United States Patent Application Publication US 2021/0180091 A1 - sequence listing, part 4

SEQ ID NO: 67956 - DNA, 24 bp, Artificial Sequence
  Synthetic oligonucleotide; TGAGAAA chr11 5349371 5349394 5349374 -
aataccagatagggaaaataaagc

SEQ ID NO: 67957 - DNA, 24 bp, Artificial Sequence
  Synthetic oligonucleotide; GAAGAAT chr11 5349281 5349304 5349284 -
cattatatacacctcattttttgg

SEQ ID NO: 67958 - DNA, 24 bp, Artificial Sequence
  Synthetic oligonucleotide; ATAGAAT chr11 5349100 5349123 5349103 -
tcaccctcttccagggtctctgtc

SEQ ID NO: 67959 - DNA, 24 bp, Artificial Sequence
  Synthetic oligonucleotide; TGAGAAA chr11 5349074 5349097 5349077 -
agaatagacttgagtttttattaa

SEQ ID NO: 67960 - DNA, 24 bp, Artificial Sequence
  Synthetic oligonucleotide; GAAGAAA chr11 5348680 5348703 5348683 -
tctaatcagctgccagggcggcta

SEQ ID NO: 67961 - DNA, 24 bp, Artificial Sequence
  Synthetic oligonucleotide; CTAGAAA chr11 5348489 5348512 5348492 -
tatggtcagatagtgacttttttt

SEQ ID NO: 67962 - DNA, 24 bp, Artificial Sequence
  Synthetic oligonucleotide; CAAGAAT chr11 5348444 5348467 5348447 -
gatgattacagaggtatacctcct

SEQ ID NO: 67963 - DNA, 24 bp, Artificial Sequence
  Synthetic oligonucleotide; TTAGAAT chr11 5348353 5348376 5348356 -
ttgggggcagggggactctcaggg

SEQ ID NO: 67964 - DNA, 24 bp, Artificial Sequence
  Synthetic oligonucleotide; AAAGAAT chr11 5348330 5348353 5348333 -
gttagaatggaagccagagagatt

SEQ ID NO: 67965 - DNA, 24 bp, Artificial Sequence
  Synthetic oligonucleotide; AGAGAAA chr11 5348312 5348335 5348315 -
gagattaaagaatcagtcaggtgg

SEQ ID NO: 67966 - DNA, 24 bp, Artificial Sequence
  Synthetic oligonucleotide; GTAGAAT chr11 5348251 5348274 5348254 -
caacacccatgctctggtttgttc

SEQ ID NO: 67967 - DNA, 24 bp, Artificial Sequence
  Synthetic oligonucleotide; CCAGAAT chr11 5348227 5348250 5348230 -
gtagaattgtttgccttatgtgtt

SEQ ID NO: 67968 - DNA, 24 bp, Artificial Sequence
  Synthetic oligonucleotide; AAAGAAA chr11 5348182 5348205 5348185 -
tttatatttgaagaggtaactctc

SEQ ID NO: 67969 - DNA, 24 bp, Artificial Sequence
  Synthetic oligonucleotide; TAAGAAA chr11 5348085 5348108 5348088 -
acaacactattacttttctcttgc

SEQ ID NO: 67970 - DNA, 24 bp, Artificial Sequence
  Synthetic oligonucleotide; TCAGAAT chr11 5347907 5347930 5347910 -
atgaaagatttgggcatcatcttt

SEQ ID NO: 67971 - DNA, 24 bp, Artificial Sequence
  Synthetic oligonucleotide; AGAGAAA chr11 5347463 5347486 5347466 -
tatgcctgctgcatcccctggaaa

SEQ ID NO: 67972 - DNA, 24 bp, Artificial Sequence
  Synthetic oligonucleotide; GCAGAAT chr11 5347411 5347434 5347414 -
agaagggaatagttagtgataact

SEQ ID NO: 67973 - DNA, 24 bp, Artificial Sequence
  Synthetic oligonucleotide; GTAGAAA chr11 5347291 5347314 5347294 -
gatctaaaccaagcaggaaatata

SEQ ID NO: 67974 - DNA, 24 bp, Artificial Sequence
  Synthetic oligonucleotide; AAAGAAA chr11 5347081 5347104 5347084 -
attcagccagtaacttatttgaaa

SEQ ID NO: 67975 - DNA, 24 bp, Artificial Sequence
  Synthetic oligonucleotide; AGAGAAA chr11 5346758 5346781 5346761 -
aggagactcctctataagctctcc

SEQ ID NO: 67976 - DNA, 24 bp, Artificial Sequence
  Synthetic oligonucleotide; AGAGAAA chr11 5346514 5346537 5346517 -
tacattttactttttaaacaaagc

SEQ ID NO: 67977 - DNA, 24 bp, Artificial Sequence
  Synthetic oligonucleotide; ATAGAAT chr11 5346456 5346479 5346459 -
atctgattttctaggtgttccatt

SEQ ID NO: 67978 - DNA, 24 bp, Artificial Sequence
  Synthetic oligonucleotide; TCAGAAA chr11 5346358 5346381 5346361 -
tctcttctctcattgtctttcttc

SEQ ID NO: 67979 - DNA, 24 bp, Artificial Sequence
  Synthetic oligonucleotide; CAAGAAT chr11 5346325 5346348 5346328 -
aagagccacgactagctgaggaca

SEQ ID NO: 67980 - DNA, 24 bp, Artificial Sequence
  Synthetic oligonucleotide; AGAGAAA chr11 5346030 5346053 5346033 -
cgtcagagaagtaagagtgttgac

SEQ ID NO: 67981 - DNA, 24 bp, Artificial Sequence
  Synthetic oligonucleotide; GAAGAAT chr11 5345962 5345985 5345965 -
ggattatctttgcgtctagtaact

SEQ ID NO: 67982 - DNA, 24 bp, Artificial Sequence
  Synthetic oligonucleotide; ACAGAAT chr11 5345893 5345916 5345896 -
tggtttatgtctctcagtcctagg

SEQ ID NO: 67983 - DNA, 24 bp, Artificial Sequence
  Synthetic oligonucleotide; CAAGAAA chr11 5345633 5345656 5345636 -
tcaagaagttgttctggcatgtga

SEQ ID NO: 67984 - DNA, 24 bp, Artificial Sequence
  Synthetic oligonucleotide; ACAGAAA chr11 5345493 5345516 5345496 -
ttcaccattctttcatttgttcaa

SEQ ID NO: 67985 - DNA, 24 bp, Artificial Sequence
  Synthetic oligonucleotide; TCAGAAT chr11 5345223 5345246 5345226 -
aagtgagtaatttaaaaatacaaa

SEQ ID NO: 67986 - DNA, 24 bp, Artificial Sequence
  Synthetic oligonucleotide; GAAGAAA chr11 5345149 5345172 5345152 -
atgtctttactacatttatagtaa

SEQ ID NO: 67987 - DNA, 24 bp, Artificial Sequence
  Synthetic oligonucleotide; TAAGAAA chr11 5344685 5344708 5344688 -
cgtgttcacaaatattaggtgaac

SEQ ID NO: 67988 - DNA, 24 bp, Artificial Sequence
  Synthetic oligonucleotide; ATAGAAA chr11 5344361 5344384 5344364 -
ctagggaattacttcagtaggcct

SEQ ID NO: 67989 - DNA, 24 bp, Artificial Sequence
  Synthetic oligonucleotide; AAAGAAA chr11 5344344 5344367 5344347 -
taggcctatagaaaaataatttaa

SEQ ID NO: 67990 - DNA, 24 bp, Artificial Sequence
  Synthetic oligonucleotide; TAAGAAA chr11 5344320 5344343 5344323 -
aaagaaaaagacactacttgtaaa

SEQ ID NO: 67991 - DNA, 24 bp, Artificial Sequence
  Synthetic oligonucleotide; CCAGAAA chr11 5343921 5343944 5343924 -
gcaattacaggtttaggtggtaga

SEQ ID NO: 67992 - DNA, 24 bp, Artificial Sequence
  Synthetic oligonucleotide; ATAGAAT chr11 5343873 5343896 5343876 -
tctggaaatccccttgaatgcccc

SEQ ID NO: 67993 - DNA, 24 bp, Artificial Sequence
  Synthetic oligonucleotide; AGAGAAT chr11 5343794 5343817 5343797 -
tagtttacataattttttttctga

SEQ ID NO: 67994 - DNA, 24 bp, Artificial Sequence
  Synthetic oligonucleotide; CAAGAAT chr11 5343758 5343781 5343761 -
aatgcatataaacagttgaaactc

SEQ ID NO: 67995 - DNA, 24 bp, Artificial Sequence
  Synthetic oligonucleotide; TAAGAAT chr11 5343711 5343734 5343714 -
gagatagatcctggaatgtgcagt

SEQ ID NO: 67996 - DNA, 24 bp, Artificial Sequence
  Synthetic oligonucleotide; TGAGAAT chr11 5343684 5343707 5343687 -
gaatacaaatagtatgagtaaccc

SEQ ID NO: 67997 - DNA, 24 bp, Artificial Sequence
  Synthetic oligonucleotide; TGAGAAA chr11 5343671 5343694 5343674 -
atgagtaaccctgagaatgtattt

SEQ ID NO: 67998 - DNA, 24 bp, Artificial Sequence
  Synthetic oligonucleotide; TGAGAAT chr11 5343620 5343643 5343623 -
attattatctttaggaaaaaattc

SEQ ID NO: 67999 - DNA, 24 bp, Artificial Sequence
  Synthetic oligonucleotide; ACAGAAA chr11 5343563 5343586 5343566 -
gtagaactgtgcactgtggtaata

SEQ ID NO: 68000 - DNA, 24 bp, Artificial Sequence
  Synthetic oligonucleotide; ACAGAAA chr11 5343557 5343580 5343560 -
ctgtgcactgtggtaataacagaa

SEQ ID NO: 68001 - DNA, 24 bp, Artificial Sequence
  Synthetic oligonucleotide; TCAGAAT chr11 5342635 5342658 5342638 -
atatagtgtcaagaccaagcagat

SEQ ID NO: 68002 - DNA, 24 bp, Artificial Sequence
  Synthetic oligonucleotide; ATAGAAT chr11 5342603 5342626 5342606 -
ccattcttcacctttttactaccc

SEQ ID NO: 68003 - DNA, 24 bp, Artificial Sequence
  Synthetic oligonucleotide; ACAGAAT chr11 5342562 5342585 5342565 -
tctccaatcatcacagtcactctc

SEQ ID NO: 68004 - DNA, 24 bp, Artificial Sequence
  Synthetic oligonucleotide; ACAGAAT chr11 5342258 5342281 5342261 -
atggtataaagttagcagatagga

SEQ ID NO: 68005 - DNA, 24 bp, Artificial Sequence
  Synthetic oligonucleotide; AAAGAAT chr11 5342088 5342111 5342091 -
gaagtccaggaattttcctgcaaa

SEQ ID NO: 68006 - DNA, 24 bp, Artificial Sequence
  Synthetic oligonucleotide; GAAGAAT chr11 5341690 5341713 5341693 -
aaaaataggtttctgcattttttt

SEQ ID NO: 68007 - DNA, 24 bp, Artificial Sequence
  Synthetic oligonucleotide; AAAGAAT chr11 5341631 5341654 5341634 -
ccatgtaataagtgtaaatttccc

SEQ ID NO: 68008 - DNA, 24 bp, Artificial Sequence
  Synthetic oligonucleotide; ACAGAAT chr11 5341422 5341445 5341425 -
ttggtgttttaccccgatcatttt

SEQ ID NO: 68009 - DNA, 24 bp, Artificial Sequence
  Synthetic oligonucleotide; GAAGAAA chr11 5341329 5341352 5341332 -
tcaactcagcaggaaatgtcttat

SEQ ID NO: 68010 - DNA, 24 bp, Artificial Sequence
  Synthetic oligonucleotide; TAAGAAA chr11 5341115 5341138 5341118 -
gtattgctcatagagagtccaact

SEQ ID NO: 68011 - DNA, 24 bp, Artificial Sequence
  Synthetic oligonucleotide; AAAGAAT chr11 5340512 5340535 5340515 -
accgcagtagaagaacttttttaa

SEQ ID NO: 68012 - DNA, 24 bp, Artificial Sequence
  Synthetic oligonucleotide; GTAGAAT chr11 5340460 5340483 5340463 -
aaaaaaaagagtaatgcttttgtt

SEQ ID NO: 68013 - DNA, 24 bp, Artificial Sequence
  Synthetic oligonucleotide; TTAGAAT chr11 5340437 5340460 5340440 -
tgtagaattactaaaatgcaatgc

SEQ ID NO: 68014 - DNA, 24 bp, Artificial Sequence
  Synthetic oligonucleotide; AAAGAAA chr11 5340359 5340382 5340362 -
aaatatttagagtaaattatagat

SEQ ID NO: 68015 - DNA, 24 bp, Artificial Sequence
  Synthetic oligonucleotide; AAAGAAT chr11 5340339 5340362 5340342 -
agataaagaaatgataataaataa

SEQ ID NO: 68016 - DNA, 24 bp, Artificial Sequence
  Synthetic oligonucleotide; ACAGAAA chr11 5339687 5339710 5339690 -
aagccttagcaaattaatacagga

SEQ ID NO: 68017 - DNA, 24 bp, Artificial Sequence
  Synthetic oligonucleotide; GTAGAAT chr11 5339348 5339371 5339351 -
catgaatttgtattcataagaaga

SEQ ID NO: 68018 - DNA, 24 bp, Artificial Sequence
  Synthetic oligonucleotide; GAAGAAT chr11 5339249 5339272 5339252 -
gcttttcatcattcaagactgaaa

SEQ ID NO: 68019 - DNA, 24 bp, Artificial Sequence
  Synthetic oligonucleotide; AAAGAAT chr11 5339147 5339170 5339150 -
tagttatgggaaatctaaggtgta

SEQ ID NO: 68020 - DNA, 24 bp, Artificial Sequence
  Synthetic oligonucleotide; TAAGAAT chr11 5339048 5339071 5339051 -
tgggcttgaagggataacatacca

SEQ ID NO: 68021 - DNA, 24 bp, Artificial Sequence
  Synthetic oligonucleotide; TTAGAAA chr11 5338982 5339005 5338985 -
gcatttctgtagactaagccaatc

SEQ ID NO: 68022 - DNA, 24 bp, Artificial Sequence
  Synthetic oligonucleotide; GAAGAAT chr11 5338959 5338982 5338962 -
cttagaaatgattaagaagacgtg

SEQ ID NO: 68023 - DNA, 24 bp, Artificial Sequence
  Synthetic oligonucleotide; TTAGAAA chr11 5338718 5338741 5338721 -
tattaaattgggcagcaaggatga

SEQ ID NO: 68024 - DNA, 24 bp, Artificial Sequence
  Synthetic oligonucleotide; AAAGAAT chr11 5338678 5338701 5338681 -
acccagaggtctccatgtccaatt

SEQ ID NO: 68025 - DNA, 24 bp, Artificial Sequence
  Synthetic oligonucleotide; CCAGAAA chr11 5338471 5338494 5338474 -
tggccctatgttagtcatggttct

SEQ ID NO: 68026 - DNA, 24 bp, Artificial Sequence
  Synthetic oligonucleotide; ATAGAAT chr11 5338463 5338486 5338466 -
tgttagtcatggttctccagaaaa

SEQ ID NO: 68027 - DNA, 24 bp, Artificial Sequence
  Synthetic oligonucleotide; ACAGAAT chr11 5338359 5338382 5338362 -
caaacagacacactgactaatgga

SEQ ID NO: 68028 - DNA, 24 bp, Artificial Sequence
  Synthetic oligonucleotide; GCAGAAA chr11 5338227 5338250 5338230 -
gctgggagaactggctagccatat

SEQ ID NO: 68029 - DNA, 24 bp, Artificial Sequence
  Synthetic oligonucleotide; GAAGAAA chr11 5338126 5338149 5338129 -
aaacccaaaactataaaaacttta

SEQ ID NO: 68030 - DNA, 24 bp, Artificial Sequence
  Synthetic oligonucleotide; GGAGAAT chr11 5337815 5337838 5337818 -
tcagctactcaggaggctgaggca

SEQ ID NO: 68031 - DNA, 24 bp, Artificial Sequence
  Synthetic oligonucleotide; AAAGAAA chr11 5337717 5337740 5337720 -
aagagtgagacttcatctcaaaat

SEQ ID NO: 68032 - DNA, 24 bp, Artificial Sequence
  Synthetic oligonucleotide; ACAGAAT chr11 5337645 5337668 5337648 -
atcatcagagcgaacaggcaacct

SEQ ID NO: 68033 - DNA, 24 bp, Artificial Sequence
  Synthetic oligonucleotide; GGAGAAA chr11 5337637 5337660 5337640 -
agcgaacaggcaacctacagaatg

SEQ ID NO: 68034 - DNA, 24 bp, Artificial Sequence
  Synthetic oligonucleotide; CCAGAAT chr11 5337593 5337616 5337596 -
acccatctgacaaaggtctaatat

SEQ ID NO: 68035 - DNA, 24 bp, Artificial Sequence
  Synthetic oligonucleotide; AAAGAAA chr11 5337560 5337583 5337563 -
atgaggaacttagacatatttaca

SEQ ID NO: 68036 - DNA, 24 bp, Artificial Sequence
  Synthetic oligonucleotide; TAAGAAA chr11 5337479 5337502 5337482 -
ctcaaaagaagacatttatgtggc

SEQ ID NO: 68037 - DNA, 24 bp, Artificial Sequence
  Synthetic oligonucleotide; AGAGAAA chr11 5337439 5337462 5337442 -
aaagtctcaatgtcactgatcatt

SEQ ID NO: 68038 - DNA, 24 bp, Artificial Sequence
  Synthetic oligonucleotide; TCAGAAT chr11 5337393 5337416 5337396 -
caatgaaataccatctgacaccag

SEQ ID NO: 68039 - DNA, 24 bp, Artificial Sequence
  Synthetic oligonucleotide; CAAGAAA chr11 5337371 5337394 5337374 -
agtcagaatggtggtttttaaagt

SEQ ID NO: 68040 - DNA, 24 bp, Artificial Sequence
  Synthetic oligonucleotide; AGAGAAA chr11 5337342 5337365 5337345 -
aacaacagatgctagcaaggttgc

SEQ ID NO: 68041 - DNA, 24 bp, Artificial Sequence
  Synthetic oligonucleotide; CCAGAAA chr11 5337249 5337272 5337252 -
tggcaattcctcaaagatttagaa

SEQ ID NO: 68042 - DNA, 24 bp, Artificial Sequence
  Synthetic oligonucleotide; ATAGAAT chr11 5337124 5337147 5337127 -
agcactattcacaatagcaaagac

SEQ ID NO: 68043 - DNA, 24 bp, Artificial Sequence
  Synthetic oligonucleotide; ACAGAAA chr11 5336964 5336987 5336967 -
tatcttcagtaaactaatgcagga

SEQ ID NO: 68044 - DNA, 24 bp, Artificial Sequence
  Synthetic oligonucleotide; TGAGAAT chr11 5336914 5336937 5336917 -
cacttagaagtgggagctgaacaa

SEQ ID NO: 68045 - DNA, 24 bp, Artificial Sequence
  Synthetic oligonucleotide; TTAGAAA chr11 5336831 5336854 5336834 -
catggggtgtggtgaaggggagca

SEQ ID NO: 68046 - DNA, 24 bp, Artificial Sequence
  Synthetic oligonucleotide; GCAGAAA chr11 5336381 5336404 5336384 -
ttgatgtttcagttcaatctaaag

SEQ ID NO: 68047 - DNA, 24 bp, Artificial Sequence
  Synthetic oligonucleotide; CTAGAAT chr11 5336179 5336202 5336182 -
ctaaaaacaccctcacaaaaacat

SEQ ID NO: 68048 - DNA, 24 bp, Artificial Sequence
  Synthetic oligonucleotide; ATAGAAT chr11 5336037 5336060 5336040 -
tggaatccagaaggctgacagata

SEQ ID NO: 68049 - DNA, 24 bp, Artificial Sequence
  Synthetic oligonucleotide; ACAGAAA chr11 5336022 5336045 5336025 -
tgacagataatagaatcaaactac

SEQ ID NO: 68050 - DNA, 24 bp, Artificial Sequence
  Synthetic oligonucleotide; CCAGAAA chr11 5335810 5335833 5335813 -
accaagagccaaggaataggaaga

SEQ ID NO: 68051 - DNA, 24 bp, Artificial Sequence
  Synthetic oligonucleotide; TTAGAAA chr11 5335708 5335731 5335711 -
ctaataaatattgtgttatgtgat

SEQ ID NO: 68052 - DNA, 24 bp, Artificial Sequence
  Synthetic oligonucleotide; AAAGAAT chr11 5335554 5335577 5335557 -
caggcaatacagcaggaaatatga

SEQ ID NO: 68053 - DNA, 24 bp, Artificial Sequence
  Synthetic oligonucleotide; TTAGAAA chr11 5335537 5335560 5335540 -
aatatgaaaagaatgaacaaggtc

SEQ ID NO: 68054 - DNA, 24 bp, Artificial Sequence
  Synthetic oligonucleotide; GCAGAAT chr11 5334996 5335019 5334999 -
gcttacatttaggaagacctatga

SEQ ID NO: 68055 - DNA, 24 bp, Artificial Sequence
  Synthetic oligonucleotide; ATAGAAA chr11 5334842 5334865 5334845 -
ttaggatttaagactgatgagaca

SEQ ID NO: 68056 - DNA, 24 bp, Artificial Sequence
  Synthetic oligonucleotide; AAAGAAT chr11 5334758 5334781 5334761 -
aattgtcagacaaagccagggatt

SEQ ID NO: 68057 - DNA, 24 bp, Artificial Sequence
  Synthetic oligonucleotide; ACAGAAA chr11 5334633 5334656 5334636 -
ttcttgggcaagacttaccaagag

SEQ ID NO: 68058 - DNA, 24 bp, Artificial Sequence
  Synthetic oligonucleotide; CAAGAAA chr11 5334550 5334573 5334553 -
ataacaaacaatcttatttgaaac

SEQ ID NO: 68059 - DNA, 24 bp, Artificial Sequence
  Synthetic oligonucleotide; AAAGAAA chr11 5334355 5334378 5334358 -
gctacaattctgttttctttttgc

SEQ ID NO: 68060 - DNA, 24 bp, Artificial Sequence
  Synthetic oligonucleotide; GGAGAAT chr11 5334095 5334118 5334098 -
ccaggtcaggctctagtgactatg

SEQ ID NO: 68061 - DNA, 24 bp, Artificial Sequence
  Synthetic oligonucleotide; AGAGAAA chr11 5334006 5334029 5334009 -
catagttgttgcaagagggtaaat

SEQ ID NO: 68062 - DNA, 24 bp, Artificial Sequence
  Synthetic oligonucleotide; ATAGAAA chr11 5333800 5333823 5333803 -
gctattaagaacacttttcctaca

SEQ ID NO: 68063 - DNA, 24 bp, Artificial Sequence
  Synthetic oligonucleotide; AAAGAAT chr11 5333295 5333318 5333298 -
gccactaggtctgagagactagta

SEQ ID NO: 68064 - DNA, 24 bp, Artificial Sequence
  Synthetic oligonucleotide; ATAGAAA chr11 5333189 5333212 5333192 -
agagagggcaaaataagagacaat

SEQ ID NO: 68065 - DNA, 24 bp, Artificial Sequence
  Synthetic oligonucleotide; GCAGAAA chr11 5333082 5333105 5333085 -
accctatgtacctgagcagatggt

SEQ ID NO: 68066 - DNA, 24 bp, Artificial Sequence
  Synthetic oligonucleotide; GAAGAAT chr11 5332664 5332687 5332667 -
gggctcttatccaaaggctctggg

SEQ ID NO: 68067 - DNA, 24 bp, Artificial Sequence
  Synthetic oligonucleotide; CTAGAAA chr11 5331929 5331952 5331932 -
tgatattgtatcatattcacagtc

SEQ ID NO: 68068 - DNA, 24 bp, Artificial Sequence
  Synthetic oligonucleotide; GTAGAAA chr11 5331902 5331925 5331905 -
gaaattaggataggaaatcttgtg

SEQ ID NO: 68069 - DNA, 24 bp, Artificial Sequence
  Synthetic oligonucleotide; GTAGAAA chr11 5331744 5331767 5331747 -
tgaagcacaatgtctgaaagggtg

SEQ ID NO: 68070 - DNA, 24 bp, Artificial Sequence
  Synthetic oligonucleotide; TCAGAAT chr11 5331656 5331679 5331659 -
acagtagcatctggttagcttgag

SEQ ID NO: 68071 - DNA, 24 bp, Artificial Sequence
  Synthetic oligonucleotide; GAAGAAT chr11 5331622 5331645 5331625 -
ctgtaagtgtaaacactcgatttt

SEQ ID NO: 68072 - DNA, 24 bp, Artificial Sequence
  Synthetic oligonucleotide; TAAGAAT chr11 5330555 5330578 5330558 -
cactgtgcttcatcaaaaaaatgt

SEQ ID NO: 68073 - DNA, 24 bp, Artificial Sequence
  Synthetic oligonucleotide; TTAGAAT chr11 5330468 5330491 5330471 -
caaagagataccatctcacaccag

SEQ ID NO: 68074 - DNA, 24 bp, Artificial Sequence
  Synthetic oligonucleotide; GGAGAAA chr11 5330415 5330438 5330418 -
aacaacaggtgctggagaggatgt

SEQ ID NO: 68075 - DNA, 24 bp, Artificial Sequence
  Synthetic oligonucleotide; CTAGAAA chr11 5330322 5330345 5330325 -
tggcgattcctcagggatctagaa

SEQ ID NO: 68076 - DNA, 24 bp, Artificial Sequence
  Synthetic oligonucleotide; TAAGAAA chr11 5330158 5330181 5330161 -
atgtccaacaatgatagactgaat

SEQ ID NO: 68077 - DNA, 24 bp, Artificial Sequence
  Synthetic oligonucleotide; CTAGAAT chr11 5329678 5329701 5329681 -
acatgttttgttattctggctctg

SEQ ID NO: 68078 - DNA, 24 bp, Artificial Sequence
  Synthetic oligonucleotide; TGAGAAA chr11 5329527 5329550 5329530 -
tattagcttaaataatatttcttt

SEQ ID NO: 68079 - DNA, 24 bp, Artificial Sequence
  Synthetic oligonucleotide; GGAGAAT chr11 5329108 5329131 5329111 -
ccagcttctcaggaggctgtggca

SEQ ID NO: 68080 - DNA, 24 bp, Artificial Sequence
  Synthetic oligonucleotide; CTAGAAA chr11 5328606 5328629 5328609 -
gagatcaaggggtctcctgagatg

SEQ ID NO: 68081 - DNA, 24 bp, Artificial Sequence
  Synthetic oligonucleotide; AGAGAAT chr11 5328148 5328171 5328151 -
gtagatgtttatagcttttttttc

SEQ ID NO: 68082 - DNA, 24 bp, Artificial Sequence
  Synthetic oligonucleotide; GCAGAAA chr11 5328000 5328023 5328003 -
tacattcatttttgaaaataagaa

SEQ ID NO: 68083 - DNA, 24 bp, Artificial Sequence
  Synthetic oligonucleotide; CCAGAAA chr11 5327857 5327880 5327860 -
gaaatcaactcagtttttgtttat

SEQ ID NO: 68084 - DNA, 24 bp, Artificial Sequence
  Synthetic oligonucleotide; TTAGAAA chr11 5327740 5327763 5327743 -
aaattctgaatcgagttgaaaggc

SEQ ID NO: 68085 - DNA, 24 bp, Artificial Sequence
  Synthetic oligonucleotide; TAAGAAA chr11 5327713 5327736 5327716 -
gaaaagggcagccaaattaagatc

SEQ ID NO: 68086 - DNA, 24 bp, Artificial Sequence
  Synthetic oligonucleotide; ATAGAAA chr11 5327614 5327637 5327617 -
caggaggaatttaacttgtggaca

SEQ ID NO: 68087 - DNA, 24 bp, Artificial Sequence
  Synthetic oligonucleotide; ATAGAAA chr11 5327455 5327478 5327458 -
cactctgctaagatcctgaaattt

SEQ ID NO: 68088 - DNA, 24 bp, Artificial Sequence
  Synthetic oligonucleotide; AAAGAAA chr11 5327451 5327474 5327454 -
ctgctaagatcctgaaatttatag

SEQ ID NO: 68089 - DNA, 24 bp, Artificial Sequence
  Synthetic oligonucleotide; CTAGAAA chr11 5327308 5327331 5327311 -
ggcatgagtagtcagtgggactca

SEQ ID NO: 68090 - DNA, 24 bp, Artificial Sequence
  Synthetic oligonucleotide; CTAGAAA chr11 5326935 5326958 5326938 -
tacaagtataggaatcttattcat

SEQ ID NO: 68091 - DNA, 24 bp, Artificial Sequence
  Synthetic oligonucleotide; CTAGAAT chr11 5326893 5326916 5326896 -
gtgaaattcaggtcaatagaacat

SEQ ID NO: 68092 - DNA, 24 bp, Artificial Sequence
  Synthetic oligonucleotide; CTAGAAT chr11 5326882 5326905 5326885 -
gtcaatagaacatctagaatgaag

SEQ ID NO: 68093 - DNA, 24 bp, Artificial Sequence
  Synthetic oligonucleotide; GGAGAAT chr11 5326782 5326805 5326785 -
gcaatattctgcataaaattgaag

SEQ ID NO: 68094 - DNA, 24 bp, Artificial Sequence
  Synthetic oligonucleotide; CCAGAAA chr11 5326436 5326459 5326439 -
cagccatagctgctccacctttat

SEQ ID NO: 68095 - DNA, 24 bp, Artificial Sequence
  Synthetic oligonucleotide; CTAGAAT chr11 5326259 5326282 5326262 -
gtttgatgacagtatctagctctc

SEQ ID NO: 68096 - DNA, 24 bp, Artificial Sequence
  Synthetic oligonucleotide; TCAGAAT chr11 5325789 5325812 5325792 -
gtgactttcttctatgtttaccct

SEQ ID NO: 68097 - DNA, 24 bp, Artificial Sequence
  Synthetic oligonucleotide; GAAGAAA chr11 5325442 5325465 5325445 -
tttttgatactgaggccattttat

SEQ ID NO: 68098 - DNA, 24 bp, Artificial Sequence
  Synthetic oligonucleotide; CAAGAAA chr11 5325319 5325342 5325322 -
atacccctcttggatcgtggcaac

SEQ ID NO: 68099 - DNA, 24 bp, Artificial Sequence
  Synthetic oligonucleotide; ACAGAAA chr11 5325312 5325335 5325315 -
tcttggatcgtggcaaccaagaaa

SEQ ID NO: 68100 - DNA, 24 bp, Artificial Sequence
  Synthetic oligonucleotide; ACAGAAA chr11 5325188 5325211 5325191 -
gaaaagcagagagaggtaagaagg

SEQ ID NO: 68101 - DNA, 24 bp, Artificial Sequence
  Synthetic oligonucleotide; GCAGAAA chr11 5325133 5325156 5325136 -
aaataatgttggaaagggcaagtg

SEQ ID NO: 68102 - DNA, 24 bp, Artificial Sequence
  Synthetic oligonucleotide; AAAGAAA chr11 5325129 5325152 5325132 -
aatgttggaaagggcaagtggcag

SEQ ID NO: 68103 - DNA, 24 bp, Artificial Sequence
  Synthetic oligonucleotide; AAAGAAA chr11 5325108 5325131 5325111 -
cagaaagaaagccagtaaatggtg

SEQ ID NO: 68104 - DNA, 24 bp, Artificial Sequence
  Synthetic oligonucleotide; GGAGAAA chr11 5325071 5325094 5325074 -
aaagataattgtatgaagatattt

SEQ ID NO: 68105 - DNA, 24 bp, Artificial Sequence
  Synthetic oligonucleotide; TGAGAAA chr11 5325063 5325086 5325066 -
ttgtatgaagatatttggagaaaa

SEQ ID NO: 68106 - DNA, 24 bp, Artificial Sequence
  Synthetic oligonucleotide; TCAGAAT chr11 5324925 5324948 5324928 -
ggacctgaaaaaagcgaatttgat

SEQ ID NO: 68107 - DNA, 24 bp, Artificial Sequence
  Synthetic oligonucleotide; GCAGAAT chr11 5324908 5324931 5324911 -
atttgattcagaatgttggaaggg

SEQ ID NO: 68108 - DNA, 24 bp, Artificial Sequence
  Synthetic oligonucleotide; TGAGAAA chr11 5324730 5324753 5324733 -
ctgacattcaatttccaaaaaaaa

SEQ ID NO: 68109 - DNA, 24 bp, Artificial Sequence
  Synthetic oligonucleotide; TGAGAAA chr11 5324492 5324515 5324495 -
aaattaatgaaaaatttttgaatt

SEQ ID NO: 68110 - DNA, 24 bp, Artificial Sequence
  Synthetic oligonucleotide; CAAGAAA chr11 5324330 5324353 5324333 -
tggaggctcctggtttcaaggttt

SEQ ID NO: 68111 - DNA, 24 bp, Artificial Sequence
  Synthetic oligonucleotide; CAAGAAA chr11 5323761 5323784 5323764 -
atcacacgtgctttctgcctccac

SEQ ID NO: 68112 - DNA, 24 bp, Artificial Sequence
  Synthetic oligonucleotide; GAAGAAT chr11 5323510 5323533 5323513 -
tttgacattcatttacagatttgg

SEQ ID NO: 68113 - DNA, 24 bp, Artificial Sequence
  Synthetic oligonucleotide; GGAGAAT chr11 5323349 5323372 5323352 -
ggtttagtagttaaactcggatct

SEQ ID NO: 68114 - DNA, 24 bp, Artificial Sequence
  Synthetic oligonucleotide; CCAGAAT chr11 5323319 5323342 5323322 -
tcagacacagacataaaaatgaag

SEQ ID NO: 68115 - DNA, 24 bp, Artificial Sequence
  Synthetic oligonucleotide; CTAGAAA chr11 5322963 5322986 5322966 -
aaaaaaaaagttgatcatcattct

SEQ ID NO: 68116 - DNA, 24 bp, Artificial Sequence
  Synthetic oligonucleotide; TAAGAAA chr11 5322909 5322932 5322912 -
ttattctcatggcaaatatagtga

SEQ ID NO: 68117 - DNA, 24 bp, Artificial Sequence
  Synthetic oligonucleotide; ATAGAAA chr11 5322506 5322529 5322509 -
gaagggtcaaggctctattcaaaa

SEQ ID NO: 68118 - DNA, 24 bp, Artificial Sequence
  Synthetic oligonucleotide; CTAGAAT chr11 5322488 5322511 5322491 -
tcaaaaatagaaaatatagccatt

SEQ ID NO: 68119 - DNA, 24 bp, Artificial Sequence
  Synthetic oligonucleotide; TTAGAAA chr11 5322417 5322440 5322420 -
tttatatatgttcagagggaaaaa

SEQ ID NO: 68120 - DNA, 24 bp, Artificial Sequence
  Synthetic oligonucleotide; AGAGAAA chr11 5322334 5322357 5322337 -
atattaggaagaccaacaatgttg

SEQ ID NO: 68121 - DNA, 24 bp, Artificial Sequence
  Synthetic oligonucleotide; TGAGAAA chr11 5321770 5321793 5321773 -
tagtttaattacctgccacatgtg

SEQ ID NO: 68122 - DNA, 24 bp, Artificial Sequence
  Synthetic oligonucleotide; AAAGAAA chr11 5321515 5321538 5321518 -
ttcttggtgccttcatggttgttt

SEQ ID NO: 68123 - DNA, 24 bp, Artificial Sequence
  Synthetic oligonucleotide; TTAGAAA chr11 5321148 5321171 5321151 -
tttacctatatgttaatgaaactg

SEQ ID NO: 68124 - DNA, 24 bp, Artificial Sequence
  Synthetic oligonucleotide; AAAGAAA chr11 5321143 5321166 5321146 -
ctatatgttaatgaaactgttaga

SEQ ID NO: 68125 - DNA, 24 bp, Artificial Sequence
  Synthetic oligonucleotide; TCAGAAA chr11 5320928 5320951 5320931 -
gaactactctccattcagcaaaac

SEQ ID NO: 68126 - DNA, 24 bp, Artificial Sequence
  Synthetic oligonucleotide; ATAGAAT chr11 5320850 5320873 5320853 -
aatcactcagttctattctaagtc

SEQ ID NO: 68127 - DNA, 24 bp, Artificial Sequence
  Synthetic oligonucleotide; CCAGAAA chr11 5320268 5320291 5320271 -
tcttctggaaaatgttccctgatc

SEQ ID NO: 68128 - DNA, 24 bp, Artificial Sequence
  Synthetic oligonucleotide; GAAGAAT chr11 5319971 5319994 5319974 -
tttatcagttctagcagccttttg

SEQ ID NO: 68129 - DNA, 24 bp, Artificial Sequence
  Synthetic oligonucleotide; TGAGAAT chr11 5319822 5319845 5319825 -
caattttatgttcactaggagtgg

SEQ ID NO: 68130 - DNA, 24 bp, Artificial Sequence
  Synthetic oligonucleotide; GGAGAAT chr11 5319786 5319809 5319789 -
tccttgtcttgttgcagttttcga

SEQ ID NO: 68131 - DNA, 24 bp, Artificial Sequence
  Synthetic oligonucleotide; AAAGAAA chr11 5319559 5319582 5319562 -
aaggagaactacaaaacactgctg

SEQ ID NO: 68132 - DNA, 24 bp, Artificial Sequence
  Synthetic oligonucleotide; TCAGAAA chr11 5319552 5319575 5319555 -
actacaaaacactgctgaaagaaa

SEQ ID NO: 68133 - DNA, 24 bp, Artificial Sequence
  Synthetic oligonucleotide; GAAGAAT chr11 5319502 5319525 5319505 -
aaagctttccaggctcatggattg

SEQ ID NO: 68134 - DNA, 24 bp, Artificial Sequence
  Synthetic oligonucleotide; TTAGAAA chr11 5319406 5319429 5319409 -
ttaccaatgtcattcttcacagta

SEQ ID NO: 68135 - DNA, 24 bp, Artificial Sequence
  Synthetic oligonucleotide; GCAGAAA chr11 5319341 5319364 5319344 -
cctgaacaggcaaagcaatcttaa

SEQ ID NO: 68136 - DNA, 24 bp, Artificial Sequence
  Synthetic oligonucleotide; GGAGAAT chr11 5319105 5319128 5319108 -
ccagctactcggaaggctgaggca

SEQ ID NO: 68137 - DNA, 24 bp, Artificial Sequence
  Synthetic oligonucleotide; AAAGAAA chr11 5319005 5319028 5319008 -
gagtgaaactctgaaaaaataaaa

SEQ ID NO: 68138 - DNA, 24 bp, Artificial Sequence
  Synthetic oligonucleotide; AAAGAAA chr11 5319001 5319024 5319004 -
gaaactctgaaaaaataaaaaaag

SEQ ID NO: 68139 - DNA, 24 bp, Artificial Sequence
  Synthetic oligonucleotide; AAAGAAA chr11 5318996 5319019 5318999 -
tctgaaaaaataaaaaaagaaaga

SEQ ID NO: 68140 - DNA, 24 bp, Artificial Sequence
  Synthetic oligonucleotide; AAAGAAA chr11 5318992 5319015 5318995 -
aaaaaataaaaaaagaaagaaaag

SEQ ID NO: 68141 - DNA, 24 bp, Artificial Sequence
  Synthetic oligonucleotide; GAAGAAA chr11 5318979 5319002 5318982 -
agaaagaaaagaaagaaagagagg

SEQ ID NO: 68142 - DNA, 24 bp, Artificial Sequence
  Synthetic oligonucleotide; AAAGAAA chr11 5318970 5318993 5318973 -
agaaagaaagagagggaagaaagg

SEQ ID NO: 68143 - DNA, 24 bp, Artificial Sequence
  Synthetic oligonucleotide; ATAGAAA chr11 5318888 5318911 5318891 -
agacacattgactaaggaaacaca

SEQ ID NO: 68144 - DNA, 24 bp, Artificial Sequence
  Synthetic oligonucleotide; GAAGAAT chr11 5318758 5318781 5318761 -
ggaatacgtggctagccatatgca

SEQ ID NO: 68145 - DNA, 24 bp, Artificial Sequence
  Synthetic oligonucleotide; AGAGAAA chr11 5318723 5318746 5318726 -
ctagacccttaccttacaccattt

SEQ ID NO: 68146 - DNA, 24 bp, Artificial Sequence
  Synthetic oligonucleotide; AAAGAAA chr11 5318618 5318641 5318621 -
agcccccaaaagcaattgcaatgc

SEQ ID NO: 68147 - DNA, 24 bp, Artificial Sequence
  Synthetic oligonucleotide; ATAGAAT chr11 5318525 5318548 5318528 -
aaccaacccaaatgtccaacaatg

SEQ ID NO: 68148 - DNA, 24 bp, Artificial Sequence
  Synthetic oligonucleotide; TAAGAAA chr11 5318514 5318537 5318517 -
atgtccaacaatgatagaatggat

SEQ ID NO: 68149 - DNA, 24 bp, Artificial Sequence
  Synthetic oligonucleotide; GAAGAAA chr11 5318107 5318130 5318110 -
aataaaaagagcttctgtgcagca

SEQ ID NO: 68150 - DNA, 24 bp, Artificial Sequence
  Synthetic oligonucleotide; GGAGAAA chr11 5318066 5318089 5318069 -
agtaaactgacaatctacaggata

SEQ ID NO: 68151 - DNA, 24 bp, Artificial Sequence
  Synthetic oligonucleotide; TCAGAAT chr11 5318022 5318045 5318025 -
gtgcatctggaaaaggtctaatat

SEQ ID NO: 68152 - DNA, 24 bp, Artificial Sequence
  Synthetic oligonucleotide; AGAGAAA chr11 5317873 5317896 5317876 -
caaaaatgatcatcatcactaatg

SEQ ID NO: 68153 - DNA, 24 bp, Artificial Sequence
  Synthetic oligonucleotide; TCAGAAT chr11 5317828 5317851 5317831 -
acaagagatactatctcataccag

SEQ ID NO: 68154 - DNA, 24 bp, Artificial Sequence
  Synthetic oligonucleotide; GGAGAAA chr11 5317778 5317801 5317781 -
aaaaacagattctcatgaggctat

SEQ ID NO: 68155 - DNA, 24 bp, Artificial Sequence
  Synthetic oligonucleotide; GCAGAAA chr11 5317722 5317745 5317725 -
gggatgtaaattagttcaaccact

SEQ ID NO: 68156 - DNA, 24 bp, Artificial Sequence
  Synthetic oligonucleotide; TTAGAAT chr11 5317576 5317599 5317579 -
cttgcatgttcactgtaatgctgt

SEQ ID NO: 68157 - DNA, 24 bp, Artificial Sequence
  Synthetic oligonucleotide; AAAGAAA chr11 5317521 5317544 5317524 -
gtgtctatcaaaggcggacgggat

SEQ ID NO: 68158 - DNA, 24 bp, Artificial Sequence
  Synthetic oligonucleotide; AAAGAAA chr11 5317170 5317193 5317173 -
tctaaagtaaatgttgaaaattta

SEQ ID NO: 68159 - DNA, 24 bp, Artificial Sequence
  Synthetic oligonucleotide; TCAGAAA chr11 5316997 5317020 5317000 -
atcagaactgattttcccaaagta

SEQ ID NO: 68160 - DNA, 24 bp, Artificial Sequence
  Synthetic oligonucleotide; GGAGAAA chr11 5316762 5316785 5316765 -
atgcagcttttctcatccatcctt

SEQ ID NO: 68161 - DNA, 24 bp, Artificial Sequence
  Synthetic oligonucleotide; CAAGAAA chr11 5316536 5316559 5316539 -
agcaggaatgggtccttattccag

SEQ ID NO: 68162 - DNA, 24 bp, Artificial Sequence
  Synthetic oligonucleotide; TTAGAAT chr11 5316225 5316248 5316228 -
tccacagagggctcatggcttttg

SEQ ID NO: 68163 - DNA, 24 bp, Artificial Sequence
  Synthetic oligonucleotide; AAAGAAA chr11 5316182 5316205 5316185 -
taacattctatttcaaaactaaac

SEQ ID NO: 68164 - DNA, 24 bp, Artificial Sequence
  Synthetic oligonucleotide; TAAGAAT chr11 5315947 5315970 5315950 -
ttttttaaaatgtgttttttagat

SEQ ID NO: 68165 - DNA, 24 bp, Artificial Sequence
  Synthetic oligonucleotide; GAAGAAA chr11 5315914 5315937 5315917 -
ttaactacttaattattcataact

SEQ ID NO: 68166 - DNA, 24 bp, Artificial Sequence
  Synthetic oligonucleotide; TAAGAAA chr11 5315856 5315879 5315859 -
gtctataaatgtattgctcttcta

SEQ ID NO: 68167 - DNA, 24 bp, Artificial Sequence
  Synthetic oligonucleotide; GCAGAAA chr11 5315785 5315808 5315788 -
aatatgaatattaggattgaggct

SEQ ID NO: 68168 - DNA, 24 bp, Artificial Sequence
  Synthetic oligonucleotide; GCAGAAT chr11 5315382 5315405 5315385 -
attatccactcccattatccactt

SEQ ID NO: 68169 - DNA, 24 bp, Artificial Sequence
  Synthetic oligonucleotide; CCAGAAA chr11 5315026 5315049 5315029 -
ttaaaacagttaaaggtattgcct

SEQ ID NO: 68170 - DNA, 24 bp, Artificial Sequence
  Synthetic oligonucleotide; ACAGAAT chr11 5314786 5314809 5314789 -
gcattgttcgcctattttctgggc

SEQ ID NO: 68171 - DNA, 24 bp, Artificial Sequence
  Synthetic oligonucleotide; TCAGAAT chr11 5314763 5314786 5314766 -
cacagaatggcttgagcccttttt

SEQ ID NO: 68172 - DNA, 24 bp, Artificial Sequence
  Synthetic oligonucleotide; ACAGAAA chr11 5314140 5314163 5314143 -
taggtgcaaaggtaattgcagttc

SEQ ID NO: 68173 - DNA, 24 bp, Artificial Sequence
  Synthetic oligonucleotide; GGAGAAA chr11 5313229 5313252 5313232 -
ccagatattagacttttgtcagat

SEQ ID NO: 68174 - DNA, 24 bp, Artificial Sequence
  Synthetic oligonucleotide; ATAGAAA chr11 5312956 5312979 5312959 -
tcttgtgttctctctaaatgctgg

SEQ ID NO: 68175 - DNA, 24 bp, Artificial Sequence
  Synthetic oligonucleotide; AAAGAAT chr11 5312335 5312358 5312338 -
aagtcttcaaataagtggggactc

SEQ ID NO: 68176 - DNA, 24 bp, Artificial Sequence
  Synthetic oligonucleotide; AAAGAAA chr11 5312327 5312350 5312330 -
aaataagtggggactcaaagaata

SEQ ID NO: 68177 - DNA, 24 bp, Artificial Sequence
  Synthetic oligonucleotide; GCAGAAA chr11 5312284 5312307 5312287 -
acaagtgctgtgattaatcataaa

SEQ ID NO: 68178 - DNA, 24 bp, Artificial Sequence
  Synthetic oligonucleotide; TGAGAAA chr11 5312204 5312227 5312207 -
gcttgaaataagggtaagattccc

SEQ ID NO: 68179 - DNA, 24 bp, Artificial Sequence
  Synthetic oligonucleotide; TTAGAAA chr11 5312167 5312190 5312170 -
cttcagctgagacctgaaaatgga

SEQ ID NO: 68180 - DNA, 24 bp, Artificial Sequence
  Synthetic oligonucleotide; CAAGAAT chr11 5312140 5312163 5312143 -
gaaactaactggtgaaaatacaga

SEQ ID NO: 68181 - DNA, 24 bp, Artificial Sequence
  Synthetic oligonucleotide; GCAGAAT chr11 5311880 5311903 5311883 -
ggaattgagggaggcagggaaagg

SEQ ID NO: 68182 - DNA, 24 bp, Artificial Sequence
  Synthetic oligonucleotide; GAAGAAA chr11 5311860 5311883 5311863 -
aagggcagaatattagagtaattt

SEQ ID NO: 68183 - DNA, 24 bp, Artificial Sequence
  Synthetic oligonucleotide; TTAGAAA chr11 5311761 5311784 5311764 -
aatataataaggtttacaggttat

SEQ ID NO: 68184 - DNA, 24 bp, Artificial Sequence
  Synthetic oligonucleotide; AAAGAAA chr11 5311746 5311769 5311749 -
acaggttatttagaaaagcagagg

SEQ ID NO: 68185 - DNA, 24 bp, Artificial Sequence
  Synthetic oligonucleotide; GAAGAAA chr11 5311692 5311715 5311695 -
ccatcaatttctgacatgttcttg

SEQ ID NO: 68186 - DNA, 24 bp, Artificial Sequence
  Synthetic oligonucleotide; AAAGAAA chr11 5311675 5311698 5311678 -
gttcttggaagaaaggcagtgcca

SEQ ID NO: 68187 - DNA, 24 bp, Artificial Sequence
  Synthetic oligonucleotide; GAAGAAT chr11 5311635 5311658 5311638 -
tgattatgtattgtctataaataa

SEQ ID NO: 68188 - DNA, 24 bp, Artificial Sequence
  Synthetic oligonucleotide; TGAGAAT chr11 5311600 5311623 5311603 -
ataatttttaaagttgtgggacac

SEQ ID NO: 68189 - DNA, 24 bp, Artificial Sequence
  Synthetic oligonucleotide; TAAGAAA chr11 5311568 5311591 5311571 -
agtcaaaataataaacatgtgatt

SEQ ID NO: 68190 - DNA, 24 bp, Artificial Sequence
  Synthetic oligonucleotide; TCAGAAA chr11 5311411 5311434 5311414 -
gtcatagtaaaggcaagacatatg

SEQ ID NO: 68191 - DNA, 24 bp, Artificial Sequence
  Synthetic oligonucleotide; TGAGAAT chr11 5311400 5311423 5311403 -
ggcaagacatatgtcagaaaatga

SEQ ID NO: 68192 - DNA, 24 bp, Artificial Sequence
  Synthetic oligonucleotide; ACAGAAA chr11 5311377 5311400 5311380 -
atgagaatttacagatgcaagaca

SEQ ID NO: 68193 - DNA, 24 bp, Artificial Sequence
  Synthetic oligonucleotide; AGAGAAT chr11 5311338 5311361 5311341 -
agcagatgacacccaaagaaggtc

SEQ ID NO: 68194 - DNA, 24 bp, Artificial Sequence
  Synthetic oligonucleotide; GGAGAAA chr11 5311305 5311328 5311308 -
gtgaaacagtggctcactatccta

SEQ ID NO: 68195 - DNA, 24 bp, Artificial Sequence
  Synthetic oligonucleotide; CAAGAAT chr11 5311101 5311124 5311104 -
ctgaattaccagatgagtaaataa

SEQ ID NO: 68196 - DNA, 24 bp, Artificial Sequence
  Synthetic oligonucleotide; AAAGAAT chr11 5310185 5310208 5310188 -
ctcactctgaatattctgcttttc

SEQ ID NO: 68197 - DNA, 24 bp, Artificial Sequence
  Synthetic oligonucleotide; GAAGAAA chr11 5310155 5310178 5310158 -
tattccttggaatattccatggaa

SEQ ID NO: 68198 - DNA, 24 bp, Artificial Sequence
  Synthetic oligonucleotide; GGAGAAA chr11 5310132 5310155 5310135 -
agaagaaaatgagacaagctttct

SEQ ID NO: 68199 - DNA, 24 bp, Artificial Sequence
  Synthetic oligonucleotide; AAAGAAA chr11 5310060 5310083 5310063 -
gcctcctgggttcagttttcagtt

SEQ ID NO: 68200 - DNA, 24 bp, Artificial Sequence
  Synthetic oligonucleotide; GGAGAAA chr11 5309931 5309954 5309934 -
cacattttacaggtacattttcac

SEQ ID NO: 68201 - DNA, 24 bp, Artificial Sequence
  Synthetic oligonucleotide; AGAGAAA chr11 5309517 5309540 5309520 -
tattgggaagacataaaaatgtgg

SEQ ID NO: 68202 - DNA, 24 bp, Artificial Sequence
  Synthetic oligonucleotide; GAAGAAT chr11 5309145 5309168 5309148 -
agactgtctttgtaagttattttg

SEQ ID NO: 68203 - DNA, 24 bp, Artificial Sequence
  Synthetic oligonucleotide; ATAGAAA chr11 5309140 5309163 5309143 -
gtctttgtaagttattttggaaga

SEQ ID NO: 68204 - DNA, 24 bp, Artificial Sequence
  Synthetic oligonucleotide; TGAGAAA chr11 5308955 5308978 5308958 -
tctgttagtttttctcatgcttag

SEQ ID NO: 68205 - DNA, 24 bp, Artificial Sequence
  Synthetic oligonucleotide; GAAGAAA chr11 5308882 5308905 5308885 -
caataacctgcaatttacgtccaa

SEQ ID NO: 68206 - DNA, 24 bp, Artificial Sequence
  Synthetic oligonucleotide; CCAGAAA chr11 5308396 5308419 5308399 -
ctgtaacttctttcaacgtaatct

SEQ ID NO: 68207 - DNA, 24 bp, Artificial Sequence
  Synthetic oligonucleotide; TGAGAAT chr11 5308170 5308193 5308173 -
tattgttggggtacagttctttat

SEQ ID NO: 68208 - DNA, 24 bp, Artificial Sequence
  Synthetic oligonucleotide; GGAGAAT chr11 5308040 5308063 5308043 -
caaagtagtcttttcattggaatg

SEQ ID NO: 68209 - DNA, 24 bp, Artificial Sequence
  Synthetic oligonucleotide; AAAGAAA chr11 5307806 5307829 5307809 -
caagacactgtctcaaaagagagg

SEQ ID NO: 68210 - DNA, 24 bp, Artificial Sequence
  Synthetic oligonucleotide; AAAGAAA chr11 5307801 5307824 5307804 -
cactgtctcaaaagagaggaaaga

SEQ ID NO: 68211 - DNA, 24 bp, Artificial Sequence
  Synthetic oligonucleotide; AGAGAAT chr11 5307794 5307817 5307797 -
tcaaaagagaggaaagaaaagaaa

SEQ ID NO: 68212 - DNA, 24 bp, Artificial Sequence
  Synthetic oligonucleotide; GGAGAAA chr11 5307767 5307790 5307770 -
gaataaaaggaaaggaaaggaaag

SEQ ID NO: 68213 - DNA, 24 bp, Artificial Sequence
  Synthetic oligonucleotide; AAAGAAA chr11 5307763 5307786 5307766 -
aaaaggaaaggaaaggaaagggag

SEQ ID NO: 68214 - DNA, 24 bp, Artificial Sequence
  Synthetic oligonucleotide; GAAGAAA chr11 5307747 5307770 5307750 -
aaagggagaaagaaaggaaggaag

SEQ ID NO: 68215 - DNA, 24 bp, Artificial Sequence
  Synthetic oligonucleotide; AGAGAAA chr11 5307733 5307756 5307736 -
aggaaggaaggaagaaaaagagag

SEQ ID NO: 68216 - DNA, 24 bp, Artificial Sequence
  Synthetic oligonucleotide; AAAGAAA chr11 5307721 5307744 5307724 -
agaaaaagagagagagaaataagg

SEQ ID NO: 68217 - DNA, 24 bp, Artificial Sequence
  Synthetic oligonucleotide; AAAGAAA chr11 5307717 5307740 5307720 -
aaagagagagagaaataaggaaag

SEQ ID NO: 68218 - DNA, 24 bp, Artificial Sequence
  Synthetic oligonucleotide; AAAGAAA chr11 5307710 5307733 5307713 -
gagagaaataaggaaagaaagaaa

SEQ ID NO: 68219 - DNA, 24 bp, Artificial Sequence
  Synthetic oligonucleotide; AAAGAAA chr11 5307535 5307558 5307538 -
agagacatcgaagtactaaacaat

SEQ ID NO: 68220 - DNA, 24 bp, Artificial Sequence
  Synthetic oligonucleotide; CAAGAAT chr11 5307424 5307447 5307427 -
gctacaaaaccaatggcttgatca

SEQ ID NO: 68221 - DNA, 24 bp, Artificial Sequence
  Synthetic oligonucleotide; CTAGAAT chr11 5307240 5307263 5307243 -
agccgtcacttcttagctacaagt

SEQ ID NO: 68222 - DNA, 24 bp, Artificial Sequence
  Synthetic oligonucleotide; GTAGAAT chr11 5307062 5307085 5307065 -
tgctgcgagtgtcacatatattat

SEQ ID NO: 68223 - DNA, 24 bp, Artificial Sequence
  Synthetic oligonucleotide; ATAGAAA chr11 5306952 5306975 5306955 -
tctgcacgatcttagactacttaa

SEQ ID NO: 68224 - DNA, 24 bp, Artificial Sequence
  Synthetic oligonucleotide; TCAGAAT chr11 5306914 5306937 5306917 -
cataatccaatgaaaaaagagatt

SEQ ID NO: 68225 - DNA, 24 bp, Artificial Sequence
  Synthetic oligonucleotide; CTAGAAA chr11 5306738 5306761 5306741 -
tttaatgcagatatctttatacat

SEQ ID NO: 68226 - DNA, 24 bp, Artificial Sequence
  Synthetic oligonucleotide; ATAGAAA chr11 5306455 5306478 5306458 -
ggtagggtagtgagttttgaatca

SEQ ID NO: 68227 - DNA, 24 bp, Artificial Sequence
  Synthetic oligonucleotide; AAAGAAT chr11 5306451 5306474 5306454 -
gggtagtgagttttgaatcaatag

SEQ ID NO: 68228 - DNA, 24 bp, Artificial Sequence
  Synthetic oligonucleotide; AGAGAAT chr11 5306368 5306391 5306371 -
aaggattttgtaaagggttgaatt

SEQ ID NO: 68229 - DNA, 24 bp, Artificial Sequence
  Synthetic oligonucleotide; AAAGAAA chr11 5306196 5306219 5306199 -
acttctcttagagactctccttcc

SEQ ID NO: 68230 - DNA, 24 bp, Artificial Sequence
  Synthetic oligonucleotide; AGAGAAT chr11 5306129 5306152 5306132 -
atctttcccaggttggggaggaaa

SEQ ID NO: 68231 - DNA, 24 bp, Artificial Sequence
  Synthetic oligonucleotide; CTAGAAT chr11 5306081 5306104 5306084 -
ccaaatatcctatgtggaaatgag

SEQ ID NO: 68232 - DNA, 24 bp, Artificial Sequence
  Synthetic oligonucleotide; TCAGAAT chr11 5306034 5306057 5306037 -
tttgtgtaacaaatatatctctca

SEQ ID NO: 68233 - DNA, 24 bp, Artificial Sequence
  Synthetic oligonucleotide; TCAGAAA chr11 5305978 5306001 5305981 -
aaacaaccaatattcaggtcatgc

SEQ ID NO: 68234 - DNA, 24 bp, Artificial Sequence
  Synthetic oligonucleotide; AGAGAAA chr11 5305965 5305988 5305968 -
tcaggtcatgctcagaaaccgcaa

SEQ ID NO: 68235 - DNA, 24 bp, Artificial Sequence
  Synthetic oligonucleotide; TAAGAAA chr11 5305945 5305968 5305948 -
gcaaagagaaaactgtggctcagg

SEQ ID NO: 68236 - DNA, 24 bp, Artificial Sequence
  Synthetic oligonucleotide; TGAGAAT chr11 5305880 5305903 5305883 -
catttccatttgatggacattggt

SEQ ID NO: 68237 - DNA, 24 bp, Artificial Sequence
  Synthetic oligonucleotide; TCAGAAA chr11 5304384 5304407 5304387 -
ctggatgatggatctatgttacct

SEQ ID NO: 68238 - DNA, 24 bp, Artificial Sequence
  Synthetic oligonucleotide; AAAGAAT chr11 5304348 5304371 5304351 -
gaggactctgggatagttgctgtc

SEQ ID NO: 68239 - DNA, 24 bp, Artificial Sequence
  Synthetic oligonucleotide; TCAGAAA chr11 5304327 5304350 5304330 -
gtcaaagaatcagtccaaaggcac

SEQ ID NO: 68240 - DNA, 24 bp, Artificial Sequence
  Synthetic oligonucleotide; TAAGAAT chr11 5303927 5303950 5303930 -
ggttttgaaaacacgactatagtt

SEQ ID NO: 68241 - DNA, 24 bp, Artificial Sequence
  Synthetic oligonucleotide; ACAGAAT chr11 5303349 5303372 5303352 -
tattttaaaagactctggacacat

SEQ ID NO: 68242 - DNA, 24 bp, Artificial Sequence
  Synthetic oligonucleotide; GGAGAAA chr11 5303330 5303353 5303333 -
cacatacagaatcaattgaatttg

SEQ ID NO: 68243 - DNA, 24 bp, Artificial Sequence
  Synthetic oligonucleotide; AGAGAAA chr11 5302374 5302397 5302377 -
aatacagctgtcccattagtttca

SEQ ID NO: 68244 - DNA, 24 bp, Artificial Sequence
  Synthetic oligonucleotide; AGAGAAT chr11 5302287 5302310 5302290 -
ataggaggaggaataaaagagtaa

SEQ ID NO: 68245 - DNA, 24 bp, Artificial Sequence
  Synthetic oligonucleotide; CCAGAAA chr11 5302083 5302106 5302086 -
acaattaattaagtatgagacaat

SEQ ID NO: 68246 - DNA, 24 bp, Artificial Sequence
  Synthetic oligonucleotide; AGAGAAA chr11 5302020 5302043 5302023 -
atgatgtgctacaagaagattgtg

SEQ ID NO: 68247 - DNA, 24 bp, Artificial Sequence
  Synthetic oligonucleotide; AAAGAAA chr11 5302013 5302036 5302016 -
gctacaagaagattgtgagagaaa

SEQ ID NO: 68248 - DNA, 24 bp, Artificial Sequence
  Synthetic oligonucleotide; GTAGAAT chr11 5301629 5301652 5301632 -
tccttcattcattcactggccatt

SEQ ID NO: 68249 - DNA, 24 bp, Artificial Sequence
  Synthetic oligonucleotide; TCAGAAT chr11 5301005 5301028 5301008 -
cagagtagggcttgagcccttatt

SEQ ID NO: 68250 - DNA, 24 bp, Artificial Sequence
  Synthetic oligonucleotide; CGAGAAA chr11 5300873 5300896 5300876 -
atcacatgaaaaagctgatgtgag

SEQ ID NO: 68251 - DNA, 24 bp, Artificial Sequence
  Synthetic oligonucleotide; GAAGAAA chr11 5300784 5300807 5300787 -
taaagagggaatgccagtgatgct

SEQ ID NO: 68252 - DNA, 24 bp, Artificial Sequence
  Synthetic oligonucleotide; AAAGAAT chr11 5300778 5300801 5300781 -
gggaatgccagtgatgctgaagaa

SEQ ID NO: 68253 - DNA, 24 bp, Artificial Sequence
  Synthetic oligonucleotide; TCAGAAA chr11 5300722 5300745 5300725 -
tccaaaagaagagtaactatgatt

SEQ ID NO: 68254 - DNA, 24 bp, Artificial Sequence
  Synthetic oligonucleotide; AAAGAAA chr11 5300666 5300689 5300669 -
gcttgggtcaaatacagttcatct

SEQ ID NO: 68255 - DNA, 24 bp, Artificial Sequence
  Synthetic oligonucleotide; TTAGAAA chr11 5300120 5300143 5300123 -
acttggcaaaggtaatgttatatt

SEQ ID NO: 68256 - DNA, 24 bp, Artificial Sequence
  Synthetic oligonucleotide; TAAGAAA chr11 5299773 5299796 5299776 -
attctaaattctctctgcttcact

SEQ ID NO: 68257 - DNA, 24 bp, Artificial Sequence
  Synthetic oligonucleotide; TAAGAAA chr11 5299706 5299729 5299709 -
tctgaaaatattccagagatttga

SEQ ID NO: 68258 - DNA, 24 bp, Artificial Sequence
  Synthetic oligonucleotide; TTAGAAA chr11 5299453 5299476 5299456 -
gttggcatacagagtttattctat

SEQ ID NO: 68259 - DNA, 24 bp, Artificial Sequence
  Synthetic oligonucleotide; TAAGAAA chr11 5299142 5299165 5299145 -
aaaataaggtatgatagcgaagtc

SEQ ID NO: 68260 - DNA, 24 bp, Artificial Sequence
  Synthetic oligonucleotide; AGAGAAA chr11 5298176 5298199 5298179 -
ctcctaatgatagggacaggaggc

SEQ ID NO: 68261 - DNA, 24 bp, Artificial Sequence
  Synthetic oligonucleotide; GCAGAAA chr11 5298163 5298186 5298166 -
ggacaggaggcagagaaattttag

SEQ ID NO: 68262 - DNA, 24 bp, Artificial Sequence
  Synthetic oligonucleotide; CTAGAAA chr11 5298012 5298035 5298015 -
ctagctgtcttattcatgcacttt

SEQ ID NO: 68263 - DNA, 24 bp, Artificial Sequence
  Synthetic oligonucleotide; ACAGAAA chr11 5297758 5297781 5297761 -
tccaaaagtattgaccaataagga

SEQ ID NO: 68264 - DNA, 24 bp, Artificial Sequence
  Synthetic oligonucleotide; ATAGAAA chr11 5297625 5297648 5297628 -
taaggtagtttgaaaagcctagat

SEQ ID NO: 68265 - DNA, 24 bp, Artificial Sequence
  Synthetic oligonucleotide; ACAGAAT chr11 5297584 5297607 5297587 -
acatgagttcagtatataattgta

SEQ ID NO: 68266 - DNA, 24 bp, Artificial Sequence
  Synthetic oligonucleotide; ATAGAAA chr11 5297375 5297398 5297378 -
tgtagaacctaagctgattcggcc

SEQ ID NO: 68267 - DNA, 24 bp, Artificial Sequence
  Synthetic oligonucleotide; ATAGAAT chr11 5297301 5297324 5297304 -
ctatgctgtcagatgaatactgag

SEQ ID NO: 68268 - DNA, 24 bp, Artificial Sequence
  Synthetic oligonucleotide; ACAGAAA chr11 5297177 5297200 5297180 -
gatggatgaaggcaggtgactcta

SEQ ID NO: 68269 - DNA, 24 bp, Artificial Sequence
  Synthetic oligonucleotide; ATAGAAA chr11 5296747 5296770 5296750 -
aatttgtgtaggttgaaatgagct

SEQ ID NO: 68270 - DNA, 24 bp, Artificial Sequence
  Synthetic oligonucleotide; GGAGAAA chr11 5296634 5296657 5296637 -
taactaatgtgaagtgactttaaa

SEQ ID NO: 68271 - DNA, 24 bp, Artificial Sequence
  Synthetic oligonucleotide; GGAGAAA chr11 5296432 5296455 5296435 -
aggaacctgtagatacaaaaagtt

SEQ ID NO: 68272 - DNA, 24 bp, Artificial Sequence
  Synthetic oligonucleotide; ATAGAAA chr11 5296387 5296410 5296390 -
atgacaaaaatctattaatccttg

SEQ ID NO: 68273 - DNA, 24 bp, Artificial Sequence
  Synthetic oligonucleotide; AAAGAAA chr11 5296351 5296374 5296354 -
aagagataaaacactggtttacat

SEQ ID NO: 68274 - DNA, 24 bp, Artificial Sequence
  Synthetic oligonucleotide; TGAGAAA chr11 5296303 5296326 5296306 -
cagatccttataaaagtgataatt

SEQ ID NO: 68275 - DNA, 24 bp, Artificial Sequence
  Synthetic oligonucleotide; TCAGAAA chr11 5296130 5296153 5296133 -
ttctcacttatcactataaacatc

SEQ ID NO: 68276 - DNA, 24 bp, Artificial Sequence
  Synthetic oligonucleotide; GTAGAAA chr11 5296078 5296101 5296081 -
gcattttaaatagttaggaataat

SEQ ID NO: 68277 - DNA, 24 bp, Artificial Sequence
  Synthetic oligonucleotide; TCAGAAA chr11 5295910 5295933 5295913 -
gtaacttggttctagttgcttctt

SEQ ID NO: 68278 - DNA, 24 bp, Artificial Sequence
  Synthetic oligonucleotide; GAAGAAA chr11 5295812 5295835 5295815 -
ctaactactttttagtacatctaa

SEQ ID NO: 68279 - DNA, 24 bp, Artificial Sequence
  Synthetic oligonucleotide; AGAGAAA chr11 5295601 5295624 5295604 -
gagactaaccttccctcgctttgc

SEQ ID NO: 68280 - DNA, 24 bp, Artificial Sequence
  Synthetic oligonucleotide; CTAGAAT chr11 5295237 5295260 5295240 -
taattcaactcatgatatttggct

SEQ ID NO: 68281 - DNA, 24 bp, Artificial Sequence
  Synthetic oligonucleotide; TGAGAAA chr11 5295139 5295162 5295142 -
tctgaaataagacataatttgggg

SEQ ID NO: 68282 - DNA, 24 bp, Artificial Sequence
  Synthetic oligonucleotide; AGAGAAT chr11 5293710 5293733 5293713 -
gcaggatgtgggtggggccagata

SEQ ID NO: 68283 - DNA, 24 bp, Artificial Sequence
  Synthetic oligonucleotide; GAAGAAA chr11 5293401 5293424 5293404 -
gcgagaccacgaacccatcagaag

SEQ ID NO: 68284 - DNA, 24 bp, Artificial Sequence
  Synthetic oligonucleotide; TCAGAAA chr11 5293255 5293278 5293258 -
cccaccaattccggacacagtatg

SEQ ID NO: 68285 - DNA, 24 bp, Artificial Sequence
  Synthetic oligonucleotide; GCAGAAA chr11 5293085 5293108 5293088 -
attctctttcccttcctctatgtg

SEQ ID NO: 68286 - DNA, 24 bp, Artificial Sequence
  Synthetic oligonucleotide; AAAGAAA chr11 5292967 5292990 5292970 -
aacatctgactgtgacgtagcaat

SEQ ID NO: 68287 - DNA, 24 bp, Artificial Sequence
  Synthetic oligonucleotide; CGAGAAA chr11 5292808 5292831 5292811 -
tgcaatttcaagttctttacaggc

SEQ ID NO: 68288 - DNA, 24 bp, Artificial Sequence
  Synthetic oligonucleotide; ACAGAAT chr11 5291620 5291643 5291623 -
gatttttcccacagtctgttggtc

SEQ ID NO: 68289 - DNA, 24 bp, Artificial Sequence
  Synthetic oligonucleotide; TGAGAAT chr11 5291587 5291610 5291590 -
cctgagtgattactgatgaaagag

SEQ ID NO: 68290 - DNA, 24 bp, Artificial Sequence
  Synthetic oligonucleotide; CCAGAAA chr11 5291137 5291160 5291140 -
tcggtctttctttatttcaagagt

SEQ ID NO: 68291 - DNA, 24 bp, Artificial Sequence
  Synthetic oligonucleotide; AGAGAAA chr11 5291079 5291102 5291082 -
atggaaagagctctttcaagagac

SEQ ID NO: 68292 - DNA, 24 bp, Artificial Sequence
  Synthetic oligonucleotide; AAAGAAT chr11 5291074 5291097 5291077 -
aagagctctttcaagagacagaga

SEQ ID NO: 68293 - DNA, 24 bp, Artificial Sequence
  Synthetic oligonucleotide; TTAGAAT chr11 5290852 5290875 5290855 -
tttagtttatatacatctgtattg

SEQ ID NO: 68294 - DNA, 24 bp, Artificial Sequence
  Synthetic oligonucleotide; GTAGAAT chr11 5290261 5290284 5290264 -
agggaccacagggttaagggggca

SEQ ID NO: 68295 - DNA, 24 bp, Artificial Sequence
  Synthetic oligonucleotide; AAAGAAT chr11 5290143 5290166 5290146 -
tttaaatgtataaataagtggatg

SEQ ID NO: 68296 - DNA, 24 bp, Artificial Sequence
  Synthetic oligonucleotide; ATAGAAT chr11 5290107 5290130 5290110 -
gatagatagacagatagatgatag

SEQ ID NO: 68297 - DNA, 24 bp, Artificial Sequence
  Synthetic oligonucleotide; GGAGAAA chr11 5289774 5289797 5289777 -
ggagagctgaacttggtcaacaaa

SEQ ID NO: 68298 - DNA, 24 bp, Artificial Sequence
  Synthetic oligonucleotide; ACAGAAT chr11 5289026 5289049 5289029 -
cagagtgaaaccttgcctcacgaa

SEQ ID NO: 68299 - DNA, 24 bp, Artificial Sequence
  Synthetic oligonucleotide; CTAGAAA chr11 5288883 5288906 5288886 -
aattttgtaatattgatattattc

SEQ ID NO: 68300 - DNA, 24 bp, Artificial Sequence
  Synthetic oligonucleotide; AAAGAAT chr11 5288635 5288658 5288638 -
aacaggaataacagaacaagattg

SEQ ID NO: 68301 - DNA, 24 bp, Artificial Sequence
  Synthetic oligonucleotide; TGAGAAT chr11 5288406 5288429 5288409 -
gacatctcattctttttcttagtg

SEQ ID NO: 68302 - DNA, 24 bp, Artificial Sequence
  Synthetic oligonucleotide; TAAGAAT chr11 5288400 5288423 5288403 -
tcattctttttcttagtgtgagaa

SEQ ID NO: 68303 - DNA, 24 bp, Artificial Sequence
  Synthetic oligonucleotide; AAAGAAA chr11 5288146 5288169 5288149 -
catttaaatgatatatttatttta

SEQ ID NO: 68304 - DNA, 24 bp, Artificial Sequence
  Synthetic oligonucleotide; GTAGAAT chr11 5288097 5288120 5288100 -
ccctggctgtgacatggaaactat

SEQ ID NO: 68305 - DNA, 24 bp, Artificial Sequence
  Synthetic oligonucleotide; ACAGAAA chr11 5288023 5288046 5288026 -
aggggctcactgcacatacactag

SEQ ID NO: 68306 - DNA, 24 bp, Artificial Sequence
  Synthetic oligonucleotide; TGAGAAA chr11 5287973 5287996 5287976 -
agcctgatcatttccatgtcatac

SEQ ID NO: 68307 - DNA, 24 bp, Artificial Sequence
  Synthetic oligonucleotide; TGAGAAA chr11 5287441 5287464 5287444 -
agggttttttaattagtttgtttt

SEQ ID NO: 68308 - DNA, 24 bp, Artificial Sequence
  Synthetic oligonucleotide; CTAGAAA chr11 5287076 5287099 5287079 -
agtgacttataaatgctaactact

SEQ ID NO: 68309 - DNA, 24 bp, Artificial Sequence
  Synthetic oligonucleotide; GTAGAAT chr11 5286778 5286801 5286781 -
acaaacataaactactagcaaata

SEQ ID NO: 68310 - DNA, 24 bp, Artificial Sequence
  Synthetic oligonucleotide; TCAGAAA chr11 5286613 5286636 5286616 -
ggcctcccaggccaagttatccat

SEQ ID NO: 68311 - DNA, 24 bp, Artificial Sequence
  Synthetic oligonucleotide; TCAGAAT chr11 5286319 5286342 5286322 -
ttatttaacaaatgcatgaatgct

SEQ ID NO: 68312 - DNA, 24 bp, Artificial Sequence
  Synthetic oligonucleotide; TAAGAAT chr11 5286238 5286261 5286241 -
aggattagaagattcttctgtgtg

SEQ ID NO: 68313 - DNA, 24 bp, Artificial Sequence
  Synthetic oligonucleotide; ATAGAAA chr11 5286168 5286191 5286171 -
gaaaatctgtgagctcctcaccat

SEQ ID NO: 68314 - DNA, 24 bp, Artificial Sequence
  Synthetic oligonucleotide; TGAGAAA chr11 5286070 5286093 5286073 -
ttaattcccaaactcatatagctc

SEQ ID NO: 68315 - DNA, 24 bp, Artificial Sequence
  Synthetic oligonucleotide; ACAGAAA chr11 5285946 5285969 5285949 -
ttggttgcatgaatcagattatca

SEQ ID NO: 68316 - DNA, 24 bp, Artificial Sequence
  Synthetic oligonucleotide; GTAGAAA chr11 5285848 5285871 5285851 -
cctgcccattcagggctccagcat

SEQ ID NO: 68317 - DNA, 24 bp, Artificial Sequence
  Synthetic oligonucleotide; GGAGAAT chr11 5285461 5285484 5285464 -
accctgctgagatgatctatgtgg

SEQ ID NO: 68318 - DNA, 24 bp, Artificial Sequence
  Synthetic oligonucleotide; TGAGAAA chr11 5285446 5285469 5285449 -
tctatgtggggagaatggcttctt

SEQ ID NO: 68319 - DNA, 24 bp, Artificial Sequence
  Synthetic oligonucleotide; CCAGAAT chr11 5285395 5285418 5285398 -
tgcccctcattcccactttaatat

SEQ ID NO: 68320 - DNA, 24 bp, Artificial Sequence
  Synthetic oligonucleotide; GAAGAAT chr11 5285380 5285403 5285383 -
ctttaatatccagaatcactataa

SEQ ID NO: 68321 - DNA, 24 bp, Artificial Sequence
  Synthetic oligonucleotide; TGAGAAA chr11 5284134 5284157 5284137 -
catggaagcccaaggttctgaaca

SEQ ID NO: 68322 - DNA, 24 bp, Artificial Sequence
  Synthetic oligonucleotide; CTAGAAA chr11 5284077 5284100 5284080 -
gagggaaacaagatggtgaaggga

SEQ ID NO: 68323 - DNA, 24 bp, Artificial Sequence
  Synthetic oligonucleotide; CTAGAAT chr11 5283853 5283876 5283856 -
cacctcttgagtacttagtatatg

SEQ ID NO: 68324 - DNA, 24 bp, Artificial Sequence
  Synthetic oligonucleotide; GGAGAAT chr11 5283619 5283642 5283622 -
ccagctactcaggaggctgaggca

SEQ ID NO: 68325 - DNA, 24 bp, Artificial Sequence
  Synthetic oligonucleotide; CGAGAAA chr11 5283163 5283186 5283166 -
acacaaactcagatattgtggatg

SEQ ID NO: 68326 - DNA, 24 bp, Artificial Sequence
  Synthetic oligonucleotide; GGAGAAA chr11 5283022 5283045 5283025 -
tgcatttcttcaggaaagtttgag

SEQ ID NO: 68327 - DNA, 24 bp, Artificial Sequence
  Synthetic oligonucleotide; AAAGAAA chr11 5283010 5283033 5283013 -
ggaaagtttgagggagaaaaaggt

SEQ ID NO: 68328 - DNA, 24 bp, Artificial Sequence
  Synthetic oligonucleotide; TTAGAAA chr11 5283000 5283023 5283003 -
agggagaaaaaggtaaagaaaaat

SEQ ID NO: 68329 - DNA, 24 bp, Artificial Sequence
  Synthetic oligonucleotide; TCAGAAT chr11 5282988 5283011 5282991 -
gtaaagaaaaatttagaaacaact

SEQ ID NO: 68330 - DNA, 24 bp, Artificial Sequence
  Synthetic oligonucleotide; TGAGAAA chr11 5282923 5282946 5282926 -
tatgacaaattataagcagacact

SEQ ID NO: 68331 - DNA, 24 bp, Artificial Sequence
  Synthetic oligonucleotide; TCAGAAA chr11 5282766 5282789 5282769 -
tcatcctgcagtgacctcagtgcc

SEQ ID NO: 68332 - DNA, 24 bp, Artificial Sequence
  Synthetic oligonucleotide; CAAGAAA chr11 5282651 5282674 5282654 -
tgctgtggtgctgtgataggtaca

SEQ ID NO: 68333 - DNA, 24 bp, Artificial Sequence
  Synthetic oligonucleotide; GAAGAAA chr11 5282641 5282664 5282644 -
ctgtgataggtacacaagaaatga

SEQ ID NO: 68334 - DNA, 24 bp, Artificial Sequence
  Synthetic oligonucleotide; AAAGAAT chr11 5282499 5282522 5282502 -
tcacattgtctttctcatctgtaa

SEQ ID NO: 68335 - DNA, 24 bp, Artificial Sequence
  Synthetic oligonucleotide; TGAGAAA chr11 5282279 5282302 5282282 -
gaggtgggtgaatgagagggtaag

SEQ ID NO: 68336 - DNA, 24 bp, Artificial Sequence
  Synthetic oligonucleotide; CAAGAAA chr11 5282155 5282178 5282158 -
gaatctgctgccaacattaacagt

SEQ ID NO: 68337 - DNA, 24 bp, Artificial Sequence
  Synthetic oligonucleotide; ACAGAAA chr11 5282061 5282084 5282064 -
gtatatatttatcataatactgta

SEQ ID NO: 68338 - DNA, 24 bp, Artificial Sequence
  Synthetic oligonucleotide; TGAGAAA chr11 5281732 5281755 5281735 -
ctagtagacttatgaaatttctga

SEQ ID NO: 68339 - DNA, 24 bp, Artificial Sequence
  Synthetic oligonucleotide; GGAGAAA chr11 5281718 5281741 5281721 -
aaatttctgatgagaaaggagaga

SEQ ID NO: 68340 - DNA, 24 bp, Artificial Sequence
  Synthetic oligonucleotide; AGAGAAT chr11 5281584 5281607 5281587 -
ttacagcttgccctgatgggagat

SEQ ID NO: 68341 - DNA, 24 bp, Artificial Sequence
  Synthetic oligonucleotide; AGAGAAA chr11 5281466 5281489 5281469 -
cactctctaaaataatccacagtg

SEQ ID NO: 68342 - DNA, 24 bp, Artificial Sequence
  Synthetic oligonucleotide; GGAGAAT chr11 5281224 5281247 5281227 -
ccagctattagggtggctgaggca

SEQ ID NO: 68343 - DNA, 24 bp, Artificial Sequence
  Synthetic oligonucleotide; AAAGAAA chr11 5280607 5280630 5280610 -
aaactccacctcaaacggcatcat

SEQ ID NO: 68344 - DNA, 24 bp, Artificial Sequence
  Synthetic oligonucleotide; ACAGAAT chr11 5280587 5280610 5280590 -
tcataaagaaaatggatgcctgag

SEQ ID NO: 68345 - DNA, 24 bp, Artificial Sequence
  Synthetic oligonucleotide; CTAGAAT chr11 5280570 5280593 5280573 -
gcctgagacagaatgtgacatatt

SEQ ID NO: 68346 - DNA, 24 bp, Artificial Sequence
  Synthetic oligonucleotide; ATAGAAT chr11 5280481 5280504 5280484 -
atatatttgttgttatcaattgcc

SEQ ID NO: 68347 - DNA, 24 bp, Artificial Sequence
  Synthetic oligonucleotide; GCAGAAT chr11 5280417 5280440 5280420 -
aggtggcctctatacctagaagcg

SEQ ID NO: 68348 - DNA, 24 bp, Artificial Sequence
  Synthetic oligonucleotide; AAAGAAA chr11 5280315 5280338 5280318 -
gaagaggaaggcatgaaaacagga

SEQ ID NO: 68349 - DNA, 24 bp, Artificial Sequence
  Synthetic oligonucleotide; AAAGAAA chr11 5280115 5280138 5280118 -
gtaggcaactctgatcctgagagg

SEQ ID NO: 68350 - DNA, 24 bp, Artificial Sequence
  Synthetic oligonucleotide; GGAGAAA chr11 5280011 5280034 5280014 -
tgacagacagacataatgcttgtg

SEQ ID NO: 68351 - DNA, 24 bp, Artificial Sequence
  Synthetic oligonucleotide; GAAGAAT chr11 5279970 5279993 5279973 -
tcaaggggatagagaaggcttcca

SEQ ID NO: 68352 - DNA, 24 bp, Artificial Sequence
  Synthetic oligonucleotide; TCAGAAA chr11 5279917 5279940 5279920 -
ggagttcacagtggcaaagatgtt

SEQ ID NO: 68353 - DNA, 24 bp, Artificial Sequence
  Synthetic oligonucleotide; ATAGAAA chr11 5279560 5279583 5279563 -
ttttggttcaagtgtatgtttgtg

SEQ ID NO: 68354 - DNA, 24 bp, Artificial Sequence
  Synthetic oligonucleotide; TAAGAAA chr11 5279509 5279532 5279512 -
catatctaacataaacacaaacat

SEQ ID NO: 68355 - DNA, 24 bp, Artificial Sequence
  Synthetic oligonucleotide; TTAGAAA chr11 5279392 5279415 5279395 -
tgagccatttaaatcacaaattaa

SEQ ID NO: 68356 - DNA, 24 bp, Artificial Sequence
  Synthetic oligonucleotide; CTAGAAA chr11 5279352 5279375 5279355 -
ggggaaaaaattccatggatgggt

SEQ ID NO: 68357 - DNA, 24 bp, Artificial Sequence
  Synthetic oligonucleotide; CTAGAAT chr11 5279268 5279291 5279271 -
aacttgaaatatgtggctaaataa

SEQ ID NO: 68358 - DNA, 24 bp, Artificial Sequence
  Synthetic oligonucleotide; CTAGAAA chr11 5279126 5279149 5279129 -
attcattttcattttatattgggc

SEQ ID NO: 68359 - DNA, 24 bp, Artificial Sequence
  Synthetic oligonucleotide; GGAGAAT chr11 5278639 5278662 5278642 -
ccaactacttgggaggctgaggca

SEQ ID NO: 68360 - DNA, 24 bp, Artificial Sequence
  Synthetic oligonucleotide; AAAGAAA chr11 5278552 5278575 5278555 -
agcctccagagcgagactctgtct

SEQ ID NO: 68361 - DNA, 24 bp, Artificial Sequence
  Synthetic oligonucleotide; ACAGAAT chr11 5278491 5278514 5278494 -
aaacccatcaaattccctgaccga

SEQ ID NO: 68362 - DNA, 24 bp, Artificial Sequence
  Synthetic oligonucleotide; AAAGAAA chr11 5278441 5278464 5278444 -
acttatctaccattttccctcctt

SEQ ID NO: 68363 - DNA, 24 bp, Artificial Sequence
  Synthetic oligonucleotide; CAAGAAA chr11 5278380 5278403 5278383 -
gctcagaagcctctggtcagcatc

SEQ ID NO: 68364 - DNA, 24 bp, Artificial Sequence
  Synthetic oligonucleotide; CCAGAAA chr11 5278170 5278193 5278173 -
ccttactctgacatatactcacag

SEQ ID NO: 68365 - DNA, 24 bp, Artificial Sequence
  Synthetic oligonucleotide; TCAGAAA chr11 5278102 5278125 5278105 -
cacacaccaattccatattctctg

SEQ ID NO: 68366 - DNA, 24 bp, Artificial Sequence
  Synthetic oligonucleotide; AAAGAAA chr11 5277130 5277153 5277133 -
acacatccactgctatgcacacac

SEQ ID NO: 68367 - DNA, 24 bp, Artificial Sequence
  Synthetic oligonucleotide; CTAGAAT chr11 5277039 5277062 5277042 -
gagccttgatgggattactgagtt

SEQ ID NO: 68368 - DNA, 24 bp, Artificial Sequence
  Synthetic oligonucleotide; AAAGAAA chr11 5276862 5276885 5276865 -
ttgtttcatcagtcaggtaaaagt

SEQ ID NO: 68369 - DNA, 24 bp, Artificial Sequence
  Synthetic oligonucleotide; TGAGAAT chr11 5276621 5276644 5276624 -
aatgataagcatacttctattcaa

SEQ ID NO: 68370 - DNA, 24 bp, Artificial Sequence
  Synthetic oligonucleotide; TAAGAAT chr11 5276596 5276619 5276599 -
gagaatattctgtaagattatagt

SEQ ID NO: 68371 - DNA, 24 bp, Artificial Sequence
  Synthetic oligonucleotide; GTAGAAA chr11 5276071 5276094 5276074 -
agccttttctatgtatctacttgt

SEQ ID NO: 68372 - DNA, 24 bp, Artificial Sequence
  Synthetic oligonucleotide; AAAGAAA chr11 5275908 5275931 5275911 -
cccagctatcaccatcccaagtct

SEQ ID NO: 68373 - DNA, 24 bp, Artificial Sequence
  Synthetic oligonucleotide; TTAGAAA chr11 5275872 5275895 5275875 -
aatgggtttgcccatctctgttga

SEQ ID NO: 68374 - DNA, 24 bp, Artificial Sequence
  Synthetic oligonucleotide; CCAGAAA chr11 5275834 5275857 5275837 -
aaaataaaataagcccctaagctc

SEQ ID NO: 68375 - DNA, 24 bp, Artificial Sequence
  Synthetic oligonucleotide; GAAGAAA chr11 5275806 5275829 5275809 -
aaaacatgactaaaccagcaagaa

SEQ ID NO: 68376 - DNA, 24 bp, Artificial Sequence
  Synthetic oligonucleotide; ACAGAAA chr11 5275744 5275767 5275747 -
ctagtgtctgaatgaggcttgagt

SEQ ID NO: 68377 - DNA, 24 bp, Artificial Sequence
  Synthetic oligonucleotide; CTAGAAT chr11 5275623 5275646 5275626 -
ctttcagaacaaactcctgtgggg

SEQ ID NO: 68378 - DNA, 24 bp, Artificial Sequence
  Synthetic oligonucleotide; AGAGAAA chr11 5275419 5275442 5275422 -
caatcctcagttttaaccttctcc

SEQ ID NO: 68379 - DNA, 24 bp, Artificial Sequence
  Synthetic oligonucleotide; CAAGAAA chr11 5275331 5275354 5275334 -
agtactgaagatagcatgcatagg

SEQ ID NO: 68380 - DNA, 24 bp, Artificial Sequence
  Synthetic oligonucleotide; TCAGAAT chr11 5275296 5275319 5275299 -
ccttagctttatgttgctgttgtt

SEQ ID NO: 68381 - DNA, 24 bp, Artificial Sequence
  Synthetic oligonucleotide; CAAGAAT chr11 5275044 5275067 5275047 -
caatgcaatttaattaaaaaaacc

SEQ ID NO: 68382 - DNA, 24 bp, Artificial Sequence
  Synthetic oligonucleotide; TTAGAAT chr11 5275034 5275057 5275037 -
taattaaaaaaacccaagaatttc

SEQ ID NO: 68383 - DNA, 24 bp, Artificial Sequence
  Synthetic oligonucleotide; AAAGAAA chr11 5274972 5274995 5274975 -
acttactcaaggtcccaaaaggtc

SEQ ID NO: 68384 - DNA, 24 bp, Artificial Sequence
  Synthetic oligonucleotide; TGAGAAT chr11 5274691 5274714 5274694 -
gttgccagagagagagattactct

SEQ ID NO: 68385 - DNA, 24 bp, Artificial Sequence
  Synthetic oligonucleotide; CAAGAAA chr11 5274370 5274393 5274373 -
tgaacttaaaataaaagttgaaaa

SEQ ID NO: 68386 - DNA, 24 bp, Artificial Sequence
  Synthetic oligonucleotide; CTAGAAA chr11 5274311 5274334 5274314 -
attctctcattctttacaattaca

SEQ ID NO: 68387 - DNA, 24 bp, Artificial Sequence
  Synthetic oligonucleotide; ACAGAAT chr11 5274276 5274299 5274279 -
ccacaggcttcctgcaaggcagcc

SEQ ID NO: 68388 - DNA, 24 bp, Artificial Sequence
  Synthetic oligonucleotide; GTAGAAT chr11 5274211 5274234 5274214 -
atgcaaaatctaacacaaaatcta

SEQ ID NO: 68389 - DNA, 24 bp, Artificial Sequence
  Synthetic oligonucleotide; TGAGAAT chr11 5274179 5274202 5274182 -
atttgcttacatctatttttgttc

SEQ ID NO: 68390 - DNA, 24 bp, Artificial Sequence
  Synthetic oligonucleotide; GCAGAAT chr11 5274149 5274172 5274152 -
tatagatttagatacataatggaa

SEQ ID NO: 68391 - DNA, 24 bp, Artificial Sequence
  Synthetic oligonucleotide; TTAGAAT chr11 5274123 5274146 5274126 -
agaataatttaaaatctggctaat

SEQ ID NO: 68392 - DNA, 24 bp, Artificial Sequence
  Synthetic oligonucleotide; AAAGAAT chr11 5274026 5274049 5274029 -
aaaataaagtaagttatttgtggt

SEQ ID NO: 68393 - DNA, 24 bp, Artificial Sequence
  Synthetic oligonucleotide; CAAGAAT chr11 5273945 5273968 5273948 -
aagtgaagggcctactttacttaa

SEQ ID NO: 68394 - DNA, 24 bp, Artificial Sequence
  Synthetic oligonucleotide; CCAGAAA chr11 5273853 5273876 5273856 -
ggttaaacatatgtcataaattag

SEQ ID NO: 68395 - DNA, 24 bp, Artificial Sequence
  Synthetic oligonucleotide; TAAGAAA chr11 5273842 5273865 5273845 -
tgtcataaattagccagaaagatt

SEQ ID NO: 68396 - DNA, 24 bp, Artificial Sequence
  Synthetic oligonucleotide; TTAGAAT chr11 5273793 5273816 5273796 -
tttaaattaggcatcttacagttt

SEQ ID NO: 68397 - DNA, 24 bp, Artificial Sequence
  Synthetic oligonucleotide; TAAGAAA chr11 5273773 5273796 5273776 -
gtttttagaatcctgcatagaact

SEQ ID NO: 68398 - DNA, 24 bp, Artificial Sequence
  Synthetic oligonucleotide; AAAGAAA chr11 5273521 5273544 5273524 -
tgaactttgggcttttaatatagg

SEQ ID NO: 68399 - DNA, 24 bp, Artificial Sequence
  Synthetic oligonucleotide; GAAGAAA chr11 5273217 5273240 5273220 -
ctggaaccataggcagtaaggaga

SEQ ID NO: 68400 - DNA, 24 bp, Artificial Sequence
  Synthetic oligonucleotide; GAAGAAT chr11 5273118 5273141 5273121 -
gactggtgtccatactctgaatgg

SEQ ID NO: 68401 - DNA, 24 bp, Artificial Sequence
  Synthetic oligonucleotide; GGAGAAA chr11 5273082 5273105 5273085 -
gattacccatagggcttgttttag

SEQ ID NO: 68402 - DNA, 24 bp, Artificial Sequence
  Synthetic oligonucleotide; ATAGAAA chr11 5272687 5272710 5272690 -
aacactagggggctggtgaagttt

SEQ ID NO: 68403 - DNA, 24 bp, Artificial Sequence
  Synthetic oligonucleotide; CTAGAAT chr11 5272609 5272632 5272612 -
tctactttgaatgcaaaggacaaa

SEQ ID NO: 68404 - DNA, 24 bp, Artificial Sequence
  Synthetic oligonucleotide; AGAGAAA chr11 5272571 5272594 5272574 -
tcagtacctattgcatagttataa

SEQ ID NO: 68405 - DNA, 24 bp, Artificial Sequence
  Synthetic oligonucleotide; TTAGAAT chr11 5271924 5271947 5271927 -
ggttttgtctgtgttagccaatgg

SEQ ID NO: 68406 - DNA, 24 bp, Artificial Sequence
  Synthetic oligonucleotide; TCAGAAA chr11 5271911 5271934 5271914 -
ttagccaatggttagaatatatgc

SEQ ID NO: 68407 - DNA, 24 bp, Artificial Sequence
  Synthetic oligonucleotide; AAAGAAA chr11 5271883 5271906 5271886 -
aaagataccattggttaatagcta

SEQ ID NO: 68408 - DNA, 24 bp, Artificial Sequence
  Synthetic oligonucleotide; GTAGAAA chr11 5271871 5271894 5271874 -
ggttaatagctaaaagaaaatgga

SEQ ID NO: 68409 - DNA, 24 bp, Artificial Sequence
  Synthetic oligonucleotide; GGAGAAA chr11 5271798 5271821 5271801 -
caggtgaagacttctggaatcatg

SEQ ID NO: 68410 - DNA, 24 bp, Artificial Sequence
  Synthetic oligonucleotide; TAAGAAA chr11 5271728 5271751 5271731 -
ttttttttttttttatcacaaaca

SEQ ID NO: 68411 - DNA, 24 bp, Artificial Sequence
  Synthetic oligonucleotide; AGAGAAA chr11 5271689 5271712 5271692 -
aataacaaagtcaggttatagaag

SEQ ID NO: 68412 - DNA, 24 bp, Artificial Sequence
  Synthetic oligonucleotide; ACAGAAA chr11 5271560 5271583 5271563 -
ctgaacatacaggaaattgtagga

SEQ ID NO: 68413 - DNA, 24 bp, Artificial Sequence
  Synthetic oligonucleotide; GGAGAAA chr11 5271521 5271544 5271524 -
tctggtggggcaaggggagccata

SEQ ID NO: 68414 - DNA, 24 bp, Artificial Sequence
  Synthetic oligonucleotide; AAAGAAA chr11 5271517 5271540 5271520 -
gtggggcaaggggagccataggag

SEQ ID NO: 68415 - DNA, 24 bp, Artificial Sequence
  Synthetic oligonucleotide; GTAGAAA chr11 5271508 5271531 5271511 -
ggggagccataggagaaagaaatg

SEQ ID NO: 68416 - DNA, 24 bp, Artificial Sequence
  Synthetic oligonucleotide; GGAGAAT chr11 5271344 5271367 5271347 -
ccagctgctcgggaggctgaggca

SEQ ID NO: 68417 - DNA, 24 bp, Artificial Sequence
  Synthetic oligonucleotide; AAAGAAA chr11 5271239 5271262 5271242 -
gactccgtctcaaaaaaaaaaaaa

SEQ ID NO: 68418 - DNA, 24 bp, Artificial Sequence
  Synthetic oligonucleotide; AAAGAAA chr11 5271235 5271258 5271238 -
ccgtctcaaaaaaaaaaaaaaaag

SEQ ID NO: 68419 - DNA, 24 bp, Artificial Sequence
  Synthetic oligonucleotide; AAAGAAA chr11 5271231 5271254 5271234 -
ctcaaaaaaaaaaaaaaaagaaag

SEQ ID NO: 68420 - DNA, 24 bp, Artificial Sequence
  Synthetic oligonucleotide; AAAGAAA chr11 5271226 5271249 5271229 -
aaaaaaaaaaaaaagaaagaaaga

SEQ ID NO: 68421 - DNA, 24 bp, Artificial Sequence
  Synthetic oligonucleotide; AAAGAAA chr11 5271220 5271243 5271223 -
aaaaaaaagaaagaaagaaaagaa

SEQ ID NO: 68422 - DNA, 24 bp, Artificial Sequence
  Synthetic oligonucleotide; AAAGAAA chr11 5271213 5271236 5271216 -
agaaagaaagaaaagaaaaagaaa

SEQ ID NO: 68423 - DNA, 24 bp, Artificial Sequence
  Synthetic oligonucleotide; ATAGAAT chr11 5271129 5271152 5271132 -
attatggtgatgtaagggactttt

SEQ ID NO: 68424 - DNA, 24 bp, Artificial Sequence
  Synthetic oligonucleotide; ACAGAAA chr11 5270855 5270878 5270858 -
agcaagtcatcaaaatggggacat

SEQ ID NO: 68425 - DNA, 24 bp, Artificial Sequence
  Synthetic oligonucleotide; AGAGAAA chr11 5270626 5270649 5270629 -
gtagccaatgtcccctgtggtcat

SEQ ID NO: 68426 - DNA, 24 bp, Artificial Sequence
  Synthetic oligonucleotide; AGAGAAA chr11 5270448 5270471 5270451 -
actatgtacggtttttgtctccct

SEQ ID NO: 68427 - DNA, 24 bp, Artificial Sequence
  Synthetic oligonucleotide; GGAGAAT chr11 5270237 5270260 5270240 -
tttatatgaggctttcttggaaaa

SEQ ID NO: 68428 - DNA, 24 bp, Artificial Sequence
  Synthetic oligonucleotide; AAAGAAT chr11 5269979 5270002 5269982 -
acagggggccagaacttcggcagt

SEQ ID NO: 68429 - DNA, 24 bp, Artificial Sequence
  Synthetic oligonucleotide; TCAGAAA chr11 5269363 5269386 5269366 -
ttattggaaagaccaacaaagatc

SEQ ID NO: 68430 - DNA, 24 bp, Artificial Sequence
  Synthetic oligonucleotide; AGAGAAT chr11 5269204 5269227 5269207 -
gccagaacttgatgtgtttatccc

SEQ ID NO: 68431 - DNA, 24 bp, Artificial Sequence
  Synthetic oligonucleotide; ATAGAAT chr11 5269191 5269214 5269194 -
gtgtttatcccagagaattgtatt

SEQ ID NO: 68432 - DNA, 24 bp, Artificial Sequence
  Synthetic oligonucleotide; GAAGAAT chr11 5269169 5269192 5269172 -
ttatagaattgtagacttgtgaaa

SEQ ID NO: 68433 - DNA, 24 bp, Artificial Sequence
  Synthetic oligonucleotide; ATAGAAA chr11 5269122 5269145 5269125 -
tagatgaaagtccatttcaaggaa

SEQ ID NO: 68434 - DNA, 24 bp, Artificial Sequence
  Synthetic oligonucleotide; TTAGAAA chr11 5269081 5269104 5269084 -
tatgtgggtcatgataattgaggt

SEQ ID NO: 68435 - DNA, 24 bp, Artificial Sequence
  Synthetic oligonucleotide; AAAGAAA chr11 5269041 5269064 5269044 -
gcaaaaaaaataaaagatttgctc

SEQ ID NO: 68436 - DNA, 24 bp, Artificial Sequence
  Synthetic oligonucleotide; AAAGAAA chr11 5268883 5268906 5268886 -
tttacaaaaattagacaattgctt

SEQ ID NO: 68437 - DNA, 24 bp, Artificial Sequence
  Synthetic oligonucleotide; GTAGAAT chr11 5268813 5268836 5268816 -
ggaagggggtgagggtgtaggtag

SEQ ID NO: 68438 - DNA, 24 bp, Artificial Sequence
  Synthetic oligonucleotide; ATAGAAT chr11 5268790 5268813 5268793 -
ggtagaatgttgaatgtagggctc

SEQ ID NO: 68439 - DNA, 24 bp, Artificial Sequence
  Synthetic oligonucleotide; AGAGAAA chr11 5268394 5268417 5268397 -
acatggggactgggcttggccttg

SEQ ID NO: 68440 - DNA, 24 bp, Artificial Sequence
  Synthetic oligonucleotide; AGAGAAA chr11 5268275 5268298 5268278 -
aagtgttcatgggctgagggatgg

SEQ ID NO: 68441 - DNA, 24 bp, Artificial Sequence
  Synthetic oligonucleotide; TAAGAAA chr11 5268244 5268267 5268247 -
cataggaagaaccaagagcttcct

SEQ ID NO: 68442 - DNA, 24 bp, Artificial Sequence
  Synthetic oligonucleotide; GGAGAAT chr11 5268201 5268224 5268204 -
tgtaaaattaatgtggatgttatg

SEQ ID NO: 68443 - DNA, 24 bp, Artificial Sequence
  Synthetic oligonucleotide; GGAGAAA chr11 5268166 5268189 5268169 -
ggattccaaggaggatgatatgat

SEQ ID NO: 68444 - DNA, 24 bp, Artificial Sequence
  Synthetic oligonucleotide; TGAGAAA chr11 5268063 5268086 5268066 -
aaagaaggagctgttagtggtacc

SEQ ID NO: 68445 - DNA, 24 bp, Artificial Sequence
  Synthetic oligonucleotide; CTAGAAT chr11 5267976 5267999 5267979 -
cttcatagatatccaagatatagg

SEQ ID NO: 68446 - DNA, 24 bp, Artificial Sequence
  Synthetic oligonucleotide; ATAGAAT chr11 5267787 5267810 5267790 -
gatatcattgtgcattatcttctg

SEQ ID NO: 68447 - DNA, 24 bp, Artificial Sequence
  Synthetic oligonucleotide; ATAGAAT chr11 5267698 5267721 5267701 -
tgtgatgaagactttccgtgggag

SEQ ID NO: 68448 - DNA, 24 bp, Artificial Sequence
  Synthetic oligonucleotide; TGAGAAA chr11 5267323 5267346 5267326 -
tttgaaggatggacaaaggtgggg

SEQ ID NO: 68449 - DNA, 24 bp, Artificial Sequence
  Synthetic oligonucleotide; CCAGAAT chr11 5266971 5266994 5266974 -
acttttgaatttggctgtatatat

SEQ ID NO: 68450 - DNA, 24 bp, Artificial Sequence
  Synthetic oligonucleotide; TGAGAAA chr11 5266678 5266701 5266681 -
tgagcatttatcatttctatgtat

SEQ ID NO: 68451 - DNA, 24 bp, Artificial Sequence
  Synthetic oligonucleotide; TGAGAAA chr11 5266060 5266083 5266063 -
atgatagttctgtttttagtttac

SEQ ID NO: 68452 - DNA, 24 bp, Artificial Sequence
  Synthetic oligonucleotide; TAAGAAA chr11 5265997 5266020 5266000 -
ttttacattcccaccaacagtgtg

SEQ ID NO: 68453 - DNA, 24 bp, Artificial Sequence
  Synthetic oligonucleotide; TGAGAAT chr11 5265859 5265882 5265862 -
catttccctgatcattagtgatgt

SEQ ID NO: 68454 - DNA, 24 bp, Artificial Sequence
  Synthetic oligonucleotide; TGAGAAT chr11 5265814 5265837 5265817 -
gttggtcatttgtatatctttttc

SEQ ID NO: 68455 - DNA, 24 bp, Artificial Sequence
  Synthetic oligonucleotide; CTAGAAT chr11 5265505 5265528 5265508 -
gaagggtttttccgatgttatttt

SEQ ID NO: 68456 - DNA, 24 bp, Artificial Sequence
  Synthetic oligonucleotide; TAAGAAT chr11 5265120 5265143 5265123 -
ttattgggctcttttttggttcca

SEQ ID NO: 68457 - DNA, 24 bp, Artificial Sequence
  Synthetic oligonucleotide; TGAGAAT chr11 5264991 5265014 5264994 -
cacaatattgattctacccatcta

SEQ ID NO: 68458 - DNA, 24 bp, Artificial Sequence
  Synthetic oligonucleotide; TAAGAAA chr11 5264788 5264811 5264791 -
ctcagcttggtcattgctggtatg

SEQ ID NO: 68459 - DNA, 24 bp, Artificial Sequence
  Synthetic oligonucleotide; CCAGAAA chr11 5264751 5264774 5264754 -
cattggtgtacgttaattttgtat

SEQ ID NO: 68460 - DNA, 24 bp, Artificial Sequence
  Synthetic oligonucleotide; ACAGAAT chr11 5264519 5264542 5264522 -
tccttgtctcattccagttttcag

SEQ ID NO: 68461 - DNA, 24 bp, Artificial Sequence
  Synthetic oligonucleotide; ATAGAAT chr11 5264101 5264124 5264104 -
tggtattaaggtgatactggcttc

SEQ ID NO: 68462 - DNA, 24 bp, Artificial Sequence
  Synthetic oligonucleotide; GTAGAAT chr11 5264062 5264085 5264065 -
gaggattctctctttctctatctt

SEQ ID NO: 68463 - DNA, 24 bp, Artificial Sequence
  Synthetic oligonucleotide; GTAGAAT chr11 5264014 5264037 5264017 -
tatcaattcttctttgaatgtctg

SEQ ID NO: 68464 - DNA, 24 bp, Artificial Sequence
  Synthetic oligonucleotide; GCAGAAT chr11 5263346 5263369 5263349 -
tactttaagttctgggatacatgt

SEQ ID NO: 68465 - DNA, 24 bp, Artificial Sequence
  Synthetic oligonucleotide; TCAGAAT chr11 5263106 5263129 5263109 -
ttctctgttcctgtgttagtttgc

SEQ ID NO: 68466 - DNA, 24 bp, Artificial Sequence
  Synthetic oligonucleotide; GTAGAAT chr11 5262906 5262929 5262909 -
catacgtgtgcacgtgtctttata

SEQ ID NO: 68467 - DNA, 24 bp, Artificial Sequence
  Synthetic oligonucleotide; GGAGAAA chr11 5261082 5261105 5261085 -
gtggcatatcatatggcctatctt

SEQ ID NO: 68468 - DNA, 24 bp, Artificial Sequence
  Synthetic oligonucleotide; ATAGAAT chr11 5261058 5261081 5261061 -
ggagaaagttccatgtgctgatga

SEQ ID NO: 68469 - DNA, 24 bp, Artificial Sequence
  Synthetic oligonucleotide; GTAGAAT chr11 5261031 5261054 5261034 -
gaatgtgtattctgcagttgttgg

SEQ ID NO: 68470 - DNA, 24 bp, Artificial Sequence
  Synthetic oligonucleotide; TAAGAAT chr11 5260840 5260863 5260843 -
ctccagtattagatgcatatatat

SEQ ID NO: 68471 - DNA, 24 bp, Artificial Sequence
  Synthetic oligonucleotide; TAAGAAT chr11 5260735 5260758 5260738 -
ctttaaagtttgttttgtctgaca

SEQ ID NO: 68472 - DNA, 24 bp, Artificial Sequence
  Synthetic oligonucleotide; TGAGAAA chr11 5260186 5260209 5260189 -
acttctagcttttacggtttctgc

SEQ ID NO: 68473 - DNA, 24 bp, Artificial Sequence
  Synthetic oligonucleotide; CTAGAAA chr11 5259045 5259068 5259048 -
cctcctgccaggaggtggcacttt

SEQ ID NO: 68474 - DNA, 24 bp, Artificial Sequence
  Synthetic oligonucleotide; CAAGAAT chr11 5258979 5259002 5258982 -
ggggctggggcaccctagaactcc

SEQ ID NO: 68475 - DNA, 24 bp, Artificial Sequence
  Synthetic oligonucleotide; GCAGAAA chr11 5258430 5258453 5258433 -
cccaaatgacccctgtgaggcaag

SEQ ID NO: 68476 - DNA, 24 bp, Artificial Sequence
  Synthetic oligonucleotide; TCAGAAT chr11 5258321 5258344 5258324 -
aaattgactcagctccaggtaagg

SEQ ID NO: 68477 - DNA, 24 bp, Artificial Sequence
  Synthetic oligonucleotide; AAAGAAT chr11 5257757 5257780 5257760 -
gcatgacaagatttttaatagttg

SEQ ID NO: 68478 - DNA, 24 bp, Artificial Sequence
  Synthetic oligonucleotide; TTAGAAT chr11 5257684 5257707 5257687 -
acagttgtgataaacaggtcattc

SEQ ID NO: 68479 - DNA, 24 bp, Artificial Sequence
  Synthetic oligonucleotide; AAAGAAT chr11 5257154 5257177 5257157 -
aacaaatgtttgaaaatacatggg

SEQ ID NO: 68480 - DNA, 24 bp, Artificial Sequence
  Synthetic oligonucleotide; AAAGAAA chr11 5257119 5257142 5257122 -
gaaaacacttgaaattgcttgtgt

SEQ ID NO: 68481 - DNA, 24 bp, Artificial Sequence
  Synthetic oligonucleotide; GGAGAAA chr11 5257033 5257056 5257036 -
gaggaataagacagttatggataa

SEQ ID NO: 68482 - DNA, 24 bp, Artificial Sequence
  Synthetic oligonucleotide; CCAGAAT chr11 5256822 5256845 5256825 -
gagtggtggctcacgcctgtaatc

SEQ ID NO: 68483 - DNA, 24 bp, Artificial Sequence
  Synthetic oligonucleotide; GGAGAAT chr11 5256664 5256687 5256667 -
ccagctacttgggaggctgaggaa

SEQ ID NO: 68484 - DNA, 24 bp, Artificial Sequence
  Synthetic oligonucleotide; AGAGAAA chr11 5255975 5255998 5255978 -
ctaccaaggtcatggatcgagttc

SEQ ID NO: 68485 - DNA, 24 bp, Artificial Sequence
  Synthetic oligonucleotide; AAAGAAA chr11 5255927 5255950 5255930 -
aacctaccaaaaaataaaaatccc

SEQ ID NO: 68486 - DNA, 24 bp, Artificial Sequence
  Synthetic oligonucleotide; AAAGAAA chr11 5255916 5255939 5255919 -
aaataaaaatcccaaagaaaaaat

SEQ ID NO: 68487 - DNA, 24 bp, Artificial Sequence
  Synthetic oligonucleotide; TCAGAAA chr11 5255866 5255889 5255869 -
ctgccatgttaagtggccaatatg

SEQ ID NO: 68488 - DNA, 24 bp, Artificial Sequence
  Synthetic oligonucleotide; TTAGAAT chr11 5255727 5255750 5255730 -
ccatgcaaatacatgtcttatgtc

SEQ ID NO: 68489 - DNA, 24 bp, Artificial Sequence
  Synthetic oligonucleotide; GAAGAAA chr11 5255093 5255116 5255096 -
gtcctggtatcttctatggtggga

SEQ ID NO: 68490 - DNA, 24 bp, Artificial Sequence
  Synthetic oligonucleotide; GAAGAAT chr11 5255074 5255097 5255077 -
tgggagaagaaaactagctaaagg

SEQ ID NO: 68491 - DNA, 24 bp, Artificial Sequence
  Synthetic oligonucleotide; AGAGAAA chr11 5255062 5255085 5255065 -
actagctaaagggaagaataaatt

SEQ ID NO: 68492 - DNA, 24 bp, Artificial Sequence
  Synthetic oligonucleotide; GAAGAAT chr11 5254817 5254840 5254820 -
aggggccggcggctggctagggat

SEQ ID NO: 68493 - DNA, 24 bp, Artificial Sequence
  Synthetic oligonucleotide; GGAGAAA chr11 5254654 5254677 5254657 -
aaggtgaatgtggaagatgctgga

SEQ ID NO: 68494 - DNA, 24 bp, Artificial Sequence
  Synthetic oligonucleotide; GAAGAAA chr11 5254175 5254198 5254178 -
tttgaagatactggggttgggagt

SEQ ID NO: 68495 - DNA, 24 bp, Artificial Sequence
  Synthetic oligonucleotide; TGAGAAA chr11 5254079 5254102 5254082 -
aatctagatggacaactttgactt

SEQ ID NO: 68496 - DNA, 24 bp, Artificial Sequence
  Synthetic oligonucleotide; GTAGAAA chr11 5254027 5254050 5254030 -
atgacttttctttattagatttcg

SEQ ID NO: 68497 - DNA, 24 bp, Artificial Sequence
  Synthetic oligonucleotide; AAAGAAT chr11 5253361 5253384 5253364 -
accgttttggcaatccatttcggc

SEQ ID NO: 68498 - DNA, 24 bp, Artificial Sequence
  Synthetic oligonucleotide; AAAGAAA chr11 5253005 5253028 5253008 -
gagcaaataaaagaactaggcaat

SEQ ID NO: 68499 - DNA, 24 bp, Artificial Sequence
  Synthetic oligonucleotide; GGAGAAA chr11 5252958 5252981 5252961 -
ctgcaagtgggagtaaaaggtgca

SEQ ID NO: 68500 - DNA, 24 bp, Artificial Sequence
  Synthetic oligonucleotide; GAAGAAA chr11 5252943 5252966 5252946 -
aaaggtgcaggagaaatctggttg

SEQ ID NO: 68501 - DNA, 24 bp, Artificial Sequence
  Synthetic oligonucleotide; TCAGAAA chr11 5252914 5252937 5252917 -
aagacctctataggacaggactcc

SEQ ID NO: 68502 - DNA, 24 bp, Artificial Sequence
  Synthetic oligonucleotide; GAAGAAA chr11 5252815 5252838 5252818 -
acagcagcgaggaaggggctcaac

SEQ ID NO: 68503 - DNA, 24 bp, Artificial Sequence
  Synthetic oligonucleotide; GAAGAAT chr11 5252382 5252405 5252385 -
cacggtcagatgaaaatatagtgt

SEQ ID NO: 68504 - DNA, 24 bp, Artificial Sequence
  Synthetic oligonucleotide; CCAGAAA chr11 5252253 5252276 5252256 -
gttatgaacttaacgcttgtgtct

SEQ ID NO: 68505 - DNA, 24 bp, Artificial Sequence
  Synthetic oligonucleotide; ATAGAAT chr11 5252145 5252168 5252148 -
agctcatgagagcagatccccatc

SEQ ID NO: 68506 - DNA, 24 bp, Artificial Sequence
  Synthetic oligonucleotide; GCAGAAA chr11 5252028 5252051 5252031 -
gaagagagccctgaccaggaacca

SEQ ID NO: 68507 - DNA, 24 bp, Artificial Sequence
  Synthetic oligonucleotide; TGAGAAA chr11 5252019 5252042 5252022 -
cctgaccaggaaccagcagaaaag

SEQ ID NO: 68508 - DNA, 24 bp, Artificial Sequence
  Synthetic oligonucleotide; GAAGAAA chr11 5251943 5251966 5251946 -
caccttgcactaagtaaggcagat

SEQ ID NO: 68509 - DNA, 24 bp, Artificial Sequence
  Synthetic oligonucleotide; AGAGAAA chr11 5251937 5251960 5251940 -
gcactaagtaaggcagatgaagaa

SEQ ID NO: 68510 - DNA, 24 bp, Artificial Sequence
  Synthetic oligonucleotide; TTAGAAA chr11 5251905 5251928 5251908 -
aaataagcttcggtgttcagtgga

SEQ ID NO: 68511 - DNA, 24 bp, Artificial Sequence
  Synthetic oligonucleotide; TCAGAAT chr11 5251853 5251876 5251856 -
aaatctccacttgtcctctgtgtt

SEQ ID NO: 68512 - DNA, 24 bp, Artificial Sequence
  Synthetic oligonucleotide; AAAGAAT chr11 5251174 5251197 5251177 -
ctttacacaggatcatgaaggatg

SEQ ID NO: 68513 - DNA, 24 bp, Artificial Sequence
  Synthetic oligonucleotide; CCAGAAT chr11 5251085 5251108 5251088 -
aagatacagcttgcctccgataag

SEQ ID NO: 68514 - DNA, 24 bp, Artificial Sequence
  Synthetic oligonucleotide; AGAGAAA chr11 5251024 5251047 5251027 -
ggttagagatcatggatcactttc

SEQ ID NO: 68515 - DNA, 24 bp, Artificial Sequence
  Synthetic oligonucleotide; TCAGAAA chr11 5250936 5250959 5250939 -
ctaccctgttaatggtccaatatg

SEQ ID NO: 68516 - DNA, 24 bp, Artificial Sequence
  Synthetic oligonucleotide; TTAGAAA chr11 5250919 5250942 5250922 -
caatatgtcagaaacagcactgtg

SEQ ID NO: 68517 - DNA, 24 bp, Artificial Sequence
  Synthetic oligonucleotide; ATAGAAA chr11 5250460 5250483 5250463 -
ttactgcgctgaaactgtggcttt

SEQ ID NO: 68518 - DNA, 24 bp, Artificial Sequence
  Synthetic oligonucleotide; TGAGAAA chr11 5250435 5250458 5250438 -
tagaaattgttttcactgcactat

SEQ ID NO: 68519 - DNA, 24 bp, Artificial Sequence
  Synthetic oligonucleotide; TTAGAAA chr11 5250367 5250390 5250370 -
aaaaagaagtatagcactttttcc

SEQ ID NO: 68520 - DNA, 24 bp, Artificial Sequence
  Synthetic oligonucleotide; GAAGAAT chr11 5250146 5250169 5250149 -
tgggagaaggaaactagctaaagg

SEQ ID NO: 68521 - DNA, 24 bp, Artificial Sequence
  Synthetic oligonucleotide; AGAGAAA chr11 5250134 5250157 5250137 -
actagctaaagggaagaataaatt

SEQ ID NO: 68522 - DNA, 24 bp, Artificial Sequence
  Synthetic oligonucleotide; GAAGAAT chr11 5249893 5249916 5249896 -
aggggccggcggctggctagggat

SEQ ID NO: 68523 - DNA, 24 bp, Artificial Sequence
  Synthetic oligonucleotide; GGAGAAA chr11 5249730 5249753 5249733 -
aaggtgaatgtggaagatgctgga

SEQ ID NO: 68524 - DNA, 24 bp, Artificial Sequence
  Synthetic oligonucleotide; GAAGAAA chr11 5249251 5249274 5249254 -
tttgaagatactggggttgggggt

SEQ ID NO: 68525 - DNA, 24 bp, Artificial Sequence
  Synthetic oligonucleotide; TGAGAAA chr11 5249155 5249178 5249158 -
aatctagatggacaattttgactt

SEQ ID NO: 68526 - DNA, 24 bp, Artificial Sequence
  Synthetic oligonucleotide; GTAGAAA chr11 5249103 5249126 5249106 -
atgacttttctttattagattcca

SEQ ID NO: 68527 - DNA, 24 bp, Artificial Sequence
  Synthetic oligonucleotide; AAAGAAT chr11 5248443 5248466 5248446 -
accgttttggcaatccatttcggc

SEQ ID NO: 68528 - DNA, 24 bp, Artificial Sequence
  Synthetic oligonucleotide; GGAGAAA chr11 5248048 5248071 5248051 -
ctgcaagtgggagtaaatggtgta

SEQ ID NO: 68529 - DNA, 24 bp, Artificial Sequence
  Synthetic oligonucleotide; GAAGAAA chr11 5248033 5248056 5248036 -
aatggtgtaggagaaatccggtgg

SEQ ID NO: 68530 - DNA, 24 bp, Artificial Sequence
  Synthetic oligonucleotide; TCAGAAA chr11 5248004 5248027 5248007 -
aagacctctataggacaggacttc

SEQ ID NO: 68531 - DNA, 24 bp, Artificial Sequence
  Synthetic oligonucleotide; TAAGAAA chr11 5247791 5247814 5247794 -
cttttcacagcccttgtggatgcc

SEQ ID NO: 68532 - DNA, 24 bp, Artificial Sequence
  Synthetic oligonucleotide; TAAGAAA chr11 5247686 5247709 5247689 -
ctgggggaggtggggacttaggtg

SEQ ID NO: 68533 - DNA, 24 bp, Artificial Sequence
  Synthetic oligonucleotide; TGAGAAA chr11 5247636 5247659 5247639 -
aagtcagcatgagcatgttatgtc

SEQ ID NO: 68534 - DNA, 24 bp, Artificial Sequence
  Synthetic oligonucleotide; GAAGAAT chr11 5247597 5247620 5247600 -
cactgtgagatcaaaatgtagtgg

SEQ ID NO: 68535 - DNA, 24 bp, Artificial Sequence
  Synthetic oligonucleotide; TCAGAAA chr11 5247244 5247267 5247247 -
agaaccctgaccacgagtcagcct

SEQ ID NO: 68536 - DNA, 24 bp, Artificial Sequence
  Synthetic oligonucleotide; TGAGAAA chr11 5247235 5247258 5247238 -
accacgagtcagccttcagaaatg

SEQ ID NO: 68537 - DNA, 24 bp, Artificial Sequence
  Synthetic oligonucleotide; GGAGAAA chr11 5247153 5247176 5247156 -
gcactgagtaaggcagatgaagaa

SEQ ID NO: 68538 - DNA, 24 bp, Artificial Sequence
  Synthetic oligonucleotide; TCAGAAT chr11 5246878 5246901 5246881 -
tttctttcttttttctcctcagcc

SEQ ID NO: 68539 - DNA, 24 bp, Artificial Sequence
  Synthetic oligonucleotide; TCAGAAT chr11 5246773 5246796 5246776 -
acttcaaatgcagtcactaccgtt

SEQ ID NO: 68540 - DNA, 24 bp, Artificial Sequence
  Synthetic oligonucleotide; AAAGAAA chr11 5246703 5246726 5246706 -
tcaaagcaaatttcttgagagagt

SEQ ID NO: 68541 - DNA, 24 bp, Artificial Sequence
  Synthetic oligonucleotide; GAAGAAT chr11 5246378 5246401 5246381 -
actctggatattaggcctttgtca

SEQ ID NO: 68542 - DNA, 24 bp, Artificial Sequence
  Synthetic oligonucleotide; AGAGAAT chr11 5245863 5245886 5245866 -
actatagtgagggcaccattagcc

SEQ ID NO: 68543 - DNA, 24 bp, Artificial Sequence
  Synthetic oligonucleotide; TCAGAAT chr11 5245830 5245853 5245833 -
gtctgtctagttcatgtaagattc

SEQ ID NO: 68544 - DNA, 24 bp, Artificial Sequence
  Synthetic oligonucleotide; TAAGAAA chr11 5245823 5245846 5245826 -
tagttcatgtaagattctcagaat

SEQ ID NO: 68545 - DNA, 24 bp, Artificial Sequence
  Synthetic oligonucleotide; CAAGAAA chr11 5245621 5245644 5245624 -
ttggaaatggggaacagccacaaa

SEQ ID NO: 68546 - DNA, 24 bp, Artificial Sequence
  Synthetic oligonucleotide; AAAGAAT chr11 5245617 5245640 5245620 -
aaatggggaacagccacaaacaag

SEQ ID NO: 68547 - DNA, 24 bp, Artificial Sequence
  Synthetic oligonucleotide; AGAGAAA chr11 5245562 5245585 5245565 -
aggtcacttttcctggagcgggtg

SEQ ID NO: 68548 - DNA, 24 bp, Artificial Sequence
  Synthetic oligonucleotide; ACAGAAA chr11 5245437 5245460 5245440 -
taaggatatgaggtatggcaatga

SEQ ID NO: 68549 - DNA, 24 bp, Artificial Sequence
  Synthetic oligonucleotide; TCAGAAA chr11 5245162 5245185 5245165 -
gactaaaatattgtgtctctaata

SEQ ID NO: 68550 - DNA, 24 bp, Artificial Sequence
  Synthetic oligonucleotide; TAAGAAT chr11 5244997 5245020 5245000 -
tctaagtatgaggacagtaagcct

SEQ ID NO: 68551 - DNA, 24 bp, Artificial Sequence
  Synthetic oligonucleotide; GAAGAAT chr11 5244863 5244886 5244866 -
agcagcctgtggaatattgtcagt

SEQ ID NO: 68552 - DNA, 24 bp, Artificial Sequence
  Synthetic oligonucleotide; GGAGAAT chr11 5244280 5244303 5244283 -
ccagctactcgggaggctgaggca

SEQ ID NO: 68553 - DNA, 24 bp, Artificial Sequence
  Synthetic oligonucleotide; AAAGAAA chr11 5244168 5244191 5244171 -
ccatctcaaaaaaaaaaaaaaaaa

SEQ ID NO: 68554 - DNA, 24 bp, Artificial Sequence
  Synthetic oligonucleotide; AAAGAAA chr11 5244162 5244185 5244165 -
caaaaaaaaaaaaaaaaaaaagaa

SEQ ID NO: 68555 - DNA, 24 bp, Artificial Sequence
  Synthetic oligonucleotide; AAAGAAA chr11 5244158 5244181 5244161 -
aaaaaaaaaaaaaaaaagaaaaag

SEQ ID NO: 68556 - DNA, 24 bp, Artificial Sequence
  Synthetic oligonucleotide; AAAGAAA chr11 5244154 5244177 5244157 -
aaaaaaaaaaaaagaaaaagaaag

SEQ ID NO: 68557 - DNA, 24 bp, Artificial Sequence
  Synthetic oligonucleotide; AAAGAAA chr11 5244150 5244173 5244153 -
aaaaaaaaagaaaaagaaagaaag

SEQ ID NO: 68558 - DNA, 24 bp, Artificial Sequence
  Synthetic oligonucleotide; AGAGAAT chr11 5244106 5244129 5244109 -
aattgtgtattcaatgtagtctca

SEQ ID NO: 68559 - DNA, 24 bp, Artificial Sequence
  Synthetic oligonucleotide; CAAGAAA chr11 5244092 5244115 5244095 -
tgtagtctcaagagaattgaaaac

SEQ ID NO: 68560 - DNA, 24 bp, Artificial Sequence
  Synthetic oligonucleotide; TGAGAAA chr11 5243908 5243931 5243911 -
attagcggctgctggcgaagtcct

SEQ ID NO: 68561 - DNA, 24 bp, Artificial Sequence
  Synthetic oligonucleotide; TCAGAAA chr11 5243789 5243812 5243792 -
cctgagaaggccacctggattcta

SEQ ID NO: 68562 - DNA, 24 bp, Artificial Sequence
  Synthetic oligonucleotide; GCAGAAA chr11 5243424 5243447 5243427 -
aggtactggaagccgggacaaggt

SEQ ID NO: 68563 - DNA, 24 bp, Artificial Sequence
  Synthetic oligonucleotide; GCAGAAA chr11 5243416 5243439 5243419 -
gaagccgggacaaggtgcagaaag

SEQ ID NO: 68564 - DNA, 24 bp, Artificial Sequence
  Synthetic oligonucleotide; AGAGAAA chr11 5242808 5242831 5242811 -
ggatgagggaacagaagttgagat

SEQ ID NO: 68565 - DNA, 24 bp, Artificial Sequence
  Synthetic oligonucleotide; TTAGAAA chr11 5242729 5242752 5242732 -
cacttttctgcatagtcctggagg

SEQ ID NO: 68566 - DNA, 24 bp, Artificial Sequence
  Synthetic oligonucleotide; ATAGAAT chr11 5241984 5242007 5241987 -
tgattcagttcctgcatgataaaa

SEQ ID NO: 68567 - DNA, 24 bp, Artificial Sequence
  Synthetic oligonucleotide; AAAGAAA chr11 5241977 5242000 5241980 -
gttcctgcatgataaaaatagaat

SEQ ID NO: 68568 - DNA, 24 bp, Artificial Sequence
  Synthetic oligonucleotide; TAAGAAA chr11 5241961 5241984 5241964 -
aatagaataaagaaatatgctctc

SEQ ID NO: 68569 - DNA, 24 bp, Artificial Sequence
  Synthetic oligonucleotide; TGAGAAT chr11 5241880 5241903 5241883 -
aggacgcactatttctgatggaaa

SEQ ID NO: 68570 - DNA, 24 bp, Artificial Sequence
  Synthetic oligonucleotide; GGAGAAT chr11 5241870 5241893 5241873 -
atttctgatggaaatgagaatgtt

SEQ ID NO: 68571 - DNA, 24 bp, Artificial Sequence
  Synthetic oligonucleotide; CAAGAAA chr11 5241823 5241846 5241826 -
agaagatactttcttgcaatcctg

SEQ ID NO: 68572 - DNA, 24 bp, Artificial Sequence
  Synthetic oligonucleotide; CTAGAAT chr11 5241757 5241780 5241760 -
actcctaggaaggggaaatcgtct

SEQ ID NO: 68573 - DNA, 24 bp, Artificial Sequence
  Synthetic oligonucleotide; ACAGAAA chr11 5241736 5241759 5241739 -
tctctagaataagacaatgttttt

SEQ ID NO: 68574 - DNA, 24 bp, Artificial Sequence
  Synthetic oligonucleotide; AGAGAAT chr11 5241464 5241487 5241467 -
cttaacgtcttcaatggtattaat

SEQ ID NO: 68575 - DNA, 24 bp, Artificial Sequence
  Synthetic oligonucleotide; GGAGAAT chr11 5241012 5241035 5241015 -
agcacgttaagtcaagttgataga

SEQ ID NO: 68576 - DNA, 24 bp, Artificial Sequence
  Synthetic oligonucleotide; TAAGAAA chr11 5240940 5240963 5240943 -
actggatgcagagaccagatgaag

SEQ ID NO: 68577 - DNA, 24 bp, Artificial Sequence
  Synthetic oligonucleotide; GTAGAAA chr11 5240862 5240885 5240865 -
gagtgacataataaatagggaaac

SEQ ID NO: 68578 - DNA, 24 bp, Artificial Sequence
  Synthetic oligonucleotide; TAAGAAA chr11 5240726 5240749 5240729 -
tgaagttgatggaaacaatgaagt

SEQ ID NO: 68579 - DNA, 24 bp, Artificial Sequence
  Synthetic oligonucleotide; AAAGAAA chr11 5240467 5240490 5240470 -
tagcaccctcaaacctaaaacctc

SEQ ID NO: 68580 - DNA, 24 bp, Artificial Sequence
  Synthetic oligonucleotide; GCAGAAT chr11 5240253 5240276 5240256 -
gagtccccactaataacccacaaa

SEQ ID NO: 68581 - DNA, 24 bp, Artificial Sequence
  Synthetic oligonucleotide; AGAGAAT chr11 5239761 5239784 5239764 -
tgacaaaattaccccagtcaatct

SEQ ID NO: 68582 - DNA, 24 bp, Artificial Sequence
  Synthetic oligonucleotide; TCAGAAT chr11 5239201 5239224 5239204 -
gcatgtgtcatgcatttattcaca

SEQ ID NO: 68583 - DNA, 24 bp, Artificial Sequence
  Synthetic oligonucleotide; CTAGAAT chr11 5239097 5239120 5239100 -
acaaaccattatcagttactcaac

SEQ ID NO: 68584 - DNA, 24 bp, Artificial Sequence
  Synthetic oligonucleotide; GCAGAAA chr11 5239023 5239046 5239026 -
ctaaaatatcaaataaaggacagt

SEQ ID NO: 68585 - DNA, 24 bp, Artificial Sequence
  Synthetic oligonucleotide; TCAGAAA chr11 5238999 5239022 5239002 -
gcagaaatctagatgttagtaaca

SEQ ID NO: 68586 - DNA, 24 bp, Artificial Sequence
  Synthetic oligonucleotide; GGAGAAA chr11 5238959 5238982 5238962 -
gccattaggcctagaagggcagaa

SEQ ID NO: 68587 - DNA, 24 bp, Artificial Sequence
  Synthetic oligonucleotide; CCAGAAA chr11 5238770 5238793 5238773 -
gatccgttcagagagagagagaga

SEQ ID NO: 68588 - DNA, 24 bp, Artificial Sequence
  Synthetic oligonucleotide; GCAGAAT chr11 5238723 5238746 5238726 -
ttccctcagccagtgtttaccatt

SEQ ID NO: 68589 - DNA, 24 bp, Artificial Sequence
  Synthetic oligonucleotide; TGAGAAA chr11 5238642 5238665 5238645 -
atacagagaacactgagggaagga

SEQ ID NO: 68590 - DNA, 24 bp, Artificial Sequence
  Synthetic oligonucleotide; ACAGAAT chr11 5238510 5238533 5238513 -
gtattgataagataatatgaaaac

SEQ ID NO: 68591 - DNA, 24 bp, Artificial Sequence
  Synthetic oligonucleotide; TTAGAAT chr11 5238482 5238505 5238485 -
aattcaaacagcagtgaactgaga

SEQ ID NO: 68592 - DNA, 24 bp, Artificial Sequence
  Synthetic oligonucleotide; TAAGAAT chr11 5238456 5238479 5238459 -
agaattgtggagagcactggcatt

SEQ ID NO: 68593 - DNA, 24 bp, Artificial Sequence
  Synthetic oligonucleotide; TTAGAAT chr11 5238442 5238465 5238445 -
cactggcatttaagaatgtcacac

SEQ ID NO: 68594 - DNA, 24 bp, Artificial Sequence
  Synthetic oligonucleotide; CAAGAAT chr11 5238026 5238049 5238029 -
caggcgtgagccaccacacccagc

SEQ ID NO: 68595 - DNA, 24 bp, Artificial Sequence
  Synthetic oligonucleotide; GGAGAAT chr11 5237061 5237084 5237064 -
ccagctattcaggtggctgaggca

SEQ ID NO: 68596 - DNA, 24 bp, Artificial Sequence
  Synthetic oligonucleotide; AGAGAAA chr11 5236964 5236987 5236967 -
atagggatgaaactccatctcaga

SEQ ID NO: 68597 - DNA, 24 bp, Artificial Sequence
  Synthetic oligonucleotide; AAAGAAA chr11 5236959 5236982 5236962 -
gatgaaactccatctcagaagaga

SEQ ID NO: 68598 - DNA, 24 bp, Artificial Sequence
  Synthetic oligonucleotide; ATAGAAT chr11 5236908 5236931 5236911 -
acaaatcctctcaatgcaatccat

SEQ ID NO: 68599 - DNA, 24 bp, Artificial Sequence
  Synthetic oligonucleotide; ACAGAAT chr11 5236855 5236878 5236858 -
atgtgtaaaatcatttcaggtaga

SEQ ID NO: 68600 - DNA, 24 bp, Artificial Sequence
  Synthetic oligonucleotide; TAAGAAT chr11 5236785 5236808 5236788 -
atcaaataacagtcctcatggcct

SEQ ID NO: 68601 - DNA, 24 bp, Artificial Sequence
  Synthetic oligonucleotide; TTAGAAT chr11 5236762 5236785 5236765 -
ttaagaatttacctaacatttttt

SEQ ID NO: 68602 - DNA, 24 bp, Artificial Sequence
  Synthetic oligonucleotide; ATAGAAA chr11 5236395 5236418 5236398 -
caccgtcatggtccaagtctgata

SEQ ID NO: 68603 - DNA, 24 bp, Artificial Sequence
  Synthetic oligonucleotide; TGAGAAT chr11 5236299 5236322 5236302 -
tctaaaatacatttcttcactaag

SEQ ID NO: 68604 - DNA, 24 bp, Artificial Sequence
  Synthetic oligonucleotide; ACAGAAA chr11 5236215 5236238 5236218 -
atatctttcgttggcttccaggtt

SEQ ID NO: 68605 - DNA, 24 bp, Artificial Sequence
  Synthetic oligonucleotide; TCAGAAT chr11 5236135 5236158 5236138 -
attttataacatttccccttgtga

SEQ ID NO: 68606 - DNA, 24 bp, Artificial Sequence
  Synthetic oligonucleotide; TCAGAAA chr11 5235352 5235375 5235355 -
ctgccattgtggcattatttgaat

SEQ ID NO: 68607 - DNA, 24 bp, Artificial Sequence
  Synthetic oligonucleotide; GAAGAAT chr11 5234987 5235010 5234990 -
taaaaaattagagttttattatag

SEQ ID NO: 68608 - DNA, 24 bp, Artificial Sequence
  Synthetic oligonucleotide; ACAGAAA chr11 5234809 5234832 5234812 -
gataagttttcttagtataaagtg

SEQ ID NO: 68609 - DNA, 24 bp, Artificial Sequence
  Synthetic oligonucleotide; TTAGAAA chr11 5234723 5234746 5234726 -
aaaaatgaaactaggaggatattt

SEQ ID NO: 68610 - DNA, 24 bp, Artificial Sequence
  Synthetic oligonucleotide; TTAGAAT chr11 5233695 5233718 5233698 -
agctctcacctgctaattctgcac

SEQ ID NO: 68611 - DNA, 24 bp, Artificial Sequence
  Synthetic oligonucleotide; ATAGAAT chr11 5233631 5233654 5233634 -
ggctccaactcaaagatgagaggc

SEQ ID NO: 68612 - DNA, 24 bp, Artificial Sequence
  Synthetic oligonucleotide; GCAGAAA chr11 5233187 5233210 5233190 -
ggatcagttttgtctaagatttgg

SEQ ID NO: 68613 - DNA, 24 bp, Artificial Sequence
  Synthetic oligonucleotide; AAAGAAT chr11 5232856 5232879 5232859 -
tcaagggtatggcttctgcctaat

SEQ ID NO: 68614 - DNA, 24 bp, Artificial Sequence
  Synthetic oligonucleotide; AGAGAAA chr11 5232728 5232751 5232731 -
attttacaaagagtacatgggaaa

SEQ ID NO: 68615 - DNA, 24 bp, Artificial Sequence
  Synthetic oligonucleotide; GCAGAAA chr11 5232670 5232693 5232673 -
gggtgacacttctacctccaaaga

SEQ ID NO: 68616 - DNA, 24 bp, Artificial Sequence
  Synthetic oligonucleotide; TGAGAAA chr11 5232549 5232572 5232552 -
ctacgattaaactccaacaattac

SEQ ID NO: 68617 - DNA, 24 bp, Artificial Sequence
  Synthetic oligonucleotide; CAAGAAA chr11 5232421 5232444 5232424 -
ataccccatcaagtgttcctgctc

SEQ ID NO: 68618 - DNA, 24 bp, Artificial Sequence
  Synthetic oligonucleotide; AAAGAAT chr11 5232377 5232400 5232380 -
ttacttgccccagaacatctctgt

SEQ ID NO: 68619 - DNA, 24 bp, Artificial Sequence
  Synthetic oligonucleotide; GCAGAAA chr11 5232113 5232136 5232116 -
gcctcatattaaattcatcaatgg

SEQ ID NO: 68620 - DNA, 24 bp, Artificial Sequence
  Synthetic oligonucleotide; AAAGAAA chr11 5232109 5232132 5232112 -
catattaaattcatcaatgggcag

SEQ ID NO: 68621 - DNA, 24 bp, Artificial Sequence
  Synthetic oligonucleotide; CAAGAAA chr11 5232093 5232116 5232096 -
atgggcagaaagaaaatatttatt

SEQ ID NO: 68622 - DNA, 24 bp, Artificial Sequence
  Synthetic oligonucleotide; ACAGAAT chr11 5231756 5231779 5231759 -
ttttaaacttacttgaatacctaa

SEQ ID NO: 68623 - DNA, 24 bp, Artificial Sequence
  Synthetic oligonucleotide; CCAGAAT chr11 5231697 5231720 5231700 -
ttcacagtaactctgtctgtactg

SEQ ID NO: 68624 - DNA, 24 bp, Artificial Sequence
  Synthetic oligonucleotide; AGAGAAT chr11 5231237 5231260 5231240 -
gttggccctaaaaatccaaatacc

SEQ ID NO: 68625 - DNA, 24 bp, Artificial Sequence
  Synthetic oligonucleotide; GGAGAAT chr11 5230599 5230622 5230602 -
tttcaataaaataatttaatgtca

SEQ ID NO: 68626 - DNA, 24 bp, Artificial Sequence
  Synthetic oligonucleotide; TAAGAAA chr11 5230253 5230276 5230256 -
tatgttgactttattgctttttgg

SEQ ID NO: 68627 - DNA, 24 bp, Artificial Sequence
  Synthetic oligonucleotide; TAAGAAA chr11 5229826 5229849 5229829 -
attctgatataaaacattaggact

SEQ ID NO: 68628 - DNA, 24 bp, Artificial Sequence
  Synthetic oligonucleotide; GTAGAAT chr11 5229695 5229718 5229698 -
gtggtcagtggggctggaataaaa

SEQ ID NO: 68629 - DNA, 24 bp, Artificial Sequence
  Synthetic oligonucleotide; ATAGAAA chr11 5229445 5229468 5229448 -
tgtccctgcagggtattatgggta

SEQ ID NO: 68630 - DNA, 24 bp, Artificial Sequence
  Synthetic oligonucleotide; AAAGAAA chr11 5229441 5229464 5229444 -
cctgcagggtattatgggtaatag

SEQ ID NO: 68631 - DNA, 24 bp, Artificial Sequence
  Synthetic oligonucleotide; AAAGAAA chr11 5229306 5229329 5229309 -
aggatccatagttcatcatttaaa

SEQ ID NO: 68632 - DNA, 24 bp, Artificial Sequence
  Synthetic oligonucleotide; ATAGAAA chr11 5229294 5229317 5229297 -
tcatcatttaaaaaagaaaacaaa

SEQ ID NO: 68633 - DNA, 24 bp, Artificial Sequence
  Synthetic oligonucleotide; TCAGAAT chr11 5229180 5229203 5229183 -
tcttgctttgacaattttggtctt

SEQ ID NO: 68634 - DNA, 24 bp, Artificial Sequence
  Synthetic oligonucleotide; AAAGAAA chr11 5228811 5228834 5228814 -
ttttttacagaggaatgaatataa

SEQ ID NO: 68635 - DNA, 24 bp, Artificial Sequence
  Synthetic oligonucleotide; TGAGAAT chr11 5228701 5228724 5228704 -
agaaccaaacactttctgcgtgtg

SEQ ID NO: 68636 - DNA, 24 bp, Artificial Sequence
  Synthetic oligonucleotide; GTAGAAA chr11 5228647 5228670 5228650 -
agtacctgatgagggttgagacag

SEQ ID NO: 68637 - DNA, 24 bp, Artificial Sequence
  Synthetic oligonucleotide; AGAGAAA chr11 5228608 5228631 5228611 -
gatctctatttatttagcaataat

SEQ ID NO: 68638 - DNA, 24 bp, Artificial Sequence
  Synthetic oligonucleotide; AGAGAAT chr11 5228594 5228617 5228597 -
tagcaataatagagaaagcattta

SEQ ID NO: 68639 - DNA, 24 bp, Artificial Sequence
  Synthetic oligonucleotide; TAAGAAA chr11 5228574 5228597 5228577 -
tttaagagaataaagcaatggaaa

SEQ ID NO: 68640 - DNA, 24 bp, Artificial Sequence
  Synthetic oligonucleotide; CTAGAAA chr11 5228545 5228568 5228548 -
aatttgtaaatttccttctgataa

SEQ ID NO: 68641 - DNA, 24 bp, Artificial Sequence
  Synthetic oligonucleotide; GGAGAAA chr11 5228415 5228438 5228418 -
tgttagagctgaaaggaagaagta

SEQ ID NO: 68642 - DNA, 24 bp, Artificial Sequence
  Synthetic oligonucleotide; GGAGAAA chr11 5228162 5228185 5228165 -
aaggggaaaaagtacagggggatg

SEQ ID NO: 68643 - DNA, 24 bp, Artificial Sequence
  Synthetic oligonucleotide; AGAGAAA chr11 5228133 5228156 5228136 -
aaggcgatcacgttgggaagctat

SEQ ID NO: 68644 - DNA, 24 bp, Artificial Sequence
  Synthetic oligonucleotide; AGAGAAA chr11 5228081 5228104 5228084 -
gaggtttaaacaaacaaaatataa

SEQ ID NO: 68645 - DNA, 24 bp, Artificial Sequence
  Synthetic oligonucleotide; GCAGAAA chr11 5227912 5227935 5227915 -
agacactcttgcagattagtccag

SEQ ID NO: 68646 - DNA, 24 bp, Artificial Sequence
  Synthetic oligonucleotide; TAAGAAA chr11 5227674 5227697 5227677 -
atttattagcatgcatgagcaaat

SEQ ID NO: 68647 - DNA, 24 bp, Artificial Sequence
  Synthetic oligonucleotide; TAAGAAA chr11 5227396 5227419 5227399 -
tgcatcaacttcttatttgtgtaa

SEQ ID NO: 68648 - DNA, 24 bp, Artificial Sequence
  Synthetic oligonucleotide; ATAGAAA chr11 5226892 5226915 5226895 -
tacaagacaggtttaaggagacca

SEQ ID NO: 68649 - DNA, 24 bp, Artificial Sequence
  Synthetic oligonucleotide; CAAGAAA chr11 5226698 5226721 5226701 -
caaccctaaggtgaaggctcatgg

SEQ ID NO: 68650 - DNA, 24 bp, Artificial Sequence
  Synthetic oligonucleotide; TTAGAAT chr11 5226486 5226509 5226489 -
aggggataagtaacagggtacagt

SEQ ID NO: 68651 - DNA, 24 bp, Artificial Sequence
  Synthetic oligonucleotide; AAAGAAT chr11 5225956 5225979 5225959 -
tatcatgcctctttgcaccattct

SEQ ID NO: 68652 - DNA, 24 bp, Artificial Sequence
  Synthetic oligonucleotide; AAAGAAT chr11 5225682 5225705 5225685 -
tgtgtgctggcccatcactttggc

SEQ ID NO: 68653 - DNA, 24 bp, Artificial Sequence
  Synthetic oligonucleotide; TCAGAAA chr11 5225650 5225673 5225653 -
caccccaccagtgcaggctgccta

SEQ ID NO: 68654 - DNA, 24 bp, Artificial Sequence
  Synthetic oligonucleotide; AAAGAAA chr11 5225394 5225417 5225397 -
gggaggtcagtgcatttaaaacat

SEQ ID NO: 68655 - DNA, 24 bp, Artificial Sequence
  Synthetic oligonucleotide; TCAGAAA chr11 5225265 5225288 5225268 -
tgatgcatatgccttattcatccc

SEQ ID NO: 68656 - DNA, 24 bp, Artificial Sequence
  Synthetic oligonucleotide; GAAGAAT chr11 5224828 5224851 5224831 -
cttagtatgaaaagttaggactga

SEQ ID NO: 68657 - DNA, 24 bp, Artificial Sequence
  Synthetic oligonucleotide; GAAGAAT chr11 5224444 5224467 5224447 -
taagtgatgatagaagggtatata

SEQ ID NO: 68658 - DNA, 24 bp, Artificial Sequence
  Synthetic oligonucleotide; AAAGAAT chr11 5224349 5224372 5224352 -
aacaaaaataaatttgaatgggtt

SEQ ID NO: 68659 - DNA, 24 bp, Artificial Sequence
  Synthetic oligonucleotide; AAAGAAA chr11 5224311 5224334 5224314 -
agacctaaaaccataaaaattttt

SEQ ID NO: 68660 - DNA, 24 bp, Artificial Sequence
  Synthetic oligonucleotide; GAAGAAA chr11 5224298 5224321 5224301 -
taaaaatttttaaagaaatcaaaa

SEQ ID NO: 68661 - DNA, 24 bp, Artificial Sequence
  Synthetic oligonucleotide; TAAGAAA chr11 5224086 5224109 5224089 -
attttggttaatatccaaaatata

SEQ ID NO: 68662 - DNA, 24 bp, Artificial Sequence
  Synthetic oligonucleotide; GAAGAAA chr11 5224021 5224044 5224024 -
ataggaaaataaaaaaattaaaaa

SEQ ID NO: 68663 - DNA, 24 bp, Artificial Sequence
  Synthetic oligonucleotide; GCAGAAT chr11 5223999 5224022 5224002 -
aagaagaaaatcctgccatttatg

SEQ ID NO: 68664 - DNA, 24 bp, Artificial Sequence
  Synthetic oligonucleotide; TAAGAAA chr11 5223968 5223991 5223971 -
tgatgaacctggaggatgtaaaac

SEQ ID NO: 68665 - DNA, 24 bp, Artificial Sequence
  Synthetic oligonucleotide; GGAGAAT chr11 5223846 5223869 5223849 -
tatggtttccaggggttgggggtg

SEQ ID NO: 68666 - DNA, 24 bp, Artificial Sequence
  Synthetic oligonucleotide; CAAGAAA chr11 5223408 5223431 5223411 -
agtagatcttaaaagcatttacca

SEQ ID NO: 68667 - DNA, 24 bp, Artificial Sequence
  Synthetic oligonucleotide; GAAGAAT chr11 5223260 5223283 5223263 -
tgtgaatgatacctcaataaagtt

SEQ ID NO: 68668 - DNA, 24 bp, Artificial Sequence
  Synthetic oligonucleotide; AAAGAAT chr11 5223247 5223270 5223250 -
tcaataaagttgaagaataataaa

SEQ ID NO: 68669 - DNA, 24 bp, Artificial Sequence
  Synthetic oligonucleotide; TTAGAAT chr11 5223189 5223212 5223192 -
aaataaaaaaatgcatcttgatga

SEQ ID NO: 68670 - DNA, 24 bp, Artificial Sequence
  Synthetic oligonucleotide; GAAGAAA chr11 5222999 5223022 5223002 -
tttctagtgttattattaaatagt

SEQ ID NO: 68671 - DNA, 24 bp, Artificial Sequence
  Synthetic oligonucleotide; ATAGAAA chr11 5222777 5222800 5222780 -
tgtgtaagtaagatagtggaataa

SEQ ID NO: 68672 - DNA, 24 bp, Artificial Sequence
  Synthetic oligonucleotide; CTAGAAT chr11 5222575 5222598 5222578 -
aggtaaaattcagtcacgaaaaaa

SEQ ID NO: 68673 - DNA, 24 bp, Artificial Sequence
  Synthetic oligonucleotide; GTAGAAA chr11 5222504 5222527 5222507 -
ctgttatttaattatcaacccaaa

SEQ ID NO: 68674 - DNA, 24 bp, Artificial Sequence
  Synthetic oligonucleotide; GGAGAAA chr11 5222489 5222512 5222492 -
caacccaaagtagaaactatcaag

SEQ ID NO: 68675 - DNA, 24 bp, Artificial Sequence
  Synthetic oligonucleotide; GGAGAAT chr11 5222253 5222276 5222256 -
ccagcaatttgggaggctgaggca

SEQ ID NO: 68676 - DNA, 24 bp, Artificial Sequence
  Synthetic oligonucleotide; AAAGAAA chr11 5222153 5222176 5222156 -
gcatgagactccgtcacaaaaaaa

SEQ ID NO: 68677 - DNA, 24 bp, Artificial Sequence
  Synthetic oligonucleotide; AAAGAAA chr11 5221891 5221914 5221894 -
gtcagggaattccctttcctagtc

SEQ ID NO: 68678 - DNA, 24 bp, Artificial Sequence
  Synthetic oligonucleotide; ACAGAAA chr11 5221179 5221202 5221182 -
gactgttagaaggaaaactaacaa

SEQ ID NO: 68679 - DNA, 24 bp, Artificial Sequence
  Synthetic oligonucleotide; GCAGAAA chr11 5221086 5221109 5221089 -
ccataaagatggggaaaaagcaga

SEQ ID NO: 68680 - DNA, 24 bp, Artificial Sequence
  Synthetic oligonucleotide; AGAGAAT chr11 5220998 5221021 5221001 -
accagcaatggaacaaagctgggc

SEQ ID NO: 68681 - DNA, 24 bp, Artificial Sequence
  Synthetic oligonucleotide; CTAGAAT chr11 5220870 5220893 5220873 -
aaaaaaaattagatgaatggataa

SEQ ID NO: 68682 - DNA, 24 bp, Artificial Sequence
  Synthetic oligonucleotide; GAAGAAA chr11 5220760 5220783 5220763 -
ctcagtaaccgatgagatcaactg

SEQ ID NO: 68683 - DNA, 24 bp, Artificial Sequence
  Synthetic oligonucleotide; AGAGAAA chr11 5220700 5220723 5220703 -
gaaatgaagcatgaagagaagttt

SEQ ID NO: 68684 - DNA, 24 bp, Artificial Sequence
  Synthetic oligonucleotide; AAAGAAT chr11 5220693 5220716 5220696 -
agcatgaagagaagtttagagaaa

SEQ ID NO: 68685 - DNA, 24 bp, Artificial Sequence
  Synthetic oligonucleotide; AAAGAAA chr11 5220684 5220707 5220687 -
agaagtttagagaaaaaagaataa

SEQ ID NO: 68686 - DNA, 24 bp, Artificial Sequence
  Synthetic oligonucleotide; CAAGAAA chr11 5220664 5220687 5220667 -
ataaaaagaaacgaacaaagcctc

SEQ ID NO: 68687 - DNA, 24 bp, Artificial Sequence
  Synthetic oligonucleotide; GGAGAAT chr11 5220599 5220622 5220602 -
aattggtgtagctgaaagtgatgg

SEQ ID NO: 68688 - DNA, 24 bp, Artificial Sequence
  Synthetic oligonucleotide; AGAGAAA chr11 5220477 5220500 5220480 -
agagaacgccacaaagatactcct

SEQ ID NO: 68689 - DNA, 24 bp, Artificial Sequence
  Synthetic oligonucleotide; AGAGAAA chr11 5220398 5220421 5220401 -
ggaaaaaatgttaagggcagccag

SEQ ID NO: 68690 - DNA, 24 bp, Artificial Sequence
  Synthetic oligonucleotide; GCAGAAA chr11 5220340 5220363 5220343 -
atcagactaacagctgatctatcg

SEQ ID NO: 68691 - DNA, 24 bp, Artificial Sequence
  Synthetic oligonucleotide; GAAGAAA chr11 5220321 5220344 5220324 -
tatcggcagaaactctacaagcca

SEQ ID NO: 68692 - DNA, 24 bp, Artificial Sequence
  Synthetic oligonucleotide; AAAGAAA chr11 5220289 5220312 5220292 -
tgggggccaatattcaacattgtt

SEQ ID NO: 68693 - DNA, 24 bp, Artificial Sequence
  Synthetic oligonucleotide; AAAGAAT chr11 5220284 5220307 5220287 -
gccaatattcaacattgttaaaga

SEQ ID NO: 68694 - DNA, 24 bp, Artificial Sequence
  Synthetic oligonucleotide; CCAGAAT chr11 5220270 5220293 5220273 -
ttgttaaagaaaagaattttcaac

SEQ ID NO: 68695 - DNA, 24 bp, Artificial Sequence
  Synthetic oligonucleotide; GGAGAAA chr11 5220229 5220252 5220232 -
gccaaactaagcttcataagtgaa

SEQ ID NO: 68696 - DNA, 24 bp, Artificial Sequence
  Synthetic oligonucleotide; GAAGAAA chr11 5220069 5220092 5220072 -
aattgtaaagaccatcaaggctag

SEQ ID NO: 68697 - DNA, 24 bp, Artificial Sequence
  Synthetic oligonucleotide; ACAGAAA chr11 5219553 5219576 5219556 -
gtcaacattagacagatcaacgag

SEQ ID NO: 68698 - DNA, 24 bp, Artificial Sequence
  Synthetic oligonucleotide; ACAGAAT chr11 5219462 5219485 5219465 -
tacagaactctccaccccaaatca

SEQ ID NO: 68699 - DNA, 24 bp, Artificial Sequence
  Synthetic oligonucleotide; ACAGAAA chr11 5219369 5219392 5219372 -
gctctcctcagcaaatgtaaaaga

SEQ ID NO: 68700 - DNA, 24 bp, Artificial Sequence
  Synthetic oligonucleotide; TAAGAAA chr11 5219310 5219333 5219313 -
tgcaatcaaactagaactcaggat

SEQ ID NO: 68701 - DNA, 24 bp, Artificial Sequence
  Synthetic oligonucleotide; GCAGAAA chr11 5219225 5219248 5219228 -
tactgggtacataacaaaatgaag

SEQ ID NO: 68702 - DNA, 24 bp, Artificial Sequence
  Synthetic oligonucleotide; CCAGAAT chr11 5219175 5219198 5219178 -
caacgagaacaaagacacaacaca

SEQ ID NO: 68703 - DNA, 24 bp, Artificial Sequence
  Synthetic oligonucleotide; CAAGAAA chr11 5219016 5219039 5219019 -
acacattcaaaagctaacagaaga

SEQ ID NO: 68704 - DNA, 24 bp, Artificial Sequence
  Synthetic oligonucleotide; GAAGAAA chr11 5218880 5218903 5218883 -
tagactgctagcaagactaataaa

SEQ ID NO: 68705 - DNA, 24 bp, Artificial Sequence
  Synthetic oligonucleotide; GAAGAAT chr11 5218868 5218891 5218871 -
aagactaataaagaagaaaagaga

SEQ ID NO: 68706 - DNA, 24 bp, Artificial Sequence
  Synthetic oligonucleotide; ACAGAAA chr11 5218815 5218838 5218818 -
acacggggtatcaccactgatccc

SEQ ID NO: 68707 - DNA, 24 bp, Artificial Sequence
  Synthetic oligonucleotide; AGAGAAT chr11 5218794 5218817 5218797 -
cccacagaaatacaaactaccgtc

SEQ ID NO: 68708 - DNA, 24 bp, Artificial Sequence
  Synthetic oligonucleotide; CTAGAAA chr11 5218761 5218784 5218764 -
tataaacacctctacgcaaataaa

SEQ ID NO: 68709 - DNA, 24 bp, Artificial Sequence
  Synthetic oligonucleotide; GAAGAAA chr11 5218749 5218772 5218752 -
tacgcaaataaactagaaaatcta

SEQ ID NO: 68710 - DNA, 24 bp, Artificial Sequence
  Synthetic oligonucleotide; ATAGAAA chr11 5218533 5218556 5218536 -
ttccttctgaaactattccaatca

SEQ ID NO: 68711 - DNA, 24 bp, Artificial Sequence
  Synthetic oligonucleotide; AGAGAAT chr11 5218447 5218470 5218450 -
gcctgacagagacacaacaaaaaa

SEQ ID NO: 68712 - DNA, 24 bp, Artificial Sequence
  Synthetic oligonucleotide; GCAGAAA chr11 5218252 5218275 5218255 -
aaccatatgattatctcaatagat

SEQ ID NO: 68713 - DNA, 24 bp, Artificial Sequence
  Synthetic oligonucleotide; CTAGAAA chr11 5217931 5217954 5217934 -
tttgcagatgacatgattgtatat

SEQ ID NO: 68714 - DNA, 24 bp, Artificial Sequence
  Synthetic oligonucleotide; AGAGAAT chr11 5217762 5217785 5217765 -
aactcccattcacaattgcttcaa

SEQ ID NO: 68715 - DNA, 24 bp, Artificial Sequence
  Synthetic oligonucleotide; GAAGAAT chr11 5217630 5217653 5217633 -
agaacattccatgctcatgggtag

SEQ ID NO: 68716 - DNA, 24 bp, Artificial Sequence
  Synthetic oligonucleotide; TCAGAAA chr11 5217340 5217363 5217343 -
gaccaatggaacagaacagagccc

SEQ ID NO: 68717 - DNA, 24 bp, Artificial Sequence
  Synthetic oligonucleotide; AGAGAAA chr11 5217291 5217314 5217294 -
actatctgatctttgacaaacctg

SEQ ID NO: 68718 - DNA, 24 bp, Artificial Sequence
  Synthetic oligonucleotide; GTAGAAA chr11 5217222 5217245 5217225 -
gctgggaaaactggctagccatat

SEQ ID NO: 68719 - DNA, 24 bp, Artificial Sequence
  Synthetic oligonucleotide; CTAGAAA chr11 5217124 5217147 5217127 -
gttagacctaaaaccataaaaacc

SEQ ID NO: 68720 - DNA, 24 bp, Artificial Sequence
  Synthetic oligonucleotide; AAAGAAA chr11 5216986 5217009 5216989 -
aaactaaagagcttctgcacagct

SEQ ID NO: 68721 - DNA, 24 bp, Artificial Sequence
  Synthetic oligonucleotide; GGAGAAA chr11 5216945 5216968 5216948 -
agtgaacaggcaacctacaaaatg

SEQ ID NO: 68722 - DNA, 24 bp, Artificial Sequence
  Synthetic oligonucleotide; CCAGAAT chr11 5216901 5216924 5216904 -
actcatctgacaaagggctaatat

SEQ ID NO: 68723 - DNA, 24 bp, Artificial Sequence
  Synthetic oligonucleotide; CAAGAAA chr11 5216870 5216893 5216873 -
ctacaatgaactcaaacaaattta

SEQ ID NO: 68724 - DNA, 24 bp, Artificial Sequence
  Synthetic oligonucleotide; AGAGAAA chr11 5216750 5216773 5216753 -
aaatgctcatcatcactagccatc

SEQ ID NO: 68725 - DNA, 24 bp, Artificial Sequence
  Synthetic oligonucleotide; TTAGAAT chr11 5216704 5216727 5216707 -
caatgagataccatctcacaccag

SEQ ID NO: 68726 - DNA, 24 bp, Artificial Sequence
  Synthetic oligonucleotide; GGAGAAA chr11 5216651 5216674 5216654 -
aacaacaggtgctggagaggatgt

SEQ ID NO: 68727 - DNA, 24 bp, Artificial Sequence
  Synthetic oligonucleotide; CTAGAAA chr11 5216557 5216580 5216560 -
tggcaattcctcaggaatctagaa

SEQ ID NO: 68728 - DNA, 24 bp, Artificial Sequence
  Synthetic oligonucleotide; TAAGAAA chr11 5216393 5216416 5216396 -
atgtccaacaacgatagactggat

SEQ ID NO: 68729 - DNA, 24 bp, Artificial Sequence
  Synthetic oligonucleotide; GGAGAAT chr11 5216272 5216295 5216275 -
atcattctcagcaaactatcacaa

SEQ ID NO: 68730 - DNA, 24 bp, Artificial Sequence
  Synthetic oligonucleotide; ACAGAAA chr11 5215942 5215965 5215945 -
atcaagtctttctctttgaaatag

SEQ ID NO: 68731 - DNA, 24 bp, Artificial Sequence
  Synthetic oligonucleotide; TAAGAAT chr11 5215809 5215832 5215812 -
agagtcttccttcttatttgttta

SEQ ID NO: 68732 - DNA, 24 bp, Artificial Sequence
  Synthetic oligonucleotide; GTAGAAA chr11 5215779 5215802 5215782 -
tttagtaaatggcaatattgagaa

SEQ ID NO: 68733 - DNA, 24 bp, Artificial Sequence
  Synthetic oligonucleotide; CTAGAAT chr11 5215705 5215728 5215708 -
agcaatactaaacaggagccaagc

SEQ ID NO: 68734 - DNA, 24 bp, Artificial Sequence
  Synthetic oligonucleotide; AAAGAAA chr11 5215558 5215581 5215561 -
aaacaaagtgaccaattaaaataa

SEQ ID NO: 68735 - DNA, 24 bp, Artificial Sequence
  Synthetic oligonucleotide; AGAGAAA chr11 5215047 5215070 5215050 -
tctggggagggggacatagagttg

SEQ ID NO: 68736 - DNA, 24 bp, Artificial Sequence
  Synthetic oligonucleotide; GAAGAAA chr11 5214278 5214301 5214281 -
taggtcctcccaaggctgaaccag

SEQ ID NO: 68737 - DNA, 24 bp, Artificial Sequence
  Synthetic oligonucleotide; AAAGAAA chr11 5214027 5214050 5214030 -
cctgatagacacacaacaacaaaa

SEQ ID NO: 68738 - DNA, 24 bp, Artificial Sequence
  Synthetic oligonucleotide; ACAGAAA chr11 5213849 5213872 5213852 -
ttcatcatatatacagcactaaaa

SEQ ID NO: 68739 - DNA, 24 bp, Artificial Sequence
  Synthetic oligonucleotide; ACAGAAT chr11 5213695 5213718 5213698 -
tgacaaacccacagccaacatcat

SEQ ID NO: 68740 - DNA, 24 bp, Artificial Sequence
  Synthetic oligonucleotide; AGAGAAA chr11 5213545 5213568 5213548 -
aataaagggcatccaaataggaag

SEQ ID NO: 68741 - DNA, 24 bp, Artificial Sequence
  Synthetic oligonucleotide; CTAGAAA chr11 5213513 5213536 5213516 -
tcaaagtatccctgttttctgtat

SEQ ID NO: 68742 - DNA, 24 bp, Artificial Sequence
  Synthetic oligonucleotide; AAAGAAT chr11 5213348 5213371 5213351 -
caatcccatttaccgttgccacaa

SEQ ID NO: 68743 - DNA, 24 bp, Artificial Sequence
  Synthetic oligonucleotide; AAAGAAA chr11 5213271 5213294 5213274 -
aatgagatttacaaaacactgctc

SEQ ID NO: 68744 - DNA, 24 bp, Artificial Sequence
  Synthetic oligonucleotide; ATAGAAA chr11 5213255 5213278 5213258 -
cactgctcaaagaaatcagagctg

SEQ ID NO: 68745 - DNA, 24 bp, Artificial Sequence
  Synthetic oligonucleotide; AAAGAAT chr11 5213216 5213239 5213219 -
aaaactttccatgctcatggataa

SEQ ID NO: 68746 - DNA, 24 bp, Artificial Sequence
  Synthetic oligonucleotide; CTAGAAA chr11 5213121 5213144 5213124 -
ctaccaatgacattcttcacagaa

SEQ ID NO: 68747 - DNA, 24 bp, Artificial Sequence
  Synthetic oligonucleotide; AGAGAAA chr11 5212827 5212850 5212830 -
aacttagagtacaaaaaaaaaaaa

SEQ ID NO: 68748 - DNA, 24 bp, Artificial Sequence
  Synthetic oligonucleotide; AAAGAAA chr11 5212821 5212844 5212824 -
gagtacaaaaaaaaaaaaagagaa

SEQ ID NO: 68749 - DNA, 24 bp, Artificial Sequence
  Synthetic oligonucleotide; ACAGAAA chr11 5212738 5212761 5212741 -
taaccaaaacagtgtggtactgtt

SEQ ID NO: 68750 - DNA, 24 bp, Artificial Sequence
  Synthetic oligonucleotide; ACAGAAT chr11 5212712 5212735 5212715 -
agaaaagacacacagacaaatgga

SEQ ID NO: 68751 - DNA, 24 bp, Artificial Sequence
  Synthetic oligonucleotide; CCAGAAA chr11 5212698 5212721 5212701 -
gacaaatggaacagaatagagagc

SEQ ID NO: 68752 - DNA, 24 bp, Artificial Sequence
  Synthetic oligonucleotide; AAAGAAA chr11 5212348 5212371 5212351 -
ttaaaataaagtttctgcacagca

SEQ ID NO: 68753 - DNA, 24 bp, Artificial Sequence
  Synthetic oligonucleotide; ATAGAAT chr11 5212319 5212342 5212322 -
aactatcaactgagtaaacaacct

SEQ ID NO: 68754 - DNA, 24 bp, Artificial Sequence
  Synthetic oligonucleotide; GGAGAAA chr11 5212311 5212334 5212314 -
actgagtaaacaacctatagaatg

SEQ ID NO: 68755 - DNA, 24 bp, Artificial Sequence
  Synthetic oligonucleotide; TCAGAAT chr11 5212267 5212290 5212270 -
atgcatccaacaaaggcctaatat

SEQ ID NO: 68756 - DNA, 24 bp, Artificial Sequence
  Synthetic oligonucleotide; AGAGAAA chr11 5212117 5212140 5212120 -
aaaagctcagtgtcactgatcatt

SEQ ID NO: 68757 - DNA, 24 bp, Artificial Sequence
  Synthetic oligonucleotide; GGAGAAA chr11 5212018 5212041 5212021 -
aataacagatgtgggtaaggttgt

SEQ ID NO: 68758 - DNA, 24 bp, Artificial Sequence
  Synthetic oligonucleotide; ACAGAAA chr11 5211925 5211948 5211928 -
tggcaattccctaaagacctaaaa

SEQ ID NO: 68759 - DNA, 24 bp, Artificial Sequence
  Synthetic oligonucleotide; ATAGAAT chr11 5211801 5211824 5211804 -
cagcataatcacaatagcaaagac

SEQ ID NO: 68760 - DNA, 24 bp, Artificial Sequence
  Synthetic oligonucleotide; AAAGAAT chr11 5211718 5211741 5211721 -
catggaatactatgtggccataaa

SEQ ID NO: 68761 - DNA, 24 bp, Artificial Sequence
  Synthetic oligonucleotide; ACAGAAA chr11 5211643 5211666 5211646 -
tatccttaacaaactaatgtaaga

SEQ ID NO: 68762 - DNA, 24 bp, Artificial Sequence
  Synthetic oligonucleotide; TGAGAAA chr11 5211593 5211616 5211596 -
cacttacaagtaggaactaaatga

SEQ ID NO: 68763 - DNA, 24 bp, Artificial Sequence
  Synthetic oligonucleotide; GCAGAAA chr11 5211515 5211538 5211518 -
tggagggtgggaacggggagaaga

SEQ ID NO: 68764 - DNA, 24 bp, Artificial Sequence
  Synthetic oligonucleotide; GGAGAAA chr11 5210526 5210549 5210529 -
ctaagccatcctgcagagcaagtg

SEQ ID NO: 68765 - DNA, 24 bp, Artificial Sequence
  Synthetic oligonucleotide; GAAGAAT chr11 5210258 5210281 5210261 -
ttgaggccagcttgcttcccacta

SEQ ID NO: 68766 - DNA, 24 bp, Artificial Sequence
  Synthetic oligonucleotide; TGAGAAT chr11 5210126 5210149 5210129 -
gagtgcaatttcttcaactacaaa

SEQ ID NO: 68767 - DNA, 24 bp, Artificial Sequence
  Synthetic oligonucleotide; AGAGAAA chr11 5210022 5210045 5210025 -
tctgggcacatgcaggctgctata

SEQ ID NO: 68768 - DNA, 24 bp, Artificial Sequence
  Synthetic oligonucleotide; ACAGAAT chr11 5209902 5209925 5209905 -
gcatattttatgacctagcaattt

SEQ ID NO: 68769 - DNA, 24 bp, Artificial Sequence
  Synthetic oligonucleotide; TAAGAAT chr11 5209878 5209901 5209881 -
acagaatatatatacaaaaatata

SEQ ID NO: 68770 - DNA, 24 bp, Artificial Sequence
  Synthetic oligonucleotide; ATAGAAT chr11 5209774 5209797 5209777 -
aatatattgtggtatatacataaa

SEQ ID NO: 68771 - DNA, 24 bp, Artificial Sequence
  Synthetic oligonucleotide; TCAGAAA chr11 5209762 5209785 5209765 -
tatatacataaaatagaatgacat

SEQ ID NO: 68772 - DNA, 24 bp, Artificial Sequence
  Synthetic oligonucleotide; TTAGAAA chr11 5209410 5209433 5209413 -
aaaatattaaaataaaaactaaat

SEQ ID NO: 68773 - DNA, 24 bp, Artificial Sequence
  Synthetic oligonucleotide; GAAGAAA chr11 5209235 5209258 5209238 -
tgtcttaacttcctgaagaagagg

SEQ ID NO: 68774 - DNA, 24 bp, Artificial Sequence
  Synthetic oligonucleotide; ACAGAAA chr11 5209209 5209232 5209212 -
agaaataatgaaaaaaggaaaata

SEQ ID NO: 68775 - DNA, 24 bp, Artificial Sequence
  Synthetic oligonucleotide; CAAGAAA chr11 5208987 5209010 5208990 -
tgtcttcactacatggtactatgt

SEQ ID NO: 68776 - DNA, 24 bp, Artificial Sequence
  Synthetic oligonucleotide; AGAGAAA chr11 5208981 5209004 5208984 -
cactacatggtactatgtcaagaa

SEQ ID NO: 68777 - DNA, 24 bp, Artificial Sequence
  Synthetic oligonucleotide; CTAGAAT chr11 5208675 5208698 5208678 -
tatttaataatcaatttctcacaa

SEQ ID NO: 68778 - DNA, 24 bp, Artificial Sequence
  Synthetic oligonucleotide; TAAGAAA chr11 5208546 5208569 5208549 -
gtgttgagctaaaaattatatacc

SEQ ID NO: 68779 - DNA, 24 bp, Artificial Sequence
  Synthetic oligonucleotide; ACAGAAA chr11 5207875 5207898 5207878 -
taataaataaataaaataaataaa

SEQ ID NO: 68780 - DNA, 24 bp, Artificial Sequence
  Synthetic oligonucleotide; AGAGAAT chr11 5207624 5207647 5207627 -
agataataaacctttgtcacctct

SEQ ID NO: 68781 - DNA, 24 bp, Artificial Sequence
  Synthetic oligonucleotide; TTAGAAA chr11 5207600 5207623 5207603 -
agagaattctaaaaatccacagat

SEQ ID NO: 68782 - DNA, 24 bp, Artificial Sequence
  Synthetic oligonucleotide; CAAGAAA chr11 5207582 5207605 5207585 -
acagatttagaaattctaggaatc

SEQ ID NO: 68783 - DNA, 24 bp, Artificial Sequence
  Synthetic oligonucleotide; AGAGAAA chr11 5207405 5207428 5207408 -
tatcacaatagatgacacctgcat

SEQ ID NO: 68784 - DNA, 24 bp, Artificial Sequence
  Synthetic oligonucleotide; TCAGAAT chr11 5206903 5206926 5206906 -
atccatctctcctatgttctgagg

SEQ ID NO: 68785 - DNA, 24 bp, Artificial Sequence
  Synthetic oligonucleotide; ACAGAAA chr11 5206773 5206796 5206776 -
ttacttctcacattcttttcttga

SEQ ID NO: 68786 - DNA, 24 bp, Artificial Sequence
  Synthetic oligonucleotide; TGAGAAA chr11 5206541 5206564 5206544 -
tattcttattccactgtgtggtga

SEQ ID NO: 68787 - DNA, 24 bp, Artificial Sequence
  Synthetic oligonucleotide; GGAGAAA chr11 5206473 5206496 5206476 -
tccctgaagccatagtaaccccct

SEQ ID NO: 68788 - DNA, 24 bp, Artificial Sequence
  Synthetic oligonucleotide; TTAGAAA chr11 5206421 5206444 5206424 -
gcctaggtatgggtactcgatttc

SEQ ID NO: 68789 - DNA, 24 bp, Artificial Sequence
  Synthetic oligonucleotide; GTAGAAT chr11 5206373 5206396 5206376 -
tatcttaaaaataagggtattgaa

SEQ ID NO: 68790 - DNA, 24 bp, Artificial Sequence
  Synthetic oligonucleotide; CTAGAAT chr11 5206365 5206388 5206368 -
aaataagggtattgaagtagaatt

SEQ ID NO: 68791 - DNA, 24 bp, Artificial Sequence
  Synthetic oligonucleotide; ATAGAAA chr11 5206237 5206260 5206240 -
aaagttgatttcataaaaacggga

SEQ ID NO: 68792 - DNA, 24 bp, Artificial Sequence
  Synthetic oligonucleotide; GAAGAAA chr11 5205746 5205769 5205749 -
attttaagctgtctcacattttct

SEQ ID NO: 68793 - DNA, 24 bp, Artificial Sequence
  Synthetic oligonucleotide; ATAGAAA chr11 5205526 5205549 5205529 -
ttagtaatgatgggaatattattt

SEQ ID NO: 68794 - DNA, 24 bp, Artificial Sequence
  Synthetic oligonucleotide; TCAGAAT chr11 5205141 5205164 5205144 -
tagattctctctgaactagcatat

SEQ ID NO: 68795 - DNA, 24 bp, Artificial Sequence
  Synthetic oligonucleotide; ATAGAAT chr11 5205103 5205126 5205106 -
cagtcagttctttggacaagtctt

SEQ ID NO: 68796 - DNA, 24 bp, Artificial Sequence
  Synthetic oligonucleotide; GAAGAAA chr11 5205003 5205026 5205006 -
ttatgcatcactgaagtagggagg

SEQ ID NO: 68797 - DNA, 24 bp, Artificial Sequence
  Synthetic oligonucleotide; CCAGAAA chr11 5204963 5204986 5204966 -
actacttctgacccctagtggtgt

SEQ ID NO: 68798 - DNA, 24 bp, Artificial Sequence
  Synthetic oligonucleotide; ATAGAAT chr11 5204815 5204838 5204818 -
ggcaaataggaatgttttagttct

SEQ ID NO: 68799 - DNA, 24 bp, Artificial Sequence
  Synthetic oligonucleotide; ACAGAAA chr11 5204689 5204712 5204692 -
cacacagggaattattctgaaaag

SEQ ID NO: 68800 - DNA, 24 bp, Artificial Sequence
  Synthetic oligonucleotide; TCAGAAA chr11 5204627 5204650 5204630 -
taggtcagttttaatcagagggca

SEQ ID NO: 68801 - DNA, 24 bp, Artificial Sequence
  Synthetic oligonucleotide; AAAGAAT chr11 5204611 5204634 5204614 -
agagggcatcagaaaagactcctg

SEQ ID NO: 68802 - DNA, 24 bp, Artificial Sequence
  Synthetic oligonucleotide; GAAGAAA chr11 5204061 5204084 5204064 -
gtctgaagcctttgtagtcagtct

SEQ ID NO: 68803 - DNA, 24 bp, Artificial Sequence
  Synthetic oligonucleotide; ACAGAAT chr11 5203706 5203729 5203709 -
tacttttaacacatacctacattc

SEQ ID NO: 68804 - DNA, 24 bp, Artificial Sequence
  Synthetic oligonucleotide; AGAGAAA chr11 5203638 5203661 5203641 -
tatgtctgagtcaggctggaaatg

SEQ ID NO: 68805 - DNA, 24 bp, Artificial Sequence
  Synthetic oligonucleotide; TCAGAAA chr11 5203520 5203543 5203523 -
gatgactcaattggtggccaaagg

SEQ ID NO: 68806 - DNA, 24 bp, Artificial Sequence
  Synthetic oligonucleotide; ATAGAAT chr11 5203417 5203440 5203420 -
ctgtgattgtctagctcttatttc

SEQ ID NO: 68807 - DNA, 24 bp, Artificial Sequence
  Synthetic oligonucleotide; GAAGAAA chr11 5203220 5203243 5203223 -
gagagtaagttagttaagggggtt

SEQ ID NO: 68808 - DNA, 24 bp, Artificial Sequence
  Synthetic oligonucleotide; TTAGAAA chr11 5203187 5203210 5203190 -
agataatctaggtggggagcagta

SEQ ID NO: 68809 - DNA, 24 bp, Artificial Sequence
  Synthetic oligonucleotide; AAAGAAT chr11 5202931 5202954 5202934 -
tatacaaggctttttgactatgat

SEQ ID NO: 68810 - DNA, 24 bp, Artificial Sequence
  Synthetic oligonucleotide; GTAGAAA chr11 5202842 5202865 5202845 -
gtttgtgtgatttagtagatgttt

SEQ ID NO: 68811 - DNA, 24 bp, Artificial Sequence
  Synthetic oligonucleotide; GTAGAAA chr11 5202650 5202673 5202653 -
gggcctatctgggatgtgtttctg

SEQ ID NO: 68812 - DNA, 24 bp, Artificial Sequence
  Synthetic oligonucleotide; GTAGAAA chr11 5202641 5202664 5202644 -
tgggatgtgtttctggtagaaatg

SEQ ID NO: 68813 - DNA, 24 bp, Artificial Sequence
  Synthetic oligonucleotide; AGAGAAA chr11 5202594 5202617 5202597 -
tggagagaggaaagggaaggaaag

SEQ ID NO: 68814 - DNA, 24 bp, Artificial Sequence
  Synthetic oligonucleotide; GGAGAAA chr11 5202514 5202537 5202517 -
tggtggagtcactttataatatta

SEQ ID NO: 68815 - DNA, 24 bp, Artificial Sequence
  Synthetic oligonucleotide; ACAGAAA chr11 5202503 5202526 5202506 -
ctttataatattaggagaaaaggg

SEQ ID NO: 68816 - DNA, 24 bp, Artificial Sequence
  Synthetic oligonucleotide; TAAGAAA chr11 5202341 5202364 5202344 -
ggtgcaaatgttagtttcaaataa

SEQ ID NO: 68817 - DNA, 24 bp, Artificial Sequence
  Synthetic oligonucleotide; TGAGAAT chr11 5202305 5202328 5202308 -
gacatagtctgcacattaaggaac

SEQ ID NO: 68818 - DNA, 24 bp, Artificial Sequence
  Synthetic oligonucleotide; TAAGAAA chr11 5202160 5202183 5202163 -
atagatatatggataaatttgtct

SEQ ID NO: 68819 - DNA, 24 bp, Artificial Sequence
  Synthetic oligonucleotide; GAAGAAA chr11 5202104 5202127 5202107 -
gcaagatcgttttaaaaagggtag

SEQ ID NO: 68820 - DNA, 24 bp, Artificial Sequence
  Synthetic oligonucleotide; CGAGAAA chr11 5202055 5202078 5202058 -
ataatttaggcagatagaacattt

SEQ ID NO: 68821 - DNA, 24 bp, Artificial Sequence
  Synthetic oligonucleotide; AGAGAAA chr11 5202034 5202057 5202037 -
tttcgagaaaaattttacgaaaga

SEQ ID NO: 68822 - DNA, 24 bp, Artificial Sequence
  Synthetic oligonucleotide; AGAGAAA chr11 5202019 5202042 5202022 -
tacgaaagaagagaaattcgattt

SEQ ID NO: 68823 - DNA, 24 bp, Artificial Sequence
  Synthetic oligonucleotide; CAAGAAA chr11 5201972 5201995 5201975 -
ttcaaaagactgaaaaatcctctg

SEQ ID NO: 68824 - DNA, 24 bp, Artificial Sequence
  Synthetic oligonucleotide; GAAGAAA chr11 5201964 5201987 5201967 -
actgaaaaatcctctgcaagaaac

SEQ ID NO: 68825 - DNA, 24 bp, Artificial Sequence
  Synthetic oligonucleotide; GGAGAAA chr11 5201942 5201965 5201945 -
acgaagaaacttcaagcattctat

SEQ ID NO: 68826 - DNA, 24 bp, Artificial Sequence
  Synthetic oligonucleotide; CAAGAAA chr11 5201883 5201906 5201886 -
ttcaatgctgagaaggagtcaggg

SEQ ID NO: 68827 - DNA, 24 bp, Artificial Sequence
  Synthetic oligonucleotide; GAAGAAA chr11 5201824 5201847 5201827 -
agtgtagtatagagagtacattga

SEQ ID NO: 68828 - DNA, 24 bp, Artificial Sequence
  Synthetic oligonucleotide; TAAGAAA chr11 5201514 5201537 5201517 -
tgtgatctgtagaactgcaggttc

SEQ ID NO: 68829 - DNA, 24 bp, Artificial Sequence
  Synthetic oligonucleotide; AAAGAAA chr11 5201510 5201533 5201513 -
atctgtagaactgcaggttctaag

SEQ ID NO: 68830 - DNA, 24 bp, Artificial Sequence
  Synthetic oligonucleotide; TGAGAAA chr11 5201322 5201345 5201325 -
catctcaagaggccagagctccag

SEQ ID NO: 68831 - DNA, 24 bp, Artificial Sequence
  Synthetic oligonucleotide; GAAGAAA chr11 5201264 5201287 5201267 -
tattcctgtctgcttatcaccaat

SEQ ID NO: 68832 - DNA, 24 bp, Artificial Sequence
  Synthetic oligonucleotide; GGAGAAA chr11 5201227 5201250 5201230 -
ttgctggctacgtcatctggaggg

SEQ ID NO: 68833 - DNA, 24 bp, Artificial Sequence
  Synthetic oligonucleotide; GGAGAAA chr11 5201192 5201215 5201195 -
gagtatcttcattaaatagtattt

SEQ ID NO: 68834 - DNA, 24 bp, Artificial Sequence
  Synthetic oligonucleotide; GAAGAAA chr11 5201068 5201091 5201071 -
ttcgaatgtttaatgaattggaga

SEQ ID NO: 68835 - DNA, 24 bp, Artificial Sequence
  Synthetic oligonucleotide; AAAGAAA chr11 5200823 5200846 5200826 -
caaaggcaatggatactatgtctc

SEQ ID NO: 68836 - DNA, 24 bp, Artificial Sequence
  Synthetic oligonucleotide; ACAGAAT chr11 5200817 5200840 5200820 -
caatggatactatgtctcaaagaa

SEQ ID NO: 68837 - DNA, 24 bp, Artificial Sequence
  Synthetic oligonucleotide; TTAGAAA chr11 5200761 5200784 5200764 -
taagttttagggtatttcatttac

SEQ ID NO: 68838 - DNA, 24 bp, Artificial Sequence
  Synthetic oligonucleotide; CCAGAAT chr11 5200688 5200711 5200691 -
aatactctcacatgtttctcagtt

SEQ ID NO: 68839 - DNA, 24 bp, Artificial Sequence
  Synthetic oligonucleotide; CCAGAAT chr11 5200259 5200282 5200262 -
gttattcctccatcctgactaatt

SEQ ID NO: 68840 - DNA, 24 bp, Artificial Sequence
  Synthetic oligonucleotide; CCAGAAT chr11 5199773 5199796 5199776 -
gtgtcaagacccaacagattcata

SEQ ID NO: 68841 - DNA, 24 bp, Artificial Sequence
  Synthetic oligonucleotide; AAAGAAA chr11 5199708 5199731 5199711 -
atattgagatgtattgcctaaaaa

SEQ ID NO: 68842 - DNA, 24 bp, Artificial Sequence
  Synthetic oligonucleotide; AAAGAAA chr11 5199704 5199727 5199707 -
tgagatgtattgcctaaaaaaaag

SEQ ID NO: 68843 - DNA, 24 bp, Artificial Sequence
  Synthetic oligonucleotide; AAAGAAA chr11 5199660 5199683 5199663 -
ataaacaaaaatcagtgccataaa

SEQ ID NO: 68844 - DNA, 24 bp, Artificial Sequence
  Synthetic oligonucleotide; AGAGAAT chr11 5199584 5199607 5199587 -
cttaaaaaatatttaaatatagtc

SEQ ID NO: 68845 - DNA, 24 bp, Artificial Sequence
  Synthetic oligonucleotide; TAAGAAA chr11 5199512 5199535 5199515 -
tcactctatcagtctgaccatatt

SEQ ID NO: 68846 - DNA, 24 bp, Artificial Sequence
  Synthetic oligonucleotide; GTAGAAA chr11 5199408 5199431 5199411 -
aaacctaggttttcaagtttcaaa

SEQ ID NO: 68847 - DNA, 24 bp, Artificial Sequence
  Synthetic oligonucleotide; CCAGAAT chr11 5199306 5199329 5199309 -
ggaatgttgtgatatctgtatgga

SEQ ID NO: 68848 - DNA, 24 bp, Artificial Sequence
  Synthetic oligonucleotide; AAAGAAA chr11 5199060 5199083 5199063 -
agctacagttcataaagaggacac

SEQ ID NO: 68849 - DNA, 24 bp, Artificial Sequence
  Synthetic oligonucleotide; TTAGAAT chr11 5199014 5199037 5199017 -
aacttctaccatgtctaatttaaa

SEQ ID NO: 68850 - DNA, 24 bp, Artificial Sequence
  Synthetic oligonucleotide; AAAGAAA chr11 5198866 5198889 5198869 -
cgctaccgacttattctgagttta

SEQ ID NO: 68851 - DNA, 24 bp, Artificial Sequence
  Synthetic oligonucleotide; AAAGAAA chr11 5198797 5198820 5198800 -
gctagtgcagctttccaaagaagg

SEQ ID NO: 68852 - DNA, 24 bp, Artificial Sequence
  Synthetic oligonucleotide; CAAGAAA chr11 5198755 5198778 5198758 -
aggtacaaaactatgcatggataa

SEQ ID NO: 68853 - DNA, 24 bp, Artificial Sequence
  Synthetic oligonucleotide; TTAGAAA chr11 5198436 5198459 5198439 -
ttctggacagagtaaagtatctgg

SEQ ID NO: 68854 - DNA, 24 bp, Artificial Sequence
  Synthetic oligonucleotide; CAAGAAA chr11 5198137 5198160 5198140 -
aaccccgtctctactaaaaaaaca

SEQ ID NO: 68855 - DNA, 24 bp, Artificial Sequence
  Synthetic oligonucleotide; GGAGAAT chr11 5198074 5198097 5198077 -
ccaggtactcgggaggctgagaca

SEQ ID NO: 68856 - DNA, 24 bp, Artificial Sequence
  Synthetic oligonucleotide; AGAGAAA chr11 5197965 5197988 5197968 -
tctgtctcaaaaaaaaaaaaaaaa

SEQ ID NO: 68857 - DNA, 24 bp, Artificial Sequence
  Synthetic oligonucleotide; AAAGAAA chr11 5197955 5197978 5197958 -
aaaaaaaaaaaaaaagagaaaaaa

SEQ ID NO: 68858 - DNA, 24 bp, Artificial Sequence
  Synthetic oligonucleotide; AGAGAAT chr11 5197670 5197693 5197673 -
gagctgacacaacactggggaagc

SEQ ID NO: 68859 - DNA, 24 bp, Artificial Sequence
  Synthetic oligonucleotide; TCAGAAT chr11 5197614 5197637 5197617 -
ccaccagccactcatagggaagca

SEQ ID NO: 68860 - DNA, 24 bp, Artificial Sequence
  Synthetic oligonucleotide; ATAGAAT chr11 5197464 5197487 5197467 -
tttgtgcttcagattaggcaacct

SEQ ID NO: 68861 - DNA, 24 bp, Artificial Sequence
  Synthetic oligonucleotide; TCAGAAA chr11 5197390 5197413 5197393 -
aataaaaaatacctaagagtatcc

SEQ ID NO: 68862 - DNA, 24 bp, Artificial Sequence
  Synthetic oligonucleotide; TCAGAAT chr11 5197325 5197348 5197328 -
tgatgataagatttatgaagaact

SEQ ID NO: 68863 - DNA, 24 bp, Artificial Sequence
  Synthetic oligonucleotide; ACAGAAA chr11 5197229 5197252 5197232 -
ctttatatgattactgggctttat

SEQ ID NO: 68864 - DNA, 24 bp, Artificial Sequence
  Synthetic oligonucleotide; AAAGAAA chr11 5197225 5197248 5197228 -
atatgattactgggctttatacag

SEQ ID NO: 68865 - DNA, 24 bp, Artificial Sequence
  Synthetic oligonucleotide; GAAGAAA chr11 5197125 5197148 5197128 -
aaaaataactaaacctctcctgag

SEQ ID NO: 68866 - DNA, 24 bp, Artificial Sequence
  Synthetic oligonucleotide; TGAGAAA chr11 5196844 5196867 5196847 -
tgcaaggctactatccagcgtcac

SEQ ID NO: 68867 - DNA, 24 bp, Artificial Sequence
  Synthetic oligonucleotide; GGAGAAA chr11 5196712 5196735 5196715 -
atgaagtcacggttattataataa

SEQ ID NO: 68868 - DNA, 24 bp, Artificial Sequence
  Synthetic oligonucleotide; TCAGAAA chr11 5196666 5196689 5196669 -
agaacaaggtgacaaaagtaagat

SEQ ID NO: 68869 - DNA, 24 bp, Artificial Sequence
  Synthetic oligonucleotide; TCAGAAA chr11 5196658 5196681 5196661 -
gtgacaaaagtaagattcagaaaa

SEQ ID NO: 68870 - DNA, 24 bp, Artificial Sequence
  Synthetic oligonucleotide; GGAGAAA chr11 5196592 5196615 5196595 -
acaccgaaaagctaaggtccagtg

SEQ ID NO: 68871 - DNA, 24 bp, Artificial Sequence
  Synthetic oligonucleotide; TTAGAAA chr11 5196548 5196571 5196551 -
gaagtgagaggacatgattcagga

SEQ ID NO: 68872 - DNA, 24 bp, Artificial Sequence
  Synthetic oligonucleotide; TGAGAAT chr11 5196328 5196351 5196331 -
acctagatcccttgcatgcctcta

SEQ ID NO: 68873 - DNA, 24 bp, Artificial Sequence
  Synthetic oligonucleotide; GCAGAAA chr11 5195998 5196021 5196001 -
agtccattttcccagaagtctctt

SEQ ID NO: 68874 - DNA, 24 bp, Artificial Sequence
  Synthetic oligonucleotide; ATAGAAA chr11 5195873 5195896 5195876 -
agtcttggcaccatgtaatggcac

SEQ ID NO: 68875 - DNA, 24 bp, Artificial Sequence
  Synthetic oligonucleotide; TAAGAAA chr11 5195684 5195707 5195687 -
gtactgaataataaaatataaatt

SEQ ID NO: 68876 - DNA, 24 bp, Artificial Sequence
  Synthetic oligonucleotide; GAAGAAA chr11 5195569 5195592 5195572 -
tatagatgtacacagagacactgt

SEQ ID NO: 68877 - DNA, 24 bp, Artificial Sequence
  Synthetic oligonucleotide; ACAGAAA chr11 5195469 5195492 5195472 -
ggataatctgaaatctatatgtct

SEQ ID NO: 68878 - DNA, 24 bp, Artificial Sequence
  Synthetic oligonucleotide; TGAGAAA chr11 5195452 5195475 5195455 -
tatgtctacagaaaaggataccaa

SEQ ID NO: 68879 - DNA, 24 bp, Artificial Sequence
  Synthetic oligonucleotide; ACAGAAA chr11 5195410 5195433 5195413 -
gcaaagagcattttctggaaaaac

SEQ ID NO: 68880 - DNA, 24 bp, Artificial Sequence
  Synthetic oligonucleotide; GTAGAAA chr11 5195364 5195387 5195367 -
tcgtgaggggtagggctaaaaatg

SEQ ID NO: 68881 - DNA, 24 bp, Artificial Sequence
  Synthetic oligonucleotide; AAAGAAT chr11 5195182 5195205 5195185 -
tatatgaaacagagagattatgca

SEQ ID NO: 68882 - DNA, 24 bp, Artificial Sequence
  Synthetic oligonucleotide; AGAGAAA chr11 5195147 5195170 5195150 -
attgaatgatgataaactgtctca

SEQ ID NO: 68883 - DNA, 24 bp, Artificial Sequence
  Synthetic oligonucleotide; ATAGAAA chr11 5195035 5195058 5195038 -
cagataactaattgtaccgtgttc

SEQ ID NO: 68884 - DNA, 24 bp, Artificial Sequence
  Synthetic oligonucleotide; TGAGAAT chr11 5194720 5194743 5194723 -
tttttcgtccttgcgatagtttac

SEQ ID NO: 68885 - DNA, 24 bp, Artificial Sequence
  Synthetic oligonucleotide; AAAGAAT chr11 5194478 5194501 5194481 -
gttccatatttcatggtgaggaac

SEQ ID NO: 68886 - DNA, 24 bp, Artificial Sequence
  Synthetic oligonucleotide; GAAGAAA chr11 5193783 5193806 5193786 -
gcaagaccgtgaacacaccagaag

SEQ ID NO: 68887 - DNA, 24 bp, Artificial Sequence
  Synthetic oligonucleotide; TAAGAAT chr11 5193717 5193740 5193720 -
accatcctttgaacacaccatctt

SEQ ID NO: 68888 - DNA, 24 bp, Artificial Sequence
  Synthetic oligonucleotide; CTAGAAT chr11 5193574 5193597 5193577 -
tccaccaacacaaaaattacatac

SEQ ID NO: 68889 - DNA, 24 bp, Artificial Sequence
  Synthetic oligonucleotide; AAAGAAA chr11 5193557 5193580 5193560 -
tacatacctagaatcaattttaat

SEQ ID NO: 68890 - DNA, 24 bp, Artificial Sequence
  Synthetic oligonucleotide; GCAGAAA chr11 5193523 5193546 5193526 -
tatttggagcacagcttattcagg

SEQ ID NO: 68891 - DNA, 24 bp, Artificial Sequence
  Synthetic oligonucleotide; ACAGAAT chr11 5193437 5193460 5193440 -
tcattttagatccttgatatttga

SEQ ID NO: 68892 - DNA, 24 bp, Artificial Sequence
  Synthetic oligonucleotide; GCAGAAA chr11 5193330 5193353 5193333 -
gggacaggaagtagatttaagagt

SEQ ID NO: 68893 - DNA, 24 bp, Artificial Sequence
  Synthetic oligonucleotide; AGAGAAT chr11 5193090 5193113 5193093 -
aaaataaaaattcatggtaagtta

SEQ ID NO: 68894 - DNA, 24 bp, Artificial Sequence
  Synthetic oligonucleotide; TAAGAAA chr11 5192873 5192896 5192876 -
aatatactcagtaacacatgtcat

SEQ ID NO: 68895 - DNA, 24 bp, Artificial Sequence
  Synthetic oligonucleotide; TGAGAAA chr11 5192736 5192759 5192739 -
actctcacttattgcttgtaggga

SEQ ID NO: 68896 - DNA, 24 bp, Artificial Sequence
  Synthetic oligonucleotide; ATAGAAT chr11 5192513 5192536 5192516 -
gataaactgtggaacatccatagg

SEQ ID NO: 68897 - DNA, 24 bp, Artificial Sequence
  Synthetic oligonucleotide; TGAGAAA chr11 5192365 5192388 5192368 -
cattaacctattttatcttgctgt

SEQ ID NO: 68898 - DNA, 24 bp, Artificial Sequence
  Synthetic oligonucleotide; ATAGAAT chr11 5192226 5192249 5192229 -
gacttagtttcagacagctattgc

SEQ ID NO: 68899 - DNA, 24 bp, Artificial Sequence
  Synthetic oligonucleotide; GAAGAAA chr11 5192028 5192051 5192031 -
cacattgagtatcaaaggaaggaa

SEQ ID NO: 68900 - DNA, 24 bp, Artificial Sequence
  Synthetic oligonucleotide; CAAGAAA chr11 5191828 5191851 5191831 -
tctgctcagcttctagggagacct

SEQ ID NO: 68901 - DNA, 24 bp, Artificial Sequence
  Synthetic oligonucleotide; AGAGAAA chr11 5191314 5191337 5191317 -
gggtacaaattcccattccaaaag

SEQ ID NO: 68902 - DNA, 24 bp, Artificial Sequence
  Synthetic oligonucleotide; AAAGAAA chr11 5191300 5191323 5191303 -
attccaaaagagagaaatgcacca

SEQ ID NO: 68903 - DNA, 24 bp, Artificial Sequence
  Synthetic oligonucleotide; GTAGAAA chr11 5191272 5191295 5191275 -
aaaggggctaaagatcccacacga

SEQ ID NO: 68904 - DNA, 24 bp, Artificial Sequence
  Synthetic oligonucleotide; TTAGAAA chr11 5189934 5189957 5189937 -
gacacatcttgaacaccttgctgc

SEQ ID NO: 68905 - DNA, 24 bp, Artificial Sequence
  Synthetic oligonucleotide; TCAGAAT chr11 5189745 5189768 5189748 -
tggacttcattgtccatatcacta

SEQ ID NO: 68906 - DNA, 24 bp, Artificial Sequence
  Synthetic oligonucleotide; CTAGAAA chr11 5189712 5189735 5189715 -
tggtcacaaccattccacaagtct

SEQ ID NO: 68907 - DNA, 24 bp, Artificial Sequence
  Synthetic oligonucleotide; AGAGAAA chr11 5189403 5189426 5189406 -
tcaggaaacttataatcatggcag

SEQ ID NO: 68908 - DNA, 24 bp, Artificial Sequence
  Synthetic oligonucleotide; AAAGAAA chr11 5188940 5188963 5188943 -
gcaggtcctggtgtatccttcctt

SEQ ID NO: 68909 - DNA, 24 bp, Artificial Sequence
  Synthetic oligonucleotide; TGAGAAA chr11 5188737 5188760 5188740 -
tctgcaaatattgattccaaccac

SEQ ID NO: 68910 - DNA, 24 bp, Artificial Sequence
  Synthetic oligonucleotide; TAAGAAA chr11 5188601 5188624 5188604 -
gtcccataaaatctcataatgttt

SEQ ID NO: 68911 - DNA, 24 bp, Artificial Sequence
  Synthetic oligonucleotide; GAAGAAA chr11 5188503 5188526 5188506 -
cttgctctacagcctacaaacaag

SEQ ID NO: 68912 - DNA, 24 bp, Artificial Sequence
  Synthetic oligonucleotide; GAAGAAA chr11 5188412 5188435 5188415 -
ccagctttactaacttacaaatga

SEQ ID NO: 68913 - DNA, 24 bp, Artificial Sequence
  Synthetic oligonucleotide; GAAGAAA chr11 5188373 5188396 5188376 -
ccaattatgccaaattacttgttc

SEQ ID NO: 68914 - DNA, 24 bp, Artificial Sequence
  Synthetic oligonucleotide; ATAGAAA chr11 5188062 5188085 5188065 -
catttatccatttccttgaaatcc

SEQ ID NO: 68915 - DNA, 24 bp, Artificial Sequence
  Synthetic oligonucleotide; TGAGAAT chr11 5187986 5188009 5187989 -
ggcaatttctgacatgaacttatg

SEQ ID NO: 68916 - DNA, 24 bp, Artificial Sequence
  Synthetic oligonucleotide; TAAGAAA chr11 5187769 5187792 5187772 -
tggctcaaagactgtagacttcta

SEQ ID NO: 68917 - DNA, 24 bp, Artificial Sequence
  Synthetic oligonucleotide; ATAGAAT chr11 5187715 5187738 5187718 -
atcaataactattatttcatctgc

SEQ ID NO: 68918 - DNA, 24 bp, Artificial Sequence
  Synthetic oligonucleotide; TCAGAAA chr11 5187618 5187641 5187621 -
ctgccctcttgcatattatattta

SEQ ID NO: 68919 - DNA, 24 bp, Artificial Sequence
  Synthetic oligonucleotide; TCAGAAA chr11 5186996 5187019 5186999 -
cttctagggattctttgaaaaata

SEQ ID NO: 68920 - DNA, 24 bp, Artificial Sequence
  Synthetic oligonucleotide; AGAGAAT chr11 5186961 5186984 5186964 -
cagatatatggaaggctccacttg

SEQ ID NO: 68921 - DNA, 24 bp, Artificial Sequence
  Synthetic oligonucleotide; AGAGAAT chr11 5186829 5186852 5186832 -
tattcctcattaaagtatccttca

SEQ ID NO: 68922 - DNA, 24 bp, Artificial Sequence
  Synthetic oligonucleotide; CAAGAAA chr11 5186757 5186780 5186760 -
attctgacccatttaccatgtgac

SEQ ID NO: 68923 - DNA, 24 bp, Artificial Sequence
  Synthetic oligonucleotide; AGAGAAT chr11 5186703 5186726 5186706 -
taaaaattaaagggaaataaaatg

SEQ ID NO: 68924 - DNA, 24 bp, Artificial Sequence
  Synthetic oligonucleotide; GAAGAAA chr11 5186536 5186559 5186539 -
cttaggtgtcagagagtggtggct

SEQ ID NO: 68925 - DNA, 24 bp, Artificial Sequence
  Synthetic oligonucleotide; AGAGAAT chr11 5186506 5186529 5186509 -
aaaaaatgcacaaattataatgaa

SEQ ID NO: 68926 - DNA, 24 bp, Artificial Sequence
  Synthetic oligonucleotide; CTAGAAA chr11 5186299 5186322 5186302 -
aacctgctaaatatcttcaggatt

SEQ ID NO: 68927 - DNA, 24 bp, Artificial Sequence
  Synthetic oligonucleotide; GTAGAAA chr11 5186253 5186276 5186256 -
ctgagttatgctcaatgaaaactt

SEQ ID NO: 68928 - DNA, 24 bp, Artificial Sequence
  Synthetic oligonucleotide; CCAGAAA chr11 5186240 5186263 5186243 -
aatgaaaacttgtagaaaataaca

SEQ ID NO: 68929 - DNA, 24 bp, Artificial Sequence
  Synthetic oligonucleotide; CAAGAAA chr11 5186224 5186247 5186227 -
aaataacaccagaaaaaaaaaagg

SEQ ID NO: 68930 - DNA, 24 bp, Artificial Sequence
  Synthetic oligonucleotide; AAAGAAT chr11 5186069 5186092 5186072 -
ttgtattaagtaagtcattttcaa

SEQ ID NO: 68931 - DNA, 24 bp, Artificial Sequence
  Synthetic oligonucleotide; TTAGAAT chr11 5186048 5186071 5186051 -
caaaaagaatattttagttttctc

SEQ ID NO: 68932 - DNA, 24 bp, Artificial Sequence
  Synthetic oligonucleotide; TAAGAAA chr11 5185661 5185684 5185664 -
ccaattgataccatgtgcccagta

SEQ ID NO: 68933 - DNA, 24 bp, Artificial Sequence
  Synthetic oligonucleotide; TCAGAAA chr11 5185435 5185458 5185438 -
agctaccttcctaagacactgact

SEQ ID NO: 68934 - DNA, 24 bp, Artificial Sequence
  Synthetic oligonucleotide; TCAGAAT chr11 5185336 5185359 5185339 -
aatgacgtgtccagggtcatagag

SEQ ID NO: 68935 - DNA, 24 bp, Artificial Sequence
  Synthetic oligonucleotide; TCAGAAT chr11 5185227 5185250 5185230 -
tccgtggatacattcatgattcag

SEQ ID NO: 68936 - DNA, 24 bp, Artificial Sequence
  Synthetic oligonucleotide; TCAGAAA chr11 5185214 5185237 5185217 -
tcatgattcagtcagaatatgctg

SEQ ID NO: 68937 - DNA, 24 bp, Artificial Sequence
  Synthetic oligonucleotide; CTAGAAT chr11 5185203 5185226 5185206 -
tcagaatatgctgtcagaaatatc

SEQ ID NO: 68938 - DNA, 24 bp, Artificial Sequence
  Synthetic oligonucleotide; CCAGAAA chr11 5185085 5185108 5185088 -
aaccataggtatcacaaaagatca

SEQ ID NO: 68939 - DNA, 24 bp, Artificial Sequence
  Synthetic oligonucleotide; CCAGAAA chr11 5185067 5185090 5185070 -
agatcaccagaaaaaatttaaagg

SEQ ID NO: 68940 - DNA, 24 bp, Artificial Sequence
  Synthetic oligonucleotide; CCAGAAT chr11 5184622 5184645 5184625 -
atttccatcatataaaatttgaga

SEQ ID NO: 68941 - DNA, 24 bp, Artificial Sequence
  Synthetic oligonucleotide; TGAGAAA chr11 5184461 5184484 5184464 -
caagaactttagccagcttttact

SEQ ID NO: 68942 - DNA, 24 bp, Artificial Sequence
  Synthetic oligonucleotide; GAAGAAT chr11 5183276 5183299 5183279 -
ggaataggtgtggtgtggtgctga

SEQ ID NO: 68943 - DNA, 24 bp, Artificial Sequence
  Synthetic oligonucleotide; TGAGAAT chr11 5182713 5182736 5182716 -
acatttaaggttaatattgttatg

SEQ ID NO: 68944 - DNA, 24 bp, Artificial Sequence
  Synthetic oligonucleotide; ATAGAAA chr11 5182374 5182397 5182377 -
ttccttctgaaactattccaatca

SEQ ID NO: 68945 - DNA, 24 bp, Artificial Sequence
  Synthetic oligonucleotide; AGAGAAT chr11 5182288 5182311 5182291 -
gcctagcagacacacaacaaaaaa

SEQ ID NO: 68946 - DNA, 24 bp, Artificial Sequence
  Synthetic oligonucleotide; GCAGAAA chr11 5182068 5182091 5182071 -
aaccacatgattatctcaatagat

SEQ ID NO: 68947 - DNA, 24 bp, Artificial Sequence
  Synthetic oligonucleotide; AGAGAAA chr11 5181826 5181849 5181829 -
agttctggccagggcaatcaggca

SEQ ID NO: 68948 - DNA, 24 bp, Artificial Sequence
  Synthetic oligonucleotide; AAAGAAA chr11 5181822 5181845 5181825 -
ctggccagggcaatcaggcaagag

SEQ ID NO: 68949 - DNA, 24 bp, Artificial Sequence
  Synthetic oligonucleotide; CTAGAAA chr11 5181747 5181770 5181750 -
tttgcagatgacgtgattgtatat

SEQ ID NO: 68950 - DNA, 24 bp, Artificial Sequence
  Synthetic oligonucleotide; TCAGAAA chr11 5181695 5181718 5181698 -
atctccttaagctgataagcaact

SEQ ID NO: 68951 - DNA, 24 bp, Artificial Sequence
  Synthetic oligonucleotide; AGAGAAT chr11 5181578 5181601 5181581 -
aactcccattcacaattgcctcaa

SEQ ID NO: 68952 - DNA, 24 bp, Artificial Sequence
  Synthetic oligonucleotide; GAAGAAT chr11 5181446 5181469 5181449 -
agaacattccatgctcatggatag

SEQ ID NO: 68953 - DNA, 24 bp, Artificial Sequence
  Synthetic oligonucleotide; ACAGAAT chr11 5181357 5181380 5181360 -
atcaagctaccaatgactttcttc

SEQ ID NO: 68954 - DNA, 24 bp, Artificial Sequence
  Synthetic oligonucleotide; TCAGAAA chr11 5181157 5181180 5181160 -
gaccaatggagcagaacagagctc

SEQ ID NO: 68955 - DNA, 24 bp, Artificial Sequence
  Synthetic oligonucleotide; GTAGAAA chr11 5181039 5181062 5181042 -
gctgggaaaactggctagccatat

SEQ ID NO: 68956 - DNA, 24 bp, Artificial Sequence
  Synthetic oligonucleotide; GAAGAAA chr11 5180938 5180961 5180941 -
agacctaaaaccataaaaacctta

SEQ ID NO: 68957 - DNA, 24 bp, Artificial Sequence
  Synthetic oligonucleotide; AAAGAAA chr11 5180803 5180826 5180806 -
aaactaaagagcttctgcacagca

SEQ ID NO: 68958 - DNA, 24 bp, Artificial Sequence
  Synthetic oligonucleotide; GGAGAAA chr11 5180762 5180785 5180765 -
agtgaacaggcaacctacacaatg

SEQ ID NO: 68959 - DNA, 24 bp, Artificial Sequence
  Synthetic oligonucleotide; CCAGAAT chr11 5180718 5180741 5180721 -
actcatctgacaaagggctaatat

SEQ ID NO: 68960 - DNA, 24 bp, Artificial Sequence
  Synthetic oligonucleotide; CAAGAAA chr11 5180687 5180710 5180690 -
ctacaatgaactcaaacaaattta

SEQ ID NO: 68961 - DNA, 24 bp, Artificial Sequence
  Synthetic oligonucleotide; AGAGAAA chr11 5180566 5180589 5180569 -
aaatgctcatcatcactggccatc

SEQ ID NO: 68962 - DNA, 24 bp, Artificial Sequence
  Synthetic oligonucleotide; TTAGAAT chr11 5180520 5180543 5180523 -
caatgagatatcatctcacaccag

SEQ ID NO: 68963 - DNA, 24 bp, Artificial Sequence
  Synthetic oligonucleotide; GGAGAAA chr11 5180467 5180490 5180470 -
aaccacaggtgctggagaggatgt

SEQ ID NO: 68964 - DNA, 24 bp, Artificial Sequence
  Synthetic oligonucleotide; CTAGAAA chr11 5180374 5180397 5180377 -
tggcaattcctcagggatctagaa

SEQ ID NO: 68965 - DNA, 24 bp, Artificial Sequence
  Synthetic oligonucleotide; TAAGAAA chr11 5180210 5180233 5180213 -
atgtccaacaatgatagactggat

SEQ ID NO: 68966 - DNA, 24 bp, Artificial Sequence
  Synthetic oligonucleotide; AAAGAAA chr11 5179778 5179801 5179781 -
attttcaatcagtgactgaagtgg

SEQ ID NO: 68967 - DNA, 24 bp, Artificial Sequence
  Synthetic oligonucleotide; TGAGAAA chr11 5179367 5179390 5179370 -
ttataatgttttatcctatatttt

SEQ ID NO: 68968 - DNA, 24 bp, Artificial Sequence
  Synthetic oligonucleotide; GTAGAAA chr11 5178997 5179020 5179000 -
agtctgtgggttttttttacatct

SEQ ID NO: 68969 - DNA, 24 bp, Artificial Sequence
  Synthetic oligonucleotide; GAAGAAA chr11 5178786 5178809 5178789 -
cccattttactctcctttcccaga

SEQ ID NO: 68970 - DNA, 24 bp, Artificial Sequence
  Synthetic oligonucleotide; AAAGAAA chr11 5178772 5178795 5178775 -
ctttcccagagaagaaaacattgg

SEQ ID NO: 68971 - DNA, 24 bp, Artificial Sequence
  Synthetic oligonucleotide; GCAGAAT chr11 5178326 5178349 5178329 -
ttcttcatacatttcatctttgtg

SEQ ID NO: 68972 - DNA, 24 bp, Artificial Sequence
  Synthetic oligonucleotide; GGAGAAA chr11 5178148 5178171 5178151 -
tggtataccgacttacatattgtg

SEQ ID NO: 68973 - DNA, 24 bp, Artificial Sequence
  Synthetic oligonucleotide; ATAGAAT chr11 5177691 5177714 5177694 -
agattaaaaagtctgttttaggga

SEQ ID NO: 68974 - DNA, 24 bp, Artificial Sequence
  Synthetic oligonucleotide; ATAGAAA chr11 5177673 5177696 5177676 -
tagggaatagaataaatacaatcc

SEQ ID NO: 68975 - DNA, 24 bp, Artificial Sequence
  Synthetic oligonucleotide; TCAGAAA chr11 5177550 5177573 5177553 -
actttaatgaaattctccattttt

SEQ ID NO: 68976 - DNA, 24 bp, Artificial Sequence
  Synthetic oligonucleotide; CGAGAAA chr11 5177500 5177523 5177503 -
aacttaaaaatatataaagataat

SEQ ID NO: 68977 - DNA, 24 bp, Artificial Sequence
  Synthetic oligonucleotide; AGAGAAA chr11 5177493 5177516 5177496 -
aaatatataaagataatcgagaaa

SEQ ID NO: 68978 - DNA, 24 bp, Artificial Sequence
  Synthetic oligonucleotide; CTAGAAT chr11 5177278 5177301 5177281 -
gttacttaagttaaaatgttatcc

SEQ ID NO: 68979 - DNA, 24 bp, Artificial Sequence
  Synthetic oligonucleotide; ACAGAAA chr11 5177055 5177078 5177058 -
catcaatggagcatcatggcatca

SEQ ID NO: 68980 - DNA, 24 bp, Artificial Sequence
  Synthetic oligonucleotide; GGAGAAT chr11 5176953 5176976 5176956 -
ttttaaaaagctagagaagattaa

SEQ ID NO: 68981 - DNA, 24 bp, Artificial Sequence
  Synthetic oligonucleotide; CAAGAAA chr11 5176940 5176963 5176943 -
gagaagattaaggagaatattttc

SEQ ID NO: 68982 - DNA, 24 bp, Artificial Sequence
  Synthetic oligonucleotide; AAAGAAT chr11 5176923 5176946 5176926 -
tattttccaagaaacttaaataaa

SEQ ID NO: 68983 - DNA, 24 bp, Artificial Sequence
  Synthetic oligonucleotide; TGAGAAT chr11 5176802 5176825 5176805 -
tcttaaaagcctagaacaatgcca

SEQ ID NO: 68984 - DNA, 24 bp, Artificial Sequence
  Synthetic oligonucleotide; AAAGAAA chr11 5176768 5176791 5176771 -
taaaaaatgaccttatttacacct

SEQ ID NO: 68985 - DNA, 24 bp, Artificial Sequence
  Synthetic oligonucleotide; TGAGAAA chr11 5176745 5176768 5176748 -
taaagaaagacaaaaaaaaaactt

SEQ ID NO: 68986 - DNA, 24 bp, Artificial Sequence
  Synthetic oligonucleotide; ATAGAAA chr11 5176667 5176690 5176670 -
tgcttagctttttctgtgattttt

SEQ ID NO: 68987 - DNA, 24 bp, Artificial Sequence
  Synthetic oligonucleotide; AAAGAAT chr11 5176509 5176532 5176512 -
cacacacacacacgtttgtgcacc

SEQ ID NO: 68988 - DNA, 24 bp, Artificial Sequence
  Synthetic oligonucleotide; TAAGAAA chr11 5176503 5176526 5176506 -
cacacacgtttgtgcaccaaagaa

SEQ ID NO: 68989 - DNA, 24 bp, Artificial Sequence
  Synthetic oligonucleotide; TTAGAAA chr11 5176495 5176518 5176498 -
tttgtgcaccaaagaataagaaag

SEQ ID NO: 68990 - DNA, 24 bp, Artificial Sequence
  Synthetic oligonucleotide; GGAGAAT chr11 5176455 5176478 5176458 -
tacagtatttccattattgggaag

SEQ ID NO: 68991 - DNA, 24 bp, Artificial Sequence
  Synthetic oligonucleotide; TAAGAAA chr11 5176137 5176160 5176140 -
tacttgattttagcagtggggagc

SEQ ID NO: 68992 - DNA, 24 bp, Artificial Sequence
  Synthetic oligonucleotide; GCAGAAA chr11 5175679 5175702 5175682 -
aggaaaggaaaggtccaaaaaagg

SEQ ID NO: 68993 - DNA, 24 bp, Artificial Sequence
  Synthetic oligonucleotide; ACAGAAT chr11 5175610 5175633 5175613 -
gctaaaactgatatggtgttctag

SEQ ID NO: 68994 - DNA, 24 bp, Artificial Sequence
  Synthetic oligonucleotide; TGAGAAT chr11 5175554 5175577 5175557 -
cagggtgctaagtgattgataagg

SEQ ID NO: 68995 - DNA, 24 bp, Artificial Sequence
  Synthetic oligonucleotide; GGAGAAA chr11 5175442 5175465 5175445 -
tcaagcaaaattttgatttcgggg

SEQ ID NO: 68996 - DNA, 24 bp, Artificial Sequence
  Synthetic oligonucleotide; ATAGAAT chr11 5175256 5175279 5175259 -
gcaactgcaagaaccaataggaaa

SEQ ID NO: 68997 - DNA, 24 bp, Artificial Sequence
  Synthetic oligonucleotide; GGAGAAT chr11 5175163 5175186 5175166 -
ccagctacatgggaggctgaggca

SEQ ID NO: 68998 - DNA, 24 bp, Artificial Sequence
  Synthetic oligonucleotide; AAAGAAA chr11 5175038 5175061 5175041 -
caaaaatacgtaaaacaaaaacaa

SEQ ID NO: 68999 - DNA, 24 bp, Artificial Sequence
  Synthetic oligonucleotide; TCAGAAA chr11 5174934 5174957 5174937 -
acattgtttattgtaacaattctc

SEQ ID NO: 69000 - DNA, 24 bp, Artificial Sequence
  Synthetic oligonucleotide; GCAGAAA chr11 5174690 5174713 5174693 -
tgccaaaactttttcatcatccaa

SEQ ID NO: 69001 - DNA, 24 bp, Artificial Sequence
  Synthetic oligonucleotide; CTAGAAA chr11 5173839 5173862 5173842 -
aatgttcatttgtatatcttcttt

SEQ ID NO: 69002 - DNA, 24 bp, Artificial Sequence
  Synthetic oligonucleotide; TAAGAAT chr11 5173592 5173615 5173595 -
tactcatactttttgtgtcatatc

SEQ ID NO: 69003 - DNA, 24 bp, Artificial Sequence
  Synthetic oligonucleotide; AAAGAAT chr11 5173465 5173488 5173468 -
atgctggcttttaatccttatttg

SEQ ID NO: 69004 - DNA, 24 bp, Artificial Sequence
  Synthetic oligonucleotide; ACAGAAT chr11 5173396 5173419 5173399 -
ttgaatatgaagttgtatataaaa

SEQ ID NO: 69005 - DNA, 24 bp, Artificial Sequence
  Synthetic oligonucleotide; ACAGAAA chr11 5173343 5173366 5173346 -
ggcaaaaaggacacagatcaaaca

SEQ ID NO: 69006 - DNA, 24 bp, Artificial Sequence
  Synthetic oligonucleotide; CTAGAAT chr11 5173331 5173354 5173334 -
acagatcaaacaacagaaaacagt

SEQ ID NO: 69007 - DNA, 24 bp, Artificial Sequence
  Synthetic oligonucleotide; TTAGAAA chr11 5173236 5173259 5173239 -
caacccttgatcttatacttggta

SEQ ID NO: 69008 - DNA, 24 bp, Artificial Sequence
  Synthetic oligonucleotide; TGAGAAT chr11 5173214 5173237 5173217 -
tattagaaaaattgtttatatgtt

SEQ ID NO: 69009 - DNA, 24 bp, Artificial Sequence
  Synthetic oligonucleotide; CAAGAAT chr11 5173154 5173177 5173157 -
ccccaaacaaatttcaggtggaat

SEQ ID NO: 69010 - DNA, 24 bp, Artificial Sequence
  Synthetic oligonucleotide; TAAGAAT chr11 5172993 5173016 5172996 -
tactttgtatatggaatagcttct

SEQ ID NO: 69011 - DNA, 24 bp, Artificial Sequence
  Synthetic oligonucleotide; TAAGAAA chr11 5172879 5172902 5172882 -
aagataagatgcgggggaagtata

SEQ ID NO: 69012 - DNA, 24 bp, Artificial Sequence
  Synthetic oligonucleotide; GGAGAAA chr11 5171985 5172008 5171988 -
ttttctaatctatggatagcaggt

SEQ ID NO: 69013 - DNA, 24 bp, Artificial Sequence
  Synthetic oligonucleotide; AAAGAAA chr11 5171961 5171984 5171964 -
ggagaaagagtgaactggtaagtt

SEQ ID NO: 69014 - DNA, 24 bp, Artificial Sequence
  Synthetic oligonucleotide; GGAGAAA chr11 5171931 5171954 5171934 -
aaaaatggaaaatactttattcta

SEQ ID NO: 69015 - DNA, 24 bp, Artificial Sequence
  Synthetic oligonucleotide; TCAGAAA chr11 5171449 5171472 5171452 -
ctgtggcttacctgtgcccttgtt

SEQ ID NO: 69016 - DNA, 24 bp, Artificial Sequence
  Synthetic oligonucleotide; GTAGAAA chr11 5171366 5171389 5171369 -
cagaacttgatgtgcaataactga

SEQ ID NO: 69017 - DNA, 24 bp, Artificial Sequence
  Synthetic oligonucleotide; AAAGAAA chr11 5170408 5170431 5170411 -
cccattgtctatagtatcaaaatc

SEQ ID NO: 69018 - DNA, 24 bp, Artificial Sequence
  Synthetic oligonucleotide; GAAGAAA chr11 5170222 5170245 5170225 -
aatgagctttaacattttgtagat

SEQ ID NO: 69019 - DNA, 24 bp, Artificial Sequence
  Synthetic oligonucleotide; TGAGAAT chr11 5170192 5170215 5170195 -
aaaaaacagttttatatatttccc

SEQ ID NO: 69020 - DNA, 24 bp, Artificial Sequence
  Synthetic oligonucleotide; GTAGAAA chr11 5170055 5170078 5170058 -
agtgacatttggttctgggaatat

SEQ ID NO: 69021 - DNA, 24 bp, Artificial Sequence
  Synthetic oligonucleotide; GAAGAAT chr11 5169864 5169887 5169867 -
ttacctctgatggatataaagatg

SEQ ID NO: 69022 - DNA, 24 bp, Artificial Sequence
  Synthetic oligonucleotide; CAAGAAT chr11 5169631 5169654 5169634 -
tagtgaatacaagtgtggaaaata

SEQ ID NO: 69023 - DNA, 24 bp, Artificial Sequence
  Synthetic oligonucleotide; TTAGAAA chr11 5169419 5169442 5169422 -
tggtcaggaggaaactgtttggct

SEQ ID NO: 69024 - DNA, 24 bp, Artificial Sequence
  Synthetic oligonucleotide; CTAGAAA chr11 5169385 5169408 5169388 -
attttatttttaatgagttcaata

SEQ ID NO: 69025 - DNA, 24 bp, Artificial Sequence
  Synthetic oligonucleotide; AAAGAAA chr11 5169381 5169404 5169384 -
tatttttaatgagttcaatactag

SEQ ID NO: 69026 - DNA, 24 bp, Artificial Sequence
  Synthetic oligonucleotide; GAAGAAA chr11 5169342 5169365 5169345 -
caactacttgaaaatactgtttta

SEQ ID NO: 69027 - DNA, 24 bp, Artificial Sequence
  Synthetic oligonucleotide; ACAGAAA chr11 5169324 5169347 5169327 -
gttttagaagaaaataactaaaaa

SEQ ID NO: 69028 - DNA, 24 bp, Artificial Sequence
  Synthetic oligonucleotide; GAAGAAT chr11 5169227 5169250 5169230 -
caaacaaaaaggtagggaggacca

SEQ ID NO: 69029 - DNA, 24 bp, Artificial Sequence
  Synthetic oligonucleotide; CTAGAAA chr11 5169219 5169242 5169222 -
aaggtagggaggaccagaagaatt

SEQ ID NO: 69030 - DNA, 24 bp, Artificial Sequence
  Synthetic oligonucleotide; TAAGAAA chr11 5168606 5168629 5168609 -
ataatttattcatttataaatgaa

SEQ ID NO: 69031 - DNA, 24 bp, Artificial Sequence
  Synthetic oligonucleotide; GAAGAAA chr11 5168292 5168315 5168295 -
atttaatccacggaacaaatatat

SEQ ID NO: 69032 - DNA, 24 bp, Artificial Sequence
  Synthetic oligonucleotide; GTAGAAA chr11 5168258 5168281 5168261 -
tcagtttgtctacatgttacaaat

SEQ ID NO: 69033 - DNA, 24 bp, Artificial Sequence
  Synthetic oligonucleotide; ACAGAAA chr11 5168252 5168275 5168255 -
tgtctacatgttacaaatgtagaa

SEQ ID NO: 69034 - DNA, 24 bp, Artificial Sequence
  Synthetic oligonucleotide; GCAGAAT chr11 5168197 5168220 5168200 -
cccaagtcaaagagttaataagtg

SEQ ID NO: 69035 - DNA, 24 bp, Artificial Sequence
  Synthetic oligonucleotide; TGAGAAA chr11 5167681 5167704 5167684 -
agatgatcctaaaagcagaagaga

SEQ ID NO: 69036 - DNA, 24 bp, Artificial Sequence
  Synthetic oligonucleotide; ATAGAAA chr11 5167626 5167649 5167629 -
aatcctgtgacaacaaacatctca

SEQ ID NO: 69037 - DNA, 24 bp, Artificial Sequence
  Synthetic oligonucleotide; AAAGAAA chr11 5167568 5167591 5167571 -
aaattttcaaagcgctcagggata

SEQ ID NO: 69038 - DNA, 24 bp, Artificial Sequence
  Synthetic oligonucleotide; CAAGAAT chr11 5167552 5167575 5167555 -
cagggataaaagaaaactgatatt

SEQ ID NO: 69039 - DNA, 24 bp, Artificial Sequence
  Synthetic oligonucleotide; AGAGAAT chr11 5167475 5167498 5167478 -
tctttcccagacaaacaaaagttg

SEQ ID NO: 69040 - DNA, 24 bp, Artificial Sequence
  Synthetic oligonucleotide; AAAGAAA chr11 5167415 5167438 5167418 -
tgctaaagggagttatgcaatctg

SEQ ID NO: 69041 - DNA, 24 bp, Artificial Sequence
  Synthetic oligonucleotide; AAAGAAA chr11 5167391 5167414 5167394 -
aaagaaaaaagacattaacatgca

SEQ ID NO: 69042 - DNA, 24 bp, Artificial Sequence
  Synthetic oligonucleotide; CTAGAAT chr11 5167335 5167358 5167338 -
gtaaaattaagtacatagacaaac

SEQ ID NO: 69043 - DNA, 24 bp, Artificial Sequence
  Synthetic oligonucleotide; GTAGAAT chr11 5167156 5167179 5167159 -
gtgggggtggagtggagttaaagt

SEQ ID NO: 69044 - DNA, 24 bp, Artificial Sequence
  Synthetic oligonucleotide; ATAGAAT chr11 5166814 5166837 5166817 -
gtctcagttccccaattaaaagta

SEQ ID NO: 69045 - DNA, 24 bp, Artificial Sequence
  Synthetic oligonucleotide; AAAGAAA chr11 5166796 5166819 5166799 -
aaagtaatagaatggtaaatggat

SEQ ID NO: 69046 - DNA, 24 bp, Artificial Sequence
  Synthetic oligonucleotide; CAAGAAA chr11 5166765 5166788 5166768 -
caatatccaactttatgcgatctt

SEQ ID NO: 69047 - DNA, 24 bp, Artificial Sequence
  Synthetic oligonucleotide; CCAGAAA chr11 5166689 5166712 5166692 -
gaaaaaaattccatgaactggaaa

SEQ ID NO: 69048 - DNA, 24 bp, Artificial Sequence
  Synthetic oligonucleotide; TAAGAAA chr11 5166627 5166650 5166630 -
aatagactacaaatttaaaaactg

SEQ ID NO: 69049 - DNA, 24 bp, Artificial Sequence
  Synthetic oligonucleotide; GTAGAAA chr11 5166234 5166257 5166237 -
taagtttgtacaaatttttcagaa

SEQ ID NO: 69050 - DNA, 24 bp, Artificial Sequence
  Synthetic oligonucleotide; CTAGAAA chr11 5166189 5166212 5166192 -
ttttctgaccacagtggaataaaa

SEQ ID NO: 69051 - DNA, 24 bp, Artificial Sequence
  Synthetic oligonucleotide; TCAGAAA chr11 5166164 5166187 5166167 -
tagaaatgaataacaagaagatca

SEQ ID NO: 69052 - DNA, 24 bp, Artificial Sequence
  Synthetic oligonucleotide; ATAGAAA chr11 5166155 5166178 5166158 -
ataacaagaagatcatcagaaaat

SEQ ID NO: 69053 - DNA, 24 bp, Artificial Sequence
  Synthetic oligonucleotide; TGAGAAA chr11 5165632 5165655 5165635 -
cctgtcctcctgctctttgctccg

SEQ ID NO: 69054 - DNA, 24 bp, Artificial Sequence
  Synthetic oligonucleotide; CAAGAAA chr11 5165587 5165610 5165590 -
ctcaggtcctcaaactgaccagcc

SEQ ID NO: 69055 - DNA, 24 bp, Artificial Sequence
  Synthetic oligonucleotide; CCAGAAA chr11 5164635 5164658 5164638 -
aaactcgacagtggttccaaatag

SEQ ID NO: 69056 - DNA, 24 bp, Artificial Sequence
  Synthetic oligonucleotide; CCAGAAA chr11 5163739 5163762 5163742 -
tcccccaggagcttgctacaagtg

SEQ ID NO: 69057 - DNA, 24 bp, Artificial Sequence
  Synthetic oligonucleotide; CTAGAAA chr11 5163658 5163681 5163661 -
gtgtcccatctgtgcaggacccca

SEQ ID NO: 69058 - DNA, 24 bp, Artificial Sequence
  Synthetic oligonucleotide; TCAGAAT chr11 5162885 5162908 5162888 -
accagacaagccttacaggttagt

SEQ ID NO: 69059 - DNA, 24 bp, Artificial Sequence
  Synthetic oligonucleotide; TCAGAAT chr11 5162464 5162487 5162467 -
ccttcctaggcatagttagtgcgg

SEQ ID NO: 69060 - DNA, 24 bp, Artificial Sequence
  Synthetic oligonucleotide; GTAGAAA chr11 5161919 5161942 5161922 -
cgaacctctcatttcctttccatc

SEQ ID NO: 69061 - DNA, 24 bp, Artificial Sequence
  Synthetic oligonucleotide; AAAGAAA chr11 5161903 5161926 5161906 -
tttccatcgtagaaatctatcctc

SEQ ID NO: 69062 - DNA, 24 bp, Artificial Sequence
  Synthetic oligonucleotide; TCAGAAT chr11 5161390 5161413 5161393 -
ctttctcagaagtcagacctgtcc

SEQ ID NO: 69063 - DNA, 24 bp, Artificial Sequence
  Synthetic oligonucleotide; TTAGAAT chr11 5161300 5161323 5161303 -
tctaattccagacaccagaccaac

SEQ ID NO: 69064 - DNA, 24 bp, Artificial Sequence
  Synthetic oligonucleotide; TGAGAAA chr11 5160817 5160840 5160820 -
ccctaatcccgctcgaagcagccc

SEQ ID NO: 69065 - DNA, 24 bp, Artificial Sequence
  Synthetic oligonucleotide; AAAGAAA chr11 5160274 5160297 5160277 -
aaactgaataaccaatgagtcact

SEQ ID NO: 69066 - DNA, 24 bp, Artificial Sequence
  Synthetic oligonucleotide; GTAGAAA chr11 5160138 5160161 5160141 -
caataaacacctatatccaaaaaa

SEQ ID NO: 69067 - DNA, 24 bp, Artificial Sequence
  Synthetic oligonucleotide; GGAGAAA chr11 5160051 5160074 5160054 -
accaaatgcaaaattaatagaagg

SEQ ID NO: 69068 - DNA, 24 bp, Artificial Sequence
  Synthetic oligonucleotide; TAAGAAA chr11 5160044 5160067 5160047 -
gcaaaattaatagaaggggagaaa

SEQ ID NO: 69069 - DNA, 24 bp, Artificial Sequence
  Synthetic oligonucleotide; GAAGAAA chr11 5160030 5160053 5160033 -
aggggagaaataagaaagatcaga

SEQ ID NO: 69070 - DNA, 24 bp, Artificial Sequence
  Synthetic oligonucleotide; ACAGAAA chr11 5159999 5160022 5160002 -
caaatgaaattgagaccaaaaaat

SEQ ID NO: 69071 - DNA, 24 bp, Artificial Sequence
  Synthetic oligonucleotide; TAAGAAA chr11 5159936 5159959 5159939 -
aggtaaacaaaatcaacaaaactt

SEQ ID NO: 69072 - DNA, 24 bp, Artificial Sequence
  Synthetic oligonucleotide; TTAGAAA chr11 5159913 5159936 5159916 -
ttaagaaaaaagagtcaaataaaa

SEQ ID NO: 69073 - DNA, 24 bp, Artificial Sequence
  Synthetic oligonucleotide; CTAGAAT chr11 5159814 5159837 5159817 -
ctgtattccaacaaattggaaaat

SEQ ID NO: 69074 - DNA, 24 bp, Artificial Sequence
  Synthetic oligonucleotide; GTAGAAA chr11 5159760 5159783 5159763 -
tacagcctagcaagactgaagcat

SEQ ID NO: 69075 - DNA, 24 bp, Artificial Sequence
  Synthetic oligonucleotide; ACAGAAA chr11 5159754 5159777 5159757 -
ctagcaagactgaagcatgtagaa

SEQ ID NO: 69076 - DNA, 24 bp, Artificial Sequence
  Synthetic oligonucleotide; AAAGAAA chr11 5159689 5159712 5159692 -
agttgtaatataaagtttcctatt

SEQ ID NO: 69077 - DNA, 24 bp, Artificial Sequence
  Synthetic oligonucleotide; AGAGAAA chr11 5159421 5159444 5159424 -
ccaagtgctaacattatgctgaac

SEQ ID NO: 69078 - DNA, 24 bp, Artificial Sequence
  Synthetic oligonucleotide; CAAGAAT chr11 5159379 5159402 5159382 -
tttcctctaaggactgaaataagg

SEQ ID NO: 69079 - DNA, 24 bp, Artificial Sequence
  Synthetic oligonucleotide; AGAGAAA chr11 5159325 5159348 5159328 -
aacataatattggaagtcttggaa

SEQ ID NO: 69080 - DNA, 24 bp, Artificial Sequence
  Synthetic oligonucleotide; AGAGAAA chr11 5159311 5159334 5159314 -
agtcttggaaagagaaattcagga

SEQ ID NO: 69081 - DNA, 24 bp, Artificial Sequence
  Synthetic oligonucleotide; AAAGAAA chr11 5159307 5159330 5159310 -
ttggaaagagaaattcaggaagag

SEQ ID NO: 69082 - DNA, 24 bp, Artificial Sequence
  Synthetic oligonucleotide; TTAGAAA chr11 5159236 5159259 5159239 -
tttgtagatgacatgatcttatac

SEQ ID NO: 69083 - DNA, 24 bp, Artificial Sequence
  Synthetic oligonucleotide; TAAGAAA chr11 5159018 5159041 5159021 -
aacccaagaagtaaaagatctcta

SEQ ID NO: 69084 - DNA, 24 bp, Artificial Sequence
  Synthetic oligonucleotide; AAAGAAA chr11 5158993 5159016 5158996 -
aagaaaaattataaaactctggtg

SEQ ID NO: 69085 - DNA, 24 bp, Artificial Sequence
  Synthetic oligonucleotide; GAAGAAT chr11 5158935 5158958 5158938 -
acgatattccatgctcatgaacta

SEQ ID NO: 69086 - DNA, 24 bp, Artificial Sequence
  Synthetic oligonucleotide; ACAGAAA chr11 5158852 5158875 5158855 -
tctgtcaaaataccaatggcattc

SEQ ID NO: 69087 - DNA, 24 bp, Artificial Sequence
  Synthetic oligonucleotide; ATAGAAA chr11 5158846 5158869 5158849 -
aaaataccaatggcattcacagaa

SEQ ID NO: 69088 - DNA, 24 bp, Artificial Sequence
  Synthetic oligonucleotide; GGAGAAT chr11 5158390 5158413 5158393 -
ccagatactcaggaggctgaggca

SEQ ID NO: 69089 - DNA, 24 bp, Artificial Sequence
  Synthetic oligonucleotide; CAAGAAA chr11 5158261 5158284 5158264 -
aaaaaaaggtacaaacagtctttt

SEQ ID NO: 69090 - DNA, 24 bp, Artificial Sequence
  Synthetic oligonucleotide; GAAGAAA chr11 5158125 5158148 5158128 -
atacctgaaattatgaaactactg

SEQ ID NO: 69091 - DNA, 24 bp, Artificial Sequence
  Synthetic oligonucleotide; AAAGAAA chr11 5157998 5158021 5158001 -
ggattgtttgaagctctgcacagc

SEQ ID NO: 69092 - DNA, 24 bp, Artificial Sequence
  Synthetic oligonucleotide; AAAGAAT chr11 5157968 5157991 5157971 -
aataataaagtgaagagacaaccc

SEQ ID NO: 69093 - DNA, 24 bp, Artificial Sequence
  Synthetic oligonucleotide; GGAGAAA chr11 5157960 5157983 5157963 -
agtgaagagacaacccaaagaatg

SEQ ID NO: 69094 - DNA, 24 bp, Artificial Sequence
  Synthetic oligonucleotide; CCAGAAT chr11 5157916 5157939 5157919 -
atatattttacaaggaattgataa

SEQ ID NO: 69095 - DNA, 24 bp, Artificial Sequence
  Synthetic oligonucleotide; CAAGAAA chr11 5157906 5157929 5157909 -
caaggaattgataaccagaatatg

SEQ ID NO: 69096 - DNA, 24 bp, Artificial Sequence
  Synthetic oligonucleotide; ACAGAAA chr11 5157886 5157909 5157889 -
tatgcaagaaactcaagcaactca

SEQ ID NO: 69097 - DNA, 24 bp, Artificial Sequence
  Synthetic oligonucleotide; AAAGAAT chr11 5157534 5157557 5157537 -
atcactcctaggtatataccctta

SEQ ID NO: 69098 - DNA, 24 bp, Artificial Sequence
  Synthetic oligonucleotide; AAAGAAA chr11 5157420 5157443 5157423 -
gtattcgtcaacagataaatggat

SEQ ID NO: 69099 - DNA, 24 bp, Artificial Sequence
  Synthetic oligonucleotide; AAAGAAT chr11 5157356 5157379 5157359 -
aatggaatattattcaaccataaa

SEQ ID NO: 69100 - DNA, 24 bp, Artificial Sequence
  Synthetic oligonucleotide; ACAGAAA chr11 5157281 5157304 5157284 -
tacgttaagtgaaataagccaagc

SEQ ID NO: 69101 - DNA, 24 bp, Artificial Sequence
  Synthetic oligonucleotide; AAAGAAA chr11 5157277 5157300 5157280 -
ttaagtgaaataagccaagcacag

SEQ ID NO: 69102 - DNA, 24 bp, Artificial Sequence
  Synthetic oligonucleotide; GAAGAAA chr11 5157182 5157205 5157185 -
ttggtagttaccggcggcgggagg

SEQ ID NO: 69103 - DNA, 24 bp, Artificial Sequence
  Synthetic oligonucleotide; TGAGAAA chr11 5157171 5157194 5157174 -
cggcggcgggagggaagaaaggaa

SEQ ID NO: 69104 - DNA, 24 bp, Artificial Sequence
  Synthetic oligonucleotide; GGAGAAT chr11 5156805 5156828 5156808 -
ccacctacttgggaggcttgggca

SEQ ID NO: 69105 - DNA, 24 bp, Artificial Sequence
  Synthetic oligonucleotide; GGAGAAT chr11 5156439 5156462 5156442 -
ccagctactatggaggctgaggcg

SEQ ID NO: 69106 - DNA, 24 bp, Artificial Sequence
  Synthetic oligonucleotide; AAAGAAA chr11 5156339 5156362 5156342 -
cagagagagactctgtctcaaaaa

SEQ ID NO: 69107 - DNA, 24 bp, Artificial Sequence
  Synthetic oligonucleotide; GGAGAAA chr11 5156133 5156156 5156136 -
tgttcctgtgtacttggaacagag

SEQ ID NO: 69108 - DNA, 24 bp, Artificial Sequence
  Synthetic oligonucleotide; TTAGAAT chr11 5156032 5156055 5156035 -
agtcaccagcacatgtgaatagtt

SEQ ID NO: 69109 - DNA, 24 bp, Artificial Sequence
  Synthetic oligonucleotide; GAAGAAA chr11 5155960 5155983 5155963 -
aataaaatcagtataagagaagag

SEQ ID NO: 69110 - DNA, 24 bp, Artificial Sequence
  Synthetic oligonucleotide; AAAGAAT chr11 5155915 5155938 5155918 -
agtctaaattgtttcttagtgaca

SEQ ID NO: 69111 - DNA, 24 bp, Artificial Sequence
  Synthetic oligonucleotide; CAAGAAA chr11 5155667 5155690 5155670 -
tatcaagtgtctcttagctacatt

SEQ ID NO: 69112 - DNA, 24 bp, Artificial Sequence
  Synthetic oligonucleotide; CTAGAAA chr11 5155658 5155681 5155661 -
tctcttagctacattcaagaaagc

SEQ ID NO: 69113 - DNA, 24 bp, Artificial Sequence
  Synthetic oligonucleotide; GGAGAAT chr11 5155633 5155656 5155636 -
tagaaaccagctgtaaaatgtcaa

SEQ ID NO: 69114 - DNA, 24 bp, Artificial Sequence
  Synthetic oligonucleotide; TTAGAAT chr11 5155603 5155626 5155606 -
tagtgtcatatgcataagtcttgc

SEQ ID NO: 69115 - DNA, 24 bp, Artificial Sequence
  Synthetic oligonucleotide; TTAGAAT chr11 5155504 5155527 5155507 -
agactataatttttttcatttcat

SEQ ID NO: 69116 - DNA, 24 bp, Artificial Sequence
  Synthetic oligonucleotide; AAAGAAA chr11 5155449 5155472 5155452 -
taggaatataatgactgttttttg

SEQ ID NO: 69117 - DNA, 24 bp, Artificial Sequence
  Synthetic oligonucleotide; GAAGAAA chr11 5155420 5155443 5155423 -
aaaagaaggaaggaaagtaacaag

SEQ ID NO: 69118 - DNA, 24 bp, Artificial Sequence
  Synthetic oligonucleotide; AGAGAAA chr11 5155412 5155435 5155415 -
gaaggaaagtaacaaggaagaaag

SEQ ID NO: 69119 - DNA, 24 bp, Artificial Sequence
  Synthetic oligonucleotide; TTAGAAA chr11 5155339 5155362 5155342 -
cttccagctttacatttgtaggac

SEQ ID NO: 69120 - DNA, 24 bp, Artificial Sequence
  Synthetic oligonucleotide; TAAGAAT chr11 5155310 5155333 5155313 -
aatgtccattataatttgtcacta

SEQ ID NO: 69121 - DNA, 24 bp, Artificial Sequence
  Synthetic oligonucleotide; GAAGAAT chr11 5155254 5155277 5155257 -
aaaaacttcaataaaataaaatgg

SEQ ID NO: 69122 - DNA, 24 bp, Artificial Sequence
  Synthetic oligonucleotide; AGAGAAA chr11 5155170 5155193 5155173 -
cagatttttcttttctgaataaaa

SEQ ID NO: 69123 - DNA, 24 bp, Artificial Sequence
  Synthetic oligonucleotide; ATAGAAA chr11 5155110 5155133 5155113 -
atatttatttaaataggaattggc

SEQ ID NO: 69124 - DNA, 24 bp, Artificial Sequence
  Synthetic oligonucleotide; TTAGAAT chr11 5155082 5155105 5155085 -
aaacatgtttgcattaaatgggct

SEQ ID NO: 69125 - DNA, 24 bp, Artificial Sequence
  Synthetic oligonucleotide; ATAGAAA chr11 5155068 5155091 5155071 -
taaatgggctttagaattttgcaa

SEQ ID NO: 69126 - DNA, 24 bp, Artificial Sequence
  Synthetic oligonucleotide; GCAGAAA chr11 5155059 5155082 5155062 -
tttagaattttgcaaatagaaatg

SEQ ID NO: 69127 - DNA, 24 bp, Artificial Sequence
  Synthetic oligonucleotide; AGAGAAA chr11 5154989 5155012 5154992 -
attctgcatttagcctgtgggaaa

SEQ ID NO: 69128 - DNA, 24 bp, Artificial Sequence
  Synthetic oligonucleotide; AGAGAAA chr11 5154979 5155002 5154982 -
tagcctgtgggaaaagagaaaaag

SEQ ID NO: 69129 - DNA, 24 bp, Artificial Sequence
  Synthetic oligonucleotide; GTAGAAA chr11 5154956 5154979 5154959 -
gagagaaaggagatttctgcaagt

SEQ ID NO: 69130 - DNA, 24 bp, Artificial Sequence
  Synthetic oligonucleotide; TCAGAAT chr11 5154743 5154766 5154746 -
agctcaataaattcatcccgtgtt

SEQ ID NO: 69131 - DNA, 24 bp, Artificial Sequence
  Synthetic oligonucleotide; ACAGAAA chr11 5154519 5154542 5154522 -
tggatgctgttacacagagtgcag

SEQ ID NO: 69132 - DNA, 24 bp, Artificial Sequence
  Synthetic oligonucleotide; GAAGAAA chr11 5154459 5154482 5154462 -
gggaatgaagctggaatccttgga

SEQ ID NO: 69133 - DNA, 24 bp, Artificial Sequence
  Synthetic oligonucleotide; GAAGAAA chr11 5154134 5154157 5154137 -
attctaattgtgattatctttgga

SEQ ID NO: 69134 - DNA, 24 bp, Artificial Sequence
  Synthetic oligonucleotide; TTAGAAA chr11 5154114 5154137 5154117 -
tggagaagaaaaaatttgccccta

SEQ ID NO: 69135 - DNA, 24 bp, Artificial Sequence
  Synthetic oligonucleotide; AAAGAAT chr11 5153699 5153722 5153702 -
aacaactttattgaagtgtctagg

SEQ ID NO: 69136 - DNA, 24 bp, Artificial Sequence
  Synthetic oligonucleotide; TTAGAAA chr11 5153611 5153634 5153614 -
gtactgattcaaaatatgtaattt

SEQ ID NO: 69137 - DNA, 24 bp, Artificial Sequence
  Synthetic oligonucleotide; TCAGAAA chr11 5153552 5153575 5153555 -
ataaagcataagagcccaggtttt

SEQ ID NO: 69138 - DNA, 24 bp, Artificial Sequence
  Synthetic oligonucleotide; TAAGAAA chr11 5153421 5153444 5153424 -
tctagttctacatttgacttcttc

SEQ ID NO: 69139 - DNA, 24 bp, Artificial Sequence
  Synthetic oligonucleotide; AAAGAAA chr11 5153037 5153060 5153040 -
aaaaatataattccctttaacttt

SEQ ID NO: 69140 - DNA, 24 bp, Artificial Sequence
  Synthetic oligonucleotide; AAAGAAA chr11 5152934 5152957 5152937 -
ctctttacattattctgaatataa

SEQ ID NO: 69141 - DNA, 24 bp, Artificial Sequence
  Synthetic oligonucleotide; AAAGAAA chr11 5152815 5152838 5152818 -
aatttgcttgtctaaaatgttctt

SEQ ID NO: 69142 - DNA, 24 bp, Artificial Sequence
  Synthetic oligonucleotide; AAAGAAA chr11 5152685 5152708 5152688 -
ttttttttttgtccacaggtctgg

SEQ ID NO: 69143 - DNA, 24 bp, Artificial Sequence
  Synthetic oligonucleotide; GGAGAAA chr11 5152452 5152475 5152455 -
agacagactcaatataatgagttt

SEQ ID NO: 69144 - DNA, 24 bp, Artificial Sequence
  Synthetic oligonucleotide; TCAGAAA chr11 5152444 5152467 5152447 -
tcaatataatgagtttggagaaaa

SEQ ID NO: 69145 - DNA, 24 bp, Artificial Sequence
  Synthetic oligonucleotide; TGAGAAA chr11 5152412 5152435 5152415 -
cagaagaggaacagtaacactgac

SEQ ID NO: 69146 - DNA, 24 bp, Artificial Sequence
  Synthetic oligonucleotide; CTAGAAT chr11 5152307 5152330 5152310 -
ttgacactagtagggatcccaggc

SEQ ID NO: 69147 - DNA, 24 bp, Artificial Sequence
  Synthetic oligonucleotide; TAAGAAT chr11 5151166 5151189 5151169 -
tagcccctggttgagttattcttc

SEQ ID NO: 69148 - DNA, 24 bp, Artificial Sequence
  Synthetic oligonucleotide; AAAGAAA chr11 5150981 5151004 5150984 -
gtacatgttaactgtgttcttgtc

SEQ ID NO: 69149 - DNA, 24 bp, Artificial Sequence
  Synthetic oligonucleotide; ACAGAAT chr11 5150769 5150792 5150772 -
ctgcaatattaaaaatactatact

SEQ ID NO: 69150 - DNA, 24 bp, Artificial Sequence
  Synthetic oligonucleotide; AGAGAAA chr11 5150643 5150666 5150646 -
gaatgggcaggcaagggaaagaag

SEQ ID NO: 69151 - DNA, 24 bp, Artificial Sequence
  Synthetic oligonucleotide; AGAGAAT chr11 5150604 5150627 5150607 -
gtacacataggatgtggagttcag

SEQ ID NO: 69152 - DNA, 24 bp, Artificial Sequence
  Synthetic oligonucleotide; TAAGAAT chr11 5150114 5150137 5150117 -
ctatattgtctaaaattagtggca

SEQ ID NO: 69153 - DNA, 24 bp, Artificial Sequence
  Synthetic oligonucleotide; AAAAAC chr11 5150387 5150410 5150407 +
taccttgcactcataccatattga

SEQ ID NO: 69154 - DNA, 24 bp, Artificial Sequence
  Synthetic oligonucleotide; AAAAAC chr11 5150518 5150541 5150538 +
gaatcagaggtaactacctaacca

SEQ ID NO: 69155 - DNA, 24 bp, Artificial Sequence
  Synthetic oligonucleotide; AAAAAC chr11 5150824 5150847 5150844 +
gtaaattttgaggttagcaaaaaa

SEQ ID NO: 69156 - DNA, 24 bp, Artificial Sequence
  Synthetic oligonucleotide; TAAAAC chr11 5151281 5151304 5151301 +
tgattgatatgagccatgatgatc

SEQ ID NO: 69157 - DNA, 24 bp, Artificial Sequence
  Synthetic oligonucleotide; AAAAAC chr11 5151659 5151682 5151679 +
cctagcctccttctggggcaaacg

SEQ ID NO: 69158 - DNA, 24 bp, Artificial Sequence
  Synthetic oligonucleotide; AAAAAC chr11 5153527 5153550 5153547 +
tttcactgatgattgaattttctg

SEQ ID NO: 69159 - DNA, 24 bp, Artificial Sequence
  Synthetic oligonucleotide; TAAAAC chr11 5154687 5154710 5154707 +
catctttgtgtgctcatcccccag

SEQ ID NO: 69160 - DNA, 24 bp, Artificial Sequence
  Synthetic oligonucleotide; CAAAAC chr11 5154851 5154874 5154871 +
atgagggatttcctagttgatagc

SEQ ID NO: 69161 - DNA, 24 bp, Artificial Sequence
  Synthetic oligonucleotide; AAAAAC chr11 5155427 5155450 5155447 +
ctttccttccttctttttctttca

SEQ ID NO: 69162 - DNA, 24 bp, Artificial Sequence
  Synthetic oligonucleotide; TAAAAC chr11 5155808 5155831 5155828 +
cagaatttcctctgtgaaggagca

SEQ ID NO: 69163 - DNA, 24 bp, Artificial Sequence
  Synthetic oligonucleotide; TAAAAC chr11 5156005 5156028 5156025 +
gttctatcttgggtcatttcattc

SEQ ID NO: 69164 - DNA, 24 bp, Artificial Sequence
  Synthetic oligonucleotide; TAAAAC chr11 5160713 5160736 5160733 +
gtcttcttatattaataagaaaaa

SEQ ID NO: 69165 - DNA, 24 bp, Artificial Sequence
  Synthetic oligonucleotide; AAAAAC chr11 5160956 5160979 5160976 +
ctggatacggttttgtatggattg

SEQ ID NO: 69166 - DNA, 24 bp, Artificial Sequence
  Synthetic oligonucleotide; AAAAAC chr11 5160983 5161006 5161003 +
aaccaaatggaataagagaaggag

SEQ ID NO: 69167 - DNA, 24 bp, Artificial Sequence
  Synthetic oligonucleotide; AAAAAC chr11 5161151 5161174 5161171 +
gagatatcagctgtgatggcttgg

SEQ ID NO: 69168 - DNA, 24 bp, Artificial Sequence
  Synthetic oligonucleotide; AAAAAC chr11 5161539 5161562 5161559 +
gttttactgaatactaagagcctg

SEQ ID NO: 69169 - DNA, 24 bp, Artificial Sequence
  Synthetic oligonucleotide; TAAAAC chr11 5162366 5162389 5162386 +
tgcatgcagacctgagggctaggc

SEQ ID NO: 69170 - DNA, 24 bp, Artificial Sequence
  Synthetic oligonucleotide; CAAAAC chr11 5162827 5162850 5162847 +
gtttggcaccatggggtggatagg

SEQ ID NO: 69171 - DNA, 24 bp, Artificial Sequence
  Synthetic oligonucleotide; GAAAAC chr11 5163155 5163178 5163175 +
tgtgaaggaggctttgaactgggg

SEQ ID NO: 69172 - DNA, 24 bp, Artificial Sequence
  Synthetic oligonucleotide; TAAAAC chr11 5165383 5165406 5165403 +
gcaccggagttttgggtccacgga

SEQ ID NO: 69173 - DNA, 24 bp, Artificial Sequence
  Synthetic oligonucleotide; AAAAAC chr11 5167109 5167132 5167129 +
aaataaaggaatataaacaagggc

SEQ ID NO: 69174 - DNA, 24 bp, Artificial Sequence
  Synthetic oligonucleotide; TAAAAC chr11 5167756 5167779 5167776 +
acacttagaatgaataatatgtaa

SEQ ID NO: 69175 - DNA, 24 bp, Artificial Sequence
  Synthetic oligonucleotide; GAAAAC chr11 5167942 5167965 5167962 +
ccccttttataaagatcctcttga

SEQ ID NO: 69176 - DNA, 24 bp, Artificial Sequence
  Synthetic oligonucleotide; GAAAAC chr11 5168988 5169011 5169008 +
ttaagtccataaattaatttcgag

SEQ ID NO: 69177 - DNA, 24 bp, Artificial Sequence
  Synthetic oligonucleotide; GAAAAC chr11 5169147 5169170 5169167 +
catggaaattcaaaattatctgaa

SEQ ID NO: 69178 - DNA, 24 bp, Artificial Sequence
  Synthetic oligonucleotide; TAAAAC chr11 5169318 5169341 5169338 +
ttctgttttttagttattttcttc

SEQ ID NO: 69179 - DNA, 24 bp, Artificial Sequence
  Synthetic oligonucleotide; CAAAAC chr11 5169759 5169782 5169779 +
agctgtaccgttttgacaaattga

SEQ ID NO: 69180 - DNA, 24 bp, Artificial Sequence
  Synthetic oligonucleotide; TAAAAC chr11 5170178 5170201 5170198 +
atttcctattctcagggaaatata

SEQ ID NO: 69181 - DNA, 24 bp, Artificial Sequence
  Synthetic oligonucleotide; GAAAAC chr11 5170964 5170987 5170984 +
tccataagagtgaaagagtgcata

SEQ ID NO: 69182 - DNA, 24 bp, Artificial Sequence
  Synthetic oligonucleotide; CAAAAC chr11 5170989 5171012 5171009 +
aaaacatctggagcaggcaaccac

SEQ ID NO: 69183 - DNA, 24 bp, Artificial Sequence
  Synthetic oligonucleotide; GAAAAC chr11 5171270 5171293 5171290 +
aggtgtgaatgttatggaacgttt

SEQ ID NO: 69184 - DNA, 24 bp, Artificial Sequence
  Synthetic oligonucleotide; AAAAAC chr11 5171556 5171579 5171576 +
caagttgggtcatctatggcagtg

SEQ ID NO: 69185 - DNA, 24 bp, Artificial Sequence
  Synthetic oligonucleotide; CAAAAC chr11 5172775 5172798 5172795 +
cataagaacatgccaatgtcaatg

SEQ ID NO: 69186 - DNA, 24 bp, Artificial Sequence
  Synthetic oligonucleotide; CAAAAC chr11 5172907 5172930 5172927 +
aattttttcatacacaatcattta

SEQ ID NO: 69187 - DNA, 24 bp, Artificial Sequence
  Synthetic oligonucleotide; AAAAAC chr11 5173751 5173774 5173771 +
atgtatgaaaaagtcctacaactc

SEQ ID NO: 69188 - DNA, 24 bp, Artificial Sequence
  Synthetic oligonucleotide; CAAAAC chr11 5173857 5173880 5173877 +
aacattggcacataaaatgcaaac

SEQ ID NO: 69189 - DNA, 24 bp, Artificial Sequence
  Synthetic oligonucleotide; CAAAAC chr11 5173915 5173938 5173935 +
agaatgtctatactttaagagaaa

SEQ ID NO: 69190 - DNA, 24 bp, Artificial Sequence
  Synthetic oligonucleotide; AAAAAC chr11 5174034 5174057 5174054 +
tagaaaatattttgacagttcttc

SEQ ID NO: 69191 - DNA, 24 bp, Artificial Sequence
  Synthetic oligonucleotide; TAAAAC chr11 5174335 5174358 5174355 +
atggcaactttaagtgaaatgatg

SEQ ID NO: 69192 - DNA, 24 bp, Artificial Sequence
  Synthetic oligonucleotide; CAAAAC chr11 5174535 5174558 5174555 +
atgttgggtaaaataagccagaca

SEQ ID NO: 69193 - DNA, 24 bp, Artificial Sequence
  Synthetic oligonucleotide; TAAAAC chr11 5174847 5174870 5174867 +
tcacaataaaaatggaaagaaatt

SEQ ID NO: 69194 - DNA, 24 bp, Artificial Sequence
  Synthetic oligonucleotide; TAAAAC chr11 5175257 5175280 5175277 +
ttcctattggttcttgcagttgca

SEQ ID NO: 69195 - DNA, 24 bp, Artificial Sequence
  Synthetic oligonucleotide; TAAAAC chr11 5175467 5175490 5175487 +
tgatattaactaagacctcagtta

SEQ ID NO: 69196 - DNA, 24 bp, Artificial Sequence
  Synthetic oligonucleotide; CAAAAC chr11 5175620 5175643 5175640 +
atatcagttttagctaagtgcttc

SEQ ID NO: 69197 - DNA, 24 bp, Artificial Sequence
  Synthetic oligonucleotide; GAAAAC chr11 5175832 5175855 5175852 +
ctggttaaggagacagtagaacat

SEQ ID NO: 69198 - DNA, 24 bp, Artificial Sequence
  Synthetic oligonucleotide; CAAAAC chr11 5176269 5176292 5176289 +
gtgtaaatttcacattagaatgtc

SEQ ID NO: 69199 - DNA, 24 bp, Artificial Sequence
  Synthetic oligonucleotide; AAAAAC chr11 5176293 5176316 5176313 +
caaaacattgtgtagagtagaaaa

SEQ ID NO: 69200 - DNA, 24 bp, Artificial Sequence
  Synthetic oligonucleotide; CAAAAC chr11 5177401 5177424 5177421 +
ctataaaaagcccagtgactgact

SEQ ID NO: 69201 - DNA, 24 bp, Artificial Sequence
  Synthetic oligonucleotide; CAAAAC chr11 5177561 5177584 5177581 +
atttcattaaagtatttttttttt

SEQ ID NO: 69202 - DNA, 24 bp, Artificial Sequence
  Synthetic oligonucleotide; TAAAAC chr11 5177671 5177694 5177691 +
atggattgtatttattctattccc

SEQ ID NO: 69203 - DNA, 24 bp, Artificial Sequence
  Synthetic oligonucleotide; AAAAAC chr11 5178982 5179005 5179002 +
tactattatttctacagatgtaaa

SEQ ID NO: 69204 - DNA, 24 bp, Artificial Sequence
  Synthetic oligonucleotide; TAAAAC chr11 5179093 5179116 5179113 +
accatccaatgctgcctatcaagg

SEQ ID NO: 69205 - DNA, 24 bp, Artificial Sequence
  Synthetic oligonucleotide; TAAAAC chr11 5179105 5179128 5179125 +
tgcctatcaaggtaaaactagata

SEQ ID NO: 69206 - DNA, 24 bp, Artificial Sequence
  Synthetic oligonucleotide; TAAAAC chr11 5179354 5179377 5179374 +
aatctatttctcaaaaatatagga

SEQ ID NO: 69207 - DNA, 24 bp, Artificial Sequence
  Synthetic oligonucleotide; CAAAAC chr11 5179511 5179534 5179531 +
tcaggagttccagaccagcttgac

SEQ ID NO: 69208 - DNA, 24 bp, Artificial Sequence
  Synthetic oligonucleotide; AAAAAC chr11 5182586 5182609 5182606 +
gaaacaaccagtaccagccactgc

SEQ ID NO: 69209 - DNA, 24 bp, Artificial Sequence
  Synthetic oligonucleotide; GAAAAC chr11 5182868 5182891 5182888 +
ggaggaagatctaccaagcaaatg

SEQ ID NO: 69210 - DNA, 24 bp, Artificial Sequence
  Synthetic oligonucleotide; TAAAAC chr11 5182909 5182932 5182929 +
agggtttgcaatcttagtctctga

SEQ ID NO: 69211 - DNA, 24 bp, Artificial Sequence
  Synthetic oligonucleotide; CAAAAC chr11 5183397 5183420 5183417 +
gaactcaggattaagaaactcact

SEQ ID NO: 69212 - DNA, 24 bp, Artificial Sequence
  Synthetic oligonucleotide; CAAAAC chr11 5183515 5183538 5183535 +
aaaccaacgagaataaagatacaa

SEQ ID NO: 69213 - DNA, 24 bp, Artificial Sequence
  Synthetic oligonucleotide; AAAAAC chr11 5183726 5183749 5183746 +
agaagtgaaggagattgagacaca

SEQ ID NO: 69214 - DNA, 24 bp, Artificial Sequence
  Synthetic oligonucleotide; TAAAAC chr11 5184119 5184142 5184139 +
aagtaatttaatgttttcacatta

SEQ ID NO: 69215 - DNA, 24 bp, Artificial Sequence
  Synthetic oligonucleotide; GAAAAC chr11 5185026 5185049 5185046 +
acaggaatgaagataagggggaaa

SEQ ID NO: 69216 - DNA, 24 bp, Artificial Sequence
  Synthetic oligonucleotide; TAAAAC chr11 5185116 5185139 5185136 +
atttgtttgtttttttgtttttcc

SEQ ID NO: 69217 - DNA, 24 bp, Artificial Sequence
  Synthetic oligonucleotide; GAAAAC chr11 5186026 5186049 5186046 +
gcattatttaaacatattctaaga

SEQ ID NO: 69218 - DNA, 24 bp, Artificial Sequence
  Synthetic oligonucleotide; AAAAAC chr11 5186878 5186901 5186898 +
aaataccatgatattcatggaatt

SEQ ID NO: 69219 - DNA, 24 bp, Artificial Sequence
  Synthetic oligonucleotide; TAAAAC chr11 5187015 5187038 5187035 +
agaagcttttttcacctatagtag

SEQ ID NO: 69220 - DNA, 24 bp, Artificial Sequence
  Synthetic oligonucleotide; TAAAAC chr11 5187038 5187061 5187058 +
gtaaaacttagtaaaaaaaaatag

SEQ ID NO: 69221 - DNA, 24 bp, Artificial Sequence
  Synthetic oligonucleotide; TAAAAC chr11 5187538 5187561 5187558 +
taatgtttttaaatctggggactc

SEQ ID NO: 69222 - DNA, 24 bp, Artificial Sequence
  Synthetic oligonucleotide; TAAAAC chr11 5187664 5187687 5187684 +
gatacaagtaccatgttactactt

SEQ ID NO: 69223 - DNA, 24 bp, Artificial Sequence
  Synthetic oligonucleotide; TAAAAC chr11 5188575 5188598 5188595 +
gaatgctatccaacacaactttct

SEQ ID NO: 69224 - DNA, 24 bp, Artificial Sequence
  Synthetic oligonucleotide; GAAAAC chr11 5190058 5190081 5190078 +
aattatctgctcggccatgtggta

SEQ ID NO: 69225 - DNA, 24 bp, Artificial Sequence
  Synthetic oligonucleotide; TAAAAC chr11 5191047 5191070 5191067 +
catgtgcaagggaaatgcccttta

SEQ ID NO: 69226 - DNA, 24 bp, Artificial Sequence
  Synthetic oligonucleotide; AAAAAC chr11 5191099 5191122 5191119 +
tcactatcatgagaacagcatgtg

SEQ ID NO: 69227 - DNA, 24 bp, Artificial Sequence
  Synthetic oligonucleotide; GAAAAC chr11 5191195 5191218 5191215 +
ctattcaagaagaaatttgggtgg

SEQ ID NO: 69228 - DNA, 24 bp, Artificial Sequence
  Synthetic oligonucleotide; GAAAAC chr11 5191926 5191949 5191946 +
tcaggtatttttttacagcagtgt

SEQ ID NO: 69229 - DNA, 24 bp, Artificial Sequence
  Synthetic oligonucleotide; AAAAAC chr11 5194715 5194738 5194735 +
tctcagtaaactatcgcaaggacg

SEQ ID NO: 69230 - DNA, 24 bp, Artificial Sequence
  Synthetic oligonucleotide; TAAAAC chr11 5194945 5194968 5194965 +
cctgcacattgtgcacatgtaccc

SEQ ID NO: 69231 - DNA, 24 bp, Artificial Sequence
  Synthetic oligonucleotide; AAAAAC chr11 5196436 5196459 5196456 +
tccacaaaagcagtccctggtacc

SEQ ID NO: 69232 - DNA, 24 bp, Artificial Sequence
  Synthetic oligonucleotide; AAAAAC chr11 5196508 5196531 5196528 +
tattattagcagatcatttttact

SEQ ID NO: 69233 - DNA, 24 bp, Artificial Sequence
  Synthetic oligonucleotide; GAAAAC chr11 5196934 5196957 5196954 +
tcagctgttgttgcctaattcatg

SEQ ID NO: 69234 - DNA, 24 bp, Artificial Sequence
  Synthetic oligonucleotide; CAAAAC chr11 5197010 5197033 5197030 +
ccacctggctactatgtagctttt

SEQ ID NO: 69235 - DNA, 24 bp, Artificial Sequence
  Synthetic oligonucleotide; CAAAAC chr11 5197156 5197179 5197176 +
attgcttccagatagaggcctttg

SEQ ID NO: 69236 - DNA, 24 bp, Artificial Sequence
  Synthetic oligonucleotide; GAAAAC chr11 5197613 5197636 5197633 +
atgcttccctatgagtggctggtg

SEQ ID NO: 69237 - DNA, 24 bp, Artificial Sequence
  Synthetic oligonucleotide; TAAAAC chr11 5197800 5197823 5197820 +
agcagctaacttctcttttcatta

SEQ ID NO: 69238 - DNA, 24 bp, Artificial Sequence
  Synthetic oligonucleotide; TAAAAC chr11 5198712 5198735 5198732 +
atacctaatagaatataggaagat

SEQ ID NO: 69239 - DNA, 24 bp, Artificial Sequence
  Synthetic oligonucleotide; GAAAAC chr11 5199394 5199417 5199414 +
ttcaagttttctactttgaaactt

SEQ ID NO: 69240 - DNA, 24 bp, Artificial Sequence
  Synthetic oligonucleotide; CAAAAC chr11 5199857 5199880 5199877 +
gggccacgggggaaaggtgcttgc

SEQ ID NO: 69241 - DNA, 24 bp, Artificial Sequence
  Synthetic oligonucleotide; AAAAAC chr11 5200190 5200213 5200210 +
agatgatggggggtgtaataaaga

SEQ ID NO: 69242 - DNA, 24 bp, Artificial Sequence
  Synthetic oligonucleotide; TAAAAC chr11 5200468 5200491 5200488 +
gtgagggccagcatggacaggaag

SEQ ID NO: 69243 - DNA, 24 bp, Artificial Sequence
  Synthetic oligonucleotide; TAAAAC chr11 5200752 5200775 5200772 +
aatttctaagtaaatgaaataccc

SEQ ID NO: 69244 - DNA, 24 bp, Artificial Sequence
  Synthetic oligonucleotide; AAAAAC chr11 5200771 5200794 5200791 +
taccctaaaacttactgacttaaa

SEQ ID NO: 69245 - DNA, 24 bp, Artificial Sequence
  Synthetic oligonucleotide; AAAAAC chr11 5200907 5200930 5200927 +
aacatatccttagaagccataagc

SEQ ID NO: 69246 - DNA, 24 bp, Artificial Sequence
  Synthetic oligonucleotide; TAAAAC chr11 5202090 5202113 5202110 +
tcctcaatttcttcctaccctttt

SEQ ID NO: 69247 - DNA, 24 bp, Artificial Sequence
  Synthetic oligonucleotide; TAAAAC chr11 5202188 5202211 5202208 +
ttggtatcatgtttcaattttaaa

SEQ ID NO: 69248 - DNA, 24 bp, Artificial Sequence
  Synthetic oligonucleotide; AAAAAC chr11 5202851 5202874 5202871 +
ctaaatcacacaaacctttgttga

SEQ ID NO: 69249 - DNA, 24 bp, Artificial Sequence
  Synthetic oligonucleotide; CAAAAC chr11 5203013 5203036 5203033 +
atatttaggtatctttatcttcct

SEQ ID NO: 69250 - DNA, 24 bp, Artificial Sequence
  Synthetic oligonucleotide; TAAAAC chr11 5203543 5203566 5203563 +
catataccaagtttgaatggttta

SEQ ID NO: 69251 - DNA, 24 bp, Artificial Sequence
  Synthetic oligonucleotide; TAAAAC chr11 5203834 5203857 5203854 +
aaaatggtgaaaccctgtctctac

SEQ ID NO: 69252 - DNA, 24 bp, Artificial Sequence
  Synthetic oligonucleotide; AAAAAC chr11 5204291 5204314 5204311 +
aggtaaataaatgaagatttaaag

SEQ ID NO: 69253 - DNA, 24 bp, Artificial Sequence
  Synthetic oligonucleotide; AAAAAC chr11 5204340 5204363 5204360 +
tgccagatgctccacctgtattta

SEQ ID NO: 69254 - DNA, 24 bp, Artificial Sequence
  Synthetic oligonucleotide; TAAAAC chr11 5204614 5204637 5204634 +
gagtcttttctgatgccctctgat

SEQ ID NO: 69255 - DNA, 24 bp, Artificial Sequence
  Synthetic oligonucleotide; TAAAAC chr11 5204796 5204819 5204816 +
agcttctttataattctatagaac

SEQ ID NO: 69256 - DNA, 24 bp, Artificial Sequence
  Synthetic oligonucleotide; GAAAAC chr11 5205787 5205810 5205807 +
actggtaaacactgaatgaaagaa

SEQ ID NO: 69257 - DNA, 24 bp, Artificial Sequence
  Synthetic oligonucleotide; AAAAAC chr11 5205836 5205859 5205856 +
aggttacaaataaatttatatttt

SEQ ID NO: 69258 - DNA, 24 bp, Artificial Sequence
  Synthetic oligonucleotide; TAAAAC chr11 5206118 5206141 5206138 +
tcactatgcagtgtgagagatcac

SEQ ID NO: 69259 - DNA, 24 bp, Artificial Sequence
  Synthetic oligonucleotide; TAAAAC chr11 5206297 5206320 5206317 +
gttaaatttatgaggataaataat

SEQ ID NO: 69260 - DNA, 24 bp, Artificial Sequence
  Synthetic oligonucleotide; CAAAAC chr11 5208220 5208243 5208240 +
aggcatagagaagtaacttatcct

SEQ ID NO: 69261 - DNA, 24 bp, Artificial Sequence
  Synthetic oligonucleotide; AAAAAC chr11 5208424 5208447 5208444 +
cagggaatacctgagaggaaaaaa

SEQ ID NO: 69262 - DNA, 24 bp, Artificial Sequence
  Synthetic oligonucleotide; AAAAAC chr11 5208593 5208616 5208613 +
attgttggtatgatgataatatat

SEQ ID NO: 69263 - DNA, 24 bp, Artificial Sequence
  Synthetic oligonucleotide; AAAAAC chr11 5210160 5210183 5210180 +
aaattgctcctggctacatcccag

SEQ ID NO: 69264 - DNA, 24 bp, Artificial Sequence
  Synthetic oligonucleotide; TAAAAC chr11 5211281 5211304 5211301 +
attaaattactttcataatgcgca

SEQ ID NO: 69265 - DNA, 24 bp, Artificial Sequence
  Synthetic oligonucleotide; AAAAAC chr11 5211304 5211327 5211324 +
ataaaacaacattttgttagactt

SEQ ID NO: 69266 - DNA, 24 bp, Artificial Sequence
  Synthetic oligonucleotide; GAAAAC chr11 5213494 5213517 5213514 +
tgactatggtgttttctagataca

SEQ ID NO: 69267 - DNA, 24 bp, Artificial Sequence
  Synthetic oligonucleotide; TAAAAC chr11 5214276 5214299 5214296 +
tcctggttcagccttgggaggacc

SEQ ID NO: 69268 - DNA, 24 bp, Artificial Sequence
  Synthetic oligonucleotide; GAAAAC chr11 5214370 5214393 5214390 +
agatttcaagactaatgaatagct

SEQ ID NO: 69269 - DNA, 24 bp, Artificial Sequence
  Synthetic oligonucleotide; GAAAAC chr11 5214433 5214456 5214453 +
ctgaatgaattttgggtaaataat

SEQ ID NO: 69270 - DNA, 24 bp, Artificial Sequence
  Synthetic oligonucleotide; TAAAAC chr11 5214689 5214712 5214709 +
agatcaaagctaactgaaggatat

SEQ ID NO: 69271 - DNA, 24 bp, Artificial Sequence
  Synthetic oligonucleotide; AAAAAC chr11 5214869 5214892 5214889 +
cccacagaaatacaaataatcatc

SEQ ID NO: 69272 - DNA, 24 bp, Artificial Sequence
  Synthetic oligonucleotide; CAAAAC chr11 5215307 5215330 5215327 +
tgttggagaatatcatcaccgtaa

SEQ ID NO: 69273 - DNA, 24 bp, Artificial Sequence
  Synthetic oligonucleotide; AAAAAC chr11 5215729 5215752 5215749 +
gctttgagattgttctggttcatg

SEQ ID NO: 69274 - DNA, 24 bp, Artificial Sequence
  Synthetic oligonucleotide; GAAAAC chr11 5215899 5215922 5215919 +
gttgaaggaatgttaactgactga

SEQ ID NO: 69275 - DNA, 24 bp, Artificial Sequence
  Synthetic oligonucleotide; AAAAAC chr11 5218902 5218925 5218922 +
tatcaattttgttgatcttttcaa

SEQ ID NO: 69276 - DNA, 24 bp, Artificial Sequence
  Synthetic oligonucleotide; CAAAAC chr11 5222940 5222963 5222960 +
atgttagaaatgaagaaaagcatg

SEQ ID NO: 69277 - DNA, 24 bp, Artificial Sequence
  Synthetic oligonucleotide; TAAAAC chr11 5223009 5223032 5223029 +
aataacactagaaaatctagggag

SEQ ID NO: 69278 - DNA, 24 bp, Artificial Sequence
  Synthetic oligonucleotide; CAAAAC chr11 5223655 5223678 5223675 +
gcactccagcctggacaacaagag

SEQ ID NO: 69279 - DNA, 24 bp, Artificial Sequence
  Synthetic oligonucleotide; AAAAAC chr11 5224238 5224261 5224258 +
cctttgcttctcatatcaaattca

SEQ ID NO: 69280 - DNA, 24 bp, Artificial Sequence
  Synthetic oligonucleotide; TAAAAC chr11 5225039 5225062 5225059 +
aggcgaggagaaaccatctcgccg

SEQ ID NO: 69281 - DNA, 24 bp, Artificial Sequence
  Synthetic oligonucleotide; TAAAAC chr11 5225162 5225185 5225182 +
tgaaaagacattcatgaggacagc

SEQ ID NO: 69282 - DNA, 24 bp, Artificial Sequence
  Synthetic oligonucleotide; CAAAAC chr11 5225194 5225217 5225214 +
taagtaatgtaaaatacagcatag

SEQ ID NO: 69283 - DNA, 24 bp, Artificial Sequence
  Synthetic oligonucleotide; TAAAAC chr11 5226101 5226124 5226121 +
tttggtcaatatgtgtacacatat

SEQ ID NO: 69284 - DNA, 24 bp, Artificial Sequence
  Synthetic oligonucleotide; GAAAAC chr11 5226370 5226393 5226390 +
aaagaaagcaagaattaaacaaaa

SEQ ID NO: 69285 - DNA, 24 bp, Artificial Sequence
  Synthetic oligonucleotide; TAAAAC chr11 5226405 5226428 5226425 +
ttatgaacagcaaataaaagaaac

SEQ ID NO: 69286 - DNA, 24 bp, Artificial Sequence
  Synthetic oligonucleotide; GAAAAC chr11 5226525 5226548 5226545 +
ttaaccatagaaaagaaggggaaa

SEQ ID NO: 69287 - DNA, 24 bp, Artificial Sequence
  Synthetic oligonucleotide; AAAAAC chr11 5227283 5227306 5227303 +
ataccatcagtacaaattgctact

SEQ ID NO: 69288 - DNA, 24 bp, Artificial Sequence
  Synthetic oligonucleotide; GAAAAC chr11 5227502 5227525 5227522 +
aaatacttacaggacagaatggat

SEQ ID NO: 69289 - DNA, 24 bp, Artificial Sequence
  Synthetic oligonucleotide; TAAAAC chr11 5227547 5227570 5227567 +
agcatatcttctccttatttggat

SEQ ID NO: 69290 - DNA, 24 bp, Artificial Sequence
  Synthetic oligonucleotide; AAAAAC chr11 5227753 5227776 5227773 +
ttaggttttgggaaacaagagata

SEQ ID NO: 69291 - DNA, 24 bp, Artificial Sequence
  Synthetic oligonucleotide; AAAAAC chr11 5228188 5228211 5228208 +
actaaattaactcctcaggtgagg

SEQ ID NO: 69292 - DNA, 24 bp, Artificial Sequence
  Synthetic oligonucleotide; TAAAAC chr11 5228238 5228261 5228258 +
cttcctgctattaaaagatgtaat

SEQ ID NO: 69293 - DNA, 24 bp, Artificial Sequence
  Synthetic oligonucleotide; TAAAAC chr11 5228459 5228482 5228479 +
aaaataaaataaaataaaataaaa

SEQ ID NO: 69294 - DNA, 24 bp, Artificial Sequence
  Synthetic oligonucleotide; AAAAAC chr11 5228806 5228829 5228826 +
tctttttatattcattcctctgta

SEQ ID NO: 69295 - DNA, 24 bp, Artificial Sequence
  Synthetic oligonucleotide; TAAAAC chr11 5228906 5228929 5228926 +
acgtctttaaaatattttaaatgt

SEQ ID NO: 69296 - DNA, 24 bp, Artificial Sequence
  Synthetic oligonucleotide; AAAAAC chr11 5229580 5229603 5229600 +
ctaaatcagcattcaaagttcctg

SEQ ID NO: 69297 - DNA, 24 bp, Artificial Sequence
  Synthetic oligonucleotide; GAAAAC chr11 5230138 5230161 5230158 +
taaaatgaaataaaaatgctccaa

SEQ ID NO: 69298 - DNA, 24 bp, Artificial Sequence
  Synthetic oligonucleotide; AAAAAC chr11 5230733 5230756 5230753 +
aaagcaacgccatagtgagaaaag

SEQ ID NO: 69299 - DNA, 24 bp, Artificial Sequence
  Synthetic oligonucleotide; GAAAAC chr11 5231578 5231601 5231598 +
gcctactatgtataatgacttaag

SEQ ID NO: 69300 - DNA, 24 bp, Artificial Sequence
  Synthetic oligonucleotide; CAAAAC chr11 5231634 5231657 5231654 +
ccagtcaattcaaaatgttgtgat

SEQ ID NO: 69301 - DNA, 24 bp, Artificial Sequence
  Synthetic oligonucleotide; CAAAAC chr11 5233175 5233198 5233195 +
atttttttctgcccaaatcttaga

SEQ ID NO: 69302 - DNA, 24 bp, Artificial Sequence
  Synthetic oligonucleotide; TAAAAC chr11 5233591 5233614 5233611 +
tattgtaaaatgatttatagcctc

SEQ ID NO: 69303 - DNA, 24 bp, Artificial Sequence
  Synthetic oligonucleotide; GAAAAC chr11 5234200 5234223 5234220 +
agaccaccagtaatctgagggtag

SEQ ID NO: 69304 - DNA, 24 bp, Artificial Sequence
  Synthetic oligonucleotide; GAAAAC chr11 5234798 5234821 5234818 +
tttgtttctgtcactttatactaa

SEQ ID NO: 69305 - DNA, 24 bp, Artificial Sequence
  Synthetic oligonucleotide; TAAAAC chr11 5234969 5234992 5234989 +
tcttttggtaaattcttcctataa

SEQ ID NO: 69306 - DNA, 24 bp, Artificial Sequence
  Synthetic oligonucleotide; GAAAAC chr11 5235738 5235761 5235758 +
ctgtacaatagtataacccctttg

SEQ ID NO: 69307 - DNA, 24 bp, Artificial Sequence
  Synthetic oligonucleotide; AAAAAC chr11 5235877 5235900 5235897 +
aatgcttatgacagcaataatcat

SEQ ID NO: 69308 - DNA, 24 bp, Artificial Sequence
  Synthetic oligonucleotide; GAAAAC chr11 5237420 5237443 5237440 +
agtagctatctaatgactaaaatg

SEQ ID NO: 69309 - DNA, 24 bp, Artificial Sequence
  Synthetic oligonucleotide; AAAAAC chr11 5239503 5239526 5239523 +
gagcagattaagtacattagtagg

SEQ ID NO: 69310 - DNA, 24 bp, Artificial Sequence
  Synthetic oligonucleotide; GAAAAC chr11 5239999 5240022 5240019 +
gtgttttccactaaaggtgaatgt

SEQ ID NO: 69311 - DNA, 24 bp, Artificial Sequence
  Synthetic oligonucleotide; TAAAAC chr11 5240427 5240450 5240447 +
gagaagaaagggtattatatcttc

SEQ ID NO: 69312 - DNA, 24 bp, Artificial Sequence
  Synthetic oligonucleotide; CAAAAC chr11 5240893 5240916 5240913 +
caagaaacttcagtgatttttgct

SEQ ID NO: 69313 - DNA, 24 bp, Artificial Sequence
  Synthetic oligonucleotide; AAAAAC chr11 5241178 5241201 5241198 +
aaagagaataaaatcactaccact

SEQ ID NO: 69314 - DNA, 24 bp, Artificial Sequence
  Synthetic oligonucleotide; TAAAAC chr11 5241186 5241209 5241206 +
taaaatcactaccactaaaaacaa

SEQ ID NO: 69315 - DNA, 24 bp, Artificial Sequence
  Synthetic oligonucleotide; GAAAAC chr11 5241396 5241419 5241416 +
agaggtagcagatgaagtacagat

SEQ ID NO: 69316 - DNA, 24 bp, Artificial Sequence
  Synthetic oligonucleotide; AAAAAC chr11 5241712 5241735 5241732 +
acctccattgacctccctttctgt

SEQ ID NO: 69317 - DNA, 24 bp, Artificial Sequence
  Synthetic oligonucleotide; CAAAAC chr11 5242194 5242217 5242214 +
aaaatcctcgctgaagtgggttgc

SEQ ID NO: 69318 - DNA, 24 bp, Artificial Sequence
  Synthetic oligonucleotide; AAAAAC chr11 5242808 5242831 5242828 +
atctcaacttctgttccctcatcc

SEQ ID NO: 69319 - DNA, 24 bp, Artificial Sequence
  Synthetic oligonucleotide; CAAAAC chr11 5243258 5243281 5243278 +
ttgcacagtcagagcccagatatc

SEQ ID NO: 69320 - DNA, 24 bp, Artificial Sequence
  Synthetic oligonucleotide; GAAAAC chr11 5244536 5244559 5244556 +
agaaacaaactagggaagtaaggg

SEQ ID NO: 69321 - DNA, 24 bp, Artificial Sequence
  Synthetic oligonucleotide; CAAAAC chr11 5245240 5245263 5245260 +
tttgtagtgacaaacagtttgagg

SEQ ID NO: 69322 - DNA, 24 bp, Artificial Sequence
  Synthetic oligonucleotide; TAAAAC chr11 5245385 5245408 5245405 +
tcaggtcatgtcctttaatggccc

SEQ ID NO: 69323 - DNA, 24 bp, Artificial Sequence
  Synthetic oligonucleotide; TAAAAC chr11 5245449 5245472 5245469 +
ctcatatccttaggtacatacatc

SEQ ID NO: 69324 - DNA, 24 bp, Artificial Sequence
  Synthetic oligonucleotide; AAAAAC chr11 5246126 5246149 5246146 +
ccagatggattagagacttaaatg

SEQ ID NO: 69325 - DNA, 24 bp, Artificial Sequence
  Synthetic oligonucleotide; AAAAAC chr11 5246411 5246434 5246431 +
acttaaacaactttacaagaaaaa

SEQ ID NO: 69326 - DNA, 24 bp, Artificial Sequence
  Synthetic oligonucleotide; TAAAAC chr11 5246421 5246444 5246441 +
ctttacaagaaaaaaaaaacccat

SEQ ID NO: 69327 - DNA, 24 bp, Artificial Sequence
  Synthetic oligonucleotide; TAAAAC chr11 5246446 5246469 5246466 +
aaaaccatggcacacttttaccta

SEQ ID NO: 69328 - DNA, 24 bp, Artificial Sequence
  Synthetic oligonucleotide; CAAAAC chr11 5246578 5246601 5246598 +
taaaaagagaaggcataaataatc

SEQ ID NO: 69329 - DNA, 24 bp, Artificial Sequence
  Synthetic oligonucleotide; AAAAAC chr11 5246709 5246732 5246729 +
tcaagaaatttgctttgacttaaa

SEQ ID NO: 69330 - DNA, 24 bp, Artificial Sequence
  Synthetic oligonucleotide; AAAAAC chr11 5246716 5246739 5246736 +
atttgctttgacttaaaaaaaaca

SEQ ID NO: 69331 - DNA, 24 bp, Artificial Sequence
  Synthetic oligonucleotide; CAAAAC chr11 5247103 5247126 5247123 +
gataaacatggtctgtagtccact

SEQ ID NO: 69332 - DNA, 24 bp, Artificial Sequence
  Synthetic oligonucleotide; CAAAAC chr11 5247962 5247985 5247982 +
cactgaaccttttcccatctcttc

SEQ ID NO: 69333 - DNA, 24 bp, Artificial Sequence
  Synthetic oligonucleotide; CAAAAC chr11 5248434 5248457 5248454 +
gaattctttgccgaaatggattgc

SEQ ID NO: 69334 - DNA, 24 bp, Artificial Sequence
  Synthetic oligonucleotide; TAAAAC chr11 5249038 5249061 5249058 +
tgtcctgcctccagatagatgttt

SEQ ID NO: 69335 - DNA, 24 bp, Artificial Sequence
  Synthetic oligonucleotide; TAAAAC chr11 5249177 5249200 5249197 +
tttttagaggcactccttaggccc

SEQ ID NO: 69336 - DNA, 24 bp, Artificial Sequence
  Synthetic oligonucleotide; GAAAAC chr11 5250421 5250444 5250441 +
ctcttaatttctcaatagtgcagt

SEQ ID NO: 69337 - DNA, 24 bp, Artificial Sequence
  Synthetic oligonucleotide; GAAAAC chr11 5250795 5250818 5250815 +
agacataagatgtgcgtgtacatg

SEQ ID NO: 69338 - DNA, 24 bp, Artificial Sequence
  Synthetic oligonucleotide; GAAAAC chr11 5251636 5251659 5251656 +
tcctgaaagtaggaagggcatgtg

SEQ ID NO: 69339 - DNA, 24 bp, Artificial Sequence
  Synthetic oligonucleotide; AAAAAC chr11 5252625 5252648 5252645 +
cttcattgtagttaccgtggaaag

SEQ ID NO: 69340 - DNA, 24 bp, Artificial Sequence
  Synthetic oligonucleotide; CAAAAC chr11 5252872 5252895 5252892 +
cactgaacctttccccatctcttc

SEQ ID NO: 69341 - DNA, 24 bp, Artificial Sequence
  Synthetic oligonucleotide; CAAAAC chr11 5253007 5253030 5253027 +
tgcctagttcttttatttgctcat

SEQ ID NO: 69342 - DNA, 24 bp, Artificial Sequence
  Synthetic oligonucleotide; TAAAAC chr11 5253105 5253128 5253125 +
tacacataaacacatccctcaaca

SEQ ID NO: 69343 - DNA, 24 bp, Artificial Sequence
  Synthetic oligonucleotide; CAAAAC chr11 5253352 5253375 5253372 +
gaattctttgccgaaatggattgc

SEQ ID NO: 69344 - DNA, 24 bp, Artificial Sequence
  Synthetic oligonucleotide; GAAAAC chr11 5253624 5253647 5253644 +
catgaaccctgtatgctgtaggct

SEQ ID NO: 69345 - DNA, 24 bp, Artificial Sequence
  Synthetic oligonucleotide; TAAAAC chr11 5253958 5253981 5253978 +
tgtcctgcctccagatagatgttt

SEQ ID NO: 69346 - DNA, 24 bp, Artificial Sequence
  Synthetic oligonucleotide; TAAAAC chr11 5254101 5254124 5254121 +
ttttcagaggcactccttaggccc

SEQ ID NO: 69347 - DNA, 24 bp, Artificial Sequence
  Synthetic oligonucleotide; GAAAAC chr11 5255726 5255749 5255746 +
agacataagacatgtatttgcatg

SEQ ID NO: 69348 - DNA, 24 bp, Artificial Sequence
  Synthetic oligonucleotide; AAAAAC chr11 5256915 5256938 5256935 +
ttcaaacaacttccccatttatcc

SEQ ID NO: 69349 - DNA, 24 bp, Artificial Sequence
  Synthetic oligonucleotide; TAAAAC chr11 5257080 5257103 5257100 +
tgacattgattaaatcctaactga

SEQ ID NO: 69350 - DNA, 24 bp, Artificial Sequence
  Synthetic oligonucleotide; TAAAAC chr11 5257225 5257248 5257245 +
atttaagttaaataagtcagagaa

SEQ ID NO: 69351 - DNA, 24 bp, Artificial Sequence
  Synthetic oligonucleotide; GAAAAC chr11 5257442 5257465 5257462 +
taaattcaaagctctgaagcagaa

SEQ ID NO: 69352 - DNA, 24 bp, Artificial Sequence
  Synthetic oligonucleotide; GAAAAC chr11 5259407 5259430 5259427 +
gcctacccaagtgagaaggaacca

SEQ ID NO: 69353 - DNA, 24 bp, Artificial Sequence
  Synthetic oligonucleotide; AAAAAC chr11 5259429 5259452 5259449 +
cagaaaactaactctggtaatatg

SEQ ID NO: 69354 - DNA, 24 bp, Artificial Sequence
  Synthetic oligonucleotide; AAAAAC chr11 5259588 5259611 5259608 +
gaggaaggtgaagtccaattttaa

SEQ ID NO: 69355 - DNA, 24 bp, Artificial Sequence
  Synthetic oligonucleotide; AAAAAC chr11 5259653 5259676 5259673 +
tcagttaaagagatagcataaata

SEQ ID NO: 69356 - DNA, 24 bp, Artificial Sequence
  Synthetic oligonucleotide; CAAAAC chr11 5259662 5259685 5259682 +
gagatagcataaataaaaaacatt

SEQ ID NO: 69357 - DNA, 24 bp, Artificial Sequence
  Synthetic oligonucleotide; GAAAAC chr11 5259920 5259943 5259940 +
aaagaagagaaatctaaaagtttg

SEQ ID NO: 69358 - DNA, 24 bp, Artificial Sequence
  Synthetic oligonucleotide; GAAAAC chr11 5259947 5259970 5259967 +
aacttatccagggaaataatcaag

SEQ ID NO: 69359 - DNA, 24 bp, Artificial Sequence
  Synthetic oligonucleotide; GAAAAC chr11 5260130 5260153 5260150 +
gaaactaccaggtaacctatgaaa

SEQ ID NO: 69360 - DNA, 24 bp, Artificial Sequence
  Synthetic oligonucleotide; CAAAAC chr11 5260216 5260239 5260236 +
ggccctatcttcagccttcttaaa

SEQ ID NO: 69361 - DNA, 24 bp, Artificial Sequence
  Synthetic oligonucleotide; AAAAAC chr11 5260295 5260318 5260315 +
aagaaaatacacagtgtttttcag

SEQ ID NO: 69362 - DNA, 24 bp, Artificial Sequence
  Synthetic oligonucleotide; CAAAAC chr11 5260391 5260414 5260411 +
ttgaaataaaccctggaagcacat

SEQ ID NO: 69363 - DNA, 24 bp, Artificial Sequence
  Synthetic oligonucleotide; CAAAAC chr11 5260718 5260741 5260738 +
caaagcagctattcttatgtcaga

SEQ ID NO: 69364 - DNA, 24 bp, Artificial Sequence
  Synthetic oligonucleotide; TAAAAC chr11 5260852 5260875 5260872 +
ctaatactggagatcccaaattta

SEQ ID NO: 69365 - DNA, 24 bp, Artificial Sequence
  Synthetic oligonucleotide; CAAAAC chr11 5261081 5261104 5261101 +
caagataggccatatgatatgcca

SEQ ID NO: 69366 - DNA, 24 bp, Artificial Sequence
  Synthetic oligonucleotide; CAAAAC chr11 5261181 5261204 5261201 +
gaaatcaactacaaaaggaacctt

SEQ ID NO: 69367 - DNA, 24 bp, Artificial Sequence
  Synthetic oligonucleotide; GAAAAC chr11 5261279 5261302 5261299 +
ggaaatttaaaaatcatttgcttt

SEQ ID NO: 69368 - DNA, 24 bp, Artificial Sequence
  Synthetic oligonucleotide; AAAAAC chr11 5261722 5261745 5261742 +
ataagagaggacacaaacaaatgg

SEQ ID NO: 69369 - DNA, 24 bp, Artificial Sequence
  Synthetic oligonucleotide; AAAAAC chr11 5261847 5261870 5261867 +
actgacttttttcaaagaattaga

SEQ ID NO: 69370 - DNA, 24 bp, Artificial Sequence
  Synthetic oligonucleotide; AAAAAC chr11 5261976 5261999 5261996 +
actatactacaaggctacagtaac

SEQ ID NO: 69371 - DNA, 24 bp, Artificial Sequence
  Synthetic oligonucleotide; CAAAAC chr11 5261998 5262021 5262018 +
acaaaaacagcatggtactggtac

SEQ ID NO: 69372 - DNA, 24 bp, Artificial Sequence
  Synthetic oligonucleotide; AAAAAC chr11 5262132 5262155 5262152 +
tccctatttaataaatggtgctgg

SEQ ID NO: 69373 - DNA, 24 bp, Artificial Sequence
  Synthetic oligonucleotide; TAAAAC chr11 5262154 5262177 5262174 +
ggaaaaactggctagcaatatgca

SEQ ID NO: 69374 - DNA, 24 bp, Artificial Sequence
  Synthetic oligonucleotide; TAAAAC chr11 5262233 5262256 5262253 +
gattaaagacttaaatgtgcaacc

SEQ ID NO: 69375 - DNA, 24 bp, Artificial Sequence
  Synthetic oligonucleotide; TAAAAC chr11 5262307 5262330 5262327 +
taggcatgggcaaaaattcacgac

SEQ ID NO: 69376 - DNA, 24 bp, Artificial Sequence
  Synthetic oligonucleotide; AAAAAC chr11 5262505 5262528 5262525 +
aagaacttcaacaaatttacaaga

SEQ ID NO: 69377 - DNA, 24 bp, Artificial Sequence
  Synthetic oligonucleotide; CAAAAC chr11 5262635 5262658 5262655 +
actggtcattagagaaatgcaaat

SEQ ID NO: 69378 - DNA, 24 bp, Artificial Sequence
  Synthetic oligonucleotide; CAAAAC chr11 5263399 5263422 5263419 +
accgacaatagtgacacaacctat

SEQ ID NO: 69379 - DNA, 24 bp, Artificial Sequence
  Synthetic oligonucleotide; AAAAAC chr11 5263526 5263549 5263546 +
cacaccacaagaaactagagaaac

SEQ ID NO: 69380 - DNA, 24 bp, Artificial Sequence
  Synthetic oligonucleotide; CAAAAC chr11 5263541 5263564 5263561 +
tagagaaacaaaaacaaacagaac

SEQ ID NO: 69381 - DNA, 24 bp, Artificial Sequence
  Synthetic oligonucleotide; TAAAAC chr11 5263596 5263619 5263616 +
gataagaggagaactaaatgaaat

SEQ ID NO: 69382 - DNA, 24 bp, Artificial Sequence
  Synthetic oligonucleotide; TAAAAC chr11 5263661 5263684 5263681 +
aagctggttctttgaaaagataaa

SEQ ID NO: 69383 - DNA, 24 bp, Artificial Sequence
  Synthetic oligonucleotide; CAAAAC chr11 5263732 5263755 5263752 +
agtgcaaataaactcaattagaaa

SEQ ID NO: 69384 - DNA, 24 bp, Artificial Sequence
  Synthetic oligonucleotide; GAAAAC chr11 5263817 5263840 5263837 +
gaacacctttacatgcataaacta

SEQ ID NO: 69385 - DNA, 24 bp, Artificial Sequence
  Synthetic oligonucleotide; CAAAAC chr11 5264099 5264122 5264119 +
atgaagccagtatcaccttaatac

SEQ ID NO: 69386 - DNA, 24 bp, Artificial Sequence
  Synthetic oligonucleotide; AAAAAC chr11 5264129 5264152 5264149 +
tgggaaagaacataaccaaaaaaa

SEQ ID NO: 69387 - DNA, 24 bp, Artificial Sequence
  Synthetic oligonucleotide; CAAAAC chr11 5264214 5264237 5264234 +
agctaatagcatccgacagcatat

SEQ ID NO: 69388 - DNA, 24 bp, Artificial Sequence
  Synthetic oligonucleotide; TAAAAC chr11 5264382 5264405 5264402 +
caaaattcaacatcactttatgac

SEQ ID NO: 69389 - DNA, 24 bp, Artificial Sequence
  Synthetic oligonucleotide; GAAAAC chr11 5264497 5264520 5264517 +
gaaaaagttaaaagcattctgtct

SEQ ID NO: 69390 - DNA, 24 bp, Artificial Sequence
  Synthetic oligonucleotide; GAAAAC chr11 5264663 5264686 5264683 +
gctgatgatatgattgtgtatgta

SEQ ID NO: 69391 - DNA, 24 bp, Artificial Sequence
  Synthetic oligonucleotide; CAAAAC chr11 5264683 5264706 5264703 +
tgtagaaaactctaaagactcctc

SEQ ID NO: 69392 - DNA, 24 bp, Artificial Sequence
  Synthetic oligonucleotide; AAAAAC chr11 5264827 5264850 5264847 +
tcaaccccttttacaatagctgca

SEQ ID NO: 69393 - DNA, 24 bp, Artificial Sequence
  Synthetic oligonucleotide; CAAAAC chr11 5264832 5264855 5264852 +
cccttttacaatagctgcaaaaaa

SEQ ID NO: 69394 - DNA, 24 bp, Artificial Sequence
  Synthetic oligonucleotide; CAAAAC chr11 5264837 5264860 5264857 +
ttacaatagctgcaaaaaacaaaa

SEQ ID NO: 69395 - DNA, 24 bp, Artificial Sequence
  Synthetic oligonucleotide; CAAAAC chr11 5264842 5264865 5264862 +
atagctgcaaaaaacaaaacaaaa

SEQ ID NO: 69396 - DNA, 24 bp, Artificial Sequence
  Synthetic oligonucleotide; AAAAAC chr11 5264848 5264871 5264868 +
gcaaaaaacaaaacaaaacaaaac

SEQ ID NO: 69397 - DNA, 24 bp, Artificial Sequence
  Synthetic oligonucleotide; GAAAAC chr11 5264898 5264921 5264918 +
aaggaggtgaaagacatctacaag

SEQ ID NO: 69398 - DNA, 24 bp, Artificial Sequence
  Synthetic oligonucleotide; CAAAAC chr11 5264906 5264929 5264926 +
gaaagacatctacaaggaaaacta

SEQ ID NO: 69399 - DNA, 24 bp, Artificial Sequence
  Synthetic oligonucleotide; AAAAAC chr11 5265074 5265097 5265094 +
accattagtcttcacagaactaga

SEQ ID NO: 69400 - DNA, 24 bp, Artificial Sequence
  Synthetic oligonucleotide; CAAAAC chr11 5265200 5265223 5265220 +
actatacaataaggccatagtcac

SEQ ID NO: 69401 - DNA, 24 bp, Artificial Sequence
  Synthetic oligonucleotide; AAAAAC chr11 5265312 5265335 5265332 +
caactgatctttgacaaagcaaac

SEQ ID NO: 69402 - DNA, 24 bp, Artificial Sequence
  Synthetic oligonucleotide; AAAAAC chr11 5265494 5265517 5265514 +
aacaattctagaaaataacatcgg

SEQ ID NO: 69403 - DNA, 24 bp, Artificial Sequence
  Synthetic oligonucleotide; AAAAAC chr11 5265559 5265582 5265579 +
ccaagaacacaaatgcaaatacat

SEQ ID NO: 69404 - DNA, 24 bp, Artificial Sequence
  Synthetic oligonucleotide; CAAAAC chr11 5265864 5265887 5265884 +
actaatgatcagggaaatgcaaat

SEQ ID NO: 69405 - DNA, 24 bp, Artificial Sequence
  Synthetic oligonucleotide; TAAAAC chr11 5265897 5265920 5265917 +
aatgagatatctacttactctagt

SEQ ID NO: 69406 - DNA, 24 bp, Artificial Sequence
  Synthetic oligonucleotide; GAAAAC chr11 5266013 5266036 5266033 +
atgtaaaatagtacaaccattatg

SEQ ID NO: 69407 - DNA, 24 bp, Artificial Sequence
  Synthetic oligonucleotide; AAAAAC chr11 5266043 5266066 5266063 +
agtatgaagatttctcagtaaact

SEQ ID NO: 69408 - DNA, 24 bp, Artificial Sequence
  Synthetic oligonucleotide; AAAAAC chr11 5266330 5266353 5266350 +
taattgaaagccctgaagcagaac

SEQ ID NO: 69409 - DNA, 24 bp, Artificial Sequence
  Synthetic oligonucleotide; CAAAAC chr11 5267104 5267127 5267124 +
atgaaagacacaagacctgaaggt

SEQ ID NO: 69410 - DNA, 24 bp, Artificial Sequence
  Synthetic oligonucleotide; AAAAAC chr11 5267704 5267727 5267724 +
cggaaagtcttcatcacactctcc

SEQ ID NO: 69411 - DNA, 24 bp, Artificial Sequence
  Synthetic oligonucleotide; TAAAAC chr11 5267887 5267910 5267907 +
catcttatctccaaatcaatttca

SEQ ID NO: 69412 - DNA, 24 bp, Artificial Sequence
  Synthetic oligonucleotide; AAAAAC chr11 5268075 5268098 5268095 +
agctccttctttccccggtgcagt

SEQ ID NO: 69413 - DNA, 24 bp, Artificial Sequence
  Synthetic oligonucleotide; GAAAAC chr11 5268625 5268648 5268645 +
caggcatgttgagtagaagtttcc

SEQ ID NO: 69414 - DNA, 24 bp, Artificial Sequence
  Synthetic oligonucleotide; AAAAAC chr11 5268641 5268664 5268661 +
aagtttccgaaaacaacttgatga

SEQ ID NO: 69415 - DNA, 24 bp, Artificial Sequence
  Synthetic oligonucleotide; AAAAAC chr11 5268659 5268682 5268679 +
tgatgaaaaaacaaacaaacaaac

SEQ ID NO: 69416 - DNA, 24 bp, Artificial Sequence
  Synthetic oligonucleotide; AAAAAC chr11 5270314 5270337 5270334 +
tgccttaaaggtggtgacagtgac

SEQ ID NO: 69417 - DNA, 24 bp, Artificial Sequence
  Synthetic oligonucleotide; TAAAAC chr11 5270348 5270371 5270368 +
ccaaggaaaagaaaataaagctgt

SEQ ID NO: 69418 - DNA, 24 bp, Artificial Sequence
  Synthetic oligonucleotide; CAAAAC chr11 5270398 5270421 5270418 +
ctctcttaaggagtgcattgtaaa

SEQ ID NO: 69419 - DNA, 24 bp, Artificial Sequence
  Synthetic oligonucleotide; AAAAAC chr11 5270432 5270455 5270452 +
gtaccttagtttctctagggagac

SEQ ID NO: 69420 - DNA, 24 bp, Artificial Sequence
  Synthetic oligonucleotide; AAAAAC chr11 5271730 5271753 5271750 +
tttgtgataaaaaaaaaaaaaaaa

SEQ ID NO: 69421 - DNA, 24 bp, Artificial Sequence
  Synthetic oligonucleotide; CAAAAC chr11 5271917 5271940 5271937 +
attctaaccattggctaacacaga

SEQ ID NO: 69422 - DNA, 24 bp, Artificial Sequence
  Synthetic oligonucleotide; AAAAAC chr11 5272483 5272506 5272503 +
taagagcgaaactccatctcaaac

SEQ ID NO: 69423 - DNA, 24 bp, Artificial Sequence
  Synthetic oligonucleotide; AAAAAC chr11 5272489 5272512 5272509 +
cgaaactccatctcaaacaaaaac

SEQ ID NO: 69424 - DNA, 24 bp, Artificial Sequence
  Synthetic oligonucleotide; TAAAAC chr11 5273059 5273082 5273079 +
gagtttggagaacaggtttctccc

SEQ ID NO: 69425 - DNA, 24 bp, Artificial Sequence
  Synthetic oligonucleotide; AAAAAC chr11 5273767 5273790 5273787 +
ttcttaagttctatgcaggattct

SEQ ID NO: 69426 - DNA, 24 bp, Artificial Sequence
  Synthetic oligonucleotide; TAAAAC chr11 5274866 5274889 5274886 +
tcctacatgatgggcactgaaggt

SEQ ID NO: 69427 - DNA, 24 bp, Artificial Sequence
  Synthetic oligonucleotide; GAAAAC chr11 5274889 5274912 5274909 +
ttaaaacttgagtctgtcaactta

SEQ ID NO: 69428 - DNA, 24 bp, Artificial Sequence
  Synthetic oligonucleotide; TAAAAC chr11 5275076 5275099 5275096 +
atttatgaactaagaacatagaaa

SEQ ID NO: 69429 - DNA, 24 bp, Artificial Sequence
  Synthetic oligonucleotide; AAAAAC chr11 5275187 5275210 5275207 +
tgaatcttatgtctagaaattttg

SEQ ID NO: 69430 - DNA, 24 bp, Artificial Sequence
  Synthetic oligonucleotide; TAAAAC chr11 5275404 5275427 5275424 +
aatgtgtatttctctggagaaggt

SEQ ID NO: 69431 - DNA, 24 bp, Artificial Sequence
  Synthetic oligonucleotide; GAAAAC chr11 5275504 5275527 5275524 +
gatcatccatcatgaggaaatatg

SEQ ID NO: 69432 - DNA, 24 bp, Artificial Sequence
  Synthetic oligonucleotide; CAAAAC chr11 5276223 5276246 5276243 +
tgtttacaaatatgtgattatcat

SEQ ID NO: 69433 - DNA, 24 bp, Artificial Sequence
  Synthetic oligonucleotide; AAAAAC chr11 5276324 5276347 5276344 +
taactgagactttaaaaaaaaaaa

SEQ ID NO: 69434 - DNA, 24 bp, Artificial Sequence
  Synthetic oligonucleotide; AAAAAC chr11 5276334 5276357 5276354 +
tttaaaaaaaaaaaaaaaacaaaa

SEQ ID NO: 69435 - DNA, 24 bp, Artificial Sequence
  Synthetic oligonucleotide; AAAAAC chr11 5276505 5276528 5276525 +
accccagaacttaaagcatattaa

SEQ ID NO: 69436 - DNA, 24 bp, Artificial Sequence
  Synthetic oligonucleotide; AAAAAC chr11 5276910 5276933 5276930 +
gctctagttataaattccagtgta

SEQ ID NO: 69437 - DNA, 24 bp, Artificial Sequence
  Synthetic oligonucleotide; CAAAAC chr11 5276991 5277014 5277011 +
ttttcaagagcaaatctcagccta

SEQ ID NO: 69438 - DNA, 24 bp, Artificial Sequence
  Synthetic oligonucleotide; AAAAAC chr11 5277218 5277241 5277238 +
gtaaaattgctaagaatacagcac

SEQ ID NO: 69439 - DNA, 24 bp, Artificial Sequence
  Synthetic oligonucleotide; AAAAAC chr11 5277341 5277364 5277361 +
gattaggtgctatggagaaaaaaa

SEQ ID NO: 69440 - DNA, 24 bp, Artificial Sequence
  Synthetic oligonucleotide; AAAAAC chr11 5277684 5277707 5277704 +
tacctacatcatagagttgtaaga

SEQ ID NO: 69441 - DNA, 24 bp, Artificial Sequence
  Synthetic oligonucleotide; GAAAAC chr11 5278039 5278062 5278059 +
ggtgaaggcaaggggtcagcctct

SEQ ID NO: 69442 - DNA, 24 bp, Artificial Sequence
  Synthetic oligonucleotide; AAAAAC chr11 5278056 5278079 5278076 +
agcctctgaaaacatcctttcacg

SEQ ID NO: 69443 - DNA, 24 bp, Artificial Sequence
  Synthetic oligonucleotide; TAAAAC chr11 5279305 5279328 5279325 +
ccctttaaacactgccactcaacc

SEQ ID NO: 69444 - DNA, 24 bp, Artificial Sequence
  Synthetic oligonucleotide; AAAAAC chr11 5279694 5279717 5279714 +
gtcattcattcacaaatgaataca

SEQ ID NO: 69445 - DNA, 24 bp, Artificial Sequence
  Synthetic oligonucleotide; CAAAAC chr11 5279743 5279766 5279763 +
gtcctgtaatgggtcctgggcctg

SEQ ID NO: 69446 - DNA, 24 bp, Artificial Sequence
  Synthetic oligonucleotide; AAAAAC chr11 5280907 5280930 5280927 +
acagaaatgtaacaggaactaagg

SEQ ID NO: 69447 - DNA, 24 bp, Artificial Sequence
  Synthetic oligonucleotide; TAAAAC chr11 5281059 5281082 5281079 +
cagtgcttgaatcataaataagaa

SEQ ID NO: 69448 - DNA, 24 bp, Artificial Sequence
  Synthetic oligonucleotide; GAAAAC chr11 5281496 5281519 5281516 +
ggtcaagatttttttaaaaattaa

SEQ ID NO: 69449 - DNA, 24 bp, Artificial Sequence
  Synthetic oligonucleotide; AAAAAC chr11 5283174 5283197 5283194 +
tctgagtttgtgttttgctgtgga

SEQ ID NO: 69450 - DNA, 24 bp, Artificial Sequence
  Synthetic oligonucleotide; TAAAAC chr11 5283458 5283481 5283478 +
tctacttctgagtattggtgtgag

SEQ ID NO: 69451 - DNA, 24 bp, Artificial Sequence
  Synthetic oligonucleotide; GAAAAC chr11 5284550 5284573 5284570 +
tcttactttatagatgatgatcct

SEQ ID NO: 69452 - DNA, 24 bp, Artificial Sequence
  Synthetic oligonucleotide; GAAAAC chr11 5285193 5285216 5285213 +
ttttatggagttagcgtgaggatg

SEQ ID NO: 69453 - DNA, 24 bp, Artificial Sequence
  Synthetic oligonucleotide; GAAAAC chr11 5286018 5286041 5286038 +
tgcatatgatggggtagcagacaa

SEQ ID NO: 69454 - DNA, 24 bp, Artificial Sequence
  Synthetic oligonucleotide; CAAAAC chr11 5286416 5286439 5286436 +
catctaactgaagacagcagcaat

SEQ ID NO: 69455 - DNA, 24 bp, Artificial Sequence
  Synthetic oligonucleotide; AAAAAC chr11 5286550 5286573 5286570 +
agtgtaattttttagtcacttagg

SEQ ID NO: 69456 - DNA, 24 bp, Artificial Sequence
  Synthetic oligonucleotide; TAAAAC chr11 5287136 5287159 5287156 +
tgcagaacaatcttatgagcctgt

SEQ ID NO: 69457 - DNA, 24 bp, Artificial Sequence
  Synthetic oligonucleotide; AAAAAC chr11 5287416 5287439 5287436 +
ggtgacagagtgagaccctttctc

SEQ ID NO: 69458 - DNA, 24 bp, Artificial Sequence
  Synthetic oligonucleotide; AAAAAC chr11 5287432 5287455 5287452 +
cctttctcaaaaacaaactaatta

SEQ ID NO: 69459 - DNA, 24 bp, Artificial Sequence
  Synthetic oligonucleotide; AAAAAC chr11 5288737 5288760 5288757 +
ggtcgttgtgtttgctgtgtttgc

SEQ ID NO: 69460 - DNA, 24 bp, Artificial Sequence
  Synthetic oligonucleotide; TAAAAC chr11 5290815 5290838 5290835 +
tgagaaataattttatttatatta

SEQ ID NO: 69461 - DNA, 24 bp, Artificial Sequence
  Synthetic oligonucleotide; AAAAAC chr11 5290850 5290873 5290870 +
aacaatacagatgtatataaacta

SEQ ID NO: 69462 - DNA, 24 bp, Artificial Sequence
  Synthetic oligonucleotide; AAAAAC chr11 5290906 5290929 5290926 +
ctcaatatcacttcttcacttaga

SEQ ID NO: 69463 - DNA, 24 bp, Artificial Sequence
  Synthetic oligonucleotide; TAAAAC chr11 5291764 5291787 5291784 +
tgcataggaaataataatggacca

SEQ ID NO: 69464 - DNA, 24 bp, Artificial Sequence
  Synthetic oligonucleotide; GAAAAC chr11 5292273 5292296 5292293 +
tgatacccatataaataacgtaga

SEQ ID NO: 69465 - DNA, 24 bp, Artificial Sequence
  Synthetic oligonucleotide; GAAAAC chr11 5292559 5292582 5292579 +
cttcacatacttattttttgtggt

SEQ ID NO: 69466 - DNA, 24 bp, Artificial Sequence
  Synthetic oligonucleotide; GAAAAC chr11 5292645 5292668 5292665 +
tgtcaggatgcagtaatagattta

SEQ ID NO: 69467 - DNA, 24 bp, Artificial Sequence
  Synthetic oligonucleotide; GAAAAC chr11 5292693 5292716 5292713 +
aatcatgaataatgatcaatcgag

SEQ ID NO: 69468 - DNA, 24 bp, Artificial Sequence
  Synthetic oligonucleotide; CAAAAC chr11 5292848 5292871 5292868 +
gccttgagtggattgatgtggaag

SEQ ID NO: 69469 - DNA, 24 bp, Artificial Sequence
  Synthetic oligonucleotide; AAAAAC chr11 5292885 5292908 5292905 +
aaataaagacaaatgtgcaacatc

SEQ ID NO: 69470 - DNA, 24 bp, Artificial Sequence
  Synthetic oligonucleotide; CAAAAC chr11 5295772 5295795 5295792 +
tttgactcagaggtggataagaga

SEQ ID NO: 69471 - DNA, 24 bp, Artificial Sequence
  Synthetic oligonucleotide; TAAAAC chr11 5296496 5296519 5296516 +
taacactccaagatagatttagat

SEQ ID NO: 69472 - DNA, 24 bp, Artificial Sequence
  Synthetic oligonucleotide; GAAAAC chr11 5296588 5296611 5296608 +
taacatgatgaggagacatggaaa

SEQ ID NO: 69473 - DNA, 24 bp, Artificial Sequence
  Synthetic oligonucleotide; AAAAAC chr11 5298257 5298280 5298277 +
catgatcccatatttacaaaaaat

SEQ ID NO: 69474 - DNA, 24 bp, Artificial Sequence
  Synthetic oligonucleotide; TAAAAC chr11 5298905 5298928 5298925 +
ataggttatgaatataattaaaat

SEQ ID NO: 69475 - DNA, 24 bp, Artificial Sequence
  Synthetic oligonucleotide; GAAAAC chr11 5299212 5299235 5299232 +
aggctgtcttcttataacaatcaa

SEQ ID NO: 69476 - DNA, 24 bp, Artificial Sequence
  Synthetic oligonucleotide; AAAAAC chr11 5299262 5299285 5299282 +
acaaatacatttgccatttttaca

SEQ ID NO: 69477 - DNA, 24 bp, Artificial Sequence
  Synthetic oligonucleotide; GAAAAC chr11 5299412 5299435 5299432 +
tagaccaaacaacaaaggcaacca

SEQ ID NO: 69478 - DNA, 24 bp, Artificial Sequence
  Synthetic oligonucleotide; AAAAAC chr11 5299458 5299481 5299478 +
ataaactctgtatgccaactttgg

SEQ ID NO: 69479 - DNA, 24 bp, Artificial Sequence
  Synthetic oligonucleotide; CAAAAC chr11 5300135 5300158 5300155 +
ttgccaagtttttgcattaattat

SEQ ID NO: 69480 - DNA, 24 bp, Artificial Sequence
  Synthetic oligonucleotide; GAAAAC chr11 5300326 5300349 5300346 +
gtttcagcagacaatgggaagaag

SEQ ID NO: 69481 - DNA, 24 bp, Artificial Sequence
  Synthetic oligonucleotide; TAAAAC chr11 5300916 5300939 5300936 +
tctgaggaaaaaaaagtgtggata

SEQ ID NO: 69482 - DNA, 24 bp, Artificial Sequence
  Synthetic oligonucleotide; TAAAAC chr11 5301472 5301495 5301492 +
aaagaattatgggcaaaatggaca

SEQ ID NO: 69483 - DNA, 24 bp, Artificial Sequence
  Synthetic oligonucleotide; CAAAAC chr11 5301578 5301601 5301598 +
gatggcaatgaaacagtcataggc

SEQ ID NO: 69484 - DNA, 24 bp, Artificial Sequence
  Synthetic oligonucleotide; CAAAAC chr11 5302037 5302060 5302057 +
acatcatcaggccattttttacct

SEQ ID NO: 69485 - DNA, 24 bp, Artificial Sequence
  Synthetic oligonucleotide; TAAAAC chr11 5302662 5302685 5302682 +
gtctctataaaaaataaaataaaa

SEQ ID NO: 69486 - DNA, 24 bp, Artificial Sequence
  Synthetic oligonucleotide; GAAAAC chr11 5303268 5303291 5303288 +
gaaattttgtagcaggtttattgg

SEQ ID NO: 69487 - DNA, 24 bp, Artificial Sequence
  Synthetic oligonucleotide; AAAAAC chr11 5303442 5303465 5303462 +
atctttgcaccttttttattttat

SEQ ID NO: 69488 - DNA, 24 bp, Artificial Sequence
  Synthetic oligonucleotide; AAAAAC chr11 5303649 5303672 5303669 +
agagactatgttcatatggatact

SEQ ID NO: 69489 - DNA, 24 bp, Artificial Sequence
  Synthetic oligonucleotide; CAAAAC chr11 5303920 5303943 5303940 +
attcttaaactatagtcgtgtttt

SEQ ID NO: 69490 - DNA, 24 bp, Artificial Sequence
  Synthetic oligonucleotide; TAAAAC chr11 5303966 5303989 5303986 +
acatgcggatgcacagggttttat

SEQ ID NO: 69491 - DNA, 24 bp, Artificial Sequence
  Synthetic oligonucleotide; CAAAAC chr11 5304066 5304089 5304086 +
ctatttaacatctgcagtctctag

SEQ ID NO: 69492 - DNA, 24 bp, Artificial Sequence
  Synthetic oligonucleotide; AAAAAC chr11 5304954 5304977 5304974 +
gctgaggcaggagaattgctttaa

SEQ ID NO: 69493 - DNA, 24 bp, Artificial Sequence
  Synthetic oligonucleotide; AAAAAC chr11 5305184 5305207 5305204 +
agcaaagttgatctgtatttacaa

SEQ ID NO: 69494 - DNA, 24 bp, Artificial Sequence
  Synthetic oligonucleotide; AAAAAC chr11 5305374 5305397 5305394 +
tgactgtgagacaaaaagtgagta

SEQ ID NO: 69495 - DNA, 24 bp, Artificial Sequence
  Synthetic oligonucleotide; CAAAAC chr11 5305482 5305505 5305502 +
tcgagaccagctgggccaacatgg

SEQ ID NO: 69496 - DNA, 24 bp, Artificial Sequence
  Synthetic oligonucleotide; AAAAAC chr11 5305689 5305712 5305709 +
agagagagaaaagaaaagtgagta

SEQ ID NO: 69497 - DNA, 24 bp, Artificial Sequence
  Synthetic oligonucleotide; CAAAAC chr11 5305833 5305856 5305853 +
attcaaacacaggtttatctaacc

SEQ ID NO: 69498 - DNA, 24 bp, Artificial Sequence
  Synthetic oligonucleotide; CAAAAC chr11 5306436 5306459 5306456 +
atttatttattctttctattgatt

SEQ ID NO: 69499 - DNA, 24 bp, Artificial Sequence
  Synthetic oligonucleotide; AAAAAC chr11 5306735 5306758 5306755 +
tagatgtataaagatatctgcatt

SEQ ID NO: 69500 - DNA, 24 bp, Artificial Sequence
  Synthetic oligonucleotide; CAAAAC chr11 5306980 5307003 5307000 +
caactctaccctaaactcttatct

SEQ ID NO: 69501 - DNA, 24 bp, Artificial Sequence
  Synthetic oligonucleotide; AAAAAC chr11 5307102 5307125 5307122 +
atcacctgtttatacttaggggaa

SEQ ID NO: 69502 - DNA, 24 bp, Artificial Sequence
  Synthetic oligonucleotide; CAAAAC chr11 5307144 5307167 5307164 +
tcatatattcaggtaagattttgc

SEQ ID NO: 69503 - DNA, 24 bp, Artificial Sequence
  Synthetic oligonucleotide; TAAAAC chr11 5307285 5307308 5307305 +
agtcagttctctttgtactcacag

SEQ ID NO: 69504 - DNA, 24 bp, Artificial Sequence
  Synthetic oligonucleotide; CAAAAC chr11 5307290 5307313 5307310 +
gttctctttgtactcacagtaaaa

SEQ ID NO: 69505 - DNA, 24 bp, Artificial Sequence
  Synthetic oligonucleotide; TAAAAC chr11 5308355 5308378 5308375 +
cattttaaggttgaaggtatgcag

SEQ ID NO: 69506 - DNA, 24 bp, Artificial Sequence
  Synthetic oligonucleotide; CAAAAC chr11 5308555 5308578 5308575 +
gagtaagattttgtgtcaactaaa

SEQ ID NO: 69507 - DNA, 24 bp, Artificial Sequence
  Synthetic oligonucleotide; AAAAAC chr11 5308883 5308906 5308903 +
tggacgtaaattgcaggttattga

SEQ ID NO: 69508 - DNA, 24 bp, Artificial Sequence
  Synthetic oligonucleotide; AAAAAC chr11 5308942 5308965 5308962 +
ggcatctttctcactaagcatgag

SEQ ID NO: 69509 - DNA, 24 bp, Artificial Sequence
  Synthetic oligonucleotide; GAAAAC chr11 5309434 5309457 5309454 +
aaagttttaatacaaggacataca

SEQ ID NO: 69510 - DNA, 24 bp, Artificial Sequence
  Synthetic oligonucleotide; TAAAAC chr11 5309517 5309540 5309537 +
ccacatttttatgtcttcccaata

SEQ ID NO: 69511 - DNA, 24 bp, Artificial Sequence
  Synthetic oligonucleotide; AAAAAC chr11 5309813 5309836 5309833 +
ggcgacagagcgagactccatctc

SEQ ID NO: 69512 - DNA, 24 bp, Artificial Sequence
  Synthetic oligonucleotide; CAAAAC chr11 5309818 5309841 5309838 +
cagagcgagactccatctcaaaaa

SEQ ID NO: 69513 - DNA, 24 bp, Artificial Sequence
  Synthetic oligonucleotide; CAAAAC chr11 5309823 5309846 5309843 +
cgagactccatctcaaaaacaaaa

SEQ ID NO: 69514 - DNA, 24 bp, Artificial Sequence
  Synthetic oligonucleotide; AAAAAC chr11 5309837 5309860 5309857 +
aaaaacaaaacaaaacaaagcaaa

SEQ ID NO: 69515 - DNA, 24 bp, Artificial Sequence
  Synthetic oligonucleotide; GAAAAC chr11 5310040 5310063 5310060 +
atttgttaaatcatttctttaact

SEQ ID NO: 69516 - DNA, 24 bp, Artificial Sequence
  Synthetic oligonucleotide; GAAAAC chr11 5310091 5310114 5310111 +
gcagtcagccgagatcaaggcact

SEQ ID NO: 69517 - DNA, 24 bp, Artificial Sequence
  Synthetic oligonucleotide; AAAAAC chr11 5310386 5310409 5310406 +
atgctacaacatgaataaacctta

SEQ ID NO: 69518 - DNA, 24 bp, Artificial Sequence
  Synthetic oligonucleotide; TAAAAC chr11 5310687 5310710 5310707 +
ttgtatatattaccactataaaaa

SEQ ID NO: 69519 - DNA, 24 bp, Artificial Sequence
  Synthetic oligonucleotide; AAAAAC chr11 5310735 5310758 5310755 +
cattaaatttattgtgaaaggttt

SEQ ID NO: 69520 - DNA, 24 bp, Artificial Sequence
  Synthetic oligonucleotide; AAAAAC chr11 5311049 5311072 5311069 +
ggtaactaacataagcactcatga

SEQ ID NO: 69521 - DNA, 24 bp, Artificial Sequence
  Synthetic oligonucleotide; TAAAAC chr11 5311218 5311241 5311238 +
gcagtattttttggactgctattt

SEQ ID NO: 69522 - DNA, 24 bp, Artificial Sequence
  Synthetic oligonucleotide; AAAAAC chr11 5311253 5311276 5311273 +
ctacttcagtgaatgacacccaag

SEQ ID NO: 69523 - DNA, 24 bp, Artificial Sequence
  Synthetic oligonucleotide; TAAAAC chr11 5311907 5311930 5311927 +
ttataaataatattgaagtaattt

SEQ ID NO: 69524 - DNA, 24 bp, Artificial Sequence
  Synthetic oligonucleotide; GAAAAC chr11 5312683 5312706 5312703 +
attgtgtatatagcaagacaaaca

SEQ ID NO: 69525 - DNA, 24 bp, Artificial Sequence
  Synthetic oligonucleotide; TAAAAC chr11 5312712 5312735 5312732 +
ctgggaaaatacgtacactaaaaa

SEQ ID NO: 69526 - DNA, 24 bp, Artificial Sequence
  Synthetic oligonucleotide; TAAAAC chr11 5313024 5313047 5313044 +
tatgaatttagagagtctctactg

SEQ ID NO: 69527 - DNA, 24 bp, Artificial Sequence
  Synthetic oligonucleotide; GAAAAC chr11 5313059 5313082 5313079 +
agatgacattgtatcattttgaaa

SEQ ID NO: 69528 - DNA, 24 bp, Artificial Sequence
  Synthetic oligonucleotide; TAAAAC chr11 5313243 5313266 5313263 +
taatatctggagtctatgaggaac

SEQ ID NO: 69529 - DNA, 24 bp, Artificial Sequence
  Synthetic oligonucleotide; AAAAAC chr11 5313262 5313285 5313282 +
ggaactaaaacaaatttacaagaa

SEQ ID NO: 69530 - DNA, 24 bp, Artificial Sequence
  Synthetic oligonucleotide; CAAAAC chr11 5313390 5313413 5313410 +
actggtcattagaaaaatgcaaat

SEQ ID NO: 69531 - DNA, 24 bp, Artificial Sequence
  Synthetic oligonucleotide; GAAAAC chr11 5313740 5313763 5313760 +
tccatcaatgatagagtggataaa

SEQ ID NO: 69532 - DNA, 24 bp, Artificial Sequence
  Synthetic oligonucleotide; GAAAAC chr11 5313863 5313886 5313883 +
cctcatcaaactaacacaggaaca

SEQ ID NO: 69533 - DNA, 24 bp, Artificial Sequence
  Synthetic oligonucleotide; CAAAAC chr11 5314280 5314303 5314300 +
tgctataattcatctttatatggc

SEQ ID NO: 69534 - DNA, 24 bp, Artificial Sequence
  Synthetic oligonucleotide; AAAAAC chr11 5315928 5315951 5315948 +
aagtagttaagcattcttaatcta

SEQ ID NO: 69535 - DNA, 24 bp, Artificial Sequence
  Synthetic oligonucleotide; GAAAAC chr11 5316144 5316167 5316164 +
tgatatagacatagtgttttgtta

SEQ ID NO: 69536 - DNA, 24 bp, Artificial Sequence
  Synthetic oligonucleotide; AAAAAC chr11 5319610 5319633 5319630 +
atatgatcatctcaatagactgag

SEQ ID NO: 69537 - DNA, 24 bp, Artificial Sequence
  Synthetic oligonucleotide; AAAAAC chr11 5319647 5319670 5319667 +
taaaattcaacatcccttcatgat

SEQ ID NO: 69538 - DNA, 24 bp, Artificial Sequence
  Synthetic oligonucleotide; AAAAAC chr11 5319709 5319732 5319729 +
tcaaaagaataaaagccacgtatg

SEQ ID NO: 69539 - DNA, 24 bp, Artificial Sequence
  Synthetic oligonucleotide; CAAAAC chr11 5319722 5319745 5319742 +
agccacgtatgaaaaacccataac

SEQ ID NO: 69540 - DNA, 24 bp, Artificial Sequence
  Synthetic oligonucleotide; GAAAAC chr11 5319764 5319787 5319784 +
gcaaaagctggaactattctcctc

SEQ ID NO: 69541 - DNA, 24 bp, Artificial Sequence
  Synthetic oligonucleotide; TAAAAC chr11 5320133 5320156 5320153 +
ggacttgttctttttattgaaatt

SEQ ID NO: 69542 - DNA, 24 bp, Artificial Sequence
  Synthetic oligonucleotide; CAAAAC chr11 5320367 5320390 5320387 +
gcgtacaggtgaaaagaacaaaca

SEQ ID NO: 69543 - DNA, 24 bp, Artificial Sequence
  Synthetic oligonucleotide; TAAAAC chr11 5320582 5320605 5320602 +
tcacaatatatcttgcaaatcatg

SEQ ID NO: 69544 - DNA, 24 bp, Artificial Sequence
  Synthetic oligonucleotide; TAAAAC chr11 5320617 5320640 5320637 +
gacattaccataagggaatgaata

SEQ ID NO: 69545 - DNA, 24 bp, Artificial Sequence
  Synthetic oligonucleotide; TAAAAC chr11 5321831 5321854 5321851 +
gtccttccatcaaatgtatcactg

SEQ ID NO: 69546 - DNA, 24 bp, Artificial Sequence
  Synthetic oligonucleotide; AAAAAC chr11 5322253 5322276 5322273 +
gaagcttttagtacacagtcacac

SEQ ID NO: 69547 - DNA, 24 bp, Artificial Sequence
  Synthetic oligonucleotide; AAAAAC chr11 5322564 5322587 5322584 +
catctgaagagcaaacatactctt

SEQ ID NO: 69548 - DNA, 24 bp, Artificial Sequence
  Synthetic oligonucleotide; CAAAAC chr11 5323820 5323843 5323840 +
gcaaaattacaggcaggatggata

SEQ ID NO: 69549 - DNA, 24 bp, Artificial Sequence
  Synthetic oligonucleotide; AAAAAC chr11 5324554 5324577 5324574 +
aatatttgcaacaacagtgataac

SEQ ID NO: 69550 - DNA, 24 bp, Artificial Sequence
  Synthetic oligonucleotide; CAAAAC chr11 5324941 5324964 5324961 +
tcaggtcctcaggtgattccagtg

SEQ ID NO: 69551 - DNA, 24 bp, Artificial Sequence
  Synthetic oligonucleotide; AAAAAC chr11 5325666 5325689 5325686 +
accttcgaaagatccttcatgctt

SEQ ID NO: 69552 - DNA, 24 bp, Artificial Sequence
  Synthetic oligonucleotide; AAAAAC chr11 5325951 5325974 5325971 +
aaaatgtttgtgagcttttcctta

SEQ ID NO: 69553 - DNA, 24 bp, Artificial Sequence
  Synthetic oligonucleotide; TAAAAC chr11 5325983 5326006 5326003 +
taacgtctttagagaaattggcca

SEQ ID NO: 69554 - DNA, 24 bp, Artificial Sequence
  Synthetic oligonucleotide; GAAAAC chr11 5326813 5326836 5326833 +
tgtctcaacaggatccataatgct

SEQ ID NO: 69555 - DNA, 24 bp, Artificial Sequence
  Synthetic oligonucleotide; AAAAAC chr11 5327758 5327781 5327778 +
gaattttttgtctactcttcagag

SEQ ID NO: 69556 - DNA, 24 bp, Artificial Sequence
  Synthetic oligonucleotide; AAAAAC chr11 5327839 5327862 5327859 +
aaaataagccctttctggataaac

SEQ ID NO: 69557 - DNA, 24 bp, Artificial Sequence
  Synthetic oligonucleotide; GAAAAC chr11 5328235 5328258 5328255 +
tgccaatccaagggtcccagatta

SEQ ID NO: 69558 - DNA, 24 bp, Artificial Sequence
  Synthetic oligonucleotide; GAAAAC chr11 5328349 5328372 5328369 +
tctttacctctaggcagacctctg

SEQ ID NO: 69559 - DNA, 24 bp, Artificial Sequence
  Synthetic oligonucleotide; AAAAAC chr11 5328709 5328732 5328729 +
tggggtgaggaaaatttgaaattc

SEQ ID NO: 69560 - DNA, 24 bp, Artificial Sequence
  Synthetic oligonucleotide; AAAAAC chr11 5329531 5329554 5329551 +
aaatattatttaagctaataattg

SEQ ID NO: 69561 - DNA, 24 bp, Artificial Sequence
  Synthetic oligonucleotide; CAAAAC chr11 5329668 5329691 5329688 +
agaattctagcagagccagaataa

SEQ ID NO: 69562 - DNA, 24 bp, Artificial Sequence
  Synthetic oligonucleotide; AAAAAC chr11 5330588 5330611 5330608 +
gtggtagcccaatcaagtgacatt

SEQ ID NO: 69563 - DNA, 24 bp, Artificial Sequence
  Synthetic oligonucleotide; TAAAAC chr11 5330973 5330996 5330993 +
atctcaggggattatggatgccaa

SEQ ID NO: 69564 - DNA, 24 bp, Artificial Sequence
  Synthetic oligonucleotide; CAAAAC chr11 5331365 5331388 5331385 +
gatacctgaggagaaacaaacaaa

SEQ ID NO: 69565 - DNA, 24 bp, Artificial Sequence
  Synthetic oligonucleotide; TAAAAC chr11 5331785 5331808 5331805 +
ataaaaattatttcacacatactt

SEQ ID NO: 69566 - DNA, 24 bp, Artificial Sequence
  Synthetic oligonucleotide; AAAAAC chr11 5331864 5331887 5331884 +
aaatggtgtgataggcataatttt

SEQ ID NO: 69567 - DNA, 24 bp, Artificial Sequence
  Synthetic oligonucleotide; AAAAAC chr11 5332211 5332234 5332231 +
taacagcctgcaaacaaacaaaca

SEQ ID NO: 69568 - DNA, 24 bp, Artificial Sequence
  Synthetic oligonucleotide; AAAAAC chr11 5332217 5332240 5332237 +
cctgcaaacaaacaaacaaaaaac

SEQ ID NO: 69569 - DNA, 24 bp, Artificial Sequence
  Synthetic oligonucleotide; AAAAAC chr11 5332223 5332246 5332243 +
aacaaacaaacaaaaaacaaaaac

SEQ ID NO: 69570 - DNA, 24 bp, Artificial Sequence
  Synthetic oligonucleotide; GAAAAC chr11 5332813 5332836 5332833 +
tgcagtaatttatgtataacaata

SEQ ID NO: 69571 - DNA, 24 bp, Artificial Sequence
  Synthetic oligonucleotide; TAAAAC chr11 5333233 5333256 5333253 +
ttttgcatcacccagactttagca

SEQ ID NO: 69572 - DNA, 24 bp, Artificial Sequence
  Synthetic oligonucleotide; AAAAAC chr11 5333312 5333335 5333332 +
tagtggctctaactcattgtagta

SEQ ID NO: 69573 - DNA, 24 bp, Artificial Sequence
  Synthetic oligonucleotide; GAAAAC chr11 5333633 5333656 5333653 +
gaacataggtggatgtaagataga

SEQ ID NO: 69574 - DNA, 24 bp, Artificial Sequence
  Synthetic oligonucleotide; TAAAAC chr11 5333868 5333891 5333888 +
ttattcatgtaagcacccatcaca

SEQ ID NO: 69575 - DNA, 24 bp, Artificial Sequence
  Synthetic oligonucleotide; GAAAAC chr11 5334338 5334361 5334358 +
agccccatattttctttgcaaaaa

SEQ ID NO: 69576 - DNA, 24 bp, Artificial Sequence
  Synthetic oligonucleotide; GAAAAC chr11 5336257 5336280 5336277 +
gcaggcggcttcctccaatcagtt

SEQ ID NO: 69577 - DNA, 24 bp, Artificial Sequence
  Synthetic oligonucleotide; CAAAAC chr11 5336378 5336401 5336398 +
tgcctttagattgaactgaaacat

SEQ ID NO: 69578 - DNA, 24 bp, Artificial Sequence
  Synthetic oligonucleotide; AAAAAC chr11 5337352 5337375 5337372 +
tagcatctgttgtttcttgacttt

SEQ ID NO: 69579 - DNA, 24 bp, Artificial Sequence
  Synthetic oligonucleotide; AAAAAC chr11 5338633 5338656 5338653 +
tctaaggatttaggctataaaatc

SEQ ID NO: 69580 - DNA, 24 bp, Artificial Sequence
  Synthetic oligonucleotide; AAAAAC chr11 5339806 5339829 5339826 +
attgttacaatgggttttgaatag

SEQ ID NO: 69581 - DNA, 24 bp, Artificial Sequence
  Synthetic oligonucleotide; CAAAAC chr11 5340197 5340220 5340217 +
aaactcaactgaaactaggctgaa

SEQ ID NO: 69582 - DNA, 24 bp, Artificial Sequence
  Synthetic oligonucleotide; GAAAAC chr11 5340282 5340305 5340302 +
gtcctccttgtcactgagtctcag

SEQ ID NO: 69583 - DNA, 24 bp, Artificial Sequence
  Synthetic oligonucleotide; AAAAAC chr11 5340387 5340410 5340407 +
tagtttgaagtcacttgcctgatg

SEQ ID NO: 69584 - DNA, 24 bp, Artificial Sequence
  Synthetic oligonucleotide; GAAAAC chr11 5340793 5340816 5340813 +
ttttatattaaatttccccatcaa

SEQ ID NO: 69585 - DNA, 24 bp, Artificial Sequence
  Synthetic oligonucleotide; GAAAAC chr11 5340897 5340920 5340917 +
acatgtttggttttatgaatgatt

SEQ ID NO: 69586 - DNA, 24 bp, Artificial Sequence
  Synthetic oligonucleotide; AAAAAC chr11 5340908 5340931 5340928 +
tttatgaatgattgaaaacaggac

SEQ ID NO: 69587 - DNA, 24 bp, Artificial Sequence
  Synthetic oligonucleotide; AAAAAC chr11 5340994 5341017 5341014 +
aggtgacatggcgtgacaaggata

SEQ ID NO: 69588 - DNA, 24 bp, Artificial Sequence
  Synthetic oligonucleotide; TAAAAC chr11 5341411 5341434 5341431 +
cacaattctgtaaaatgatcgggg

SEQ ID NO: 69589 - DNA, 24 bp, Artificial Sequence
  Synthetic oligonucleotide; CAAAAC chr11 5342714 5342737 5342734 +
gaacaatatgtggaacctgctttc

SEQ ID NO: 69590 - DNA, 24 bp, Artificial Sequence
  Synthetic oligonucleotide; AAAAAC chr11 5342754 5342777 5342774 +
agacaatccaatcactgtgacata

SEQ ID NO: 69591 - DNA, 24 bp, Artificial Sequence
  Synthetic oligonucleotide; TAAAAC chr11 5343137 5343160 5343157 +
atctaagagggttgcagatggcaa

SEQ ID NO: 69592 - DNA, 24 bp, Artificial Sequence
  Synthetic oligonucleotide; GAAAAC chr11 5343455 5343478 5343475 +
agtgatgagcttcctccaagcctg

SEQ ID NO: 69593 - DNA, 24 bp, Artificial Sequence
  Synthetic oligonucleotide; TAAAAC chr11 5344822 5344845 5344842 +
acaaatataaatgcaagtttaaca

SEQ ID NO: 69594 - DNA, 24 bp, Artificial Sequence
  Synthetic oligonucleotide; GAAAAC chr11 5344946 5344969 5344966 +
ttgaactgagacctcaatacaaaa

SEQ ID NO: 69595 - DNA, 24 bp, Artificial Sequence
  Synthetic oligonucleotide; GAAAAC chr11 5344974 5344997 5344994 +
acctgaccgtatacagacctagag

SEQ ID NO: 69596 - DNA, 24 bp, Artificial Sequence
  Synthetic oligonucleotide; GAAAAC chr11 5345019 5345042 5345039 +
atcagcatgactggcatttgataa

SEQ ID NO: 69597 - DNA, 24 bp, Artificial Sequence
  Synthetic oligonucleotide; AAAAAC chr11 5345360 5345383 5345380 +
gaaatgaaaaaaagagaaaaatag

SEQ ID NO: 69598 - DNA, 24 bp, Artificial Sequence
  Synthetic oligonucleotide; GAAAAC chr11 5347630 5347653 5347650 +
caaaatattcaacctccaacagag

SEQ ID NO: 69599 - DNA, 24 bp, Artificial Sequence
  Synthetic oligonucleotide; AAAAAC chr11 5348031 5348054 5348051 +
tcattgcaggaaccaaggcaaaaa

SEQ ID NO: 69600 - DNA, 24 bp, Artificial Sequence
  Synthetic oligonucleotide; TAAAAC chr11 5348141 5348164 5348161 +
gtcctaaagactccctgacatctc

SEQ ID NO: 69601 - DNA, 24 bp, Artificial Sequence
  Synthetic oligonucleotide; AAAAAC chr11 5349055 5349078 5349075 +
tttgagaattagtttctcattaat

SEQ ID NO: 69602 - DNA, 24 bp, Artificial Sequence
  Synthetic oligonucleotide; GAAAAC chr11 5349218 5349241 5349238 +
gtgaaagcactcagttttcaatat

SEQ ID NO: 69603 - DNA, 24 bp, Artificial Sequence
  Synthetic oligonucleotide; TAAAAC chr11 5349614 5349637 5349634 +
tcatttaacaatgaatacctataa

SEQ ID NO: 69604 - DNA, 24 bp, Artificial Sequence
  Synthetic oligonucleotide; AAAAAC chr11 5349950 5349973 5349970 +
atttaaagtcaaacacaggctcct

SEQ ID NO: 69605 - DNA, 24 bp, Artificial Sequence
  Synthetic oligonucleotide; AAAAAC chr11 5350090 5350113 5350110 +
gaggtacttctctgaaacaataac

SEQ ID NO: 69606 - DNA, 24 bp, Artificial Sequence
  Synthetic oligonucleotide; CAAAAC chr11 5350125 5350148 5350145 +
aataaaaaaattatccactcttta

SEQ ID NO: 69607 - DNA, 24 bp, Artificial Sequence
  Synthetic oligonucleotide; TAAAAC chr11 5352359 5352382 5352379 +
tatgaacccatttatctatagcat

SEQ ID NO: 69608 - DNA, 24 bp, Artificial Sequence
  Synthetic oligonucleotide; TAAAAC chr11 5353210 5353233 5353230 +
atctctatgagaaatgtgttcagt

SEQ ID NO: 69609 - DNA, 24 bp, Artificial Sequence
  Synthetic oligonucleotide; GAAAAC chr11 5353254 5353277 5353274 +
atcaaataatattgataataattt

SEQ ID NO: 69610 - DNA, 24 bp, Artificial Sequence
  Synthetic oligonucleotide; AAAAAC chr11 5353426 5353449 5353446 +
ggcatgtgcaaaatagcagagttg

SEQ ID NO: 69611 - DNA, 24 bp, Artificial Sequence
  Synthetic oligonucleotide; GAAAAC chr11 5353840 5353863 5353860 +
cttgggatgtataaataacacaga

SEQ ID NO: 69612 - DNA, 24 bp, Artificial Sequence
  Synthetic oligonucleotide; GAAAAC chr11 5354730 5354753 5354750 +
tggaagagactcagccactcacag

SEQ ID NO: 69613 - DNA, 24 bp, Artificial Sequence
  Synthetic oligonucleotide; AAAAAC chr11 5354992 5355015 5355012 +
atgtgctctgggaggatatccaca

SEQ ID NO: 69614 - DNA, 24 bp, Artificial Sequence
  Synthetic oligonucleotide; GAAAAC chr11 5355024 5355047 5355044 +
atggatgcatccttgctaacactg

SEQ ID NO: 69615 - DNA, 24 bp, Artificial Sequence
  Synthetic oligonucleotide; AAAAAC chr11 5355279 5355302 5355299 +
attggattttatattaatactttc

SEQ ID NO: 69616 - DNA, 24 bp, Artificial Sequence
  Synthetic oligonucleotide; GAAAAC chr11 5355907 5355930 5355927 +
gcaagctgagggtcctgttagaag

SEQ ID NO: 69617 - DNA, 24 bp, Artificial Sequence
  Synthetic oligonucleotide; AAAAAC chr11 5355939 5355962 5355959 +
acaaacagaaaggacatccacacc

SEQ ID NO: 69618 - DNA, 24 bp, Artificial Sequence
  Synthetic oligonucleotide; TAAAAC chr11 5355983 5356006 5356003 +
ccatcatcaaagaccaaaggtaga

SEQ ID NO: 69619 - DNA, 24 bp, Artificial Sequence
  Synthetic oligonucleotide; AAAAAC chr11 5356002 5356025 5356022 +
gtagataaaaccacaaagatgggg

SEQ ID NO: 69620 - DNA, 24 bp, Artificial Sequence
  Synthetic oligonucleotide; AAAAAC chr11 5356015 5356038 5356035 +
caaagatggggaaaaacagagcag

SEQ ID NO: 69621 - DNA, 24 bp, Artificial Sequence
  Synthetic oligonucleotide; AAAAAC chr11 5356193 5356216 5356213 +
gctcgaacccatggcaaaaaagtt

SEQ ID NO: 69622 - DNA, 24 bp, Artificial Sequence
  Synthetic oligonucleotide; GAAAAC chr11 5356273 5356296 5356293 +
gtccttaaaggacctgatggagct

SEQ ID NO: 69623 - DNA, 24 bp, Artificial Sequence
  Synthetic oligonucleotide; GAAAAC chr11 5356517 5356540 5356537 +
gacgggcagaatggaaccaagttg

SEQ ID NO: 69624 - DNA, 24 bp, Artificial Sequence
  Synthetic oligonucleotide; AAAAAC chr11 5356992 5357015 5357012 +
ggcacaaccggtaccagccactgc

SEQ ID NO: 69625 - DNA, 24 bp, Artificial Sequence
  Synthetic oligonucleotide; GAAAAC chr11 5357273 5357296 5357293 +
ggaggaagatctaccaagaaaatg

SEQ ID NO: 69626 - DNA, 24 bp, Artificial Sequence
  Synthetic oligonucleotide; TAAAAC chr11 5357313 5357336 5357333 +
aggggttgcaatcctcatctctga

SEQ ID NO: 69627 - DNA, 24 bp, Artificial Sequence
  Synthetic oligonucleotide; CAAAAC chr11 5357818 5357841 5357838 +
gaactcaggattaagaaactcact

SEQ ID NO: 69628 - DNA, 24 bp, Artificial Sequence
  Synthetic oligonucleotide; AAAAAC chr11 5358148 5358171 5358168 +
gaactgaaggaaatagagacacaa

SEQ ID NO: 69629 - DNA, 24 bp, Artificial Sequence
  Synthetic oligonucleotide; AAAAAC chr11 5358491 5358514 5358511 +
gcaataattaatagcttaccaacc

SEQ ID NO: 69630 - DNA, 24 bp, Artificial Sequence
  Synthetic oligonucleotide; AAAAAC chr11 5358710 5358733 5358730 +
atatccctgatggacatcgatgca

SEQ ID NO: 69631 - DNA, 24 bp, Artificial Sequence
  Synthetic oligonucleotide; AAAAAC chr11 5358863 5358886 5358883 +
cagcatataaacagaaccaaagac

SEQ ID NO: 69632 - DNA, 24 bp, Artificial Sequence
  Synthetic oligonucleotide; AAAAAC chr11 5358931 5358954 5358951 +
caaaattcaacaacccttcatgct

SEQ ID NO: 69633 - DNA, 24 bp, Artificial Sequence
  Synthetic oligonucleotide; AAAAAC chr11 5359026 5359049 5359046 +
cagccaatatcatactgaatggac

SEQ ID NO: 69634 - DNA, 24 bp, Artificial Sequence
  Synthetic oligonucleotide; GAAAAC chr11 5359048 5359071 5359068 +
acaaaaactggaagcattcccttt

SEQ ID NO: 69635 - DNA, 24 bp, Artificial Sequence
  Synthetic oligonucleotide; GAAAAC chr11 5359213 5359236 5359233 +
gcagatgacacgattgtatatcta

SEQ ID NO: 69636 - DNA, 24 bp, Artificial Sequence
  Synthetic oligonucleotide; AAAAAC chr11 5359611 5359634 5359631 +
aatgactttcttcacagaattgga

SEQ ID NO: 69637 - DNA, 24 bp, Artificial Sequence
  Synthetic oligonucleotide; CAAAAC chr11 5359740 5359763 5359760 +
actatactacaaggctacagtaac

SEQ ID NO: 69638 - DNA, 24 bp, Artificial Sequence
  Synthetic oligonucleotide; CAAAAC chr11 5359762 5359785 5359782 +
accaaaacagcatggtactggtac

SEQ ID NO: 69639 - DNA, 24 bp, Artificial Sequence
  Synthetic oligonucleotide; AAAAAC chr11 5359855 5359878 5359875 +
ctgatctttgacaaacctgacaaa

SEQ ID NO: 69640 - DNA, 24 bp, Artificial Sequence
  Synthetic oligonucleotide; GAAAAC chr11 5359900 5359923 5359920 +
tccctatttaataaatggtgctgg

SEQ ID NO: 69641 - DNA, 24 bp, Artificial Sequence
  Synthetic oligonucleotide; GAAAAC chr11 5360001 5360024 5360021 +
gattacagacttaaatgttagact

SEQ ID NO: 69642 - DNA, 24 bp, Artificial Sequence
  Synthetic oligonucleotide; AAAAAC chr11 5360010 5360033 5360030 +
cttaaatgttagactgaaaaccat

SEQ ID NO: 69643 - DNA, 24 bp, Artificial Sequence
  Synthetic oligonucleotide; GAAAAC chr11 5360023 5360046 5360043 +
ctgaaaaccataaaaactctggaa

SEQ ID NO: 69644 - DNA, 24 bp, Artificial Sequence
  Synthetic oligonucleotide; TAAAAC chr11 5360076 5360099 5360096 +
aggcatgggcaaggacttcatgtc

SEQ ID NO: 69645 - DNA, 24 bp, Artificial Sequence
  Synthetic oligonucleotide; AAAAAC chr11 5360277 5360300 5360297 +
tgaactcaaacaaatttacaagaa

SEQ ID NO: 69646 - DNA, 24 bp, Artificial Sequence
  Synthetic oligonucleotide; CAAAAC chr11 5360402 5360425 5360422 +
actggccatcagagaaatacaaat

SEQ ID NO: 69647 - DNA, 24 bp, Artificial Sequence
  Synthetic oligonucleotide; GAAAAC chr11 5360747 5360770 5360767 +
tccaacaatgatagactggattaa

SEQ ID NO: 69648 - DNA, 24 bp, Artificial Sequence
  Synthetic oligonucleotide; AAAAAC chr11 5360869 5360892 5360889 +
ttctcagcaaactatcgcaaggac

SEQ ID NO: 69649 - DNA, 24 bp, Artificial Sequence
  Synthetic oligonucleotide; TAAAAC chr11 5361099 5361122 5361119 +
cctgcacgttgtgcaaatgtaccc

SEQ ID NO: 69650 - DNA, 24 bp, Artificial Sequence
  Synthetic oligonucleotide; AAAAAC chr11 5361960 5361983 5361980 +
acaagggtatagactaacagaaag

SEQ ID NO: 69651 - DNA, 24 bp, Artificial Sequence
  Synthetic oligonucleotide; GAAAAC chr11 5362997 5363020 5363017 +
ggcagggattggggcatgaaggtt

SEQ ID NO: 69652 - DNA, 24 bp, Artificial Sequence
  Synthetic oligonucleotide; CAAAAC chr11 5363116 5363139 5363136 +
gaagaaagagaccctgagtgtctt

SEQ ID NO: 69653 - DNA, 24 bp, Artificial Sequence
  Synthetic oligonucleotide; AAAAAC chr11 5363752 5363775 5363772 +
tagcattttcatgaggattctatt

SEQ ID NO: 69654 - DNA, 24 bp, Artificial Sequence
  Synthetic oligonucleotide; CAAAAC chr11 5364286 5364309 5364306 +
ccttgaccaccaatcttgacttca

SEQ ID NO: 69655 - DNA, 24 bp, Artificial Sequence
  Synthetic oligonucleotide; TAAAAC chr11 5365041 5365064 5365061 +
cttgggcaaataagggacactcaa

SEQ ID NO: 69656 - DNA, 24 bp, Artificial Sequence
  Synthetic oligonucleotide; GAAAAC chr11 5365287 5365310 5365307 +
taccactggtgtttgccagctgtg

SEQ ID NO: 69657 - DNA, 24 bp, Artificial Sequence
  Synthetic oligonucleotide; AAAAAC chr11 5365543 5365566 5365563 +
ttttcacaaagcatattgatacac

SEQ ID NO: 69658 - DNA, 24 bp, Artificial Sequence
  Synthetic oligonucleotide; AAAAAC chr11 5368536 5368559 5368556 +
ctgtctagctctgacaaagaaaat

SEQ ID NO: 69659 - DNA, 24 bp, Artificial Sequence
  Synthetic oligonucleotide; TAAAAC chr11 5368726 5368749 5368746 +
tgagttactcaaaatattatgctt

SEQ ID NO: 69660 - DNA, 24 bp, Artificial Sequence
  Synthetic oligonucleotide; CAAAAC chr11 5368741 5368764 5368761 +
attatgctttaaaactgaaggaag

SEQ ID NO: 69661 - DNA, 24 bp, Artificial Sequence
  Synthetic oligonucleotide; TAAAAC chr11 5369402 5369425 5369422 +
agaattacatctattatacctcag

SEQ ID NO: 69662 - DNA, 24 bp, Artificial Sequence
  Synthetic oligonucleotide; TAAAAC chr11 5371261 5371284 5371281 +
tctttcacattaggttaatttttt

SEQ ID NO: 69663 - DNA, 24 bp, Artificial Sequence
  Synthetic oligonucleotide; TAAAAC chr11 5371353 5371376 5371373 +
ttaatagagacattgatgaaactg

SEQ ID NO: 69664 - DNA, 24 bp, Artificial Sequence
  Synthetic oligonucleotide; AAAAAC chr11 5371481 5371504 5371501 +
agagtactgatattaaaaatagag

SEQ ID NO: 69665 - DNA, 24 bp, Artificial Sequence
  Synthetic oligonucleotide; GAAAAC chr11 5372788 5372811 5372808 +
acctgagctctggcacattttaca

SEQ ID NO: 69666 - DNA, 24 bp, Artificial Sequence
  Synthetic oligonucleotide; CAAAAC chr11 5372837 5372860 5372857 +
aaccacagaacacccccaaatggc

SEQ ID NO: 69667 - DNA, 24 bp, Artificial Sequence
  Synthetic oligonucleotide; AAAAAC chr11 5372856 5372879 5372876 +
atggccaaaacaatcttgagaaag

SEQ ID NO: 69668 - DNA, 24 bp, Artificial Sequence
  Synthetic oligonucleotide; GAAAAC chr11 5373074 5373097 5373094 +
agtctcctcaacaaatagtgttgg

SEQ ID NO: 69669 - DNA, 24 bp, Artificial Sequence
  Synthetic oligonucleotide; CAAAAC chr11 5373177 5373200 5373197 +
acataaatgtaagacctgaaatca

SEQ ID NO: 69670 - DNA, 24 bp, Artificial Sequence
  Synthetic oligonucleotide; CAAAAC chr11 5374105 5374128 5374125 +
acacggccaggtactcctctgaga

SEQ ID NO: 69671 - DNA, 24 bp, Artificial Sequence
  Synthetic oligonucleotide; GAAAAC chr11 5374262 5374285 5374282 +
gctgagggtcctgtctgttagaag

SEQ ID NO: 69672 - DNA, 24 bp, Artificial Sequence
  Synthetic oligonucleotide; AAAAAC chr11 5374294 5374317 5374314 +
acaaacagaaaggacatccacacc

SEQ ID NO: 69673 - DNA, 24 bp, Artificial Sequence
  Synthetic oligonucleotide; AAAAAC chr11 5374358 5374381 5374378 +
tagatacaaccacaaagttgggga

SEQ ID NO: 69674 - DNA, 24 bp, Artificial Sequence
  Synthetic oligonucleotide; AAAAAC chr11 5374371 5374394 5374391 +
aaagttggggaaaaaacagagcag

SEQ ID NO: 69675 - DNA, 24 bp, Artificial Sequence
  Synthetic oligonucleotide; AAAAAC chr11 5374549 5374572 5374569 +
attcaaaccaaaggcaaagaagat

SEQ ID NO: 69676 - DNA, 24 bp, Artificial Sequence
  Synthetic oligonucleotide; GAAAAC chr11 5374874 5374897 5374894 +
gacggggagaatcgaaccaagttg

SEQ ID NO: 69677 - DNA, 24 bp, Artificial Sequence
  Synthetic oligonucleotide; GAAAAC chr11 5375608 5375631 5375628 +
ggaggaagatctaccaagcaaatg

SEQ ID NO: 69678 - DNA, 24 bp, Artificial Sequence
  Synthetic oligonucleotide; TAAAAC chr11 5375648 5375671 5375668 +
aggggttgcaatcctagtctctga

SEQ ID NO: 69679 - DNA, 24 bp, Artificial Sequence
  Synthetic oligonucleotide; CAAAAC chr11 5376139 5376162 5376159 +
gaactcaggattaagaaactcact

SEQ ID NO: 69680 - DNA, 24 bp, Artificial Sequence
  Synthetic oligonucleotide; AAAAAC chr11 5376468 5376491 5376488 +
agaactgaaggaaacagagacaca

SEQ ID NO: 69681 - DNA, 24 bp, Artificial Sequence
  Synthetic oligonucleotide; CAAAAC chr11 5376522 5376545 5376542 +
gagctggttttttgaaaggatcaa

SEQ ID NO: 69682 - DNA, 24 bp, Artificial Sequence
  Synthetic oligonucleotide; AAAAAC chr11 5377180 5377203 5377200 +
cagcatataaacagaaccaaagac

SEQ ID NO: 69683 - DNA, 24 bp, Artificial Sequence
  Synthetic oligonucleotide; AAAAAC chr11 5377248 5377271 5377268 +
caaaattcaacaacccttcatgct

SEQ ID NO: 69684 - DNA, 24 bp, Artificial Sequence
  Synthetic oligonucleotide; AAAAAC chr11 5377343 5377366 5377363 +
cagccaatatcatactgaatgggc

SEQ ID NO: 69685 - DNA, 24 bp, Artificial Sequence
  Synthetic oligonucleotide; GAAAAC chr11 5377531 5377554 5377551 +
gcagacgacatgattgtatatcta

SEQ ID NO: 69686 - DNA, 24 bp, Artificial Sequence
  Synthetic oligonucleotide; CAAAAC chr11 5377599 5377622 5377619 +
caacttcagcaaagcctcaggata

SEQ ID NO: 69687 - DNA, 24 bp, Artificial Sequence
  Synthetic oligonucleotide; AAAAAC chr11 5377928 5377951 5377948 +
caatgattttcttcacagaattgg

SEQ ID NO: 69688 - DNA, 24 bp, Artificial Sequence
  Synthetic oligonucleotide; CAAAAC chr11 5378057 5378080 5378077 +
actatactacaaggctacagtaac

SEQ ID NO: 69689 - DNA, 24 bp, Artificial Sequence
  Synthetic oligonucleotide; CAAAAC chr11 5378079 5378102 5378099 +
accaaaacagcatgttactggtac

SEQ ID NO: 69690 - DNA, 24 bp, Artificial Sequence
  Synthetic oligonucleotide; AAAAAC chr11 5378158 5378181 5378178 +
atatctacaactatctgatctttg

SEQ ID NO: 69691 - DNA, 24 bp, Artificial Sequence
  Synthetic oligonucleotide; AAAAAC chr11 5378169 5378192 5378189 +
tatctgatctttgaaaaacctgag

SEQ ID NO: 69692 - DNA, 24 bp, Artificial Sequence
  Synthetic oligonucleotide; TAAAAC chr11 5378318 5378341 5378338 +
gattaaagacttaaacattagacc

SEQ ID NO: 69693 - DNA, 24 bp, Artificial Sequence
  Synthetic oligonucleotide; AAAAAC chr11 5378327 5378350 5378347 +
cttaaacattagacctaaaaccat

SEQ ID NO: 69694 - DNA, 24 bp, Artificial Sequence
  Synthetic oligonucleotide; GAAAAC chr11 5378340 5378363 5378360 +
cctaaaaccataaaaaccctagaa

SEQ ID NO: 69695 - DNA, 24 bp, Artificial Sequence
  Synthetic oligonucleotide; TAAAAC chr11 5378393 5378416 5378413 +
aggcatgggcaaggacttcatgtc

SEQ ID NO: 69696 - DNA, 24 bp, Artificial Sequence
  Synthetic oligonucleotide; AAAAAC chr11 5378594 5378617 5378614 +
tgaactcaaacaaatttacaagaa

SEQ ID NO: 69697 - DNA, 24 bp, Artificial Sequence
  Synthetic oligonucleotide; GAAAAC chr11 5378652 5378675 5378672 +
gatatgaacagacacttctcaaaa

SEQ ID NO: 69698 - DNA, 24 bp, Artificial Sequence
  Synthetic oligonucleotide; CAAAAC chr11 5378723 5378746 5378743 +
actggccatcagagaaatgcaaat

SEQ ID NO: 69699 - DNA, 24 bp, Artificial Sequence
  Synthetic oligonucleotide; AAAAAC chr11 5379190 5379213 5379210 +
tctcagtaaactatcgcaaggaca

SEQ ID NO: 69700 - DNA, 24 bp, Artificial Sequence
  Synthetic oligonucleotide; AAAAAC chr11 5379711 5379734 5379731 +
aaacattcagtcaataattcctca

SEQ ID NO: 69701 - DNA, 24 bp, Artificial Sequence
  Synthetic oligonucleotide; CAAAAC chr11 5379957 5379980 5379977 +
aagtcaccagaatcatgaaccaaa

SEQ ID NO: 69702 - DNA, 24 bp, Artificial Sequence
  Synthetic oligonucleotide; TAAAAC chr11 5380034 5380057 5380054 +
caaatcaaaatatgcaaaatacac

SEQ ID NO: 69703 - DNA, 24 bp, Artificial Sequence
  Synthetic oligonucleotide; GAAAAC chr11 5380658 5380681 5380678 +
tctgtaaaaatctgaaaaagctaa

SEQ ID NO: 69704 - DNA, 24 bp, Artificial Sequence
  Synthetic oligonucleotide; GAAAAC chr11 5380928 5380951 5380948 +
atgctccccctggtggctacattg

SEQ ID NO: 69705 - DNA, 24 bp, Artificial Sequence
  Synthetic oligonucleotide; TAAAAC chr11 5381047 5381070 5381067 +
aattctggatagaggttccttaaa

SEQ ID NO: 69706 - DNA, 24 bp, Artificial Sequence
  Synthetic oligonucleotide; GAAAAC chr11 5381181 5381204 5381201 +
cacacaaacaatattacatgcaat

SEQ ID NO: 69707 - DNA, 24 bp, Artificial Sequence
  Synthetic oligonucleotide; TAAAAC chr11 5381700 5381723 5381720 +
aaagaggactattttgtgatatga

SEQ ID NO: 69708 - DNA, 24 bp, Artificial Sequence
  Synthetic oligonucleotide; CAAAAC chr11 5382206 5382229 5382226 +
atcaccggaaaatcttatagttct

SEQ ID NO: 69709 - DNA, 24 bp, Artificial Sequence
  Synthetic oligonucleotide; GAAAAC chr11 5383475 5383498 5383495 +
catatactacatccgacctctctg

SEQ ID NO: 69710 - DNA, 24 bp, Artificial Sequence
  Synthetic oligonucleotide; CAAAAC chr11 5383613 5383636 5383633 +
tgttgcagcagatgtctgtgtagc

SEQ ID NO: 69711 - DNA, 24 bp, Artificial Sequence
  Synthetic oligonucleotide; GAAAAC chr11 5384428 5384451 5384448 +
agaaccagagccagagaaagaaca

SEQ ID NO: 69712 - DNA, 24 bp, Artificial Sequence
  Synthetic oligonucleotide; AAAAAC chr11 5384653 5384676 5384673 +
acaccctctccttactctcatcag

SEQ ID NO: 69713 - DNA, 24 bp, Artificial Sequence
  Synthetic oligonucleotide; AAAAAC chr11 5384827 5384850 5384847 +
tccaaaatcctcctctatcctact

SEQ ID NO: 69714 - DNA, 24 bp, Artificial Sequence
  Synthetic oligonucleotide; AAAAAC chr11 5386123 5386146 5386143 +
gatccgcaagtgtttactggttgg

SEQ ID NO: 69715 - DNA, 24 bp, Artificial Sequence
  Synthetic oligonucleotide; AAAAAC chr11 5386170 5386193 5386190 +
agaaagcaataaatatagaagaat

SEQ ID NO: 69716 - DNA, 24 bp, Artificial Sequence
  Synthetic oligonucleotide; CAAAAC chr11 5386255 5386278 5386275 +
gaaaagatgggtttggaaaggtgc

SEQ ID NO: 69717 - DNA, 24 bp, Artificial Sequence
  Synthetic oligonucleotide; GAAAAC chr11 5386569 5386592 5386589 +
aatgataggagctactgaagtact

SEQ ID NO: 69718 - DNA, 24 bp, Artificial Sequence
  Synthetic oligonucleotide; AAAAAC chr11 5387363 5387386 5387383 +
tgctttagctaagtgggttttaaa

SEQ ID NO: 69719 - DNA, 24 bp, Artificial Sequence
  Synthetic oligonucleotide; AAAAAC chr11 5387980 5388003 5388000 +
gttcttgccattgaaagtaatggt

SEQ ID NO: 69720 - DNA, 24 bp, Artificial Sequence
  Synthetic oligonucleotide; AAAAAC chr11 5388672 5388695 5388692 +
attttaaaccttttttacttcatt

SEQ ID NO: 69721 - DNA, 24 bp, Artificial Sequence
  Synthetic oligonucleotide; TAAAAC chr11 5388902 5388925 5388922 +
gatgtgatatggagaagtctaaca

SEQ ID NO: 69722 - DNA, 24 bp, Artificial Sequence
  Synthetic oligonucleotide; GAAAAC chr11 5389183 5389206 5389203 +
aactgaaataattgaaatacagag

SEQ ID NO: 69723 - DNA, 24 bp, Artificial Sequence
  Synthetic oligonucleotide; TAAAAC chr11 5390366 5390389 5390386 +
aggccagtaaatgagtcctggggc

SEQ ID NO: 69724 - DNA, 24 bp, Artificial Sequence
  Synthetic oligonucleotide; AAAAAC chr11 5390509 5390532 5390529 +
tttatgtctggagttgtggcttta

SEQ ID NO: 69725 - DNA, 24 bp, Artificial Sequence
  Synthetic oligonucleotide; TAAAAC chr11 5390629 5390652 5390649 +
attgaaggtcatcatcaatgtaac

SEQ ID NO: 69726 - DNA, 24 bp, Artificial Sequence
  Synthetic oligonucleotide; AAAAAC chr11 5390651 5390674 5390671 +
actaaaactaaaatgaaactaaat

SEQ ID NO: 69727 - DNA, 24 bp, Artificial Sequence
  Synthetic oligonucleotide; GAAAAC chr11 5392049 5392072 5392069 +
agaccccgattcaaaaataaaaag

SEQ ID NO: 69728 - DNA, 24 bp, Artificial Sequence
  Synthetic oligonucleotide; GAAAAC chr11 5392511 5392534 5392531 +
atacgtacaggtaataacatattt

SEQ ID NO: 69729 - DNA, 24 bp, Artificial Sequence
  Synthetic oligonucleotide; AAAAAC chr11 5392888 5392911 5392908 +
ggcaacagagcaagactccttctc

SEQ ID NO: 69730 - DNA, 24 bp, Artificial Sequence
  Synthetic oligonucleotide; GAAAAC chr11 5392968 5392991 5392988 +
agaggtattttcacataccagaat

SEQ ID NO: 69731 - DNA, 24 bp, Artificial Sequence
  Synthetic oligonucleotide; AAAAAC chr11 5392996 5393019 5393016 +
acataatttaatttgccttttata

SEQ ID NO: 69732 - DNA, 24 bp, Artificial Sequence
  Synthetic oligonucleotide; AAAAAC chr11 5393426 5393449 5393446 +
ggctataaatatttgtatcaaaag

SEQ ID NO: 69733 - DNA, 24 bp, Artificial Sequence
  Synthetic oligonucleotide; GAAAAC chr11 5394014 5394037 5394034 +
tagtatcaggaaaagatagcaaca

SEQ ID NO: 69734 - DNA, 24 bp, Artificial Sequence
  Synthetic oligonucleotide; AAAAAC chr11 5394087 5394110 5394107 +
attttaagagttatagattcacag

SEQ ID NO: 69735 - DNA, 24 bp, Artificial Sequence
  Synthetic oligonucleotide; AAAAAC chr11 5394375 5394398 5394395 +
attcaacaacaacaacaaaccaaa

SEQ ID NO: 69736 - DNA, 24 bp, Artificial Sequence
  Synthetic oligonucleotide; TAAAAC chr11 5394552 5394575 5394572 +
cctttgaaattgatactgtatttg

SEQ ID NO: 69737 - DNA, 24 bp, Artificial Sequence
  Synthetic oligonucleotide; AAAAAC chr11 5395758 5395781 5395778 +
caaagccatatggaaggattgtcc

SEQ ID NO: 69738 - DNA, 24 bp, Artificial Sequence
  Synthetic oligonucleotide; GAAAAC chr11 5396290 5396313 5396310 +
gcagatgacgtgattgcatatcta

SEQ ID NO: 69739 - DNA, 24 bp, Artificial Sequence
  Synthetic oligonucleotide; AAAAAC chr11 5396671 5396694 5396691 +
aatgactttcttcacagaattgga

SEQ ID NO: 69740 - DNA, 24 bp, Artificial Sequence
  Synthetic oligonucleotide; CAAAAC chr11 5396800 5396823 5396820 +
actatactacaaggctacagtaac

SEQ ID NO: 69741 - DNA, 24 bp, Artificial Sequence
  Synthetic oligonucleotide; CAAAAC chr11 5396822 5396845 5396842 +
accaaaacagcatagtactggtac

SEQ ID NO: 69742 - DNA, 24 bp, Artificial Sequence
  Synthetic oligonucleotide; CAAAAC chr11 5396848 5396871 5396868 +
aaacagagatatagaccaatggaa

SEQ ID NO: 69743 - DNA, 24 bp, Artificial Sequence
  Synthetic oligonucleotide; AAAAAC chr11 5396912 5396935 5396932 +
tatctgatctttgacaaacctgag

SEQ ID NO: 69744 - DNA, 24 bp, Artificial Sequence
  Synthetic oligonucleotide; GAAAAC chr11 5396960 5396983 5396980 +
tccctgtttaataaatggtgctgg

SEQ ID NO: 69745 - DNA, 24 bp, Artificial Sequence
  Synthetic oligonucleotide; TAAAAC chr11 5397061 5397084 5397081 +
gattaaagacttaaatgttagacc

SEQ ID NO: 69746 - DNA, 24 bp, Artificial Sequence
  Synthetic oligonucleotide; AAAAAC chr11 5397070 5397093 5397090 +
cttaaatgttagacctaaaaccat

SEQ ID NO: 69747 - DNA, 24 bp, Artificial Sequence
  Synthetic oligonucleotide; GAAAAC chr11 5397083 5397106 5397103 +
cctaaaaccataaaaactctagaa

SEQ ID NO: 69748 - DNA, 24 bp, Artificial Sequence
  Synthetic oligonucleotide; TAAAAC chr11 5397136 5397159 5397156 +
aggcatgggcatggacttcatgtc

SEQ ID NO: 69749 - DNA, 24 bp, Artificial Sequence
  Synthetic oligonucleotide; AAAAAC chr11 5397340 5397363 5397360 +
actcaaacaaatttacaagagaaa

SEQ ID NO: 69750 - DNA, 24 bp, Artificial Sequence
  Synthetic oligonucleotide; CAAAAC chr11 5397462 5397485 5397482 +
actggccatcagagaaatgcaaat

SEQ ID NO: 69751 - DNA, 24 bp, Artificial Sequence
  Synthetic oligonucleotide; TAAAAC chr11 5398160 5398183 5398180 +
cctgcaccttgtgcacatgtaccc

SEQ ID NO: 69752 - DNA, 24 bp, Artificial Sequence
  Synthetic oligonucleotide; GAAAAC chr11 5399079 5399102 5399099 +
cacatcctaaattggtggcagatg

SEQ ID NO: 69753 - DNA, 24 bp, Artificial Sequence
  Synthetic oligonucleotide; CAAAAC chr11 5399084 5399107 5399104 +
cctaaattggtggcagatggaaaa

SEQ ID NO: 69754 - DNA, 24 bp, Artificial Sequence
  Synthetic oligonucleotide; AAAAAC chr11 5399090 5399113 5399110 +
ttggtggcagatggaaaacaaaac

SEQ ID NO: 69755 - DNA, 24 bp, Artificial Sequence
  Synthetic oligonucleotide; AAAAAC chr11 5399430 5399453 5399450 +
gtaagtattaacatctttatcttt

SEQ ID NO: 69756 - DNA, 24 bp, Artificial Sequence
  Synthetic oligonucleotide; GAAAAC chr11 5399778 5399801 5399798 +
atgcaagaaagaaaaaaaaaggaa

SEQ ID NO: 69757 - DNA, 24 bp, Artificial Sequence
  Synthetic oligonucleotide; TAAAAC chr11 5399695 5399718 5399698 -
gtcagatctccttgaaagagatct

SEQ ID NO: 69758 - DNA, 24 bp, Artificial Sequence
  Synthetic oligonucleotide; CAAAAC chr11 5399155 5399178 5399158 -
gagtaacccaagataatatgatgg

SEQ ID NO: 69759 - DNA, 24 bp, Artificial Sequence
  Synthetic oligonucleotide; GAAAAC chr11 5398756 5398779 5398759 -
caagagagagtgagcaagaagagg

SEQ ID NO: 69760 - DNA, 24 bp, Artificial Sequence
  Synthetic oligonucleotide; TAAAAC chr11 5398743 5398766 5398746 -
gcaagaagagggaaaactgcctta

SEQ ID NO: 69761 - DNA, 24 bp, Artificial Sequence
  Synthetic oligonucleotide; GAAAAC chr11 5398724 5398747 5398727 -
ccttataaaaccatcagatctcat

SEQ ID NO: 69762 - DNA, 24 bp, Artificial Sequence
  Synthetic oligonucleotide; AAAAAC chr11 5395513 5395536 5395516 -
aagtccagatctgtcttccccatc

SEQ ID NO: 69763 - DNA, 24 bp, Artificial Sequence
  Synthetic oligonucleotide; CAAAAC chr11 5395367 5395390 5395370 -
cactccaatgacttcctttatcca

SEQ ID NO: 69764 - DNA, 24 bp, Artificial Sequence
  Synthetic oligonucleotide; AAAAAC chr11 5394781 5394804 5394784 -
tcttctgcaggaggttgatgtgaa

SEQ ID NO: 69765 - DNA, 24 bp, Artificial Sequence
  Synthetic oligonucleotide; AAAAAC chr11 5394756 5394779 5394759 -
aaaactaacgtcccctgatgaagc

SEQ ID NO: 69766 - DNA, 24 bp, Artificial Sequence
  Synthetic oligonucleotide; GAAAAC chr11 5394661 5394684 5394664 -
ataggtaacattttagatagaggg

SEQ ID NO: 69767 - DNA, 24 bp, Artificial Sequence
  Synthetic oligonucleotide; CAAAAC chr11 5394626 5394649 5394629 -
caaaggctcagagttgtcacaaag

SEQ ID NO: 69768 - DNA, 24 bp, Artificial Sequence
  Synthetic oligonucleotide; TAAAAC chr11 5394361 5394384 5394364 -
gttgttgaatcagtggagcatagt

SEQ ID NO: 69769 - DNA, 24 bp, Artificial Sequence
  Synthetic oligonucleotide; AAAAAC chr11 5394164 5394187 5394167 -
tacctaggttataatatgtgctta

SEQ ID NO: 69770 - DNA, 24 bp, Artificial Sequence
  Synthetic oligonucleotide; GAAAAC chr11 5393929 5393952 5393932 -
tgggacttccttcagtataacatg

SEQ ID NO: 69771 - DNA, 24 bp, Artificial Sequence
  Synthetic oligonucleotide; TAAAAC chr11 5393769 5393792 5393772 -
ctgtgagcctcagtttcctaattt

SEQ ID NO: 69772 - DNA, 24 bp, Artificial Sequence
  Synthetic oligonucleotide; TAAAAC chr11 5393541 5393564 5393544 -
ttgtaaaatgctctttttagatta

SEQ ID NO: 69773 - DNA, 24 bp, Artificial Sequence
  Synthetic oligonucleotide; TAAAAC chr11 5391087 5391110 5391090 -
tgtcattgttcaatatcacacaac

SEQ ID NO: 69774 - DNA, 24 bp, Artificial Sequence
  Synthetic oligonucleotide; CAAAAC chr11 5390228 5390251 5390231 -
gaatagcaggtggggcatgcttcc

SEQ ID NO: 69775 - DNA, 24 bp, Artificial Sequence
  Synthetic oligonucleotide; GAAAAC chr11 5390050 5390073 5390053 -
gagcaccaggtccagcatcacagt

SEQ ID NO: 69776 - DNA, 24 bp, Artificial Sequence
  Synthetic oligonucleotide; AAAAAC chr11 5388507 5388530 5388510 -
ttgtattttcattcttcctggaat

SEQ ID NO: 69777 - DNA, 24 bp, Artificial Sequence
  Synthetic oligonucleotide; AAAAAC chr11 5387740 5387763 5387743 -
ggcaagtgtgtggctatcttaggg

SEQ ID NO: 69778 - DNA, 24 bp, Artificial Sequence
  Synthetic oligonucleotide; TAAAAC chr11 5387385 5387408 5387388 -
ccaaccaccctataatgttttttt

SEQ ID NO: 69779 - DNA, 24 bp, Artificial Sequence
  Synthetic oligonucleotide; GAAAAC chr11 5386426 5386449 5386429 -
cattttattactacttcacaagga

SEQ ID NO: 69780 - DNA, 24 bp, Artificial Sequence
  Synthetic oligonucleotide; AAAAAC chr11 5386166 5386189 5386169 -
ttctatatttattgctttcttggc

SEQ ID NO: 69781 - DNA, 24 bp, Artificial Sequence
  Synthetic oligonucleotide; AAAAAC chr11 5385629 5385652 5385632 -
tttagaacataaatttatattggc

SEQ ID NO: 69782 - DNA, 24 bp, Artificial Sequence
  Synthetic oligonucleotide; AAAAAC chr11 5385493 5385516 5385496 -
actatatatatatttttttgcatg

SEQ ID NO: 69783 - DNA, 24 bp, Artificial Sequence
  Synthetic oligonucleotide; AAAAAC chr11 5384192 5384215 5384195 -
gtaacagagctagacctcatttct

SEQ ID NO: 69784 - DNA, 24 bp, Artificial Sequence
  Synthetic oligonucleotide; GAAAAC chr11 5384161 5384184 5384164 -
acaaacaaagaaacaacaacaaaa

SEQ ID NO: 69785 - DNA, 24 bp, Artificial Sequence
  Synthetic oligonucleotide; CAAAAC chr11 5383152 5383175 5383155 -
gagccctacaacaagtagccttta

SEQ ID NO: 69786 - DNA, 24 bp, Artificial Sequence
  Synthetic oligonucleotide; CAAAAC chr11 5383012 5383035 5383015 -
catgtgtacatttctcttttcttt

SEQ ID NO: 69787 - DNA, 24 bp, Artificial Sequence
  Synthetic oligonucleotide; CAAAAC chr11 5382891 5382914 5382894 -
ttagagttgtgtggggatgagctc

SEQ ID NO: 69788 - DNA, 24 bp, Artificial Sequence
  Synthetic oligonucleotide; TAAAAC chr11 5382871 5382894 5382874 -
gctccaaaacggggcatacagatc

SEQ ID NO: 69789 - DNA, 24 bp, Artificial Sequence
  Synthetic oligonucleotide; GAAAAC chr11 5382455 5382478 5382458 -
gggcatctatcacacataagatag

SEQ ID NO: 69790 - DNA, 24 bp, Artificial Sequence
  Synthetic oligonucleotide; TAAAAC chr11 5382171 5382194 5382174 -
tttaagagagttaataccttggaa

SEQ ID NO: 69791 - DNA, 24 bp, Artificial Sequence
  Synthetic oligonucleotide; GAAAAC chr11 5381793 5381816 5381796 -
agtttccaagcaatagatttattt

SEQ ID NO: 69792 - DNA, 24 bp, Artificial Sequence
  Synthetic oligonucleotide; AAAAAC chr11 5380716 5380739 5380719 -
catatctacatcttacaaacacat

SEQ ID NO: 69793 - DNA, 24 bp, Artificial Sequence
  Synthetic oligonucleotide; GAAAAC chr11 5380129 5380152 5380132 -
ggaaccgattttcattttcattgt

SEQ ID NO: 69794 - DNA, 24 bp, Artificial Sequence
  Synthetic oligonucleotide; TAAAAC chr11 5379644 5379667 5379647 -
ccttgagcaatgtcaattaaaaaa

SEQ ID NO: 69795 - DNA, 24 bp, Artificial Sequence
  Synthetic oligonucleotide; AAAAAC chr11 5376534 5376557 5376537 -
ctatcagttttgttgatcctttca

SEQ ID NO: 69796 - DNA, 24 bp, Artificial Sequence
  Synthetic oligonucleotide; AAAAAC chr11 5373346 5373369 5373349 -
gttcctatttggccatcttggctc

SEQ ID NO: 69797 - DNA, 24 bp, Artificial Sequence
  Synthetic oligonucleotide; GAAAAC chr11 5372728 5372751 5372731 -
actaaatattttctgcacagcaaa

SEQ ID NO: 69798 - DNA, 24 bp, Artificial Sequence
  Synthetic oligonucleotide; CAAAAC chr11 5372491 5372514 5372494 -
accaatcatcaggaaaatgcaaat

SEQ ID NO: 69799 - DNA, 24 bp, Artificial Sequence
  Synthetic oligonucleotide; GAAAAC chr11 5372354 5372377 5372357 -
atgtaagttaacatagccattata

SEQ ID NO: 69800 - DNA, 24 bp, Artificial Sequence
  Synthetic oligonucleotide; TAAAAC chr11 5371549 5371572 5371552 -
ggtccttcatgttatttccactct

SEQ ID NO: 69801 - DNA, 24 bp, Artificial Sequence
  Synthetic oligonucleotide; CAAAAC chr11 5371144 5371167 5371147 -
ctcagaatgtgtggagagtaattc

SEQ ID NO: 69802 - DNA, 24 bp, Artificial Sequence
  Synthetic oligonucleotide; AAAAAC chr11 5371039 5371062 5371042 -
atcactcaaattatctgctcttgg

SEQ ID NO: 69803 - DNA, 24 bp, Artificial Sequence
  Synthetic oligonucleotide; CAAAAC chr11 5369902 5369925 5369905 -
ttccctttctttctatgttgatag

SEQ ID NO: 69804 - DNA, 24 bp, Artificial Sequence
  Synthetic oligonucleotide; AAAAAC chr11 5369015 5369038 5369018 -
aatatctagtcccagaaggaggct

SEQ ID NO: 69805 - DNA, 24 bp, Artificial Sequence
  Synthetic oligonucleotide; TAAAAC chr11 5368692 5368715 5368695 -
acctcaaattttgctcttgacaga

SEQ ID NO: 69806 - DNA, 24 bp, Artificial Sequence
  Synthetic oligonucleotide; TAAAAC chr11 5368640 5368663 5368643 -
tttctcacaggatgcatgtgagaa

SEQ ID NO: 69807 - DNA, 24 bp, Artificial Sequence
  Synthetic oligonucleotide; CAAAAC chr11 5368334 5368357 5368337 -
atccccacttaaagatgagtggac

SEQ ID NO: 69808 - DNA, 24 bp, Artificial Sequence
  Synthetic oligonucleotide; CAAAAC chr11 5368248 5368271 5368251 -
ttgtaaaccaaactgtttaattcc

SEQ ID NO: 69809 - DNA, 24 bp, Artificial Sequence
  Synthetic oligonucleotide; AAAAAC chr11 5368108 5368131 5368111 -
gcaacaaatctgaatggcagagga

SEQ ID NO: 69810 - DNA, 24 bp, Artificial Sequence
  Synthetic oligonucleotide; AAAAAC chr11 5367615 5367638 5367618 -
tacaggtcataaagaccttgctga

SEQ ID NO: 69811 - DNA, 24 bp, Artificial Sequence
  Synthetic oligonucleotide; TAAAAC chr11 5367161 5367184 5367164 -
tattccagttcacaatgaaataac

SEQ ID NO: 69812 - DNA, 24 bp, Artificial Sequence
  Synthetic oligonucleotide; TAAAAC chr11 5366920 5366943 5366923 -
atgacaccaagtccaggcagggac

SEQ ID NO: 69813 - DNA, 24 bp, Artificial Sequence
  Synthetic oligonucleotide; AAAAAC chr11 5365546 5365569 5365549 -
tttgtgtatcaatatgctttgtga

SEQ ID NO: 69814 - DNA, 24 bp, Artificial Sequence
  Synthetic oligonucleotide; TAAAAC chr11 5364883 5364906 5364886 -
aaattatttactaaaatcatttaa

SEQ ID NO: 69815 - DNA, 24 bp, Artificial Sequence
  Synthetic oligonucleotide; AAAAAC chr11 5363574 5363597 5363577 -
tatcttctttctgcattcacactc

SEQ ID NO: 69816 - DNA, 24 bp, Artificial Sequence
  Synthetic oligonucleotide; AAAAAC chr11 5363365 5363388 5363368 -
tcaacaccatagcttgaagtaaaa

SEQ ID NO: 69817 - DNA, 24 bp, Artificial Sequence
  Synthetic oligonucleotide; AAAAAC chr11 5363359 5363382 5363362 -
ccatagcttgaagtaaaaaaaaac

SEQ ID NO: 69818 - DNA, 24 bp, Artificial Sequence
  Synthetic oligonucleotide; AAAAAC chr11 5363349 5363372 5363352 -
aagtaaaaaaaaacaaaaaccaaa

SEQ ID NO: 69819 - DNA, 24 bp, Artificial Sequence
  Synthetic oligonucleotide; AAAAAC chr11 5363312 5363335 5363315 -
ccaatactgctgcatcatgacttg

SEQ ID NO: 69820 - DNA, 24 bp, Artificial Sequence
  Synthetic oligonucleotide; TAAAAC chr11 5363157 5363180 5363160 -
tctccagactaatcattctgttcg

SEQ ID NO: 69821 - DNA, 24 bp, Artificial Sequence
  Synthetic oligonucleotide; GAAAAC chr11 5362911 5362934 5362914 -
gcgggacacttccagcaatagaaa

SEQ ID NO: 69822 - DNA, 24 bp, Artificial Sequence
  Synthetic oligonucleotide; AAAAAC chr11 5358214 5358237 5358217 -
ctatcaattttgttgatctttttg

SEQ ID NO: 69823 - DNA, 24 bp, Artificial Sequence
  Synthetic oligonucleotide; GAAAAC chr11 5355705 5355728 5355708 -
gtttatttgaaatgacacaccact

SEQ ID NO: 69824 - DNA, 24 bp, Artificial Sequence
  Synthetic oligonucleotide; TAAAAC chr11 5353954 5353977 5353957 -
aatttcacacacagccaagttgag

SEQ ID NO: 69825 - DNA, 24 bp, Artificial Sequence
  Synthetic oligonucleotide; TAAAAC chr11 5353650 5353673 5353653 -
aatatctttcttttaaaattaatt

SEQ ID NO: 69826 - DNA, 24 bp, Artificial Sequence
  Synthetic oligonucleotide; GAAAAC chr11 5352692 5352715 5352695 -
aacaatgtgagttaaattacctga

SEQ ID NO: 69827 - DNA, 24 bp, Artificial Sequence
  Synthetic oligonucleotide; TAAAAC chr11 5352111 5352134 5352114 -
aaagtccaacaagaccattgcaaa

SEQ ID NO: 69828 - DNA, 24 bp, Artificial Sequence
  Synthetic oligonucleotide; AAAAAC chr11 5351204 5351227 5351207 -
tgtaaatcatataacccagaaaat

SEQ ID NO: 69829 - DNA, 24 bp, Artificial Sequence
  Synthetic oligonucleotide; AAAAAC chr11 5350998 5351021 5351001 -
aaagcagatataaagattatatgg

SEQ ID NO: 69830 - DNA, 24 bp, Artificial Sequence
  Synthetic oligonucleotide; TAAAAC chr11 5350592 5350615 5350595 -
caagatcaaggagaattttttttt

SEQ ID NO: 69831 - DNA, 24 bp, Artificial Sequence
  Synthetic oligonucleotide; AAAAAC chr11 5349410 5349433 5349413 -
aaacatataattgataaattaaaa

SEQ ID NO: 69832 - DNA, 24 bp, Artificial Sequence
  Synthetic oligonucleotide; GAAAAC chr11 5349237 5349260 5349240 -
gtttgtcttgtctgttttcatatt

SEQ ID NO: 69833 - DNA, 24 bp, Artificial Sequence
  Synthetic oligonucleotide; TAAAAC chr11 5349153 5349176 5349156 -
tgagtttcagaggggataaaaatc

SEQ ID NO: 69834 - DNA, 24 bp, Artificial Sequence
  Synthetic oligonucleotide; TAAAAC chr11 5347555 5347578 5347558 -
cattgcatttcatagtccttactg

SEQ ID NO: 69835 - DNA, 24 bp, Artificial Sequence
  Synthetic oligonucleotide; GAAAAC chr11 5347460 5347483 5347463 -
gcctgctgcatcccctggaaaaga

SEQ ID NO: 69836 - DNA, 24 bp, Artificial Sequence
  Synthetic oligonucleotide; CAAAAC chr11 5346313 5346336 5346316 -
tagctgaggacacaagaattttca

SEQ ID NO: 69837 - DNA, 24 bp, Artificial Sequence
  Synthetic oligonucleotide; AAAAAC chr11 5345667 5345690 5345670 -
acgaccatctttttaacttaggat

SEQ ID NO: 69838 - DNA, 24 bp, Artificial Sequence
  Synthetic oligonucleotide; GAAAAC chr11 5345146 5345169 5345149 -
tctttactacatttatagtaagaa

SEQ ID NO: 69839 - DNA, 24 bp, Artificial Sequence
  Synthetic oligonucleotide; CAAAAC chr11 5345141 5345164 5345144 -
actacatttatagtaagaagaaaa

SEQ ID NO: 69840 - DNA, 24 bp, Artificial Sequence
  Synthetic oligonucleotide; CAAAAC chr11 5345136 5345159 5345139 -
atttatagtaagaagaaaacaaaa

SEQ ID NO: 69841 - DNA, 24 bp, Artificial Sequence
  Synthetic oligonucleotide; TAAAAC chr11 5344575 5344598 5344578 -
ctagtctagtggcagaaggaatat

SEQ ID NO: 69842 - DNA, 24 bp, Artificial Sequence
  Synthetic oligonucleotide; AAAAAC chr11 5342553 5342576 5342556 -
atcacagtcactctcacagaatgt

SEQ ID NO: 69843 - DNA, 24 bp, Artificial Sequence
  Synthetic oligonucleotide; AAAAAC chr11 5341989 5342012 5341992 -
atcaaattataatgaatttgtctc

SEQ ID NO: 69844 - DNA, 24 bp, Artificial Sequence
  Synthetic oligonucleotide; AAAAAC chr11 5341111 5341134 5341114 -
tgctcatagagagtccaacttaag

SEQ ID NO: 69845 - DNA, 24 bp, Artificial Sequence
  Synthetic oligonucleotide; TAAAAC chr11 5340912 5340935 5340915 -
ttttgtcctgttttcaatcattca

SEQ ID NO: 69846 - DNA, 24 bp, Artificial Sequence
  Synthetic oligonucleotide; GAAAAC chr11 5340573 5340596 5340576 -
tactccaaaaatattgttccctat

SEQ ID NO: 69847 - DNA, 24 bp, Artificial Sequence
  Synthetic oligonucleotide; TAAAAC chr11 5340124 5340147 5340127 -
tgtgaatcttctctaactaatatt

SEQ ID NO: 69848 - DNA, 24 bp, Artificial Sequence
  Synthetic oligonucleotide; CAAAAC chr11 5339825 5339848 5339828 -
tccactcagacatgtttttctatt

SEQ ID NO: 69849 - DNA, 24 bp, Artificial Sequence
  Synthetic oligonucleotide; GAAAAC chr11 5339684 5339707 5339687 -
ccttagcaaattaatacaggaaca

SEQ ID NO: 69850 - DNA, 24 bp, Artificial Sequence
  Synthetic oligonucleotide; AAAAAC chr11 5338294 5338317 5338297 -
aatctgatcttcaacaaacctggt

SEQ ID NO: 69851 - DNA, 24 bp, Artificial Sequence
  Synthetic oligonucleotide; TAAAAC chr11 5338152 5338175 5338155 -
caagatgcattaaagacttaagtg

SEQ ID NO: 69852 - DNA, 24 bp, Artificial Sequence
  Synthetic oligonucleotide; CAAAAC chr11 5338145 5338168 5338148 -
cattaaagacttaagtgtaaaacc

SEQ ID NO: 69853 - DNA, 24 bp, Artificial Sequence
  Synthetic oligonucleotide; AAAAAC chr11 5338136 5338159 5338139 -
cttaagtgtaaaacccaaaactat

SEQ ID NO: 69854 - DNA, 24 bp, Artificial Sequence
  Synthetic oligonucleotide; GAAAAC chr11 5338123 5338146 5338126 -
cccaaaactataaaaactttagaa

SEQ ID NO: 69855 - DNA, 24 bp, Artificial Sequence
  Synthetic oligonucleotide; AAAAAC chr11 5338061 5338084 5338064 -
caaagatttcatgatgaaaatgtc

SEQ ID NO: 69856 - DNA, 24 bp, Artificial Sequence
  Synthetic oligonucleotide; CAAAAC chr11 5337425 5337448 5337428 -
actgatcattagagaaatgcaaat

SEQ ID NO: 69857 - DNA, 24 bp, Artificial Sequence
  Synthetic oligonucleotide; GAAAAC chr11 5336961 5336984 5336964 -
cttcagtaaactaatgcaggaaca

SEQ ID NO: 69858 - DNA, 24 bp, Artificial Sequence
  Synthetic oligonucleotide; AAAAAC chr11 5336623 5336646 5336626 -
actgcattaaaaaaaaataatggc

SEQ ID NO: 69859 - DNA, 24 bp, Artificial Sequence
  Synthetic oligonucleotide; GAAAAC chr11 5336522 5336545 5336525 -
atatgcagagtgagtcatcaagtt

SEQ ID NO: 69860 - DNA, 24 bp, Artificial Sequence
  Synthetic oligonucleotide; AAAAAC chr11 5336201 5336224 5336204 -
ccgatttaaatgttaatcttgcct

SEQ ID NO: 69861 - DNA, 24 bp, Artificial Sequence
  Synthetic oligonucleotide; AAAAAC chr11 5336187 5336210 5336190 -
aatcttgcctaaaaacaccctcac

SEQ ID NO: 69862 - DNA, 24 bp, Artificial Sequence
  Synthetic oligonucleotide; GAAAAC chr11 5334630 5334653 5334633 -
ttgggcaagacttaccaagagaca

SEQ ID NO: 69863 - DNA, 24 bp, Artificial Sequence
  Synthetic oligonucleotide; AAAAAC chr11 5333908 5333931 5333911 -
cctagcaaatgttaactctgaaat

SEQ ID NO: 69864 - DNA, 24 bp, Artificial Sequence
  Synthetic oligonucleotide; GAAAAC chr11 5333139 5333162 5333142 -
atggatataggaagaacgacacag

SEQ ID NO: 69865 - DNA, 24 bp, Artificial Sequence
  Synthetic oligonucleotide; GAAAAC chr11 5332072 5332095 5332075 -
cttcctattctcctactacttggt

SEQ ID NO: 69866 - DNA, 24 bp, Artificial Sequence
  Synthetic oligonucleotide; CAAAAC chr11 5331684 5331707 5331687 -
cgtatagtctagagctgtgctgtc

SEQ ID NO: 69867 - DNA, 24 bp, Artificial Sequence
  Synthetic oligonucleotide; TAAAAC chr11 5330526 5330549 5330529 -
ataaaaattatttcacacatactt

SEQ ID NO: 69868 - DNA, 24 bp, Artificial Sequence
  Synthetic oligonucleotide; CAAAAC chr11 5330500 5330523 5330503 -
aaactaacacgtcacaatgcaaat

SEQ ID NO: 69869 - DNA, 24 bp, Artificial Sequence
  Synthetic oligonucleotide; AAAAAC chr11 5330032 5330055 5330035 -
tctcagcaaactatcgcaaggaca

SEQ ID NO: 69870 - DNA, 24 bp, Artificial Sequence
  Synthetic oligonucleotide; TAAAAC chr11 5329802 5329825 5329805 -
cctgcacattgtgcacatgtaccc

SEQ ID NO: 69871 - DNA, 24 bp, Artificial Sequence
  Synthetic oligonucleotide; AAAAAC chr11 5329748 5329771 5329751 -
aaaaatacattattttggattaac

SEQ ID NO: 69872 - DNA, 24 bp, Artificial Sequence
  Synthetic oligonucleotide; AAAAAC chr11 5328900 5328923 5328903 -
ttttaccaaagtaacaggaaagac

SEQ ID NO: 69873 - DNA, 24 bp, Artificial Sequence
  Synthetic oligonucleotide; CAAAAC chr11 5328129 5328152 5328132 -
ttttcagagaatatttcttcattc

SEQ ID NO: 69874 - DNA, 24 bp, Artificial Sequence
  Synthetic oligonucleotide; AAAAAC chr11 5326432 5326455 5326435 -
catagctgctccacctttatccag

SEQ ID NO: 69875 - DNA, 24 bp, Artificial Sequence
  Synthetic oligonucleotide; AAAAAC chr11 5326039 5326062 5326042 -
ttttttctgctcataaatataata

SEQ ID NO: 69876 - DNA, 24 bp, Artificial Sequence
  Synthetic oligonucleotide; TAAAAC chr11 5325841 5325864 5325844 -
aaattttttatttttaaaattttt

SEQ ID NO: 69877 - DNA, 24 bp, Artificial Sequence
  Synthetic oligonucleotide; GAAAAC chr11 5325439 5325462 5325442 -
ttgatactgaggccattttatgaa

SEQ ID NO: 69878 - DNA, 24 bp, Artificial Sequence
  Synthetic oligonucleotide; GAAAAC chr11 5325316 5325339 5325319 -
cccctcttggatcgtggcaaccaa

SEQ ID NO: 69879 - DNA, 24 bp, Artificial Sequence
  Synthetic oligonucleotide; GAAAAC chr11 5325185 5325208 5325188 -
aagcagagagaggtaagaaggaca

SEQ ID NO: 69880 - DNA, 24 bp, Artificial Sequence
  Synthetic oligonucleotide; TAAAAC chr11 5324761 5324784 5324764 -
gatggtgatgcacgctatagtgca

SEQ ID NO: 69881 - DNA, 24 bp, Artificial Sequence
  Synthetic oligonucleotide; AAAAAC chr11 5324726 5324749 5324729 -
cattcaatttccaaaaaaaatgag

SEQ ID NO: 69882 - DNA, 24 bp, Artificial Sequence
  Synthetic oligonucleotide; AAAAAC chr11 5324708 5324731 5324711 -
aatgagaaaaactgcattaactga

SEQ ID NO: 69883 - DNA, 24 bp, Artificial Sequence
  Synthetic oligonucleotide; AAAAAC chr11 5324447 5324470 5324450 -
ctcagtattttttctaattaggga

SEQ ID NO: 69884 - DNA, 24 bp, Artificial Sequence
  Synthetic oligonucleotide; CAAAAC chr11 5323423 5323446 5323426 -
aatgaaccctgtcatctacagcat

SEQ ID NO: 69885 - DNA, 24 bp, Artificial Sequence
  Synthetic oligonucleotide; AAAAAC chr11 5323062 5323085 5323065 -
aaggcagaacatataatctctatg

SEQ ID NO: 69886 - DNA, 24 bp, Artificial Sequence
  Synthetic oligonucleotide; AAAAAC chr11 5322642 5322665 5322645 -
tttgcccaaaaaaatcttagaagg

SEQ ID NO: 69887 - DNA, 24 bp, Artificial Sequence
  Synthetic oligonucleotide; GAAAAC chr11 5322199 5322222 5322202 -
tttcatccacaaatttcaaaaggg

SEQ ID NO: 69888 - DNA, 24 bp, Artificial Sequence
  Synthetic oligonucleotide; AAAAAC chr11 5321270 5321293 5321273 -
aggacagcttcctttaaattctct

SEQ ID NO: 69889 - DNA, 24 bp, Artificial Sequence
  Synthetic oligonucleotide; TAAAAC chr11 5321047 5321070 5321050 -
catcttttctacaaagtcagcatg

SEQ ID NO: 69890 - DNA, 24 bp, Artificial Sequence
  Synthetic oligonucleotide; CAAAAC chr11 5320934 5320957 5320937 -
tcaatggaactactctccattcag

SEQ ID NO: 69891 - DNA, 24 bp, Artificial Sequence
  Synthetic oligonucleotide; CAAAAC chr11 5320798 5320821 5320801 -
ctaatgctactgataacaactagt

SEQ ID NO: 69892 - DNA, 24 bp, Artificial Sequence
  Synthetic oligonucleotide; CAAAAC chr11 5319572 5319595 5319575 -
gaaagatctctacaaggagaacta

SEQ ID NO: 69893 - DNA, 24 bp, Artificial Sequence
  Synthetic oligonucleotide; AAAAAC chr11 5319402 5319425 5319405 -
caatgtcattcttcacagtattag

SEQ ID NO: 69894 - DNA, 24 bp, Artificial Sequence
  Synthetic oligonucleotide; GAAAAC chr11 5318885 5318908 5318888 -
cacattgactaaggaaacacaata

SEQ ID NO: 69895 - DNA, 24 bp, Artificial Sequence
  Synthetic oligonucleotide; AAAAAC chr11 5318828 5318851 5318831 -
catctgatcttcaacaacactgac

SEQ ID NO: 69896 - DNA, 24 bp, Artificial Sequence
  Synthetic oligonucleotide; CAAAAC chr11 5318699 5318722 5318702 -
agagaaatcaactgaaaatgaatt

SEQ ID NO: 69897 - DNA, 24 bp, Artificial Sequence
  Synthetic oligonucleotide; AAAAAC chr11 5318388 5318411 5318391 -
tctcagcaaactatcacaaggaca

SEQ ID NO: 69898 - DNA, 24 bp, Artificial Sequence
  Synthetic oligonucleotide; CAAAAC chr11 5317859 5317882 5317862 -
atcactaatgagagaaatgcaaat

SEQ ID NO: 69899 - DNA, 24 bp, Artificial Sequence
  Synthetic oligonucleotide; AAAAAC chr11 5317802 5317825 5317805 -
agaatagctatttttaaaaagcca

SEQ ID NO: 69900 - DNA, 24 bp, Artificial Sequence
  Synthetic oligonucleotide; GAAAAC chr11 5317719 5317742 5317722 -
atgtaaattagttcaaccactgca

SEQ ID NO: 69901 - DNA, 24 bp, Artificial Sequence
  Synthetic oligonucleotide; GAAAAC chr11 5317634 5317657 5317637 -
ccgctactgggtatatatccatag

SEQ ID NO: 69902 - DNA, 24 bp, Artificial Sequence
  Synthetic oligonucleotide; AAAAAC chr11 5317220 5317243 5317223 -
cactgcatgcaatatatccatgta

SEQ ID NO: 69903 - DNA, 24 bp, Artificial Sequence
  Synthetic oligonucleotide; AAAAAC chr11 5317165 5317188 5317168 -
agtaaatgttgaaaatttaaaaga

SEQ ID NO: 69904 - DNA, 24 bp, Artificial Sequence
  Synthetic oligonucleotide; AAAAAC chr11 5317151 5317174 5317154 -
atttaaaagaaaaaacaaataaat

SEQ ID NO: 69905 - DNA, 24 bp, Artificial Sequence
  Synthetic oligonucleotide; GAAAAC chr11 5316307 5316330 5316310 -
gtggtgctcatggattagcttcag

SEQ ID NO: 69906 - DNA, 24 bp, Artificial Sequence
  Synthetic oligonucleotide; TAAAAC chr11 5316214 5316237 5316217 -
ctcatggcttttgttagaattcca

SEQ ID NO: 69907 - DNA, 24 bp, Artificial Sequence
  Synthetic oligonucleotide; CAAAAC chr11 5316193 5316216 5316196 -
ccataaaacattaacattctattt

SEQ ID NO: 69908 - DNA, 24 bp, Artificial Sequence
  Synthetic oligonucleotide; CAAAAC chr11 5316165 5316188 5316168 -
actaaacaaagaaaagttttctaa

SEQ ID NO: 69909 - DNA, 24 bp, Artificial Sequence
  Synthetic oligonucleotide; AAAAAC chr11 5315756 5315779 5315759 -
aatacagtttcacaagaaggtagt

SEQ ID NO: 69910 - DNA, 24 bp, Artificial Sequence
  Synthetic oligonucleotide; TAAAAC chr11 5315049 5315072 5315052 -
tgtcttttcttatatcctgatcct

SEQ ID NO: 69911 - DNA, 24 bp, Artificial Sequence
  Synthetic oligonucleotide; TAAAAC chr11 5314465 5314488 5314468 -
gtggaatactattgaatatggaga

SEQ ID NO: 69912 - DNA, 24 bp, Artificial Sequence
  Synthetic oligonucleotide; CAAAAC chr11 5314246 5314269 5314249 -
ggtcatggaactctactataatct

SEQ ID NO: 69913 - DNA, 24 bp, Artificial Sequence
  Synthetic oligonucleotide; TAAAAC chr11 5312312 5312335 5312315 -
caaagaataaaagaaatccaaatt

SEQ ID NO: 69914 - DNA, 24 bp, Artificial Sequence
  Synthetic oligonucleotide; AAAAAC chr11 5311520 5311543 5311523 -
ttcaaactgtagaactagactttt

SEQ ID NO: 69915 - DNA, 24 bp, Artificial Sequence
  Synthetic oligonucleotide; AAAAAC chr11 5310581 5310604 5310584 -
ctaaaattttgtattacaccaaat

SEQ ID NO: 69916 - DNA, 24 bp, Artificial Sequence
  Synthetic oligonucleotide; TAAAAC chr11 5309443 5309466 5309446 -
caagttttctgtatgtccttgtat

SEQ ID NO: 69917 - DNA, 24 bp, Artificial Sequence
  Synthetic oligonucleotide; TAAAAC chr11 5309416 5309439 5309419 -
aactttttcatactgaatcaattg

SEQ ID NO: 69918 - DNA, 24 bp, Artificial Sequence
  Synthetic oligonucleotide; TAAAAC chr11 5308985 5309008 5308988 -
taagttggctaaggcccttcaaat

SEQ ID NO: 69919 - DNA, 24 bp, Artificial Sequence
  Synthetic oligonucleotide; GAAAAC chr11 5308393 5308416 5308396 -
taacttctttcaacgtaatctcca

SEQ ID NO: 69920 - DNA, 24 bp, Artificial Sequence
  Synthetic oligonucleotide; AAAAAC chr11 5308075 5308098 5308078 -
gacttggtgtatttagacatcaac

SEQ ID NO: 69921 - DNA, 24 bp, Artificial Sequence
  Synthetic oligonucleotide; TAAAAC chr11 5308015 5308038 5308018 -
gagaatataagttccataagtggt

SEQ ID NO: 69922 - DNA, 24 bp, Artificial Sequence
  Synthetic oligonucleotide; AAAAAC chr11 5307965 5307988 5307968 -
tgcagccaaagtactaagaaggaa

SEQ ID NO: 69923 - DNA, 24 bp, Artificial Sequence
  Synthetic oligonucleotide; CAAAAC chr11 5307444 5307467 5307447 -
ttgtaaaggtctacaatttggcta

SEQ ID NO: 69924 - DNA, 24 bp, Artificial Sequence
  Synthetic oligonucleotide; GAAAAC chr11 5305962 5305985 5305965 -
ggtcatgctcagaaaccgcaaaga

SEQ ID NO: 69925 - DNA, 24 bp, Artificial Sequence
  Synthetic oligonucleotide; TAAAAC chr11 5303989 5304012 5303992 -
ccagtaattaccacacagttttaa

SEQ ID NO: 69926 - DNA, 24 bp, Artificial Sequence
  Synthetic oligonucleotide; GAAAAC chr11 5303945 5303968 5303948 -
tgtcccaaacgcagctcaggtttt

SEQ ID NO: 69927 - DNA, 24 bp, Artificial Sequence
  Synthetic oligonucleotide; CAAAAC chr11 5302844 5302867 5302847 -
ttttcatgtttgtccctaatgtgc

SEQ ID NO: 69928 - DNA, 24 bp, Artificial Sequence
  Synthetic oligonucleotide; GAAAAC chr11 5302010 5302033 5302013 -
acaagaagattgtgagagaaaaaa

SEQ ID NO: 69929 - DNA, 24 bp, Artificial Sequence
  Synthetic oligonucleotide; CAAAAC chr11 5301958 5301981 5301961 -
cctaaaaaatatcttctccacctg

SEQ ID NO: 69930 - DNA, 24 bp, Artificial Sequence
  Synthetic oligonucleotide; TAAAAC chr11 5301403 5301426 5301406 -
cattttgcctccatcaagatgtca

SEQ ID NO: 69931 - DNA, 24 bp, Artificial Sequence
  Synthetic oligonucleotide; AAAAAC chr11 5300148 5300171 5300151 -
tgaaatagttttgataattaatgc

SEQ ID NO: 69932 - DNA, 24 bp, Artificial Sequence
  Synthetic oligonucleotide; GAAAAC chr11 5299690 5299713 5299693 -
agatttgataagaaaatacttact

SEQ ID NO: 69933 - DNA, 24 bp, Artificial Sequence
  Synthetic oligonucleotide; AAAAAC chr11 5299624 5299647 5299627 -
ggcccatttggatgcaggaaaaat

SEQ ID NO: 69934 - DNA, 24 bp, Artificial Sequence
  Synthetic oligonucleotide; AAAAAC chr11 5299330 5299353 5299333 -
actgaaaggatgtctgtaagagta

SEQ ID NO: 69935 - DNA, 24 bp, Artificial Sequence
  Synthetic oligonucleotide; TAAAAC chr11 5297750 5297773 5297753 -
tattgaccaataaggaacagaaaa

SEQ ID NO: 69936 - DNA, 24 bp, Artificial Sequence
  Synthetic oligonucleotide; CAAAAC chr11 5297412 5297435 5297415 -
cttaggtaggttaagtaatttatc

SEQ ID NO: 69937 - DNA, 24 bp, Artificial Sequence
  Synthetic oligonucleotide; TAAAAC chr11 5296572 5296595 5296575 -
tcatgttacaataacggaagagat

SEQ ID NO: 69938 - DNA, 24 bp, Artificial Sequence
  Synthetic oligonucleotide; TAAAAC chr11 5296369 5296392 5296372 -
tccttgatagaaaatgagaagaga

SEQ ID NO: 69939 - DNA, 24 bp, Artificial Sequence
  Synthetic oligonucleotide; GAAAAC chr11 5296075 5296098 5296078 -
ttttaaatagttaggaataatgta

SEQ ID NO: 69940 - DNA, 24 bp, Artificial Sequence
  Synthetic oligonucleotide; TAAAAC chr11 5295055 5295078 5295058 -
cttatttttactgcttaaacataa

SEQ ID NO: 69941 - DNA, 24 bp, Artificial Sequence
  Synthetic oligonucleotide; CAAAAC chr11 5293763 5293786 5293766 -
taaatgcaccaatcagtgccctgt

SEQ ID NO: 69942 - DNA, 24 bp, Artificial Sequence
  Synthetic oligonucleotide; AAAAAC chr11 5292376 5292399 5292379 -
gtcatcctcacggtgactaacgca

SEQ ID NO: 69943 - DNA, 24 bp, Artificial Sequence
  Synthetic oligonucleotide; AAAAAC chr11 5291558 5291581 5291561 -
atgttattgatagtcacaatgaca

SEQ ID NO: 69944 - DNA, 24 bp, Artificial Sequence
  Synthetic oligonucleotide; GAAAAC chr11 5290748 5290771 5290751 -
tacaagctatacttaactcacttg

SEQ ID NO: 69945 - DNA, 24 bp, Artificial Sequence
  Synthetic oligonucleotide; AAAAAC chr11 5289970 5289993 5289973 -
tgtcaaaggaagtcaaaagatgtg

SEQ ID NO: 69946 - DNA, 24 bp, Artificial Sequence
  Synthetic oligonucleotide; TAAAAC chr11 5289440 5289463 5289443 -
gcctgatttaagcctttttggtca

SEQ ID NO: 69947 - DNA, 24 bp, Artificial Sequence
  Synthetic oligonucleotide; AAAAAC chr11 5289017 5289040 5289020 -
accttgcctcacgaaacagaatac

SEQ ID NO: 69948 - DNA, 24 bp, Artificial Sequence
  Synthetic oligonucleotide; AAAAAC chr11 5289002 5289025 5289005 -
acagaatacaaaaacaaacaaaca

SEQ ID NO: 69949 - DNA, 24 bp, Artificial Sequence
  Synthetic oligonucleotide; GAAAAC chr11 5288695 5288718 5288698 -
aaattgtctattgtcaatttatgg

SEQ ID NO: 69950 - DNA, 24 bp, Artificial Sequence
  Synthetic oligonucleotide; GAAAAC chr11 5287022 5287045 5287025 -
actgcaatcattcttgctgcaggt

SEQ ID NO: 69951 - DNA, 24 bp, Artificial Sequence
  Synthetic oligonucleotide; AAAAAC chr11 5286845 5286868 5286848 -
ttatccccattttactacagttaa

SEQ ID NO: 69952 - DNA, 24 bp, Artificial Sequence
  Synthetic oligonucleotide; GAAAAC chr11 5286399 5286422 5286402 -
ttagatggttaactttgtgaagtt

SEQ ID NO: 69953 - DNA, 24 bp, Artificial Sequence
  Synthetic oligonucleotide; AAAAAC chr11 5285195 5285218 5285198 -
tccatcctcacgctaactccataa

SEQ ID NO: 69954 - DNA, 24 bp, Artificial Sequence
  Synthetic oligonucleotide; CAAAAC chr11 5283191 5283214 5283194 -
ctgaagacagtgttttttccacag

SEQ ID NO: 69955 - DNA, 24 bp, Artificial Sequence
  Synthetic oligonucleotide; GAAAAC chr11 5282920 5282943 5282923 -
gacaaattataagcagacacttga

SEQ ID NO: 69956 - DNA, 24 bp, Artificial Sequence
  Synthetic oligonucleotide; GAAAAC chr11 5282058 5282081 5282061 -
tatatttatcataatactgtaaca

SEQ ID NO: 69957 - DNA, 24 bp, Artificial Sequence
  Synthetic oligonucleotide; CAAAAC chr11 5281029 5281052 5281032 -
gtgtttagcatccagcaggtgctt

SEQ ID NO: 69958 - DNA, 24 bp, Artificial Sequence
  Synthetic oligonucleotide; TAAAAC chr11 5280633 5280656 5280636 -
aaaaggagaagctgaccacctgac

SEQ ID NO: 69959 - DNA, 24 bp, Artificial Sequence
  Synthetic oligonucleotide; GAAAAC chr11 5280325 5280348 5280328 -
caaggatatggaagaggaaggcat

SEQ ID NO: 69960 - DNA, 24 bp, Artificial Sequence
  Synthetic oligonucleotide; GAAAAC chr11 5280312 5280335 5280315 -
gaggaaggcatgaaaacaggaaaa

SEQ ID NO: 69961 - DNA, 24 bp, Artificial Sequence
  Synthetic oligonucleotide; AAAAAC chr11 5280043 5280066 5280046 -
actgtgaaggactacaagaggatg

SEQ ID NO: 69962 - DNA, 24 bp, Artificial Sequence
  Synthetic oligonucleotide; AAAAAC chr11 5280006 5280029 5280009 -
gacagacataatgcttgtgggaga

SEQ ID NO: 69963 - DNA, 24 bp, Artificial Sequence
  Synthetic oligonucleotide; AAAAAC chr11 5279595 5279618 5279598 -
agagaagatttagtgatgctatgt

SEQ ID NO: 69964 - DNA, 24 bp, Artificial Sequence
  Synthetic oligonucleotide; AAAAAC chr11 5279385 5279408 5279388 -
tttaaatcacaaattaattagaaa

SEQ ID NO: 69965 - DNA, 24 bp, Artificial Sequence
  Synthetic oligonucleotide; AAAAAC chr11 5278974 5278997 5278977 -
cttattcaattctacacatggagg

SEQ ID NO: 69966 - DNA, 24 bp, Artificial Sequence
  Synthetic oligonucleotide; AAAAAC chr11 5278548 5278571 5278551 -
tccagagcgagactctgtctaaag

SEQ ID NO: 69967 - DNA, 24 bp, Artificial Sequence
  Synthetic oligonucleotide; GAAAAC chr11 5278542 5278565 5278545 -
gcgagactctgtctaaagaaaaac

SEQ ID NO: 69968 - DNA, 24 bp, Artificial Sequence
  Synthetic oligonucleotide; CAAAAC chr11 5278517 5278540 5278520 -
aaaacaaacaaacaaacaaacaaa

SEQ ID NO: 69969 - DNA, 24 bp, Artificial Sequence
  Synthetic oligonucleotide; TAAAAC chr11 5277836 5277859 5277839 -
gatagtttcctatatcatttataa

SEQ ID NO: 69970 - DNA, 24 bp, Artificial Sequence
  Synthetic oligonucleotide; GAAAAC chr11 5277276 5277299 5277279 -
agctctttccactatcaagtccat

SEQ ID NO: 69971 - DNA, 24 bp, Artificial Sequence
  Synthetic oligonucleotide; GAAAAC chr11 5276996 5277019 5276999 -
ttttgtaggctgagatttgctctt

SEQ ID NO: 69972 - DNA, 24 bp, Artificial Sequence
  Synthetic oligonucleotide; AAAAAC chr11 5276858 5276881 5276861 -
ttcatcagtcaggtaaaagtaaag

SEQ ID NO: 69973 - DNA, 24 bp, Artificial Sequence
  Synthetic oligonucleotide; CAAAAC chr11 5276720 5276743 5276723 -
tggacatcagtgttatgtgaggtt

SEQ ID NO: 69974 - DNA, 24 bp, Artificial Sequence
  Synthetic oligonucleotide; TAAAAC chr11 5276184 5276207 5276187 -
cacacacacacatatatatatata

SEQ ID NO: 69975 - DNA, 24 bp, Artificial Sequence
  Synthetic oligonucleotide; GAAAAC chr11 5275869 5275892 5275872 -
gggtttgcccatctctgttgatta

SEQ ID NO: 69976 - DNA, 24 bp, Artificial Sequence
  Synthetic oligonucleotide; CAAAAC chr11 5275864 5275887 5275867 -
tgcccatctctgttgattagaaaa

SEQ ID NO: 69977 - DNA, 24 bp, Artificial Sequence
  Synthetic oligonucleotide; GAAAAC chr11 5275831 5275854 5275834 -
ataaaataagcccctaagctccca

SEQ ID NO: 69978 - DNA, 24 bp, Artificial Sequence
  Synthetic oligonucleotide; CAAAAC chr11 5275552 5275575 5275555 -
tcagcatcctcacccttagtgaca

SEQ ID NO: 69979 - DNA, 24 bp, Artificial Sequence
  Synthetic oligonucleotide; AAAAAC chr11 5275051 5275074 5275054 -
cattaggcaatgcaatttaattaa

SEQ ID NO: 69980 - DNA, 24 bp, Artificial Sequence
  Synthetic oligonucleotide; GAAAAC chr11 5274375 5274398 5274378 -
acccctgaacttaaaataaaagtt

SEQ ID NO: 69981 - DNA, 24 bp, Artificial Sequence
  Synthetic oligonucleotide; AAAAAC chr11 5273983 5274006 5273986 -
atttatttcttagataataccatg

SEQ ID NO: 69982 - DNA, 24 bp, Artificial Sequence
  Synthetic oligonucleotide; GAAAAC chr11 5272942 5272965 5272945 -
gtggatctgtagcaaattccccct

SEQ ID NO: 69983 - DNA, 24 bp, Artificial Sequence
  Synthetic oligonucleotide; AAAAAC chr11 5272019 5272042 5272022 -
cctatgtatattatttgatgcaat

SEQ ID NO: 69984 - DNA, 24 bp, Artificial Sequence
  Synthetic oligonucleotide; AAAAAC chr11 5269541 5269564 5269544 -
ctgacttcctttggagatgctatt

SEQ ID NO: 69985 - DNA, 24 bp, Artificial Sequence
  Synthetic oligonucleotide; CAAAAC chr11 5269307 5269330 5269310 -
cagcagacttctagtgagcataac

SEQ ID NO: 69986 - DNA, 24 bp, Artificial Sequence
  Synthetic oligonucleotide; AAAAAC chr11 5268879 5268902 5268882 -
caaaaattagacaattgcttaaag

SEQ ID NO: 69987 - DNA, 24 bp, Artificial Sequence
  Synthetic oligonucleotide; AAAAAC chr11 5268026 5268049 5268029 -
ttgtggtacatgtcacttttcatt

SEQ ID NO: 69988 - DNA, 24 bp, Artificial Sequence
  Synthetic oligonucleotide; AAAAAC chr11 5268020 5268043 5268023 -
tacatgtcacttttcattaaaaac

SEQ ID NO: 69989 - DNA, 24 bp, Artificial Sequence
  Synthetic oligonucleotide; CAAAAC chr11 5268015 5268038 5268018 -
gtcacttttcattaaaaacaaaaa

SEQ ID NO: 69990 - DNA, 24 bp, Artificial Sequence
  Synthetic oligonucleotide; CAAAAC chr11 5268010 5268033 5268013 -
ttttcattaaaaacaaaaacaaaa

SEQ ID NO: 69991 - DNA, 24 bp, Artificial Sequence
  Synthetic oligonucleotide; CAAAAC chr11 5268005 5268028 5268008 -
attaaaaacaaaaacaaaacaaaa

SEQ ID NO: 69992 - DNA, 24 bp, Artificial Sequence
  Synthetic oligonucleotide; TAAAAC chr11 5267671 5267694 5267674 -
gaatactaataaaggcttaaattc

SEQ ID NO: 69993 - DNA, 24 bp, Artificial Sequence
  Synthetic oligonucleotide; AAAAAC chr11 5266432 5266455 5266435 -
cttttttagctcccacagatgaat

SEQ ID NO: 69994 - DNA, 24 bp, Artificial Sequence
  Synthetic oligonucleotide; AAAAAC chr11 5260316 5260339 5260319 -
attctctcagcatttgtttttctg

SEQ ID NO: 69995 - DNA, 24 bp, Artificial Sequence
  Synthetic oligonucleotide; AAAAAC chr11 5259803 5259826 5259806 -
gtctttgttggattgggttaattc

SEQ ID NO: 69996 - DNA, 24 bp, Artificial Sequence
  Synthetic oligonucleotide; CAAAAC chr11 5257954 5257977 5257957 -
tctctctctctttttcttctcccc

SEQ ID NO: 69997 - DNA, 24 bp, Artificial Sequence
  Synthetic oligonucleotide; CAAAAC chr11 5257712 5257735 5257715 -
cacaggcaataagggctttttaag

SEQ ID NO: 69998 - DNA, 24 bp, Artificial Sequence
  Synthetic oligonucleotide; GAAAAC chr11 5257143 5257166 5257146 -
gaaaatacatgggaaagaatgctt

SEQ ID NO: 69999 - DNA, 24 bp, Artificial Sequence
  Synthetic oligonucleotide; GAAAAC chr11 5256918 5256941 5256921 -
tttggataaatggggaagttgttt

SEQ ID NO: 70000 - DNA, 24 bp, Artificial Sequence
  Synthetic oligonucleotide; AAAAAC chr11 5255970 5255993 5255973 -
aaggtcatggatcgagttcagaga

SEQ ID NO: 70001 - DNA, 24 bp, Artificial Sequence
  Synthetic oligonucleotide; CAAAAC chr11 5255959 5255982 5255962 -
tcgagttcagagaaaaaacaaaag

SEQ ID NO: 70002 - DNA, 24 bp, Artificial Sequence
  Synthetic oligonucleotide; AAAAAC chr11 5255910 5255933 5255913 -
aaatcccaaagaaaaaataaagaa

SEQ ID NO: 70003 - DNA, 24 bp, Artificial Sequence
  Synthetic oligonucleotide; TAAAAC chr11 5255783 5255806 5255786 -
cacagtgtgtggactattagtcaa

SEQ ID NO: 70004 - DNA, 24 bp, Artificial Sequence
  Synthetic oligonucleotide; CAAAAC chr11 5255608 5255631 5255611 -
ttaccgagcatagaagagctacac

SEQ ID NO: 70005 - DNA, 24 bp, Artificial Sequence
  Synthetic oligonucleotide; TAAAAC chr11 5255341 5255364 5255344 -
atgagaacttaagagataatggcc

SEQ ID NO: 70006 - DNA, 24 bp, Artificial Sequence
  Synthetic oligonucleotide; TAAAAC chr11 5255231 5255254 5255234 -
catcaaaaatcctggacctatgcc

SEQ ID NO: 70007 - DNA, 24 bp, Artificial Sequence
  Synthetic oligonucleotide; AAAAAC chr11 5255137 5255160 5255140 -
actggagctacagacaagaaggtg

SEQ ID NO: 70008 - DNA, 24 bp, Artificial Sequence
  Synthetic oligonucleotide; GAAAAC chr11 5255090 5255113 5255093 -
ctggtatcttctatggtgggagaa

SEQ ID NO: 70009 - DNA, 24 bp, Artificial Sequence
  Synthetic oligonucleotide; TAAAAC chr11 5253984 5254007 5253987 -
ttcccctatttttgttattcgttt

SEQ ID NO: 70010 - DNA, 24 bp, Artificial Sequence
  Synthetic oligonucleotide; TAAAAC chr11 5251515 5251538 5251518 -
tttctttgtcctttttttttttag

SEQ ID NO: 70011 - DNA, 24 bp, Artificial Sequence
  Synthetic oligonucleotide; AAAAAC chr11 5251020 5251043 5251023 -
agagatcatggatcactttcagag

SEQ ID NO: 70012 - DNA, 24 bp, Artificial Sequence
  Synthetic oligonucleotide; AAAAAC chr11 5251014 5251037 5251017 -
catggatcactttcagagaaaaac

SEQ ID NO: 70013 - DNA, 24 bp, Artificial Sequence
  Synthetic oligonucleotide; CAAAAC chr11 5250994 5251017 5250997 -
aaacaaaaacaaactaaccaaaag

SEQ ID NO: 70014 - DNA, 24 bp, Artificial Sequence
  Synthetic oligonucleotide; AAAAAC chr11 5250981 5251004 5250984 -
ctaaccaaaagcaaaacagaacca

SEQ ID NO: 70015 - DNA, 24 bp, Artificial Sequence
  Synthetic oligonucleotide; AAAAAC chr11 5250852 5250875 5250855 -
atagtgtgtggactattagtcaat

SEQ ID NO: 70016 - DNA, 24 bp, Artificial Sequence
  Synthetic oligonucleotide; CAAAAC chr11 5250677 5250700 5250680 -
ttactgagcatagaagagctacgc

SEQ ID NO: 70017 - DNA, 24 bp, Artificial Sequence
  Synthetic oligonucleotide; TAAAAC chr11 5250303 5250326 5250306 -
cgtcaaaaatcctggacctatgcc

SEQ ID NO: 70018 - DNA, 24 bp, Artificial Sequence
  Synthetic oligonucleotide; AAAAAC chr11 5250209 5250232 5250212 -
actggagctagagacaagaaggta

SEQ ID NO: 70019 - DNA, 24 bp, Artificial Sequence
  Synthetic oligonucleotide; AAAAAC chr11 5250130 5250153 5250133 -
gctaaagggaagaataaattagag

SEQ ID NO: 70020 - DNA, 24 bp, Artificial Sequence
  Synthetic oligonucleotide; TAAAAC chr11 5249064 5249087 5249067 -
atctttccctcatttttgttgttt

SEQ ID NO: 70021 - DNA, 24 bp, Artificial Sequence
  Synthetic oligonucleotide; AAAAAC chr11 5247230 5247253 5247233 -
gagtcagccttcagaaatgtgaga

SEQ ID NO: 70022 - DNA, 24 bp, Artificial Sequence
  Synthetic oligonucleotide; GAAAAC chr11 5245653 5245676 5245656 -
atcacagtagaagcaataatcatg

SEQ ID NO: 70023 - DNA, 24 bp, Artificial Sequence
  Synthetic oligonucleotide; TAAAAC chr11 5245221 5245244 5245224 -
acaaactttccccatgttcctaag

SEQ ID NO: 70024 - DNA, 24 bp, Artificial Sequence
  Synthetic oligonucleotide; AAAAAC chr11 5244588 5244611 5244591 -
gtacactgactactaaatggatta

SEQ ID NO: 70025 - DNA, 24 bp, Artificial Sequence
  Synthetic oligonucleotide; TAAAAC chr11 5244575 5244598 5244578 -
taaatggattaaaaaacacagtaa

SEQ ID NO: 70026 - DNA, 24 bp, Artificial Sequence
  Synthetic oligonucleotide; AAAAAC chr11 5244142 5244165 5244145 -
agaaaaagaaagaaagaaagaaaa

SEQ ID NO: 70027 - DNA, 24 bp, Artificial Sequence
  Synthetic oligonucleotide; GAAAAC chr11 5244098 5244121 5244101 -
attcaatgtagtctcaagagaatt

SEQ ID NO: 70028 - DNA, 24 bp, Artificial Sequence
  Synthetic oligonucleotide; CAAAAC chr11 5243765 5243788 5243768 -
tcagaaactcgaatgtccatcttg

SEQ ID NO: 70029 - DNA, 24 bp, Artificial Sequence
  Synthetic oligonucleotide; AAAAAC chr11 5242882 5242905 5242885 -
gccacttaccatttgatagctctg

SEQ ID NO: 70030 - DNA, 24 bp, Artificial Sequence
  Synthetic oligonucleotide; GAAAAC chr11 5241099 5241122 5241102 -
aaaaaattattagcaatcaatatt

SEQ ID NO: 70031 - DNA, 24 bp, Artificial Sequence
  Synthetic oligonucleotide; GAAAAC chr11 5240674 5240697 5240677 -
tgtggcagtgattgcacagaactg

SEQ ID NO: 70032 - DNA, 24 bp, Artificial Sequence
  Synthetic oligonucleotide; TAAAAC chr11 5240476 5240499 5240479 -
ggaagtatgtagcaccctcaaacc

SEQ ID NO: 70033 - DNA, 24 bp, Artificial Sequence
  Synthetic oligonucleotide; CAAAAC chr11 5240412 5240435 5240415 -
tttcttctccagtttcattaatcc

SEQ ID NO: 70034 - DNA, 24 bp, Artificial Sequence
  Synthetic oligonucleotide; GAAAAC chr11 5240007 5240030 5240010 -
gagttttcacattcacctttagtg

SEQ ID NO: 70035 - DNA, 24 bp, Artificial Sequence
  Synthetic oligonucleotide; GAAAAC chr11 5238996 5239019 5238999 -
gaaatctagatgttagtaacatca

SEQ ID NO: 70036 - DNA, 24 bp, Artificial Sequence
  Synthetic oligonucleotide; AAAAAC chr11 5238826 5238849 5238829 -
gggggcatcaaagtatcagccata

SEQ ID NO: 70037 - DNA, 24 bp, Artificial Sequence
  Synthetic oligonucleotide; GAAAAC chr11 5238516 5238539 5238519 -
attaatgtattgataagataatat

SEQ ID NO: 70038 - DNA, 24 bp, Artificial Sequence
  Synthetic oligonucleotide; TAAAAC chr11 5237471 5237494 5237474 -
gcatgggtatttcacttgttatac

SEQ ID NO: 70039 - DNA, 24 bp, Artificial Sequence
  Synthetic oligonucleotide; AAAAAC chr11 5235339 5235362 5235342 -
attatttgaattcagaaaagagtg

SEQ ID NO: 70040 - DNA, 24 bp, Artificial Sequence
  Synthetic oligonucleotide; TAAAAC chr11 5234850 5234873 5234853 -
gaactttatattgagtcaacttgt

SEQ ID NO: 70041 - DNA, 24 bp, Artificial Sequence
  Synthetic oligonucleotide; TAAAAC chr11 5234761 5234784 5234764 -
aagatacattccactatattagcc

SEQ ID NO: 70042 - DNA, 24 bp, Artificial Sequence
  Synthetic oligonucleotide; TAAAAC chr11 5233381 5233404 5233384 -
atatgctatatacacatacaaaat

SEQ ID NO: 70043 - DNA, 24 bp, Artificial Sequence
  Synthetic oligonucleotide; GAAAAC chr11 5232090 5232113 5232093 -
ggcagaaagaaaatatttattcaa

SEQ ID NO: 70044 - DNA, 24 bp, Artificial Sequence
  Synthetic oligonucleotide; GAAAAC chr11 5231371 5231394 5231374 -
tgtagaccttatgatcttgatagg

SEQ ID NO: 70045 - DNA, 24 bp, Artificial Sequence
  Synthetic oligonucleotide; TAAAAC chr11 5230838 5230861 5230841 -
tacccccaaatttaaaatgaaagt

SEQ ID NO: 70046 - DNA, 24 bp, Artificial Sequence
  Synthetic oligonucleotide; TAAAAC chr11 5229934 5229957 5229937 -
aagtgctgcttttgaaacaaatga

SEQ ID NO: 70047 - DNA, 24 bp, Artificial Sequence
  Synthetic oligonucleotide; TAAAAC chr11 5229841 5229864 5229844 -
acccagactagggccattctgata

SEQ ID NO: 70048 - DNA, 24 bp, Artificial Sequence
  Synthetic oligonucleotide; GAAAAC chr11 5229303 5229326 5229306 -
atccatagttcatcatttaaaaaa

SEQ ID NO: 70049 - DNA, 24 bp, Artificial Sequence
  Synthetic oligonucleotide; GAAAAC chr11 5229284 5229307 5229287 -
aaaaagaaaacaaaatagaaaaag

SEQ ID NO: 70050 - DNA, 24 bp, Artificial Sequence
  Synthetic oligonucleotide; GAAAAC chr11 5229025 5229048 5229028 -
atcagggatgtgaaacagggtctt

SEQ ID NO: 70051 - DNA, 24 bp, Artificial Sequence
  Synthetic oligonucleotide; TAAAAC chr11 5229009 5229032 5229012 -
agggtcttgaaaactgtctaaatc

SEQ ID NO: 70052 - DNA, 24 bp, Artificial Sequence
  Synthetic oligonucleotide; TAAAAC chr11 5228047 5228070 5228050 -
gaacttgaatcaaggaaatgattt

SEQ ID NO: 70053 - DNA, 24 bp, Artificial Sequence
  Synthetic oligonucleotide; CAAAAC chr11 5227763 5227786 5227766 -
tctagttttttatctcttgtttcc

SEQ ID NO: 70054 - DNA, 24 bp, Artificial Sequence
  Synthetic oligonucleotide; AAAAAC chr11 5227670 5227693 5227673 -
attagcatgcatgagcaaattaag

SEQ ID NO: 70055 - DNA, 24 bp, Artificial Sequence
  Synthetic oligonucleotide; CAAAAC chr11 5227440 5227463 5227443 -
atcccaaagctgaattatggtaga

SEQ ID NO: 70056 - DNA, 24 bp, Artificial Sequence
  Synthetic oligonucleotide; GAAAAC chr11 5227384 5227407 5227387 -
ttatttgtgtaataagaaaattgg

SEQ ID NO: 70057 - DNA, 24 bp, Artificial Sequence
  Synthetic oligonucleotide; AAAAAC chr11 5226274 5226297 5226277 -
tgagatacattaagtaacttaaaa

SEQ ID NO: 70058 - DNA, 24 bp, Artificial Sequence
  Synthetic oligonucleotide; AAAAAC chr11 5225487 5225510 5225490 -
tgagcatctggattctgcctaata

SEQ ID NO: 70059 - DNA, 24 bp, Artificial Sequence
  Synthetic oligonucleotide; TAAAAC chr11 5225402 5225425 5225405 -
gggaatgtgggaggtcagtgcatt

SEQ ID NO: 70060 - DNA, 24 bp, Artificial Sequence
  Synthetic oligonucleotide; AAAAAC chr11 5224985 5225008 5224988 -
ttatagaggtctacttgaagaagg

SEQ ID NO: 70061 - DNA, 24 bp, Artificial Sequence
  Synthetic oligonucleotide; TAAAAC chr11 5224330 5224353 5224333 -
gggttaaagaattaaactaagacc

SEQ ID NO: 70062 - DNA, 24 bp, Artificial Sequence
  Synthetic oligonucleotide; AAAAAC chr11 5224182 5224205 5224185 -
atcaaactaaaaaatttccacaca

SEQ ID NO: 70063 - DNA, 24 bp, Artificial Sequence
  Synthetic oligonucleotide; CAAAAC chr11 5224177 5224200 5224180 -
actaaaaaatttccacacaaaaaa

SEQ ID NO: 70064 - DNA, 24 bp, Artificial Sequence
  Synthetic oligonucleotide; TAAAAC chr11 5223974 5223997 5223977 -
cagaattgatgaacctggaggatg

SEQ ID NO: 70065 - DNA, 24 bp, Artificial Sequence
  Synthetic oligonucleotide; TAAAAC chr11 5223327 5223350 5223330 -
tcatttcacaaggtatacatatat

SEQ ID NO: 70066 - DNA, 24 bp, Artificial Sequence
  Synthetic oligonucleotide; AAAAAC chr11 5223223 5223246 5223226 -
aaagaatagacatcacatgaatta

SEQ ID NO: 70067 - DNA, 24 bp, Artificial Sequence
  Synthetic oligonucleotide; CAAAAC chr11 5223130 5223153 5223133 -
tccatttgactgtttactcttttc

SEQ ID NO: 70068 - DNA, 24 bp, Artificial Sequence
  Synthetic oligonucleotide; AAAAAC chr11 5222767 5222790 5222770 -
agatagtggaataaatagaaatcc

SEQ ID NO: 70069 - DNA, 24 bp, Artificial Sequence
  Synthetic oligonucleotide; AAAAAC chr11 5222695 5222718 5222698 -
gcttttaaatttagcttggaaata

SEQ ID NO: 70070 - DNA, 24 bp, Artificial Sequence
  Synthetic oligonucleotide; AAAAAC chr11 5222580 5222603 5222583 -
tgtgaaggtaaaattcagtcacga

SEQ ID NO: 70071 - DNA, 24 bp, Artificial Sequence
  Synthetic oligonucleotide; AAAAAC chr11 5222315 5222338 5222318 -
aaacctcatcgctactaaaaatat

SEQ ID NO: 70072 - DNA, 24 bp, Artificial Sequence
  Synthetic oligonucleotide; CAAAAC chr11 5221348 5221371 5221351 -
cacatggctggtactcctctaaga

SEQ ID NO: 70073 - DNA, 24 bp, Artificial Sequence
  Synthetic oligonucleotide; GAAAAC chr11 5221263 5221286 5221266 -
gcagccaccgctgttgatacccag

SEQ ID NO: 70074 - DNA, 24 bp, Artificial Sequence
  Synthetic oligonucleotide; GAAAAC chr11 5221191 5221214 5221194 -
gctgagggtcctgactgttagaag

SEQ ID NO: 70075 - DNA, 24 bp, Artificial Sequence
  Synthetic oligonucleotide; AAAAAC chr11 5221159 5221182 5221162 -
acaaacagaaaggacatccacacc

SEQ ID NO: 70076 - DNA, 24 bp, Artificial Sequence
  Synthetic oligonucleotide; TAAAAC chr11 5221115 5221138 5221118 -
ccatcatcaaagaccaaaggtaga

SEQ ID NO: 70077 - DNA, 24 bp, Artificial Sequence
  Synthetic oligonucleotide; AAAAAC chr11 5221082 5221105 5221085 -
aaagatggggaaaaagcagagcag

SEQ ID NO: 70078 - DNA, 24 bp, Artificial Sequence
  Synthetic oligonucleotide; AAAAAC chr11 5220904 5220927 5220907 -
gttcgaacaaacggcaaagaagta

SEQ ID NO: 70079 - DNA, 24 bp, Artificial Sequence
  Synthetic oligonucleotide; GAAAAC chr11 5220824 5220847 5220827 -
gtccttaaaggacctgatggagct

SEQ ID NO: 70080 - DNA, 24 bp, Artificial Sequence
  Synthetic oligonucleotide; GAAAAC chr11 5220580 5220603 5220583 -
gatggggagaatggaaccaagttg

SEQ ID NO: 70081 - DNA, 24 bp, Artificial Sequence
  Synthetic oligonucleotide; AAAAAC chr11 5220105 5220128 5220108 -
ggaacaactagtatcagccactgc

SEQ ID NO: 70082 - DNA, 24 bp, Artificial Sequence
  Synthetic oligonucleotide; GAAAAC chr11 5219827 5219850 5219830 -
ggaggaatatctaccaagcaaatg

SEQ ID NO: 70083 - DNA, 24 bp, Artificial Sequence
  Synthetic oligonucleotide; TAAAAC chr11 5219787 5219810 5219790 -
aggggttgcaatcctagtctctga

SEQ ID NO: 70084 - DNA, 24 bp, Artificial Sequence
  Synthetic oligonucleotide; TAAAAC chr11 5219653 5219676 5219656 -
ccaatacaggagcacccagattca

SEQ ID NO: 70085 - DNA, 24 bp, Artificial Sequence
  Synthetic oligonucleotide; CAAAAC chr11 5219421 5219444 5219424 -
ttcagcaccacaccacacctattc

SEQ ID NO: 70086 - DNA, 24 bp, Artificial Sequence
  Synthetic oligonucleotide; CAAAAC chr11 5219297 5219320 5219300 -
gaactcaggattaagaaactcact

SEQ ID NO: 70087 - DNA, 24 bp, Artificial Sequence
  Synthetic oligonucleotide; AAAAAC chr11 5219063 5219086 5219066 -
attgacaccctaacatcacaatta

SEQ ID NO: 70088 - DNA, 24 bp, Artificial Sequence
  Synthetic oligonucleotide; AAAAAC chr11 5218968 5218991 5218971 -
gaagtgaaggacatagagacacaa

SEQ ID NO: 70089 - DNA, 24 bp, Artificial Sequence
  Synthetic oligonucleotide; AAAAAC chr11 5218211 5218234 5218214 -
caaaattcaacaacgcttcatgct

SEQ ID NO: 70090 - DNA, 24 bp, Artificial Sequence
  Synthetic oligonucleotide; AAAAAC chr11 5218116 5218139 5218119 -
cagccaatatcatactgagtggac

SEQ ID NO: 70091 - DNA, 24 bp, Artificial Sequence
  Synthetic oligonucleotide; GAAAAC chr11 5218094 5218117 5218097 -
acaaaaactggaagcattcccttt

SEQ ID NO: 70092 - DNA, 24 bp, Artificial Sequence
  Synthetic oligonucleotide; GAAAAC chr11 5217928 5217951 5217931 -
gcagatgacatgattgtatatcta

SEQ ID NO: 70093 - DNA, 24 bp, Artificial Sequence
  Synthetic oligonucleotide; AAAAAC chr11 5217530 5217553 5217533 -
aatgactttcttcacagaactgga

SEQ ID NO: 70094 - DNA, 24 bp, Artificial Sequence
  Synthetic oligonucleotide; CAAAAC chr11 5217401 5217424 5217404 -
actatactacaatgctacggtaac

SEQ ID NO: 70095 - DNA, 24 bp, Artificial Sequence
  Synthetic oligonucleotide; CAAAAC chr11 5217379 5217402 5217382 -
accaaaacagcatggtactggtac

SEQ ID NO: 70096 - DNA, 24 bp, Artificial Sequence
  Synthetic oligonucleotide; GAAAAC chr11 5217241 5217264 5217244 -
tccctatttaataaatggtgctgg

SEQ ID NO: 70097 - DNA, 24 bp, Artificial Sequence
  Synthetic oligonucleotide; TAAAAC chr11 5217140 5217163 5217143 -
gattaaagacttacatgttagacc

SEQ ID NO: 70098 - DNA, 24 bp, Artificial Sequence
  Synthetic oligonucleotide; AAAAAC chr11 5217131 5217154 5217134 -
cttacatgttagacctaaaaccat

SEQ ID NO: 70099 - DNA, 24 bp, Artificial Sequence
  Synthetic oligonucleotide; AAAAAC chr11 5217118 5217141 5217121 -
cctaaaaccataaaaaccctagaa

SEQ ID NO: 70100 - DNA, 24 bp, Artificial Sequence
  Synthetic oligonucleotide; TAAAAC chr11 5217065 5217088 5217068 -
aggcatgggcaaggacttcatgtc

SEQ ID NO: 70101 - DNA, 24 bp, Artificial Sequence
  Synthetic oligonucleotide; AAAAAC chr11 5216865 5216888 5216868 -
atgaactcaaacaaatttacaaga

SEQ ID NO: 70102 - DNA, 24 bp, Artificial Sequence
  Synthetic oligonucleotide; AAAAAC chr11 5216788 5216811 5216791 -
caaaagaagacatttatgtaatca

SEQ ID NO: 70103 - DNA, 24 bp, Artificial Sequence
  Synthetic oligonucleotide; CAAAAC chr11 5216736 5216759 5216739 -
actagccatcagagaaatgcaaat

SEQ ID NO: 70104 - DNA, 24 bp, Artificial Sequence
  Synthetic oligonucleotide; TAAAAC chr11 5216037 5216060 5216040 -
cctgcatgttgtgcacatgtaccc

SEQ ID NO: 70105 - DNA, 24 bp, Artificial Sequence
  Synthetic oligonucleotide; TAAAAC chr11 5215998 5216021 5216001 -
aataataaaaaaaagttatcctat

SEQ ID NO: 70106 - DNA, 24 bp, Artificial Sequence
  Synthetic oligonucleotide; GAAAAC chr11 5215584 5215607 5215587 -
atgattaaagataacaagaggtct

SEQ ID NO: 70107 - DNA, 24 bp, Artificial Sequence
  Synthetic oligonucleotide; AAAAAC chr11 5215397 5215420 5215400 -
gtgactgagatcctgtctctgagg

SEQ ID NO: 70108 - DNA, 24 bp, Artificial Sequence
  Synthetic oligonucleotide; AAAAAC chr11 5215378 5215401 5215381 -
tgaggaaaaacaaacaaacaagca

SEQ ID NO: 70109 - DNA, 24 bp, Artificial Sequence
  Synthetic oligonucleotide; CAAAAC chr11 5214764 5214787 5214767 -
tgatctaccttattaattttttca

SEQ ID NO: 70110 - DNA, 24 bp, Artificial Sequence
  Synthetic oligonucleotide; CAAAAC chr11 5214056 5214079 5214059 -
atgaggccagcatcatcctgatac

SEQ ID NO: 70111 - DNA, 24 bp, Artificial Sequence
  Synthetic oligonucleotide; GAAAAC chr11 5214024 5214047 5214027 -
gatagacacacaacaacaaaaaaa

SEQ ID NO: 70112 - DNA, 24 bp, Artificial Sequence
  Synthetic oligonucleotide; AAAAAC chr11 5213853 5213876 5213856 -
gtgattcatcatatatacagcact

SEQ ID NO: 70113 - DNA, 24 bp, Artificial Sequence
  Synthetic oligonucleotide; TAAAAC chr11 5213780 5213803 5213783 -
ataaaattcaacttcacttcatgt

SEQ ID NO: 70114 - DNA, 24 bp, Artificial Sequence
  Synthetic oligonucleotide; CAAAAC chr11 5213685 5213708 5213688 -
acagccaacatcatacagaatggg

SEQ ID NO: 70115 - DNA, 24 bp, Artificial Sequence
  Synthetic oligonucleotide; GAAAAC chr11 5213662 5213685 5213665 -
gcaaaacctggaagcattcttctt

SEQ ID NO: 70116 - DNA, 24 bp, Artificial Sequence
  Synthetic oligonucleotide; GAAAAC chr11 5213510 5213533 5213513 -
aagtatccctgttttctgtatcta

SEQ ID NO: 70117 - DNA, 24 bp, Artificial Sequence
  Synthetic oligonucleotide; CAAAAC chr11 5213284 5213307 5213287 -
gaaagatctctacaatgagattta

SEQ ID NO: 70118 - DNA, 24 bp, Artificial Sequence
  Synthetic oligonucleotide; AAAAAC chr11 5213241 5213264 5213244 -
atcagagctgatagaaacaaatgg

SEQ ID NO: 70119 - DNA, 24 bp, Artificial Sequence
  Synthetic oligonucleotide; CAAAAC chr11 5212758 5212781 5212761 -
accataccacagggctacagtaac

SEQ ID NO: 70120 - DNA, 24 bp, Artificial Sequence
  Synthetic oligonucleotide; AAAAAC chr11 5212647 5212670 5212650 -
catctgatctttgacaaagctgat

SEQ ID NO: 70121 - DNA, 24 bp, Artificial Sequence
  Synthetic oligonucleotide; CAAAAC chr11 5212506 5212529 5212509 -
caagatggattagagacttaaatg

SEQ ID NO: 70122 - DNA, 24 bp, Artificial Sequence
  Synthetic oligonucleotide; CAAAAC chr11 5212230 5212253 5212233 -
ggaacttaaatgaatctacaagaa

SEQ ID NO: 70123 - DNA, 24 bp, Artificial Sequence
  Synthetic oligonucleotide; AAAAAC chr11 5211929 5211952 5211932 -
agtgtggcaattccctaaagacct

SEQ ID NO: 70124 - DNA, 24 bp, Artificial Sequence
  Synthetic oligonucleotide; GAAAAC chr11 5211640 5211663 5211643 -
ccttaacaaactaatgtaagaaca

SEQ ID NO: 70125 - DNA, 24 bp, Artificial Sequence
  Synthetic oligonucleotide; GAAAAC chr11 5211590 5211613 5211593 -
ttacaagtaggaactaaatgatga

SEQ ID NO: 70126 - DNA, 24 bp, Artificial Sequence
  Synthetic oligonucleotide; AAAAAC chr11 5211211 5211234 5211214 -
attgtgttcctatatagtaaatat

SEQ ID NO: 70127 - DNA, 24 bp, Artificial Sequence
  Synthetic oligonucleotide; GAAAAC chr11 5210711 5210734 5210714 -
ttcgaggaactcaagtcctatctt

SEQ ID NO: 70128 - DNA, 24 bp, Artificial Sequence
  Synthetic oligonucleotide; GAAAAC chr11 5210019 5210042 5210022 -
gggcacatgcaggctgctataaga

SEQ ID NO: 70129 - DNA, 24 bp, Artificial Sequence
  Synthetic oligonucleotide; AAAAAC chr11 5209421 5209444 5209424 -
atgctgtacttaaaatattaaaat

SEQ ID NO: 70130 - DNA, 24 bp, Artificial Sequence
  Synthetic oligonucleotide; CAAAAC chr11 5208536 5208559 5208539 -
aaaaattatatacctaagaaatga

SEQ ID NO: 70131 - DNA, 24 bp, Artificial Sequence
  Synthetic oligonucleotide; TAAAAC chr11 5208062 5208085 5208065 -
tgatgatcatggtgatattaataa

SEQ ID NO: 70132 - DNA, 24 bp, Artificial Sequence
  Synthetic oligonucleotide; TAAAAC chr11 5207879 5207902 5207882 -
tctctaataaataaataaaataaa

SEQ ID NO: 70133 - DNA, 24 bp, Artificial Sequence
  Synthetic oligonucleotide; AAAAAC chr11 5207868 5207891 5207871 -
taaataaaataaataaaacagaaa

SEQ ID NO: 70134 - DNA, 24 bp, Artificial Sequence
  Synthetic oligonucleotide; AAAAAC chr11 5207263 5207286 5207266 -
tcctgacgagtttctataaaaaaa

SEQ ID NO: 70135 - DNA, 24 bp, Artificial Sequence
  Synthetic oligonucleotide; CAAAAC chr11 5206571 5206594 5206574 -
atggcattacttttttattgctgc

SEQ ID NO: 70136 - DNA, 24 bp, Artificial Sequence
  Synthetic oligonucleotide; AAAAAC chr11 5206247 5206270 5206250 -
aattttttaaaaagttgatttcat

SEQ ID NO: 70137 - DNA, 24 bp, Artificial Sequence
  Synthetic oligonucleotide; CAAAAC chr11 5205719 5205742 5205722 -
gaaaagggaacatattaaagccaa

SEQ ID NO: 70138 - DNA, 24 bp, Artificial Sequence
  Synthetic oligonucleotide; AAAAAC chr11 5205651 5205674 5205654 -
acaatcaaatgctataaatcttat

SEQ ID NO: 70139 - DNA, 24 bp, Artificial Sequence
  Synthetic oligonucleotide; AAAAAC chr11 5204856 5204879 5204859 -
cagtaattatgttctaagaacagc

SEQ ID NO: 70140 - DNA, 24 bp, Artificial Sequence
  Synthetic oligonucleotide; AAAAAC chr11 5204676 5204699 5204679 -
attctgaaaagacagaaaaaaaaa

SEQ ID NO: 70141 - DNA, 24 bp, Artificial Sequence
  Synthetic oligonucleotide; GAAAAC chr11 5204536 5204559 5204539 -
ccagacagtgctcagaggggatac

SEQ ID NO: 70142 - DNA, 24 bp, Artificial Sequence
  Synthetic oligonucleotide; GAAAAC chr11 5204389 5204412 5204392 -
agcataacacaacatgatgtcttg

SEQ ID NO: 70143 - DNA, 24 bp, Artificial Sequence
  Synthetic oligonucleotide; CAAAAC chr11 5204288 5204311 5204291 -
taaatcttcatttatttaccttat

SEQ ID NO: 70144 - DNA, 24 bp, Artificial Sequence
  Synthetic oligonucleotide; CAAAAC chr11 5204260 5204283 5204263 -
actatgctctttcatcctaccttt

SEQ ID NO: 70145 - DNA, 24 bp, Artificial Sequence
  Synthetic oligonucleotide; AAAAAC chr11 5203343 5203366 5203346 -
ccttatttttcatattcttgagca

SEQ ID NO: 70146 - DNA, 24 bp, Artificial Sequence
  Synthetic oligonucleotide; AAAAAC chr11 5201879 5201902 5201882 -
atgctgagaaggagtcagggcaag

SEQ ID NO: 70147 - DNA, 24 bp, Artificial Sequence
  Synthetic oligonucleotide; AAAAAC chr11 5201661 5201684 5201664 -
ctgtttacattattagagctttaa

SEQ ID NO: 70148 - DNA, 24 bp, Artificial Sequence
  Synthetic oligonucleotide; GAAAAC chr11 5201507 5201530 5201510 -
tgtagaactgcaggttctaagaaa

SEQ ID NO: 70149 - DNA, 24 bp, Artificial Sequence
  Synthetic oligonucleotide; GAAAAC chr11 5201224 5201247 5201227 -
ctggctacgtcatctggaggggga

SEQ ID NO: 70150 - DNA, 24 bp, Artificial Sequence
  Synthetic oligonucleotide; TAAAAC chr11 5200977 5201000 5200980 -
aaatgtctaagcaacgtatttttt

SEQ ID NO: 70151 - DNA, 24 bp, Artificial Sequence
  Synthetic oligonucleotide; TAAAAC chr11 5199451 5199474 5199454 -
tacttttgagcatttcctttgctg

SEQ ID NO: 70152 - DNA, 24 bp, Artificial Sequence
  Synthetic oligonucleotide; AAAAAC chr11 5199434 5199457 5199437 -
tttgctgtaaaacaaagctggatt

SEQ ID NO: 70153 - DNA, 24 bp, Artificial Sequence
  Synthetic oligonucleotide; GAAAAC chr11 5199405 5199428 5199408 -
cctaggttttcaagtttcaaagta

SEQ ID NO: 70154 - DNA, 24 bp, Artificial Sequence
  Synthetic oligonucleotide; CAAAAC chr11 5198774 5198797 5198777 -
gaaagaaaggaaggaaatcaggta

SEQ ID NO: 70155 - DNA, 24 bp, Artificial Sequence
  Synthetic oligonucleotide; TAAAAC chr11 5198619 5198642 5198622 -
ttatttttatttttagatatcaac

SEQ ID NO: 70156 - DNA, 24 bp, Artificial Sequence
  Synthetic oligonucleotide; GAAAAC chr11 5198292 5198315 5198295 -
tcttctggtatagctatcagaagt

SEQ ID NO: 70157 - DNA, 24 bp, Artificial Sequence
  Synthetic oligonucleotide; AAAAAC chr11 5198144 5198167 5198147 -
atggtgaaaccccgtctctactaa

SEQ ID NO: 70158 - DNA, 24 bp, Artificial Sequence
  Synthetic oligonucleotide; CAAAAC chr11 5197424 5197447 5197427 -
aatagtttgaaataatggccgtga

SEQ ID NO: 70159 - DNA, 24 bp, Artificial Sequence
  Synthetic oligonucleotide; TAAAAC chr11 5197053 5197076 5197056 -
gcagatggagacatcacaggtgtt

SEQ ID NO: 70160 - DNA, 24 bp, Artificial Sequence
  Synthetic oligonucleotide; GAAAAC chr11 5196831 5196854 5196834 -
tccagcgtcactgagaaacgttac

SEQ ID NO: 70161 - DNA, 24 bp, Artificial Sequence
  Synthetic oligonucleotide; GAAAAC chr11 5196709 5196732 5196712 -
aagtcacggttattataataagga

SEQ ID NO: 70162 - DNA, 24 bp, Artificial Sequence
  Synthetic oligonucleotide; AAAAAC chr11 5195505 5195528 5195508 -
tatacatttaaatatgatttttta

SEQ ID NO: 70163 - DNA, 24 bp, Artificial Sequence
  Synthetic oligonucleotide; AAAAAC chr11 5195447 5195470 5195450 -
ctacagaaaaggataccaatgaga

SEQ ID NO: 70164 - DNA, 24 bp, Artificial Sequence
  Synthetic oligonucleotide; AAAAAC chr11 5195416 5195439 5195419 -
ttatctgcaaagagcattttctgg

SEQ ID NO: 70165 - DNA, 24 bp, Artificial Sequence
  Synthetic oligonucleotide; CAAAAC chr11 5194205 5194228 5194208 -
taaatgcaccaatcagcactctgc

SEQ ID NO: 70166 - DNA, 24 bp, Artificial Sequence
  Synthetic oligonucleotide; GAAAAC chr11 5193554 5193577 5193557 -
atacctagaatcaattttaataaa

SEQ ID NO: 70167 - DNA, 24 bp, Artificial Sequence
  Synthetic oligonucleotide; AAAAAC chr11 5193080 5193103 5193083 -
ttcatggtaagttaagagaatgaa

SEQ ID NO: 70168 - DNA, 24 bp, Artificial Sequence
  Synthetic oligonucleotide; CAAAAC chr11 5193053 5193076 5193056 -
aacaagccacagagaacatatttg

SEQ ID NO: 70169 - DNA, 24 bp, Artificial Sequence
  Synthetic oligonucleotide; AAAAAC chr11 5192986 5193009 5192989 -
aagaacttttaaaattctacaata

SEQ ID NO: 70170 - DNA, 24 bp, Artificial Sequence
  Synthetic oligonucleotide; TAAAAC chr11 5192858 5192881 5192861 -
acatgtcattaagaaactgcacat

SEQ ID NO: 70171 - DNA, 24 bp, Artificial Sequence
  Synthetic oligonucleotide; CAAAAC chr11 5192691 5192714 5192694 -
tggaagacagtttacagtttctta

SEQ ID NO: 70172 - DNA, 24 bp, Artificial Sequence
  Synthetic oligonucleotide; AAAAAC chr11 5191384 5191407 5191387 -
ttcaacctatgagcctgtaaaatc

SEQ ID NO: 70173 - DNA, 24 bp, Artificial Sequence
  Synthetic oligonucleotide; GAAAAC chr11 5191269 5191292 5191272 -
ggggctaaagatcccacacgagta

SEQ ID NO: 70174 - DNA, 24 bp, Artificial Sequence
  Synthetic oligonucleotide; TAAAAC chr11 5190894 5190917 5190897 -
ctcgggtatttcttcatagcagtt

SEQ ID NO: 70175 - DNA, 24 bp, Artificial Sequence
  Synthetic oligonucleotide; AAAAAC chr11 5189399 5189422 5189402 -
gaaacttataatcatggcagagag

SEQ ID NO: 70176 - DNA, 24 bp, Artificial Sequence
  Synthetic oligonucleotide; CAAAAC chr11 5189107 5189130 5189110 -
tcaacaaaatacataaaatgtaag

SEQ ID NO: 70177 - DNA, 24 bp, Artificial Sequence
  Synthetic oligonucleotide; CAAAAC chr11 5189094 5189117 5189097 -
taaaatgtaagcaaaacacaacaa

SEQ ID NO: 70178 - DNA, 24 bp, Artificial Sequence
  Synthetic oligonucleotide; AAAAAC chr11 5188052 5188075 5188055 -
tttccttgaaatccatagaaattt

SEQ ID NO: 70179 - DNA, 24 bp, Artificial Sequence
  Synthetic oligonucleotide; GAAAAC chr11 5187766 5187789 5187769 -
ctcaaagactgtagacttctataa

SEQ ID NO: 70180 - DNA, 24 bp, Artificial Sequence
  Synthetic oligonucleotide; GAAAAC chr11 5187599 5187622 5187602 -
atttatcagaaatcattatttact

SEQ ID NO: 70181 - DNA, 24 bp, Artificial Sequence
  Synthetic oligonucleotide; AAAAAC chr11 5187548 5187571 5187551 -
tcaagttttagagtccccagattt

SEQ ID NO: 70182 - DNA, 24 bp, Artificial Sequence
  Synthetic oligonucleotide; GAAAAC chr11 5186410 5186433 5186413 -
gagtaaaattcgtcctcttaagct

SEQ ID NO: 70183 - DNA, 24 bp, Artificial Sequence
  Synthetic oligonucleotide; GAAAAC chr11 5186261 5186284 5186264 -
taagtaaactgagttatgctcaat

SEQ ID NO: 70184 - DNA, 24 bp, Artificial Sequence
  Synthetic oligonucleotide; TAAAAC chr11 5185961 5185984 5185964 -
tcaatgaatttatattctagtagt

SEQ ID NO: 70185 - DNA, 24 bp, Artificial Sequence
  Synthetic oligonucleotide; TAAAAC chr11 5185775 5185798 5185778 -
attatactggtgatggggcaaaaa

SEQ ID NO: 70186 - DNA, 24 bp, Artificial Sequence
  Synthetic oligonucleotide; AAAAAC chr11 5185138 5185161 5185141 -
catcacatatgacaatgttttagg

SEQ ID NO: 70187 - DNA, 24 bp, Artificial Sequence
  Synthetic oligonucleotide; AAAAAC chr11 5185130 5185153 5185133 -
atgacaatgttttaggaaaaacaa

SEQ ID NO: 70188 - DNA, 24 bp, Artificial Sequence
  Synthetic oligonucleotide; AAAAAC chr11 5185112 5185135 5185115 -
aaacaaaaaaacaaacaaatattt

SEQ ID NO: 70189 - DNA, 24 bp, Artificial Sequence
  Synthetic oligonucleotide; TAAAAC chr11 5184813 5184836 5184816 -
caatgtgagatatatattaaatag

SEQ ID NO: 70190 - DNA, 24 bp, Artificial Sequence
  Synthetic oligonucleotide; AAAAAC chr11 5184601 5184624 5184604 -
agaccagaatatttagcacttagc

SEQ ID NO: 70191 - DNA, 24 bp, Artificial Sequence
  Synthetic oligonucleotide; AAAAAC chr11 5184490 5184513 5184493 -
ttcttaagcccctgtgccacctca

SEQ ID NO: 70192 - DNA, 24 bp, Artificial Sequence
  Synthetic oligonucleotide; GAAAAC chr11 5184137 5184160 5184140 -
atatagactcctgttttataatgt

SEQ ID NO: 70193 - DNA, 24 bp, Artificial Sequence
  Synthetic oligonucleotide; AAAAAC chr11 5183792 5183815 5183795 -
ctatcaattttgttgatcttttca

SEQ ID NO: 70194 - DNA, 24 bp, Artificial Sequence
  Synthetic oligonucleotide; AAAAAC chr11 5182027 5182050 5182030 -
caaaattcaacaatgcttcatact

SEQ ID NO: 70195 - DNA, 24 bp, Artificial Sequence
  Synthetic oligonucleotide; AAAAAC chr11 5181932 5181955 5181935 -
cagccaatatcatactgaatggac

SEQ ID NO: 70196 - DNA, 24 bp, Artificial Sequence
  Synthetic oligonucleotide; GAAAAC chr11 5181910 5181933 5181913 -
acaaaaactggaagcattcccttt

SEQ ID NO: 70197 - DNA, 24 bp, Artificial Sequence
  Synthetic oligonucleotide; GAAAAC chr11 5181744 5181767 5181747 -
gcagatgacgtgattgtatatcta

SEQ ID NO: 70198 - DNA, 24 bp, Artificial Sequence
  Synthetic oligonucleotide; CAAAAC chr11 5181514 5181537 5181517 -
gaaggacctcttcaaggagaacaa

SEQ ID NO: 70199 - DNA, 24 bp, Artificial Sequence
  Synthetic oligonucleotide; AAAAAC chr11 5181346 5181369 5181349 -
aatgactttcttcacagaattgga

SEQ ID NO: 70200 - DNA, 24 bp, Artificial Sequence
  Synthetic oligonucleotide; CAAAAC chr11 5181218 5181241 5181221 -
aactatactacaaggtacagtaac

SEQ ID NO: 70201 - DNA, 24 bp, Artificial Sequence
  Synthetic oligonucleotide; CAAAAC chr11 5181196 5181219 5181199 -
accaaaacaacatggtactggtac

SEQ ID NO: 70202 - DNA, 24 bp, Artificial Sequence
  Synthetic oligonucleotide; AAAAAC chr11 5181106 5181129 5181109 -
tatctgatctttgacaaacctgac

SEQ ID NO: 70203 - DNA, 24 bp, Artificial Sequence
  Synthetic oligonucleotide; GAAAAC chr11 5181058 5181081 5181061 -
tccctatttaataaatgatgctgg

SEQ ID NO: 70204 - DNA, 24 bp, Artificial Sequence
  Synthetic oligonucleotide; TAAAAC chr11 5180957 5180980 5180960 -
gattaaagacttacatgttagacc

SEQ ID NO: 70205 - DNA, 24 bp, Artificial Sequence
  Synthetic oligonucleotide; AAAAAC chr11 5180948 5180971 5180951 -
cttacatgttagacctaaaaccat

SEQ ID NO: 70206 - DNA, 24 bp, Artificial Sequence
  Synthetic oligonucleotide; GAAAAC chr11 5180935 5180958 5180938 -
cctaaaaccataaaaaccttagaa

SEQ ID NO: 70207 - DNA, 24 bp, Artificial Sequence
  Synthetic oligonucleotide; TAAAAC chr11 5180882 5180905 5180885 -
aggcatgggcaaggacttcatgtc

SEQ ID NO: 70208 - DNA, 24 bp, Artificial Sequence
  Synthetic oligonucleotide; AAAAAC chr11 5180681 5180704 5180684 -
tgaactcaaacaaatttacaagaa

SEQ ID NO: 70209 - DNA, 24 bp, Artificial Sequence
  Synthetic oligonucleotide; AAAAAC chr11 5180604 5180627 5180607 -
caaaagaagacatttatgcagcca

SEQ ID NO: 70210 - DNA, 24 bp, Artificial Sequence
  Synthetic oligonucleotide; CAAAAC chr11 5180552 5180575 5180555 -
actggccatcagagaaatgcaaat

SEQ ID NO: 70211 - DNA, 24 bp, Artificial Sequence
  Synthetic oligonucleotide; AAAAAC chr11 5180084 5180107 5180087 -
tctgagcaaagtatcgcaaggacg

SEQ ID NO: 70212 - DNA, 24 bp, Artificial Sequence
  Synthetic oligonucleotide; AAAAAC chr11 5179430 5179453 5179433 -
cgtgccaggctggcatatagattt

SEQ ID NO: 70213 - DNA, 24 bp, Artificial Sequence
  Synthetic oligonucleotide; GAAAAC chr11 5178783 5178806 5178786 -
attttactctcctttcccagagaa

SEQ ID NO: 70214 - DNA, 24 bp, Artificial Sequence
  Synthetic oligonucleotide; GAAAAC chr11 5178769 5178792 5178772 -
tcccagagaagaaaacattggaaa

SEQ ID NO: 70215 - DNA, 24 bp, Artificial Sequence
  Synthetic oligonucleotide; TAAAAC chr11 5177865 5177888 5177868 -
atttcttgcccatcgctttggagg

SEQ ID NO: 70216 - DNA, 24 bp, Artificial Sequence
  Synthetic oligonucleotide; AAAAAC chr11 5176753 5176776 5176756 -
tttacacctaaagaaagacaaaaa

SEQ ID NO: 70217 - DNA, 24 bp, Artificial Sequence
  Synthetic oligonucleotide; TAAAAC chr11 5176445 5176468 5176448 -
ccattattgggaagggagaataca

SEQ ID NO: 70218 - DNA, 24 bp, Artificial Sequence
  Synthetic oligonucleotide; TAAAAC chr11 5175632 5175655 5175635 -
cagggagttttggaagcacttagc

SEQ ID NO: 70219 - DNA, 24 bp, Artificial Sequence
  Synthetic oligonucleotide; AAAAAC chr11 5175599 5175622 5175602 -
tatggtgttctagacagaattagc

SEQ ID NO: 70220 - DNA, 24 bp, Artificial Sequence
  Synthetic oligonucleotide; AAAAAC chr11 5175592 5175615 5175595 -
ttctagacagaattagcaaaaaca

SEQ ID NO: 70221 - DNA, 24 bp, Artificial Sequence
  Synthetic oligonucleotide; AAAAAC chr11 5175068 5175091 5175071 -
ccacagagagagactccatctcaa

SEQ ID NO: 70222 - DNA, 24 bp, Artificial Sequence
  Synthetic oligonucleotide; TAAAAC chr11 5175052 5175075 5175055 -
catctcaaaaaaaccaaaaatacg

SEQ ID NO: 70223 - DNA, 24 bp, Artificial Sequence
  Synthetic oligonucleotide; AAAAAC chr11 5175046 5175069 5175049 -
aaaaaaaccaaaaatacgtaaaac

SEQ ID NO: 70224 - DNA, 24 bp, Artificial Sequence
  Synthetic oligonucleotide; AAAAAC chr11 5175034 5175057 5175037 -
aatacgtaaaacaaaaacaaaaag

SEQ ID NO: 70225 - DNA, 24 bp, Artificial Sequence
  Synthetic oligonucleotide; TAAAAC chr11 5175022 5175045 5175025 -
aaaaacaaaaagaaaaacaaaaaa

SEQ ID NO: 70226 - DNA, 24 bp, Artificial Sequence
  Synthetic oligonucleotide; CAAAAC chr11 5174711 5174734 5174714 -
gccgctatcaccatgatctcatgc

SEQ ID NO: 70227 - DNA, 24 bp, Artificial Sequence
  Synthetic oligonucleotide; TAAAAC chr11 5174389 5174412 5174392 -
tttttctcatctaacagtgttggc

SEQ ID NO: 70228 - DNA, 24 bp, Artificial Sequence
  Synthetic oligonucleotide; AAAAAC chr11 5174331 5174354 5174334 -
atttcacttaaagttgccatttcc

SEQ ID NO: 70229 - DNA, 24 bp, Artificial Sequence
  Synthetic oligonucleotide; AAAAAC chr11 5173400 5173423 5173403 -
ccaattgaatatgaagttgtatat

SEQ ID NO: 70230 - DNA, 24 bp, Artificial Sequence
  Synthetic oligonucleotide; GAAAAC chr11 5173340 5173363 5173343 -
aaaaaggacacagatcaaacaaca

SEQ ID NO: 70231 - DNA, 24 bp, Artificial Sequence
  Synthetic oligonucleotide; TAAAAC chr11 5172377 5172400 5172380 -
gaaattgatcatggtaggagtcat

SEQ ID NO: 70232 - DNA, 24 bp, Artificial Sequence
  Synthetic oligonucleotide; AAAAAC chr11 5170215 5170238 5170218 -
tttaacattttgtagatgaagaaa

SEQ ID NO: 70233 - DNA, 24 bp, Artificial Sequence
  Synthetic oligonucleotide; CAAAAC chr11 5169774 5169797 5169777 -
ggtgacattgttttgtcaatttgt

SEQ ID NO: 70234 - DNA, 24 bp, Artificial Sequence
  Synthetic oligonucleotide; CAAAAC chr11 5169723 5169746 5169726 -
tttctaggtacatcaattttacat

SEQ ID NO: 70235 - DNA, 24 bp, Artificial Sequence
  Synthetic oligonucleotide; AAAAAC chr11 5169374 5169397 5169377 -
aatgagttcaatactagaaagaaa

SEQ ID NO: 70236 - DNA, 24 bp, Artificial Sequence
  Synthetic oligonucleotide; AAAAAC chr11 5169328 5169351 5169331 -
tactgttttagaagaaaataacta

SEQ ID NO: 70237 - DNA, 24 bp, Artificial Sequence
  Synthetic oligonucleotide; AAAAAC chr11 5168935 5168958 5168938 -
aagtgttcaatgtagtgaagtcat

SEQ ID NO: 70238 - DNA, 24 bp, Artificial Sequence
  Synthetic oligonucleotide; AAAAAC chr11 5168810 5168833 5168813 -
ttactattcttatggtatacatga

SEQ ID NO: 70239 - DNA, 24 bp, Artificial Sequence
  Synthetic oligonucleotide; GAAAAC chr11 5168764 5168787 5168767 -
taactttatcaagttcacacaatg

SEQ ID NO: 70240 - DNA, 24 bp, Artificial Sequence
  Synthetic oligonucleotide; CAAAAC chr11 5168183 5168206 5168186 -
ttaataagtggcagaatcacaact

SEQ ID NO: 70241 - DNA, 24 bp, Artificial Sequence
  Synthetic oligonucleotide; AAAAAC chr11 5168163 5168186 5168166 -
aactcaaaaccagacaatccaact

SEQ ID NO: 70242 - DNA, 24 bp, Artificial Sequence
  Synthetic oligonucleotide; GAAAAC chr11 5167565 5167588 5167568 -
ttttcaaagcgctcagggataaaa

SEQ ID NO: 70243 - DNA, 24 bp, Artificial Sequence
  Synthetic oligonucleotide; TAAAAC chr11 5167534 5167557 5167537 -
gatattcaagaatattttataggg

SEQ ID NO: 70244 - DNA, 24 bp, Artificial Sequence
  Synthetic oligonucleotide; GAAAAC chr11 5167388 5167411 5167391 -
gaaaaaagacattaacatgcaaaa

SEQ ID NO: 70245 - DNA, 24 bp, Artificial Sequence
  Synthetic oligonucleotide; AAAAAC chr11 5167271 5167294 5167274 -
cacagaactccagtatgaaaccca

SEQ ID NO: 70246 - DNA, 24 bp, Artificial Sequence
  Synthetic oligonucleotide; AAAAAC chr11 5167256 5167279 5167259 -
tgaaacccaaaaaacaaatctttc

SEQ ID NO: 70247 - DNA, 24 bp, Artificial Sequence
  Synthetic oligonucleotide; AAAAAC chr11 5166635 5166658 5166638 -
tcagataaaatagactacaaattt

SEQ ID NO: 70248 - DNA, 24 bp, Artificial Sequence
  Synthetic oligonucleotide; GAAAAC chr11 5166518 5166541 5166521 -
catcaaagttcccaagtatataag

SEQ ID NO: 70249 - DNA, 24 bp, Artificial Sequence
  Synthetic oligonucleotide; TAAAAC chr11 5166194 5166217 5166197 -
gtatattttctgaccacagtggaa

SEQ ID NO: 70250 - DNA, 24 bp, Artificial Sequence
  Synthetic oligonucleotide; TAAAAC chr11 5165839 5165862 5165842 -
tttcctttacctacccaaatctta

SEQ ID NO: 70251 - DNA, 24 bp, Artificial Sequence
  Synthetic oligonucleotide; CAAAAC chr11 5165397 5165420 5165400 -
ggagacatgttttatccgtggacc

SEQ ID NO: 70252 - DNA, 24 bp, Artificial Sequence
  Synthetic oligonucleotide; TAAAAC chr11 5164736 5164759 5164739 -
ccttagcctgtgctctcaagaact

SEQ ID NO: 70253 - DNA, 24 bp, Artificial Sequence
  Synthetic oligonucleotide; TAAAAC chr11 5164709 5164732 5164712 -
aacctcttcaactcacacctgacc

SEQ ID NO: 70254 - DNA, 24 bp, Artificial Sequence
  Synthetic oligonucleotide; TAAAAC chr11 5164579 5164602 5164582 -
tcaagatctaaataatttttgtcg

SEQ ID NO: 70255 - DNA, 24 bp, Artificial Sequence
  Synthetic oligonucleotide; AAAAAC chr11 5164118 5164141 5164121 -
gtttaggctctttcatcaaatatg

SEQ ID NO: 70256 - DNA, 24 bp, Artificial Sequence
  Synthetic oligonucleotide; TAAAAC chr11 5163986 5164009 5163989 -
acccaatctgctcctgacattaaa

SEQ ID NO: 70257 - DNA, 24 bp, Artificial Sequence
  Synthetic oligonucleotide; TAAAAC chr11 5163063 5163086 5163066 -
atcatgcgccccttaccatcccat

SEQ ID NO: 70258 - DNA, 24 bp, Artificial Sequence
  Synthetic oligonucleotide; TAAAAC chr11 5162913 5162936 5162916 -
accattcccccattttacctgtcc

SEQ ID NO: 70259 - DNA, 24 bp, Artificial Sequence
  Synthetic oligonucleotide; AAAAAC chr11 5162570 5162593 5162573 -
tacctatctcggcataattctcat

SEQ ID NO: 70260 - DNA, 24 bp, Artificial Sequence
  Synthetic oligonucleotide; CAAAAC chr11 5162506 5162529 5162509 -
tctcccaaacctcaatcccttcta

SEQ ID NO: 70261 - DNA, 24 bp, Artificial Sequence
  Synthetic oligonucleotide; TAAAAC chr11 5161545 5161568 5161548 -
gtttttcaggctcttagtattcag

SEQ ID NO: 70262 - DNA, 24 bp, Artificial Sequence
  Synthetic oligonucleotide; AAAAAC chr11 5161480 5161503 5161483 -
agtagaacggactaaatgtctttt

SEQ ID NO: 70263 - DNA, 24 bp, Artificial Sequence
  Synthetic oligonucleotide; AAAAAC chr11 5161284 5161307 5161287 -
agaccaacttagaatgtgccccaa

SEQ ID NO: 70264 - DNA, 24 bp, Artificial Sequence
  Synthetic oligonucleotide; CAAAAC chr11 5160971 5160994 5160974 -
ttccatttggtttttcaatccata

SEQ ID NO: 70265 - DNA, 24 bp, Artificial Sequence
  Synthetic oligonucleotide; TAAAAC chr11 5160428 5160451 5160431 -
tttcctttacctacccaaatctta

SEQ ID NO: 70266 - DNA, 24 bp, Artificial Sequence
  Synthetic oligonucleotide; TAAAAC chr11 5160252 5160275 5160255 -
ctaaagaaattaagaaggaaattt

SEQ ID NO: 70267 - DNA, 24 bp, Artificial Sequence
  Synthetic oligonucleotide; CAAAAC chr11 5160211 5160234 5160214 -
agtgaaaatggaaatacaacatac

SEQ ID NO: 70268 - DNA, 24 bp, Artificial Sequence
  Synthetic oligonucleotide; AAAAAC chr11 5159986 5160009 5159989 -
gaccaaaaaatacagaaaatcatt

SEQ ID NO: 70269 - DNA, 24 bp, Artificial Sequence
  Synthetic oligonucleotide; CAAAAC chr11 5159944 5159967 5159947 -
tcttggaaaggtaaacaaaatcaa

SEQ ID NO: 70270 - DNA, 24 bp, Artificial Sequence
  Synthetic oligonucleotide; GAAAAC chr11 5159751 5159774 5159754 -
gcaagactgaagcatgtagaaaca

SEQ ID NO: 70271 - DNA, 24 bp, Artificial Sequence
  Synthetic oligonucleotide; AAAAAC chr11 5159599 5159622 5159602 -
aattcctcaaacaaacaaacaaat

SEQ ID NO: 70272 - DNA, 24 bp, Artificial Sequence
  Synthetic oligonucleotide; AAAAAC chr11 5159464 5159487 5159467 -
agtaggaacatacctcaaaataat

SEQ ID NO: 70273 - DNA, 24 bp, Artificial Sequence
  Synthetic oligonucleotide; AAAAAC chr11 5159231 5159254 5159234 -
agatgacatgatcttatacttaga

SEQ ID NO: 70274 - DNA, 24 bp, Artificial Sequence
  Synthetic oligonucleotide; AAAAAC chr11 5159223 5159246 5159226 -
tgatcttatacttagaaaaaacct

SEQ ID NO: 70275 - DNA, 24 bp, Artificial Sequence
  Synthetic oligonucleotide; TAAAAC chr11 5159202 5159225 5159205 -
cctaaaaacttcactaaatactat

SEQ ID NO: 70276 - DNA, 24 bp, Artificial Sequence
  Synthetic oligonucleotide; TAAAAC chr11 5159098 5159121 5159101 -
ttatcaatctgcaaaaaaaatcaa

SEQ ID NO: 70277 - DNA, 24 bp, Artificial Sequence
  Synthetic oligonucleotide; TAAAAC chr11 5159006 5159029 5159009 -
aaaagatctctataagaaaaatta

SEQ ID NO: 70278 - DNA, 24 bp, Artificial Sequence
  Synthetic oligonucleotide; AAAAAC chr11 5158842 5158865 5158845 -
taccaatggcattcacagaaatag

SEQ ID NO: 70279 - DNA, 24 bp, Artificial Sequence
  Synthetic oligonucleotide; CAAAAC chr11 5158770 5158793 5158773 -
taaagcaatcctgagcaaaaagaa

SEQ ID NO: 70280 - DNA, 24 bp, Artificial Sequence
  Synthetic oligonucleotide; GAAAAC chr11 5158245 5158268 5158248 -
agtcttttcaagaaacagtgctag

SEQ ID NO: 70281 - DNA, 24 bp, Artificial Sequence
  Synthetic oligonucleotide; GAAAAC chr11 5158122 5158145 5158125 -
cctgaaattatgaaactactggaa

SEQ ID NO: 70282 - DNA, 24 bp, Artificial Sequence
  Synthetic oligonucleotide; CAAAAC chr11 5158043 5158066 5158046 -
tgagacttcaaaagcacaaataac

SEQ ID NO: 70283 - DNA, 24 bp, Artificial Sequence
  Synthetic oligonucleotide; CAAAAC chr11 5157761 5157784 5157764 -
aatatcactaatcaccagataaat

SEQ ID NO: 70284 - DNA, 24 bp, Artificial Sequence
  Synthetic oligonucleotide; CAAAAC chr11 5157713 5157736 5157716 -
caccttagttaaaatagcttataa

SEQ ID NO: 70285 - DNA, 24 bp, Artificial Sequence
  Synthetic oligonucleotide; AAAAAC chr11 5157239 5157262 5157242 -
catgttctaactcgtgtggaagtt

SEQ ID NO: 70286 - DNA, 24 bp, Artificial Sequence
  Synthetic oligonucleotide; AAAAAC chr11 5157156 5157179 5157159 -
agaaaggaatgagaaatcaagcaa

SEQ ID NO: 70287 - DNA, 24 bp, Artificial Sequence
  Synthetic oligonucleotide; AAAAAC chr11 5155278 5155301 5155281 -
ttacttaatttactaaaagataaa

SEQ ID NO: 70288 - DNA, 24 bp, Artificial Sequence
  Synthetic oligonucleotide; AAAAAC chr11 5155166 5155189 5155169 -
tttttcttttctgaataaaaagag

SEQ ID NO: 70289 - DNA, 24 bp, Artificial Sequence
  Synthetic oligonucleotide; CAAAAC chr11 5154386 5154409 5154389 -
tattcttcaggtatctggtaagag

SEQ ID NO: 70290 - DNA, 24 bp, Artificial Sequence
  Synthetic oligonucleotide; TAAAAC chr11 5154078 5154101 5154081 -
agtgacttatggatgggagtgtca

SEQ ID NO: 70291 - DNA, 24 bp, Artificial Sequence
  Synthetic oligonucleotide; TAAAAC chr11 5153726 5153749 5153729 -
agctgattcatgagcttactgaga

SEQ ID NO: 70292 - DNA, 24 bp, Artificial Sequence
  Synthetic oligonucleotide; TAAAAC chr11 5153275 5153298 5153278 -
tgctaattataactctgaacattt

SEQ ID NO: 70293 - DNA, 24 bp, Artificial Sequence
  Synthetic oligonucleotide; GAAAAC chr11 5152561 5152584 5152564 -
acagtgcctgtgaatgccccacct

SEQ ID NO: 70294 - DNA, 24 bp, Artificial Sequence
  Synthetic oligonucleotide; CAAAAC chr11 5152521 5152544 5152524 -
ctccatgaatccatcttttccttt

SEQ ID NO: 70295 - DNA, 24 bp, Artificial Sequence
  Synthetic oligonucleotide; CAAAAC chr11 5151377 5151400 5151380 -
tttcttttgcagtagtaaccatat

SEQ ID NO: 70296 - DNA, 24 bp, Artificial Sequence
  Synthetic oligonucleotide; CAAAAC chr11 5151372 5151395 5151375 -
tttgcagtagtaaccatatcaaaa

SEQ ID NO: 70297 - DNA, 24 bp, Artificial Sequence
  Synthetic oligonucleotide; AAAAAC chr11 5151365 5151388 5151368 -
tagtaaccatatcaaaacaaaaca

SEQ ID NO: 70298 - DNA, 24 bp, Artificial Sequence
  Synthetic oligonucleotide; GAAAAC chr11 5151069 5151092 5151072 -
ttctgaaacatccagggactcaat

SEQ ID NO: 70299 - DNA, 24 bp, Artificial Sequence
  Synthetic oligonucleotide; AAAAAC chr11 5150799 5150822 5150802 -
tctttattaattcatcattttatc

SEQ ID NO: 70300 - DNA, 24 bp, Artificial Sequence
  Synthetic oligonucleotide; AAAAAC chr11 5150084 5150107 5150087 -
tttacggctagtcaattgttcttg

SEQ ID NO: 70301 - DNA, 22 bp, Artificial Sequence
  Synthetic oligonucleotide; CTG chr11 5150003 5150024 5150020 5150025 +
gtaaatcaaagtatggacatct

SEQ ID NO: 70302 - DNA, 22 bp, Artificial Sequence
  Synthetic oligonucleotide; CTG chr11 5150026 5150047 5150043 5150048 +
cccatatgtgaatattttccat

SEQ ID NO: 70303 - DNA, 22 bp, Artificial Sequence
  Synthetic oligonucleotide; TTT chr11 5150043 5150064 5150060 5150065 +
tccataaccttgaaaaaaatga

SEQ ID NO: 70304 - DNA, 22 bp, Artificial Sequence
  Synthetic oligonucleotide; TTT chr11 5150044 5150065 5150061 5150066 +
ccataaccttgaaaaaaatgat

SEQ ID NO: 70305 - DNA, 22 bp, Artificial Sequence
  Synthetic oligonucleotide; TTC chr11 5150045 5150066 5150062 5150067 +
cataaccttgaaaaaaatgatc

SEQ ID NO: 70306 - DNA, 22 bp, Artificial Sequence
  Synthetic oligonucleotide; CTT chr11 5150054 5150075 5150071 5150076 +
gaaaaaaatgatctatgacctg

SEQ ID NO: 70307 - DNA, 22 bp, Artificial Sequence
  Synthetic oligonucleotide; TTG chr11 5150055 5150076 5150072 5150077 +
aaaaaaatgatctatgacctga

SEQ ID NO: 70308 - DNA, 22 bp, Artificial Sequence
  Synthetic oligonucleotide; CTA chr11 5150069 5150090 5150086 5150091 +
tgacctgaggtttttcaagaac

SEQ ID NO: 70309 - DNA, 22 bp, Artificial Sequence
  Synthetic oligonucleotide; CTG chr11 5150076 5150097 5150093 5150098 +
aggtttttcaagaacaattgac

SEQ ID NO: 70310 - DNA, 22 bp, Artificial Sequence
  Synthetic oligonucleotide; TTT chr11 5150082 5150103 5150099 5150104 +
ttcaagaacaattgactagccg

SEQ ID NO: 70311 - DNA, 22 bp, Artificial Sequence
  Synthetic oligonucleotide; TTT chr11 5150083 5150104 5150100 5150105 +
tcaagaacaattgactagccgt

SEQ ID NO: 70312 - DNA, 22 bp, Artificial Sequence
  Synthetic oligonucleotide; TTT chr11 5150084 5150105 5150101 5150106 +
caagaacaattgactagccgta

SEQ ID NO: 70313 - DNA, 22 bp, Artificial Sequence
  Synthetic oligonucleotide; TTC chr11 5150085 5150106 5150102 5150107 +
aagaacaattgactagccgtaa

SEQ ID NO: 70314 - DNA, 22 bp, Artificial Sequence
  Synthetic oligonucleotide; TTG chr11 5150096 5150117 5150113 5150118 +
actagccgtaaattcttatgcc

SEQ ID NO: 70315 - DNA, 22 bp, Artificial Sequence
  Synthetic oligonucleotide; CTA chr11 5150100 5150121 5150117 5150122 +
gccgtaaattcttatgccacta

SEQ ID NO: 70316 - DNA, 22 bp, Artificial Sequence
  Synthetic oligonucleotide; TTC chr11 5150111 5150132 5150128 5150133 +
ttatgccactaattttagacaa

SEQ ID NO: 70317 - DNA, 22 bp, Artificial Sequence
  Synthetic oligonucleotide; CTT chr11 5150113 5150134 5150130 5150135 +
atgccactaattttagacaata

SEQ ID NO: 70318 - DNA, 22 bp, Artificial Sequence
  Synthetic oligonucleotide; TTA chr11 5150114 5150135 5150131 5150136 +
tgccactaattttagacaatat

SEQ ID NO: 70319 - DNA, 22 bp, Artificial Sequence
  Synthetic oligonucleotide; CTA chr11 5150122 5150143 5150139 5150144 +
attttagacaatatagtcctcc

SEQ ID NO: 70320 - DNA, 22 bp, Artificial Sequence
  Synthetic oligonucleotide; TTT chr11 5150126 5150147 5150143 5150148 +
tagacaatatagtcctcctctt

SEQ ID NO: 70321 - DNA, 22 bp, Artificial Sequence
  Synthetic oligonucleotide; TTT chr11 5150127 5150148 5150144 5150149 +
agacaatatagtcctcctcttc

SEQ ID NO: 70322 - DNA, 22 bp, Artificial Sequence
  Synthetic oligonucleotide; TTA chr11 5150128 5150149 5150145 5150150 +
gacaatatagtcctcctcttca

SEQ ID NO: 70323 - DNA, 22 bp, Artificial Sequence
  Synthetic oligonucleotide; CTC chr11 5150143 5150164 5150160 5150165 +
ctcttcactaacacaatagccc

SEQ ID NO: 70324 - DNA, 22 bp, Artificial Sequence
  Synthetic oligonucleotide; CTC chr11 5150146 5150167 5150163 5150168 +
ttcactaacacaatagccctag

SEQ ID NO: 70325 - DNA, 22 bp, Artificial Sequence
  Synthetic oligonucleotide; CTT chr11 5150148 5150169 5150165 5150170 +
cactaacacaatagccctagac

SEQ ID NO: 70326 - DNA, 22 bp, Artificial Sequence
  Synthetic oligonucleotide; TTC chr11 5150149 5150170 5150166 5150171 +
actaacacaatagccctagact

SEQ ID NO: 70327 - DNA, 22 bp, Artificial Sequence
  Synthetic oligonucleotide; CTA chr11 5150153 5150174 5150170 5150175 +
acacaatagccctagacttatt

SEQ ID NO: 70328 - DNA, 22 bp, Artificial Sequence
  Synthetic oligonucleotide; CTA chr11 5150167 5150188 5150184 5150189 +
gacttatttatatttgctgtgt

SEQ ID NO: 70329 - DNA, 22 bp, Artificial Sequence
  Synthetic oligonucleotide; CTT chr11 5150172 5150193 5150189 5150194 +
atttatatttgctgtgtggtat

SEQ ID NO: 70330 - DNA, 22 bp, Artificial Sequence
  Synthetic oligonucleotide; TTA chr11 5150173 5150194 5150190 5150195 +
tttatatttgctgtgtggtatg

SEQ ID NO: 70331 - DNA, 22 bp, Artificial Sequence
  Synthetic oligonucleotide; TTT chr11 5150176 5150197 5150193 5150198 +
atatttgctgtgtggtatgctg

SEQ ID NO: 70332 - DNA, 22 bp, Artificial Sequence
  Synthetic oligonucleotide; TTA chr11 5150177 5150198 5150194 5150199 +
tatttgctgtgtggtatgctgc

SEQ ID NO: 70333 - DNA, 22 bp, Artificial Sequence
  Synthetic oligonucleotide; TTT chr11 5150182 5150203 5150199 5150204 +
gctgtgtggtatgctgccacat

SEQ ID NO: 70334 - DNA, 22 bp, Artificial Sequence
  Synthetic oligonucleotide; TTG chr11 5150183 5150204 5150200 5150205 +
ctgtgtggtatgctgccacatg

SEQ ID NO: 70335 - DNA, 22 bp, Artificial Sequence
  Synthetic oligonucleotide; CTG chr11 5150186 5150207 5150203 5150208 +
tgtggtatgctgccacatgccc

SEQ ID NO: 70336 - DNA, 22 bp, Artificial Sequence
  Synthetic oligonucleotide; CTG chr11 5150198 5150219 5150215 5150220 +
ccacatgcccaagcagacacac

SEQ ID NO: 70337 - DNA, 22 bp, Artificial Sequence
  Synthetic oligonucleotide; CTT chr11 5150255 5150276 5150272 5150277 +
acttgtagaacacaagcaaaca

SEQ ID NO: 70338 - DNA, 22 bp, Artificial Sequence
  Synthetic oligonucleotide; TTA chr11 5150256 5150277 5150273 5150278 +
cttgtagaacacaagcaaacaa

SEQ ID NO: 70339 - DNA, 22 bp, Artificial Sequence
  Synthetic oligonucleotide; CTT chr11 5150259 5150280 5150276 5150281 +
gtagaacacaagcaaacaaatg

SEQ ID NO: 70340 - DNA, 22 bp, Artificial Sequence
  Synthetic oligonucleotide; TTG chr11 5150260 5150281 5150277 5150282 +
tagaacacaagcaaacaaatga

SEQ ID NO: 70341 - DNA, 22 bp, Artificial Sequence
  Synthetic oligonucleotide; CTC chr11 5150288 5150309 5150305 5150310 +
tccaatggcacattatagcttt

SEQ ID NO: 70342 - DNA, 22 bp, Artificial Sequence
  Synthetic oligonucleotide; CTC chr11 5150290 5150311 5150307 5150312 +
caatggcacattatagcttttg

SEQ ID NO: 70343 - DNA, 22 bp, Artificial Sequence
  Synthetic oligonucleotide; TTA chr11 5150303 5150324 5150320 5150325 +
tagcttttggaataaagtccag

SEQ ID NO: 70344 - DNA, 22 bp, Artificial Sequence
  Synthetic oligonucleotide; CTT chr11 5150309 5150330 5150326 5150331 +
ttggaataaagtccagcaactc

SEQ ID NO: 70345 - DNA, 22 bp, Artificial Sequence
  Synthetic oligonucleotide; TTT chr11 5150310 5150331 5150327 5150332 +
tggaataaagtccagcaactct

SEQ ID NO: 70346 - DNA, 22 bp, Artificial Sequence
  Synthetic oligonucleotide; TTT chr11 5150311 5150332 5150328 5150333 +
ggaataaagtccagcaactctg

SEQ ID NO: 70347 - DNA, 22 bp, Artificial Sequence
  Synthetic oligonucleotide; TTG chr11 5150312 5150333 5150329 5150334 +
gaataaagtccagcaactctgc

SEQ ID NO: 70348 - DNA, 22 bp, Artificial Sequence
  Synthetic oligonucleotide; CTC chr11 5150331 5150352 5150348 5150353 +
tgcacaacattaatagccattt

SEQ ID NO: 70349 - DNA, 22 bp, Artificial Sequence
  Synthetic oligonucleotide; CTG chr11 5150333 5150354 5150350 5150355 +
cacaacattaatagccattttt

SEQ ID NO: 70350 - DNA, 22 bp, Artificial Sequence
  Synthetic oligonucleotide; TTA chr11 5150343 5150364 5150360 5150365 +
atagccatttttgatattcata

SEQ ID NO: 70351 - DNA, 22 bp, Artificial Sequence
  Synthetic oligonucleotide; TTT chr11 5150353 5150374 5150370 5150375 +
ttgatattcatattttccttgt

SEQ ID NO: 70352 - DNA, 22 bp, Artificial Sequence
  Synthetic oligonucleotide; TTT chr11 5150354 5150375 5150371 5150376 +
tgatattcatattttccttgtc

SEQ ID NO: 70353 - DNA, 22 bp, Artificial Sequence
  Synthetic oligonucleotide; TTT chr11 5150355 5150376 5150372 5150377 +
gatattcatattttccttgtct

SEQ ID NO: 70354 - DNA, 22 bp, Artificial Sequence
  Synthetic oligonucleotide; TTG chr11 5150356 5150377 5150373 5150378 +
atattcatattttccttgtctc

SEQ ID NO: 70355 - DNA, 22 bp, Artificial Sequence
  Synthetic oligonucleotide; TTC chr11 5150362 5150383 5150379 5150384 +
atattttccttgtctccccaag

SEQ ID NO: 70356 - DNA, 22 bp, Artificial Sequence
  Synthetic oligonucleotide; TTT chr11 5150368 5150389 5150385 5150390 +
tccttgtctccccaagttctac

SEQ ID NO: 70357 - DNA, 22 bp, Artificial Sequence
  Synthetic oligonucleotide; TTT chr11 5150369 5150390 5150386 5150391 +
ccttgtctccccaagttctacc

SEQ ID NO: 70358 - DNA, 22 bp, Artificial Sequence
  Synthetic oligonucleotide; TTC chr11 5150370 5150391 5150387 5150392 +
cttgtctccccaagttctacct

SEQ ID NO: 70359 - DNA, 22 bp, Artificial Sequence
  Synthetic oligonucleotide; CTT chr11 5150373 5150394 5150390 5150395 +
gtctccccaagttctaccttgc

SEQ ID NO: 70360 - DNA, 22 bp, Artificial Sequence
  Synthetic oligonucleotide; TTG chr11 5150374 5150395 5150391 5150396 +
tctccccaagttctaccttgca

SEQ ID NO: 70361 - DNA, 22 bp, Artificial Sequence
  Synthetic oligonucleotide; CTC chr11 5150378 5150399 5150395 5150400 +
cccaagttctaccttgcactca

SEQ ID NO: 70362 - DNA, 22 bp, Artificial Sequence
  Synthetic oligonucleotide; TTC chr11 5150387 5150408 5150404 5150409 +
taccttgcactcataccatatt

SEQ ID NO: 70363 - DNA, 22 bp, Artificial Sequence
  Synthetic oligonucleotide; CTA chr11 5150389 5150410 5150406 5150411 +
ccttgcactcataccatattga

SEQ ID NO: 70364 - DNA, 22 bp, Artificial Sequence
  Synthetic oligonucleotide; CTT chr11 5150393 5150414 5150410 5150415 +
gcactcataccatattgaaaaa

SEQ ID NO: 70365 - DNA, 22 bp, Artificial Sequence
  Synthetic oligonucleotide; TTG chr11 5150394 5150415 5150411 5150416 +
cactcataccatattgaaaaaa

SEQ ID NO: 70366 - DNA, 22 bp, Artificial Sequence
  Synthetic oligonucleotide; CTC chr11 5150399 5150420 5150416 5150421 +
ataccatattgaaaaaactaga

SEQ ID NO: 70367 - DNA, 22 bp, Artificial Sequence
  Synthetic oligonucleotide; TTG chr11 5150410 5150431 5150427 5150432 +
aaaaaactagagttaccttaaa

SEQ ID NO: 70368 - DNA, 22 bp, Artificial Sequence
  Synthetic oligonucleotide; CTA chr11 5150419 5150440 5150436 5150441 +
gagttaccttaaactacattat

SEQ ID NO: 70369 - DNA, 22 bp, Artificial Sequence
  Synthetic oligonucleotide; TTA chr11 5150425 5150446 5150442 5150447 +
ccttaaactacattatctagtt

SEQ ID NO: 70370 - DNA, 22 bp, Artificial Sequence
  Synthetic oligonucleotide; CTT chr11 5150429 5150450 5150446 5150451 +
aaactacattatctagtttaaa

SEQ ID NO: 70371 - DNA, 22 bp, Artificial Sequence
  Synthetic oligonucleotide; TTA chr11 5150430 5150451 5150447 5150452 +
aactacattatctagtttaaat

SEQ ID NO: 70372 - DNA, 22 bp, Artificial Sequence
  Synthetic oligonucleotide; CTA chr11 5150435 5150456 5150452 5150457 +
cattatctagtttaaatctcct

SEQ ID NO: 70373 - DNA, 22 bp, Artificial Sequence
  Synthetic oligonucleotide; TTA chr11 5150440 5150461 5150457 5150462 +
tctagtttaaatctcctctact

SEQ ID NO: 70374 - DNA, 22 bp, Artificial Sequence
  Synthetic oligonucleotide; CTA chr11 5150444 5150465 5150461 5150466 +
gtttaaatctcctctactatct

SEQ ID NO: 70375 - DNA, 22 bp, Artificial Sequence
  Synthetic oligonucleotide; TTT chr11 5150448 5150469 5150465 5150470 +
aaatctcctctactatctacct

SEQ ID NO: 70376 - DNA, 22 bp, Artificial Sequence
  Synthetic oligonucleotide; TTA chr11 5150449 5150470 5150466 5150471 +
aatctcctctactatctacctg

SEQ ID NO: 70377 - DNA, 22 bp, Artificial Sequence
  Synthetic oligonucleotide; CTC chr11 5150455 5150476 5150472 5150477 +
ctctactatctacctggcatga

SEQ ID NO: 70378 - DNA, 22 bp, Artificial Sequence
  Synthetic oligonucleotide; CTC chr11 5150458 5150479 5150475 5150480 +
tactatctacctggcatgatgt

SEQ ID NO: 70379 - DNA, 22 bp, Artificial Sequence
  Synthetic oligonucleotide; CTA chr11 5150460 5150481 5150477 5150482 +
ctatctacctggcatgatgtgt

SEQ ID NO: 70380 - DNA, 22 bp, Artificial Sequence
  Synthetic oligonucleotide; CTA chr11 5150463 5150484 5150480 5150485 +
tctacctggcatgatgtgttct

SEQ ID NO: 70381 - DNA, 22 bp, Artificial Sequence
  Synthetic oligonucleotide; CTA chr11 5150467 5150488 5150484 5150489 +
cctggcatgatgtgttcttact

SEQ ID NO: 70382 - DNA, 22 bp, Artificial Sequence
  Synthetic oligonucleotide; CTG chr11 5150471 5150492 5150488 5150493 +
gcatgatgtgttcttacttcct

SEQ ID NO: 70383 - DNA, 22 bp, Artificial Sequence
  Synthetic oligonucleotide; TTC chr11 5150484 5150505 5150501 5150506 +
ttacttccttggctactcatcc

SEQ ID NO: 70384 - DNA, 22 bp, Artificial Sequence
  Synthetic oligonucleotide; CTT chr11 5150486 5150507 5150503 5150508 +
acttccttggctactcatccat

SEQ ID NO: 70385 - DNA, 22 bp, Artificial Sequence
  Synthetic oligonucleotide; TTA chr11 5150487 5150508 5150504 5150509 +
cttccttggctactcatccatc

SEQ ID NO: 70386 - DNA, 22 bp, Artificial Sequence
  Synthetic oligonucleotide; CTT chr11 5150490 5150511 5150507 5150512 +
ccttggctactcatccatcatt

SEQ ID NO: 70387 - DNA, 22 bp, Artificial Sequence
  Synthetic oligonucleotide; TTC chr11 5150491 5150512 5150508 5150513 +
cttggctactcatccatcattc

SEQ ID NO: 70388 - DNA, 22 bp, Artificial Sequence
  Synthetic oligonucleotide; CTT chr11 5150494 5150515 5150511 5150516 +
ggctactcatccatcattcctc

SEQ ID NO: 70389 - DNA, 22 bp, Artificial Sequence
  Synthetic oligonucleotide; TTG chr11 5150495 5150516 5150512 5150517 +
gctactcatccatcattcctca

SEQ ID NO: 70390 - DNA, 22 bp, Artificial Sequence
  Synthetic oligonucleotide; CTA chr11 5150499 5150520 5150516 5150521 +
ctcatccatcattcctcaagaa

SEQ ID NO: 70391 - DNA, 22 bp, Artificial Sequence
  Synthetic oligonucleotide; CTC chr11 5150502 5150523 5150519 5150524 +
atccatcattcctcaagaatca

SEQ ID NO: 70392 - DNA, 22 bp, Artificial Sequence
  Synthetic oligonucleotide; TTC chr11 5150513 5150534 5150530 5150535 +
ctcaagaatcagaggtaactac

SEQ ID NO: 70393 - DNA, 22 bp, Artificial Sequence
  Synthetic oligonucleotide; CTC chr11 5150516 5150537 5150533 5150538 +
aagaatcagaggtaactaccta

SEQ ID NO: 70394 - DNA, 22 bp, Artificial Sequence
  Synthetic oligonucleotide; CTA chr11 5150534 5150555 5150551 5150556 +
cctaaccaaaaaacaaaataca

SEQ ID NO: 70395 - DNA, 22 bp, Artificial Sequence
  Synthetic oligonucleotide; CTA chr11 5150538 5150559 5150555 5150560 +
accaaaaaacaaaatacaataa

SEQ ID NO: 70396 - DNA, 22 bp, Artificial Sequence
  Synthetic oligonucleotide; CTC chr11 5150569 5150590 5150586 5150591 +
ccctgctttggttagatttcaa

SEQ ID NO: 70397 - DNA, 22 bp, Artificial Sequence
  Synthetic oligonucleotide; CTG chr11 5150574 5150595 5150591 5150596 +
ctttggttagatttcaatgctt

SEQ ID NO: 70398 - DNA, 22 bp, Artificial Sequence
  Synthetic oligonucleotide; CTT chr11 5150577 5150598 5150594 5150599 +
tggttagatttcaatgcttcat

SEQ ID NO: 70399 - DNA, 22 bp, Artificial Sequence
  Synthetic oligonucleotide; TTT chr11 5150578 5150599 5150595 5150600 +
ggttagatttcaatgcttcatt

SEQ ID NO: 70400 - DNA, 22 bp, Artificial Sequence
  Synthetic oligonucleotide; TTG chr11 5150579 5150600 5150596 5150601 +
gttagatttcaatgcttcattc

SEQ ID NO: 70401 - DNA, 22 bp, Artificial Sequence
  Synthetic oligonucleotide; TTA chr11 5150583 5150604 5150600 5150605 +
gatttcaatgcttcattctctc

SEQ ID NO: 70402 - DNA, 22 bp, Artificial Sequence
  Synthetic oligonucleotide; TTT chr11 5150588 5150609 5150605 5150610 +
caatgcttcattctctctgaac

SEQ ID NO: 70403 - DNA, 22 bp, Artificial Sequence
  Synthetic oligonucleotide; TTC chr11 5150589 5150610 5150606 5150611 +
aatgcttcattctctctgaact

SEQ ID NO: 70404 - DNA, 22 bp, Artificial Sequence
  Synthetic oligonucleotide; CTT chr11 5150596 5150617 5150613 5150618 +
cattctctctgaactccacatc

SEQ ID NO: 70405 - DNA, 22 bp, Artificial Sequence
  Synthetic oligonucleotide; TTC chr11 5150597 5150618 5150614 5150619 +
attctctctgaactccacatcc

SEQ ID NO: 70406 - DNA, 22 bp, Artificial Sequence
  Synthetic oligonucleotide; TTC chr11 5150601 5150622 5150618 5150623 +
tctctgaactccacatcctatg

SEQ ID NO: 70407 - DNA, 22 bp, Artificial Sequence
  Synthetic oligonucleotide; CTC chr11 5150603 5150624 5150620 5150625 +
tctgaactccacatcctatgtg

SEQ ID NO: 70408 - DNA, 22 bp, Artificial Sequence
  Synthetic oligonucleotide; CTC chr11 5150605 5150626 5150622 5150627 +
tgaactccacatcctatgtgta

SEQ ID NO: 70409 - DNA, 22 bp, Artificial Sequence
  Synthetic oligonucleotide; CTG chr11 5150607 5150628 5150624 5150629 +
aactccacatcctatgtgtaca

SEQ ID NO: 70410 - DNA, 22 bp, Artificial Sequence
  Synthetic oligonucleotide; CTC chr11 5150612 5150633 5150629 5150634 +
cacatcctatgtgtacacttgt

SEQ ID NO: 70411 - DNA, 22 bp, Artificial Sequence
  Synthetic oligonucleotide; CTA chr11 5150621 5150642 5150638 5150643 +
tgtgtacacttgttatttctct

SEQ ID NO: 70412 - DNA, 22 bp, Artificial Sequence
  Synthetic oligonucleotide; CTT chr11 5150632 5150653 5150649 5150654 +
gttatttctctcttctttccct

SEQ ID NO: 70413 - DNA, 22 bp, Artificial Sequence
  Synthetic oligonucleotide; TTG chr11 5150633 5150654 5150650 5150655 +
ttatttctctcttctttccctt

SEQ ID NO: 70414 - DNA, 22 bp, Artificial Sequence
  Synthetic oligonucleotide; TTA chr11 5150636 5150657 5150653 5150658 +
tttctctcttctttcccttgcc

SEQ ID NO: 70415 - DNA, 22 bp, Artificial Sequence
  Synthetic oligonucleotide; TTT chr11 5150639 5150660 5150656 5150661 +
ctctcttctttcccttgcctgc

SEQ ID NO: 70416 - DNA, 22 bp, Artificial Sequence
  Synthetic oligonucleotide; TTC chr11 5150640 5150661 5150657 5150662 +
tctcttctttcccttgcctgcc

SEQ ID NO: 70417 - DNA, 22 bp, Artificial Sequence
  Synthetic oligonucleotide; CTC chr11 5150642 5150663 5150659 5150664 +
tcttctttcccttgcctgccca

SEQ ID NO: 70418 - DNA, 22 bp, Artificial Sequence
  Synthetic oligonucleotide; CTC chr11 5150644 5150665 5150661 5150666 +
ttctttcccttgcctgcccatt

SEQ ID NO: 70419 - DNA, 22 bp, Artificial Sequence
  Synthetic oligonucleotide; CTT chr11 5150646 5150667 5150663 5150668 +
ctttcccttgcctgcccattcc

SEQ ID NO: 70420 - DNA, 22 bp, Artificial Sequence
  Synthetic oligonucleotide; TTC chr11 5150647 5150668 5150664 5150669 +
tttcccttgcctgcccattccc

SEQ ID NO: 70421 - DNA, 22 bp, Artificial Sequence
  Synthetic oligonucleotide; CTT chr11 5150649 5150670 5150666 5150671 +
tcccttgcctgcccattcccca

SEQ ID NO: 70422 - DNA, 22 bp, Artificial Sequence
  Synthetic oligonucleotide; TTT chr11 5150650 5150671 5150667 5150672 +
cccttgcctgcccattccccac

SEQ ID NO: 70423 - DNA, 22 bp, Artificial Sequence
  Synthetic oligonucleotide; TTC chr11 5150651 5150672 5150668 5150673 +
ccttgcctgcccattccccacc

SEQ ID NO: 70424 - DNA, 22 bp, Artificial Sequence
  Synthetic oligonucleotide; CTT chr11 5150655 5150676 5150672 5150677 +
gcctgcccattccccacctctc

SEQ ID NO: 70425 - DNA, 22 bp, Artificial Sequence
  Synthetic oligonucleotide; TTG chr11 5150656 5150677 5150673 5150678 +
cctgcccattccccacctctct

SEQ ID NO: 70426 - DNA, 22 bp, Artificial Sequence
  Synthetic oligonucleotide; CTG chr11 5150660 5150681 5150677 5150682 +
cccattccccacctctcttcct

SEQ ID NO: 70427 - DNA, 22 bp, Artificial Sequence
  Synthetic oligonucleotide; TTC chr11 5150667 5150688 5150684 5150689 +
cccacctctcttcctttcagtc

SEQ ID NO: 70428 - DNA, 22 bp, Artificial Sequence
  Synthetic oligonucleotide; CTC chr11 5150675 5150696 5150692 5150697 +
tcttcctttcagtctctctttt

SEQ ID NO: 70429 - DNA, 22 bp, Artificial Sequence
  Synthetic oligonucleotide; CTC chr11 5150677 5150698 5150694 5150699 +
ttcctttcagtctctcttttcc

SEQ ID NO: 70430 - DNA, 22 bp, Artificial Sequence
  Synthetic oligonucleotide; CTT chr11 5150679 5150700 5150696 5150701 +
cctttcagtctctcttttccag

SEQ ID NO: 70431 - DNA, 22 bp, Artificial Sequence
  Synthetic oligonucleotide; TTC chr11 5150680 5150701 5150697 5150702 +
ctttcagtctctcttttccaga

SEQ ID NO: 70432 - DNA, 22 bp, Artificial Sequence
  Synthetic oligonucleotide; CTT chr11 5150683 5150704 5150700 5150705 +
tcagtctctcttttccagaatt

SEQ ID NO: 70433 - DNA, 22 bp, Artificial Sequence
  Synthetic oligonucleotide; TTT chr11 5150684 5150705 5150701 5150706 +
cagtctctcttttccagaatta

SEQ ID NO: 70434 - DNA, 22 bp, Artificial Sequence
  Synthetic oligonucleotide; TTC chr11 5150685 5150706 5150702 5150707 +
agtctctcttttccagaattac

SEQ ID NO: 70435 - DNA, 22 bp, Artificial Sequence
  Synthetic oligonucleotide; CTC chr11 5150691 5150712 5150708 5150713 +
tcttttccagaattacataggt

SEQ ID NO: 70436 - DNA, 22 bp, Artificial Sequence
  Synthetic oligonucleotide; CTC chr11 5150693 5150714 5150710 5150715 +
ttttccagaattacataggtac

SEQ ID NO: 70437 - DNA, 22 bp, Artificial Sequence
  Synthetic oligonucleotide; CTT chr11 5150695 5150716 5150712 5150717 +
ttccagaattacataggtacaa

SEQ ID NO: 70438 - DNA, 22 bp, Artificial Sequence
  Synthetic oligonucleotide; TTT chr11 5150696 5150717 5150713 5150718 +
tccagaattacataggtacaaa

SEQ ID NO: 70439 - DNA, 22 bp, Artificial Sequence
  Synthetic oligonucleotide; TTT chr11 5150697 5150718 5150714 5150719 +
ccagaattacataggtacaaac

SEQ ID NO: 70440 - DNA, 22 bp, Artificial Sequence
  Synthetic oligonucleotide; TTC chr11 5150698 5150719 5150715 5150720 +
cagaattacataggtacaaact

SEQ ID NO: 70441 - DNA, 22 bp, Artificial Sequence
  Synthetic oligonucleotide; TTA chr11 5150706 5150727 5150723 5150728 +
cataggtacaaactcatgagaa

SEQ ID NO: 70442 - DNA, 22 bp, Artificial Sequence
  Synthetic oligonucleotide; CTC chr11 5150721 5150742 5150738 5150743 +
atgagaattattcactgtgcca

SEQ ID NO: 70443 - DNA, 22 bp, Artificial Sequence
  Synthetic oligonucleotide; TTA chr11 5150731 5150752 5150748 5150753 +
ttcactgtgccagatttactat

SEQ ID NO: 70444 - DNA, 22 bp, Artificial Sequence
  Synthetic oligonucleotide; TTC chr11 5150734 5150755 5150751 5150756 +
actgtgccagatttactattat

SEQ ID NO: 70445 - DNA, 22 bp, Artificial Sequence
  Synthetic oligonucleotide; CTG chr11 5150738 5150759 5150755 5150760 +
tgccagatttactattatgtca

SEQ ID NO: 70446 - DNA, 22 bp, Artificial Sequence
  Synthetic oligonucleotide; TTT chr11 5150748 5150769 5150765 5150770 +
actattatgtcacgattctgta

SEQ ID NO: 70447 - DNA, 22 bp, Artificial Sequence
  Synthetic oligonucleotide; TTA chr11 5150749 5150770 5150766 5150771 +
ctattatgtcacgattctgtag

SEQ ID NO: 70448 - DNA, 22 bp, Artificial Sequence
  Synthetic oligonucleotide; CTA chr11 5150752 5150773 5150769 5150774 +
ttatgtcacgattctgtagtat

SEQ ID NO: 70449 - DNA, 22 bp, Artificial Sequence
  Synthetic oligonucleotide; TTA chr11 5150755 5150776 5150772 5150777 +
tgtcacgattctgtagtatagt

SEQ ID NO: 70450 - DNA, 22 bp, Artificial Sequence
  Synthetic oligonucleotide; TTC chr11 5150766 5150787 5150783 5150788 +
tgtagtatagtatttttaatat

SEQ ID NO: 70451 - DNA, 22 bp, Artificial Sequence
  Synthetic oligonucleotide; CTG chr11 5150768 5150789 5150785 5150790 +
tagtatagtatttttaatattg

SEQ ID NO: 70452 - DNA, 22 bp, Artificial Sequence
  Synthetic oligonucleotide; TTT chr11 5150781 5150802 5150798 5150803 +
ttaatattgcaggtttttgata

SEQ ID NO: 70453 - DNA, 22 bp, Artificial Sequence
  Synthetic oligonucleotide; TTT chr11 5150782 5150803 5150799 5150804 +
taatattgcaggtttttgataa

SEQ ID NO: 70454 - DNA, 22 bp, Artificial Sequence
  Synthetic oligonucleotide; TTT chr11 5150783 5150804 5150800 5150805 +
aatattgcaggtttttgataaa

SEQ ID NO: 70455 - DNA, 22 bp, Artificial Sequence
  Synthetic oligonucleotide; TTA chr11 5150784 5150805 5150801 5150806 +
atattgcaggtttttgataaaa

SEQ ID NO: 70456 - DNA, 22 bp, Artificial Sequence
  Synthetic oligonucleotide; TTG chr11 5150790 5150811 5150807 5150812 +
caggtttttgataaaatgatga

SEQ ID NO: 70457 - DNA, 22 bp, Artificial Sequence
  Synthetic oligonucleotide; TTT chr11 5150797 5150818 5150814 5150819 +
ttgataaaatgatgaattaata

SEQ ID NO: 70458 - DNA, 22 bp, Artificial Sequence
  Synthetic oligonucleotide; TTT chr11 5150798 5150819 5150815 5150820 +
tgataaaatgatgaattaataa

SEQ ID NO: 70459 - DNA, 22 bp, Artificial Sequence
  Synthetic oligonucleotide; TTT chr11 5150799 5150820 5150816 5150821 +
gataaaatgatgaattaataaa

SEQ ID NO: 70460 - DNA, 22 bp, Artificial Sequence
  Synthetic oligonucleotide; TTG chr11 5150800 5150821 5150817 5150822 +
ataaaatgatgaattaataaag

SEQ ID NO: 70461 - DNA, 22 bp, Artificial Sequence
  Synthetic oligonucleotide; TTA chr11 5150816 5150837 5150833 5150838 +
ataaagaagtaaattttgaggt

SEQ ID NO: 70462 - DNA, 22 bp, Artificial Sequence
  Synthetic oligonucleotide; TTT chr11 5150832 5150853 5150849 5150854 +
tgaggttagcaaaaaaaaaaac

SEQ ID NO: 70463 - DNA, 22 bp, Artificial Sequence
  Synthetic oligonucleotide; TTT chr11 5150833 5150854 5150850 5150855 +
gaggttagcaaaaaaaaaaaca

SEQ ID NO: 70464 - DNA, 22 bp, Artificial Sequence
  Synthetic oligonucleotide; TTG chr11 5150834 5150855 5150851 5150856 +
aggttagcaaaaaaaaaaacaa

SEQ ID NO: 70465 - DNA, 22 bp, Artificial Sequence
  Synthetic oligonucleotide; TTA chr11 5150840 5150861 5150857 5150862 +
gcaaaaaaaaaaacaacaacat

SEQ ID NO: 70466 - DNA, 22 bp, Artificial Sequence
  Synthetic oligonucleotide; TTG chr11 5150864 5150885 5150881 5150886 +
atgtgtcaaatgcaacacctgg

SEQ ID NO: 70467 - DNA, 22 bp, Artificial Sequence
  Synthetic oligonucleotide; CTG chr11 5150885 5150906 5150902 5150907 +
gttctaatttttgtgcctgtaa

SEQ ID NO: 70468 - DNA, 22 bp, Artificial Sequence
  Synthetic oligonucleotide; TTC chr11 5150889 5150910 5150906 5150911 +
taatttttgtgcctgtaattcc

SEQ ID NO: 70469 - DNA, 22 bp, Artificial Sequence
  Synthetic oligonucleotide; CTA chr11 5150891 5150912 5150908 5150913 +
atttttgtgcctgtaattcctt

SEQ ID NO: 70470 - DNA, 22 bp, Artificial Sequence
  Synthetic oligonucleotide; TTT chr11 5150895 5150916 5150912 5150917 +
ttgtgcctgtaattccttgtat

SEQ ID NO: 70471 - DNA, 22 bp, Artificial Sequence
  Synthetic oligonucleotide; TTT chr11 5150896 5150917 5150913 5150918 +
tgtgcctgtaattccttgtatg

SEQ ID NO: 70472 - DNA, 22 bp, Artificial Sequence
  Synthetic oligonucleotide; TTT chr11 5150897 5150918 5150914 5150919 +
gtgcctgtaattccttgtatga

SEQ ID NO: 70473 - DNA, 22 bp, Artificial Sequence
  Synthetic oligonucleotide; TTG chr11 5150898 5150919 5150915 5150920 +
tgcctgtaattccttgtatgac

SEQ ID NO: 70474 - DNA, 22 bp, Artificial Sequence
  Synthetic oligonucleotide; CTG chr11 5150904 5150925 5150921 5150926 +
taattccttgtatgactctgaa

SEQ ID NO: 70475 - DNA, 22 bp, Artificial Sequence
  Synthetic oligonucleotide; TTC chr11 5150910 5150931 5150927 5150932 +
cttgtatgactctgaaaatgta

SEQ ID NO: 70476 - DNA, 22 bp, Artificial Sequence
  Synthetic oligonucleotide; CTT chr11 5150913 5150934 5150930 5150935 +
gtatgactctgaaaatgtattt

SEQ ID NO: 70477 - DNA, 22 bp, Artificial Sequence
  Synthetic oligonucleotide; TTG chr11 5150914 5150935 5150931 5150936 +
tatgactctgaaaatgtattta

SEQ ID NO: 70478 - DNA, 22 bp, Artificial Sequence
  Synthetic oligonucleotide; CTC chr11 5150922 5150943 5150939 5150944 +
tgaaaatgtatttaaattttta

SEQ ID NO: 70479 - DNA, 22 bp, Artificial Sequence
  Synthetic oligonucleotide; CTG chr11 5150924 5150945 5150941 5150946 +
aaaatgtatttaaatttttagg

SEQ ID NO: 70480 - DNA, 22 bp, Artificial Sequence
  Synthetic oligonucleotide; TTT chr11 5150935 5150956 5150952 5150957 +
aaatttttaggctttattgtct

SEQ ID NO: 70481 - DNA, 22 bp, Artificial Sequence
  Synthetic oligonucleotide; TTA chr11 5150936 5150957 5150953 5150958 +
aatttttaggctttattgtctc

SEQ ID NO: 70482 - DNA, 22 bp, Artificial Sequence
  Synthetic oligonucleotide; TTT chr11 5150941 5150962 5150958 5150963 +
ttaggctttattgtctcttgat

SEQ ID NO: 70483 - DNA, 22 bp, Artificial Sequence
  Synthetic oligonucleotide; TTT chr11 5150942 5150963 5150959 5150964 +
taggctttattgtctcttgata

SEQ ID NO: 70484 - DNA, 22 bp, Artificial Sequence
  Synthetic oligonucleotide; TTT chr11 5150943 5150964 5150960 5150965 +
aggctttattgtctcttgatat

SEQ ID NO: 70485 - DNA, 22 bp, Artificial Sequence
  Synthetic oligonucleotide; TTA chr11 5150944 5150965 5150961 5150966 +
ggctttattgtctcttgatatt

SEQ ID NO: 70486 - DNA, 22 bp, Artificial Sequence
  Synthetic oligonucleotide; CTT chr11 5150949 5150970 5150966 5150971 +
tattgtctcttgatattcataa

SEQ ID NO: 70487 - DNA, 22 bp, Artificial Sequence
  Synthetic oligonucleotide; TTT chr11 5150950 5150971 5150967 5150972 +
attgtctcttgatattcataag

SEQ ID NO: 70488 - DNA, 22 bp, Artificial Sequence
  Synthetic oligonucleotide; TTA chr11 5150951 5150972 5150968 5150973 +
ttgtctcttgatattcataaga

SEQ ID NO: 70489 - DNA, 22 bp, Artificial Sequence
  Synthetic oligonucleotide; TTG chr11 5150954 5150975 5150971 5150976 +
tctcttgatattcataagattt

SEQ ID NO: 70490 - DNA, 22 bp, Artificial Sequence
  Synthetic oligonucleotide; CTC chr11 5150958 5150979 5150975 5150980 +
ttgatattcataagattttctt

SEQ ID NO: 70491 - DNA, 22 bp, Artificial Sequence
  Synthetic oligonucleotide; CTT chr11 5150960 5150981 5150977 5150982 +
gatattcataagattttctttg

SEQ ID NO: 70492 - DNA, 22 bp, Artificial Sequence
  Synthetic oligonucleotide; TTG chr11 5150961 5150982 5150978 5150983 +
atattcataagattttctttga

SEQ ID NO: 70493 - DNA, 22 bp, Artificial Sequence
  Synthetic oligonucleotide; TTC chr11 5150967 5150988 5150984 5150989 +
ataagattttctttgacaagaa

SEQ ID NO: 70494 - DNA, 22 bp, Artificial Sequence
  Synthetic oligonucleotide; TTT chr11 5150976 5150997 5150993 5150998 +
tctttgacaagaacacagttaa

SEQ ID NO: 70495 - DNA, 22 bp, Artificial Sequence
  Synthetic oligonucleotide; TTT chr11 5150977 5150998 5150994 5150999 +
ctttgacaagaacacagttaac

SEQ ID NO: 70496 - DNA, 22 bp, Artificial Sequence
  Synthetic oligonucleotide; TTC chr11 5150978 5150999 5150995 5151000 +
tttgacaagaacacagttaaca

SEQ ID NO: 70497 - DNA, 22 bp, Artificial Sequence
  Synthetic oligonucleotide; CTT chr11 5150980 5151001 5150997 5151002 +
tgacaagaacacagttaacatg

SEQ ID NO: 70498 - DNA, 22 bp, Artificial Sequence
  Synthetic oligonucleotide; TTT chr11 5150981 5151002 5150998 5151003 +
gacaagaacacagttaacatgt

SEQ ID NO: 70499 - DNA, 22 bp, Artificial Sequence
  Synthetic oligonucleotide; TTG chr11 5150982 5151003 5150999 5151004 +
acaagaacacagttaacatgta

SEQ ID NO: 70500 - DNA, 22 bp, Artificial Sequence
  Synthetic oligonucleotide; TTA chr11 5150997 5151018 5151014 5151019 +
acatgtacttcctttgattttt

SEQ ID NO: 70501 - DNA, 22 bp, Artificial Sequence
  Synthetic oligonucleotide; CTT chr11 5151007 5151028 5151024 5151029 +
cctttgatttttttttttaagg

SEQ ID NO: 70502 - DNA, 22 bp, Artificial Sequence
  Synthetic oligonucleotide; TTC chr11 5151008 5151029 5151025 5151030 +
ctttgatttttttttttaaggc

SEQ ID NO: 70503 - DNA, 22 bp, Artificial Sequence
  Synthetic oligonucleotide; CTT chr11 5151011 5151032 5151028 5151033 +
tgatttttttttttaaggcagg

SEQ ID NO: 70504 - DNA, 22 bp, Artificial Sequence
  Synthetic oligonucleotide; TTT chr11 5151012 5151033 5151029 5151034 +
gatttttttttttaaggcaggg

SEQ ID NO: 70505 - DNA, 22 bp, Artificial Sequence
  Synthetic oligonucleotide; TTG chr11 5151013 5151034 5151030 5151035 +
atttttttttttaaggcaggga

SEQ ID NO: 70506 - DNA, 22 bp, Artificial Sequence
  Synthetic oligonucleotide; TTT chr11 5151017 5151038 5151034 5151039 +
ttttttttaaggcagggatgat

SEQ ID NO: 70507 - DNA, 22 bp, Artificial Sequence
  Synthetic oligonucleotide; TTT chr11 5151018 5151039 5151035 5151040 +
tttttttaaggcagggatgatc

SEQ ID NO: 70508 - DNA, 22 bp, Artificial Sequence
  Synthetic oligonucleotide; TTT chr11 5151019 5151040 5151036 5151041 +
ttttttaaggcagggatgatca

SEQ ID NO: 70509 - DNA, 22 bp, Artificial Sequence
  Synthetic oligonucleotide; TTT chr11 5151020 5151041 5151037 5151042 +
tttttaaggcagggatgatcaa

SEQ ID NO: 70510 - DNA, 22 bp, Artificial Sequence
  Synthetic oligonucleotide; TTT chr11 5151021 5151042 5151038 5151043 +
ttttaaggcagggatgatcaag

SEQ ID NO: 70511 - DNA, 22 bp, Artificial Sequence
  Synthetic oligonucleotide; TTT chr11 5151022 5151043 5151039 5151044 +
tttaaggcagggatgatcaaga

SEQ ID NO: 70512 - DNA, 22 bp, Artificial Sequence
  Synthetic oligonucleotide; TTT chr11 5151023 5151044 5151040 5151045 +
ttaaggcagggatgatcaagaa

SEQ ID NO: 70513 - DNA, 22 bp, Artificial Sequence
  Synthetic oligonucleotide; TTT chr11 5151024 5151045 5151041 5151046 +
taaggcagggatgatcaagaaa

SEQ ID NO: 70514 - DNA, 22 bp, Artificial Sequence
  Synthetic oligonucleotide; TTT chr11 5151025 5151046 5151042 5151047 +
aaggcagggatgatcaagaaaa

SEQ ID NO: 70515 - DNA, 22 bp, Artificial Sequence
  Synthetic oligonucleotide; TTA chr11 5151026 5151047 5151043 5151048 +
aggcagggatgatcaagaaaat

SEQ ID NO: 70516 - DNA, 22 bp, Artificial Sequence
  Synthetic oligonucleotide; CTT chr11 5151063 5151084 5151080 5151085 +
gttttcattgagtccctggatg

SEQ ID NO: 70517 - DNA, 22 bp, Artificial Sequence
  Synthetic oligonucleotide; TTG chr11 5151064 5151085 5151081 5151086 +
ttttcattgagtccctggatgt

SEQ ID NO: 70518 - DNA, 22 bp, Artificial Sequence
  Synthetic oligonucleotide; TTT chr11 5151067 5151088 5151084 5151089 +
tcattgagtccctggatgtttc

SEQ ID NO: 70519 - DNA, 22 bp, Artificial Sequence
  Synthetic oligonucleotide; TTT chr11 5151068 5151089 5151085 5151090 +
cattgagtccctggatgtttca

SEQ ID NO: 70520 - DNA, 22 bp, Artificial Sequence
  Synthetic oligonucleotide; TTC chr11 5151069 5151090 5151086 5151091 +
attgagtccctggatgtttcag

SEQ ID NO: 70521 - DNA, 22 bp, Artificial Sequence
  Synthetic oligonucleotide; TTG chr11 5151073 5151094 5151090 5151095 +
agtccctggatgtttcagaaca

SEQ ID NO: 70522 - DNA, 22 bp, Artificial Sequence
  Synthetic oligonucleotide; CTG chr11 5151081 5151102 5151098 5151103 +
gatgtttcagaacaacgagcct

SEQ ID NO: 70523 - DNA, 22 bp, Artificial Sequence
  Synthetic oligonucleotide; TTT chr11 5151088 5151109 5151105 5151110 +
cagaacaacgagccttaggtgc

SEQ ID NO: 70524 - DNA, 22 bp, Artificial Sequence
  Synthetic oligonucleotide; TTC chr11 5151089 5151110 5151106 5151111 +
agaacaacgagccttaggtgca

SEQ ID NO: 70525 - DNA, 22 bp, Artificial Sequence
  Synthetic oligonucleotide; CTT chr11 5151104 5151125 5151121 5151126 +
aggtgcatttaaattcagtgac

SEQ ID NO: 70526 - DNA, 22 bp, Artificial Sequence
  Synthetic oligonucleotide; TTA chr11 5151105 5151126 5151122 5151127 +
ggtgcatttaaattcagtgaca

SEQ ID NO: 70527 - DNA, 22 bp, Artificial Sequence
  Synthetic oligonucleotide; TTT chr11 5151114 5151135 5151131 5151136 +
aaattcagtgacaaaggcataa

SEQ ID NO: 70528 - DNA, 22 bp, Artificial Sequence
  Synthetic oligonucleotide; TTA chr11 5151115 5151136 5151132 5151137 +
aattcagtgacaaaggcataat

SEQ ID NO: 70529 - DNA, 22 bp, Artificial Sequence
  Synthetic oligonucleotide; TTC chr11 5151120 5151141 5151137 5151142 +
agtgacaaaggcataatttata

SEQ ID NO: 70530 - DNA, 22 bp, Artificial Sequence
  Synthetic oligonucleotide; TTT chr11 5151139 5151160 5151156 5151161 +
ataaatcctcctggagaaatat

SEQ ID NO: 70531 - DNA, 22 bp, Artificial Sequence
  Synthetic oligonucleotide; TTA chr11 5151140 5151161 5151157 5151162 +
taaatcctcctggagaaatatt

SEQ ID NO: 70532 - DNA, 22 bp, Artificial Sequence
  Synthetic oligonucleotide; CTC chr11 5151149 5151170 5151166 5151171 +
ctggagaaatattcttagaaga

SEQ ID NO: 70533 - DNA, 22 bp, Artificial Sequence
  Synthetic oligonucleotide; CTG chr11 5151152 5151173 5151169 5151174 +
gagaaatattcttagaagaata

SEQ ID NO: 70534 - DNA, 22 bp, Artificial Sequence
  Synthetic oligonucleotide; TTC chr11 5151163 5151184 5151180 5151185 +
ttagaagaataactcaaccagg

SEQ ID NO: 70535 - DNA, 22 bp, Artificial Sequence
  Synthetic oligonucleotide; CTT chr11 5151165 5151186 5151182 5151187 +
agaagaataactcaaccagggg

SEQ ID NO: 70536 - DNA, 22 bp, Artificial Sequence
  Synthetic oligonucleotide; TTA chr11 5151166 5151187 5151183 5151188 +
gaagaataactcaaccaggggc

SEQ ID NO: 70537 - DNA, 22 bp, Artificial Sequence
  Synthetic oligonucleotide; CTC chr11 5151178 5151199 5151195 5151200 +
aaccaggggctaaagaataaaa

SEQ ID NO: 70538 - DNA, 22 bp, Artificial Sequence
  Synthetic oligonucleotide; CTA chr11 5151190 5151211 5151207 5151212 +
aagaataaaagagaaaaaataa

SEQ ID NO: 70539 - DNA, 22 bp, Artificial Sequence
  Synthetic oligonucleotide; TTC chr11 5151221 5151242 5151238 5151243 +
actacttcactcatttcacact

SEQ ID NO: 70540 - DNA, 22 bp, Artificial Sequence
  Synthetic oligonucleotide; CTA chr11 5151225 5151246 5151242 5151247 +
cttcactcatttcacacttctc

SEQ ID NO: 70541 - DNA, 22 bp, Artificial Sequence
  Synthetic oligonucleotide; CTT chr11 5151228 5151249 5151245 5151250 +
cactcatttcacacttctcact

SEQ ID NO: 70542 - DNA, 22 bp, Artificial Sequence
  Synthetic oligonucleotide; TTC chr11 5151229 5151250 5151246 5151251 +
actcatttcacacttctcactt

SEQ ID NO: 70543 - DNA, 22 bp, Artificial Sequence
  Synthetic oligonucleotide; CTC chr11 5151233 5151254 5151250 5151255 +
atttcacacttctcactttcat

SEQ ID NO: 70544 - DNA, 22 bp, Artificial Sequence
  Synthetic oligonucleotide; TTT chr11 5151237 5151258 5151254 5151259 +
cacacttctcactttcattagt

SEQ ID NO: 70545 - DNA, 22 bp, Artificial Sequence
  Synthetic oligonucleotide; TTC chr11 5151238 5151259 5151255 5151260 +
acacttctcactttcattagtc

SEQ ID NO: 70546 - DNA, 22 bp, Artificial Sequence
  Synthetic oligonucleotide; CTT chr11 5151244 5151265 5151261 5151266 +
ctcactttcattagtcacgtag

SEQ ID NO: 70547 - DNA, 22 bp, Artificial Sequence
  Synthetic oligonucleotide; TTC chr11 5151245 5151266 5151262 5151267 +
tcactttcattagtcacgtaga

SEQ ID NO: 70548 - DNA, 22 bp, Artificial Sequence
  Synthetic oligonucleotide; CTC chr11 5151247 5151268 5151264 5151269 +
actttcattagtcacgtagaat

SEQ ID NO: 70549 - DNA, 22 bp, Artificial Sequence
  Synthetic oligonucleotide; CTT chr11 5151251 5151272 5151268 5151273 +
tcattagtcacgtagaattcac

SEQ ID NO: 70550 - DNA, 22 bp, Artificial Sequence
  Synthetic oligonucleotide; TTT chr11 5151252 5151273 5151269 5151274 +
cattagtcacgtagaattcaca

SEQ ID NO: 70551 - DNA, 22 bp, Artificial Sequence
  Synthetic oligonucleotide; TTC chr11 5151253 5151274 5151270 5151275 +
attagtcacgtagaattcacaa

SEQ ID NO: 70552 - DNA, 22 bp, Artificial Sequence
  Synthetic oligonucleotide; TTA chr11 5151257 5151278 5151274 5151279 +
gtcacgtagaattcacaatccc

SEQ ID NO: 70553 - DNA, 22 bp, Artificial Sequence
  Synthetic oligonucleotide; TTC chr11 5151271 5151292 5151288 5151293 +
acaatcccactgattgatatga

SEQ ID NO: 70554 - DNA, 22 bp, Artificial Sequence
  Synthetic oligonucleotide; CTG chr11 5151283 5151304 5151300 5151305 +
attgatatgagccatgatgatc

SEQ ID NO: 70555 - DNA, 22 bp, Artificial Sequence
  Synthetic oligonucleotide; TTG chr11 5151287 5151308 5151304 5151309 +
atatgagccatgatgatctaaa

SEQ ID NO: 70556 - DNA, 22 bp, Artificial Sequence
  Synthetic oligonucleotide; CTA chr11 5151307 5151328 5151324 5151329 +
aaaccagctattgtgctggcag

SEQ ID NO: 70557 - DNA, 22 bp, Artificial Sequence
  Synthetic oligonucleotide; CTA chr11 5151317 5151338 5151334 5151339 +
ttgtgctggcagatttcacaaa

SEQ ID NO: 70558 - DNA, 22 bp, Artificial Sequence
  Synthetic oligonucleotide; TTG chr11 5151320 5151341 5151337 5151342 +
tgctggcagatttcacaaaccc

SEQ ID NO: 70559 - DNA, 22 bp, Artificial Sequence
  Synthetic oligonucleotide; CTG chr11 5151325 5151346 5151342 5151347 +
gcagatttcacaaacccagcat

SEQ ID NO: 70560 - DNA, 22 bp, Artificial Sequence
  Synthetic oligonucleotide; TTT chr11 5151333 5151354 5151350 5151355 +
cacaaacccagcatctcaaata

SEQ ID NO: 70561 - DNA, 22 bp, Artificial Sequence
  Synthetic oligonucleotide; TTC chr11 5151334 5151355 5151351 5151356 +
acaaacccagcatctcaaataa

SEQ ID NO: 70562 - DNA, 22 bp, Artificial Sequence
  Synthetic oligonucleotide; CTC chr11 5151350 5151371 5151367 5151372 +
aaataatatgttttttgttttg

SEQ ID NO: 70563 - DNA, 22 bp, Artificial Sequence
  Synthetic oligonucleotide; TTT chr11 5151363 5151384 5151380 5151385 +
tttgttttgttttgatatggtt

SEQ ID NO: 70564 - DNA, 22 bp, Artificial Sequence
  Synthetic oligonucleotide; TTT chr11 5151364 5151385 5151381 5151386 +
ttgttttgttttgatatggtta

SEQ ID NO: 70565 - DNA, 22 bp, Artificial Sequence
  Synthetic oligonucleotide; TTT chr11 5151365 5151386 5151382 5151387 +
tgttttgttttgatatggttac

SEQ ID NO: 70566 - DNA, 22 bp, Artificial Sequence
  Synthetic oligonucleotide; TTT chr11 5151366 5151387 5151383 5151388 +
gttttgttttgatatggttact

SEQ ID NO: 70567 - DNA, 22 bp, Artificial Sequence
  Synthetic oligonucleotide; TTG chr11 5151367 5151388 5151384 5151389 +
ttttgttttgatatggttacta

SEQ ID NO: 70568 - DNA, 22 bp, Artificial Sequence
  Synthetic oligonucleotide; TTT chr11 5151370 5151391 5151387 5151392 +
tgttttgatatggttactactg

SEQ ID NO: 70569 - DNA, 22 bp, Artificial Sequence
  Synthetic oligonucleotide; TTT chr11 5151371 5151392 5151388 5151393 +
gttttgatatggttactactgc

SEQ ID NO: 70570 - DNA, 22 bp, Artificial Sequence
  Synthetic oligonucleotide; TTG chr11 5151372 5151393 5151389 5151394 +
ttttgatatggttactactgca

SEQ ID NO: 70571 - DNA, 22 bp, Artificial Sequence
  Synthetic oligonucleotide; TTT chr11 5151375 5151396 5151392 5151397 +
tgatatggttactactgcaaaa

SEQ ID NO: 70572 - DNA, 22 bp, Artificial Sequence
  Synthetic oligonucleotide; TTT chr11 5151376 5151397 5151393 5151398 +
gatatggttactactgcaaaag

SEQ ID NO: 70573 - DNA, 22 bp, Artificial Sequence
  Synthetic oligonucleotide; TTG chr11 5151377 5151398 5151394 5151399 +
atatggttactactgcaaaaga

SEQ ID NO: 70574 - DNA, 22 bp, Artificial Sequence
  Synthetic oligonucleotide; TTA chr11 5151386 5151407 5151403 5151408 +
ctactgcaaaagaaaaaagcat

SEQ ID NO: 70575 - DNA, 22 bp, Artificial Sequence
  Synthetic oligonucleotide; CTA chr11 5151389 5151410 5151406 5151411 +
ctgcaaaagaaaaaagcatgta

SEQ ID NO: 70576 - DNA, 22 bp, Artificial Sequence
  Synthetic oligonucleotide; CTG chr11 5151392 5151413 5151409 5151414 +
caaaagaaaaaagcatgtaggc

SEQ ID NO: 70577 - DNA, 22 bp, Artificial Sequence
  Synthetic oligonucleotide; TTA chr11 5151418 5151439 5151435 5151440 +
attaaggtggattttatgaaca

SEQ ID NO: 70578 - DNA, 22 bp, Artificial Sequence
  Synthetic oligonucleotide; TTA chr11 5151422 5151443 5151439 5151444 +
aggtggattttatgaacagaac

SEQ ID NO: 70579 - DNA, 22 bp, Artificial Sequence
  Synthetic oligonucleotide; TTT chr11 5151432 5151453 5151449 5151454 +
tatgaacagaacatttttacca

SEQ ID NO: 70580 - DNA, 22 bp, Artificial Sequence
  Synthetic oligonucleotide; TTT chr11 5151433 5151454 5151450 5151455 +
atgaacagaacatttttaccac

SEQ ID NO: 70581 - DNA, 22 bp, Artificial Sequence
  Synthetic oligonucleotide; TTA chr11 5151434 5151455 5151451 5151456 +
tgaacagaacatttttaccaca

SEQ ID NO: 70582 - DNA, 22 bp, Artificial Sequence
  Synthetic oligonucleotide; TTT chr11 5151448 5151469 5151465 5151470 +
ttaccacatgaatgcgaatctg

SEQ ID NO: 70583 - DNA, 22 bp, Artificial Sequence
  Synthetic oligonucleotide; TTT chr11 5151449 5151470 5151466 5151471 +
taccacatgaatgcgaatctgt

SEQ ID NO: 70584 - DNA, 22 bp, Artificial Sequence
  Synthetic oligonucleotide; TTT chr11 5151450 5151471 5151467 5151472 +
accacatgaatgcgaatctgtg

SEQ ID NO: 70585 - DNA, 22 bp, Artificial Sequence
  Synthetic oligonucleotide; TTA chr11 5151451 5151472 5151468 5151473 +
ccacatgaatgcgaatctgtgt

SEQ ID NO: 70586 - DNA, 22 bp, Artificial Sequence
  Synthetic oligonucleotide; CTG chr11 5151470 5151491 5151487 5151492 +
tgtggtctttgcaccatagaca

SEQ ID NO: 70587 - DNA, 22 bp, Artificial Sequence
  Synthetic oligonucleotide; CTT chr11 5151479 5151500 5151496 5151501 +
tgcaccatagacaagtggattg

SEQ ID NO: 70588 - DNA, 22 bp, Artificial Sequence
  Synthetic oligonucleotide; TTT chr11 5151480 5151501 5151497 5151502 +
gcaccatagacaagtggattga

SEQ ID NO: 70589 - DNA, 22 bp, Artificial Sequence
  Synthetic oligonucleotide; TTG chr11 5151481 5151502 5151498 5151503 +
caccatagacaagtggattgag

SEQ ID NO: 70590 - DNA, 22 bp, Artificial Sequence
  Synthetic oligonucleotide; TTG chr11 5151501 5151522 5151518 5151523 +
agaaatggagggaccagcaagt

SEQ ID NO: 70591 - DNA, 22 bp, Artificial Sequence
  Synthetic oligonucleotide; CTA chr11 5151531 5151552 5151548 5151553 +
gaaaagagaatatggatataag

SEQ ID NO: 70592 - DNA, 22 bp, Artificial Sequence
  Synthetic oligonucleotide; CTA chr11 5151576 5151597 5151593 5151598 +
tgtgtgaagaaggagaagaagg

SEQ ID NO: 70593 - DNA, 22 bp, Artificial Sequence
  Synthetic oligonucleotide; CTG chr11 5151614 5151635 5151631 5151636 +
gaggaagacacagatgtgagca

SEQ ID NO: 70594 - DNA, 22 bp, Artificial Sequence
  Synthetic oligonucleotide; TTG chr11 5151648 5151669 5151665 5151670 +
aatgctttaaacctagcctcct

SEQ ID NO: 70595 - DNA, 22 bp, Artificial Sequence
  Synthetic oligonucleotide; CTT chr11 5151655 5151676 5151672 5151677 +
taaacctagcctccttctgggg

SEQ ID NO: 70596 - DNA, 22 bp, Artificial Sequence
  Synthetic oligonucleotide; TTT chr11 5151656 5151677 5151673 5151678 +
aaacctagcctccttctggggc

SEQ ID NO: 70597 - DNA, 22 bp, Artificial Sequence
  Synthetic oligonucleotide; TTA chr11 5151657 5151678 5151674 5151679 +
aacctagcctccttctggggca

SEQ ID NO: 70598 - DNA, 22 bp, Artificial Sequence
  Synthetic oligonucleotide; CTA chr11 5151663 5151684 5151680 5151685 +
gcctccttctggggcaaacgaa

SEQ ID NO: 70599 - DNA, 22 bp, Artificial Sequence
  Synthetic oligonucleotide; CTC chr11 5151668 5151689 5151685 5151690 +
cttctggggcaaacgaaaaact

SEQ ID NO: 70600 - DNA, 22 bp, Artificial Sequence
  Synthetic oligonucleotide; CTT chr11 5151671 5151692 5151688 5151693 +
ctggggcaaacgaaaaactgtg

SEQ ID NO: 70601 - DNA, 22 bp, Artificial Sequence
  Synthetic oligonucleotide; TTC chr11 5151672 5151693 5151689 5151694 +
tggggcaaacgaaaaactgtga

SEQ ID NO: 70602 - DNA, 22 bp, Artificial Sequence
  Synthetic oligonucleotide; CTG chr11 5151674 5151695 5151691 5151696 +
gggcaaacgaaaaactgtgata

SEQ ID NO: 70603 - DNA, 22 bp, Artificial Sequence
  Synthetic oligonucleotide; CTG chr11 5151691 5151712 5151708 5151713 +
tgataaatatctggatgtagga

SEQ ID NO: 70604 - DNA, 22 bp, Artificial Sequence
  Synthetic oligonucleotide; CTG chr11 5151704 5151725 5151721 5151726 +
gatgtaggacaatgtgatgaat

SEQ ID NO: 70605 - DNA, 22 bp, Artificial Sequence
  Synthetic oligonucleotide; CTG chr11 5151742 5151763 5151759 5151764 +
ctacagtgaaggccacaaacaa

SEQ ID NO: 70606 - DNA, 22 bp, Artificial Sequence
  Synthetic oligonucleotide; CTA chr11 5151745 5151766 5151762 5151767 +
cagtgaaggccacaaacaaacc

SEQ ID NO: 70607 - DNA, 22 bp, Artificial Sequence
  Synthetic oligonucleotide; TTT chr11 5151775 5151796 5151792 5151797 +
tgttgacttgaacatttgctgc

SEQ ID NO: 70608 - DNA, 22 bp, Artificial Sequence
  Synthetic oligonucleotide; TTT chr11 5151776 5151797 5151793 5151798 +
gttgacttgaacatttgctgct

SEQ ID NO: 70609 - DNA, 22 bp, Artificial Sequence
  Synthetic oligonucleotide; TTG chr11 5151777 5151798 5151794 5151799 +
ttgacttgaacatttgctgctg

SEQ ID NO: 70610 - DNA, 22 bp, Artificial Sequence
  Synthetic oligonucleotide; TTG chr11 5151780 5151801 5151797 5151802 +
acttgaacatttgctgctgcta

SEQ ID NO: 70611 - DNA, 22 bp, Artificial Sequence
  Synthetic oligonucleotide; CTT chr11 5151784 5151805 5151801 5151806 +
gaacatttgctgctgctagttt

SEQ ID NO: 70612 - DNA, 22 bp, Artificial Sequence
  Synthetic oligonucleotide; TTG chr11 5151785 5151806 5151802 5151807 +
aacatttgctgctgctagtttc

SEQ ID NO: 70613 - DNA, 22 bp, Artificial Sequence
  Synthetic oligonucleotide; TTT chr11 5151792 5151813 5151809 5151814 +
gctgctgctagtttcacaatgg

SEQ ID NO: 70614 - DNA, 22 bp, Artificial Sequence
  Synthetic oligonucleotide; TTG chr11 5151793 5151814 5151810 5151815 +
ctgctgctagtttcacaatggc

SEQ ID NO: 70615 - DNA, 22 bp, Artificial Sequence
  Synthetic oligonucleotide; CTG chr11 5151796 5151817 5151813 5151818 +
ctgctagtttcacaatggccat

SEQ ID NO: 70616 - DNA, 22 bp, Artificial Sequence
  Synthetic oligonucleotide; CTG chr11 5151799 5151820 5151816 5151821 +
ctagtttcacaatggccatatg

SEQ ID NO: 70617 - DNA, 22 bp, Artificial Sequence
  Synthetic oligonucleotide; CTA chr11 5151802 5151823 5151819 5151824 +
gtttcacaatggccatatgctc

SEQ ID NO: 70618 - DNA, 22 bp, Artificial Sequence
  Synthetic oligonucleotide; TTT chr11 5151806 5151827 5151823 5151828 +
cacaatggccatatgctcacag

SEQ ID NO: 70619 - DNA, 22 bp, Artificial Sequence
  Synthetic oligonucleotide; TTC chr11 5151807 5151828 5151824 5151829 +
acaatggccatatgctcacagt

SEQ ID NO: 70620 - DNA, 22 bp, Artificial Sequence
  Synthetic oligonucleotide; CTC chr11 5151824 5151845 5151841 5151846 +
acagtaggagtgggagatgact

SEQ ID NO: 70621 - DNA, 22 bp, Artificial Sequence
  Synthetic oligonucleotide; CTG chr11 5151847 5151868 5151864 5151869 +
ttgtgtgataaaattgaaaccg

SEQ ID NO: 70622 - DNA, 22 bp, Artificial Sequence
  Synthetic oligonucleotide; TTG chr11 5151850 5151871 5151867 5151872 +
tgtgataaaattgaaaccggca

SEQ ID NO: 70623 - DNA, 22 bp, Artificial Sequence
  Synthetic oligonucleotide; TTG chr11 5151863 5151884 5151880 5151885 +
aaaccggcactttatcagtact

SEQ ID NO: 70624 - DNA, 22 bp, Artificial Sequence
  Synthetic oligonucleotide; CTT chr11 5151875 5151896 5151892 5151897 +
tatcagtactaggcatggggct

SEQ ID NO: 70625 - DNA, 22 bp, Artificial Sequence
  Synthetic oligonucleotide; TTT chr11 5151876 5151897 5151893 5151898 +
atcagtactaggcatggggcta

SEQ ID NO: 70626 - DNA, 22 bp, Artificial Sequence
  Synthetic oligonucleotide; TTA chr11 5151877 5151898 5151894 5151899 +
tcagtactaggcatggggctac

SEQ ID NO: 70627 - DNA, 22 bp, Artificial Sequence
  Synthetic oligonucleotide; CTA chr11 5151886 5151907 5151903 5151908 +
ggcatggggctacaagaatagc

SEQ ID NO: 70628 - DNA, 22 bp, Artificial Sequence
  Synthetic oligonucleotide; CTA chr11 5151898 5151919 5151915 5151920 +
caagaatagcagccctgagtac

SEQ ID NO: 70629 - DNA, 22 bp, Artificial Sequence
  Synthetic oligonucleotide; CTG chr11 5151915 5151936 5151932 5151937 +
agtacgaccatagttcctatct

SEQ ID NO: 70630 - DNA, 22 bp, Artificial Sequence
  Synthetic oligonucleotide; TTC chr11 5151931 5151952 5151948 5151953 +
ctatctgaatgacaagctggtg

SEQ ID NO: 70631 - DNA, 22 bp, Artificial Sequence
  Synthetic oligonucleotide; CTA chr11 5151934 5151955 5151951 5151956 +
tctgaatgacaagctggtgggt

SEQ ID NO: 70632 - DNA, 22 bp, Artificial Sequence
  Synthetic oligonucleotide; CTG chr11 5151938 5151959 5151955 5151960 +
aatgacaagctggtgggtgaag

SEQ ID NO: 70633 - DNA, 22 bp, Artificial Sequence
  Synthetic oligonucleotide; CTG chr11 5151950 5151971 5151967 5151972 +
gtgggtgaagatgttggcatgt

SEQ ID NO: 70634 - DNA, 22 bp, Artificial Sequence
  Synthetic oligonucleotide; TTG chr11 5151966 5151987 5151983 5151988 +
gcatgtcttagtggataacaga

SEQ ID NO: 70635 - DNA, 22 bp, Artificial Sequence
  Synthetic oligonucleotide; CTT chr11 5151975 5151996 5151992 5151997 +
agtggataacagatggccacat

SEQ ID NO: 70636 - DNA, 22 bp, Artificial Sequence
  Synthetic oligonucleotide; TTA chr11 5151976 5151997 5151993 5151998 +
gtggataacagatggccacata

SEQ ID NO: 70637 - DNA, 22 bp, Artificial Sequence
  Synthetic oligonucleotide; CTG chr11 5152030 5152051 5152047 5152052 +
actctataccctgcaatgtgtg

SEQ ID NO: 70638 - DNA, 22 bp, Artificial Sequence
  Synthetic oligonucleotide; CTC chr11 5152034 5152055 5152051 5152056 +
tataccctgcaatgtgtggatg

SEQ ID NO: 70639 - DNA, 22 bp, Artificial Sequence
  Synthetic oligonucleotide; CTA chr11 5152036 5152057 5152053 5152058 +
taccctgcaatgtgtggatgaa

SEQ ID NO: 70640 - DNA, 22 bp, Artificial Sequence
  Synthetic oligonucleotide; CTG chr11 5152043 5152064 5152060 5152065 +
caatgtgtggatgaaccacatt

SEQ ID NO: 70641 - DNA, 22 bp, Artificial Sequence
  Synthetic oligonucleotide; TTT chr11 5152066 5152087 5152083 5152088 +
gaagcaagcaggaatcaaaata

SEQ ID NO: 70642 - DNA, 22 bp, Artificial Sequence
  Synthetic oligonucleotide; TTG chr11 5152067 5152088 5152084 5152089 +
aagcaagcaggaatcaaaatag

SEQ ID NO: 70643 - DNA, 22 bp, Artificial Sequence
  Synthetic oligonucleotide; TTT chr11 5152093 5152114 5152110 5152115 +
caggcacattaaaccagaatat

SEQ ID NO: 70644 - DNA, 22 bp, Artificial Sequence
  Synthetic oligonucleotide; TTC chr11 5152094 5152115 5152111 5152116 +
aggcacattaaaccagaatatt

SEQ ID NO: 70645 - DNA, 22 bp, Artificial Sequence
  Synthetic oligonucleotide; TTA chr11 5152104 5152125 5152121 5152126 +
aaccagaatattccaagcatct

SEQ ID NO: 70646 - DNA, 22 bp, Artificial Sequence
  Synthetic oligonucleotide; TTC chr11 5152117 5152138 5152134 5152139 +
caagcatctttggcataatgct

SEQ ID NO: 70647 - DNA, 22 bp, Artificial Sequence
  Synthetic oligonucleotide; CTT chr11 5152127 5152148 5152144 5152149 +
tggcataatgctgctagcaagt

SEQ ID NO: 70648 - DNA, 22 bp, Artificial Sequence
  Synthetic oligonucleotide; TTT chr11 5152128 5152149 5152145 5152150 +
ggcataatgctgctagcaagtg

SEQ ID NO: 70649 - DNA, 22 bp, Artificial Sequence
  Synthetic oligonucleotide; TTG chr11 5152129 5152150 5152146 5152151 +
gcataatgctgctagcaagtgc

SEQ ID NO: 70650 - DNA, 22 bp, Artificial Sequence
  Synthetic oligonucleotide; CTG chr11 5152140 5152161 5152157 5152162 +
ctagcaagtgcaatgtctgtgg

SEQ ID NO: 70651 - DNA, 22 bp, Artificial Sequence
  Synthetic oligonucleotide; CTA chr11 5152143 5152164 5152160 5152165 +
gcaagtgcaatgtctgtggctc

SEQ ID NO: 70652 - DNA, 22 bp, Artificial Sequence
  Synthetic oligonucleotide; CTG chr11 5152159 5152180 5152176 5152181 +
tggctcctagcatgcctaagaa

SEQ ID NO: 70653 - DNA, 22 bp, Artificial Sequence
  Synthetic oligonucleotide; CTC chr11 5152165 5152186 5152182 5152187 +
ctagcatgcctaagaaaatgta

SEQ ID NO: 70654 - DNA, 22 bp, Artificial Sequence
  Synthetic oligonucleotide; CTA chr11 5152168 5152189 5152185 5152190 +
gcatgcctaagaaaatgtacaa

SEQ ID NO: 70655 - DNA, 22 bp, Artificial Sequence
  Synthetic oligonucleotide; CTA chr11 5152177 5152198 5152194 5152199 +
agaaaatgtacaagggctcatg

SEQ ID NO: 70656 - DNA, 22 bp, Artificial Sequence
  Synthetic oligonucleotide; CTC chr11 5152196 5152217 5152213 5152218 +
atggagactgcgctcagatttg

SEQ ID NO: 70657 - DNA, 22 bp, Artificial Sequence
  Synthetic oligonucleotide; CTG chr11 5152206 5152227 5152223 5152228 +
cgctcagatttgatgatgctca

SEQ ID NO: 70658 - DNA, 22 bp, Artificial Sequence
  Synthetic oligonucleotide; CTC chr11 5152211 5152232 5152228 5152233 +
agatttgatgatgctcagaagc

SEQ ID NO: 70659 - DNA, 22 bp, Artificial Sequence
  Synthetic oligonucleotide; TTT chr11 5152217 5152238 5152234 5152239 +
gatgatgctcagaagcaaggaa

SEQ ID NO: 70660 - DNA, 22 bp, Artificial Sequence
  Synthetic oligonucleotide; TTG chr11 5152218 5152239 5152235 5152240 +
atgatgctcagaagcaaggaat

SEQ ID NO: 70661 - DNA, 22 bp, Artificial Sequence
  Synthetic oligonucleotide; CTC chr11 5152227 5152248 5152244 5152249 +
agaagcaaggaatttccaatca

SEQ ID NO: 70662 - DNA, 22 bp, Artificial Sequence
  Synthetic oligonucleotide; TTT chr11 5152242 5152263 5152259 5152264 +
ccaatcatagcaatgagataaa

SEQ ID NO: 70663 - DNA, 22 bp, Artificial Sequence
  Synthetic oligonucleotide; TTC chr11 5152243 5152264 5152260 5152265 +
caatcatagcaatgagataaat

SEQ ID NO: 70664 - DNA, 22 bp, Artificial Sequence
  Synthetic oligonucleotide; CTG chr11 5152295 5152316 5152312 5152317 +
cacagattctaggcctgggatc

SEQ ID NO: 70665 - DNA, 22 bp, Artificial Sequence
  Synthetic oligonucleotide; TTC chr11 5152304 5152325 5152321 5152326 +
taggcctgggatccctactagt

SEQ ID NO: 70666 - DNA, 22 bp, Artificial Sequence
  Synthetic oligonucleotide; CTA chr11 5152306 5152327 5152323 5152328 +
ggcctgggatccctactagtgt

SEQ ID NO: 70667 - DNA, 22 bp, Artificial Sequence
  Synthetic oligonucleotide; CTG chr11 5152312 5152333 5152329 5152334 +
ggatccctactagtgtcaacac

SEQ ID NO: 70668 - DNA, 22 bp, Artificial Sequence
  Synthetic oligonucleotide; CTA chr11 5152321 5152342 5152338 5152343 +
ctagtgtcaacacagagggcat

SEQ ID NO: 70669 - DNA, 22 bp, Artificial Sequence
  Synthetic oligonucleotide; CTA chr11 5152324 5152345 5152341 5152346 +
gtgtcaacacagagggcatgta

SEQ ID NO: 70670 - DNA, 22 bp, Artificial Sequence
  Synthetic oligonucleotide; CTG chr11 5152351 5152372 5152368 5152373 +
tgatgttggaaatggacatagt

SEQ ID NO: 70671 - DNA, 22 bp, Artificial Sequence
  Synthetic oligonucleotide; TTG chr11 5152359 5152380 5152376 5152381 +
gaaatggacatagtgtcgttgg

SEQ ID NO: 70672 - DNA, 22 bp, Artificial Sequence
  Synthetic oligonucleotide; TTG chr11 5152380 5152401 5152397 5152402 +
ggtctcctgatgcaaacaaaag

SEQ ID NO: 70673 - DNA, 22 bp, Artificial Sequence
  Synthetic oligonucleotide; CTC chr11 5152386 5152407 5152403 5152408 +
ctgatgcaaacaaaagaagttt

SEQ ID NO: 70674 - DNA, 22 bp, Artificial Sequence
  Synthetic oligonucleotide; CTG chr11 5152389 5152410 5152406 5152411 +
atgcaaacaaaagaagtttctc

SEQ ID NO: 70675 - DNA, 22 bp, Artificial Sequence
  Synthetic oligonucleotide; TTT chr11 5152408 5152429 5152425 5152430 +
ctcagtcagtgttactgttcct

SEQ ID NO: 70676 - DNA, 22 bp, Artificial Sequence
  Synthetic oligonucleotide; TTC chr11 5152409 5152430 5152426 5152431 +
tcagtcagtgttactgttcctc

SEQ ID NO: 70677 - DNA, 22 bp, Artificial Sequence
  Synthetic oligonucleotide; CTC chr11 5152411 5152432 5152428 5152433 +
agtcagtgttactgttcctctt

SEQ ID NO: 70678 - DNA, 22 bp, Artificial Sequence
  Synthetic oligonucleotide; TTA chr11 5152422 5152443 5152439 5152444 +
ctgttcctcttctgctttctga

SEQ ID NO: 70679 - DNA, 22 bp, Artificial Sequence
  Synthetic oligonucleotide; CTG chr11 5152425 5152446 5152442 5152447 +
ttcctcttctgctttctgattt

SEQ ID NO: 70680 - DNA, 22 bp, Artificial Sequence
  Synthetic oligonucleotide; TTC chr11 5152428 5152449 5152445 5152450 +
ctcttctgctttctgattttct

SEQ ID NO: 70681 - DNA, 22 bp, Artificial Sequence
  Synthetic oligonucleotide; CTC chr11 5152431 5152452 5152448 5152453 +
ttctgctttctgattttctcca

SEQ ID NO: 70682 - DNA, 22 bp, Artificial Sequence
  Synthetic oligonucleotide; CTT chr11 5152433 5152454 5152450 5152455 +
ctgctttctgattttctccaaa

SEQ ID NO: 70683 - DNA, 22 bp, Artificial Sequence
  Synthetic oligonucleotide; TTC chr11 5152434 5152455 5152451 5152456 +
tgctttctgattttctccaaac

SEQ ID NO: 70684 - DNA, 22 bp, Artificial Sequence
  Synthetic oligonucleotide; CTG chr11 5152436 5152457 5152453 5152458 +
ctttctgattttctccaaactc

SEQ ID NO: 70685 - DNA, 22 bp, Artificial Sequence
  Synthetic oligonucleotide; CTT chr11 5152439 5152460 5152456 5152461 +
tctgattttctccaaactcatt

SEQ ID NO: 70686 - DNA, 22 bp, Artificial Sequence
  Synthetic oligonucleotide; TTT chr11 5152440 5152461 5152457 5152462 +
ctgattttctccaaactcatta

SEQ ID NO: 70687 - DNA, 22 bp, Artificial Sequence
  Synthetic oligonucleotide; TTC chr11 5152441 5152462 5152458 5152463 +
tgattttctccaaactcattat

SEQ ID NO: 70688 - DNA, 22 bp, Artificial Sequence
  Synthetic oligonucleotide; CTG chr11 5152443 5152464 5152460 5152465 +
attttctccaaactcattatat

SEQ ID NO: 70689 - DNA, 22 bp, Artificial Sequence
  Synthetic oligonucleotide; TTT chr11 5152447 5152468 5152464 5152469 +
tctccaaactcattatattgag

SEQ ID NO: 70690 - DNA, 22 bp, Artificial Sequence
  Synthetic oligonucleotide; TTT chr11 5152448 5152469 5152465 5152470 +
ctccaaactcattatattgagt

SEQ ID NO: 70691 - DNA, 22 bp, Artificial Sequence
  Synthetic oligonucleotide; TTC chr11 5152449 5152470 5152466 5152471 +
tccaaactcattatattgagtc

SEQ ID NO: 70692 - DNA, 22 bp, Artificial Sequence
  Synthetic oligonucleotide; CTC chr11 5152451 5152472 5152468 5152473 +
caaactcattatattgagtctg

SEQ ID NO: 70693 - DNA, 22 bp, Artificial Sequence
  Synthetic oligonucleotide; CTC chr11 5152458 5152479 5152475 5152480 +
attatattgagtctgtctgatt

SEQ ID NO: 70694 - DNA, 22 bp, Artificial Sequence
  Synthetic oligonucleotide; TTA chr11 5152462 5152483 5152479 5152484 +
tattgagtctgtctgatttggg

SEQ ID NO: 70695 - DNA, 22 bp, Artificial Sequence
  Synthetic oligonucleotide; TTG chr11 5152467 5152488 5152484 5152489 +
agtctgtctgatttgggtataa

SEQ ID NO: 70696 - DNA, 22 bp, Artificial Sequence
  Synthetic oligonucleotide; CTG chr11 5152473 5152494 5152490 5152495 +
tctgatttgggtataactctaa

SEQ ID NO: 70697 - DNA, 22 bp, Artificial Sequence
  Synthetic oligonucleotide; CTG chr11 5152477 5152498 5152494 5152499 +
atttgggtataactctaaaatc

SEQ ID NO: 70698 - DNA, 22 bp, Artificial Sequence
  Synthetic oligonucleotide; TTT chr11 5152481 5152502 5152498 5152503 +
gggtataactctaaaatcatcc

SEQ ID NO: 70699 - DNA, 22 bp, Artificial Sequence
  Synthetic oligonucleotide; TTG chr11 5152482 5152503 5152499 5152504 +
ggtataactctaaaatcatcca

SEQ ID NO: 70700 - DNA, 22 bp, Artificial Sequence
  Synthetic oligonucleotide; CTC chr11 5152492 5152513 5152509 5152514 +
taaaatcatccatcttattcac

SEQ ID NO: 70701 - DNA, 22 bp, Artificial Sequence
  Synthetic oligonucleotide; CTA chr11 5152494 5152515 5152511 5152516 +
aaatcatccatcttattcacag

SEQ ID NO: 70702 - DNA, 22 bp, Artificial Sequence
  Synthetic oligonucleotide; CTT chr11 5152508 5152529 5152525 5152530 +
attcacagttttgaaaggaaaa

SEQ ID NO: 70703 - DNA, 22 bp, Artificial Sequence
  Synthetic oligonucleotide; TTA chr11 5152509 5152530 5152526 5152531 +
ttcacagttttgaaaggaaaag

SEQ ID NO: 70704 - DNA, 22 bp, Artificial Sequence
  Synthetic oligonucleotide; TTC chr11 5152512 5152533 5152529 5152534 +
acagttttgaaaggaaaagatg

SEQ ID NO: 70705 - DNA, 22 bp, Artificial Sequence
  Synthetic oligonucleotide; TTT chr11 5152519 5152540 5152536 5152541 +
tgaaaggaaaagatggattcat

SEQ ID NO: 70706 - DNA, 22 bp, Artificial Sequence
  Synthetic oligonucleotide; TTT chr11 5152520 5152541 5152537 5152542 +
gaaaggaaaagatggattcatg

SEQ ID NO: 70707 - DNA, 22 bp, Artificial Sequence
  Synthetic oligonucleotide; TTG chr11 5152521 5152542 5152538 5152543 +
aaaggaaaagatggattcatgg

SEQ ID NO: 70708 - DNA, 22 bp, Artificial Sequence
  Synthetic oligonucleotide; TTC chr11 5152539 5152560 5152556 5152561 +
atggagatacatcactgttttc

SEQ ID NO: 70709 - DNA, 22 bp, Artificial Sequence
  Synthetic oligonucleotide; CTG chr11 5152556 5152577 5152573 5152578 +
ttttcaggtggggcattcacag

SEQ ID NO: 70710 - DNA, 22 bp, Artificial Sequence
  Synthetic oligonucleotide; TTT chr11 5152559 5152580 5152576 5152581 +
tcaggtggggcattcacaggca

SEQ ID NO: 70711 - DNA, 22 bp, Artificial Sequence
  Synthetic oligonucleotide; TTT chr11 5152560 5152581 5152577 5152582 +
caggtggggcattcacaggcac

SEQ ID NO: 70712 - DNA, 22 bp, Artificial Sequence
  Synthetic oligonucleotide; TTC chr11 5152561 5152582 5152578 5152583 +
aggtggggcattcacaggcact

SEQ ID NO: 70713 - DNA, 22 bp, Artificial Sequence
  Synthetic oligonucleotide; TTC chr11 5152574 5152595 5152591 5152596 +
acaggcactgtgccataatagg

SEQ ID NO: 70714 - DNA, 22 bp, Artificial Sequence
  Synthetic oligonucleotide; CTG chr11 5152584 5152605 5152601 5152606 +
tgccataataggatgttatgtg

SEQ ID NO: 70715 - DNA, 22 bp, Artificial Sequence
  Synthetic oligonucleotide; TTA chr11 5152602 5152623 5152619 5152624 +
tgtgcatggcaatccaaataca

SEQ ID NO: 70716 - DNA, 22 bp, Artificial Sequence
  Synthetic oligonucleotide; TTA chr11 5152627 5152648 5152644 5152649 +
gaaccagcaaaatcacctggac

SEQ ID NO: 70717 - DNA, 22 bp, Artificial Sequence
  Synthetic oligonucleotide; CTG chr11 5152646 5152667 5152663 5152668 +
gacaggggattggactactggc

SEQ ID NO: 70718 - DNA, 22 bp, Artificial Sequence
  Synthetic oligonucleotide; TTG chr11 5152658 5152679 5152675 5152680 +
gactactggccagtctgttatt

SEQ ID NO: 70719 - DNA, 22 bp, Artificial Sequence
  Synthetic oligonucleotide; CTA chr11 5152663 5152684 5152680 5152685 +
ctggccagtctgttatttcttt

SEQ ID NO: 70720 - DNA, 22 bp, Artificial Sequence
  Synthetic oligonucleotide; CTG chr11 5152666 5152687 5152683 5152688 +
gccagtctgttatttctttcca

SEQ ID NO: 70721 - DNA, 22 bp, Artificial Sequence
  Synthetic oligonucleotide; CTG chr11 5152675 5152696 5152692 5152697 +
ttatttctttccagacctgtgg

SEQ ID NO: 70722 - DNA, 22 bp, Artificial Sequence
  Synthetic oligonucleotide; TTA chr11 5152678 5152699 5152695 5152700 +
tttctttccagacctgtggaca

SEQ ID NO: 70723 - DNA, 22 bp, Artificial Sequence
  Synthetic oligonucleotide; TTT chr11 5152681 5152702 5152698 5152703 +
ctttccagacctgtggacaaaa

SEQ ID NO: 70724 - DNA, 22 bp, Artificial Sequence
  Synthetic oligonucleotide; TTC chr11 5152682 5152703 5152699 5152704 +
tttccagacctgtggacaaaaa

SEQ ID NO: 70725 - DNA, 22 bp, Artificial Sequence
  Synthetic oligonucleotide; CTT chr11 5152684 5152705 5152701 5152706 +
tccagacctgtggacaaaaaaa

SEQ ID NO: 70726 - DNA, 22 bp, Artificial Sequence
  Synthetic oligonucleotide; TTT chr11 5152685 5152706 5152702 5152707 +
ccagacctgtggacaaaaaaaa

SEQ ID NO: 70727 - DNA, 22 bp, Artificial Sequence
  Synthetic oligonucleotide; TTC chr11 5152686 5152707 5152703 5152708 +
cagacctgtggacaaaaaaaaa

SEQ ID NO: 70728 - DNA, 22 bp, Artificial Sequence
  Synthetic oligonucleotide; CTG chr11 5152694 5152715 5152711 5152716 +
tggacaaaaaaaaaaagaagtt

SEQ ID NO: 70729 - DNA, 22 bp, Artificial Sequence
  Synthetic oligonucleotide; TTT chr11 5152717 5152738 5152734 5152739 +
atttttattggacattgcattt

SEQ ID NO: 70730 - DNA, 22 bp, Artificial Sequence
  Synthetic oligonucleotide; TTA chr11 5152718 5152739 5152735 5152740 +
tttttattggacattgcatttt

SEQ ID NO: 70731 - DNA, 22 bp, Artificial Sequence
  Synthetic oligonucleotide; TTT chr11 5152721 5152742 5152738 5152743 +
ttattggacattgcattttaat

SEQ ID NO: 70732 - DNA, 22 bp, Artificial Sequence
  Synthetic oligonucleotide; TTT chr11 5152722 5152743 5152739 5152744 +
tattggacattgcattttaatt

SEQ ID NO: 70733 - DNA, 22 bp, Artificial Sequence
  Synthetic oligonucleotide; TTT chr11 5152723 5152744 5152740 5152745 +
attggacattgcattttaattt

SEQ ID NO: 70734 - DNA, 22 bp, Artificial Sequence
  Synthetic oligonucleotide; TTA chr11 5152724 5152745 5152741 5152746 +
ttggacattgcattttaatttg

SEQ ID NO: 70735 - DNA, 22 bp, Artificial Sequence
  Synthetic oligonucleotide; TTG chr11 5152727 5152748 5152744 5152749 +
gacattgcattttaatttggtt

SEQ ID NO: 70736 - DNA, 22 bp, Artificial Sequence
  Synthetic oligonucleotide; TTG chr11 5152734 5152755 5152751 5152756 +
cattttaatttggttaataaac

SEQ ID NO: 70737 - DNA, 22 bp, Artificial Sequence
  Synthetic oligonucleotide; TTT chr11 5152739 5152760 5152756 5152761 +
taatttggttaataaacctctc

SEQ ID NO: 70738 - DNA, 22 bp, Artificial Sequence
  Synthetic oligonucleotide; TTT chr11 5152740 5152761 5152757 5152762 +
aatttggttaataaacctctcc

SEQ ID NO: 70739 - DNA, 22 bp, Artificial Sequence
  Synthetic oligonucleotide; TTA chr11 5152741 5152762 5152758 5152763 +
atttggttaataaacctctcca

SEQ ID NO: 70740 - DNA, 22 bp, Artificial Sequence
  Synthetic oligonucleotide; TTT chr11 5152745 5152766 5152762 5152767 +
ggttaataaacctctccatatt

SEQ ID NO: 70741 - DNA, 22 bp, Artificial Sequence
  Synthetic oligonucleotide; TTG chr11 5152746 5152767 5152763 5152768 +
gttaataaacctctccatattt

SEQ ID NO: 70742 - DNA, 22 bp, Artificial Sequence
  Synthetic oligonucleotide; TTA chr11 5152750 5152771 5152767 5152772 +
ataaacctctccatatttcaca

SEQ ID NO: 70743 - DNA, 22 bp, Artificial Sequence
  Synthetic oligonucleotide; CTC chr11 5152759 5152780 5152776 5152781 +
tccatatttcacatttcagcta

SEQ ID NO: 70744 - DNA, 22 bp, Artificial Sequence
  Synthetic oligonucleotide; CTC chr11 5152761 5152782 5152778 5152783 +
catatttcacatttcagctatt

SEQ ID NO: 70745 - DNA, 22 bp, Artificial Sequence
  Synthetic oligonucleotide; TTT chr11 5152768 5152789 5152785 5152790 +
cacatttcagctattcctctag

SEQ ID NO: 70746 - DNA, 22 bp, Artificial Sequence
  Synthetic oligonucleotide; TTC chr11 5152769 5152790 5152786 5152791 +
acatttcagctattcctctagt

SEQ ID NO: 70747 - DNA, 22 bp, Artificial Sequence
  Synthetic oligonucleotide; TTT chr11 5152775 5152796 5152792 5152797 +
cagctattcctctagtatttaa

SEQ ID NO: 70748 - DNA, 22 bp, Artificial Sequence
  Synthetic oligonucleotide; TTC chr11 5152776 5152797 5152793 5152798 +
agctattcctctagtatttaac

SEQ ID NO: 70749 - DNA, 22 bp, Artificial Sequence
  Synthetic oligonucleotide; CTA chr11 5152781 5152802 5152798 5152803 +
ttcctctagtatttaactattt

SEQ ID NO: 70750 - DNA, 22 bp, Artificial Sequence
  Synthetic oligonucleotide; TTC chr11 5152784 5152805 5152801 5152806 +
ctctagtatttaactatttcca

SEQ ID NO: 70751 - DNA, 22 bp, Artificial Sequence
  Synthetic oligonucleotide; CTC chr11 5152787 5152808 5152804 5152809 +
tagtatttaactatttccaatt

SEQ ID NO: 70752 - DNA, 22 bp, Artificial Sequence
  Synthetic oligonucleotide; CTA chr11 5152789 5152810 5152806 5152811 +
gtatttaactatttccaatttt

SEQ ID NO: 70753 - DNA, 22 bp, Artificial Sequence
  Synthetic oligonucleotide; TTT chr11 5152795 5152816 5152812 5152817 +
aactatttccaattttctttaa

SEQ ID NO: 70754 - DNA, 22 bp, Artificial Sequence
  Synthetic oligonucleotide; TTA chr11 5152796 5152817 5152813 5152818 +
actatttccaattttctttaag

SEQ ID NO: 70755 - DNA, 22 bp, Artificial Sequence
  Synthetic oligonucleotide; CTA chr11 5152800 5152821 5152817 5152822 +
tttccaattttctttaagaaca

SEQ ID NO: 70756 - DNA, 22 bp, Artificial Sequence
  Synthetic oligonucleotide; TTT chr11 5152803 5152824 5152820 5152825 +
ccaattttctttaagaacattt

SEQ ID NO: 70757 - DNA, 22 bp, Artificial Sequence
  Synthetic oligonucleotide; TTC chr11 5152804 5152825 5152821 5152826 +
caattttctttaagaacatttt

SEQ ID NO: 70758 - DNA, 22 bp, Artificial Sequence
  Synthetic oligonucleotide; TTT chr11 5152810 5152831 5152827 5152832 +
tctttaagaacattttagacaa

SEQ ID NO: 70759 - DNA, 22 bp, Artificial Sequence
  Synthetic oligonucleotide; TTT chr11 5152811 5152832 5152828 5152833 +
ctttaagaacattttagacaag

SEQ ID NO: 70760 - DNA, 22 bp, Artificial Sequence
  Synthetic oligonucleotide; TTC chr11 5152812 5152833 5152829 5152834 +
tttaagaacattttagacaagc

SEQ ID NO: 70761 - DNA, 22 bp, Artificial Sequence
  Synthetic oligonucleotide; CTT chr11 5152814 5152835 5152831 5152836 +
taagaacattttagacaagcaa

SEQ ID NO: 70762 - DNA, 22 bp, Artificial Sequence
  Synthetic oligonucleotide; TTT chr11 5152815 5152836 5152832 5152837 +
aagaacattttagacaagcaaa

SEQ ID NO: 70763 - DNA, 22 bp, Artificial Sequence
  Synthetic oligonucleotide; TTA chr11 5152816 5152837 5152833 5152838 +
agaacattttagacaagcaaat

SEQ ID NO: 70764 - DNA, 22 bp, Artificial Sequence
  Synthetic oligonucleotide; TTT chr11 5152825 5152846 5152842 5152847 +
tagacaagcaaattaacagact

SEQ ID NO: 70765 - DNA, 22 bp, Artificial Sequence
  Synthetic oligonucleotide; TTT chr11 5152826 5152847 5152843 5152848 +
agacaagcaaattaacagactc

SEQ ID NO: 70766 - DNA, 22 bp, Artificial Sequence
  Synthetic oligonucleotide; TTA chr11 5152827 5152848 5152844 5152849 +
gacaagcaaattaacagactct

SEQ ID NO: 70767 - DNA, 22 bp, Artificial Sequence
  Synthetic oligonucleotide; TTA chr11 5152840 5152861 5152857 5152862 +
acagactctgaccagtacattg

SEQ ID NO: 70768 - DNA, 22 bp, Artificial Sequence
  Synthetic oligonucleotide; CTC chr11 5152848 5152869 5152865 5152870 +
tgaccagtacattggtgtaaaa

SEQ ID NO: 70769 - DNA, 22 bp, Artificial Sequence
  Synthetic oligonucleotide; CTG chr11 5152850 5152871 5152867 5152872 +
accagtacattggtgtaaaaga

SEQ ID NO: 70770 - DNA, 22 bp, Artificial Sequence
  Synthetic oligonucleotide; TTG chr11 5152862 5152883 5152879 5152884 +
gtgtaaaagattcccaatgaaa

SEQ ID NO: 70771 - DNA, 22 bp, Artificial Sequence
  Synthetic oligonucleotide; TTC chr11 5152875 5152896 5152892 5152897 +
ccaatgaaagagaatagaggta

SEQ ID NO: 70772 - DNA, 22 bp, Artificial Sequence
  Synthetic oligonucleotide; TTG chr11 5152907 5152928 5152924 5152929 +
acacccaagaacataatatatt

SEQ ID NO: 70773 - DNA, 22 bp, Artificial Sequence
  Synthetic oligonucleotide; TTT chr11 5152930 5152951 5152947 5152952 +
ctttttatattcagaataatgt

SEQ ID NO: 70774 - DNA, 22 bp, Artificial Sequence
  Synthetic oligonucleotide; TTC chr11 5152931 5152952 5152948 5152953 +
tttttatattcagaataatgta

SEQ ID NO: 70775 - DNA, 22 bp, Artificial Sequence
  Synthetic oligonucleotide; CTT chr11 5152933 5152954 5152950 5152955 +
tttatattcagaataatgtaaa

SEQ ID NO: 70776 - DNA, 22 bp, Artificial Sequence
  Synthetic oligonucleotide; TTT chr11 5152934 5152955 5152951 5152956 +
ttatattcagaataatgtaaag

SEQ ID NO: 70777 - DNA, 22 bp, Artificial Sequence
  Synthetic oligonucleotide; TTT chr11 5152935 5152956 5152952 5152957 +
tatattcagaataatgtaaaga

SEQ ID NO: 70778 - DNA, 22 bp, Artificial Sequence
  Synthetic oligonucleotide; TTT chr11 5152936 5152957 5152953 5152958 +
atattcagaataatgtaaagag

SEQ ID NO: 70779 - DNA, 22 bp, Artificial Sequence
  Synthetic oligonucleotide; TTA chr11 5152937 5152958 5152954 5152959 +
tattcagaataatgtaaagaga

SEQ ID NO: 70780 - DNA, 22 bp, Artificial Sequence
  Synthetic oligonucleotide; TTC chr11 5152942 5152963 5152959 5152964 +
agaataatgtaaagagaatgct

SEQ ID NO: 70781 - DNA, 22 bp, Artificial Sequence
  Synthetic oligonucleotide; CTT chr11 5152965 5152986 5152982 5152987 +
tagaaataattgaaatctttat

SEQ ID NO: 70782 - DNA, 22 bp, Artificial Sequence
  Synthetic oligonucleotide; TTT chr11 5152966 5152987 5152983 5152988 +
agaaataattgaaatctttata

SEQ ID NO: 70783 - DNA, 22 bp, Artificial Sequence
  Synthetic oligonucleotide; TTA chr11 5152967 5152988 5152984 5152989 +
gaaataattgaaatctttatac

SEQ ID NO: 70784 - DNA, 22 bp, Artificial Sequence
  Synthetic oligonucleotide; TTG chr11 5152977 5152998 5152994 5152999 +
aaatctttatacttttgacaaa

SEQ ID NO: 70785 - DNA, 22 bp, Artificial Sequence
  Synthetic oligonucleotide; CTT chr11 5152984 5153005 5153001 5153006 +
tatacttttgacaaatctgagc

SEQ ID NO: 70786 - DNA, 22 bp, Artificial Sequence
  Synthetic oligonucleotide; TTT chr11 5152985 5153006 5153002 5153007 +
atacttttgacaaatctgagcc

SEQ ID NO: 70787 - DNA, 22 bp, Artificial Sequence
  Synthetic oligonucleotide; TTA chr11 5152986 5153007 5153003 5153008 +
tacttttgacaaatctgagcca

SEQ ID NO: 70788 - DNA, 22 bp, Artificial Sequence
  Synthetic oligonucleotide; CTT chr11 5152991 5153012 5153008 5153013 +
ttgacaaatctgagccaaagct

SEQ ID NO: 70789 - DNA, 22 bp, Artificial Sequence
  Synthetic oligonucleotide; TTT chr11 5152992 5153013 5153009 5153014 +
tgacaaatctgagccaaagctc

SEQ ID NO: 70790 - DNA, 22 bp, Artificial Sequence
  Synthetic oligonucleotide; TTT chr11 5152993 5153014 5153010 5153015 +
gacaaatctgagccaaagctcc

SEQ ID NO: 70791 - DNA, 22 bp, Artificial Sequence
  Synthetic oligonucleotide; TTG chr11 5152994 5153015 5153011 5153016 +
acaaatctgagccaaagctcct

SEQ ID NO: 70792 - DNA, 22 bp, Artificial Sequence
  Synthetic oligonucleotide; CTG chr11 5153003 5153024 5153020 5153025 +
agccaaagctcctggttgcttt

SEQ ID NO: 70793 - DNA, 22 bp, Artificial Sequence
  Synthetic oligonucleotide; CTC chr11 5153014 5153035 5153031 5153036 +
ctggttgctttttatatttctt

SEQ ID NO: 70794 - DNA, 22 bp, Artificial Sequence
  Synthetic oligonucleotide; CTG chr11 5153017 5153038 5153034 5153039 +
gttgctttttatatttctttaa

SEQ ID NO: 70795 - DNA, 22 bp, Artificial Sequence
  Synthetic oligonucleotide; TTG chr11 5153021 5153042 5153038 5153043 +
ctttttatatttctttaaagtt

SEQ ID NO: 70796 - DNA, 22 bp, Artificial Sequence
  Synthetic oligonucleotide; CTT chr11 5153024 5153045 5153041 5153046 +
tttatatttctttaaagttaaa

SEQ ID NO: 70797 - DNA, 22 bp, Artificial Sequence
  Synthetic oligonucleotide; TTT chr11 5153025 5153046 5153042 5153047 +
ttatatttctttaaagttaaag

SEQ ID NO: 70798 - DNA, 22 bp, Artificial Sequence
  Synthetic oligonucleotide; TTT chr11 5153026 5153047 5153043 5153048 +
tatatttctttaaagttaaagg

SEQ ID NO: 70799 - DNA, 22 bp, Artificial Sequence
  Synthetic oligonucleotide; TTT chr11 5153027 5153048 5153044 5153049 +
atatttctttaaagttaaaggg

SEQ ID NO: 70800 - DNA, 22 bp, Artificial Sequence
  Synthetic oligonucleotide; TTA chr11 5153028 5153049 5153045 5153050 +
tatttctttaaagttaaaggga

SEQ ID NO: 70801 - DNA, 22 bp, Artificial Sequence
  Synthetic oligonucleotide; TTT chr11 5153033 5153054 5153050 5153055 +
ctttaaagttaaagggaattat

SEQ ID NO: 70802 - DNA, 22 bp, Artificial Sequence
  Synthetic oligonucleotide; TTC chr11 5153034 5153055 5153051 5153056 +
tttaaagttaaagggaattata

SEQ ID NO: 70803 - DNA, 22 bp, Artificial Sequence
  Synthetic oligonucleotide; CTT chr11 5153036 5153057 5153053 5153058 +
taaagttaaagggaattatatt

SEQ ID NO: 70804 - DNA, 22 bp, Artificial Sequence
  Synthetic oligonucleotide; TTT chr11 5153037 5153058 5153054 5153059 +
aaagttaaagggaattatattt

SEQ ID NO: 70805 - DNA, 22 bp, Artificial Sequence
  Synthetic oligonucleotide; TTA chr11 5153038 5153059 5153055 5153060 +
aagttaaagggaattatatttt

SEQ ID NO: 70806 - DNA, 22 bp, Artificial Sequence
  Synthetic oligonucleotide; TTA chr11 5153044 5153065 5153061 5153066 +
aagggaattatattttttccta

SEQ ID NO: 70807 - DNA, 22 bp, Artificial Sequence
  Synthetic oligonucleotide; TTA chr11 5153054 5153075 5153071 5153076 +
tattttttcctatatattttaa

SEQ ID NO: 70808 - DNA, 22 bp, Artificial Sequence
  Synthetic oligonucleotide; TTT chr11 5153059 5153080 5153076 5153081 +
tttcctatatattttaaacagc

SEQ ID NO: 70809 - DNA, 22 bp, Artificial Sequence
  Synthetic oligonucleotide; TTT chr11 5153060 5153081 5153077 5153082 +
ttcctatatattttaaacagct

SEQ ID NO: 70810 - DNA, 22 bp, Artificial Sequence
  Synthetic oligonucleotide; TTT chr11 5153061 5153082 5153078 5153083 +
tcctatatattttaaacagctg

SEQ ID NO: 70811 - DNA, 22 bp, Artificial Sequence
  Synthetic oligonucleotide; TTT chr11 5153062 5153083 5153079 5153084 +
cctatatattttaaacagctga

SEQ ID NO: 70812 - DNA, 22 bp, Artificial Sequence
  Synthetic oligonucleotide; TTC chr11 5153063 5153084 5153080 5153085 +
ctatatattttaaacagctgaa

SEQ ID NO: 70813 - DNA, 22 bp, Artificial Sequence
  Synthetic oligonucleotide; CTA chr11 5153066 5153087 5153083 5153088 +
tatattttaaacagctgaaact

SEQ ID NO: 70814 - DNA, 22 bp, Artificial Sequence
  Synthetic oligonucleotide; TTT chr11 5153073 5153094 5153090 5153095 +
taaacagctgaaactcttgaaa

SEQ ID NO: 70815 - DNA, 22 bp, Artificial Sequence
  Synthetic oligonucleotide; TTT chr11 5153074 5153095 5153091 5153096 +
aaacagctgaaactcttgaaat

SEQ ID NO: 70816 - DNA, 22 bp, Artificial Sequence
  Synthetic oligonucleotide; TTA chr11 5153075 5153096 5153092 5153097 +
aacagctgaaactcttgaaatg

SEQ ID NO: 70817 - DNA, 22 bp, Artificial Sequence
  Synthetic oligonucleotide; CTG chr11 5153083 5153104 5153100 5153105 +
aaactcttgaaatgttgtgagt

SEQ ID NO: 70818 - DNA, 22 bp, Artificial Sequence
  Synthetic oligonucleotide; CTC chr11 5153089 5153110 5153106 5153111 +
ttgaaatgttgtgagtttaaaa

SEQ ID NO: 70819 - DNA, 22 bp, Artificial Sequence
  Synthetic oligonucleotide; CTT chr11 5153091 5153112 5153108 5153113 +
gaaatgttgtgagtttaaaatt

SEQ ID NO: 70820 - DNA, 22 bp, Artificial Sequence
  Synthetic oligonucleotide; TTG chr11 5153092 5153113 5153109 5153114 +
aaatgttgtgagtttaaaattt

SEQ ID NO: 70821 - DNA, 22 bp, Artificial Sequence
  Synthetic oligonucleotide; TTG chr11 5153100 5153121 5153117 5153122 +
tgagtttaaaattttaatacac

SEQ ID NO: 70822 - DNA, 22 bp, Artificial Sequence
  Synthetic oligonucleotide; TTT chr11 5153107 5153128 5153124 5153129 +
aaaattttaatacactttatgg

SEQ ID NO: 70823 - DNA, 22 bp, Artificial Sequence
  Synthetic oligonucleotide; TTA chr11 5153108 5153129 5153125 5153130 +
aaattttaatacactttatgga

SEQ ID NO: 70824 - DNA, 22 bp, Artificial Sequence
  Synthetic oligonucleotide; TTT chr11 5153114 5153135 5153131 5153136 +
taatacactttatggaatatct

SEQ ID NO: 70825 - DNA, 22 bp, Artificial Sequence
  Synthetic oligonucleotide; TTT chr11 5153115 5153136 5153132 5153137 +
aatacactttatggaatatcta

SEQ ID NO: 70826 - DNA, 22 bp, Artificial Sequence
  Synthetic oligonucleotide; TTA chr11 5153116 5153137 5153133 5153138 +
atacactttatggaatatctag

SEQ ID NO: 70827 - DNA, 22 bp, Artificial Sequence
  Synthetic oligonucleotide; CTT chr11 5153124 5153145 5153141 5153146 +
tatggaatatctagagagaagg

SEQ ID NO: 70828 - DNA, 22 bp, Artificial Sequence
  Synthetic oligonucleotide; TTT chr11 5153125 5153146 5153142 5153147 +
atggaatatctagagagaagga

SEQ ID NO: 70829 - DNA, 22 bp, Artificial Sequence
  Synthetic oligonucleotide; TTA chr11 5153126 5153147 5153143 5153148 +
tggaatatctagagagaaggaa

SEQ ID NO: 70830 - DNA, 22 bp, Artificial Sequence
  Synthetic oligonucleotide; CTA chr11 5153137 5153158 5153154 5153159 +
gagagaaggaactgctaaggga

SEQ ID NO: 70831 - DNA, 22 bp, Artificial Sequence
  Synthetic oligonucleotide; CTG chr11 5153151 5153172 5153168 5153173 +
ctaagggacaagatgagcagca

SEQ ID NO: 70832 - DNA, 22 bp, Artificial Sequence
  Synthetic oligonucleotide; CTA chr11 5153154 5153175 5153171 5153176 +
agggacaagatgagcagcagca

SEQ ID NO: 70833 - DNA, 22 bp, Artificial Sequence
  Synthetic oligonucleotide; CTA chr11 5153183 5153204 5153200 5153205 +
cggcaagagaacttgctcctga

SEQ ID NO: 70834 - DNA, 22 bp, Artificial Sequence
  Synthetic oligonucleotide; CTT chr11 5153197 5153218 5153214 5153219 +
gctcctgataaaccacagatac

SEQ ID NO: 70835 - DNA, 22 bp, Artificial Sequence
  Synthetic oligonucleotide; TTG chr11 5153198 5153219 5153215 5153220 +
ctcctgataaaccacagatact

SEQ ID NO: 70836 - DNA, 22 bp, Artificial Sequence
  Synthetic oligonucleotide; CTC chr11 5153201 5153222 5153218 5153223 +
ctgataaaccacagatactgaa

SEQ ID NO: 70837 - DNA, 22 bp, Artificial Sequence
  Synthetic oligonucleotide; CTG chr11 5153204 5153225 5153221 5153226 +
ataaaccacagatactgaataa

SEQ ID NO: 70838 - DNA, 22 bp, Artificial Sequence
  Synthetic oligonucleotide; CTG chr11 5153221 5153242 5153238 5153243 +
aataatgggcaaatgaatcatt

SEQ ID NO: 70839 - DNA, 22 bp, Artificial Sequence
  Synthetic oligonucleotide; TTT chr11 5153244 5153265 5153261 5153266 +
agccagaatagagtccagtttc

SEQ ID NO: 70840 - DNA, 22 bp, Artificial Sequence
  Synthetic oligonucleotide; TTA chr11 5153245 5153266 5153262 5153267 +
gccagaatagagtccagtttcc

SEQ ID NO: 70841 - DNA, 22 bp, Artificial Sequence
  Synthetic oligonucleotide; TTT chr11 5153265 5153286 5153282 5153287 +
cctggttttaaaatgttcagag

SEQ ID NO: 70842 - DNA, 22 bp, Artificial Sequence
  Synthetic oligonucleotide; TTC chr11 5153266 5153287 5153283 5153288 +
ctggttttaaaatgttcagagt

SEQ ID NO: 70843 - DNA, 22 bp, Artificial Sequence
  Synthetic oligonucleotide; CTG chr11 5153269 5153290 5153286 5153291 +
gttttaaaatgttcagagttat

SEQ ID NO: 70844 - DNA, 22 bp, Artificial Sequence
  Synthetic oligonucleotide; TTT chr11 5153273 5153294 5153290 5153295 +
taaaatgttcagagttataatt

SEQ ID NO: 70845 - DNA, 22 bp, Artificial Sequence
  Synthetic oligonucleotide; TTT chr11 5153274 5153295 5153291 5153296 +
aaaatgttcagagttataatta

SEQ ID NO: 70846 - DNA, 22 bp, Artificial Sequence
  Synthetic oligonucleotide; TTA chr11 5153275 5153296 5153292 5153297 +
aaatgttcagagttataattag

SEQ ID NO: 70847 - DNA, 22 bp, Artificial Sequence
  Synthetic oligonucleotide; TTC chr11 5153283 5153304 5153300 5153305 +
agagttataattagcataatat

SEQ ID NO: 70848 - DNA, 22 bp, Artificial Sequence
  Synthetic oligonucleotide; TTA chr11 5153290 5153311 5153307 5153312 +
taattagcataatatagcccaa

SEQ ID NO: 70849 - DNA, 22 bp, Artificial Sequence
  Synthetic oligonucleotide; TTA chr11 5153296 5153317 5153313 5153318 +
gcataatatagcccaataaagg

SEQ ID NO: 70850 - DNA, 22 bp, Artificial Sequence
  Synthetic oligonucleotide; CTC chr11 5153321 5153342 5153338 5153343 +
attagttcttaatgaaatatag

SEQ ID NO: 70851 - DNA, 22 bp, Artificial Sequence
  Synthetic oligonucleotide; TTA chr11 5153325 5153346 5153342 5153347 +
gttcttaatgaaatataggtga

SEQ ID NO: 70852 - DNA, 22 bp, Artificial Sequence
  Synthetic oligonucleotide; TTC chr11 5153329 5153350 5153346 5153351 +
ttaatgaaatataggtgagatg

SEQ ID NO: 70853 - DNA, 22 bp, Artificial Sequence
  Synthetic oligonucleotide; CTT chr11 5153331 5153352 5153348 5153353 +
aatgaaatataggtgagatgct

SEQ ID NO: 70854 - DNA, 22 bp, Artificial Sequence
  Synthetic oligonucleotide; TTA chr11 5153332 5153353 5153349 5153354 +
atgaaatataggtgagatgctt

SEQ ID NO: 70855 - DNA, 22 bp, Artificial Sequence
  Synthetic oligonucleotide; CTT chr11 5153354 5153375 5153371 5153376 +
atataattttgtgagctctgac

SEQ ID NO: 70856 - DNA, 22 bp, Artificial Sequence
  Synthetic oligonucleotide; TTA chr11 5153355 5153376 5153372 5153377 +
tataattttgtgagctctgaca

SEQ ID NO: 70857 - DNA, 22 bp, Artificial Sequence
  Synthetic oligonucleotide; TTT chr11 5153363 5153384 5153380 5153385 +
tgtgagctctgacataagaaat

SEQ ID NO: 70858 - DNA, 22 bp, Artificial Sequence
  Synthetic oligonucleotide; TTT chr11 5153364 5153385 5153381 5153386 +
gtgagctctgacataagaaatt

SEQ ID NO: 70859 - DNA, 22 bp, Artificial Sequence
  Synthetic oligonucleotide; TTG chr11 5153365 5153386 5153382 5153387 +
tgagctctgacataagaaatta

SEQ ID NO: 70860 - DNA, 22 bp, Artificial Sequence
  Synthetic oligonucleotide; CTC chr11 5153372 5153393 5153389 5153394 +
tgacataagaaattagtaaaaa

SEQ ID NO: 70861 - DNA, 22 bp, Artificial Sequence
  Synthetic oligonucleotide; CTG chr11 5153374 5153395 5153391 5153396 +
acataagaaattagtaaaaata

SEQ ID NO: 70862 - DNA, 22 bp, Artificial Sequence
  Synthetic oligonucleotide; TTA chr11 5153387 5153408 5153404 5153409 +
gtaaaaataaaaaagctaaagg

SEQ ID NO: 70863 - DNA, 22 bp, Artificial Sequence
  Synthetic oligonucleotide; CTA chr11 5153405 5153426 5153422 5153427 +
aaggacagatttcttagaagaa

SEQ ID NO: 70864 - DNA, 22 bp, Artificial Sequence
  Synthetic oligonucleotide; TTT chr11 5153417 5153438 5153434 5153439 +
cttagaagaagtcaaatgtaga

SEQ ID NO: 70865 - DNA, 22 bp, Artificial Sequence
  Synthetic oligonucleotide; TTC chr11 5153418 5153439 5153435 5153440 +
ttagaagaagtcaaatgtagaa

SEQ ID NO: 70866 - DNA, 22 bp, Artificial Sequence
  Synthetic oligonucleotide; CTT chr11 5153420 5153441 5153437 5153442 +
agaagaagtcaaatgtagaact

SEQ ID NO: 70867 - DNA, 22 bp, Artificial Sequence
  Synthetic oligonucleotide; TTA chr11 5153421 5153442 5153438 5153443 +
gaagaagtcaaatgtagaacta

SEQ ID NO: 70868 - DNA, 22 bp, Artificial Sequence
  Synthetic oligonucleotide; CTA chr11 5153443 5153464 5153460 5153465 +
gacagggaagacaggacaaact

SEQ ID NO: 70869 - DNA, 22 bp, Artificial Sequence
  Synthetic oligonucleotide; CTT chr11 5153466 5153487 5153483 5153488 +
ggggagactaaaattgaggaaa

SEQ ID NO: 70870 - DNA, 22 bp, Artificial Sequence
  Synthetic oligonucleotide; TTG chr11 5153467 5153488 5153484 5153489 +
gggagactaaaattgaggaaag

SEQ ID NO: 70871 - DNA, 22 bp, Artificial Sequence
  Synthetic oligonucleotide; CTA chr11 5153476 5153497 5153493 5153498 +
aaattgaggaaagcactatgaa

SEQ ID NO: 70872 - DNA, 22 bp, Artificial Sequence
  Synthetic oligonucleotide; TTG chr11 5153482 5153503 5153499 5153504 +
aggaaagcactatgaataacca

SEQ ID NO: 70873 - DNA, 22 bp, Artificial Sequence
  Synthetic oligonucleotide; CTA chr11 5153494 5153515 5153511 5153516 +
tgaataaccaaagaaaatttag

SEQ ID NO: 70874 - DNA, 22 bp, Artificial Sequence
  Synthetic oligonucleotide; TTT chr11 5153514 5153535 5153531 5153536 +
agtcacttttcaatttcactga

SEQ ID NO: 70875 - DNA, 22 bp, Artificial Sequence
  Synthetic oligonucleotide; TTA chr11 5153515 5153536 5153532 5153537 +
gtcacttttcaatttcactgat

SEQ ID NO: 70876 - DNA, 22 bp, Artificial Sequence
  Synthetic oligonucleotide; CTT chr11 5153522 5153543 5153539 5153544 +
ttcaatttcactgatgattgaa

SEQ ID NO: 70877 - DNA, 22 bp, Artificial Sequence
  Synthetic oligonucleotide; TTT chr11 5153523 5153544 5153540 5153545 +
tcaatttcactgatgattgaat

SEQ ID NO: 70878 - DNA, 22 bp, Artificial Sequence
  Synthetic oligonucleotide; TTT chr11 5153524 5153545 5153541 5153546 +
caatttcactgatgattgaatt

SEQ ID NO: 70879 - DNA, 22 bp, Artificial Sequence
  Synthetic oligonucleotide; TTC chr11 5153525 5153546 5153542 5153547 +
aatttcactgatgattgaattt

SEQ ID NO: 70880 - DNA, 22 bp, Artificial Sequence
  Synthetic oligonucleotide; TTT chr11 5153530 5153551 5153547 5153552 +
cactgatgattgaattttctga

SEQ ID NO: 70881 - DNA, 22 bp, Artificial Sequence
  Synthetic oligonucleotide; TTC chr11 5153531 5153552 5153548 5153553 +
actgatgattgaattttctgaa

SEQ ID NO: 70882 - DNA, 22 bp, Artificial Sequence
  Synthetic oligonucleotide; CTG chr11 5153535 5153556 5153552 5153557 +
atgattgaattttctgaaaaac

SEQ ID NO: 70883 - DNA, 22 bp, Artificial Sequence
  Synthetic oligonucleotide; TTG chr11 5153542 5153563 5153559 5153564 +
aattttctgaaaaacctgggct

SEQ ID NO: 70884 - DNA, 22 bp, Artificial Sequence
  Synthetic oligonucleotide; TTT chr11 5153547 5153568 5153564 5153569 +
tctgaaaaacctgggctcttat

SEQ ID NO: 70885 - DNA, 22 bp, Artificial Sequence
  Synthetic oligonucleotide; TTT chr11 5153548 5153569 5153565 5153570 +
ctgaaaaacctgggctcttatg

SEQ ID NO: 70886 - DNA, 22 bp, Artificial Sequence
  Synthetic oligonucleotide; TTC chr11 5153549 5153570 5153566 5153571 +
tgaaaaacctgggctcttatgc

SEQ ID NO: 70887 - DNA, 22 bp, Artificial Sequence
  Synthetic oligonucleotide; CTG chr11 5153551 5153572 5153568 5153573 +
aaaaacctgggctcttatgctt

SEQ ID NO: 70888 - DNA, 22 bp, Artificial Sequence
  Synthetic oligonucleotide; CTG chr11 5153560 5153581 5153577 5153582 +
ggctcttatgctttatataaaa

SEQ ID NO: 70889 - DNA, 22 bp, Artificial Sequence
  Synthetic oligonucleotide; CTC chr11 5153565 5153586 5153582 5153587 +
ttatgctttatataaaagttct

SEQ ID NO: 70890 - DNA, 22 bp, Artificial Sequence
  Synthetic oligonucleotide; CTT chr11 5153567 5153588 5153584 5153589 +
atgctttatataaaagttctct

SEQ ID NO: 70891 - DNA, 22 bp, Artificial Sequence
  Synthetic oligonucleotide; TTA chr11 5153568 5153589 5153585 5153590 +
tgctttatataaaagttctctg

SEQ ID NO: 70892 - DNA, 22 bp, Artificial Sequence
  Synthetic oligonucleotide; CTT chr11 5153573 5153594 5153590 5153595 +
tatataaaagttctctgatcaa

SEQ ID NO: 70893 - DNA, 22 bp, Artificial Sequence
  Synthetic oligonucleotide; TTT chr11 5153574 5153595 5153591 5153596 +
atataaaagttctctgatcaaa

SEQ ID NO: 70894 - DNA, 22 bp, Artificial Sequence
  Synthetic oligonucleotide; TTA chr11 5153575 5153596 5153592 5153597 +
tataaaagttctctgatcaaaa

SEQ ID NO: 70895 - DNA, 22 bp, Artificial Sequence
  Synthetic oligonucleotide; TTC chr11 5153586 5153607 5153603 5153608 +
tctgatcaaaatagttattttc

SEQ ID NO: 70896 - DNA, 22 bp, Artificial Sequence
  Synthetic oligonucleotide; CTC chr11 5153588 5153609 5153605 5153610 +
tgatcaaaatagttattttcta

SEQ ID NO: 70897 - DNA, 22 bp, Artificial Sequence
  Synthetic oligonucleotide; CTG chr11 5153590 5153611 5153607 5153612 +
atcaaaatagttattttctaaa

SEQ ID NO: 70898 - DNA, 22 bp, Artificial Sequence
  Synthetic oligonucleotide; TTA chr11 5153603 5153624 5153620 5153625 +
ttttctaaaaattacatatttt

SEQ ID NO: 70899 - DNA, 22 bp, Artificial Sequence
  Synthetic oligonucleotide; TTT chr11 5153606 5153627 5153623 5153628 +
tctaaaaattacatattttgaa

SEQ ID NO: 70900 - DNA, 22 bp, Artificial Sequence
  Synthetic oligonucleotide; TTT chr11 5153607 5153628 5153624 5153629 +
ctaaaaattacatattttgaat

SEQ ID NO: 70901 - DNA, 22 bp, Artificial Sequence
  Synthetic oligonucleotide; TTC chr11 5153608 5153629 5153625 5153630 +
taaaaattacatattttgaatc

SEQ ID NO: 70902 - DNA, 22 bp, Artificial Sequence
  Synthetic oligonucleotide; CTA chr11 5153610 5153631 5153627 5153632 +
aaaattacatattttgaatcag

SEQ ID NO: 70903 - DNA, 22 bp, Artificial Sequence
  Synthetic oligonucleotide; TTA chr11 5153617 5153638 5153634 5153639 +
catattttgaatcagtacattt

SEQ ID NO: 70904 - DNA, 22 bp, Artificial Sequence
  Synthetic oligonucleotide; TTT chr11 5153624 5153645 5153641 5153646 +
tgaatcagtacattttaagcta

SEQ ID NO: 70905 - DNA, 22 bp, Artificial Sequence
  Synthetic oligonucleotide; TTT chr11 5153625 5153646 5153642 5153647 +
gaatcagtacattttaagctat

SEQ ID NO: 70906 - DNA, 22 bp, Artificial Sequence
  Synthetic oligonucleotide; TTG chr11 5153626 5153647 5153643 5153648 +
aatcagtacattttaagctata

SEQ ID NO: 70907 - DNA, 22 bp, Artificial Sequence
  Synthetic oligonucleotide; TTT chr11 5153639 5153660 5153656 5153661 +
taagctatacattagagaaatg

SEQ ID NO: 70908 - DNA, 22 bp, Artificial Sequence
  Synthetic oligonucleotide; TTT chr11 5153640 5153661 5153657 5153662 +
aagctatacattagagaaatgt

SEQ ID NO: 70909 - DNA, 22 bp, Artificial Sequence
  Synthetic oligonucleotide; TTA chr11 5153641 5153662 5153658 5153663 +
agctatacattagagaaatgtt

SEQ ID NO: 70910 - DNA, 22 bp, Artificial Sequence
  Synthetic oligonucleotide; CTA chr11 5153646 5153667 5153663 5153668 +
tacattagagaaatgtttgtga

SEQ ID NO: 70911 - DNA, 22 bp, Artificial Sequence
  Synthetic oligonucleotide; TTA chr11 5153653 5153674 5153670 5153675 +
gagaaatgtttgtgatacagtg

SEQ ID NO: 70912 - DNA, 22 bp, Artificial Sequence
  Synthetic oligonucleotide; TTT chr11 5153664 5153685 5153681 5153686 +
gtgatacagtgaaaagtaaagt

SEQ ID NO: 70913 - DNA, 22 bp, Artificial Sequence
  Synthetic oligonucleotide; TTG chr11 5153665 5153686 5153682 5153687 +
tgatacagtgaaaagtaaagtt

SEQ ID NO: 70914 - DNA, 22 bp, Artificial Sequence
  Synthetic oligonucleotide; TTA chr11 5153688 5153709 5153705 5153710 +
cttcattctttcctagacactt

SEQ ID NO: 70915 - DNA, 22 bp, Artificial Sequence
  Synthetic oligonucleotide; CTT chr11 5153691 5153712 5153708 5153713 +
cattctttcctagacacttcaa

SEQ ID NO: 70916 - DNA, 22 bp, Artificial Sequence
  Synthetic oligonucleotide; TTC chr11 5153692 5153713 5153709 5153714 +
attctttcctagacacttcaat

SEQ ID NO: 70917 - DNA, 22 bp, Artificial Sequence
  Synthetic oligonucleotide; TTC chr11 5153696 5153717 5153713 5153718 +
tttcctagacacttcaataaag

SEQ ID NO: 70918 - DNA, 22 bp, Artificial Sequence
  Synthetic oligonucleotide; CTT chr11 5153698 5153719 5153715 5153720 +
tcctagacacttcaataaagtt

SEQ ID NO: 70919 - DNA, 22 bp, Artificial Sequence
  Synthetic oligonucleotide; TTT chr11 5153699 5153720 5153716 5153721 +
cctagacacttcaataaagttg

SEQ ID NO: 70920 - DNA, 22 bp, Artificial Sequence
  Synthetic oligonucleotide; TTC chr11 5153700 5153721 5153717 5153722 +
ctagacacttcaataaagttgt

SEQ ID NO: 70921 - DNA, 22 bp, Artificial Sequence
  Synthetic oligonucleotide; CTA chr11 5153703 5153724 5153720 5153725 +
gacacttcaataaagttgtttt

SEQ ID NO: 70922 - DNA, 22 bp, Artificial Sequence
  Synthetic oligonucleotide; CTT chr11 5153710 5153731 5153727 5153732 +
caataaagttgttttatctcag

SEQ ID NO: 70923 - DNA, 22 bp, Artificial Sequence
  Synthetic oligonucleotide; TTC chr11 5153711 5153732 5153728 5153733 +
aataaagttgttttatctcagt

SEQ ID NO: 70924 - DNA, 22 bp, Artificial Sequence
  Synthetic oligonucleotide; TTG chr11 5153721 5153742 5153738 5153743 +
ttttatctcagtaagctcatga

SEQ ID NO: 70925 - DNA, 22 bp, Artificial Sequence
  Synthetic oligonucleotide; TTT chr11 5153724 5153745 5153741 5153746 +
tatctcagtaagctcatgaatc

SEQ ID NO: 70926 - DNA, 22 bp, Artificial Sequence
  Synthetic oligonucleotide; TTT chr11 5153725 5153746 5153742 5153747 +
atctcagtaagctcatgaatca

SEQ ID NO: 70927 - DNA, 22 bp, Artificial Sequence
  Synthetic oligonucleotide; TTA chr11 5153726 5153747 5153743 5153748 +
tctcagtaagctcatgaatcag

SEQ ID NO: 70928 - DNA, 22 bp, Artificial Sequence
  Synthetic oligonucleotide; CTC chr11 5153730 5153751 5153747 5153752 +
agtaagctcatgaatcagctaa

SEQ ID NO: 70929 - DNA, 22 bp, Artificial Sequence
  Synthetic oligonucleotide; CTC chr11 5153739 5153760 5153756 5153761 +
atgaatcagctaaccgtatgct

SEQ ID NO: 70930 - DNA, 22 bp, Artificial Sequence
  Synthetic oligonucleotide; CTA chr11 5153751 5153772 5153768 5153773 +
accgtatgcttcatgtcaccaa

SEQ ID NO: 70931 - DNA, 22 bp, Artificial Sequence
  Synthetic oligonucleotide; CTT chr11 5153762 5153783 5153779 5153784 +
catgtcaccaatatgctggaaa

SEQ ID NO: 70932 - DNA, 22 bp, Artificial Sequence
  Synthetic oligonucleotide; TTC chr11 5153763 5153784 5153780 5153785 +
atgtcaccaatatgctggaaat

SEQ ID NO: 70933 - DNA, 22 bp, Artificial Sequence
  Synthetic oligonucleotide; CTG chr11 5153780 5153801 5153797 5153802 +
gaaattcaggaagtagctgttc

SEQ ID NO: 70934 - DNA, 22 bp, Artificial Sequence
  Synthetic oligonucleotide; TTC chr11 5153787 5153808 5153804 5153809 +
aggaagtagctgttctttgaaa

SEQ ID NO: 70935 - DNA, 22 bp, Artificial Sequence
  Synthetic oligonucleotide; CTG chr11 5153799 5153820 5153816 5153821 +
ttctttgaaagaaaaagcagct

SEQ ID NO: 70936 - DNA, 22 bp, Artificial Sequence
  Synthetic oligonucleotide; TTC chr11 5153802 5153823 5153819 5153824 +
tttgaaagaaaaagcagctttt

SEQ ID NO: 70937 - DNA, 22 bp, Artificial Sequence
  Synthetic oligonucleotide; CTT chr11 5153804 5153825 5153821 5153826 +
tgaaagaaaaagcagctttttt

SEQ ID NO: 70938 - DNA, 22 bp, Artificial Sequence
  Synthetic oligonucleotide; TTT chr11 5153805 5153826 5153822 5153827 +
gaaagaaaaagcagcttttttt

SEQ ID NO: 70939 - DNA, 22 bp, Artificial Sequence
  Synthetic oligonucleotide; TTG chr11 5153806 5153827 5153823 5153828 +
aaagaaaaagcagctttttttt

SEQ ID NO: 70940 - DNA, 22 bp, Artificial Sequence
  Synthetic oligonucleotide; CTT chr11 5153822 5153843 5153839 5153844 +
tttttttttttttttttttgaa

SEQ ID NO: 70941 - DNA, 22 bp, Artificial Sequence
  Synthetic oligonucleotide; TTT chr11 5153823 5153844 5153840 5153845 +
ttttttttttttttttttgaaa

SEQ ID NO: 70942 - DNA, 22 bp, Artificial Sequence
  Synthetic oligonucleotide; TTT chr11 5153824 5153845 5153841 5153846 +
tttttttttttttttttgaaag

SEQ ID NO: 70943 - DNA, 22 bp, Artificial Sequence
  Synthetic oligonucleotide; TTT chr11 5153825 5153846 5153842 5153847 +
ttttttttttttttttgaaaga

SEQ ID NO: 70944 - DNA, 22 bp, Artificial Sequence
  Synthetic oligonucleotide; TTT chr11 5153826 5153847 5153843 5153848 +
tttttttttttttttgaaagaa

SEQ ID NO: 70945 - DNA, 22 bp, Artificial Sequence
  Synthetic oligonucleotide; TTT chr11 5153827 5153848 5153844 5153849 +
ttttttttttttttgaaagaaa

SEQ ID NO: 70946 - DNA, 22 bp, Artificial Sequence
  Synthetic oligonucleotide; TTT chr11 5153828 5153849 5153845 5153850 +
tttttttttttttgaaagaaaa

SEQ ID NO: 70947 - DNA, 22 bp, Artificial Sequence
  Synthetic oligonucleotide; TTT chr11 5153829 5153850 5153846 5153851 +
ttttttttttttgaaagaaaag

SEQ ID NO: 70948 - DNA, 22 bp, Artificial Sequence
  Synthetic oligonucleotide; TTT chr11 5153830 5153851 5153847 5153852 +
tttttttttttgaaagaaaagg

SEQ ID NO: 70949 - DNA, 22 bp, Artificial Sequence
  Synthetic oligonucleotide; TTT chr11 5153831 5153852 5153848 5153853 +
ttttttttttgaaagaaaagga

SEQ ID NO: 70950 - DNA, 22 bp, Artificial Sequence
  Synthetic oligonucleotide; TTT chr11 5153832 5153853 5153849 5153854 +
tttttttttgaaagaaaaggaa

SEQ ID NO: 70951 - DNA, 22 bp, Artificial Sequence
  Synthetic oligonucleotide; TTT chr11 5153833 5153854 5153850 5153855 +
ttttttttgaaagaaaaggaag

SEQ ID NO: 70952 - DNA, 22 bp, Artificial Sequence
  Synthetic oligonucleotide; TTT chr11 5153834 5153855 5153851 5153856 +
tttttttgaaagaaaaggaagg

SEQ ID NO: 70953 - DNA, 22 bp, Artificial Sequence
  Synthetic oligonucleotide; TTT chr11 5153835 5153856 5153852 5153857 +
ttttttgaaagaaaaggaaggt

SEQ ID NO: 70954 - DNA, 22 bp, Artificial Sequence
  Synthetic oligonucleotide; TTT chr11 5153836 5153857 5153853 5153858 +
tttttgaaagaaaaggaaggta

SEQ ID NO: 70955 - DNA, 22 bp, Artificial Sequence
  Synthetic oligonucleotide; TTT chr11 5153837 5153858 5153854 5153859 +
ttttgaaagaaaaggaaggtaa

SEQ ID NO: 70956 - DNA, 22 bp, Artificial Sequence
  Synthetic oligonucleotide; TTT chr11 5153838 5153859 5153855 5153860 +
tttgaaagaaaaggaaggtaag

SEQ ID NO: 70957 - DNA, 22 bp, Artificial Sequence
  Synthetic oligonucleotide; TTT chr11 5153839 5153860 5153856 5153861 +
ttgaaagaaaaggaaggtaagt

SEQ ID NO: 70958 - DNA, 22 bp, Artificial Sequence
  Synthetic oligonucleotide; TTT chr11 5153840 5153861 5153857 5153862 +
tgaaagaaaaggaaggtaagta

SEQ ID NO: 70959 - DNA, 22 bp, Artificial Sequence
  Synthetic oligonucleotide; TTT chr11 5153841 5153862 5153858 5153863 +
gaaagaaaaggaaggtaagtaa

SEQ ID NO: 70960 - DNA, 22 bp, Artificial Sequence
  Synthetic oligonucleotide; TTG chr11 5153842 5153863 5153859 5153864 +
aaagaaaaggaaggtaagtaac

SEQ ID NO: 70961 - DNA, 22 bp, Artificial Sequence
  Synthetic oligonucleotide; TTT chr11 5153901 5153922 5153918 5153923 +
actcaaatattcaacaacaaat

SEQ ID NO: 70962 - DNA, 22 bp, Artificial Sequence
  Synthetic oligonucleotide; TTA chr11 5153902 5153923 5153919 5153924 +
ctcaaatattcaacaacaaatg

SEQ ID NO: 70963 - DNA, 22 bp, Artificial Sequence
  Synthetic oligonucleotide; CTC chr11 5153905 5153926 5153922 5153927 +
aaatattcaacaacaaatgttc

SEQ ID NO: 70964 - DNA, 22 bp, Artificial Sequence
  Synthetic oligonucleotide; TTC chr11 5153913 5153934 5153930 5153935 +
aacaacaaatgttcaactgctg

SEQ ID NO: 70965 - DNA, 22 bp, Artificial Sequence
  Synthetic oligonucleotide; TTC chr11 5153927 5153948 5153944 5153949 +
aactgctgctaaacttcaaatg

SEQ ID NO: 70966 - DNA, 22 bp, Artificial Sequence
  Synthetic oligonucleotide; CTG chr11 5153932 5153953 5153949 5153954 +
ctgctaaacttcaaatgaaaga

SEQ ID NO: 70967 - DNA, 22 bp, Artificial Sequence
  Synthetic oligonucleotide; CTG chr11 5153935 5153956 5153952 5153957 +
ctaaacttcaaatgaaagaacc

SEQ ID NO: 70968 - DNA, 22 bp, Artificial Sequence
  Synthetic oligonucleotide; CTA chr11 5153938 5153959 5153955 5153960 +
aacttcaaatgaaagaaccaaa

SEQ ID NO: 70969 - DNA, 22 bp, Artificial Sequence
  Synthetic oligonucleotide; CTT chr11 5153943 5153964 5153960 5153965 +
caaatgaaagaaccaaatcagc

SEQ ID NO: 70970 - DNA, 22 bp, Artificial Sequence
  Synthetic oligonucleotide; TTC chr11 5153944 5153965 5153961 5153966 +
aaatgaaagaaccaaatcagca

SEQ ID NO: 70971 - DNA, 22 bp, Artificial Sequence
  Synthetic oligonucleotide; TTT chr11 5153976 5153997 5153993 5153998 +
catgacagggaggctgtatcag

SEQ ID NO: 70972 - DNA, 22 bp, Artificial Sequence
  Synthetic oligonucleotide; TTC chr11 5153977 5153998 5153994 5153999 +
atgacagggaggctgtatcagc

SEQ ID NO: 70973 - DNA, 22 bp, Artificial Sequence
  Synthetic oligonucleotide; CTG chr11 5153992 5154013 5154009 5154014 +
tatcagctaacatacatttacc

SEQ ID NO: 70974 - DNA, 22 bp, Artificial Sequence
  Synthetic oligonucleotide; CTA chr11 5154001 5154022 5154018 5154023 +
acatacatttaccgtaaactag

SEQ ID NO: 70975 - DNA, 22 bp, Artificial Sequence
  Synthetic oligonucleotide; TTT chr11 5154011 5154032 5154028 5154033 +
accgtaaactagtaggtcaatt

SEQ ID NO: 70976 - DNA, 22 bp, Artificial Sequence
  Synthetic oligonucleotide; TTA chr11 5154012 5154033 5154029 5154034 +
ccgtaaactagtaggtcaatta

SEQ ID NO: 70977 - DNA, 22 bp, Artificial Sequence
  Synthetic oligonucleotide; CTA chr11 5154022 5154043 5154039 5154044 +
gtaggtcaattaaatactttga

SEQ ID NO: 70978 - DNA, 22 bp, Artificial Sequence
  Synthetic oligonucleotide; TTA chr11 5154034 5154055 5154051 5154056 +
aatactttgatttccacagatt

SEQ ID NO: 70979 - DNA, 22 bp, Artificial Sequence
  Synthetic oligonucleotide; CTT chr11 5154041 5154062 5154058 5154063 +
tgatttccacagatttgatccc

SEQ ID NO: 70980 - DNA, 22 bp, Artificial Sequence
  Synthetic oligonucleotide; TTT chr11 5154042 5154063 5154059 5154064 +
gatttccacagatttgatcccc

SEQ ID NO: 70981 - DNA, 22 bp, Artificial Sequence
  Synthetic oligonucleotide; TTG chr11 5154043 5154064 5154060 5154065 +
atttccacagatttgatcccca

SEQ ID NO: 70982 - DNA, 22 bp, Artificial Sequence
  Synthetic oligonucleotide; TTT chr11 5154047 5154068 5154064 5154069 +
ccacagatttgatccccaatgc

SEQ ID NO: 70983 - DNA, 22 bp, Artificial Sequence
  Synthetic oligonucleotide; TTC chr11 5154048 5154069 5154065 5154070 +
cacagatttgatccccaatgct

SEQ ID NO: 70984 - DNA, 22 bp, Artificial Sequence
  Synthetic oligonucleotide; TTT chr11 5154057 5154078 5154074 5154079 +
gatccccaatgcttagttttat

SEQ ID NO: 70985 - DNA, 22 bp, Artificial Sequence
  Synthetic oligonucleotide; TTG chr11 5154058 5154079 5154075 5154080 +
atccccaatgcttagttttatg

SEQ ID NO: 70986 - DNA, 22 bp, Artificial Sequence
  Synthetic oligonucleotide; CTT chr11 5154071 5154092 5154088 5154093 +
agttttatgacactcccatcca

SEQ ID NO: 70987 - DNA, 22 bp, Artificial Sequence
  Synthetic oligonucleotide; TTA chr11 5154072 5154093 5154089 5154094 +
gttttatgacactcccatccat

SEQ ID NO: 70988 - DNA, 22 bp, Artificial Sequence
  Synthetic oligonucleotide; TTT chr11 5154076 5154097 5154093 5154098 +
tatgacactcccatccataagt

SEQ ID NO: 70989 - DNA, 22 bp, Artificial Sequence
  Synthetic oligonucleotide; TTT chr11 5154077 5154098 5154094 5154099 +
atgacactcccatccataagtc

SEQ ID NO: 70990 - DNA, 22 bp, Artificial Sequence
  Synthetic oligonucleotide; TTA chr11 5154078 5154099 5154095 5154100 +
tgacactcccatccataagtca

SEQ ID NO: 70991 - DNA, 22 bp, Artificial Sequence
  Synthetic oligonucleotide; CTC chr11 5154086 5154107 5154103 5154108 +
ccatccataagtcactggcttt

SEQ ID NO: 70992 - DNA, 22 bp, Artificial Sequence
  Synthetic oligonucleotide; CTG chr11 5154103 5154124 5154120 5154125 +
gctttttctaataggggcaaat

SEQ ID NO: 70993 - DNA, 22 bp, Artificial Sequence
  Synthetic oligonucleotide; CTT chr11 5154107 5154128 5154124 5154129 +
tttctaataggggcaaattttt

SEQ ID NO: 70994 - DNA, 22 bp, Artificial Sequence
  Synthetic oligonucleotide; TTT chr11 5154108 5154129 5154125 5154130 +
ttctaataggggcaaatttttt

SEQ ID NO: 70995 - DNA, 22 bp, Artificial Sequence
  Synthetic oligonucleotide; TTT chr11 5154109 5154130 5154126 5154131 +
tctaataggggcaaattttttc

SEQ ID NO: 70996 - DNA, 22 bp, Artificial Sequence
  Synthetic oligonucleotide; TTT chr11 5154110 5154131 5154127 5154132 +
ctaataggggcaaattttttct

SEQ ID NO: 70997 - DNA, 22 bp, Artificial Sequence
  Synthetic oligonucleotide; TTC chr11 5154111 5154132 5154128 5154133 +
taataggggcaaattttttctt

SEQ ID NO: 70998 - DNA, 22 bp, Artificial Sequence
  Synthetic oligonucleotide; CTA chr11 5154113 5154134 5154130 5154135 +
ataggggcaaattttttcttct

SEQ ID NO: 70999 - DNA, 22 bp, Artificial Sequence
  Synthetic oligonucleotide; TTT chr11 5154127 5154148 5154144 5154149 +
tttcttctccaaagataatcac

SEQ ID NO: 71000 - DNA, 22 bp, Artificial Sequence
  Synthetic oligonucleotide; TTT chr11 5154128 5154149 5154145 5154150 +
ttcttctccaaagataatcaca

SEQ ID NO: 71001 - DNA, 22 bp, Artificial Sequence
  Synthetic oligonucleotide; TTT chr11 5154129 5154150 5154146 5154151 +
tcttctccaaagataatcacaa

SEQ ID NO: 71002 - DNA, 22 bp, Artificial Sequence
  Synthetic oligonucleotide; TTT chr11 5154130 5154151 5154147 5154152 +
cttctccaaagataatcacaat

SEQ ID NO: 71003 - DNA, 22 bp, Artificial Sequence
  Synthetic oligonucleotide; TTC chr11 5154131 5154152 5154148 5154153 +
ttctccaaagataatcacaatt

SEQ ID NO: 71004 - DNA, 22 bp, Artificial Sequence
  Synthetic oligonucleotide; CTT chr11 5154133 5154154 5154150 5154155 +
ctccaaagataatcacaattag

SEQ ID NO: 71005 - DNA, 22 bp, Artificial Sequence
  Synthetic oligonucleotide; TTC chr11 5154134 5154155 5154151 5154156 +
tccaaagataatcacaattaga

SEQ ID NO: 71006 - DNA, 22 bp, Artificial Sequence
  Synthetic oligonucleotide; CTC chr11 5154136 5154157 5154153 5154158 +
caaagataatcacaattagaat

SEQ ID NO: 71007 - DNA, 22 bp, Artificial Sequence
  Synthetic oligonucleotide; TTA chr11 5154154 5154175 5154171 5154176 +
gaataagaatcctttaatggca

SEQ ID NO: 71008 - DNA, 22 bp, Artificial Sequence
  Synthetic oligonucleotide; CTT chr11 5154168 5154189 5154185 5154190 +
taatggcaatcacaatgtctga

SEQ ID NO: 71009 - DNA, 22 bp, Artificial Sequence
  Synthetic oligonucleotide; TTT chr11 5154169 5154190 5154186 5154191 +
aatggcaatcacaatgtctgac

SEQ ID NO: 71010 - DNA, 22 bp, Artificial Sequence
  Synthetic oligonucleotide; TTA chr11 5154170 5154191 5154187 5154192 +
atggcaatcacaatgtctgact

SEQ ID NO: 71011 - DNA, 22 bp, Artificial Sequence
  Synthetic oligonucleotide; CTG chr11 5154189 5154210 5154206 5154211 +
acttattcaagaccaaagagct

SEQ ID NO: 71012 - DNA, 22 bp, Artificial Sequence
  Synthetic oligonucleotide; CTT chr11 5154193 5154214 5154210 5154215 +
attcaagaccaaagagctgaca

SEQ ID NO: 71013 - DNA, 22 bp, Artificial Sequence
  Synthetic oligonucleotide; TTA chr11 5154194 5154215 5154211 5154216 +
ttcaagaccaaagagctgacat

SEQ ID NO: 71014 - DNA, 22 bp, Artificial Sequence
  Synthetic oligonucleotide; TTC chr11 5154197 5154218 5154214 5154219 +
aagaccaaagagctgacatgtg

SEQ ID NO: 71015 - DNA, 22 bp, Artificial Sequence
  Synthetic oligonucleotide; CTG chr11 5154212 5154233 5154229 5154234 +
acatgtgagtactacctgacag

SEQ ID NO: 71016 - DNA, 22 bp, Artificial Sequence
  Synthetic oligonucleotide; CTA chr11 5154226 5154247 5154243 5154248 +
cctgacaggcacagatagcagg

SEQ ID NO: 71017 - DNA, 22 bp, Artificial Sequence
  Synthetic oligonucleotide; CTG chr11 5154230 5154251 5154247 5154252 +
acaggcacagatagcagggttg

SEQ ID NO: 71018 - DNA, 22 bp, Artificial Sequence
  Synthetic oligonucleotide; TTG chr11 5154252 5154273 5154269 5154274 +
caggtggtggtgtatgtaagtt

SEQ ID NO: 71019 - DNA, 22 bp, Artificial Sequence
  Synthetic oligonucleotide; TTC chr11 5154275 5154296 5154292 5154297 +
ctggttagttggatagagtgat

SEQ ID NO: 71020 - DNA, 22 bp, Artificial Sequence
  Synthetic oligonucleotide; CTG chr11 5154278 5154299 5154295 5154300 +
gttagttggatagagtgattgt

SEQ ID NO: 71021 - DNA, 22 bp, Artificial Sequence
  Synthetic oligonucleotide; TTA chr11 5154282 5154303 5154299 5154304 +
gttggatagagtgattgttatt

SEQ ID NO: 71022 - DNA, 22 bp, Artificial Sequence
  Synthetic oligonucleotide; TTG chr11 5154286 5154307 5154303 5154308 +
gatagagtgattgttattggag

SEQ ID NO: 71023 - DNA, 22 bp, Artificial Sequence
  Synthetic oligonucleotide; TTG chr11 5154299 5154320 5154316 5154321 +
ttattggagaagctggtaatta

SEQ ID NO: 71024 - DNA, 22 bp, Artificial Sequence
  Synthetic oligonucleotide; TTA chr11 5154302 5154323 5154319 5154324 +
ttggagaagctggtaattaaat

SEQ ID NO: 71025 - DNA, 22 bp, Artificial Sequence
  Synthetic oligonucleotide; TTG chr11 5154305 5154326 5154322 5154327 +
gagaagctggtaattaaattat

SEQ ID NO: 71026 - DNA, 22 bp, Artificial Sequence
  Synthetic oligonucleotide; CTG chr11 5154314 5154335 5154331 5154336 +
gtaattaaattatggagaggaa

SEQ ID NO: 71027 - DNA, 22 bp, Artificial Sequence
  Synthetic oligonucleotide; TTA chr11 5154321 5154342 5154338 5154343 +
aattatggagaggaaacttgga

SEQ ID NO: 71028 - DNA, 22 bp, Artificial Sequence
  Synthetic oligonucleotide; TTA chr11 5154326 5154347 5154343 5154348 +
tggagaggaaacttggaatcgt

SEQ ID NO: 71029 - DNA, 22 bp, Artificial Sequence
  Synthetic oligonucleotide; CTT chr11 5154340 5154361 5154357 5154362 +
ggaatcgtgagacttactcctc

SEQ ID NO: 71030 - DNA, 22 bp, Artificial Sequence
  Synthetic oligonucleotide; TTG chr11 5154341 5154362 5154358 5154363 +
gaatcgtgagacttactcctca

SEQ ID NO: 71031 - DNA, 22 bp, Artificial Sequence
  Synthetic oligonucleotide; CTT chr11 5154355 5154376 5154372 5154377 +
actcctcaattattattgagag

SEQ ID NO: 71032 - DNA, 22 bp, Artificial Sequence
  Synthetic oligonucleotide; TTA chr11 5154356 5154377 5154373 5154378 +
ctcctcaattattattgagagc

SEQ ID NO: 71033 - DNA, 22 bp, Artificial Sequence
  Synthetic oligonucleotide; CTC chr11 5154359 5154380 5154376 5154381 +
ctcaattattattgagagctgg

SEQ ID NO: 71034 - DNA, 22 bp, Artificial Sequence
  Synthetic oligonucleotide; CTC chr11 5154362 5154383 5154379 5154384 +
aattattattgagagctggttt

SEQ ID NO: 71035 - DNA, 22 bp, Artificial Sequence
  Synthetic oligonucleotide; TTA chr11 5154367 5154388 5154384 5154389 +
ttattgagagctggttttgctc

SEQ ID NO: 71036 - DNA, 22 bp, Artificial Sequence
  Synthetic oligonucleotide; TTA chr11 5154370 5154391 5154387 5154392 +
ttgagagctggttttgctctta

SEQ ID NO: 71037 - DNA, 22 bp, Artificial Sequence
  Synthetic oligonucleotide; TTG chr11 5154373 5154394 5154390 5154395 +
agagctggttttgctcttacca

SEQ ID NO: 71038 - DNA, 22 bp, Artificial Sequence
  Synthetic oligonucleotide; CTG chr11 5154380 5154401 5154397 5154402 +
gttttgctcttaccagatacct

SEQ ID NO: 71039 - DNA, 22 bp, Artificial Sequence
  Synthetic oligonucleotide; TTT chr11 5154384 5154405 5154401 5154406 +
tgctcttaccagatacctgaag

SEQ ID NO: 71040 - DNA, 22 bp, Artificial Sequence
  Synthetic oligonucleotide; TTT chr11 5154385 5154406 5154402 5154407 +
gctcttaccagatacctgaaga

SEQ ID NO: 71041 - DNA, 22 bp, Artificial Sequence
  Synthetic oligonucleotide; TTG chr11 5154386 5154407 5154403 5154408 +
ctcttaccagatacctgaagaa

SEQ ID NO: 71042 - DNA, 22 bp, Artificial Sequence
  Synthetic oligonucleotide; CTC chr11 5154389 5154410 5154406 5154411 +
ttaccagatacctgaagaatat

SEQ ID NO: 71043 - DNA, 22 bp, Artificial Sequence
  Synthetic oligonucleotide; CTT chr11 5154391 5154412 5154408 5154413 +
accagatacctgaagaatattg

SEQ ID NO: 71044 - DNA, 22 bp, Artificial Sequence
  Synthetic oligonucleotide; TTA chr11 5154392 5154413 5154409 5154414 +
ccagatacctgaagaatattgt

SEQ ID NO: 71045 - DNA, 22 bp, Artificial Sequence
  Synthetic oligonucleotide; CTG chr11 5154403 5154424 5154420 5154425 +
aagaatattgtccatttttcat

SEQ ID NO: 71046 - DNA, 22 bp, Artificial Sequence
  Synthetic oligonucleotide; TTG chr11 5154413 5154434 5154430 5154435 +
tccatttttcataacactttca

SEQ ID NO: 71047 - DNA, 22 bp, Artificial Sequence
  Synthetic oligonucleotide; TTT chr11 5154420 5154441 5154437 5154442 +
ttcataacactttcattcatca

SEQ ID NO: 71048 - DNA, 22 bp, Artificial Sequence
  Synthetic oligonucleotide; TTT chr11 5154421 5154442 5154438 5154443 +
tcataacactttcattcatcac

SEQ ID NO: 71049 - DNA, 22 bp, Artificial Sequence
  Synthetic oligonucleotide; TTT chr11 5154422 5154443 5154439 5154444 +
cataacactttcattcatcact

SEQ ID NO: 71050 - DNA, 22 bp, Artificial Sequence
  Synthetic oligonucleotide; TTC chr11 5154423 5154444 5154440 5154445 +
ataacactttcattcatcactc

SEQ ID NO: 71051 - DNA, 22 bp, Artificial Sequence
  Synthetic oligonucleotide; CTT chr11 5154432 5154453 5154449 5154454 +
tcattcatcactcaccaatttt

SEQ ID NO: 71052 - DNA, 22 bp, Artificial Sequence
  Synthetic oligonucleotide; TTT chr11 5154433 5154454 5154450 5154455 +
cattcatcactcaccaattttt

SEQ ID NO: 71053 - DNA, 22 bp, Artificial Sequence
  Synthetic oligonucleotide; TTC chr11 5154434 5154455 5154451 5154456 +
attcatcactcaccaatttttc

SEQ ID NO: 71054 - DNA, 22 bp, Artificial Sequence
  Synthetic oligonucleotide; TTC chr11 5154438 5154459 5154455 5154460 +
atcactcaccaatttttcttct

SEQ ID NO: 71055 - DNA, 22 bp, Artificial Sequence
  Synthetic oligonucleotide; CTC chr11 5154445 5154466 5154462 5154467 +
accaatttttcttctccaagga

SEQ ID NO: 71056 - DNA, 22 bp, Artificial Sequence
  Synthetic oligonucleotide; TTT chr11 5154453 5154474 5154470 5154475 +
ttcttctccaaggattccagct

SEQ ID NO: 71057 - DNA, 22 bp, Artificial Sequence
  Synthetic oligonucleotide; TTT chr11 5154454 5154475 5154471 5154476 +
tcttctccaaggattccagctt

SEQ ID NO: 71058 - DNA, 22 bp, Artificial Sequence
  Synthetic oligonucleotide; TTT chr11 5154455 5154476 5154472 5154477 +
cttctccaaggattccagcttc

SEQ ID NO: 71059 - DNA, 22 bp, Artificial Sequence
  Synthetic oligonucleotide; TTC chr11 5154456 5154477 5154473 5154478 +
ttctccaaggattccagcttca

SEQ ID NO: 71060 - DNA, 22 bp, Artificial Sequence
  Synthetic oligonucleotide; CTT chr11 5154458 5154479 5154475 5154480 +
ctccaaggattccagcttcatt

SEQ ID NO: 71061 - DNA, 22 bp, Artificial Sequence
  Synthetic oligonucleotide; TTC chr11 5154459 5154480 5154476 5154481 +
tccaaggattccagcttcattc

SEQ ID NO: 71062 - DNA, 22 bp, Artificial Sequence
  Synthetic oligonucleotide; CTC chr11 5154461 5154482 5154478 5154483 +
caaggattccagcttcattccc

SEQ ID NO: 71063 - DNA, 22 bp, Artificial Sequence
  Synthetic oligonucleotide; TTC chr11 5154470 5154491 5154487 5154492 +
cagcttcattcccttaagttgt

SEQ ID NO: 71064 - DNA, 22 bp, Artificial Sequence
  Synthetic oligonucleotide; CTT chr11 5154476 5154497 5154493 5154498 +
cattcccttaagttgtgggttc

SEQ ID NO: 71065 - DNA, 22 bp, Artificial Sequence
  Synthetic oligonucleotide; TTC chr11 5154477 5154498 5154494 5154499 +
attcccttaagttgtgggttct

SEQ ID NO: 71066 - DNA, 22 bp, Artificial Sequence
  Synthetic oligonucleotide; TTC chr11 5154481 5154502 5154498 5154503 +
ccttaagttgtgggttctgtga

SEQ ID NO: 71067 - DNA, 22 bp, Artificial Sequence
  Synthetic oligonucleotide; CTT chr11 5154485 5154506 5154502 5154507 +
aagttgtgggttctgtgatggc

SEQ ID NO: 71068 - DNA, 22 bp, Artificial Sequence
  Synthetic oligonucleotide; TTA chr11 5154486 5154507 5154503 5154508 +
agttgtgggttctgtgatggct

SEQ ID NO: 71069 - DNA, 22 bp, Artificial Sequence
  Synthetic oligonucleotide; TTG chr11 5154491 5154512 5154508 5154513 +
tgggttctgtgatggctctact

SEQ ID NO: 71070 - DNA, 22 bp, Artificial Sequence
  Synthetic oligonucleotide; TTC chr11 5154498 5154519 5154515 5154520 +
tgtgatggctctactttctgtc

SEQ ID NO: 71071 - DNA, 22 bp, Artificial Sequence
  Synthetic oligonucleotide; CTG chr11 5154500 5154521 5154517 5154522 +
tgatggctctactttctgtctg

SEQ ID NO: 71072 - DNA, 22 bp, Artificial Sequence
  Synthetic oligonucleotide; CTC chr11 5154509 5154530 5154526 5154531 +
tactttctgtctgcactctgtg

SEQ ID NO: 71073 - DNA, 22 bp, Artificial Sequence
  Synthetic oligonucleotide; CTA chr11 5154511 5154532 5154528 5154533 +
ctttctgtctgcactctgtgta

SEQ ID NO: 71074 - DNA, 22 bp, Artificial Sequence
  Synthetic oligonucleotide; CTT chr11 5154514 5154535 5154531 5154536 +
tctgtctgcactctgtgtaaca

SEQ ID NO: 71075 - DNA, 22 bp, Artificial Sequence
  Synthetic oligonucleotide; TTT chr11 5154515 5154536 5154532 5154537 +
ctgtctgcactctgtgtaacag

SEQ ID NO: 71076 - DNA, 22 bp, Artificial Sequence
  Synthetic oligonucleotide; TTC chr11 5154516 5154537 5154533 5154538 +
tgtctgcactctgtgtaacagc

SEQ ID NO: 71077 - DNA, 22 bp, Artificial Sequence
  Synthetic oligonucleotide; CTG chr11 5154518 5154539 5154535 5154540 +
tctgcactctgtgtaacagcat

SEQ ID NO: 71078 - DNA, 22 bp, Artificial Sequence
  Synthetic oligonucleotide; CTG chr11 5154522 5154543 5154539 5154544 +
cactctgtgtaacagcatccag

SEQ ID NO: 71079 - DNA, 22 bp, Artificial Sequence
  Synthetic oligonucleotide; CTC chr11 5154527 5154548 5154544 5154549 +
tgtgtaacagcatccagctaat

SEQ ID NO: 71080 - DNA, 22 bp, Artificial Sequence
  Synthetic oligonucleotide; CTG chr11 5154529 5154550 5154546 5154551 +
tgtaacagcatccagctaatgt

SEQ ID NO: 71081 - DNA, 22 bp, Artificial Sequence
  Synthetic oligonucleotide; CTA chr11 5154547 5154568 5154564 5154569 +
atgtcataaattttactctgtt

SEQ ID NO: 71082 - DNA, 22 bp, Artificial Sequence
  Synthetic oligonucleotide; TTT chr11 5154560 5154581 5154577 5154582 +
tactctgtttggtgccaggata

SEQ ID NO: 71083 - DNA, 22 bp, Artificial Sequence
  Synthetic oligonucleotide; TTT chr11 5154561 5154582 5154578 5154583 +
actctgtttggtgccaggatat

SEQ ID NO: 71084 - DNA, 22 bp, Artificial Sequence
  Synthetic oligonucleotide; TTA chr11 5154562 5154583 5154579 5154584 +
ctctgtttggtgccaggatatg

SEQ ID NO: 71085 - DNA, 22 bp, Artificial Sequence
  Synthetic oligonucleotide; CTC chr11 5154565 5154586 5154582 5154587 +
tgtttggtgccaggatatgtgc

SEQ ID NO: 71086 - DNA, 22 bp, Artificial Sequence
  Synthetic oligonucleotide; CTG chr11 5154567 5154588 5154584 5154589 +
tttggtgccaggatatgtgcca

SEQ ID NO: 71087 - DNA, 22 bp, Artificial Sequence
  Synthetic oligonucleotide; TTT chr11 5154570 5154591 5154587 5154592 +
ggtgccaggatatgtgccaata

SEQ ID NO: 71088 - DNA, 22 bp, Artificial Sequence
  Synthetic oligonucleotide; TTG chr11 5154571 5154592 5154588 5154593 +
gtgccaggatatgtgccaatat

SEQ ID NO: 71089 - DNA, 22 bp, Artificial Sequence
  Synthetic oligonucleotide; CTG chr11 5154602 5154623 5154619 5154624 +
tggacattttgcagatgacttt

SEQ ID NO: 71090 - DNA, 22 bp, Artificial Sequence
  Synthetic oligonucleotide; TTT chr11 5154611 5154632 5154628 5154633 +
tgcagatgactttttacacttt

SEQ ID NO: 71091 - DNA, 22 bp, Artificial Sequence
  Synthetic oligonucleotide; TTT chr11 5154612 5154633 5154629 5154634 +
gcagatgactttttacactttt

SEQ ID NO: 71092 - DNA, 22 bp, Artificial Sequence
  Synthetic oligonucleotide; TTG chr11 5154613 5154634 5154630 5154635 +
cagatgactttttacacttttc

SEQ ID NO: 71093 - DNA, 22 bp, Artificial Sequence
  Synthetic oligonucleotide; CTT chr11 5154623 5154644 5154640 5154645 +
tttacacttttcatttatctct

SEQ ID NO: 71094 - DNA, 22 bp, Artificial Sequence
  Synthetic oligonucleotide; TTT chr11 5154624 5154645 5154641 5154646 +
ttacacttttcatttatctcta

SEQ ID NO: 71095 - DNA, 22 bp, Artificial Sequence
  Synthetic oligonucleotide; TTT chr11 5154625 5154646 5154642 5154647 +
tacacttttcatttatctctaa

SEQ ID NO: 71096 - DNA, 22 bp, Artificial Sequence
  Synthetic oligonucleotide; TTT chr11 5154626 5154647 5154643 5154648 +
acacttttcatttatctctaac

SEQ ID NO: 71097 - DNA, 22 bp, Artificial Sequence
  Synthetic oligonucleotide; TTA chr11 5154627 5154648 5154644 5154649 +
cacttttcatttatctctaaca

SEQ ID NO: 71098 - DNA, 22 bp, Artificial Sequence
  Synthetic oligonucleotide; CTT chr11 5154632 5154653 5154649 5154654 +
ttcatttatctctaacacggac

SEQ ID NO: 71099 - DNA, 22 bp, Artificial Sequence
  Synthetic oligonucleotide; TTT chr11 5154633 5154654 5154650 5154655 +
tcatttatctctaacacggaca

SEQ ID NO: 71100 - DNA, 22 bp, Artificial Sequence
  Synthetic oligonucleotide; TTT chr11 5154634 5154655 5154651 5154656 +
catttatctctaacacggacat

SEQ ID NO: 71101 - DNA, 22 bp, Artificial Sequence
  Synthetic oligonucleotide; TTC chr11 5154635 5154656 5154652 5154657 +
atttatctctaacacggacatc

SEQ ID NO: 71102 - DNA, 22 bp, Artificial Sequence
  Synthetic oligonucleotide; TTT chr11 5154639 5154660 5154656 5154661 +
atctctaacacggacatcttct

SEQ ID NO: 71103 - DNA, 22 bp, Artificial Sequence
  Synthetic oligonucleotide; TTA chr11 5154640 5154661 5154657 5154662 +
tctctaacacggacatcttctt

SEQ ID NO: 71104 - DNA, 22 bp, Artificial Sequence
  Synthetic oligonucleotide; CTC chr11 5154644 5154665 5154661 5154666 +
taacacggacatcttcttcttc

SEQ ID NO: 71105 - DNA, 22 bp, Artificial Sequence
  Synthetic oligonucleotide; CTA chr11 5154646 5154667 5154663 5154668 +
acacggacatcttcttcttctt

SEQ ID NO: 71106 - DNA, 22 bp, Artificial Sequence
  Synthetic oligonucleotide; CTT chr11 5154659 5154680 5154676 5154681 +
cttcttcttctggaagtctgtc

SEQ ID NO: 71107 - DNA, 22 bp, Artificial Sequence
  Synthetic oligonucleotide; TTC chr11 5154660 5154681 5154677 5154682 +
ttcttcttctggaagtctgtct

SEQ ID NO: 71108 - DNA, 22 bp, Artificial Sequence
  Synthetic oligonucleotide; CTT chr11 5154662 5154683 5154679 5154684 +
cttcttctggaagtctgtctca

SEQ ID NO: 71109 - DNA, 22 bp, Artificial Sequence
  Synthetic oligonucleotide; TTC chr11 5154663 5154684 5154680 5154685 +
ttcttctggaagtctgtctcag

SEQ ID NO: 71110 - DNA, 22 bp, Artificial Sequence
  Synthetic oligonucleotide; CTT chr11 5154665 5154686 5154682 5154687 +
cttctggaagtctgtctcagac

SEQ ID NO: 71111 - DNA, 22 bp, Artificial Sequence
  Synthetic oligonucleotide; TTC chr11 5154666 5154687 5154683 5154688 +
ttctggaagtctgtctcagacc

SEQ ID NO: 71112 - DNA, 22 bp, Artificial Sequence
  Synthetic oligonucleotide; CTT chr11 5154668 5154689 5154685 5154690 +
ctggaagtctgtctcagaccat

SEQ ID NO: 71113 - DNA, 22 bp, Artificial Sequence
  Synthetic oligonucleotide; TTC chr11 5154669 5154690 5154686 5154691 +
tggaagtctgtctcagaccatc

SEQ ID NO: 71114 - DNA, 22 bp, Artificial Sequence
  Synthetic oligonucleotide; CTG chr11 5154671 5154692 5154688 5154693 +
gaagtctgtctcagaccatctt

SEQ ID NO: 71115 - DNA, 22 bp, Artificial Sequence
  Synthetic oligonucleotide; CTG chr11 5154679 5154700 5154696 5154701 +
tctcagaccatctttgtgtgct

SEQ ID NO: 71116 - DNA, 22 bp, Artificial Sequence
  Synthetic oligonucleotide; CTC chr11 5154683 5154704 5154700 5154705 +
agaccatctttgtgtgctcatc

SEQ ID NO: 71117 - DNA, 22 bp, Artificial Sequence
  Synthetic oligonucleotide; CTT chr11 5154693 5154714 5154710 5154715 +
tgtgtgctcatcccccagtaaa

SEQ ID NO: 71118 - DNA, 22 bp, Artificial Sequence
  Synthetic oligonucleotide; TTT chr11 5154694 5154715 5154711 5154716 +
gtgtgctcatcccccagtaaaa

SEQ ID NO: 71119 - DNA, 22 bp, Artificial Sequence
  Synthetic oligonucleotide; TTG chr11 5154695 5154716 5154712 5154717 +
tgtgctcatcccccagtaaaac

SEQ ID NO: 71120 - DNA, 22 bp, Artificial Sequence
  Synthetic oligonucleotide; CTC chr11 5154702 5154723 5154719 5154724 +
atcccccagtaaaactcatagt

SEQ ID NO: 71121 - DNA, 22 bp, Artificial Sequence
  Synthetic oligonucleotide; CTC chr11 5154719 5154740 5154736 5154741 +
atagtgaggtctgtagcattct

SEQ ID NO: 71122 - DNA, 22 bp, Artificial Sequence
  Synthetic oligonucleotide; CTG chr11 5154732 5154753 5154749 5154754 +
tagcattctgaaacacgggatg

SEQ ID NO: 71123 - DNA, 22 bp, Artificial Sequence
  Synthetic oligonucleotide; TTC chr11 5154740 5154761 5154757 5154762 +
tgaaacacgggatgaatttatt

SEQ ID NO: 71124 - DNA, 22 bp, Artificial Sequence
  Synthetic oligonucleotide; CTG chr11 5154742 5154763 5154759 5154764 +
aaacacgggatgaatttattga

SEQ ID NO: 71125 - DNA, 22 bp, Artificial Sequence
  Synthetic oligonucleotide; TTT chr11 5154759 5154780 5154776 5154781 +
attgagctcaaattggagaaaa

SEQ ID NO: 71126 - DNA, 22 bp, Artificial Sequence
  Synthetic oligonucleotide; TTA chr11 5154760 5154781 5154777 5154782 +
ttgagctcaaattggagaaaaa

SEQ ID NO: 71127 - DNA, 22 bp, Artificial Sequence
  Synthetic oligonucleotide; TTG chr11 5154763 5154784 5154780 5154785 +
agctcaaattggagaaaaaagt

SEQ ID NO: 71128 - DNA, 22 bp, Artificial Sequence
  Synthetic oligonucleotide; CTC chr11 5154768 5154789 5154785 5154790 +
aaattggagaaaaaagtggcta

SEQ ID NO: 71129 - DNA, 22 bp, Artificial Sequence
  Synthetic oligonucleotide; TTG chr11 5154774 5154795 5154791 5154796 +
gagaaaaaagtggctatccacc

SEQ ID NO: 71130 - DNA, 22 bp, Artificial Sequence
  Synthetic oligonucleotide; CTA chr11 5154790 5154811 5154807 5154812 +
tccaccaatttaatattccttt

SEQ ID NO: 71131 - DNA, 22 bp, Artificial Sequence
  Synthetic oligonucleotide; TTT chr11 5154801 5154822 5154818 5154823 +
aatattcctttatgaatgtgtg

SEQ ID NO: 71132 - DNA, 22 bp, Artificial Sequence
  Synthetic oligonucleotide; TTA chr11 5154802 5154823 5154819 5154824 +
atattcctttatgaatgtgtgg

SEQ ID NO: 71133 - DNA, 22 bp, Artificial Sequence
  Synthetic oligonucleotide; TTC chr11 5154808 5154829 5154825 5154830 +
ctttatgaatgtgtggagaagt

SEQ ID NO: 71134 - DNA, 22 bp, Artificial Sequence
  Synthetic oligonucleotide; CTT chr11 5154811 5154832 5154828 5154833 +
tatgaatgtgtggagaagtagg

SEQ ID NO: 71135 - DNA, 22 bp, Artificial Sequence
  Synthetic oligonucleotide; TTT chr11 5154812 5154833 5154829 5154834 +
atgaatgtgtggagaagtagga

SEQ ID NO: 71136 - DNA, 22 bp, Artificial Sequence
  Synthetic oligonucleotide; TTA chr11 5154813 5154834 5154830 5154835 +
tgaatgtgtggagaagtaggag

SEQ ID NO: 71137 - DNA, 22 bp, Artificial Sequence
  Synthetic oligonucleotide; TTA chr11 5154841 5154862 5154858 5154863 +
tgagcatgaaatgagggatttc

SEQ ID NO: 71138 - DNA, 22 bp, Artificial Sequence
  Synthetic oligonucleotide; TTT chr11 5154862 5154883 5154879 5154884 +
cctagttgatagccaaaaccac

SEQ ID NO: 71139 - DNA, 22 bp, Artificial Sequence
  Synthetic oligonucleotide; TTC chr11 5154863 5154884 5154880 5154885 +
ctagttgatagccaaaaccacg

SEQ ID NO: 71140 - DNA, 22 bp, Artificial Sequence
  Synthetic oligonucleotide; CTA chr11 5154866 5154887 5154883 5154888 +
gttgatagccaaaaccacgagg

SEQ ID NO: 71141 - DNA, 22 bp, Artificial Sequence
  Synthetic oligonucleotide; TTG chr11 5154870 5154891 5154887 5154892 +
atagccaaaaccacgagggacc

SEQ ID NO: 71142 - DNA, 22 bp, Artificial Sequence
  Synthetic oligonucleotide; TTT chr11 5154902 5154923 5154919 5154924 +
taagtcagccctcttgggttca

SEQ ID NO: 71143 - DNA, 22 bp, Artificial Sequence
  Synthetic oligonucleotide; TTT chr11 5154903 5154924 5154920 5154925 +
aagtcagccctcttgggttcac

SEQ ID NO: 71144 - DNA, 22 bp, Artificial Sequence
  Synthetic oligonucleotide; TTA chr11 5154904 5154925 5154921 5154926 +
agtcagccctcttgggttcact

SEQ ID NO: 71145 - DNA, 22 bp, Artificial Sequence
  Synthetic oligonucleotide; CTC chr11 5154915 5154936 5154932 5154937 +
ttgggttcactggcacctaata

SEQ ID NO: 71146 - DNA, 22 bp, Artificial Sequence
  Synthetic oligonucleotide; CTT chr11 5154917 5154938 5154934 5154939 +
gggttcactggcacctaatatc

SEQ ID NO: 71147 - DNA, 22 bp, Artificial Sequence
  Synthetic oligonucleotide; TTG chr11 5154918 5154939 5154935 5154940 +
ggttcactggcacctaatatcc

SEQ ID NO: 71148 - DNA, 22 bp, Artificial Sequence
  Synthetic oligonucleotide; TTC chr11 5154923 5154944 5154940 5154945 +
actggcacctaatatccccgta

SEQ ID NO: 71149 - DNA, 22 bp, Artificial Sequence
  Synthetic oligonucleotide; CTG chr11 5154927 5154948 5154944 5154949 +
gcacctaatatccccgtaatta

SEQ ID NO: 71150 - DNA, 22 bp, Artificial Sequence
  Synthetic oligonucleotide; CTA chr11 5154934 5154955 5154951 5154956 +
atatccccgtaattatttctac

SEQ ID NO: 71151 - DNA, 22 bp, Artificial Sequence
  Synthetic oligonucleotide; TTA chr11 5154949 5154970 5154966 5154971 +
tttctacacttgcagaaatctc

SEQ ID NO: 71152 - DNA, 22 bp, Artificial Sequence
  Synthetic oligonucleotide; TTT chr11 5154952 5154973 5154969 5154974 +
ctacacttgcagaaatctcctt

SEQ ID NO: 71153 - DNA, 22 bp, Artificial Sequence
  Synthetic oligonucleotide; TTC chr11 5154953 5154974 5154970 5154975 +
tacacttgcagaaatctccttt

SEQ ID NO: 71154 - DNA, 22 bp, Artificial Sequence
  Synthetic oligonucleotide; CTA chr11 5154955 5154976 5154972 5154977 +
cacttgcagaaatctcctttct

SEQ ID NO: 71155 - DNA, 22 bp, Artificial Sequence
  Synthetic oligonucleotide; CTT chr11 5154960 5154981 5154977 5154982 +
gcagaaatctcctttctctctt

SEQ ID NO: 71156 - DNA, 22 bp, Artificial Sequence
  Synthetic oligonucleotide; TTG chr11 5154961 5154982 5154978 5154983 +
cagaaatctcctttctctcttt

SEQ ID NO: 71157 - DNA, 22 bp, Artificial Sequence
  Synthetic oligonucleotide; CTC chr11 5154971 5154992 5154988 5154993 +
ctttctctctttttctcttttc

SEQ ID NO: 71158 - DNA, 22 bp, Artificial Sequence
  Synthetic oligonucleotide; CTT chr11 5154974 5154995 5154991 5154996 +
tctctctttttctcttttccca

SEQ ID NO: 71159 - DNA, 22 bp, Artificial Sequence
  Synthetic oligonucleotide; TTT chr11 5154975 5154996 5154992 5154997 +
ctctctttttctcttttcccac

SEQ ID NO: 71160 - DNA, 22 bp, Artificial Sequence
  Synthetic oligonucleotide; TTC chr11 5154976 5154997 5154993 5154998 +
tctctttttctcttttcccaca

SEQ ID NO: 71161 - DNA, 22 bp, Artificial Sequence
  Synthetic oligonucleotide; CTC chr11 5154978 5154999 5154995 5155000 +
tctttttctcttttcccacagg

SEQ ID NO: 71162 - DNA, 22 bp, Artificial Sequence
  Synthetic oligonucleotide; CTC chr11 5154980 5155001 5154997 5155002 +
tttttctcttttcccacaggct

SEQ ID NO: 71163 - DNA, 22 bp, Artificial Sequence
  Synthetic oligonucleotide; CTT chr11 5154982 5155003 5154999 5155004 +
tttctcttttcccacaggctaa

SEQ ID NO: 71164 - DNA, 22 bp, Artificial Sequence
  Synthetic oligonucleotide; TTT chr11 5154983 5155004 5155000 5155005 +
ttctcttttcccacaggctaaa

SEQ ID NO: 71165 - DNA, 22 bp, Artificial Sequence
  Synthetic oligonucleotide; TTT chr11 5154984 5155005 5155001 5155006 +
tctcttttcccacaggctaaat

SEQ ID NO: 71166 - DNA, 22 bp, Artificial Sequence
  Synthetic oligonucleotide; TTT chr11 5154985 5155006 5155002 5155007 +
ctcttttcccacaggctaaatg

SEQ ID NO: 71167 - DNA, 22 bp, Artificial Sequence
  Synthetic oligonucleotide; TTC chr11 5154986 5155007 5155003 5155008 +
tcttttcccacaggctaaatgc

SEQ ID NO: 71168 - DNA, 22 bp, Artificial Sequence
  Synthetic oligonucleotide; CTC chr11 5154988 5155009 5155005 5155010 +
ttttcccacaggctaaatgcag

SEQ ID NO: 71169 - DNA, 22 bp, Artificial Sequence
  Synthetic oligonucleotide; CTT chr11 5154990 5155011 5155007 5155012 +
ttcccacaggctaaatgcagaa

SEQ ID NO: 71170 - DNA, 22 bp, Artificial Sequence
  Synthetic oligonucleotide; TTT chr11 5154991 5155012 5155008 5155013 +
tcccacaggctaaatgcagaat

SEQ ID NO: 71171 - DNA, 22 bp, Artificial Sequence
  Synthetic oligonucleotide; TTT chr11 5154992 5155013 5155009 5155014 +
cccacaggctaaatgcagaata

SEQ ID NO: 71172 - DNA, 22 bp, Artificial Sequence
  Synthetic oligonucleotide; TTC chr11 5154993 5155014 5155010 5155015 +
ccacaggctaaatgcagaataa

SEQ ID NO: 71173 - DNA, 22 bp, Artificial Sequence
  Synthetic oligonucleotide; CTA chr11 5155003 5155024 5155020 5155025 +
aatgcagaataattcatatgca

SEQ ID NO: 71174 - DNA, 22 bp, Artificial Sequence
  Synthetic oligonucleotide; TTC chr11 5155018 5155039 5155035 5155040 +
atatgcaaaaaatttttttaca

SEQ ID NO: 71175 - DNA, 22 bp, Artificial Sequence
  Synthetic oligonucleotide; TTT chr11 5155033 5155054 5155050 5155055 +
ttttacaagctatgttcctttt

SEQ ID NO: 71176 - DNA, 22 bp, Artificial Sequence
  Synthetic oligonucleotide; TTT chr11 5155034 5155055 5155051 5155056 +
tttacaagctatgttccttttc

SEQ ID NO: 71177 - DNA, 22 bp, Artificial Sequence
  Synthetic oligonucleotide; TTT chr11 5155035 5155056 5155052 5155057 +
ttacaagctatgttccttttct

SEQ ID NO: 71178 - DNA, 22 bp, Artificial Sequence
  Synthetic oligonucleotide; TTT chr11 5155036 5155057 5155053 5155058 +
tacaagctatgttccttttctg

SEQ ID NO: 71179 - DNA, 22 bp, Artificial Sequence
  Synthetic oligonucleotide; TTT chr11 5155037 5155058 5155054 5155059 +
acaagctatgttccttttctgc

SEQ ID NO: 71180 - DNA, 22 bp, Artificial Sequence
  Synthetic oligonucleotide; TTA chr11 5155038 5155059 5155055 5155060 +
caagctatgttccttttctgcc

SEQ ID NO: 71181 - DNA, 22 bp, Artificial Sequence
  Synthetic oligonucleotide; CTA chr11 5155045 5155066 5155062 5155067 +
tgttccttttctgccatttcta

SEQ ID NO: 71182 - DNA, 22 bp, Artificial Sequence
  Synthetic oligonucleotide; TTC chr11 5155050 5155071 5155067 5155072 +
cttttctgccatttctatttgc

SEQ ID NO: 71183 - DNA, 22 bp, Artificial Sequence
  Synthetic oligonucleotide; CTT chr11 5155053 5155074 5155070 5155075 +
ttctgccatttctatttgcaaa

SEQ ID NO: 71184 - DNA, 22 bp, Artificial Sequence
  Synthetic oligonucleotide; TTT chr11 5155054 5155075 5155071 5155076 +
tctgccatttctatttgcaaaa

SEQ ID NO: 71185 - DNA, 22 bp, Artificial Sequence
  Synthetic oligonucleotide; TTT chr11 5155055 5155076 5155072 5155077 +
ctgccatttctatttgcaaaat

SEQ ID NO: 71186 - DNA, 22 bp, Artificial Sequence
  Synthetic oligonucleotide; TTC chr11 5155056 5155077 5155073 5155078 +
tgccatttctatttgcaaaatt

SEQ ID NO: 71187 - DNA, 22 bp, Artificial Sequence
  Synthetic oligonucleotide; CTG chr11 5155058 5155079 5155075 5155080 +
ccatttctatttgcaaaattct

SEQ ID NO: 71188 - DNA, 22 bp, Artificial Sequence
  Synthetic oligonucleotide; TTT chr11 5155064 5155085 5155081 5155086 +
ctatttgcaaaattctaaagcc

SEQ ID NO: 71189 - DNA, 22 bp, Artificial Sequence
  Synthetic oligonucleotide; TTC chr11 5155065 5155086 5155082 5155087 +
tatttgcaaaattctaaagccc

SEQ ID NO: 71190 - DNA, 22 bp, Artificial Sequence
  Synthetic oligonucleotide; CTA chr11 5155067 5155088 5155084 5155089 +
tttgcaaaattctaaagcccat

SEQ ID NO: 71191 - DNA, 22 bp, Artificial Sequence
  Synthetic oligonucleotide; TTT chr11 5155070 5155091 5155087 5155092 +
gcaaaattctaaagcccattta

SEQ ID NO: 71192 - DNA, 22 bp, Artificial Sequence
  Synthetic oligonucleotide; TTG chr11 5155071 5155092 5155088 5155093 +
caaaattctaaagcccatttaa

SEQ ID NO: 71193 - DNA, 22 bp, Artificial Sequence
  Synthetic oligonucleotide; TTC chr11 5155079 5155100 5155096 5155101 +
taaagcccatttaatgcaaaca

SEQ ID NO: 71194 - DNA, 22 bp, Artificial Sequence
  Synthetic oligonucleotide; CTA chr11 5155081 5155102 5155098 5155103 +
aagcccatttaatgcaaacatg

SEQ ID NO: 71195 - DNA, 22 bp, Artificial Sequence
  Synthetic oligonucleotide; TTT chr11 5155091 5155112 5155108 5155113 +
aatgcaaacatgtttctatgcc

SEQ ID NO: 71196 - DNA, 22 bp, Artificial Sequence
  Synthetic oligonucleotide; TTA chr11 5155092 5155113 5155109 5155114 +
atgcaaacatgtttctatgcca

SEQ ID NO: 71197 - DNA, 22 bp, Artificial Sequence
  Synthetic oligonucleotide; TTT chr11 5155106 5155127 5155123 5155128 +
ctatgccaattcctatttaaat

SEQ ID NO: 71198 - DNA, 22 bp, Artificial Sequence
  Synthetic oligonucleotide; TTC chr11 5155107 5155128 5155124 5155129 +
tatgccaattcctatttaaata

SEQ ID NO: 71199 - DNA, 22 bp, Artificial Sequence
  Synthetic oligonucleotide; CTA chr11 5155109 5155130 5155126 5155131 +
tgccaattcctatttaaataaa

SEQ ID NO: 71200 - DNA, 22 bp, Artificial Sequence
  Synthetic oligonucleotide; TTC chr11 5155118 5155139 5155135 5155140 +
ctatttaaataaatatcttggt

SEQ ID NO: 71201 - DNA, 22 bp, Artificial Sequence
  Synthetic oligonucleotide; CTA chr11 5155121 5155142 5155138 5155143 +
tttaaataaatatcttggtgac

SEQ ID NO: 71202 - DNA, 22 bp, Artificial Sequence
  Synthetic oligonucleotide; TTT chr11 5155124 5155145 5155141 5155146 +
aaataaatatcttggtgacatt

SEQ ID NO: 71203 - DNA, 22 bp, Artificial Sequence
  Synthetic oligonucleotide; TTA chr11 5155125 5155146 5155142 5155147 +
aataaatatcttggtgacattt

SEQ ID NO: 71204 - DNA, 22 bp, Artificial Sequence
  Synthetic oligonucleotide; CTT chr11 5155137 5155158 5155154 5155159 +
ggtgacattttcactgaggcaa

SEQ ID NO: 71205 - DNA, 22 bp, Artificial Sequence
  Synthetic oligonucleotide; TTG chr11 5155138 5155159 5155155 5155160 +
gtgacattttcactgaggcaag

SEQ ID NO: 71206 - DNA, 22 bp, Artificial Sequence
  Synthetic oligonucleotide; TTT chr11 5155147 5155168 5155164 5155169 +
tcactgaggcaaggtttttctc

SEQ ID NO: 71207 - DNA, 22 bp, Artificial Sequence
  Synthetic oligonucleotide; TTT chr11 5155148 5155169 5155165 5155170 +
cactgaggcaaggtttttctct

SEQ ID NO: 71208 - DNA, 22 bp, Artificial Sequence
  Synthetic oligonucleotide; TTC chr11 5155149 5155170 5155166 5155171 +
actgaggcaaggtttttctctt

SEQ ID NO: 71209 - DNA, 22 bp, Artificial Sequence
  Synthetic oligonucleotide; CTG chr11 5155153 5155174 5155170 5155175 +
aggcaaggtttttctcttttta

SEQ ID NO: 71210 - DNA, 22 bp, Artificial Sequence
  Synthetic oligonucleotide; TTT chr11 5155164 5155185 5155181 5155186 +
ttctctttttattcagaaaaga

SEQ ID NO: 71211 - DNA, 22 bp, Artificial Sequence
  Synthetic oligonucleotide; TTT chr11 5155165 5155186 5155182 5155187 +
tctctttttattcagaaaagaa

SEQ ID NO: 71212 - DNA, 22 bp, Artificial Sequence
  Synthetic oligonucleotide; TTT chr11 5155166 5155187 5155183 5155188 +
ctctttttattcagaaaagaaa

SEQ ID NO: 71213 - DNA, 22 bp, Artificial Sequence
  Synthetic oligonucleotide; TTC chr11 5155167 5155188 5155184 5155189 +
tctttttattcagaaaagaaaa

SEQ ID NO: 71214 - DNA, 22 bp, Artificial Sequence
  Synthetic oligonucleotide; CTC chr11 5155169 5155190 5155186 5155191 +
tttttattcagaaaagaaaaat

SEQ ID NO: 71215 - DNA, 22 bp, Artificial Sequence
  Synthetic oligonucleotide; CTT chr11 5155171 5155192 5155188 5155193 +
tttattcagaaaagaaaaatct

SEQ ID NO: 71216 - DNA, 22 bp, Artificial Sequence
  Synthetic oligonucleotide; TTT chr11 5155172 5155193 5155189 5155194 +
ttattcagaaaagaaaaatctg

SEQ ID NO: 71217 - DNA, 22 bp, Artificial Sequence
  Synthetic oligonucleotide; TTT chr11 5155173 5155194 5155190 5155195 +
tattcagaaaagaaaaatctgt

SEQ ID NO: 71218 - DNA, 22 bp, Artificial Sequence
  Synthetic oligonucleotide; TTT chr11 5155174 5155195 5155191 5155196 +
attcagaaaagaaaaatctgta

SEQ ID NO: 71219 - DNA, 22 bp, Artificial Sequence
  Synthetic oligonucleotide; TTA chr11 5155175 5155196 5155192 5155197 +
ttcagaaaagaaaaatctgtat

SEQ ID NO: 71220 - DNA, 22 bp, Artificial Sequence
  Synthetic oligonucleotide; TTC chr11 5155178 5155199 5155195 5155200 +
agaaaagaaaaatctgtattca

SEQ ID NO: 71221 - DNA, 22 bp, Artificial Sequence
  Synthetic oligonucleotide; CTG chr11 5155194 5155215 5155211 5155216 +
tattcataactactttttacca

SEQ ID NO: 71222 - DNA, 22 bp, Artificial Sequence
  Synthetic oligonucleotide; TTC chr11 5155199 5155220 5155216 5155221 +
ataactactttttaccacacaa

SEQ ID NO: 71223 - DNA, 22 bp, Artificial Sequence
  Synthetic oligonucleotide; CTA chr11 5155206 5155227 5155223 5155228 +
ctttttaccacacaattacttc

SEQ ID NO: 71224 - DNA, 22 bp, Artificial Sequence
  Synthetic oligonucleotide; CTT chr11 5155209 5155230 5155226 5155231 +
tttaccacacaattacttcctc

SEQ ID NO: 71225 - DNA, 22 bp, Artificial Sequence
  Synthetic oligonucleotide; TTT chr11 5155210 5155231 5155227 5155232 +
ttaccacacaattacttcctca

SEQ ID NO: 71226 - DNA, 22 bp, Artificial Sequence
  Synthetic oligonucleotide; TTT chr11 5155211 5155232 5155228 5155233 +
taccacacaattacttcctcag

SEQ ID NO: 71227 - DNA, 22 bp, Artificial Sequence
  Synthetic oligonucleotide; TTT chr11 5155212 5155233 5155229 5155234 +
accacacaattacttcctcagt

SEQ ID NO: 71228 - DNA, 22 bp, Artificial Sequence
  Synthetic oligonucleotide; TTA chr11 5155213 5155234 5155230 5155235 +
ccacacaattacttcctcagtc

SEQ ID NO: 71229 - DNA, 22 bp, Artificial Sequence
  Synthetic oligonucleotide; TTA chr11 5155224 5155245 5155241 5155246 +
cttcctcagtcttcttcagtct

SEQ ID NO: 71230 - DNA, 22 bp, Artificial Sequence
  Synthetic oligonucleotide; CTT chr11 5155227 5155248 5155244 5155249 +
cctcagtcttcttcagtctcat

SEQ ID NO: 71231 - DNA, 22 bp, Artificial Sequence
  Synthetic oligonucleotide; TTC chr11 5155228 5155249 5155245 5155250 +
ctcagtcttcttcagtctcatt

SEQ ID NO: 71232 - DNA, 22 bp, Artificial Sequence
  Synthetic oligonucleotide; CTC chr11 5155231 5155252 5155248 5155253 +
agtcttcttcagtctcattctt

SEQ ID NO: 71233 - DNA, 22 bp, Artificial Sequence
  Synthetic oligonucleotide; CTT chr11 5155237 5155258 5155254 5155259 +
cttcagtctcattcttcccatt

SEQ ID NO: 71234 - DNA, 22 bp, Artificial Sequence
  Synthetic oligonucleotide; TTC chr11 5155238 5155259 5155255 5155260 +
ttcagtctcattcttcccattt

SEQ ID NO: 71235 - DNA, 22 bp, Artificial Sequence
  Synthetic oligonucleotide; CTT chr11 5155240 5155261 5155257 5155262 +
cagtctcattcttcccatttta

SEQ ID NO: 71236 - DNA, 22 bp, Artificial Sequence
  Synthetic oligonucleotide; TTC chr11 5155241 5155262 5155258 5155263 +
agtctcattcttcccattttat

SEQ ID NO: 71237 - DNA, 22 bp, Artificial Sequence
  Synthetic oligonucleotide; CTC chr11 5155247 5155268 5155264 5155269 +
attcttcccattttattttatt

SEQ ID NO: 71238 - DNA, 22 bp, Artificial Sequence
  Synthetic oligonucleotide; TTC chr11 5155251 5155272 5155268 5155273 +
ttcccattttattttattgaag

SEQ ID NO: 71239 - DNA, 22 bp, Artificial Sequence
  Synthetic oligonucleotide; CTT chr11 5155253 5155274 5155270 5155275 +
cccattttattttattgaagtt

SEQ ID NO: 71240 - DNA, 22 bp, Artificial Sequence
  Synthetic oligonucleotide; TTC chr11 5155254 5155275 5155271 5155276 +
ccattttattttattgaagttt

SEQ ID NO: 71241 - DNA, 22 bp, Artificial Sequence
  Synthetic oligonucleotide; TTT chr11 5155260 5155281 5155277 5155282 +
tattttattgaagtttttttta

SEQ ID NO: 71242 - DNA, 22 bp, Artificial Sequence
  Synthetic oligonucleotide; TTT chr11 5155261 5155282 5155278 5155283 +
attttattgaagttttttttat

SEQ ID NO: 71243 - DNA, 22 bp, Artificial Sequence
  Synthetic oligonucleotide; TTA chr11 5155262 5155283 5155279 5155284 +
ttttattgaagttttttttatc

SEQ ID NO: 71244 - DNA, 22 bp, Artificial Sequence
  Synthetic oligonucleotide; TTT chr11 5155265 5155286 5155282 5155287 +
tattgaagttttttttatcttt

SEQ ID NO: 71245 - DNA, 22 bp, Artificial Sequence
  Synthetic oligonucleotide; TTT chr11 5155266 5155287 5155283 5155288 +
attgaagttttttttatctttt

SEQ ID NO: 71246 - DNA, 22 bp, Artificial Sequence
  Synthetic oligonucleotide; TTA chr11 5155267 5155288 5155284 5155289 +
ttgaagttttttttatctttta

SEQ ID NO: 71247 - DNA, 22 bp, Artificial Sequence
  Synthetic oligonucleotide; TTG chr11 5155270 5155291 5155287 5155292 +
aagttttttttatcttttagta

SEQ ID NO: 71248 - DNA, 22 bp, Artificial Sequence
  Synthetic oligonucleotide; TTT chr11 5155276 5155297 5155293 5155298 +
tttttatcttttagtaaattaa

SEQ ID NO: 71249 - DNA, 22 bp, Artificial Sequence
  Synthetic oligonucleotide; TTT chr11 5155277 5155298 5155294 5155299 +
ttttatcttttagtaaattaag

SEQ ID NO: 71250 - DNA, 22 bp, Artificial Sequence
  Synthetic oligonucleotide; TTT chr11 5155278 5155299 5155295 5155300 +
tttatcttttagtaaattaagt

SEQ ID NO: 71251 - DNA, 22 bp, Artificial Sequence
  Synthetic oligonucleotide; TTT chr11 5155279 5155300 5155296 5155301 +
ttatcttttagtaaattaagta

SEQ ID NO: 71252 - DNA, 22 bp, Artificial Sequence
  Synthetic oligonucleotide; TTT chr11 5155280 5155301 5155297 5155302 +
tatcttttagtaaattaagtaa

SEQ ID NO: 71253 - DNA, 22 bp, Artificial Sequence
  Synthetic oligonucleotide; TTT chr11 5155281 5155302 5155298 5155303 +
atcttttagtaaattaagtaac

SEQ ID NO: 71254 - DNA, 22 bp, Artificial Sequence
  Synthetic oligonucleotide; TTA chr11 5155282 5155303 5155299 5155304 +
tcttttagtaaattaagtaaca

SEQ ID NO: 71255 - DNA, 22 bp, Artificial Sequence
  Synthetic oligonucleotide; CTT chr11 5155286 5155307 5155303 5155308 +
ttagtaaattaagtaacattct

SEQ ID NO: 71256 - DNA, 22 bp, Artificial Sequence
  Synthetic oligonucleotide; TTT chr11 5155287 5155308 5155304 5155309 +
tagtaaattaagtaacattctt

SEQ ID NO: 71257 - DNA, 22 bp, Artificial Sequence
  Synthetic oligonucleotide; TTT chr11 5155288 5155309 5155305 5155310 +
agtaaattaagtaacattctta

SEQ ID NO: 71258 - DNA, 22 bp, Artificial Sequence
  Synthetic oligonucleotide; TTA chr11 5155289 5155310 5155306 5155311 +
gtaaattaagtaacattcttat

SEQ ID NO: 71259 - DNA, 22 bp, Artificial Sequence
  Synthetic oligonucleotide; TTA chr11 5155297 5155318 5155314 5155319 +
agtaacattcttatagtgacaa

SEQ ID NO: 71260 - DNA, 22 bp, Artificial Sequence
  Synthetic oligonucleotide; TTC chr11 5155307 5155328 5155324 5155329 +
ttatagtgacaaattataatgg

SEQ ID NO: 71261 - DNA, 22 bp, Artificial Sequence
  Synthetic oligonucleotide; CTT chr11 5155309 5155330 5155326 5155331 +
atagtgacaaattataatggac

SEQ ID NO: 71262 - DNA, 22 bp, Artificial Sequence
  Synthetic oligonucleotide; TTA chr11 5155310 5155331 5155327 5155332 +
tagtgacaaattataatggaca

SEQ ID NO: 71263 - DNA, 22 bp, Artificial Sequence
  Synthetic oligonucleotide; TTA chr11 5155323 5155344 5155340 5155345 +
taatggacatttctaagtccta

SEQ ID NO: 71264 - DNA, 22 bp, Artificial Sequence
  Synthetic oligonucleotide; TTT chr11 5155335 5155356 5155352 5155357 +
ctaagtcctacaaatgtaaagc

SEQ ID NO: 71265 - DNA, 22 bp, Artificial Sequence
  Synthetic oligonucleotide; TTC chr11 5155336 5155357 5155353 5155358 +
taagtcctacaaatgtaaagct

SEQ ID NO: 71266 - DNA, 22 bp, Artificial Sequence
  Synthetic oligonucleotide; CTA chr11 5155338 5155359 5155355 5155360 +
agtcctacaaatgtaaagctgg

SEQ ID NO: 71267 - DNA, 22 bp, Artificial Sequence
  Synthetic oligonucleotide; CTA chr11 5155345 5155366 5155362 5155367 +
caaatgtaaagctggaagcaag

SEQ ID NO: 71268 - DNA, 22 bp, Artificial Sequence
  Synthetic oligonucleotide; CTG chr11 5155359 5155380 5155376 5155381 +
gaagcaagttgttgaacatttg

SEQ ID NO: 71269 - DNA, 22 bp, Artificial Sequence
  Synthetic oligonucleotide; TTG chr11 5155370 5155391 5155387 5155392 +
ttgaacatttgagtaaactggt

SEQ ID NO: 71270 - DNA, 22 bp, Artificial Sequence
  Synthetic oligonucleotide; TTG chr11 5155373 5155394 5155390 5155395 +
aacatttgagtaaactggtatc

SEQ ID NO: 71271 - DNA, 22 bp, Artificial Sequence
  Synthetic oligonucleotide; TTT chr11 5155380 5155401 5155397 5155402 +
gagtaaactggtatccatttcc

SEQ ID NO: 71272 - DNA, 22 bp, Artificial Sequence
  Synthetic oligonucleotide; TTG chr11 5155381 5155402 5155398 5155403 +
agtaaactggtatccatttcct

SEQ ID NO: 71273 - DNA, 22 bp, Artificial Sequence
  Synthetic oligonucleotide; CTG chr11 5155390 5155411 5155407 5155412 +
gtatccatttcctcttttctct

SEQ ID NO: 71274 - DNA, 22 bp, Artificial Sequence
  Synthetic oligonucleotide; TTT chr11 5155400 5155421 5155417 5155422 +
cctcttttctctctttcttcct

SEQ ID NO: 71275 - DNA, 22 bp, Artificial Sequence
  Synthetic oligonucleotide; TTC chr11 5155401 5155422 5155418 5155423 +
ctcttttctctctttcttcctt

SEQ ID NO: 71276 - DNA, 22 bp, Artificial Sequence
  Synthetic oligonucleotide; CTC chr11 5155404 5155425 5155421 5155426 +
ttttctctctttcttccttgtt

SEQ ID NO: 71277 - DNA, 22 bp, Artificial Sequence
  Synthetic oligonucleotide; CTT chr11 5155406 5155427 5155423 5155428 +
ttctctctttcttccttgttac

SEQ ID NO: 71278 - DNA, 22 bp, Artificial Sequence
  Synthetic oligonucleotide; TTT chr11 5155407 5155428 5155424 5155429 +
tctctctttcttccttgttact

SEQ ID NO: 71279 - DNA, 22 bp, Artificial Sequence
  Synthetic oligonucleotide; TTT chr11 5155408 5155429 5155425 5155430 +
ctctctttcttccttgttactt

SEQ ID NO: 71280 - DNA, 22 bp, Artificial Sequence
  Synthetic oligonucleotide; TTC chr11 5155409 5155430 5155426 5155431 +
tctctttcttccttgttacttt

SEQ ID NO: 71281 - DNA, 22 bp, Artificial Sequence
  Synthetic oligonucleotide; CTC chr11 5155411 5155432 5155428 5155433 +
tctttcttccttgttactttcc

SEQ ID NO: 71282 - DNA, 22 bp, Artificial Sequence
  Synthetic oligonucleotide; CTC chr11 5155413 5155434 5155430 5155435 +
tttcttccttgttactttcctt

SEQ ID NO: 71283 - DNA, 22 bp, Artificial Sequence
  Synthetic oligonucleotide; CTT chr11 5155415 5155436 5155432 5155437 +
tcttccttgttactttccttcc

SEQ ID NO: 71284 - DNA, 22 bp, Artificial Sequence
  Synthetic oligonucleotide; TTT chr11 5155416 5155437 5155433 5155438 +
cttccttgttactttccttcct

SEQ ID NO: 71285 - DNA, 22 bp, Artificial Sequence
  Synthetic oligonucleotide; TTC chr11 5155417 5155438 5155434 5155439 +
ttccttgttactttccttcctt

SEQ ID NO: 71286 - DNA, 22 bp, Artificial Sequence
  Synthetic oligonucleotide; CTT chr11 5155419 5155440 5155436 5155441 +
ccttgttactttccttccttct

SEQ ID NO: 71287 - DNA, 22 bp, Artificial Sequence
  Synthetic oligonucleotide; TTC chr11 5155420 5155441 5155437 5155442 +
cttgttactttccttccttctt

SEQ ID NO: 71288 - DNA, 22 bp, Artificial Sequence
  Synthetic oligonucleotide; CTT chr11 5155423 5155444 5155440 5155445 +
gttactttccttccttcttttt

SEQ ID NO: 71289 - DNA, 22 bp, Artificial Sequence
  Synthetic oligonucleotide; TTG chr11 5155424 5155445 5155441 5155446 +
ttactttccttccttctttttc

SEQ ID NO: 71290 - DNA, 22 bp, Artificial Sequence
  Synthetic oligonucleotide; TTA chr11 5155427 5155448 5155444 5155449 +
ctttccttccttctttttcttt

SEQ ID NO: 71291 - DNA, 22 bp, Artificial Sequence
  Synthetic oligonucleotide; CTT chr11 5155430 5155451 5155447 5155452 +
tccttccttctttttctttcaa

SEQ ID NO: 71292 - DNA, 22 bp, Artificial Sequence
  Synthetic oligonucleotide; TTT chr11 5155431 5155452 5155448 5155453 +
ccttccttctttttctttcaaa

SEQ ID NO: 71293 - DNA, 22 bp, Artificial Sequence
  Synthetic oligonucleotide; TTC chr11 5155432 5155453 5155449 5155454 +
cttccttctttttctttcaaaa

SEQ ID NO: 71294 - DNA, 22 bp, Artificial Sequence
  Synthetic oligonucleotide; CTT chr11 5155435 5155456 5155452 5155457 +
ccttctttttctttcaaaaaac

SEQ ID NO: 71295 - DNA, 22 bp, Artificial Sequence
  Synthetic oligonucleotide; TTC chr11 5155436 5155457 5155453 5155458 +
cttctttttctttcaaaaaaca

SEQ ID NO: 71296 - DNA, 22 bp, Artificial Sequence
  Synthetic oligonucleotide; CTT chr11 5155439 5155460 5155456 5155461 +
ctttttctttcaaaaaacagtc

SEQ ID NO: 71297 - DNA, 22 bp, Artificial Sequence
  Synthetic oligonucleotide; TTC chr11 5155440 5155461 5155457 5155462 +
tttttctttcaaaaaacagtca

SEQ ID NO: 71298 - DNA, 22 bp, Artificial Sequence
  Synthetic oligonucleotide; CTT chr11 5155442 5155463 5155459 5155464 +
tttctttcaaaaaacagtcatt

SEQ ID NO: 71299 - DNA, 22 bp, Artificial Sequence
  Synthetic oligonucleotide; TTT chr11 5155443 5155464 5155460 5155465 +
ttctttcaaaaaacagtcatta

SEQ ID NO: 71300 - DNA, 22 bp, Artificial Sequence
  Synthetic oligonucleotide; TTT chr11 5155444 5155465 5155461 5155466 +
tctttcaaaaaacagtcattat

SEQ ID NO: 71301 - DNA, 22 bp, Artificial Sequence
  Synthetic oligonucleotide; TTT chr11 5155445 5155466 5155462 5155467 +
ctttcaaaaaacagtcattata

SEQ ID NO: 71302 - DNA, 22 bp, Artificial Sequence
  Synthetic oligonucleotide; TTC chr11 5155446 5155467 5155463 5155468 +
tttcaaaaaacagtcattatat

SEQ ID NO: 71303 - DNA, 22 bp, Artificial Sequence
  Synthetic oligonucleotide; CTT chr11 5155448 5155469 5155465 5155470 +
tcaaaaaacagtcattatattc

SEQ ID NO: 71304 - DNA, 22 bp, Artificial Sequence
  Synthetic oligonucleotide; TTT chr11 5155449 5155470 5155466 5155471 +
caaaaaacagtcattatattcc

SEQ ID NO: 71305 - DNA, 22 bp, Artificial Sequence
  Synthetic oligonucleotide; TTC chr11 5155450 5155471 5155467 5155472 +
aaaaaacagtcattatattcct

SEQ ID NO: 71306 - DNA, 22 bp, Artificial Sequence
  Synthetic oligonucleotide; TTA chr11 5155465 5155486 5155482 5155487 +
tattcctactatttatgagtga

SEQ ID NO: 71307 - DNA, 22 bp, Artificial Sequence
  Synthetic oligonucleotide; TTC chr11 5155470 5155491 5155487 5155492 +
ctactatttatgagtgagatgt

SEQ ID NO: 71308 - DNA, 22 bp, Artificial Sequence
  Synthetic oligonucleotide; CTA chr11 5155473 5155494 5155490 5155495 +
ctatttatgagtgagatgttat

SEQ ID NO: 71309 - DNA, 22 bp, Artificial Sequence
  Synthetic oligonucleotide; CTA chr11 5155476 5155497 5155493 5155498 +
tttatgagtgagatgttatata

SEQ ID NO: 71310 - DNA, 22 bp, Artificial Sequence
  Synthetic oligonucleotide; TTT chr11 5155479 5155500 5155496 5155501 +
atgagtgagatgttatatattc

SEQ ID NO: 71311 - DNA, 22 bp, Artificial Sequence
  Synthetic oligonucleotide; TTA chr11 5155480 5155501 5155497 5155502 +
tgagtgagatgttatatattct

SEQ ID NO: 71312 - DNA, 22 bp, Artificial Sequence
  Synthetic oligonucleotide; TTA chr11 5155494 5155515 5155511 5155516 +
tatattctaaatgaaatgaaaa

SEQ ID NO: 71313 - DNA, 22 bp, Artificial Sequence
  Synthetic oligonucleotide; TTC chr11 5155501 5155522 5155518 5155523 +
taaatgaaatgaaaaaaattat

SEQ ID NO: 71314 - DNA, 22 bp, Artificial Sequence
  Synthetic oligonucleotide; CTA chr11 5155503 5155524 5155520 5155525 +
aatgaaatgaaaaaaattatag

SEQ ID NO: 71315 - DNA, 22 bp, Artificial Sequence
  Synthetic oligonucleotide; TTA chr11 5155522 5155543 5155539 5155544 +
tagtcttacctttaaattatta

SEQ ID NO: 71316 - DNA, 22 bp, Artificial Sequence
  Synthetic oligonucleotide; CTT chr11 5155529 5155550 5155546 5155551 +
acctttaaattattagtaaaat

SEQ ID NO: 71317 - DNA, 22 bp, Artificial Sequence
  Synthetic oligonucleotide; TTA chr11 5155530 5155551 5155547 5155552 +
cctttaaattattagtaaaatg

SEQ ID NO: 71318 - DNA, 22 bp, Artificial Sequence
  Synthetic oligonucleotide; CTT chr11 5155534 5155555 5155551 5155556 +
taaattattagtaaaatgggat

SEQ ID NO: 71319 - DNA, 22 bp, Artificial Sequence
  Synthetic oligonucleotide; TTT chr11 5155535 5155556 5155552 5155557 +
aaattattagtaaaatgggatt

SEQ ID NO: 71320 - DNA, 22 bp, Artificial Sequence
  Synthetic oligonucleotide; TTA chr11 5155536 5155557 5155553 5155558 +
aattattagtaaaatgggatta

SEQ ID NO: 71321 - DNA, 22 bp, Artificial Sequence
  Synthetic oligonucleotide; TTA chr11 5155541 5155562 5155558 5155563 +
ttagtaaaatgggattatgcat

SEQ ID NO: 71322 - DNA, 22 bp, Artificial Sequence
  Synthetic oligonucleotide; TTA chr11 5155544 5155565 5155561 5155566 +
gtaaaatgggattatgcattac

SEQ ID NO: 71323 - DNA, 22 bp, Artificial Sequence
  Synthetic oligonucleotide; TTA chr11 5155558 5155579 5155575 5155580 +
tgcattacaatttcatttatca

SEQ ID NO: 71324 - DNA, 22 bp, Artificial Sequence
  Synthetic oligonucleotide; TTA chr11 5155565 5155586 5155582 5155587 +
caatttcatttatcacgtaagt

SEQ ID NO: 71325 - DNA, 22 bp, Artificial Sequence
  Synthetic oligonucleotide; TTT chr11 5155571 5155592 5155588 5155593 +
catttatcacgtaagtatctga

SEQ ID NO: 71326 - DNA, 22 bp, Artificial Sequence
  Synthetic oligonucleotide; TTC chr11 5155572 5155593 5155589 5155594 +
atttatcacgtaagtatctgat

SEQ ID NO: 71327 - DNA, 22 bp, Artificial Sequence
  Synthetic oligonucleotide; TTT chr11 5155576 5155597 5155593 5155598 +
atcacgtaagtatctgataaat

SEQ ID NO: 71328 - DNA, 22 bp, Artificial Sequence
  Synthetic oligonucleotide; TTA chr11 5155577 5155598 5155594 5155599 +
tcacgtaagtatctgataaatt

SEQ ID NO: 71329 - DNA, 22 bp, Artificial Sequence
  Synthetic oligonucleotide; CTG chr11 5155592 5155613 5155609 5155614 +
ataaattctaagcaagacttat

SEQ ID NO: 71330 - DNA, 22 bp, Artificial Sequence
  Synthetic oligonucleotide; TTC chr11 5155600 5155621 5155617 5155622 +
taagcaagacttatgcatatga

SEQ ID NO: 71331 - DNA, 22 bp, Artificial Sequence
  Synthetic oligonucleotide; CTA chr11 5155602 5155623 5155619 5155624 +
agcaagacttatgcatatgaca

SEQ ID NO: 71332 - DNA, 22 bp, Artificial Sequence
  Synthetic oligonucleotide; CTT chr11 5155612 5155633 5155629 5155634 +
atgcatatgacactattctcct

SEQ ID NO: 71333 - DNA, 22 bp, Artificial Sequence
  Synthetic oligonucleotide; TTA chr11 5155613 5155634 5155630 5155635 +
tgcatatgacactattctcctt

SEQ ID NO: 71334 - DNA, 22 bp, Artificial Sequence
  Synthetic oligonucleotide; CTA chr11 5155627 5155648 5155644 5155649 +
ttctccttgacattttacagct

SEQ ID NO: 71335 - DNA, 22 bp, Artificial Sequence
  Synthetic oligonucleotide; TTC chr11 5155630 5155651 5155647 5155652 +
tccttgacattttacagctggt

SEQ ID NO: 71336 - DNA, 22 bp, Artificial Sequence
  Synthetic oligonucleotide; CTC chr11 5155632 5155653 5155649 5155654 +
cttgacattttacagctggttt

SEQ ID NO: 71337 - DNA, 22 bp, Artificial Sequence
  Synthetic oligonucleotide; CTT chr11 5155635 5155656 5155652 5155657 +
gacattttacagctggtttcta

SEQ ID NO: 71338 - DNA, 22 bp, Artificial Sequence
  Synthetic oligonucleotide; TTG chr11 5155636 5155657 5155653 5155658 +
acattttacagctggtttctag

SEQ ID NO: 71339 - DNA, 22 bp, Artificial Sequence
  Synthetic oligonucleotide; TTT chr11 5155642 5155663 5155659 5155664 +
tacagctggtttctaggctttc

SEQ ID NO: 71340 - DNA, 22 bp, Artificial Sequence
  Synthetic oligonucleotide; TTT chr11 5155643 5155664 5155660 5155665 +
acagctggtttctaggctttct

SEQ ID NO: 71341 - DNA, 22 bp, Artificial Sequence
  Synthetic oligonucleotide; TTA chr11 5155644 5155665 5155661 5155666 +
cagctggtttctaggctttctt

SEQ ID NO: 71342 - DNA, 22 bp, Artificial Sequence
  Synthetic oligonucleotide; CTG chr11 5155650 5155671 5155667 5155672 +
gtttctaggctttcttgaatgt

SEQ ID NO: 71343 - DNA, 22 bp, Artificial Sequence
  Synthetic oligonucleotide; TTT chr11 5155654 5155675 5155671 5155676 +
ctaggctttcttgaatgtagct

SEQ ID NO: 71344 - DNA, 22 bp, Artificial Sequence
  Synthetic oligonucleotide; TTC chr11 5155655 5155676 5155672 5155677 +
taggctttcttgaatgtagcta

SEQ ID NO: 71345 - DNA, 22 bp, Artificial Sequence
  Synthetic oligonucleotide; CTA chr11 5155657 5155678 5155674 5155679 +
ggctttcttgaatgtagctaag

SEQ ID NO: 71346 - DNA, 22 bp, Artificial Sequence
  Synthetic oligonucleotide; CTT chr11 5155662 5155683 5155679 5155684 +
tcttgaatgtagctaagagaca

SEQ ID NO: 71347 - DNA, 22 bp, Artificial Sequence
  Synthetic oligonucleotide; TTT chr11 5155663 5155684 5155680 5155685 +
cttgaatgtagctaagagacac

SEQ ID NO: 71348 - DNA, 22 bp, Artificial Sequence
  Synthetic oligonucleotide; TTC chr11 5155664 5155685 5155681 5155686 +
ttgaatgtagctaagagacact

SEQ ID NO: 71349 - DNA, 22 bp, Artificial Sequence
  Synthetic oligonucleotide; CTT chr11 5155666 5155687 5155683 5155688 +
gaatgtagctaagagacacttg

SEQ ID NO: 71350 - DNA, 22 bp, Artificial Sequence
  Synthetic oligonucleotide; TTG chr11 5155667 5155688 5155684 5155689 +
aatgtagctaagagacacttga

SEQ ID NO: 71351 - DNA, 22 bp, Artificial Sequence
  Synthetic oligonucleotide; CTA chr11 5155677 5155698 5155694 5155699 +
agagacacttgatataatgttt

SEQ ID NO: 71352 - DNA, 22 bp, Artificial Sequence
  Synthetic oligonucleotide; CTT chr11 5155687 5155708 5155704 5155709 +
gatataatgtttagacattggc

SEQ ID NO: 71353 - DNA, 22 bp, Artificial Sequence
  Synthetic oligonucleotide; TTG chr11 5155688 5155709 5155705 5155710 +
atataatgtttagacattggca

SEQ ID NO: 71354 - DNA, 22 bp, Artificial Sequence
  Synthetic oligonucleotide; TTT chr11 5155699 5155720 5155716 5155721 +
agacattggcaaatttaggaag

SEQ ID NO: 71355 - DNA, 22 bp, Artificial Sequence
  Synthetic oligonucleotide; TTA chr11 5155700 5155721 5155717 5155722 +
gacattggcaaatttaggaagc

SEQ ID NO: 71356 - DNA, 22 bp, Artificial Sequence
  Synthetic oligonucleotide; TTG chr11 5155707 5155728 5155724 5155729 +
gcaaatttaggaagcatactaa

SEQ ID NO: 71357 - DNA, 22 bp, Artificial Sequence
  Synthetic oligonucleotide; TTT chr11 5155715 5155736 5155732 5155737 +
aggaagcatactaatggtggag

SEQ ID NO: 71358 - DNA, 22 bp, Artificial Sequence
  Synthetic oligonucleotide; TTA chr11 5155716 5155737 5155733 5155738 +
ggaagcatactaatggtggaga

SEQ ID NO: 71359 - DNA, 22 bp, Artificial Sequence
  Synthetic oligonucleotide; CTA chr11 5155728 5155749 5155745 5155750 +
atggtggagaatatttataatg

SEQ ID NO: 71360 - DNA, 22 bp, Artificial Sequence
  Synthetic oligonucleotide; TTT chr11 5155744 5155765 5155761 5155766 +
ataatggatttccaggagaaca

SEQ ID NO: 71361 - DNA, 22 bp, Artificial Sequence
  Synthetic oligonucleotide; TTA chr11 5155745 5155766 5155762 5155767 +
taatggatttccaggagaacaa

SEQ ID NO: 71362 - DNA, 22 bp, Artificial Sequence
  Synthetic oligonucleotide; TTT chr11 5155755 5155776 5155772 5155777 +
ccaggagaacaaggaatacaga

SEQ ID NO: 71363 - DNA, 22 bp, Artificial Sequence
  Synthetic oligonucleotide; TTC chr11 5155756 5155777 5155773 5155778 +
caggagaacaaggaatacagat

SEQ ID NO: 71364 - DNA, 22 bp, Artificial Sequence
  Synthetic oligonucleotide; CTC chr11 5155804 5155825 5155821 5155826 +
tttccagaatttcctctgtgaa

SEQ ID NO: 71365 - DNA, 22 bp, Artificial Sequence
  Synthetic oligonucleotide; CTT chr11 5155806 5155827 5155823 5155828 +
tccagaatttcctctgtgaagg

SEQ ID NO: 71366 - DNA, 22 bp, Artificial Sequence
  Synthetic oligonucleotide; TTT chr11 5155807 5155828 5155824 5155829 +
ccagaatttcctctgtgaagga

SEQ ID NO: 71367 - DNA, 22 bp, Artificial Sequence
  Synthetic oligonucleotide; TTC chr11 5155808 5155829 5155825 5155830 +
cagaatttcctctgtgaaggag

SEQ ID NO: 71368 - DNA, 22 bp, Artificial Sequence
  Synthetic oligonucleotide; TTT chr11 5155816 5155837 5155833 5155838 +
cctctgtgaaggagcataaaac

SEQ ID NO: 71369 - DNA, 22 bp, Artificial Sequence
  Synthetic oligonucleotide; TTC chr11 5155817 5155838 5155834 5155839 +
ctctgtgaaggagcataaaaca

SEQ ID NO: 71370 - DNA, 22 bp, Artificial Sequence
  Synthetic oligonucleotide; CTC chr11 5155820 5155841 5155837 5155842 +
tgtgaaggagcataaaacaata

SEQ ID NO: 71371 - DNA, 22 bp, Artificial Sequence
  Synthetic oligonucleotide; CTG chr11 5155822 5155843 5155839 5155844 +
tgaaggagcataaaacaatagt

SEQ ID NO: 71372 - DNA, 22 bp, Artificial Sequence
  Synthetic oligonucleotide; CTG chr11 5155848 5155869 5155865 5155870 +
ttgcatgttgaatgaaattgat

SEQ ID NO: 71373 - DNA, 22 bp, Artificial Sequence
  Synthetic oligonucleotide; TTG chr11 5155851 5155872 5155868 5155873 +
catgttgaatgaaattgattca

SEQ ID NO: 71374 - DNA, 22 bp, Artificial Sequence
  Synthetic oligonucleotide; TTG chr11 5155858 5155879 5155875 5155880 +
aatgaaattgattcagagagca

SEQ ID NO: 71375 - DNA, 22 bp, Artificial Sequence
  Synthetic oligonucleotide; TTG chr11 5155868 5155889 5155885 5155890 +
attcagagagcatataggcagc

SEQ ID NO: 71376 - DNA, 22 bp, Artificial Sequence
  Synthetic oligonucleotide; TTC chr11 5155872 5155893 5155889 5155894 +
agagagcatataggcagctaat

SEQ ID NO: 71377 - DNA, 22 bp, Artificial Sequence
  Synthetic oligonucleotide; CTA chr11 5155892 5155913 5155909 5155914 +
atctaatattcaggttattctt

SEQ ID NO: 71378 - DNA, 22 bp, Artificial Sequence
  Synthetic oligonucleotide; CTA chr11 5155897 5155918 5155914 5155919 +
atattcaggttattcttttgtc

SEQ ID NO: 71379 - DNA, 22 bp, Artificial Sequence
  Synthetic oligonucleotide; TTC chr11 5155903 5155924 5155920 5155925 +
aggttattcttttgtcactaag

SEQ ID NO: 71380 - DNA, 22 bp, Artificial Sequence
  Synthetic oligonucleotide; TTA chr11 5155909 5155930 5155926 5155931 +
ttcttttgtcactaagaaacaa

SEQ ID NO: 71381 - DNA, 22 bp, Artificial Sequence
  Synthetic oligonucleotide; TTC chr11 5155912 5155933 5155929 5155934 +
ttttgtcactaagaaacaattt

SEQ ID NO: 71382 - DNA, 22 bp, Artificial Sequence
  Synthetic oligonucleotide; CTT chr11 5155914 5155935 5155931 5155936 +
ttgtcactaagaaacaatttag

SEQ ID NO: 71383 - DNA, 22 bp, Artificial Sequence
  Synthetic oligonucleotide; TTT chr11 5155915 5155936 5155932 5155937 +
tgtcactaagaaacaatttaga

SEQ ID NO: 71384 - DNA, 22 bp, Artificial Sequence
  Synthetic oligonucleotide; TTT chr11 5155916 5155937 5155933 5155938 +
gtcactaagaaacaatttagac

SEQ ID NO: 71385 - DNA, 22 bp, Artificial Sequence
  Synthetic oligonucleotide; TTG chr11 5155917 5155938 5155934 5155939 +
tcactaagaaacaatttagact

SEQ ID NO: 71386 - DNA, 22 bp, Artificial Sequence
  Synthetic oligonucleotide; CTA chr11 5155923 5155944 5155940 5155945 +
agaaacaatttagactagtata

SEQ ID NO: 71387 - DNA, 22 bp, Artificial Sequence
  Synthetic oligonucleotide; TTT chr11 5155934 5155955 5155951 5155956 +
agactagtataccatttggttt

SEQ ID NO: 71388 - DNA, 22 bp, Artificial Sequence
  Synthetic oligonucleotide; TTA chr11 5155935 5155956 5155952 5155957 +
gactagtataccatttggtttc

SEQ ID NO: 71389 - DNA, 22 bp, Artificial Sequence
  Synthetic oligonucleotide; CTA chr11 5155940 5155961 5155957 5155962 +
gtataccatttggtttcttcct

SEQ ID NO: 71390 - DNA, 22 bp, Artificial Sequence
  Synthetic oligonucleotide; TTT chr11 5155951 5155972 5155968 5155973 +
ggtttcttcctcttctcttata

SEQ ID NO: 71391 - DNA, 22 bp, Artificial Sequence
  Synthetic oligonucleotide; TTG chr11 5155952 5155973 5155969 5155974 +
gtttcttcctcttctcttatac

SEQ ID NO: 71392 - DNA, 22 bp, Artificial Sequence
  Synthetic oligonucleotide; TTT chr11 5155956 5155977 5155973 5155978 +
cttcctcttctcttatactgat

SEQ ID NO: 71393 - DNA, 22 bp, Artificial Sequence
  Synthetic oligonucleotide; TTC chr11 5155957 5155978 5155974 5155979 +
ttcctcttctcttatactgatt

SEQ ID NO: 71394 - DNA, 22 bp, Artificial Sequence
  Synthetic oligonucleotide; CTT chr11 5155959 5155980 5155976 5155981 +
cctcttctcttatactgatttt

SEQ ID NO: 71395 - DNA, 22 bp, Artificial Sequence
  Synthetic oligonucleotide; TTC chr11 5155960 5155981 5155977 5155982 +
ctcttctcttatactgatttta

SEQ ID NO: 71396 - DNA, 22 bp, Artificial Sequence
  Synthetic oligonucleotide; CTC chr11 5155963 5155984 5155980 5155985 +
ttctcttatactgattttattt

SEQ ID NO: 71397 - DNA, 22 bp, Artificial Sequence
  Synthetic oligonucleotide; CTT chr11 5155965 5155986 5155982 5155987 +
ctcttatactgattttatttaa

SEQ ID NO: 71398 - DNA, 22 bp, Artificial Sequence
  Synthetic oligonucleotide; TTC chr11 5155966 5155987 5155983 5155988 +
tcttatactgattttatttaaa

SEQ ID NO: 71399 - DNA, 22 bp, Artificial Sequence
  Synthetic oligonucleotide; CTC chr11 5155968 5155989 5155985 5155990 +
ttatactgattttatttaaatt

SEQ ID NO: 71400 - DNA, 22 bp, Artificial Sequence
  Synthetic oligonucleotide; CTT chr11 5155970 5155991 5155987 5155992 +
atactgattttatttaaatttg

SEQ ID NO: 71401 - DNA, 22 bp, Artificial Sequence
  Synthetic oligonucleotide; TTA chr11 5155971 5155992 5155988 5155993 +
tactgattttatttaaatttgg

SEQ ID NO: 71402 - DNA, 22 bp, Artificial Sequence
  Synthetic oligonucleotide; CTG chr11 5155976 5155997 5155993 5155998 +
attttatttaaatttgggggct

SEQ ID NO: 71403 - DNA, 22 bp, Artificial Sequence
  Synthetic oligonucleotide; TTT chr11 5155980 5156001 5155997 5156002 +
tatttaaatttgggggctctcc

SEQ ID NO: 71404 - DNA, 22 bp, Artificial Sequence
  Synthetic oligonucleotide; TTT chr11 5155981 5156002 5155998 5156003 +
atttaaatttgggggctctcca

SEQ ID NO: 71405 - DNA, 22 bp, Artificial Sequence
  Synthetic oligonucleotide; TTA chr11 5155982 5156003 5155999 5156004 +
tttaaatttgggggctctccaa

SEQ ID NO: 71406 - DNA, 22 bp, Artificial Sequence
  Synthetic oligonucleotide; TTT chr11 5155985 5156006 5156002 5156007 +
aaatttgggggctctccaaagt

SEQ ID NO: 71407 - DNA, 22 bp, Artificial Sequence
  Synthetic oligonucleotide; TTA chr11 5155986 5156007 5156003 5156008 +
aatttgggggctctccaaagtt

SEQ ID NO: 71408 - DNA, 22 bp, Artificial Sequence
  Synthetic oligonucleotide; TTT chr11 5155991 5156012 5156008 5156013 +
gggggctctccaaagttctatc

SEQ ID NO: 71409 - DNA, 22 bp, Artificial Sequence
  Synthetic oligonucleotide; TTG chr11 5155992 5156013 5156009 5156014 +
ggggctctccaaagttctatct

SEQ ID NO: 71410 - DNA, 22 bp, Artificial Sequence
  Synthetic oligonucleotide; CTC chr11 5155999 5156020 5156016 5156021 +
tccaaagttctatcttgggtca

SEQ ID NO: 71411 - DNA, 22 bp, Artificial Sequence
  Synthetic oligonucleotide; CTC chr11 5156001 5156022 5156018 5156023 +
caaagttctatcttgggtcatt

SEQ ID NO: 71412 - DNA, 22 bp, Artificial Sequence
  Synthetic oligonucleotide; TTC chr11 5156009 5156030 5156026 5156031 +
tatcttgggtcatttcattcta

SEQ ID NO: 71413 - DNA, 22 bp, Artificial Sequence
  Synthetic oligonucleotide; CTA chr11 5156011 5156032 5156028 5156033 +
tcttgggtcatttcattctaaa

SEQ ID NO: 71414 - DNA, 22 bp, Artificial Sequence
  Synthetic oligonucleotide; CTT chr11 5156015 5156036 5156032 5156037 +
gggtcatttcattctaaaacta

SEQ ID NO: 71415 - DNA, 22 bp, Artificial Sequence
  Synthetic oligonucleotide; TTG chr11 5156016 5156037 5156033 5156038 +
ggtcatttcattctaaaactat

SEQ ID NO: 71416 - DNA, 22 bp, Artificial Sequence
  Synthetic oligonucleotide; TTT chr11 5156024 5156045 5156041 5156046 +
cattctaaaactattcacatgt

SEQ ID NO: 71417 - DNA, 22 bp, Artificial Sequence
  Synthetic oligonucleotide; TTC chr11 5156025 5156046 5156042 5156047 +
attctaaaactattcacatgtg

SEQ ID NO: 71418 - DNA, 22 bp, Artificial Sequence
  Synthetic oligonucleotide; TTC chr11 5156029 5156050 5156046 5156051 +
taaaactattcacatgtgctgg

SEQ ID NO: 71419 - DNA, 22 bp, Artificial Sequence
  Synthetic oligonucleotide; CTA chr11 5156031 5156052 5156048 5156053 +
aaactattcacatgtgctggtg

SEQ ID NO: 71420 - DNA, 22 bp, Artificial Sequence
  Synthetic oligonucleotide; CTA chr11 5156037 5156058 5156054 5156059 +
ttcacatgtgctggtgactcca

SEQ ID NO: 71421 - DNA, 22 bp, Artificial Sequence
  Synthetic oligonucleotide; TTC chr11 5156040 5156061 5156057 5156062 +
acatgtgctggtgactccatct

SEQ ID NO: 71422 - DNA, 22 bp, Artificial Sequence
  Synthetic oligonucleotide; CTG chr11 5156050 5156071 5156067 5156072 +
gtgactccatctactccaaata

SEQ ID NO: 71423 - DNA, 22 bp, Artificial Sequence
  Synthetic oligonucleotide; CTC chr11 5156057 5156078 5156074 5156079 +
catctactccaaataatttagt

SEQ ID NO: 71424 - DNA, 22 bp, Artificial Sequence
  Synthetic oligonucleotide; CTA chr11 5156063 5156084 5156080 5156085 +
ctccaaataatttagttgtcac

SEQ ID NO: 71425 - DNA, 22 bp, Artificial Sequence
  Synthetic oligonucleotide; CTC chr11 5156066 5156087 5156083 5156088 +
caaataatttagttgtcacctt

SEQ ID NO: 71426 - DNA, 22 bp, Artificial Sequence
  Synthetic oligonucleotide; TTT chr11 5156076 5156097 5156093 5156098 +
agttgtcaccttcatgtgctaa

SEQ ID NO: 71427 - DNA, 22 bp, Artificial Sequence
  Synthetic oligonucleotide; TTA chr11 5156077 5156098 5156094 5156099 +
gttgtcaccttcatgtgctaac

SEQ ID NO: 71428 - DNA, 22 bp, Artificial Sequence
  Synthetic oligonucleotide; TTG chr11 5156081 5156102 5156098 5156103 +
tcaccttcatgtgctaactcct

SEQ ID NO: 71429 - DNA, 22 bp, Artificial Sequence
  Synthetic oligonucleotide; CTT chr11 5156088 5156109 5156105 5156110 +
catgtgctaactcctataacaa

SEQ ID NO: 71430 - DNA, 22 bp, Artificial Sequence
  Synthetic oligonucleotide; TTC chr11 5156089 5156110 5156106 5156111 +
atgtgctaactcctataacaat

SEQ ID NO: 71431 - DNA, 22 bp, Artificial Sequence
  Synthetic oligonucleotide; CTA chr11 5156097 5156118 5156114 5156119 +
actcctataacaatatttccag

SEQ ID NO: 71432 - DNA, 22 bp, Artificial Sequence
  Synthetic oligonucleotide; CTC chr11 5156101 5156122 5156118 5156123 +
ctataacaatatttccagccca

SEQ ID NO: 71433 - DNA, 22 bp, Artificial Sequence
  Synthetic oligonucleotide; CTA chr11 5156104 5156125 5156121 5156126 +
taacaatatttccagcccagat

SEQ ID NO: 71434 - DNA, 22 bp, Artificial Sequence
  Synthetic oligonucleotide; TTT chr11 5156115 5156136 5156132 5156137 +
ccagcccagattttctccctct

SEQ ID NO: 71435 - DNA, 22 bp, Artificial Sequence
  Synthetic oligonucleotide; TTC chr11 5156116 5156137 5156133 5156138 +
cagcccagattttctccctctg

SEQ ID NO: 71436 - DNA, 22 bp, Artificial Sequence
  Synthetic oligonucleotide; TTT chr11 5156128 5156149 5156145 5156150 +
tctccctctgttccaagtacac

SEQ ID NO: 71437 - DNA, 22 bp, Artificial Sequence
  Synthetic oligonucleotide; TTT chr11 5156129 5156150 5156146 5156151 +
ctccctctgttccaagtacaca

SEQ ID NO: 71438 - DNA, 22 bp, Artificial Sequence
  Synthetic oligonucleotide; TTC chr11 5156130 5156151 5156147 5156152 +
tccctctgttccaagtacacag

SEQ ID NO: 71439 - DNA, 22 bp, Artificial Sequence
  Synthetic oligonucleotide; CTC chr11 5156132 5156153 5156149 5156154 +
cctctgttccaagtacacagga

SEQ ID NO: 71440 - DNA, 22 bp, Artificial Sequence
  Synthetic oligonucleotide; CTC chr11 5156136 5156157 5156153 5156158 +
tgttccaagtacacaggaacag

SEQ ID NO: 71441 - DNA, 22 bp, Artificial Sequence
  Synthetic oligonucleotide; CTG chr11 5156138 5156159 5156155 5156160 +
ttccaagtacacaggaacagca

SEQ ID NO: 71442 - DNA, 22 bp, Artificial Sequence
  Synthetic oligonucleotide; TTC chr11 5156141 5156162 5156158 5156163 +
caagtacacaggaacagcatgt

SEQ ID NO: 71443 - DNA, 22 bp, Artificial Sequence
  Synthetic oligonucleotide; CTG chr11 5156167 5156188 5156184 5156189 +
cccaaattttagtttatccctc

SEQ ID NO: 71444 - DNA, 22 bp, Artificial Sequence
  Synthetic oligonucleotide; TTT chr11 5156176 5156197 5156193 5156198 +
tagtttatccctcacatccttt

SEQ ID NO: 71445 - DNA, 22 bp, Artificial Sequence
  Synthetic oligonucleotide; TTT chr11 5156177 5156198 5156194 5156199 +
agtttatccctcacatcctttg

SEQ ID NO: 71446 - DNA, 22 bp, Artificial Sequence
  Synthetic oligonucleotide; TTA chr11 5156178 5156199 5156195 5156200 +
gtttatccctcacatcctttga

SEQ ID NO: 71447 - DNA, 22 bp, Artificial Sequence
  Synthetic oligonucleotide; TTT chr11 5156182 5156203 5156199 5156204 +
atccctcacatcctttgaaaca

SEQ ID NO: 71448 - DNA, 22 bp, Artificial Sequence
  Synthetic oligonucleotide; TTA chr11 5156183 5156204 5156200 5156205 +
tccctcacatcctttgaaacat

SEQ ID NO: 71449 - DNA, 22 bp, Artificial Sequence
  Synthetic oligonucleotide; CTC chr11 5156189 5156210 5156206 5156211 +
acatcctttgaaacattgtcaa

SEQ ID NO: 71450 - DNA, 22 bp, Artificial Sequence
  Synthetic oligonucleotide; CTT chr11 5156197 5156218 5156214 5156219 +
tgaaacattgtcaatgagttct

SEQ ID NO: 71451 - DNA, 22 bp, Artificial Sequence
  Synthetic oligonucleotide; TTT chr11 5156198 5156219 5156215 5156220 +
gaaacattgtcaatgagttcta

SEQ ID NO: 71452 - DNA, 22 bp, Artificial Sequence
  Synthetic oligonucleotide; TTG chr11 5156199 5156220 5156216 5156221 +
aaacattgtcaatgagttctac

SEQ ID NO: 71453 - DNA, 22 bp, Artificial Sequence
  Synthetic oligonucleotide; TTG chr11 5156207 5156228 5156224 5156229 +
tcaatgagttctacacttaatt

SEQ ID NO: 71454 - DNA, 22 bp, Artificial Sequence
  Synthetic oligonucleotide; TTC chr11 5156218 5156239 5156235 5156240 +
tacacttaattcaaggttattt

SEQ ID NO: 71455 - DNA, 22 bp, Artificial Sequence
  Synthetic oligonucleotide; CTA chr11 5156220 5156241 5156237 5156242 +
cacttaattcaaggttattttt

SEQ ID NO: 71456 - DNA, 22 bp, Artificial Sequence
  Synthetic oligonucleotide; CTT chr11 5156225 5156246 5156242 5156247 +
aattcaaggttatttttttttc

SEQ ID NO: 71457 - DNA, 22 bp, Artificial Sequence
  Synthetic oligonucleotide; TTA chr11 5156226 5156247 5156243 5156248 +
attcaaggttatttttttttca

SEQ ID NO: 71458 - DNA, 22 bp, Artificial Sequence
  Synthetic oligonucleotide; TTC chr11 5156230 5156251 5156247 5156252 +
aaggttatttttttttcattgt

SEQ ID NO: 71459 - DNA, 22 bp, Artificial Sequence
  Synthetic oligonucleotide; TTA chr11 5156237 5156258 5156254 5156259 +
tttttttttcattgtacttgta

SEQ ID NO: 71460 - DNA, 22 bp, Artificial Sequence
  Synthetic oligonucleotide; TTT chr11 5156240 5156261 5156257 5156262 +
ttttttcattgtacttgtaaat

SEQ ID NO: 71461 - DNA, 22 bp, Artificial Sequence
  Synthetic oligonucleotide; TTT chr11 5156241 5156262 5156258 5156263 +
tttttcattgtacttgtaaata

SEQ ID NO: 71462 - DNA, 22 bp, Artificial Sequence
  Synthetic oligonucleotide; TTT chr11 5156242 5156263 5156259 5156264 +
ttttcattgtacttgtaaatat

SEQ ID NO: 71463 - DNA, 22 bp, Artificial Sequence
  Synthetic oligonucleotide; TTT chr11 5156243 5156264 5156260 5156265 +
tttcattgtacttgtaaatatt

SEQ ID NO: 71464 - DNA, 22 bp, Artificial Sequence
  Synthetic oligonucleotide; TTT chr11 5156244 5156265 5156261 5156266 +
ttcattgtacttgtaaatattg

SEQ ID NO: 71465 - DNA, 22 bp, Artificial Sequence
  Synthetic oligonucleotide; TTT chr11 5156245 5156266 5156262 5156267 +
tcattgtacttgtaaatattgg

SEQ ID NO: 71466 - DNA, 22 bp, Artificial Sequence
  Synthetic oligonucleotide; TTT chr11 5156246 5156267 5156263 5156268 +
cattgtacttgtaaatattgga

SEQ ID NO: 71467 - DNA, 22 bp, Artificial Sequence
  Synthetic oligonucleotide; TTC chr11 5156247 5156268 5156264 5156269 +
attgtacttgtaaatattggaa

SEQ ID NO: 71468 - DNA, 22 bp, Artificial Sequence
  Synthetic oligonucleotide; TTG chr11 5156251 5156272 5156268 5156273 +
tacttgtaaatattggaagact

SEQ ID NO: 71469 - DNA, 22 bp, Artificial Sequence
  Synthetic oligonucleotide; CTT chr11 5156256 5156277 5156273 5156278 +
gtaaatattggaagacttttac

SEQ ID NO: 71470 - DNA, 22 bp, Artificial Sequence
  Synthetic oligonucleotide; TTG chr11 5156257 5156278 5156274 5156279 +
taaatattggaagacttttaca

SEQ ID NO: 71471 - DNA, 22 bp, Artificial Sequence
  Synthetic oligonucleotide; TTG chr11 5156266 5156287 5156283 5156288 +
gaagacttttacatatgcatca

SEQ ID NO: 71472 - DNA, 22 bp, Artificial Sequence
  Synthetic oligonucleotide; CTT chr11 5156274 5156295 5156291 5156296 +
ttacatatgcatcaataactat

SEQ ID NO: 71473 - DNA, 22 bp, Artificial Sequence
  Synthetic oligonucleotide; TTT chr11 5156275 5156296 5156292 5156297 +
tacatatgcatcaataactatc

SEQ ID NO: 71474 - DNA, 22 bp, Artificial Sequence
  Synthetic oligonucleotide; TTT chr11 5156276 5156297 5156293 5156298 +
acatatgcatcaataactatct

SEQ ID NO: 71475 - DNA, 22 bp, Artificial Sequence
  Synthetic oligonucleotide; TTA chr11 5156277 5156298 5156294 5156299 +
catatgcatcaataactatctc

SEQ ID NO: 71476 - DNA, 22 bp, Artificial Sequence
  Synthetic oligonucleotide; CTA chr11 5156295 5156316 5156312 5156317 +
tctctggatttttttagctagt

SEQ ID NO: 71477 - DNA, 22 bp, Artificial Sequence
  Synthetic oligonucleotide; CTC chr11 5156299 5156320 5156316 5156321 +
tggatttttttagctagtctac

SEQ ID NO: 71478 - DNA, 22 bp, Artificial Sequence
  Synthetic oligonucleotide; CTG chr11 5156301 5156322 5156318 5156323 +
gatttttttagctagtctacta

SEQ ID NO: 71479 - DNA, 22 bp, Artificial Sequence
  Synthetic oligonucleotide; TTT chr11 5156306 5156327 5156323 5156328 +
ttttagctagtctactaaattt

SEQ ID NO: 71480 - DNA, 22 bp, Artificial Sequence
  Synthetic oligonucleotide; TTT chr11 5156307 5156328 5156324 5156329 +
tttagctagtctactaaatttt

SEQ ID NO: 71481 - DNA, 22 bp, Artificial Sequence
  Synthetic oligonucleotide; TTT chr11 5156308 5156329 5156325 5156330 +
ttagctagtctactaaattttt

SEQ ID NO: 71482 - DNA, 22 bp, Artificial Sequence
  Synthetic oligonucleotide; TTT chr11 5156309 5156330 5156326 5156331 +
tagctagtctactaaatttttt

SEQ ID NO: 71483 - DNA, 22 bp, Artificial Sequence
  Synthetic oligonucleotide; TTT chr11 5156310 5156331 5156327 5156332 +
agctagtctactaaattttttt

SEQ ID NO: 71484 - DNA, 22 bp, Artificial Sequence
  Synthetic oligonucleotide; TTA chr11 5156311 5156332 5156328 5156333 +
gctagtctactaaatttttttt

SEQ ID NO: 71485 - DNA, 22 bp, Artificial Sequence
  Synthetic oligonucleotide; CTA chr11 5156315 5156336 5156332 5156337 +
gtctactaaattttttttttct

SEQ ID NO: 71486 - DNA, 22 bp, Artificial Sequence
  Synthetic oligonucleotide; CTA chr11 5156320 5156341 5156337 5156342 +
ctaaattttttttttctttttt

SEQ ID NO: 71487 - DNA, 22 bp, Artificial Sequence
  Synthetic oligonucleotide; CTA chr11 5156323 5156344 5156340 5156345 +
aattttttttttcttttttttg

SEQ ID NO: 71488 - DNA, 22 bp, Artificial Sequence
  Synthetic oligonucleotide; TTT chr11 5156328 5156349 5156345 5156350 +
tttttttcttttttttgagaca

SEQ ID NO: 71489 - DNA, 22 bp, Artificial Sequence
  Synthetic oligonucleotide; TTT chr11 5156329 5156350 5156346 5156351 +
ttttttcttttttttgagacag

SEQ ID NO: 71490 - DNA, 22 bp, Artificial Sequence
  Synthetic oligonucleotide; TTT chr11 5156330 5156351 5156347 5156352 +
tttttcttttttttgagacaga

SEQ ID NO: 71491 - DNA, 22 bp, Artificial Sequence
  Synthetic oligonucleotide; TTT chr11 5156331 5156352 5156348 5156353 +
ttttcttttttttgagacagag

SEQ ID NO: 71492 - DNA, 22 bp, Artificial Sequence
  Synthetic oligonucleotide; TTT chr11 5156332 5156353 5156349 5156354 +
tttcttttttttgagacagagt

SEQ ID NO: 71493 - DNA, 22 bp, Artificial Sequence
  Synthetic oligonucleotide; TTT chr11 5156333 5156354 5156350 5156355 +
ttcttttttttgagacagagtc

SEQ ID NO: 71494 - DNA, 22 bp, Artificial Sequence
  Synthetic oligonucleotide; TTT chr11 5156334 5156355 5156351 5156356 +
tcttttttttgagacagagtct

SEQ ID NO: 71495 - DNA, 22 bp, Artificial Sequence
  Synthetic oligonucleotide; TTT chr11 5156335 5156356 5156352 5156357 +
cttttttttgagacagagtctc

SEQ ID NO: 71496 - DNA, 22 bp, Artificial Sequence
  Synthetic oligonucleotide; TTC chr11 5156336 5156357 5156353 5156358 +
ttttttttgagacagagtctct

SEQ ID NO: 71497 - DNA, 22 bp, Artificial Sequence
  Synthetic oligonucleotide; CTT chr11 5156338 5156359 5156355 5156360 +
ttttttgagacagagtctctct

SEQ ID NO: 71498 - DNA, 22 bp, Artificial Sequence
  Synthetic oligonucleotide; TTT chr11 5156339 5156360 5156356 5156361 +
tttttgagacagagtctctctc

SEQ ID NO: 71499 - DNA, 22 bp, Artificial Sequence
  Synthetic oligonucleotide; TTT chr11 5156340 5156361 5156357 5156362 +
ttttgagacagagtctctctct

SEQ ID NO: 71500 - DNA, 22 bp, Artificial Sequence
  Synthetic oligonucleotide; TTT chr11 5156341 5156362 5156358 5156363 +
tttgagacagagtctctctctg

SEQ ID NO: 71501 - DNA, 22 bp, Artificial Sequence
  Synthetic oligonucleotide; TTT chr11 5156342 5156363 5156359 5156364 +
ttgagacagagtctctctctgt

SEQ ID NO: 71502 - DNA, 22 bp, Artificial Sequence
  Synthetic oligonucleotide; TTT chr11 5156343 5156364 5156360 5156365 +
tgagacagagtctctctctgtc

SEQ ID NO: 71503 - DNA, 22 bp, Artificial Sequence
  Synthetic oligonucleotide; TTT chr11 5156344 5156365 5156361 5156366 +
gagacagagtctctctctgtcg

SEQ ID NO: 71504 - DNA, 22 bp, Artificial Sequence
  Synthetic oligonucleotide; TTG chr11 5156345 5156366 5156362 5156367 +
agacagagtctctctctgtcgc

SEQ ID NO: 71505 - DNA, 22 bp, Artificial Sequence
  Synthetic oligonucleotide; CTC chr11 5156357 5156378 5156374 5156379 +
tctctgtcgcccaggctggagt

SEQ ID NO: 71506 - DNA, 22 bp, Artificial Sequence
  Synthetic oligonucleotide; CTC chr11 5156359 5156380 5156376 5156381 +
tctgtcgcccaggctggagtgc

SEQ ID NO: 71507 - DNA, 22 bp, Artificial Sequence
  Synthetic oligonucleotide; CTC chr11 5156361 5156382 5156378 5156383 +
tgtcgcccaggctggagtgcag

SEQ ID NO: 71508 - DNA, 22 bp, Artificial Sequence
  Synthetic oligonucleotide; CTG chr11 5156363 5156384 5156380 5156385 +
tcgcccaggctggagtgcagtg

SEQ ID NO: 71509 - DNA, 22 bp, Artificial Sequence
  Synthetic oligonucleotide; CTG chr11 5156375 5156396 5156392 5156397 +
gagtgcagtggcccctgatctc

SEQ ID NO: 71510 - DNA, 22 bp, Artificial Sequence
  Synthetic oligonucleotide; CTG chr11 5156392 5156413 5156409 5156414 +
atctctgctcactgcaagctcc

SEQ ID NO: 71511 - DNA, 22 bp, Artificial Sequence
  Synthetic oligonucleotide; CTC chr11 5156397 5156418 5156414 5156419 +
tgctcactgcaagctccgcccc

SEQ ID NO: 71512 - DNA, 22 bp, Artificial Sequence
  Synthetic oligonucleotide; CTG chr11 5156399 5156420 5156416 5156421 +
ctcactgcaagctccgcccccc

SEQ ID NO: 71513 - DNA, 22 bp, Artificial Sequence
  Synthetic oligonucleotide; CTC chr11 5156402 5156423 5156419 5156424 +
actgcaagctccgccccccgcg

SEQ ID NO: 71514 - DNA, 22 bp, Artificial Sequence
  Synthetic oligonucleotide; CTG chr11 5156406 5156427 5156423 5156428 +
caagctccgccccccgcgttca

SEQ ID NO: 71515 - DNA, 22 bp, Artificial Sequence
  Synthetic oligonucleotide; CTC chr11 5156413 5156434 5156430 5156435 +
cgccccccgcgttcacgccatt

SEQ ID NO: 71516 - DNA, 22 bp, Artificial Sequence
  Synthetic oligonucleotide; TTC chr11 5156427 5156448 5156444 5156449 +
acgccattctcccgcctcagcc

SEQ ID NO: 71517 - DNA, 22 bp, Artificial Sequence
  Synthetic oligonucleotide; TTC chr11 5156436 5156457 5156453 5156458 +
tcccgcctcagcctccatagta

SEQ ID NO: 71518 - DNA, 22 bp, Artificial Sequence
  Synthetic oligonucleotide; CTC chr11 5156438 5156459 5156455 5156460 +
ccgcctcagcctccatagtagc

SEQ ID NO: 71519 - DNA, 22 bp, Artificial Sequence
  Synthetic oligonucleotide; CTC chr11 5156445 5156466 5156462 5156467 +
agcctccatagtagctgggact

SEQ ID NO: 71520 - DNA, 22 bp, Artificial Sequence
  Synthetic oligonucleotide; CTC chr11 5156451 5156472 5156468 5156473 +
catagtagctgggactacaggc

SEQ ID NO: 71521 - DNA, 22 bp, Artificial Sequence
  Synthetic oligonucleotide; CTG chr11 5156462 5156483 5156479 5156484 +
ggactacaggcacccgccacca

SEQ ID NO: 71522 - DNA, 22 bp, Artificial Sequence
  Synthetic oligonucleotide; CTA chr11 5156468 5156489 5156485 5156490 +
caggcacccgccaccaagcccg

SEQ ID NO: 71523 - DNA, 22 bp, Artificial Sequence
  Synthetic oligonucleotide; CTA chr11 5156494 5156515 5156511 5156516 +
attttttgtatttttttagtag

SEQ ID NO: 71524 - DNA, 22 bp, Artificial Sequence
  Synthetic oligonucleotide; TTT chr11 5156498 5156519 5156515 5156520 +
tttgtatttttttagtagagac

SEQ ID NO: 71525 - DNA, 22 bp, Artificial Sequence
  Synthetic oligonucleotide; TTT chr11 5156499 5156520 5156516 5156521 +
ttgtatttttttagtagagacg

SEQ ID NO: 71526 - DNA, 22 bp, Artificial Sequence
  Synthetic oligonucleotide; TTT chr11 5156500 5156521 5156517 5156522 +
tgtatttttttagtagagacgg

SEQ ID NO: 71527 - DNA, 22 bp, Artificial Sequence
  Synthetic oligonucleotide; TTT chr11 5156501 5156522 5156518 5156523 +
gtatttttttagtagagacggg

SEQ ID NO: 71528 - DNA, 22 bp, Artificial Sequence
  Synthetic oligonucleotide; TTG chr11 5156502 5156523 5156519 5156524 +
tatttttttagtagagacgggg

SEQ ID NO: 71529 - DNA, 22 bp, Artificial Sequence
  Synthetic oligonucleotide; TTT chr11 5156507 5156528 5156524 5156529 +
ttttagtagagacggggtttca

SEQ ID NO: 71530 - DNA, 22 bp, Artificial Sequence
  Synthetic oligonucleotide; TTT chr11 5156508 5156529 5156525 5156530 +
tttagtagagacggggtttcac

SEQ ID NO: 71531 - DNA, 22 bp, Artificial Sequence
  Synthetic oligonucleotide; TTT chr11 5156509 5156530 5156526 5156531 +
ttagtagagacggggtttcact

SEQ ID NO: 71532 - DNA, 22 bp, Artificial Sequence
  Synthetic oligonucleotide; TTT chr11 5156510 5156531 5156527 5156532 +
tagtagagacggggtttcactg

SEQ ID NO: 71533 - DNA, 22 bp, Artificial Sequence
  Synthetic oligonucleotide; TTT chr11 5156511 5156532 5156528 5156533 +
agtagagacggggtttcactgt

SEQ ID NO: 71534 - DNA, 22 bp, Artificial Sequence
  Synthetic oligonucleotide; TTA chr11 5156512 5156533 5156529 5156534 +
gtagagacggggtttcactgtg

SEQ ID NO: 71535 - DNA, 22 bp, Artificial Sequence
  Synthetic oligonucleotide; TTT chr11 5156527 5156548 5156544 5156549 +
cactgtgttagccaggatggtc

SEQ ID NO: 71536 - DNA, 22 bp, Artificial Sequence
  Synthetic oligonucleotide; TTC chr11 5156528 5156549 5156545 5156550 +
actgtgttagccaggatggtct

SEQ ID NO: 71537 - DNA, 22 bp, Artificial Sequence
  Synthetic oligonucleotide; CTG chr11 5156532 5156553 5156549 5156554 +
tgttagccaggatggtctcgat

SEQ ID NO: 71538 - DNA, 22 bp, Artificial Sequence
  Synthetic oligonucleotide; TTA chr11 5156537 5156558 5156554 5156559 +
gccaggatggtctcgatctcgc

SEQ ID NO: 71539 - DNA, 22 bp, Artificial Sequence
  Synthetic oligonucleotide; CTC chr11 5156551 5156572 5156568 5156573 +
gatctcgcgacctcgtgatcca

SEQ ID NO: 71540 - DNA, 22 bp, Artificial Sequence
  Synthetic oligonucleotide; CTC chr11 5156557 5156578 5156574 5156579 +
gcgacctcgtgatccacccgcc

SEQ ID NO: 71541 - DNA, 22 bp, Artificial Sequence
  Synthetic oligonucleotide; CTC chr11 5156565 5156586 5156582 5156587 +
gtgatccacccgcctccgcctc

SEQ ID NO: 71542 - DNA, 22 bp, Artificial Sequence
  Synthetic oligonucleotide; CTC chr11 5156581 5156602 5156598 5156603 +
cgcctcccaaagtgctgggatc

SEQ ID NO: 71543 - DNA, 22 bp, Artificial Sequence
  Synthetic oligonucleotide; CTC chr11 5156587 5156608 5156604 5156609 +
ccaaagtgctgggatcacaggc

SEQ ID NO: 71544 - DNA, 22 bp, Artificial Sequence
  Synthetic oligonucleotide; CTG chr11 5156598 5156619 5156615 5156620 +
ggatcacaggcgtgagccactg

SEQ ID NO: 71545 - DNA, 22 bp, Artificial Sequence
  Synthetic oligonucleotide; CTG chr11 5156620 5156641 5156637 5156642 +
cacccggcctactgaatatttt

SEQ ID NO: 71546 - DNA, 22 bp, Artificial Sequence
  Synthetic oligonucleotide; CTA chr11 5156631 5156652 5156648 5156653 +
ctgaatattttttaaatttatt

SEQ ID NO: 71547 - DNA, 22 bp, Artificial Sequence
  Synthetic oligonucleotide; CTG chr11 5156634 5156655 5156651 5156656 +
aatattttttaaatttattttt

SEQ ID NO: 71548 - DNA, 22 bp, Artificial Sequence
  Synthetic oligonucleotide; TTT chr11 5156641 5156662 5156658 5156663 +
tttaaatttatttttattaagg

SEQ ID NO: 71549 - DNA, 22 bp, Artificial Sequence
  Synthetic oligonucleotide; TTT chr11 5156642 5156663 5156659 5156664 +
ttaaatttatttttattaaggt

SEQ ID NO: 71550 - DNA, 22 bp, Artificial Sequence
  Synthetic oligonucleotide; TTT chr11 5156643 5156664 5156660 5156665 +
taaatttatttttattaaggta

SEQ ID NO: 71551 - DNA, 22 bp, Artificial Sequence
  Synthetic oligonucleotide; TTT chr11 5156644 5156665 5156661 5156666 +
aaatttatttttattaaggtaa

SEQ ID NO: 71552 - DNA, 22 bp, Artificial Sequence
  Synthetic oligonucleotide; TTA chr11 5156645 5156666 5156662 5156667 +
aatttatttttattaaggtaaa

SEQ ID NO: 71553 - DNA, 22 bp, Artificial Sequence
  Synthetic oligonucleotide; TTT chr11 5156650 5156671 5156667 5156672 +
atttttattaaggtaaaatata

SEQ ID NO: 71554 - DNA, 22 bp, Artificial Sequence
  Synthetic oligonucleotide; TTA chr11 5156651 5156672 5156668 5156673 +
tttttattaaggtaaaatatac

SEQ ID NO: 71555 - DNA, 22 bp, Artificial Sequence
  Synthetic oligonucleotide; TTT chr11 5156654 5156675 5156671 5156676 +
ttattaaggtaaaatatacata

SEQ ID NO: 71556 - DNA, 22 bp, Artificial Sequence
  Synthetic oligonucleotide; TTT chr11 5156655 5156676 5156672 5156677 +
tattaaggtaaaatatacatac

SEQ ID NO: 71557 - DNA, 22 bp, Artificial Sequence
  Synthetic oligonucleotide; TTT chr11 5156656 5156677 5156673 5156678 +
attaaggtaaaatatacatacg

SEQ ID NO: 71558 - DNA, 22 bp, Artificial Sequence
  Synthetic oligonucleotide; TTA chr11 5156657 5156678 5156674 5156679 +
ttaaggtaaaatatacatacgt

SEQ ID NO: 71559 - DNA, 22 bp, Artificial Sequence
  Synthetic oligonucleotide; TTA chr11 5156660 5156681 5156677 5156682 +
aggtaaaatatacatacgtaat

SEQ ID NO: 71560 - DNA, 22 bp, Artificial Sequence
  Synthetic oligonucleotide; TTT chr11 5156684 5156705 5156701 5156706 +
accgtctttacttttttttttt

SEQ ID NO: 71561 - DNA, 22 bp, Artificial Sequence
  Synthetic oligonucleotide; TTA chr11 5156685 5156706 5156702 5156707 +
ccgtctttactttttttttttc

SEQ ID NO: 71562 - DNA, 22 bp, Artificial Sequence
  Synthetic oligonucleotide; CTT chr11 5156692 5156713 5156709 5156714 +
tactttttttttttccttgaga

SEQ ID NO: 71563 - DNA, 22 bp, Artificial Sequence
  Synthetic oligonucleotide; TTT chr11 5156693 5156714 5156710 5156715 +
actttttttttttccttgagac

SEQ ID NO: 71564 - DNA, 22 bp, Artificial Sequence
  Synthetic oligonucleotide; TTA chr11 5156694 5156715 5156711 5156716 +
ctttttttttttccttgagacg

SEQ ID NO: 71565 - DNA, 22 bp, Artificial Sequence
  Synthetic oligonucleotide; CTT chr11 5156697 5156718 5156714 5156719 +
tttttttttccttgagacggag

SEQ ID NO: 71566 - DNA, 22 bp, Artificial Sequence
  Synthetic oligonucleotide; TTT chr11 5156698 5156719 5156715 5156720 +
ttttttttccttgagacggagt

SEQ ID NO: 71567 - DNA, 22 bp, Artificial Sequence
  Synthetic oligonucleotide; TTT chr11 5156699 5156720 5156716 5156721 +
tttttttccttgagacggagtc

SEQ ID NO: 71568 - DNA, 22 bp, Artificial Sequence
  Synthetic oligonucleotide; TTT chr11 5156700 5156721 5156717 5156722 +
ttttttccttgagacggagtct

SEQ ID NO: 71569 - DNA, 22 bp, Artificial Sequence
  Synthetic oligonucleotide; TTT chr11 5156701 5156722 5156718 5156723 +
tttttccttgagacggagtctc

SEQ ID NO: 71570 - DNA, 22 bp, Artificial Sequence
  Synthetic oligonucleotide; TTT chr11 5156702 5156723 5156719 5156724 +
ttttccttgagacggagtctcg

SEQ ID NO: 71571 - DNA, 22 bp, Artificial Sequence
  Synthetic oligonucleotide; TTT chr11 5156703 5156724 5156720 5156725 +
tttccttgagacggagtctcgc

SEQ ID NO: 71572 - DNA, 22 bp, Artificial Sequence
  Synthetic oligonucleotide; TTT chr11 5156704 5156725 5156721 5156726 +
ttccttgagacggagtctcgct

SEQ ID NO: 71573 - DNA, 22 bp, Artificial Sequence
  Synthetic oligonucleotide; TTT chr11 5156705 5156726 5156722 5156727 +
tccttgagacggagtctcgctc

SEQ ID NO: 71574 - DNA, 22 bp, Artificial Sequence
  Synthetic oligonucleotide; TTT chr11 5156706 5156727 5156723 5156728 +
ccttgagacggagtctcgctcc

SEQ ID NO: 71575 - DNA, 22 bp, Artificial Sequence
  Synthetic oligonucleotide; TTC chr11 5156707 5156728 5156724 5156729 +
cttgagacggagtctcgctccg

SEQ ID NO: 71576 - DNA, 22 bp, Artificial Sequence
  Synthetic oligonucleotide; CTT chr11 5156710 5156731 5156727 5156732 +
gagacggagtctcgctccgtca

SEQ ID NO: 71577 - DNA, 22 bp, Artificial Sequence
  Synthetic oligonucleotide; TTG chr11 5156711 5156732 5156728 5156733 +
agacggagtctcgctccgtcat

SEQ ID NO: 71578 - DNA, 22 bp, Artificial Sequence
  Synthetic oligonucleotide; CTC chr11 5156723 5156744 5156740 5156745 +
gctccgtcatccaggctggagt

SEQ ID NO: 71579 - DNA, 22 bp, Artificial Sequence
  Synthetic oligonucleotide; CTC chr11 5156727 5156748 5156744 5156749 +
cgtcatccaggctggagtgcag

SEQ ID NO: 71580 - DNA, 22 bp, Artificial Sequence
  Synthetic oligonucleotide; CTG chr11 5156741 5156762 5156758 5156763 +
gagtgcagtggtaggatcttgg

SEQ ID NO: 71581 - DNA, 22 bp, Artificial Sequence
  Synthetic oligonucleotide; CTT chr11 5156761 5156782 5156778 5156783 +
ggctcactgcaacctccgcccc

SEQ ID NO: 71582 - DNA, 22 bp, Artificial Sequence
  Synthetic oligonucleotide; TTG chr11 5156762 5156783 5156779 5156784 +
gctcactgcaacctccgccccc

SEQ ID NO: 71583 - DNA, 22 bp, Artificial Sequence
  Synthetic oligonucleotide; CTC chr11 5156766 5156787 5156783 5156788 +
actgcaacctccgcccccacca

SEQ ID NO: 71584 - DNA, 22 bp, Artificial Sequence
  Synthetic oligonucleotide; CTG chr11 5156770 5156791 5156787 5156792 +
caacctccgcccccaccaggtt

SEQ ID NO: 71585 - DNA, 22 bp, Artificial Sequence
  Synthetic oligonucleotide; CTC chr11 5156777 5156798 5156794 5156799 +
cgcccccaccaggttcaagcga

SEQ ID NO: 71586 - DNA, 22 bp, Artificial Sequence
  Synthetic oligonucleotide; TTC chr11 5156793 5156814 5156810 5156815 +
aagcgattctcctgcccaagcc

SEQ ID NO: 71587 - DNA, 22 bp, Artificial Sequence
  Synthetic oligonucleotide; TTC chr11 5156802 5156823 5156819 5156824 +
tcctgcccaagcctcccaagta

SEQ ID NO: 71588 - DNA, 22 bp, Artificial Sequence
  Synthetic oligonucleotide; CTC chr11 5156804 5156825 5156821 5156826 +
ctgcccaagcctcccaagtagg

SEQ ID NO: 71589 - DNA, 22 bp, Artificial Sequence
  Synthetic oligonucleotide; CTG chr11 5156807 5156828 5156824 5156829 +
cccaagcctcccaagtaggtgg

SEQ ID NO: 71590 - DNA, 22 bp, Artificial Sequence
  Synthetic oligonucleotide; CTC chr11 5156817 5156838 5156834 5156839 +
ccaagtaggtgggattacaggc

SEQ ID NO: 71591 - DNA, 22 bp, Artificial Sequence
  Synthetic oligonucleotide; TTA chr11 5156834 5156855 5156851 5156856 +
caggcgcctgccaccacgcctg

SEQ ID NO: 71592 - DNA, 22 bp, Artificial Sequence
  Synthetic oligonucleotide; CTG chr11 5156844 5156865 5156861 5156866 +
ccaccacgcctggctaattttt

SEQ ID NO: 71593 - DNA, 22 bp, Artificial Sequence
  Synthetic oligonucleotide; CTG chr11 5156856 5156877 5156873 5156878 +
gctaattttttgtatttttagt

SEQ ID NO: 71594 - DNA, 22 bp, Artificial Sequence
  Synthetic oligonucleotide; CTA chr11 5156860 5156881 5156877 5156882 +
attttttgtatttttagtagag

SEQ ID NO: 71595 - DNA, 22 bp, Artificial Sequence
  Synthetic oligonucleotide; TTT chr11 5156864 5156885 5156881 5156886 +
tttgtatttttagtagagacag

SEQ ID NO: 71596 - DNA, 22 bp, Artificial Sequence
  Synthetic oligonucleotide; TTT chr11 5156865 5156886 5156882 5156887 +
ttgtatttttagtagagacagg

SEQ ID NO: 71597 - DNA, 22 bp, Artificial Sequence
  Synthetic oligonucleotide; TTT chr11 5156866 5156887 5156883 5156888 +
tgtatttttagtagagacaggg

SEQ ID NO: 71598 - DNA, 22 bp, Artificial Sequence
  Synthetic oligonucleotide; TTT chr11 5156867 5156888 5156884 5156889 +
gtatttttagtagagacagggt

SEQ ID NO: 71599 - DNA, 22 bp, Artificial Sequence
  Synthetic oligonucleotide; TTG chr11 5156868 5156889 5156885 5156890 +
tatttttagtagagacagggtt

SEQ ID NO: 71600 - DNA, 22 bp, Artificial Sequence
  Synthetic oligonucleotide; TTT chr11 5156873 5156894 5156890 5156895 +
ttagtagagacagggtttcacc

SEQ ID NO: 71601 - DNA, 22 bp, Artificial Sequence
  Synthetic oligonucleotide; TTT chr11 5156874 5156895 5156891 5156896 +
tagtagagacagggtttcacca

SEQ ID NO: 71602 - DNA, 22 bp, Artificial Sequence
  Synthetic oligonucleotide; TTT chr11 5156875 5156896 5156892 5156897 +
agtagagacagggtttcaccat

SEQ ID NO: 71603 - DNA, 22 bp, Artificial Sequence
  Synthetic oligonucleotide; TTA chr11 5156876 5156897 5156893 5156898 +
gtagagacagggtttcaccatg

SEQ ID NO: 71604 - DNA, 22 bp, Artificial Sequence
  Synthetic oligonucleotide; TTT chr11 5156891 5156912 5156908 5156913 +
caccatgttggtcaggctggtc

SEQ ID NO: 71605 - DNA, 22 bp, Artificial Sequence
  Synthetic oligonucleotide; TTC chr11 5156892 5156913 5156909 5156914 +
accatgttggtcaggctggtct

SEQ ID NO: 71606 - DNA, 22 bp, Artificial Sequence
  Synthetic oligonucleotide; TTG chr11 5156901 5156922 5156918 5156923 +
gtcaggctggtcttggactcct

SEQ ID NO: 71607 - DNA, 22 bp, Artificial Sequence
  Synthetic oligonucleotide; CTG chr11 5156910 5156931 5156927 5156932 +
gtcttggactcctgacctcatg

SEQ ID NO: 71608 - DNA, 22 bp, Artificial Sequence
  Synthetic oligonucleotide; CTT chr11 5156915 5156936 5156932 5156937 +
ggactcctgacctcatgatcca

SEQ ID NO: 71609 - DNA, 22 bp, Artificial Sequence
  Synthetic oligonucleotide; TTG chr11 5156916 5156937 5156933 5156938 +
gactcctgacctcatgatccac

SEQ ID NO: 71610 - DNA, 22 bp, Artificial Sequence
  Synthetic oligonucleotide; CTC chr11 5156921 5156942 5156938 5156943 +
ctgacctcatgatccacctgcc

SEQ ID NO: 71611 - DNA, 22 bp, Artificial Sequence
  Synthetic oligonucleotide; CTG chr11 5156924 5156945 5156941 5156946 +
acctcatgatccacctgccttg

SEQ ID NO: 71612 - DNA, 22 bp, Artificial Sequence
  Synthetic oligonucleotide; CTC chr11 5156929 5156950 5156946 5156951 +
atgatccacctgccttggcctc

SEQ ID NO: 71613 - DNA, 22 bp, Artificial Sequence
  Synthetic oligonucleotide; CTG chr11 5156941 5156962 5156958 5156963 +
ccttggcctcccaaagtgctga

SEQ ID NO: 71614 - DNA, 22 bp, Artificial Sequence
  Synthetic oligonucleotide; CTT chr11 5156945 5156966 5156962 5156967 +
ggcctcccaaagtgctgagatt

SEQ ID NO: 71615 - DNA, 22 bp, Artificial Sequence
  Synthetic oligonucleotide; TTG chr11 5156946 5156967 5156963 5156968 +
gcctcccaaagtgctgagatta

SEQ ID NO: 71616 - DNA, 22 bp, Artificial Sequence
  Synthetic oligonucleotide; CTC chr11 5156951 5156972 5156968 5156973 +
ccaaagtgctgagattacaggc

SEQ ID NO: 71617 - DNA, 22 bp, Artificial Sequence
  Synthetic oligonucleotide; CTG chr11 5156962 5156983 5156979 5156984 +
agattacaggcattggccaccg

SEQ ID NO: 71618 - DNA, 22 bp, Artificial Sequence
  Synthetic oligonucleotide; TTA chr11 5156968 5156989 5156985 5156990 +
caggcattggccaccgcaccca

SEQ ID NO: 71619 - DNA, 22 bp, Artificial Sequence
  Synthetic oligonucleotide; TTG chr11 5156977 5156998 5156994 5156999 +
gccaccgcacccagcccatctt

SEQ ID NO: 71620 - DNA, 22 bp, Artificial Sequence
  Synthetic oligonucleotide; CTT chr11 5156999 5157020 5157016 5157021 +
taccatttttgagtgtacggtt

SEQ ID NO: 71621 - DNA, 22 bp, Artificial Sequence
  Synthetic oligonucleotide; TTT chr11 5157000 5157021 5157017 5157022 +
accatttttgagtgtacggttc

SEQ ID NO: 71622 - DNA, 22 bp, Artificial Sequence
  Synthetic oligonucleotide; TTA chr11 5157001 5157022 5157018 5157023 +
ccatttttgagtgtacggttca

SEQ ID NO: 71623 - DNA, 22 bp, Artificial Sequence
  Synthetic oligonucleotide; TTT chr11 5157007 5157028 5157024 5157029 +
ttgagtgtacggttcagtggta

SEQ ID NO: 71624 - DNA, 22 bp, Artificial Sequence
  Synthetic oligonucleotide; TTT chr11 5157008 5157029 5157025 5157030 +
tgagtgtacggttcagtggtaa

SEQ ID NO: 71625 - DNA, 22 bp, Artificial Sequence
  Synthetic oligonucleotide; TTT chr11 5157009 5157030 5157026 5157031 +
gagtgtacggttcagtggtaat

SEQ ID NO: 71626 - DNA, 22 bp, Artificial Sequence
  Synthetic oligonucleotide; TTG chr11 5157010 5157031 5157027 5157032 +
agtgtacggttcagtggtaata

SEQ ID NO: 71627 - DNA, 22 bp, Artificial Sequence
  Synthetic oligonucleotide; TTC chr11 5157022 5157043 5157039 5157044 +
agtggtaatacatacatacata

SEQ ID NO: 71628 - DNA, 22 bp, Artificial Sequence
  Synthetic oligonucleotide; TTT chr11 5157057 5157078 5157074 5157079 +
atatgtatacatacatattcac

SEQ ID NO: 71629 - DNA, 22 bp, Artificial Sequence
  Synthetic oligonucleotide; TTA chr11 5157058 5157079 5157075 5157080 +
tatgtatacatacatattcaca

SEQ ID NO: 71630 - DNA, 22 bp, Artificial Sequence
  Synthetic oligonucleotide; TTC chr11 5157077 5157098 5157094 5157099 +
acatttttatatatatatacac

SEQ ID NO: 71631 - DNA, 22 bp, Artificial Sequence
  Synthetic oligonucleotide; TTT chr11 5157083 5157104 5157100 5157105 +
ttatatatatatacacatacat

SEQ ID NO: 71632 - DNA, 22 bp, Artificial Sequence
  Synthetic oligonucleotide; TTT chr11 5157084 5157105 5157101 5157106 +
tatatatatatacacatacata

SEQ ID NO: 71633 - DNA, 22 bp, Artificial Sequence
  Synthetic oligonucleotide; TTT chr11 5157085 5157106 5157102 5157107 +
atatatatatacacatacatac

SEQ ID NO: 71634 - DNA, 22 bp, Artificial Sequence
  Synthetic oligonucleotide; TTA chr11 5157086 5157107 5157103 5157108 +
tatatatatacacatacataca

SEQ ID NO: 71635 - DNA, 22 bp, Artificial Sequence
  Synthetic oligonucleotide; TTT chr11 5157154 5157175 5157171 5157176 +
ttttgcttgatttctcattcct

SEQ ID NO: 71636 - DNA, 22 bp, Artificial Sequence
  Synthetic oligonucleotide; TTT chr11 5157155 5157176 5157172 5157177 +
tttgcttgatttctcattcctt

SEQ ID NO: 71637 - DNA, 22 bp, Artificial Sequence
  Synthetic oligonucleotide; TTT chr11 5157156 5157177 5157173 5157178 +
ttgcttgatttctcattccttt

SEQ ID NO: 71638 - DNA, 22 bp, Artificial Sequence
  Synthetic oligonucleotide; TTT chr11 5157157 5157178 5157174 5157179 +
tgcttgatttctcattcctttc

SEQ ID NO: 71639 - DNA, 22 bp, Artificial Sequence
  Synthetic oligonucleotide; TTT chr11 5157158 5157179 5157175 5157180 +
gcttgatttctcattcctttct

SEQ ID NO: 71640 - DNA, 22 bp, Artificial Sequence
  Synthetic oligonucleotide; TTG chr11 5157159 5157180 5157176 5157181 +
cttgatttctcattcctttctt

SEQ ID NO: 71641 - DNA, 22 bp, Artificial Sequence
  Synthetic oligonucleotide; CTT chr11 5157162 5157183 5157179 5157184 +
gatttctcattcctttcttccc

SEQ ID NO: 71642 - DNA, 22 bp, Artificial Sequence
  Synthetic oligonucleotide; TTG chr11 5157163 5157184 5157180 5157185 +
atttctcattcctttcttccct

SEQ ID NO: 71643 - DNA, 22 bp, Artificial Sequence
  Synthetic oligonucleotide; TTT chr11 5157167 5157188 5157184 5157189 +
ctcattcctttcttccctcccg

SEQ ID NO: 71644 - DNA, 22 bp, Artificial Sequence
  Synthetic oligonucleotide; TTC chr11 5157168 5157189 5157185 5157190 +
tcattcctttcttccctcccgc

SEQ ID NO: 71645 - DNA, 22 bp, Artificial Sequence
  Synthetic oligonucleotide; CTC chr11 5157170 5157191 5157187 5157192 +
attcctttcttccctcccgccg

SEQ ID NO: 71646 - DNA, 22 bp, Artificial Sequence
  Synthetic oligonucleotide; TTC chr11 5157174 5157195 5157191 5157196 +
ctttcttccctcccgccgccgg

SEQ ID NO: 71647 - DNA, 22 bp, Artificial Sequence
  Synthetic oligonucleotide; CTT chr11 5157177 5157198 5157194 5157199 +
tcttccctcccgccgccggtaa

SEQ ID NO: 71648 - DNA, 22 bp, Artificial Sequence
  Synthetic oligonucleotide; TTT chr11 5157178 5157199 5157195 5157200 +
cttccctcccgccgccggtaac

SEQ ID NO: 71649 - DNA, 22 bp, Artificial Sequence
  Synthetic oligonucleotide; TTC chr11 5157179 5157200 5157196 5157201 +
ttccctcccgccgccggtaact

SEQ ID NO: 71650 - DNA, 22 bp, Artificial Sequence
  Synthetic oligonucleotide; CTT chr11 5157181 5157202 5157198 5157203 +
ccctcccgccgccggtaactac

SEQ ID NO: 71651 - DNA, 22 bp, Artificial Sequence
  Synthetic oligonucleotide; TTC chr11 5157182 5157203 5157199 5157204 +
cctcccgccgccggtaactacc

SEQ ID NO: 71652 - DNA, 22 bp, Artificial Sequence
  Synthetic oligonucleotide; CTC chr11 5157186 5157207 5157203 5157208 +
ccgccgccggtaactaccaatc

SEQ ID NO: 71653 - DNA, 22 bp, Artificial Sequence
  Synthetic oligonucleotide; CTA chr11 5157202 5157223 5157219 5157224 +
ccaatctactctctgtcttcat

SEQ ID NO: 71654 - DNA, 22 bp, Artificial Sequence
  Synthetic oligonucleotide; CTA chr11 5157210 5157231 5157227 5157232 +
ctctctgtcttcataagatcca

SEQ ID NO: 71655 - DNA, 22 bp, Artificial Sequence
  Synthetic oligonucleotide; CTC chr11 5157213 5157234 5157230 5157235 +
tctgtcttcataagatccacgt

SEQ ID NO: 71656 - DNA, 22 bp, Artificial Sequence
  Synthetic oligonucleotide; CTC chr11 5157215 5157236 5157232 5157237 +
tgtcttcataagatccacgttt

SEQ ID NO: 71657 - DNA, 22 bp, Artificial Sequence
  Synthetic oligonucleotide; CTG chr11 5157217 5157238 5157234 5157239 +
tcttcataagatccacgttttt

SEQ ID NO: 71658 - DNA, 22 bp, Artificial Sequence
  Synthetic oligonucleotide; CTT chr11 5157221 5157242 5157238 5157243 +
cataagatccacgtttttaact

SEQ ID NO: 71659 - DNA, 22 bp, Artificial Sequence
  Synthetic oligonucleotide; TTC chr11 5157222 5157243 5157239 5157244 +
ataagatccacgtttttaactt

SEQ ID NO: 71660 - DNA, 22 bp, Artificial Sequence
  Synthetic oligonucleotide; TTT chr11 5157237 5157258 5157254 5157259 +
ttaacttccacacgagttagaa

SEQ ID NO: 71661 - DNA, 22 bp, Artificial Sequence
  Synthetic oligonucleotide; TTT chr11 5157238 5157259 5157255 5157260 +
taacttccacacgagttagaac

SEQ ID NO: 71662 - DNA, 22 bp, Artificial Sequence
  Synthetic oligonucleotide; TTT chr11 5157239 5157260 5157256 5157261 +
aacttccacacgagttagaaca

SEQ ID NO: 71663 - DNA, 22 bp, Artificial Sequence
  Synthetic oligonucleotide; TTA chr11 5157240 5157261 5157257 5157262 +
acttccacacgagttagaacat

SEQ ID NO: 71664 - DNA, 22 bp, Artificial Sequence
  Synthetic oligonucleotide; CTT chr11 5157244 5157265 5157261 5157266 +
ccacacgagttagaacatgtga

SEQ ID NO: 71665 - DNA, 22 bp, Artificial Sequence
  Synthetic oligonucleotide; TTC chr11 5157245 5157266 5157262 5157267 +
cacacgagttagaacatgtgat

SEQ ID NO: 71666 - DNA, 22 bp, Artificial Sequence
  Synthetic oligonucleotide; TTA chr11 5157256 5157277 5157273 5157278 +
gaacatgtgatatttttctttc

SEQ ID NO: 71667 - DNA, 22 bp, Artificial Sequence
  Synthetic oligonucleotide; TTT chr11 5157271 5157292 5157288 5157293 +
ttctttctgtgcttggcttatt

SEQ ID NO: 71668 - DNA, 22 bp, Artificial Sequence
  Synthetic oligonucleotide; TTT chr11 5157272 5157293 5157289 5157294 +
tctttctgtgcttggcttattt

SEQ ID NO: 71669 - DNA, 22 bp, Artificial Sequence
  Synthetic oligonucleotide; TTT chr11 5157273 5157294 5157290 5157295 +
ctttctgtgcttggcttatttc

SEQ ID NO: 71670 - DNA, 22 bp, Artificial Sequence
  Synthetic oligonucleotide; TTC chr11 5157274 5157295 5157291 5157296 +
tttctgtgcttggcttatttca

SEQ ID NO: 71671 - DNA, 22 bp, Artificial Sequence
  Synthetic oligonucleotide; CTT chr11 5157276 5157297 5157293 5157298 +
tctgtgcttggcttatttcact

SEQ ID NO: 71672 - DNA, 22 bp, Artificial Sequence
  Synthetic oligonucleotide; TTT chr11 5157277 5157298 5157294 5157299 +
ctgtgcttggcttatttcactt

SEQ ID NO: 71673 - DNA, 22 bp, Artificial Sequence
  Synthetic oligonucleotide; TTC chr11 5157278 5157299 5157295 5157300 +
tgtgcttggcttatttcactta

SEQ ID NO: 71674 - DNA, 22 bp, Artificial Sequence
  Synthetic oligonucleotide; CTG chr11 5157280 5157301 5157297 5157302 +
tgcttggcttatttcacttaac

SEQ ID NO: 71675 - DNA, 22 bp, Artificial Sequence
  Synthetic oligonucleotide; CTT chr11 5157285 5157306 5157302 5157307 +
ggcttatttcacttaacgtaat

SEQ ID NO: 71676 - DNA, 22 bp, Artificial Sequence
  Synthetic oligonucleotide; TTG chr11 5157286 5157307 5157303 5157308 +
gcttatttcacttaacgtaatt

SEQ ID NO: 71677 - DNA, 22 bp, Artificial Sequence
  Synthetic oligonucleotide; CTT chr11 5157290 5157311 5157307 5157312 +
atttcacttaacgtaattgctt

SEQ ID NO: 71678 - DNA, 22 bp, Artificial Sequence
  Synthetic oligonucleotide; TTA chr11 5157291 5157312 5157308 5157313 +
tttcacttaacgtaattgcttt

SEQ ID NO: 71679 - DNA, 22 bp, Artificial Sequence
  Synthetic oligonucleotide; TTT chr11 5157294 5157315 5157311 5157316 +
cacttaacgtaattgctttcag

SEQ ID NO: 71680 - DNA, 22 bp, Artificial Sequence
  Synthetic oligonucleotide; TTC chr11 5157295 5157316 5157312 5157317 +
acttaacgtaattgctttcagt

SEQ ID NO: 71681 - DNA, 22 bp, Artificial Sequence
  Synthetic oligonucleotide; CTT chr11 5157299 5157320 5157316 5157321 +
aacgtaattgctttcagtacca

SEQ ID NO: 71682 - DNA, 22 bp, Artificial Sequence
  Synthetic oligonucleotide; TTA chr11 5157300 5157321 5157317 5157322 +
acgtaattgctttcagtaccat

SEQ ID NO: 71683 - DNA, 22 bp, Artificial Sequence
  Synthetic oligonucleotide; TTG chr11 5157309 5157330 5157326 5157331 +
ctttcagtaccatttatgttac

SEQ ID NO: 71684 - DNA, 22 bp, Artificial Sequence
  Synthetic oligonucleotide; CTT chr11 5157312 5157333 5157329 5157334 +
tcagtaccatttatgttactgt

SEQ ID NO: 71685 - DNA, 22 bp, Artificial Sequence
  Synthetic oligonucleotide; TTT chr11 5157313 5157334 5157330 5157335 +
cagtaccatttatgttactgta

SEQ ID NO: 71686 - DNA, 22 bp, Artificial Sequence
  Synthetic oligonucleotide; TTC chr11 5157314 5157335 5157331 5157336 +
agtaccatttatgttactgtaa

SEQ ID NO: 71687 - DNA, 22 bp, Artificial Sequence
  Synthetic oligonucleotide; TTT chr11 5157324 5157345 5157341 5157346 +
atgttactgtaattgataatat

SEQ ID NO: 71688 - DNA, 22 bp, Artificial Sequence
  Synthetic oligonucleotide; TTA chr11 5157325 5157346 5157342 5157347 +
tgttactgtaattgataatatt

SEQ ID NO: 71689 - DNA, 22 bp, Artificial Sequence
  Synthetic oligonucleotide; TTA chr11 5157330 5157351 5157347 5157352 +
ctgtaattgataatatttcatt

SEQ ID NO: 71690 - DNA, 22 bp, Artificial Sequence
  Synthetic oligonucleotide; CTG chr11 5157333 5157354 5157350 5157355 +
taattgataatatttcattctt

SEQ ID NO: 71691 - DNA, 22 bp, Artificial Sequence
  Synthetic oligonucleotide; TTG chr11 5157339 5157360 5157356 5157361 +
ataatatttcattcttttttat

SEQ ID NO: 71692 - DNA, 22 bp, Artificial Sequence
  Synthetic oligonucleotide; TTT chr11 5157348 5157369 5157365 5157370 +
cattcttttttatggttgaata

SEQ ID NO: 71693 - DNA, 22 bp, Artificial Sequence
  Synthetic oligonucleotide; TTC chr11 5157349 5157370 5157366 5157371 +
attcttttttatggttgaataa

SEQ ID NO: 71694 - DNA, 22 bp, Artificial Sequence
  Synthetic oligonucleotide; TTC chr11 5157353 5157374 5157370 5157375 +
ttttttatggttgaataatatt

SEQ ID NO: 71695 - DNA, 22 bp, Artificial Sequence
  Synthetic oligonucleotide; CTT chr11 5157355 5157376 5157372 5157377 +
ttttatggttgaataatattcc

SEQ ID NO: 71696 - DNA, 22 bp, Artificial Sequence
  Synthetic oligonucleotide; TTT chr11 5157356 5157377 5157373 5157378 +
tttatggttgaataatattcca

SEQ ID NO: 71697 - DNA, 22 bp, Artificial Sequence
  Synthetic oligonucleotide; TTT chr11 5157357 5157378 5157374 5157379 +
ttatggttgaataatattccat

SEQ ID NO: 71698 - DNA, 22 bp, Artificial Sequence
  Synthetic oligonucleotide; TTT chr11 5157358 5157379 5157375 5157380 +
tatggttgaataatattccatt

SEQ ID NO: 71699 - DNA, 22 bp, Artificial Sequence
  Synthetic oligonucleotide; TTT chr11 5157359 5157380 5157376 5157381 +
atggttgaataatattccattg

SEQ ID NO: 71700 - DNA, 22 bp, Artificial Sequence
  Synthetic oligonucleotide; TTA chr11 5157360 5157381 5157377 5157382 +
tggttgaataatattccattgt

SEQ ID NO: 71701 - DNA, 22 bp, Artificial Sequence
  Synthetic oligonucleotide; TTG chr11 5157366 5157387 5157383 5157388 +
aataatattccattgtgtgtgt

SEQ ID NO: 71702 - DNA, 22 bp, Artificial Sequence
  Synthetic oligonucleotide; TTC chr11 5157376 5157397 5157393 5157398 +
cattgtgtgtgtgtgtgtgtgt

SEQ ID NO: 71703 - DNA, 22 bp, Artificial Sequence
  Synthetic oligonucleotide; TTG chr11 5157381 5157402 5157398 5157403 +
tgtgtgtgtgtgtgtgtgtgtg

SEQ ID NO: 71704 - DNA, 22 bp, Artificial Sequence
  Synthetic oligonucleotide; TTA chr11 5157412 5157433 5157429 5157434 +
ttttctttatccatttatctgt

SEQ ID NO: 71705 - DNA, 22 bp, Artificial Sequence
  Synthetic oligonucleotide; TTT chr11 5157415 5157436 5157432 5157437 +
tctttatccatttatctgttga

SEQ ID NO: 71706 - DNA, 22 bp, Artificial Sequence
  Synthetic oligonucleotide; TTT chr11 5157416 5157437 5157433 5157438 +
ctttatccatttatctgttgac

SEQ ID NO: 71707 - DNA, 22 bp, Artificial Sequence
  Synthetic oligonucleotide; TTC chr11 5157417 5157438 5157434 5157439 +
tttatccatttatctgttgacg

SEQ ID NO: 71708 - DNA, 22 bp, Artificial Sequence
  Synthetic oligonucleotide; CTT chr11 5157419 5157440 5157436 5157441 +
tatccatttatctgttgacgaa

SEQ ID NO: 71709 - DNA, 22 bp, Artificial Sequence
  Synthetic oligonucleotide; TTT chr11 5157420 5157441 5157437 5157442 +
atccatttatctgttgacgaat

SEQ ID NO: 71710 - DNA, 22 bp, Artificial Sequence
  Synthetic oligonucleotide; TTA chr11 5157421 5157442 5157438 5157443 +
tccatttatctgttgacgaata

SEQ ID NO: 71711 - DNA, 22 bp, Artificial Sequence
  Synthetic oligonucleotide; TTT chr11 5157428 5157449 5157445 5157450 +
atctgttgacgaatacatcagt

SEQ ID NO: 71712 - DNA, 22 bp, Artificial Sequence
  Synthetic oligonucleotide; TTA chr11 5157429 5157450 5157446 5157451 +
tctgttgacgaatacatcagtt

SEQ ID NO: 71713 - DNA, 22 bp, Artificial Sequence
  Synthetic oligonucleotide; CTG chr11 5157433 5157454 5157450 5157455 +
ttgacgaatacatcagttgatt

SEQ ID NO: 71714 - DNA, 22 bp, Artificial Sequence
  Synthetic oligonucleotide; TTG chr11 5157436 5157457 5157453 5157458 +
acgaatacatcagttgatttca

SEQ ID NO: 71715 - DNA, 22 bp, Artificial Sequence
  Synthetic oligonucleotide; TTG chr11 5157452 5157473 5157469 5157474 +
atttcaaatcttggcgtttgtg

SEQ ID NO: 71716 - DNA, 22 bp, Artificial Sequence
  Synthetic oligonucleotide; TTT chr11 5157456 5157477 5157473 5157478 +
caaatcttggcgtttgtgaata

SEQ ID NO: 71717 - DNA, 22 bp, Artificial Sequence
  Synthetic oligonucleotide; TTC chr11 5157457 5157478 5157474 5157479 +
aaatcttggcgtttgtgaatag

SEQ ID NO: 71718 - DNA, 22 bp, Artificial Sequence
  Synthetic oligonucleotide; CTT chr11 5157464 5157485 5157481 5157486 +
ggcgtttgtgaatagtgctata

SEQ ID NO: 71719 - DNA, 22 bp, Artificial Sequence
  Synthetic oligonucleotide; TTG chr11 5157465 5157486 5157482 5157487 +
gcgtttgtgaatagtgctataa

SEQ ID NO: 71720 - DNA, 22 bp, Artificial Sequence
  Synthetic oligonucleotide; TTT chr11 5157471 5157492 5157488 5157493 +
gtgaatagtgctataataaaga

SEQ ID NO: 71721 - DNA, 22 bp, Artificial Sequence
  Synthetic oligonucleotide; TTG chr11 5157472 5157493 5157489 5157494 +
tgaatagtgctataataaagat

SEQ ID NO: 71722 - DNA, 22 bp, Artificial Sequence
  Synthetic oligonucleotide; CTA chr11 5157484 5157505 5157501 5157506 +
taataaagatgggagtactgat

SEQ ID NO: 71723 - DNA, 22 bp, Artificial Sequence
  Synthetic oligonucleotide; CTG chr11 5157504 5157525 5157521 5157526 +
atatatcttcgacatactaatt

SEQ ID NO: 71724 - DNA, 22 bp, Artificial Sequence
  Synthetic oligonucleotide; CTT chr11 5157513 5157534 5157530 5157535 +
cgacatactaatttattctttt

SEQ ID NO: 71725 - DNA, 22 bp, Artificial Sequence
  Synthetic oligonucleotide; TTC chr11 5157514 5157535 5157531 5157536 +
gacatactaatttattctttta

SEQ ID NO: 71726 - DNA, 22 bp, Artificial Sequence
  Synthetic oligonucleotide; CTA chr11 5157523 5157544 5157540 5157545 +
atttattcttttaagggtatat

SEQ ID NO: 71727 - DNA, 22 bp, Artificial Sequence
  Synthetic oligonucleotide; TTT chr11 5157527 5157548 5157544 5157549 +
attcttttaagggtatatacct

SEQ ID NO: 71728 - DNA, 22 bp, Artificial Sequence
  Synthetic oligonucleotide; TTA chr11 5157528 5157549 5157545 5157550 +
ttcttttaagggtatataccta

SEQ ID NO: 71729 - DNA, 22 bp, Artificial Sequence
  Synthetic oligonucleotide; TTC chr11 5157531 5157552 5157548 5157553 +
ttttaagggtatatacctagga

SEQ ID NO: 71730 - DNA, 22 bp, Artificial Sequence
  Synthetic oligonucleotide; CTT chr11 5157533 5157554 5157550 5157555 +
ttaagggtatatacctaggagt

SEQ ID NO: 71731 - DNA, 22 bp, Artificial Sequence
  Synthetic oligonucleotide; TTT chr11 5157534 5157555 5157551 5157556 +
taagggtatatacctaggagtg

SEQ ID NO: 71732 - DNA, 22 bp, Artificial Sequence
  Synthetic oligonucleotide; TTT chr11 5157535 5157556 5157552 5157557 +
aagggtatatacctaggagtga

SEQ ID NO: 71733 - DNA, 22 bp, Artificial Sequence
  Synthetic oligonucleotide; TTA chr11 5157536 5157557 5157553 5157558 +
agggtatatacctaggagtgat

SEQ ID NO: 71734 - DNA, 22 bp, Artificial Sequence
  Synthetic oligonucleotide; CTA chr11 5157550 5157571 5157567 5157572 +
ggagtgatattgctggatcata

SEQ ID NO: 71735 - DNA, 22 bp, Artificial Sequence
  Synthetic oligonucleotide; TTG chr11 5157562 5157583 5157579 5157584 +
ctggatcatatggtagttctac

SEQ ID NO: 71736 - DNA, 22 bp, Artificial Sequence
  Synthetic oligonucleotide; CTG chr11 5157565 5157586 5157582 5157587 +
gatcatatggtagttctacttt

SEQ ID NO: 71737 - DNA, 22 bp, Artificial Sequence
  Synthetic oligonucleotide; TTC chr11 5157581 5157602 5157598 5157603 +
tactttacatttttgacaaatc

SEQ ID NO: 71738 - DNA, 22 bp, Artificial Sequence
  Synthetic oligonucleotide; CTA chr11 5157583 5157604 5157600 5157605 +
ctttacatttttgacaaatctc

SEQ ID NO: 71739 - DNA, 22 bp, Artificial Sequence
  Synthetic oligonucleotide; CTT chr11 5157586 5157607 5157603 5157608 +
tacatttttgacaaatctccat

SEQ ID NO: 71740 - DNA, 22 bp, Artificial Sequence
  Synthetic oligonucleotide; TTT chr11 5157587 5157608 5157604 5157609 +
acatttttgacaaatctccata

SEQ ID NO: 71741 - DNA, 22 bp, Artificial Sequence
  Synthetic oligonucleotide; TTA chr11 5157588 5157609 5157605 5157610 +
catttttgacaaatctccatac

SEQ ID NO: 71742 - DNA, 22 bp, Artificial Sequence
  Synthetic oligonucleotide; TTT chr11 5157593 5157614 5157610 5157615 +
ttgacaaatctccatactgtcc

SEQ ID NO: 71743 - DNA, 22 bp, Artificial Sequence
  Synthetic oligonucleotide; TTT chr11 5157594 5157615 5157611 5157616 +
tgacaaatctccatactgtcct

SEQ ID NO: 71744 - DNA, 22 bp, Artificial Sequence
  Synthetic oligonucleotide; TTT chr11 5157595 5157616 5157612 5157617 +
gacaaatctccatactgtcctt

SEQ ID NO: 71745 - DNA, 22 bp, Artificial Sequence
  Synthetic oligonucleotide; TTG chr11 5157596 5157617 5157613 5157618 +
acaaatctccatactgtccttc

SEQ ID NO: 71746 - DNA, 22 bp, Artificial Sequence
  Synthetic oligonucleotide; CTC chr11 5157605 5157626 5157622 5157627 +
catactgtccttcataattgct

SEQ ID NO: 71747 - DNA, 22 bp, Artificial Sequence
  Synthetic oligonucleotide; CTG chr11 5157612 5157633 5157629 5157634 +
tccttcataattgctgtaccaa

SEQ ID NO: 71748 - DNA, 22 bp, Artificial Sequence
  Synthetic oligonucleotide; CTT chr11 5157617 5157638 5157634 5157639 +
cataattgctgtaccaatttgt

SEQ ID NO: 71749 - DNA, 22 bp, Artificial Sequence
  Synthetic oligonucleotide; TTC chr11 5157618 5157639 5157635 5157640 +
ataattgctgtaccaatttgta

SEQ ID NO: 71750 - DNA, 22 bp, Artificial Sequence
  Synthetic oligonucleotide; TTG chr11 5157625 5157646 5157642 5157647 +
ctgtaccaatttgtactcccac

SEQ ID NO: 71751 - DNA, 22 bp, Artificial Sequence
  Synthetic oligonucleotide; CTG chr11 5157628 5157649 5157645 5157650 +
taccaatttgtactcccaccaa

SEQ ID NO: 71752 - DNA, 22 bp, Artificial Sequence
  Synthetic oligonucleotide; TTT chr11 5157637 5157658 5157654 5157659 +
gtactcccaccaacagtgtaag

SEQ ID NO: 71753 - DNA, 22 bp, Artificial Sequence
  Synthetic oligonucleotide; TTG chr11 5157638 5157659 5157655 5157660 +
tactcccaccaacagtgtaaga

SEQ ID NO: 71754 - DNA, 22 bp, Artificial Sequence
  Synthetic oligonucleotide; CTC chr11 5157643 5157664 5157660 5157665 +
ccaccaacagtgtaagagggtt

SEQ ID NO: 71755 - DNA, 22 bp, Artificial Sequence
  Synthetic oligonucleotide; TTT chr11 5157666 5157687 5157683 5157688 +
ccctttgtccacatccacacaa

SEQ ID NO: 71756 - DNA, 22 bp, Artificial Sequence
  Synthetic oligonucleotide; TTC chr11 5157667 5157688 5157684 5157689 +
cctttgtccacatccacacaag

SEQ ID NO: 71757 - DNA, 22 bp, Artificial Sequence
  Synthetic oligonucleotide; CTT chr11 5157671 5157692 5157688 5157693 +
tgtccacatccacacaagcatc

SEQ ID NO: 71758 - DNA, 22 bp, Artificial Sequence
  Synthetic oligonucleotide; TTT chr11 5157672 5157693 5157689 5157694 +
gtccacatccacacaagcatct

SEQ ID NO: 71759 - DNA, 22 bp, Artificial Sequence
  Synthetic oligonucleotide; TTG chr11 5157673 5157694 5157690 5157695 +
tccacatccacacaagcatctg

SEQ ID NO: 71760 - DNA, 22 bp, Artificial Sequence
  Synthetic oligonucleotide; CTG chr11 5157695 5157716 5157712 5157717 +
ttatttccttttgttttgttat

SEQ ID NO: 71761 - DNA, 22 bp, Artificial Sequence
  Synthetic oligonucleotide; TTA chr11 5157698 5157719 5157715 5157720 +
tttccttttgttttgttataag

SEQ ID NO: 71762 - DNA, 22 bp, Artificial Sequence
  Synthetic oligonucleotide; TTT chr11 5157701 5157722 5157718 5157723 +
ccttttgttttgttataagcta

SEQ ID NO: 71763 - DNA, 22 bp, Artificial Sequence
  Synthetic oligonucleotide; TTC chr11 5157702 5157723 5157719 5157724 +
cttttgttttgttataagctat

SEQ ID NO: 71764 - DNA, 22 bp, Artificial Sequence
  Synthetic oligonucleotide; CTT chr11 5157705 5157726 5157722 5157727 +
ttgttttgttataagctatttt

SEQ ID NO: 71765 - DNA, 22 bp, Artificial Sequence
  Synthetic oligonucleotide; TTT chr11 5157706 5157727 5157723 5157728 +
tgttttgttataagctatttta

SEQ ID NO: 71766 - DNA, 22 bp, Artificial Sequence
  Synthetic oligonucleotide; TTT chr11 5157707 5157728 5157724 5157729 +
gttttgttataagctattttaa

SEQ ID NO: 71767 - DNA, 22 bp, Artificial Sequence
  Synthetic oligonucleotide; TTG chr11 5157708 5157729 5157725 5157730 +
ttttgttataagctattttaac

SEQ ID NO: 71768 - DNA, 22 bp, Artificial Sequence
  Synthetic oligonucleotide; TTT chr11 5157711 5157732 5157728 5157733 +
tgttataagctattttaactaa

SEQ ID NO: 71769 - DNA, 22 bp, Artificial Sequence
  Synthetic oligonucleotide; TTT chr11 5157712 5157733 5157729 5157734 +
gttataagctattttaactaag

SEQ ID NO: 71770 - DNA, 22 bp, Artificial Sequence
  Synthetic oligonucleotide; TTG chr11 5157713 5157734 5157730 5157735 +
ttataagctattttaactaagg

SEQ ID NO: 71771 - DNA, 22 bp, Artificial Sequence
  Synthetic oligonucleotide; TTA chr11 5157716 5157737 5157733 5157738 +
taagctattttaactaaggtga

SEQ ID NO: 71772 - DNA, 22 bp, Artificial Sequence
  Synthetic oligonucleotide; CTA chr11 5157723 5157744 5157740 5157745 +
ttttaactaaggtgagatgata

SEQ ID NO: 71773 - DNA, 22 bp, Artificial Sequence
  Synthetic oligonucleotide; TTT chr11 5157726 5157747 5157743 5157748 +
taactaaggtgagatgatatca

SEQ ID NO: 71774 - DNA, 22 bp, Artificial Sequence
  Synthetic oligonucleotide; TTT chr11 5157727 5157748 5157744 5157749 +
aactaaggtgagatgatatcac

SEQ ID NO: 71775 - DNA, 22 bp, Artificial Sequence
  Synthetic oligonucleotide; TTA chr11 5157728 5157749 5157745 5157750 +
actaaggtgagatgatatcaca

SEQ ID NO: 71776 - DNA, 22 bp, Artificial Sequence
  Synthetic oligonucleotide; CTA chr11 5157732 5157753 5157749 5157754 +
aggtgagatgatatcacattgt

SEQ ID NO: 71777 - DNA, 22 bp, Artificial Sequence
  Synthetic oligonucleotide; TTG chr11 5157753 5157774 5157770 5157775 +
tggttttgatttatctggtgat

SEQ ID NO: 71778 - DNA, 22 bp, Artificial Sequence
  Synthetic oligonucleotide; TTT chr11 5157759 5157780 5157776 5157781 +
tgatttatctggtgattagtga

SEQ ID NO: 71779 - DNA, 22 bp, Artificial Sequence
  Synthetic oligonucleotide; TTT chr11 5157760 5157781 5157777 5157782 +
gatttatctggtgattagtgat

SEQ ID NO: 71780 - DNA, 22 bp, Artificial Sequence
  Synthetic oligonucleotide; TTG chr11 5157761 5157782 5157778 5157783 +
atttatctggtgattagtgata

SEQ ID NO: 71781 - DNA, 22 bp, Artificial Sequence
  Synthetic oligonucleotide; TTT chr11 5157765 5157786 5157782 5157787 +
atctggtgattagtgatattga

SEQ ID NO: 71782 - DNA, 22 bp, Artificial Sequence
  Synthetic oligonucleotide; TTA chr11 5157766 5157787 5157783 5157788 +
tctggtgattagtgatattgaa

SEQ ID NO: 71783 - DNA, 22 bp, Artificial Sequence
  Synthetic oligonucleotide; CTG chr11 5157770 5157791 5157787 5157792 +
gtgattagtgatattgaacatt

SEQ ID NO: 71784 - DNA, 22 bp, Artificial Sequence
  Synthetic oligonucleotide; TTA chr11 5157777 5157798 5157794 5157799 +
gtgatattgaacattttttcaa

SEQ ID NO: 71785 - DNA, 22 bp, Artificial Sequence
  Synthetic oligonucleotide; TTG chr11 5157786 5157807 5157803 5157808 +
aacattttttcaaatacctctg

SEQ ID NO: 71786 - DNA, 22 bp, Artificial Sequence
  Synthetic oligonucleotide; TTT chr11 5157793 5157814 5157810 5157815 +
tttcaaatacctctgggccatt

SEQ ID NO: 71787 - DNA, 22 bp, Artificial Sequence
  Synthetic oligonucleotide; TTT chr11 5157794 5157815 5157811 5157816 +
ttcaaatacctctgggccattt

SEQ ID NO: 71788 - DNA, 22 bp, Artificial Sequence
  Synthetic oligonucleotide; TTT chr11 5157795 5157816 5157812 5157817 +
tcaaatacctctgggccatttg

SEQ ID NO: 71789 - DNA, 22 bp, Artificial Sequence
  Synthetic oligonucleotide; TTT chr11 5157796 5157817 5157813 5157818 +
caaatacctctgggccatttgt

SEQ ID NO: 71790 - DNA, 22 bp, Artificial Sequence
  Synthetic oligonucleotide; TTC chr11 5157797 5157818 5157814 5157819 +
aaatacctctgggccatttgta

SEQ ID NO: 71791 - DNA, 22 bp, Artificial Sequence
  Synthetic oligonucleotide; CTC chr11 5157806 5157827 5157823 5157828 +
tgggccatttgtatggcttctt

SEQ ID NO: 71792 - DNA, 22 bp, Artificial Sequence
  Synthetic oligonucleotide; CTG chr11 5157808 5157829 5157825 5157830 +
ggccatttgtatggcttctttt

SEQ ID NO: 71793 - DNA, 22 bp, Artificial Sequence
  Synthetic oligonucleotide; TTT chr11 5157816 5157837 5157833 5157838 +
gtatggcttcttttgagaaata

SEQ ID NO: 71794 - DNA, 22 bp, Artificial Sequence
  Synthetic oligonucleotide; TTG chr11 5157817 5157838 5157834 5157839 +
tatggcttcttttgagaaatat

SEQ ID NO: 71795 - DNA, 22 bp, Artificial Sequence
  Synthetic oligonucleotide; CTT chr11 5157825 5157846 5157842 5157847 +
cttttgagaaatatctattcag

SEQ ID NO: 71796 - DNA, 22 bp, Artificial Sequence
  Synthetic oligonucleotide; TTC chr11 5157826 5157847 5157843 5157848 +
ttttgagaaatatctattcagg

SEQ ID NO: 71797 - DNA, 22 bp, Artificial Sequence
  Synthetic oligonucleotide; CTT chr11 5157828 5157849 5157845 5157850 +
ttgagaaatatctattcaggtc

SEQ ID NO: 71798 - DNA, 22 bp, Artificial Sequence
  Synthetic oligonucleotide; TTT chr11 5157829 5157850 5157846 5157851 +
tgagaaatatctattcaggtct

SEQ ID NO: 71799 - DNA, 22 bp, Artificial Sequence
  Synthetic oligonucleotide; TTT chr11 5157830 5157851 5157847 5157852 +
gagaaatatctattcaggtctt

SEQ ID NO: 71800 - DNA, 22 bp, Artificial Sequence
  Synthetic oligonucleotide; TTG chr11 5157831 5157852 5157848 5157853 +
agaaatatctattcaggtcttt

SEQ ID NO: 71801 - DNA, 22 bp, Artificial Sequence
  Synthetic oligonucleotide; CTA chr11 5157842 5157863 5157859 5157864 +
ttcaggtcttttggccattatt

SEQ ID NO: 71802 - DNA, 22 bp, Artificial Sequence
  Synthetic oligonucleotide; TTC chr11 5157845 5157866 5157862 5157867 +
aggtcttttggccattatttat

SEQ ID NO: 71803 - DNA, 22 bp, Artificial Sequence
  Synthetic oligonucleotide; CTT chr11 5157852 5157873 5157869 5157874 +
ttggccattatttatttattta

SEQ ID NO: 71804 - DNA, 22 bp, Artificial Sequence
  Synthetic oligonucleotide; TTT chr11 5157853 5157874 5157870 5157875 +
tggccattatttatttatttat

SEQ ID NO: 71805 - DNA, 22 bp, Artificial Sequence
  Synthetic oligonucleotide; TTT chr11 5157854 5157875 5157871 5157876 +
ggccattatttatttatttatt

SEQ ID NO: 71806 - DNA, 22 bp, Artificial Sequence
  Synthetic oligonucleotide; TTG chr11 5157855 5157876 5157872 5157877 +
gccattatttatttatttattt

SEQ ID NO: 71807 - DNA, 22 bp, Artificial Sequence
  Synthetic oligonucleotide; TTA chr11 5157862 5157883 5157879 5157884 +
tttatttatttatttattttct

SEQ ID NO: 71808 - DNA, 22 bp, Artificial Sequence
  Synthetic oligonucleotide; TTT chr11 5157865 5157886 5157882 5157887 +
atttatttatttattttctgtt

SEQ ID NO: 71809 - DNA, 22 bp, Artificial Sequence
  Synthetic oligonucleotide; TTA chr11 5157866 5157887 5157883 5157888 +
tttatttatttattttctgttg

SEQ ID NO: 71810 - DNA, 22 bp, Artificial Sequence
  Synthetic oligonucleotide; TTT chr11 5157869 5157890 5157886 5157891 +
atttatttattttctgttgagt

SEQ ID NO: 71811 - DNA, 22 bp, Artificial Sequence
  Synthetic oligonucleotide; TTA chr11 5157870 5157891 5157887 5157892 +
tttatttattttctgttgagtt

SEQ ID NO: 71812 - DNA, 22 bp, Artificial Sequence
  Synthetic oligonucleotide; TTT chr11 5157873 5157894 5157890 5157895 +
atttattttctgttgagttgct

SEQ ID NO: 71813 - DNA, 22 bp, Artificial Sequence
  Synthetic oligonucleotide; TTA chr11 5157874 5157895 5157891 5157896 +
tttattttctgttgagttgctt

SEQ ID NO: 71814 - DNA, 22 bp, Artificial Sequence
  Synthetic oligonucleotide; TTT chr11 5157877 5157898 5157894 5157899 +
attttctgttgagttgcttgag

SEQ ID NO: 71815 - DNA, 22 bp, Artificial Sequence
  Synthetic oligonucleotide; TTA chr11 5157878 5157899 5157895 5157900 +
ttttctgttgagttgcttgagt

SEQ ID NO: 71816 - DNA, 22 bp, Artificial Sequence
  Synthetic oligonucleotide; TTT chr11 5157881 5157902 5157898 5157903 +
tctgttgagttgcttgagtttc

SEQ ID NO: 71817 - DNA, 22 bp, Artificial Sequence
  Synthetic oligonucleotide; TTT chr11 5157882 5157903 5157899 5157904 +
ctgttgagttgcttgagtttct

SEQ ID NO: 71818 - DNA, 22 bp, Artificial Sequence
  Synthetic oligonucleotide; TTC chr11 5157883 5157904 5157900 5157905 +
tgttgagttgcttgagtttctt

SEQ ID NO: 71819 - DNA, 22 bp, Artificial Sequence
  Synthetic oligonucleotide; CTG chr11 5157885 5157906 5157902 5157907 +
ttgagttgcttgagtttcttgc

SEQ ID NO: 71820 - DNA, 22 bp, Artificial Sequence
  Synthetic oligonucleotide; TTG chr11 5157888 5157909 5157905 5157910 +
agttgcttgagtttcttgcata

SEQ ID NO: 71821 - DNA, 22 bp, Artificial Sequence
  Synthetic oligonucleotide; TTG chr11 5157893 5157914 5157910 5157915 +
cttgagtttcttgcatattctg

SEQ ID NO: 71822 - DNA, 22 bp, Artificial Sequence
  Synthetic oligonucleotide; CTT chr11 5157896 5157917 5157913 5157918 +
gagtttcttgcatattctggtt

SEQ ID NO: 71823 - DNA, 22 bp, Artificial Sequence
  Synthetic oligonucleotide; TTG chr11 5157897 5157918 5157914 5157919 +
agtttcttgcatattctggtta

SEQ ID NO: 71824 - DNA, 22 bp, Artificial Sequence
  Synthetic oligonucleotide; TTT chr11 5157902 5157923 5157919 5157924 +
cttgcatattctggttatcaat

SEQ ID NO: 71825 - DNA, 22 bp, Artificial Sequence
  Synthetic oligonucleotide; TTC chr11 5157903 5157924 5157920 5157925 +
ttgcatattctggttatcaatt

SEQ ID NO: 71826 - DNA, 22 bp, Artificial Sequence
  Synthetic oligonucleotide; CTT chr11 5157905 5157926 5157922 5157927 +
gcatattctggttatcaattcc

SEQ ID NO: 71827 - DNA, 22 bp, Artificial Sequence
  Synthetic oligonucleotide; TTG chr11 5157906 5157927 5157923 5157928 +
catattctggttatcaattcct

SEQ ID NO: 71828 - DNA, 22 bp, Artificial Sequence
  Synthetic oligonucleotide; TTC chr11 5157913 5157934 5157930 5157935 +
tggttatcaattccttgtaaaa

SEQ ID NO: 71829 - DNA, 22 bp, Artificial Sequence
  Synthetic oligonucleotide; CTG chr11 5157915 5157936 5157932 5157937 +
gttatcaattccttgtaaaata

SEQ ID NO: 71830 - DNA, 22 bp, Artificial Sequence
  Synthetic oligonucleotide; TTA chr11 5157919 5157940 5157936 5157941 +
tcaattccttgtaaaatatata

SEQ ID NO: 71831 - DNA, 22 bp, Artificial Sequence
  Synthetic oligonucleotide; TTC chr11 5157926 5157947 5157943 5157948 +
cttgtaaaatatatagtttgca

SEQ ID NO: 71832 - DNA, 22 bp, Artificial Sequence
  Synthetic oligonucleotide; CTT chr11 5157929 5157950 5157946 5157951 +
gtaaaatatatagtttgcaaat

SEQ ID NO: 71833 - DNA, 22 bp, Artificial Sequence
  Synthetic oligonucleotide; TTG chr11 5157930 5157951 5157947 5157952 +
taaaatatatagtttgcaaata

SEQ ID NO: 71834 - DNA, 22 bp, Artificial Sequence
  Synthetic oligonucleotide; TTT chr11 5157945 5157966 5157962 5157967 +
gcaaatattttctcccattctt

SEQ ID NO: 71835 - DNA, 22 bp, Artificial Sequence
  Synthetic oligonucleotide; TTG chr11 5157946 5157967 5157963 5157968 +
caaatattttctcccattcttt

SEQ ID NO: 71836 - DNA, 22 bp, Artificial Sequence
  Synthetic oligonucleotide; TTT chr11 5157955 5157976 5157972 5157977 +
tctcccattctttgggttgtct

SEQ ID NO: 71837 - DNA, 22 bp, Artificial Sequence
  Synthetic oligonucleotide; TTT chr11 5157956 5157977 5157973 5157978 +
ctcccattctttgggttgtctc

SEQ ID NO: 71838 - DNA, 22 bp, Artificial Sequence
  Synthetic oligonucleotide; TTC chr11 5157957 5157978 5157974 5157979 +
tcccattctttgggttgtctct

SEQ ID NO: 71839 - DNA, 22 bp, Artificial Sequence
  Synthetic oligonucleotide; CTC chr11 5157959 5157980 5157976 5157981 +
ccattctttgggttgtctcttc

SEQ ID NO: 71840 - DNA, 22 bp, Artificial Sequence
  Synthetic oligonucleotide; TTC chr11 5157965 5157986 5157982 5157987 +
tttgggttgtctcttcacttta

SEQ ID NO: 71841 - DNA, 22 bp, Artificial Sequence
  Synthetic oligonucleotide; CTT chr11 5157967 5157988 5157984 5157989 +
tgggttgtctcttcactttatt

SEQ ID NO: 71842 - DNA, 22 bp, Artificial Sequence
  Synthetic oligonucleotide; TTT chr11 5157968 5157989 5157985 5157990 +
gggttgtctcttcactttatta

SEQ ID NO: 71843 - DNA, 22 bp, Artificial Sequence
  Synthetic oligonucleotide; TTG chr11 5157969 5157990 5157986 5157991 +
ggttgtctcttcactttattat

SEQ ID NO: 71844 - DNA, 22 bp, Artificial Sequence
  Synthetic oligonucleotide; TTG chr11 5157974 5157995 5157991 5157996 +
tctcttcactttattattttct

SEQ ID NO: 71845 - DNA, 22 bp, Artificial Sequence
  Synthetic oligonucleotide; CTC chr11 5157978 5157999 5157995 5158000 +
ttcactttattattttctttgc

SEQ ID NO: 71846 - DNA, 22 bp, Artificial Sequence
  Synthetic oligonucleotide; CTT chr11 5157980 5158001 5157997 5158002 +
cactttattattttctttgctg

SEQ ID NO: 71847 - DNA, 22 bp, Artificial Sequence
  Synthetic oligonucleotide; TTC chr11 5157981 5158002 5157998 5158003 +
actttattattttctttgctgt

SEQ ID NO: 71848 - DNA, 22 bp, Artificial Sequence
  Synthetic oligonucleotide; CTT chr11 5157985 5158006 5158002 5158007 +
tattattttctttgctgtgcag

SEQ ID NO: 71849 - DNA, 22 bp, Artificial Sequence
  Synthetic oligonucleotide; TTT chr11 5157986 5158007 5158003 5158008 +
attattttctttgctgtgcaga

SEQ ID NO: 71850 - DNA, 22 bp, Artificial Sequence
  Synthetic oligonucleotide; TTA chr11 5157987 5158008 5158004 5158009 +
ttattttctttgctgtgcagag

SEQ ID NO: 71851 - DNA, 22 bp, Artificial Sequence
  Synthetic oligonucleotide; TTA chr11 5157990 5158011 5158007 5158012 +
ttttctttgctgtgcagagctt

SEQ ID NO: 71852 - DNA, 22 bp, Artificial Sequence
  Synthetic oligonucleotide; TTT chr11 5157993 5158014 5158010 5158015 +
tctttgctgtgcagagcttcaa

SEQ ID NO: 71853 - DNA, 22 bp, Artificial Sequence
  Synthetic oligonucleotide; TTT chr11 5157994 5158015 5158011 5158016 +
ctttgctgtgcagagcttcaaa

SEQ ID NO: 71854 - DNA, 22 bp, Artificial Sequence
  Synthetic oligonucleotide; TTC chr11 5157995 5158016 5158012 5158017 +
tttgctgtgcagagcttcaaac

SEQ ID NO: 71855 - DNA, 22 bp, Artificial Sequence
  Synthetic oligonucleotide; CTT chr11 5157997 5158018 5158014 5158019 +
tgctgtgcagagcttcaaacaa

SEQ ID NO: 71856 - DNA, 22 bp, Artificial Sequence
  Synthetic oligonucleotide; TTT chr11 5157998 5158019 5158015 5158020 +
gctgtgcagagcttcaaacaat

SEQ ID NO: 71857 - DNA, 22 bp, Artificial Sequence
  Synthetic oligonucleotide; TTG chr11 5157999 5158020 5158016 5158021 +
ctgtgcagagcttcaaacaatc

SEQ ID NO: 71858 - DNA, 22 bp, Artificial Sequence
  Synthetic oligonucleotide; CTG chr11 5158002 5158023 5158019 5158024 +
tgcagagcttcaaacaatccca

SEQ ID NO: 71859 - DNA, 22 bp, Artificial Sequence
  Synthetic oligonucleotide; CTT chr11 5158012 5158033 5158029 5158034 +
caaacaatcccaattgtctatt

SEQ ID NO: 71860 - DNA, 22 bp, Artificial Sequence
  Synthetic oligonucleotide; TTC chr11 5158013 5158034 5158030 5158035 +
aaacaatcccaattgtctattt

SEQ ID NO: 71861 - DNA, 22 bp, Artificial Sequence
  Synthetic oligonucleotide; TTG chr11 5158028 5158049 5158045 5158050 +
tctatttttgttttggttattt

SEQ ID NO: 71862 - DNA, 22 bp, Artificial Sequence
  Synthetic oligonucleotide; CTA chr11 5158032 5158053 5158049 5158054 +
tttttgttttggttatttgtgc

SEQ ID NO: 71863 - DNA, 22 bp, Artificial Sequence
  Synthetic oligonucleotide; TTT chr11 5158035 5158056 5158052 5158057 +
ttgttttggttatttgtgcttt

SEQ ID NO: 71864 - DNA, 22 bp, Artificial Sequence
  Synthetic oligonucleotide; TTT chr11 5158036 5158057 5158053 5158058 +
tgttttggttatttgtgctttt

SEQ ID NO: 71865 - DNA, 22 bp, Artificial Sequence
  Synthetic oligonucleotide; TTT chr11 5158037 5158058 5158054 5158059 +
gttttggttatttgtgcttttg

SEQ ID NO: 71866 - DNA, 22 bp, Artificial Sequence
  Synthetic oligonucleotide; TTG chr11 5158038 5158059 5158055 5158060 +
ttttggttatttgtgcttttga

SEQ ID NO: 71867 - DNA, 22 bp, Artificial Sequence
  Synthetic oligonucleotide; TTT chr11 5158041 5158062 5158058 5158063 +
tggttatttgtgcttttgaagt

SEQ ID NO: 71868 - DNA, 22 bp, Artificial Sequence
  Synthetic oligonucleotide; TTT chr11 5158042 5158063 5158059 5158064 +
ggttatttgtgcttttgaagtc

SEQ ID NO: 71869 - DNA, 22 bp, Artificial Sequence
  Synthetic oligonucleotide; TTG chr11 5158043 5158064 5158060 5158065 +
gttatttgtgcttttgaagtct

SEQ ID NO: 71870 - DNA, 22 bp, Artificial Sequence
  Synthetic oligonucleotide; TTA chr11 5158047 5158068 5158064 5158069 +
tttgtgcttttgaagtctcata

SEQ ID NO: 71871 - DNA, 22 bp, Artificial Sequence
  Synthetic oligonucleotide; TTT chr11 5158050 5158071 5158067 5158072 +
gtgcttttgaagtctcatagac

SEQ ID NO: 71872 - DNA, 22 bp, Artificial Sequence
  Synthetic oligonucleotide; TTG chr11 5158051 5158072 5158068 5158073 +
tgcttttgaagtctcatagaca

SEQ ID NO: 71873 - DNA, 22 bp, Artificial Sequence
  Synthetic oligonucleotide; CTT chr11 5158056 5158077 5158073 5158078 +
ttgaagtctcatagacagtatt

SEQ ID NO: 71874 - DNA, 22 bp, Artificial Sequence
  Synthetic oligonucleotide; TTT chr11 5158057 5158078 5158074 5158079 +
tgaagtctcatagacagtattt

SEQ ID NO: 71875 - DNA, 22 bp, Artificial Sequence
  Synthetic oligonucleotide; TTT chr11 5158058 5158079 5158075 5158080 +
gaagtctcatagacagtatttg

SEQ ID NO: 71876 - DNA, 22 bp, Artificial Sequence
  Synthetic oligonucleotide; TTG chr11 5158059 5158080 5158076 5158081 +
aagtctcatagacagtatttgc

SEQ ID NO: 71877 - DNA, 22 bp, Artificial Sequence
  Synthetic oligonucleotide; CTC chr11 5158066 5158087 5158083 5158088 +
atagacagtatttgcccaaatc

SEQ ID NO: 71878 - DNA, 22 bp, Artificial Sequence
  Synthetic oligonucleotide; TTT chr11 5158079 5158100 5158096 5158101 +
gcccaaatcaatgaatgccctg

SEQ ID NO: 71879 - DNA, 22 bp, Artificial Sequence
  Synthetic oligonucleotide; TTG chr11 5158080 5158101 5158097 5158102 +
cccaaatcaatgaatgccctgg

SEQ ID NO: 71880 - DNA, 22 bp, Artificial Sequence
  Synthetic oligonucleotide; CTG chr11 5158101 5158122 5158118 5158123 +
gagggtttccccactgttttct

SEQ ID NO: 71881 - DNA, 22 bp, Artificial Sequence
  Synthetic oligonucleotide; TTT chr11 5158109 5158130 5158126 5158131 +
ccccactgttttcttccagtag

SEQ ID NO: 71882 - DNA, 22 bp, Artificial Sequence
  Synthetic oligonucleotide; TTC chr11 5158110 5158131 5158127 5158132 +
cccactgttttcttccagtagt

SEQ ID NO: 71883 - DNA, 22 bp, Artificial Sequence
  Synthetic oligonucleotide; CTG chr11 5158117 5158138 5158134 5158139 +
ttttcttccagtagtttcataa

SEQ ID NO: 71884 - DNA, 22 bp, Artificial Sequence
  Synthetic oligonucleotide; TTT chr11 5158120 5158141 5158137 5158142 +
tcttccagtagtttcataattt

SEQ ID NO: 71885 - DNA, 22 bp, Artificial Sequence
  Synthetic oligonucleotide; TTT chr11 5158121 5158142 5158138 5158143 +
cttccagtagtttcataatttc

SEQ ID NO: 71886 - DNA, 22 bp, Artificial Sequence
  Synthetic oligonucleotide; TTC chr11 5158122 5158143 5158139 5158144 +
ttccagtagtttcataatttca

SEQ ID NO: 71887 - DNA, 22 bp, Artificial Sequence
  Synthetic oligonucleotide; CTT chr11 5158124 5158145 5158141 5158146 +
ccagtagtttcataatttcagg

SEQ ID NO: 71888 - DNA, 22 bp, Artificial Sequence
  Synthetic oligonucleotide; TTC chr11 5158125 5158146 5158142 5158147 +
cagtagtttcataatttcaggt

SEQ ID NO: 71889 - DNA, 22 bp, Artificial Sequence
  Synthetic oligonucleotide; TTT chr11 5158134 5158155 5158151 5158156 +
cataatttcaggtattggattc

SEQ ID NO: 71890 - DNA, 22 bp, Artificial Sequence
  Synthetic oligonucleotide; TTC chr11 5158135 5158156 5158152 5158157 +
ataatttcaggtattggattca

SEQ ID NO: 71891 - DNA, 22 bp, Artificial Sequence
  Synthetic oligonucleotide; TTT chr11 5158142 5158163 5158159 5158164 +
caggtattggattcaagtcttt

SEQ ID NO: 71892 - DNA, 22 bp, Artificial Sequence
  Synthetic oligonucleotide; TTC chr11 5158143 5158164 5158160 5158165 +
aggtattggattcaagtcttta

SEQ ID NO: 71893 - DNA, 22 bp, Artificial Sequence
  Synthetic oligonucleotide; TTG chr11 5158151 5158172 5158168 5158173 +
gattcaagtctttaatccatct

SEQ ID NO: 71894 - DNA, 22 bp, Artificial Sequence
  Synthetic oligonucleotide; TTC chr11 5158156 5158177 5158173 5158178 +
aagtctttaatccatcttgatt

SEQ ID NO: 71895 - DNA, 22 bp, Artificial Sequence
  Synthetic oligonucleotide; CTT chr11 5158163 5158184 5158180 5158185 +
taatccatcttgatttgatttt

SEQ ID NO: 71896 - DNA, 22 bp, Artificial Sequence
  Synthetic oligonucleotide; TTT chr11 5158164 5158185 5158181 5158186 +
aatccatcttgatttgattttt

SEQ ID NO: 71897 - DNA, 22 bp, Artificial Sequence
  Synthetic oligonucleotide; TTA chr11 5158165 5158186 5158182 5158187 +
atccatcttgatttgatttttg

SEQ ID NO: 71898 - DNA, 22 bp, Artificial Sequence
  Synthetic oligonucleotide; CTT chr11 5158174 5158195 5158191 5158196 +
gatttgatttttgtatatagtg

SEQ ID NO: 71899 - DNA, 22 bp, Artificial Sequence
  Synthetic oligonucleotide; TTG chr11 5158175 5158196 5158192 5158197 +
atttgatttttgtatatagtga

SEQ ID NO: 71900 - DNA, 22 bp, Artificial Sequence
  Synthetic oligonucleotide; TTT chr11 5158179 5158200 5158196 5158201 +
gatttttgtatatagtgagaga

SEQ ID NO: 71901 - DNA, 22 bp, Artificial Sequence
  Synthetic oligonucleotide; TTG chr11 5158180 5158201 5158197 5158202 +
atttttgtatatagtgagagat

SEQ ID NO: 71902 - DNA, 22 bp, Artificial Sequence
  Synthetic oligonucleotide; TTT chr11 5158184 5158205 5158201 5158206 +
ttgtatatagtgagagataggg

SEQ ID NO: 71903 - DNA, 22 bp, Artificial Sequence
  Synthetic oligonucleotide; TTT chr11 5158185 5158206 5158202 5158207 +
tgtatatagtgagagatagggg

SEQ ID NO: 71904 - DNA, 22 bp, Artificial Sequence
  Synthetic oligonucleotide; TTT chr11 5158186 5158207 5158203 5158208 +
gtatatagtgagagataggggt

SEQ ID NO: 71905 - DNA, 22 bp, Artificial Sequence
  Synthetic oligonucleotide; TTG chr11 5158187 5158208 5158204 5158209 +
tatatagtgagagataggggtc

SEQ ID NO: 71906 - DNA, 22 bp, Artificial Sequence
  Synthetic oligonucleotide; TTT chr11 5158215 5158236 5158232 5158237 +
tactcttttgcaaatggatatc

SEQ ID NO: 71907 - DNA, 22 bp, Artificial Sequence
  Synthetic oligonucleotide; TTT chr11 5158216 5158237 5158233 5158238 +
actcttttgcaaatggatatcc

SEQ ID NO: 71908 - DNA, 22 bp, Artificial Sequence
  Synthetic oligonucleotide; TTA chr11 5158217 5158238 5158234 5158239 +
ctcttttgcaaatggatatcca

SEQ ID NO: 71909 - DNA, 22 bp, Artificial Sequence
  Synthetic oligonucleotide; CTC chr11 5158220 5158241 5158237 5158242 +
ttttgcaaatggatatccagtt

SEQ ID NO: 71910 - DNA, 22 bp, Artificial Sequence
  Synthetic oligonucleotide; CTT chr11 5158222 5158243 5158239 5158244 +
ttgcaaatggatatccagtttt

SEQ ID NO: 71911 - DNA, 22 bp, Artificial Sequence
  Synthetic oligonucleotide; TTT chr11 5158223 5158244 5158240 5158245 +
tgcaaatggatatccagttttc

SEQ ID NO: 71912 - DNA, 22 bp, Artificial Sequence
  Synthetic oligonucleotide; TTT chr11 5158224 5158245 5158241 5158246 +
gcaaatggatatccagttttcc

SEQ ID NO: 71913 - DNA, 22 bp, Artificial Sequence
  Synthetic oligonucleotide; TTG chr11 5158225 5158246 5158242 5158247 +
caaatggatatccagttttcct

SEQ ID NO: 71914 - DNA, 22 bp, Artificial Sequence
  Synthetic oligonucleotide; TTT chr11 5158243 5158264 5158260 5158265 +
tcctagcactgtttcttgaaaa

SEQ ID NO: 71915 - DNA, 22 bp, Artificial Sequence
  Synthetic oligonucleotide; TTT chr11 5158244 5158265 5158261 5158266 +
cctagcactgtttcttgaaaag

SEQ ID NO: 71916 - DNA, 22 bp, Artificial Sequence
  Synthetic oligonucleotide; TTC chr11 5158245 5158266 5158262 5158267 +
ctagcactgtttcttgaaaaga

SEQ ID NO: 71917 - DNA, 22 bp, Artificial Sequence
  Synthetic oligonucleotide; CTA chr11 5158248 5158269 5158265 5158270 +
gcactgtttcttgaaaagactg

SEQ ID NO: 71918 - DNA, 22 bp, Artificial Sequence
  Synthetic oligonucleotide; CTG chr11 5158254 5158275 5158271 5158276 +
tttcttgaaaagactgtttgta

SEQ ID NO: 71919 - DNA, 22 bp, Artificial Sequence
  Synthetic oligonucleotide; TTT chr11 5158257 5158278 5158274 5158279 +
cttgaaaagactgtttgtacct

SEQ ID NO: 71920 - DNA, 22 bp, Artificial Sequence
  Synthetic oligonucleotide; TTC chr11 5158258 5158279 5158275 5158280 +
ttgaaaagactgtttgtacctt

SEQ ID NO: 71921 - DNA, 22 bp, Artificial Sequence
  Synthetic oligonucleotide; CTT chr11 5158260 5158281 5158277 5158282 +
gaaaagactgtttgtacctttt

SEQ ID NO: 71922 - DNA, 22 bp, Artificial Sequence
  Synthetic oligonucleotide; TTG chr11 5158261 5158282 5158278 5158283 +
aaaagactgtttgtaccttttt

SEQ ID NO: 71923 - DNA, 22 bp, Artificial Sequence
  Synthetic oligonucleotide; CTG chr11 5158270 5158291 5158287 5158292 +
tttgtacctttttttttttttt

SEQ ID NO: 71924 - DNA, 22 bp, Artificial Sequence
  Synthetic oligonucleotide; TTT chr11 5158273 5158294 5158290 5158295 +
gtaccttttttttttttttttt

SEQ ID NO: 71925 - DNA, 22 bp, Artificial Sequence
  Synthetic oligonucleotide; TTG chr11 5158274 5158295 5158291 5158296 +
tacctttttttttttttttttt

SEQ ID NO: 71926 - DNA, 22 bp, Artificial Sequence
  Synthetic oligonucleotide; CTT chr11 5158280 5158301 5158297 5158302 +
ttttttttttttttttgagatg

SEQ ID NO: 71927 - DNA, 22 bp, Artificial Sequence
  Synthetic oligonucleotide; TTT chr11 5158281 5158302 5158298 5158303 +
tttttttttttttttgagatgg

SEQ ID NO: 71928 - DNA, 22 bp, Artificial Sequence
  Synthetic oligonucleotide; TTT chr11 5158282 5158303 5158299 5158304 +
ttttttttttttttgagatgga

SEQ ID NO: 71929 - DNA, 22 bp, Artificial Sequence
  Synthetic oligonucleotide; TTT chr11 5158283 5158304 5158300 5158305 +
tttttttttttttgagatggag

SEQ ID NO: 71930 - DNA, 22 bp, Artificial Sequence
  Synthetic oligonucleotide; TTT chr11 5158284 5158305 5158301 5158306 +
ttttttttttttgagatggagt

SEQ ID NO: 71931 - DNA, 22 bp, Artificial Sequence
  Synthetic oligonucleotide; TTT chr11 5158285 5158306 5158302 5158307 +
tttttttttttgagatggagtc

SEQ ID NO: 71932 - DNA, 22 bp, Artificial Sequence
  Synthetic oligonucleotide; TTT chr11 5158286 5158307 5158303 5158308 +
ttttttttttgagatggagtct

SEQ ID NO: 71933 - DNA, 22 bp, Artificial Sequence
  Synthetic oligonucleotide; TTT chr11 5158287 5158308 5158304 5158309 +
tttttttttgagatggagtctc

SEQ ID NO: 71934 - DNA, 22 bp, Artificial Sequence
  Synthetic oligonucleotide; TTT chr11 5158288 5158309 5158305 5158310 +
ttttttttgagatggagtctca

SEQ ID NO: 71935 - DNA, 22 bp, Artificial Sequence
  Synthetic oligonucleotide; TTT chr11 5158289 5158310 5158306 5158311 +
tttttttgagatggagtctcac

SEQ ID NO: 71936 - DNA, 22 bp, Artificial Sequence
  Synthetic oligonucleotide; TTT chr11 5158290 5158311 5158307 5158312 +
ttttttgagatggagtctcact

SEQ ID NO: 71937 - DNA, 22 bp, Artificial Sequence
  Synthetic oligonucleotide; TTT chr11 5158291 5158312 5158308 5158313 +
tttttgagatggagtctcactg

SEQ ID NO: 71938 - DNA, 22 bp, Artificial Sequence
  Synthetic oligonucleotide; TTT chr11 5158292 5158313 5158309 5158314 +
ttttgagatggagtctcactgt

SEQ ID NO: 71939 - DNA, 22 bp, Artificial Sequence
  Synthetic oligonucleotide; TTT chr11 5158293 5158314 5158310 5158315 +
tttgagatggagtctcactgtt

SEQ ID NO: 71940 - DNA, 22 bp, Artificial Sequence
  Synthetic oligonucleotide; TTT chr11 5158294 5158315 5158311 5158316 +
ttgagatggagtctcactgttg

SEQ ID NO: 71941 - DNA, 22 bp, Artificial Sequence
  Synthetic oligonucleotide; TTT chr11 5158295 5158316 5158312 5158317 +
tgagatggagtctcactgttgc

SEQ ID NO: 71942 - DNA, 22 bp, Artificial Sequence
  Synthetic oligonucleotide; TTT chr11 5158296 5158317 5158313 5158318 +
gagatggagtctcactgttgcc

SEQ ID NO: 71943 - DNA, 22 bp, Artificial Sequence
  Synthetic oligonucleotide; TTG chr11 5158297 5158318 5158314 5158319 +
agatggagtctcactgttgccc

SEQ ID NO: 71944 - DNA, 22 bp, Artificial Sequence
  Synthetic oligonucleotide; CTC chr11 5158309 5158330 5158326 5158331 +
actgttgcccaggctggagtgc

SEQ ID NO: 71945 - DNA, 22 bp, Artificial Sequence
  Synthetic oligonucleotide; CTG chr11 5158313 5158334 5158330 5158335 +
ttgcccaggctggagtgcagtg

SEQ ID NO: 71946 - DNA, 22 bp, Artificial Sequence
  Synthetic oligonucleotide; TTG chr11 5158316 5158337 5158333 5158338 +
cccaggctggagtgcagtggca

SEQ ID NO: 71947 - DNA, 22 bp, Artificial Sequence
  Synthetic oligonucleotide; CTG chr11 5158325 5158346 5158342 5158347 +
gagtgcagtggcagcacaatct

SEQ ID NO: 71948 - DNA, 22 bp, Artificial Sequence
  Synthetic oligonucleotide; CTT chr11 5158348 5158369 5158365 5158370 +
ggatcactgcaacttctgcctc

SEQ ID NO: 71949 - DNA, 22 bp, Artificial Sequence
  Synthetic oligonucleotide; TTG chr11 5158349 5158370 5158366 5158371 +
gatcactgcaacttctgcctcc

SEQ ID NO: 71950 - DNA, 22 bp, Artificial Sequence
  Synthetic oligonucleotide; CTG chr11 5158357 5158378 5158374 5158379 +
caacttctgcctcccaggttca

SEQ ID NO: 71951 - DNA, 22 bp, Artificial Sequence
  Synthetic oligonucleotide; CTT chr11 5158363 5158384 5158380 5158385 +
ctgcctcccaggttcaagcgat

SEQ ID NO: 71952 - DNA, 22 bp, Artificial Sequence
  Synthetic oligonucleotide; TTC chr11 5158364 5158385 5158381 5158386 +
tgcctcccaggttcaagcgatt

SEQ ID NO: 71953 - DNA, 22 bp, Artificial Sequence
  Synthetic oligonucleotide; CTG chr11 5158366 5158387 5158383 5158388 +
cctcccaggttcaagcgattct

SEQ ID NO: 71954 - DNA, 22 bp, Artificial Sequence
  Synthetic oligonucleotide; CTC chr11 5158370 5158391 5158387 5158392 +
ccaggttcaagcgattctcctg

SEQ ID NO: 71955 - DNA, 22 bp, Artificial Sequence
  Synthetic oligonucleotide; TTC chr11 5158378 5158399 5158395 5158400 +
aagcgattctcctgcctcagcc

SEQ ID NO: 71956 - DNA, 22 bp, Artificial Sequence
  Synthetic oligonucleotide; TTC chr11 5158387 5158408 5158404 5158409 +
tcctgcctcagcctcctgagta

SEQ ID NO: 71957 - DNA, 22 bp, Artificial Sequence
  Synthetic oligonucleotide; CTC chr11 5158389 5158410 5158406 5158411 +
ctgcctcagcctcctgagtatc

SEQ ID NO: 71958 - DNA, 22 bp, Artificial Sequence
  Synthetic oligonucleotide; CTG chr11 5158392 5158413 5158409 5158414 +
cctcagcctcctgagtatctgg

SEQ ID NO: 71959 - DNA, 22 bp, Artificial Sequence
  Synthetic oligonucleotide; CTC chr11 5158396 5158417 5158413 5158418 +
agcctcctgagtatctgggatt

SEQ ID NO: 71960 - DNA, 22 bp, Artificial Sequence
  Synthetic oligonucleotide; CTC chr11 5158402 5158423 5158419 5158424 +
ctgagtatctgggattacagga

SEQ ID NO: 71961 - DNA, 22 bp, Artificial Sequence
  Synthetic oligonucleotide; CTG chr11 5158405 5158426 5158422 5158427 +
agtatctgggattacaggagcg

SEQ ID NO: 71962 - DNA, 22 bp, Artificial Sequence
  Synthetic oligonucleotide; CTG chr11 5158413 5158434 5158430 5158435 +
ggattacaggagcgccccacca

SEQ ID NO: 71963 - DNA, 22 bp, Artificial Sequence
  Synthetic oligonucleotide; TTA chr11 5158419 5158440 5158436 5158441 +
caggagcgccccaccatgcctg

SEQ ID NO: 71964 - DNA, 22 bp, Artificial Sequence
  Synthetic oligonucleotide; CTG chr11 5158441 5158462 5158458 5158463 +
gctaatttttgtatttttagta

SEQ ID NO: 71965 - DNA, 22 bp, Artificial Sequence
  Synthetic oligonucleotide; CTA chr11 5158445 5158466 5158462 5158467 +
atttttgtatttttagtagaga

SEQ ID NO: 71966 - DNA, 22 bp, Artificial Sequence
  Synthetic oligonucleotide; TTT chr11 5158449 5158470 5158466 5158471 +
ttgtatttttagtagagacgga

SEQ ID NO: 71967 - DNA, 22 bp, Artificial Sequence
  Synthetic oligonucleotide; TTT chr11 5158450 5158471 5158467 5158472 +
tgtatttttagtagagacggag

SEQ ID NO: 71968 - DNA, 22 bp, Artificial Sequence
  Synthetic oligonucleotide; TTT chr11 5158451 5158472 5158468 5158473 +
gtatttttagtagagacggagt

SEQ ID NO: 71969 - DNA, 22 bp, Artificial Sequence
  Synthetic oligonucleotide; TTG chr11 5158452 5158473 5158469 5158474 +
tatttttagtagagacggagtg

SEQ ID NO: 71970 - DNA, 22 bp, Artificial Sequence
  Synthetic oligonucleotide; TTT chr11 5158457 5158478 5158474 5158479 +
ttagtagagacggagtgtcacc

SEQ ID NO: 71971 - DNA, 22 bp, Artificial Sequence
  Synthetic oligonucleotide; TTT chr11 5158458 5158479 5158475 5158480 +
tagtagagacggagtgtcacca

SEQ ID NO: 71972 - DNA, 22 bp, Artificial Sequence
  Synthetic oligonucleotide; TTT chr11 5158459 5158480 5158476 5158481 +
agtagagacggagtgtcaccac

SEQ ID NO: 71973 - DNA, 22 bp, Artificial Sequence
  Synthetic oligonucleotide; TTA chr11 5158460 5158481 5158477 5158482 +
gtagagacggagtgtcaccacg

SEQ ID NO: 71974 - DNA, 22 bp, Artificial Sequence
  Synthetic oligonucleotide; TTG chr11 5158485 5158506 5158502 5158507 +
gtcaggctggtcttgaactcct

SEQ ID NO: 71975 - DNA, 22 bp, Artificial Sequence
  Synthetic oligonucleotide; CTG chr11 5158494 5158515 5158511 5158516 +
gtcttgaactcctgacctcgtg

SEQ ID NO: 71976 - DNA, 22 bp, Artificial Sequence
  Synthetic oligonucleotide; CTT chr11 5158499 5158520 5158516 5158521 +
gaactcctgacctcgtgatccc

SEQ ID NO: 71977 - DNA, 22 bp, Artificial Sequence
  Synthetic oligonucleotide; TTG chr11 5158500 5158521 5158517 5158522 +
aactcctgacctcgtgatcccc

SEQ ID NO: 71978 - DNA, 22 bp, Artificial Sequence
  Synthetic oligonucleotide; CTC chr11 5158505 5158526 5158522 5158527 +
ctgacctcgtgatccccccacc

SEQ ID NO: 71979 - DNA, 22 bp, Artificial Sequence
  Synthetic oligonucleotide; CTG chr11 5158508 5158529 5158525 5158530 +
acctcgtgatccccccacctca

SEQ ID NO: 71980 - DNA, 22 bp, Artificial Sequence
  Synthetic oligonucleotide; CTC chr11 5158513 5158534 5158530 5158535 +
gtgatccccccacctcagcctc

SEQ ID NO: 71981 - DNA, 22 bp, Artificial Sequence
  Synthetic oligonucleotide; CTC chr11 5158529 5158550 5158546 5158551 +
agcctcacaaagtgctgggatt

SEQ ID NO: 71982 - DNA, 22 bp, Artificial Sequence
  Synthetic oligonucleotide; CTC chr11 5158535 5158556 5158552 5158557 +
acaaagtgctgggattacaggt

SEQ ID NO: 71983 - DNA, 22 bp, Artificial Sequence
  Synthetic oligonucleotide; CTG chr11 5158546 5158567 5158563 5158568 +
ggattacaggtgtgagccactg

SEQ ID NO: 71984 - DNA, 22 bp, Artificial Sequence
  Synthetic oligonucleotide; TTA chr11 5158552 5158573 5158569 5158574 +
caggtgtgagccactgcacctg

SEQ ID NO: 71985 - DNA, 22 bp, Artificial Sequence
  Synthetic oligonucleotide; CTG chr11 5158568 5158589 5158585 5158590 +
cacctggcccatttgttcctat

SEQ ID NO: 71986 - DNA, 22 bp, Artificial Sequence
  Synthetic oligonucleotide; CTG chr11 5158574 5158595 5158591 5158596 +
gcccatttgttcctatttttat

SEQ ID NO: 71987 - DNA, 22 bp, Artificial Sequence
  Synthetic oligonucleotide; TTT chr11 5158582 5158603 5158599 5158604 +
gttcctatttttatgttcttga

SEQ ID NO: 71988 - DNA, 22 bp, Artificial Sequence
  Synthetic oligonucleotide; TTG chr11 5158583 5158604 5158600 5158605 +
ttcctatttttatgttcttgat

SEQ ID NO: 71989 - DNA, 22 bp, Artificial Sequence
  Synthetic oligonucleotide; TTC chr11 5158586 5158607 5158603 5158608 +
ctatttttatgttcttgatgcc

SEQ ID NO: 71990 - DNA, 22 bp, Artificial Sequence
  Synthetic oligonucleotide; CTA chr11 5158589 5158610 5158606 5158611 +
tttttatgttcttgatgccttt

SEQ ID NO: 71991 - DNA, 22 bp, Artificial Sequence
  Synthetic oligonucleotide; TTT chr11 5158592 5158613 5158609 5158614 +
ttatgttcttgatgcctttgtt

SEQ ID NO: 71992 - DNA, 22 bp, Artificial Sequence
  Synthetic oligonucleotide; TTT chr11 5158593 5158614 5158610 5158615 +
tatgttcttgatgcctttgtta

SEQ ID NO: 71993 - DNA, 22 bp, Artificial Sequence
  Synthetic oligonucleotide; TTT chr11 5158594 5158615 5158611 5158616 +
atgttcttgatgcctttgttaa

SEQ ID NO: 71994 - DNA, 22 bp, Artificial Sequence
  Synthetic oligonucleotide; TTA chr11 5158595 5158616 5158612 5158617 +
tgttcttgatgcctttgttaaa

SEQ ID NO: 71995 - DNA, 22 bp, Artificial Sequence
  Synthetic oligonucleotide; TTC chr11 5158600 5158621 5158617 5158622 +
ttgatgcctttgttaaagatga

SEQ ID NO: 71996 - DNA, 22 bp, Artificial Sequence
  Synthetic oligonucleotide; CTT chr11 5158602 5158623 5158619 5158624 +
gatgcctttgttaaagatgact

SEQ ID NO: 71997 - DNA, 22 bp, Artificial Sequence
  Synthetic oligonucleotide; TTG chr11 5158603 5158624 5158620 5158625 +
atgcctttgttaaagatgactt

SEQ ID NO: 71998 - DNA, 22 bp, Artificial Sequence
  Synthetic oligonucleotide; CTT chr11 5158610 5158631 5158627 5158632 +
tgttaaagatgacttggttgtt

SEQ ID NO: 71999 - DNA, 22 bp, Artificial Sequence
  Synthetic oligonucleotide; TTT chr11 5158611 5158632 5158628 5158633 +
gttaaagatgacttggttgtta

SEQ ID NO: 72000 - DNA, 22 bp, Artificial Sequence
  Synthetic oligonucleotide; TTG chr11 5158612 5158633 5158629 5158634 +
ttaaagatgacttggttgttaa

SEQ ID NO: 72001 - DNA, 22 bp, Artificial Sequence
  Synthetic oligonucleotide; TTA chr11 5158615 5158636 5158632 5158637 +
aagatgacttggttgttaagtg

SEQ ID NO: 72002 - DNA, 22 bp, Artificial Sequence
  Synthetic oligonucleotide; CTT chr11 5158625 5158646 5158642 5158647 +
ggttgttaagtgcctggatttg

SEQ ID NO: 72003 - DNA, 22 bp, Artificial Sequence
  Synthetic oligonucleotide; TTG chr11 5158626 5158647 5158643 5158648 +
gttgttaagtgcctggatttgc

SEQ ID NO: 72004 - DNA, 22 bp, Artificial Sequence
  Synthetic oligonucleotide; TTG chr11 5158630 5158651 5158647 5158652 +
ttaagtgcctggatttgcatct

SEQ ID NO: 72005 - DNA, 22 bp, Artificial Sequence
  Synthetic oligonucleotide; TTA chr11 5158633 5158654 5158650 5158655 +
agtgcctggatttgcatctggg

SEQ ID NO: 72006 - DNA, 22 bp, Artificial Sequence
  Synthetic oligonucleotide; CTG chr11 5158641 5158662 5158658 5158663 +
gatttgcatctgggttctctat

SEQ ID NO: 72007 - DNA, 22 bp, Artificial Sequence
  Synthetic oligonucleotide; TTT chr11 5158646 5158667 5158663 5158668 +
gcatctgggttctctatgctgt

SEQ ID NO: 72008 - DNA, 22 bp, Artificial Sequence
  Synthetic oligonucleotide; TTG chr11 5158647 5158668 5158664 5158669 +
catctgggttctctatgctgtt

SEQ ID NO: 72009 - DNA, 22 bp, Artificial Sequence
  Synthetic oligonucleotide; CTG chr11 5158653 5158674 5158670 5158675 +
ggttctctatgctgttccattg

SEQ ID NO: 72010 - DNA, 22 bp, Artificial Sequence
  Synthetic oligonucleotide; TTC chr11 5158658 5158679 5158675 5158680 +
tctatgctgttccattgggctg

SEQ ID NO: 72011 - DNA, 22 bp, Artificial Sequence
  Synthetic oligonucleotide; CTC chr11 5158660 5158681 5158677 5158682 +
tatgctgttccattgggctgta

SEQ ID NO: 72012 - DNA, 22 bp, Artificial Sequence
  Synthetic oligonucleotide; CTA chr11 5158662 5158683 5158679 5158684 +
tgctgttccattgggctgtatg

SEQ ID NO: 72013 - DNA, 22 bp, Artificial Sequence
  Synthetic oligonucleotide; CTG chr11 5158667 5158688 5158684 5158689 +
ttccattgggctgtatgtctgt

SEQ ID NO: 72014 - DNA, 22 bp, Artificial Sequence
  Synthetic oligonucleotide; TTC chr11 5158670 5158691 5158687 5158692 +
cattgggctgtatgtctgtctt

SEQ ID NO: 72015 - DNA, 22 bp, Artificial Sequence
  Synthetic oligonucleotide; TTG chr11 5158675 5158696 5158692 5158697 +
ggctgtatgtctgtctttatgc

SEQ ID NO: 72016 - DNA, 22 bp, Artificial Sequence
  Synthetic oligonucleotide; CTG chr11 5158680 5158701 5158697 5158702 +
tatgtctgtctttatgcagtac

SEQ ID NO: 72017 - DNA, 22 bp, Artificial Sequence
  Synthetic oligonucleotide; CTG chr11 5158688 5158709 5158705 5158710 +
tctttatgcagtactgtgctgt

SEQ ID NO: 72018 - DNA, 22 bp, Artificial Sequence
  Synthetic oligonucleotide; CTT chr11 5158692 5158713 5158709 5158714 +
tatgcagtactgtgctgtttgg

SEQ ID NO: 72019 - DNA, 22 bp, Artificial Sequence
  Synthetic oligonucleotide; TTT chr11 5158693 5158714 5158710 5158715 +
atgcagtactgtgctgtttggc

SEQ ID NO: 72020 - DNA, 22 bp, Artificial Sequence
  Synthetic oligonucleotide; TTA chr11 5158694 5158715 5158711 5158716 +
tgcagtactgtgctgtttggct

SEQ ID NO: 72021 - DNA, 22 bp, Artificial Sequence
  Synthetic oligonucleotide; CTG chr11 5158704 5158725 5158721 5158726 +
tgctgtttggctactgtagctt

SEQ ID NO: 72022 - DNA, 22 bp, Artificial Sequence
  Synthetic oligonucleotide; CTG chr11 5158709 5158730 5158726 5158731 +
tttggctactgtagctttgtag

SEQ ID NO: 72023 - DNA, 22 bp, Artificial Sequence
  Synthetic oligonucleotide; TTT chr11 5158712 5158733 5158729 5158734 +
ggctactgtagctttgtagtag

SEQ ID NO: 72024 - DNA, 22 bp, Artificial Sequence
  Synthetic oligonucleotide; TTG chr11 5158713 5158734 5158730 5158735 +
gctactgtagctttgtagtaga

SEQ ID NO: 72025 - DNA, 22 bp, Artificial Sequence
  Synthetic oligonucleotide; CTA chr11 5158717 5158738 5158734 5158739 +
ctgtagctttgtagtagatttt

SEQ ID NO: 72026 - DNA, 22 bp, Artificial Sequence
  Synthetic oligonucleotide; CTG chr11 5158720 5158741 5158737 5158742 +
tagctttgtagtagattttgaa

SEQ ID NO: 72027 - DNA, 22 bp, Artificial Sequence
  Synthetic oligonucleotide; CTT chr11 5158726 5158747 5158743 5158748 +
tgtagtagattttgaagtcata

SEQ ID NO: 72028 - DNA, 22 bp, Artificial Sequence
  Synthetic oligonucleotide; TTT chr11 5158727 5158748 5158744 5158749 +
gtagtagattttgaagtcatat

SEQ ID NO: 72029 - DNA, 22 bp, Artificial Sequence
  Synthetic oligonucleotide; TTG chr11 5158728 5158749 5158745 5158750 +
tagtagattttgaagtcatata

SEQ ID NO: 72030 - DNA, 22 bp, Artificial Sequence
  Synthetic oligonucleotide; TTT chr11 5158738 5158759 5158755 5158760 +
tgaagtcatatagtgtgatagc

SEQ ID NO: 72031 - DNA, 22 bp, Artificial Sequence
  Synthetic oligonucleotide; TTT chr11 5158739 5158760 5158756 5158761 +
gaagtcatatagtgtgatagct

SEQ ID NO: 72032 - DNA, 22 bp, Artificial Sequence
  Synthetic oligonucleotide; TTG chr11 5158740 5158761 5158757 5158762 +
aagtcatatagtgtgatagctt

SEQ ID NO: 72033 - DNA, 22 bp, Artificial Sequence
  Synthetic oligonucleotide; CTT chr11 5158762 5158783 5158779 5158784 +
tggttttgttctttttgctcag

SEQ ID NO: 72034 - DNA, 22 bp, Artificial Sequence
  Synthetic oligonucleotide; TTT chr11 5158763 5158784 5158780 5158785 +
ggttttgttctttttgctcagg

SEQ ID NO: 72035 - DNA, 22 bp, Artificial Sequence
  Synthetic oligonucleotide; TTG chr11 5158764 5158785 5158781 5158786 +
gttttgttctttttgctcagga

SEQ ID NO: 72036 - DNA, 22 bp, Artificial Sequence
  Synthetic oligonucleotide; TTT chr11 5158768 5158789 5158785 5158790 +
tgttctttttgctcaggattgc

SEQ ID NO: 72037 - DNA, 22 bp, Artificial Sequence
  Synthetic oligonucleotide; TTT chr11 5158769 5158790 5158786 5158791 +
gttctttttgctcaggattgct

SEQ ID NO: 72038 - DNA, 22 bp, Artificial Sequence
  Synthetic oligonucleotide; TTG chr11 5158770 5158791 5158787 5158792 +
ttctttttgctcaggattgctt

SEQ ID NO: 72039 - DNA, 22 bp, Artificial Sequence
  Synthetic oligonucleotide; TTC chr11 5158773 5158794 5158790 5158795 +
tttttgctcaggattgctttag

SEQ ID NO: 72040 - DNA, 22 bp, Artificial Sequence
  Synthetic oligonucleotide; CTT chr11 5158775 5158796 5158792 5158797 +
tttgctcaggattgctttagct

SEQ ID NO: 72041 - DNA, 22 bp, Artificial Sequence
  Synthetic oligonucleotide; TTT chr11 5158776 5158797 5158793 5158798 +
ttgctcaggattgctttagcta

SEQ ID NO: 72042 - DNA, 22 bp, Artificial Sequence
  Synthetic oligonucleotide; TTT chr11 5158777 5158798 5158794 5158799 +
tgctcaggattgctttagctat

SEQ ID NO: 72043 - DNA, 22 bp, Artificial Sequence
  Synthetic oligonucleotide; TTT chr11 5158778 5158799 5158795 5158800 +
gctcaggattgctttagctatt

SEQ ID NO: 72044 - DNA, 22 bp, Artificial Sequence
  Synthetic oligonucleotide; TTG chr11 5158779 5158800 5158796 5158801 +
ctcaggattgctttagctattg

SEQ ID NO: 72045 - DNA, 22 bp, Artificial Sequence
  Synthetic oligonucleotide; CTC chr11 5158782 5158803 5158799 5158804 +
aggattgctttagctattgggg

SEQ ID NO: 72046 - DNA, 22 bp, Artificial Sequence
  Synthetic oligonucleotide; TTG chr11 5158789 5158810 5158806 5158811 +
ctttagctattggggatctttt

SEQ ID NO: 72047 - DNA, 22 bp, Artificial Sequence
  Synthetic oligonucleotide; CTT chr11 5158792 5158813 5158809 5158814 +
tagctattggggatcttttgtg

SEQ ID NO: 72048 - DNA, 22 bp, Artificial Sequence
  Synthetic oligonucleotide; TTT chr11 5158793 5158814 5158810 5158815 +
agctattggggatcttttgtgg

SEQ ID NO: 72049 - DNA, 22 bp, Artificial Sequence
  Synthetic oligonucleotide; TTA chr11 5158794 5158815 5158811 5158816 +
gctattggggatcttttgtggt

SEQ ID NO: 72050 - DNA, 22 bp, Artificial Sequence
  Synthetic oligonucleotide; CTA chr11 5158798 5158819 5158815 5158820 +
ttggggatcttttgtggttcca

SEQ ID NO: 72051 - DNA, 22 bp, Artificial Sequence
  Synthetic oligonucleotide; TTG chr11 5158801 5158822 5158818 5158823 +
gggatcttttgtggttccatat

SEQ ID NO: 72052 - DNA, 22 bp, Artificial Sequence
  Synthetic oligonucleotide; CTT chr11 5158809 5158830 5158826 5158831 +
ttgtggttccatataaatatta

SEQ ID NO: 72053 - DNA, 22 bp, Artificial Sequence
  Synthetic oligonucleotide; TTT chr11 5158810 5158831 5158827 5158832 +
tgtggttccatataaatattag

SEQ ID NO: 72054 - DNA, 22 bp, Artificial Sequence
  Synthetic oligonucleotide; TTT chr11 5158811 5158832 5158828 5158833 +
gtggttccatataaatattagg

SEQ ID NO: 72055 - DNA, 22 bp, Artificial Sequence
  Synthetic oligonucleotide; TTG chr11 5158812 5158833 5158829 5158834 +
tggttccatataaatattagga

SEQ ID NO: 72056 - DNA, 22 bp, Artificial Sequence
  Synthetic oligonucleotide; TTC chr11 5158818 5158839 5158835 5158840 +
catataaatattaggattgttt

SEQ ID NO: 72057 - DNA, 22 bp, Artificial Sequence
  Synthetic oligonucleotide; TTA chr11 5158831 5158852 5158848 5158853 +
ggattgtttttctatttctgtg

SEQ ID NO: 72058 - DNA, 22 bp, Artificial Sequence
  Synthetic oligonucleotide; TTG chr11 5158837 5158858 5158854 5158859 +
tttttctatttctgtgaatgcc

SEQ ID NO: 72059 - DNA, 22 bp, Artificial Sequence
  Synthetic oligonucleotide; TTT chr11 5158840 5158861 5158857 5158862 +
ttctatttctgtgaatgccatt

SEQ ID NO: 72060 - DNA, 22 bp, Artificial Sequence
  Synthetic oligonucleotide; TTT chr11 5158841 5158862 5158858 5158863 +
tctatttctgtgaatgccattg

SEQ ID NO: 72061 - DNA, 22 bp, Artificial Sequence
  Synthetic oligonucleotide; TTT chr11 5158842 5158863 5158859 5158864 +
ctatttctgtgaatgccattgg

SEQ ID NO: 72062 - DNA, 22 bp, Artificial Sequence
  Synthetic oligonucleotide; TTC chr11 5158843 5158864 5158860 5158865 +
tatttctgtgaatgccattggt

SEQ ID NO: 72063 - DNA, 22 bp, Artificial Sequence
  Synthetic oligonucleotide; CTA chr11 5158845 5158866 5158862 5158867 +
tttctgtgaatgccattggtat

SEQ ID NO: 72064 - DNA, 22 bp, Artificial Sequence
  Synthetic oligonucleotide; TTT chr11 5158848 5158869 5158865 5158870 +
ctgtgaatgccattggtatttt

SEQ ID NO: 72065 - DNA, 22 bp, Artificial Sequence
  Synthetic oligonucleotide; TTC chr11 5158849 5158870 5158866 5158871 +
tgtgaatgccattggtattttg

SEQ ID NO: 72066 - DNA, 22 bp, Artificial Sequence
  Synthetic oligonucleotide; CTG chr11 5158851 5158872 5158868 5158873 +
tgaatgccattggtattttgac

SEQ ID NO: 72067 - DNA, 22 bp, Artificial Sequence
  Synthetic oligonucleotide; TTG chr11 5158863 5158884 5158880 5158885 +
gtattttgacagaaattgcact

SEQ ID NO: 72068 - DNA, 22 bp, Artificial Sequence
  Synthetic oligonucleotide; TTT chr11 5158869 5158890 5158886 5158891 +
tgacagaaattgcactgaatct

SEQ ID NO: 72069 - DNA, 22 bp, Artificial Sequence
  Synthetic oligonucleotide; TTT chr11 5158870 5158891 5158887 5158892 +
gacagaaattgcactgaatctg

SEQ ID NO: 72070 - DNA, 22 bp, Artificial Sequence
  Synthetic oligonucleotide; TTG chr11 5158871 5158892 5158888 5158893 +
acagaaattgcactgaatctgt

SEQ ID NO: 72071 - DNA, 22 bp, Artificial Sequence
  Synthetic oligonucleotide; TTG chr11 5158881 5158902 5158898 5158903 +
cactgaatctgtacattgcttt

SEQ ID NO: 72072 - DNA, 22 bp, Artificial Sequence
  Synthetic oligonucleotide; CTG chr11 5158886 5158907 5158903 5158908 +
aatctgtacattgctttgggta

SEQ ID NO: 72073 - DNA, 22 bp, Artificial Sequence
  Synthetic oligonucleotide; CTG chr11 5158892 5158913 5158909 5158914 +
tacattgctttgggtagtattg

SEQ ID NO: 72074 - DNA, 22 bp, Artificial Sequence
  Synthetic oligonucleotide; TTG chr11 5158899 5158920 5158916 5158921 +
ctttgggtagtattgtcatttt

SEQ ID NO: 72075 - DNA, 22 bp, Artificial Sequence
  Synthetic oligonucleotide; CTT chr11 5158902 5158923 5158919 5158924 +
tgggtagtattgtcattttaat

SEQ ID NO: 72076 - DNA, 22 bp, Artificial Sequence
  Synthetic oligonucleotide; TTT chr11 5158903 5158924 5158920 5158925 +
gggtagtattgtcattttaata

SEQ ID NO: 72077 - DNA, 22 bp, Artificial Sequence
  Synthetic oligonucleotide; TTG chr11 5158904 5158925 5158921 5158926 +
ggtagtattgtcattttaatat

SEQ ID NO: 72078 - DNA, 22 bp, Artificial Sequence
  Synthetic oligonucleotide; TTG chr11 5158914 5158935 5158931 5158936 +
tcattttaatattaattcttct

SEQ ID NO: 72079 - DNA, 22 bp, Artificial Sequence
  Synthetic oligonucleotide; TTT chr11 5158920 5158941 5158937 5158942 +
taatattaattcttctagttca

SEQ ID NO: 72080 - DNA, 22 bp, Artificial Sequence
  Synthetic oligonucleotide; TTT chr11 5158921 5158942 5158938 5158943 +
aatattaattcttctagttcat

SEQ ID NO: 72081 - DNA, 22 bp, Artificial Sequence
  Synthetic oligonucleotide; TTA chr11 5158922 5158943 5158939 5158944 +
atattaattcttctagttcatg

SEQ ID NO: 72082 - DNA, 22 bp, Artificial Sequence
  Synthetic oligonucleotide; TTA chr11 5158928 5158949 5158945 5158950 +
attcttctagttcatgagcatg

SEQ ID NO: 72083 - DNA, 22 bp, Artificial Sequence
  Synthetic oligonucleotide; TTC chr11 5158932 5158953 5158949 5158954 +
ttctagttcatgagcatggaat

SEQ ID NO: 72084 - DNA, 22 bp, Artificial Sequence
  Synthetic oligonucleotide; CTT chr11 5158934 5158955 5158951 5158956 +
ctagttcatgagcatggaatat

SEQ ID NO: 72085 - DNA, 22 bp, Artificial Sequence
  Synthetic oligonucleotide; TTC chr11 5158935 5158956 5158952 5158957 +
tagttcatgagcatggaatatc

SEQ ID NO: 72086 - DNA, 22 bp, Artificial Sequence
  Synthetic oligonucleotide; CTA chr11 5158937 5158958 5158954 5158959 +
gttcatgagcatggaatatcgt

SEQ ID NO: 72087 - DNA, 22 bp, Artificial Sequence
  Synthetic oligonucleotide; TTC chr11 5158941 5158962 5158958 5158963 +
atgagcatggaatatcgttcca

SEQ ID NO: 72088 - DNA, 22 bp, Artificial Sequence
  Synthetic oligonucleotide; TTC chr11 5158961 5158982 5158978 5158983 +
cattttatttgtgtgccctctt

SEQ ID NO: 72089 - DNA, 22 bp, Artificial Sequence
  Synthetic oligonucleotide; TTT chr11 5158966 5158987 5158983 5158988 +
tatttgtgtgccctcttctatt

SEQ ID NO: 72090 - DNA, 22 bp, Artificial Sequence
  Synthetic oligonucleotide; TTT chr11 5158967 5158988 5158984 5158989 +
atttgtgtgccctcttctattt

SEQ ID NO: 72091 - DNA, 22 bp, Artificial Sequence
  Synthetic oligonucleotide; TTA chr11 5158968 5158989 5158985 5158990 +
tttgtgtgccctcttctatttc

SEQ ID NO: 72092 - DNA, 22 bp, Artificial Sequence
  Synthetic oligonucleotide; TTT chr11 5158971 5158992 5158988 5158993 +
gtgtgccctcttctatttcttt

SEQ ID NO: 72093 - DNA, 22 bp, Artificial Sequence
  Synthetic oligonucleotide; TTG chr11 5158972 5158993 5158989 5158994 +
tgtgccctcttctatttctttc

SEQ ID NO: 72094 - DNA, 22 bp, Artificial Sequence
  Synthetic oligonucleotide; CTC chr11 5158981 5159002 5158998 5159003 +
ttctatttctttcaccagagtt

SEQ ID NO: 72095 - DNA, 22 bp, Artificial Sequence
  Synthetic oligonucleotide; CTT chr11 5158983 5159004 5159000 5159005 +
ctatttctttcaccagagtttt

SEQ ID NO: 72096 - DNA, 22 bp, Artificial Sequence
  Synthetic oligonucleotide; TTC chr11 5158984 5159005 5159001 5159006 +
tatttctttcaccagagtttta

SEQ ID NO: 72097 - DNA, 22 bp, Artificial Sequence
  Synthetic oligonucleotide; CTA chr11 5158986 5159007 5159003 5159008 +
tttctttcaccagagttttata

SEQ ID NO: 72098 - DNA, 22 bp, Artificial Sequence
  Synthetic oligonucleotide; TTT chr11 5158989 5159010 5159006 5159011 +
ctttcaccagagttttataatt

SEQ ID NO: 72099 - DNA, 22 bp, Artificial Sequence
  Synthetic oligonucleotide; TTC chr11 5158990 5159011 5159007 5159012 +
tttcaccagagttttataattt

SEQ ID NO: 72100 - DNA, 22 bp, Artificial Sequence
  Synthetic oligonucleotide; CTT chr11 5158992 5159013 5159009 5159014 +
tcaccagagttttataattttt

SEQ ID NO: 72101 - DNA, 22 bp, Artificial Sequence
  Synthetic oligonucleotide; TTT chr11 5158993 5159014 5159010 5159015 +
caccagagttttataatttttc

SEQ ID NO: 72102 - DNA, 22 bp, Artificial Sequence
  Synthetic oligonucleotide; TTC chr11 5158994 5159015 5159011 5159016 +
accagagttttataatttttct

SEQ ID NO: 72103 - DNA, 22 bp, Artificial Sequence
  Synthetic oligonucleotide; TTT chr11 5159004 5159025 5159021 5159026 +
tataatttttcttatagagatc

SEQ ID NO: 72104 - DNA, 22 bp, Artificial Sequence
  Synthetic oligonucleotide; TTT chr11 5159005 5159026 5159022 5159027 +
ataatttttcttatagagatct

SEQ ID NO: 72105 - DNA, 22 bp, Artificial Sequence
  Synthetic oligonucleotide; TTA chr11 5159006 5159027 5159023 5159028 +
taatttttcttatagagatctt

SEQ ID NO: 72106 - DNA, 22 bp, Artificial Sequence
  Synthetic oligonucleotide; TTT chr11 5159012 5159033 5159029 5159034 +
ttcttatagagatcttttactt

SEQ ID NO: 72107 - DNA, 22 bp, Artificial Sequence
  Synthetic oligonucleotide; TTT chr11 5159013 5159034 5159030 5159035 +
tcttatagagatcttttacttc

SEQ ID NO: 72108 - DNA, 22 bp, Artificial Sequence
  Synthetic oligonucleotide; TTT chr11 5159014 5159035 5159031 5159036 +
cttatagagatcttttacttct

SEQ ID NO: 72109 - DNA, 22 bp, Artificial Sequence
  Synthetic oligonucleotide; TTC chr11 5159015 5159036 5159032 5159037 +
ttatagagatcttttacttctt

SEQ ID NO: 72110 - DNA, 22 bp, Artificial Sequence
  Synthetic oligonucleotide; CTT chr11 5159017 5159038 5159034 5159039 +
atagagatcttttacttcttgg

SEQ ID NO: 72111 - DNA, 22 bp, Artificial Sequence
  Synthetic oligonucleotide; TTA chr11 5159018 5159039 5159035 5159040 +
tagagatcttttacttcttggg

SEQ ID NO: 72112 - DNA, 22 bp, Artificial Sequence
  Synthetic oligonucleotide; CTT chr11 5159028 5159049 5159045 5159050 +
ttacttcttgggttagattgac

SEQ ID NO: 72113 - DNA, 22 bp, Artificial Sequence
  Synthetic oligonucleotide; TTT chr11 5159029 5159050 5159046 5159051 +
tacttcttgggttagattgact

SEQ ID NO: 72114 - DNA, 22 bp, Artificial Sequence
  Synthetic oligonucleotide; TTT chr11 5159030 5159051 5159047 5159052 +
acttcttgggttagattgactc

SEQ ID NO: 72115 - DNA, 22 bp, Artificial Sequence
  Synthetic oligonucleotide; TTA chr11 5159031 5159052 5159048 5159053 +
cttcttgggttagattgactcc

SEQ ID NO: 72116 - DNA, 22 bp, Artificial Sequence
  Synthetic oligonucleotide; CTT chr11 5159034 5159055 5159051 5159056 +
cttgggttagattgactcctgg

SEQ ID NO: 72117 - DNA, 22 bp, Artificial Sequence
  Synthetic oligonucleotide; TTC chr11 5159035 5159056 5159052 5159057 +
ttgggttagattgactcctggg

SEQ ID NO: 72118 - DNA, 22 bp, Artificial Sequence
  Synthetic oligonucleotide; CTT chr11 5159037 5159058 5159054 5159059 +
gggttagattgactcctgggta

SEQ ID NO: 72119 - DNA, 22 bp, Artificial Sequence
  Synthetic oligonucleotide; TTG chr11 5159038 5159059 5159055 5159060 +
ggttagattgactcctgggtat

SEQ ID NO: 72120 - DNA, 22 bp, Artificial Sequence
  Synthetic oligonucleotide; TTA chr11 5159043 5159064 5159060 5159065 +
gattgactcctgggtattttat

SEQ ID NO: 72121 - DNA, 22 bp, Artificial Sequence
  Synthetic oligonucleotide; TTG chr11 5159048 5159069 5159065 5159070 +
actcctgggtattttatatttt

SEQ ID NO: 72122 - DNA, 22 bp, Artificial Sequence
  Synthetic oligonucleotide; CTC chr11 5159052 5159073 5159069 5159074 +
ctgggtattttatatttttatt

SEQ ID NO: 72123 - DNA, 22 bp, Artificial Sequence
  Synthetic oligonucleotide; CTG chr11 5159055 5159076 5159072 5159077 +
ggtattttatatttttattgct

SEQ ID NO: 72124 - DNA, 22 bp, Artificial Sequence
  Synthetic oligonucleotide; TTT chr11 5159062 5159083 5159079 5159084 +
tatatttttattgctattgtaa

SEQ ID NO: 72125 - DNA, 22 bp, Artificial Sequence
  Synthetic oligonucleotide; TTT chr11 5159063 5159084 5159080 5159085 +
atatttttattgctattgtaaa

SEQ ID NO: 72126 - DNA, 22 bp, Artificial Sequence
  Synthetic oligonucleotide; TTA chr11 5159064 5159085 5159081 5159086 +
tatttttattgctattgtaaat

SEQ ID NO: 72127 - DNA, 22 bp, Artificial Sequence
  Synthetic oligonucleotide; TTT chr11 5159069 5159090 5159086 5159091 +
ttattgctattgtaaataagat

SEQ ID NO: 72128 - DNA, 22 bp, Artificial Sequence
  Synthetic oligonucleotide; TTT chr11 5159070 5159091 5159087 5159092 +
tattgctattgtaaataagatt

SEQ ID NO: 72129 - DNA, 22 bp, Artificial Sequence
  Synthetic oligonucleotide; TTT chr11 5159071 5159092 5159088 5159093 +
attgctattgtaaataagattg

SEQ ID NO: 72130 - DNA, 22 bp, Artificial Sequence
  Synthetic oligonucleotide; TTA chr11 5159072 5159093 5159089 5159094 +
ttgctattgtaaataagattgt

SEQ ID NO: 72131 - DNA, 22 bp, Artificial Sequence
  Synthetic oligonucleotide; TTG chr11 5159075 5159096 5159092 5159097 +
ctattgtaaataagattgtttt

SEQ ID NO: 72132 - DNA, 22 bp, Artificial Sequence
  Synthetic oligonucleotide; CTA chr11 5159078 5159099 5159095 5159100 +
ttgtaaataagattgttttatt

SEQ ID NO: 72133 - DNA, 22 bp, Artificial Sequence
  Synthetic oligonucleotide; TTG chr11 5159081 5159102 5159098 5159103 +
taaataagattgttttattgat

SEQ ID NO: 72134 - DNA, 22 bp, Artificial Sequence
  Synthetic oligonucleotide; TTG chr11 5159093 5159114 5159110 5159115 +
ttttattgattttttttgcaga

SEQ ID NO: 72135 - DNA, 22 bp, Artificial Sequence
  Synthetic oligonucleotide; TTT chr11 5159096 5159117 5159113 5159118 +
tattgattttttttgcagattg

SEQ ID NO: 72136 - DNA, 22 bp, Artificial Sequence
  Synthetic oligonucleotide; TTT chr11 5159097 5159118 5159114 5159119 +
attgattttttttgcagattga

SEQ ID NO: 72137 - DNA, 22 bp, Artificial Sequence
  Synthetic oligonucleotide; TTA chr11 5159098 5159119 5159115 5159120 +
ttgattttttttgcagattgat

SEQ ID NO: 72138 - DNA, 22 bp, Artificial Sequence
  Synthetic oligonucleotide; TTG chr11 5159101 5159122 5159118 5159123 +
attttttttgcagattgataac

SEQ ID NO: 72139 - DNA, 22 bp, Artificial Sequence
  Synthetic oligonucleotide; TTT chr11 5159105 5159126 5159122 5159127 +
tttttgcagattgataactttt

SEQ ID NO: 72140 - DNA, 22 bp, Artificial Sequence
  Synthetic oligonucleotide; TTT chr11 5159106 5159127 5159123 5159128 +
ttttgcagattgataacttttt

SEQ ID NO: 72141 - DNA, 22 bp, Artificial Sequence
  Synthetic oligonucleotide; TTT chr11 5159107 5159128 5159124 5159129 +
tttgcagattgataacttttta

SEQ ID NO: 72142 - DNA, 22 bp, Artificial Sequence
  Synthetic oligonucleotide; TTT chr11 5159108 5159129 5159125 5159130 +
ttgcagattgataactttttat

SEQ ID NO: 72143 - DNA, 22 bp, Artificial Sequence
  Synthetic oligonucleotide; TTT chr11 5159109 5159130 5159126 5159131 +
tgcagattgataactttttata

SEQ ID NO: 72144 - DNA, 22 bp, Artificial Sequence
  Synthetic oligonucleotide; TTT chr11 5159110 5159131 5159127 5159132 +
gcagattgataactttttatat

SEQ ID NO: 72145 - DNA, 22 bp, Artificial Sequence
  Synthetic oligonucleotide; TTG chr11 5159111 5159132 5159128 5159133 +
cagattgataactttttatata

SEQ ID NO: 72146 - DNA, 22 bp, Artificial Sequence
  Synthetic oligonucleotide; TTG chr11 5159118 5159139 5159135 5159140 +
ataactttttatatatgaaatg

SEQ ID NO: 72147 - DNA, 22 bp, Artificial Sequence
  Synthetic oligonucleotide; CTT chr11 5159125 5159146 5159142 5159147 +
tttatatatgaaatgctactga

SEQ ID NO: 72148 - DNA, 22 bp, Artificial Sequence
  Synthetic oligonucleotide; TTT chr11 5159126 5159147 5159143 5159148 +
ttatatatgaaatgctactgat

SEQ ID NO: 72149 - DNA, 22 bp, Artificial Sequence
  Synthetic oligonucleotide; TTT chr11 5159127 5159148 5159144 5159149 +
tatatatgaaatgctactgatt

SEQ ID NO: 72150 - DNA, 22 bp, Artificial Sequence
  Synthetic oligonucleotide; TTT chr11 5159128 5159149 5159145 5159150 +
atatatgaaatgctactgattt

SEQ ID NO: 72151 - DNA, 22 bp, Artificial Sequence
  Synthetic oligonucleotide; TTA chr11 5159129 5159150 5159146 5159151 +
tatatgaaatgctactgatttt

SEQ ID NO: 72152 - DNA, 22 bp, Artificial Sequence
  Synthetic oligonucleotide; CTA chr11 5159143 5159164 5159160 5159165 +
ctgattttgtatttttatttca

SEQ ID NO: 72153 - DNA, 22 bp, Artificial Sequence
  Synthetic oligonucleotide; CTG chr11 5159146 5159167 5159163 5159168 +
attttgtatttttatttcatat

SEQ ID NO: 72154 - DNA, 22 bp, Artificial Sequence
  Synthetic oligonucleotide; TTT chr11 5159150 5159171 5159167 5159172 +
tgtatttttatttcatatcctg

SEQ ID NO: 72155 - DNA, 22 bp, Artificial Sequence
  Synthetic oligonucleotide; TTT chr11 5159151 5159172 5159168 5159173 +
gtatttttatttcatatcctgt

SEQ ID NO: 72156 - DNA, 22 bp, Artificial Sequence
  Synthetic oligonucleotide; TTG chr11 5159152 5159173 5159169 5159174 +
tatttttatttcatatcctgta

SEQ ID NO: 72157 - DNA, 22 bp, Artificial Sequence
  Synthetic oligonucleotide; TTT chr11 5159157 5159178 5159174 5159179 +
ttatttcatatcctgtaacttt

SEQ ID NO: 72158 - DNA, 22 bp, Artificial Sequence
  Synthetic oligonucleotide; TTT chr11 5159158 5159179 5159175 5159180 +
tatttcatatcctgtaacttta

SEQ ID NO: 72159 - DNA, 22 bp, Artificial Sequence
  Synthetic oligonucleotide; TTT chr11 5159159 5159180 5159176 5159181 +
atttcatatcctgtaactttat

SEQ ID NO: 72160 - DNA, 22 bp, Artificial Sequence
  Synthetic oligonucleotide; TTA chr11 5159160 5159181 5159177 5159182 +
tttcatatcctgtaactttatt

SEQ ID NO: 72161 - DNA, 22 bp, Artificial Sequence
  Synthetic oligonucleotide; TTT chr11 5159163 5159184 5159180 5159185 +
catatcctgtaactttattgat

SEQ ID NO: 72162 - DNA, 22 bp, Artificial Sequence
  Synthetic oligonucleotide; TTC chr11 5159164 5159185 5159181 5159186 +
atatcctgtaactttattgatt

SEQ ID NO: 72163 - DNA, 22 bp, Artificial Sequence
  Synthetic oligonucleotide; CTG chr11 5159172 5159193 5159189 5159194 +
taactttattgatttttttaaa

SEQ ID NO: 72164 - DNA, 22 bp, Artificial Sequence
  Synthetic oligonucleotide; CTT chr11 5159178 5159199 5159195 5159200 +
tattgatttttttaaatcgttt

SEQ ID NO: 72165 - DNA, 22 bp, Artificial Sequence
  Synthetic oligonucleotide; TTT chr11 5159179 5159200 5159196 5159201 +
attgatttttttaaatcgtttt

SEQ ID NO: 72166 - DNA, 22 bp, Artificial Sequence
  Synthetic oligonucleotide; TTA chr11 5159180 5159201 5159197 5159202 +
ttgatttttttaaatcgtttta

SEQ ID NO: 72167 - DNA, 22 bp, Artificial Sequence
  Synthetic oligonucleotide; TTG chr11 5159183 5159204 5159200 5159205 +
atttttttaaatcgttttaata

SEQ ID NO: 72168 - DNA, 22 bp, Artificial Sequence
  Synthetic oligonucleotide; TTT chr11 5159187 5159208 5159204 5159209 +
ttttaaatcgttttaatagtat

SEQ ID NO: 72169 - DNA, 22 bp, Artificial Sequence
  Synthetic oligonucleotide; TTT chr11 5159188 5159209 5159205 5159210 +
tttaaatcgttttaatagtatt

SEQ ID NO: 72170 - DNA, 22 bp, Artificial Sequence
  Synthetic oligonucleotide; TTT chr11 5159189 5159210 5159206 5159211 +
ttaaatcgttttaatagtattt

SEQ ID NO: 72171 - DNA, 22 bp, Artificial Sequence
  Synthetic oligonucleotide; TTT chr11 5159190 5159211 5159207 5159212 +
taaatcgttttaatagtattta

SEQ ID NO: 72172 - DNA, 22 bp, Artificial Sequence
  Synthetic oligonucleotide; TTT chr11 5159191 5159212 5159208 5159213 +
aaatcgttttaatagtatttag

SEQ ID NO: 72173 - DNA, 22 bp, Artificial Sequence
  Synthetic oligonucleotide; TTA chr11 5159192 5159213 5159209 5159214 +
aatcgttttaatagtatttagt

SEQ ID NO: 72174 - DNA, 22 bp, Artificial Sequence
  Synthetic oligonucleotide; TTT chr11 5159200 5159221 5159217 5159222 +
taatagtatttagtgaagtttt

SEQ ID NO: 72175 - DNA, 22 bp, Artificial Sequence
  Synthetic oligonucleotide; TTT chr11 5159201 5159222 5159218 5159223 +
aatagtatttagtgaagttttt

SEQ ID NO: 72176 - DNA, 22 bp, Artificial Sequence
  Synthetic oligonucleotide; TTA chr11 5159202 5159223 5159219 5159224 +
atagtatttagtgaagttttta

SEQ ID NO: 72177 - DNA, 22 bp, Artificial Sequence
  Synthetic oligonucleotide; TTT chr11 5159211 5159232 5159228 5159233 +
agtgaagtttttaggttttttc

SEQ ID NO: 72178 - DNA, 22 bp, Artificial Sequence
  Synthetic oligonucleotide; TTA chr11 5159212 5159233 5159229 5159234 +
gtgaagtttttaggttttttct

SEQ ID NO: 72179 - DNA, 22 bp, Artificial Sequence
  Synthetic oligonucleotide; TTT chr11 5159221 5159242 5159238 5159243 +
ttaggttttttctaagtataag

SEQ ID NO: 72180 - DNA, 22 bp, Artificial Sequence
  Synthetic oligonucleotide; TTT chr11 5159222 5159243 5159239 5159244 +
taggttttttctaagtataaga

SEQ ID NO: 72181 - DNA, 22 bp, Artificial Sequence
  Synthetic oligonucleotide; TTT chr11 5159223 5159244 5159240 5159245 +
aggttttttctaagtataagat

SEQ ID NO: 72182 - DNA, 22 bp, Artificial Sequence
  Synthetic oligonucleotide; TTA chr11 5159224 5159245 5159241 5159246 +
ggttttttctaagtataagatc

SEQ ID NO: 72183 - DNA, 22 bp, Artificial Sequence
  Synthetic oligonucleotide; TTT chr11 5159229 5159250 5159246 5159251 +
tttctaagtataagatcatgtc

SEQ ID NO: 72184 - DNA, 22 bp, Artificial Sequence
  Synthetic oligonucleotide; TTT chr11 5159230 5159251 5159247 5159252 +
ttctaagtataagatcatgtca

SEQ ID NO: 72185 - DNA, 22 bp, Artificial Sequence
  Synthetic oligonucleotide; TTT chr11 5159231 5159252 5159248 5159253 +
tctaagtataagatcatgtcat

SEQ ID NO: 72186 - DNA, 22 bp, Artificial Sequence
  Synthetic oligonucleotide; TTT chr11 5159232 5159253 5159249 5159254 +
ctaagtataagatcatgtcatc

SEQ ID NO: 72187 - DNA, 22 bp, Artificial Sequence
  Synthetic oligonucleotide; TTC chr11 5159233 5159254 5159250 5159255 +
taagtataagatcatgtcatct

SEQ ID NO: 72188 - DNA, 22 bp, Artificial Sequence
  Synthetic oligonucleotide; CTA chr11 5159235 5159256 5159252 5159257 +
agtataagatcatgtcatctac

SEQ ID NO: 72189 - DNA, 22 bp, Artificial Sequence
  Synthetic oligonucleotide; CTA chr11 5159256 5159277 5159273 5159278 +
caaactaggctaatttaacttc

SEQ ID NO: 72190 - DNA, 22 bp, Artificial Sequence
  Synthetic oligonucleotide; CTA chr11 5159263 5159284 5159280 5159285 +
ggctaatttaacttcttccttt

SEQ ID NO: 72191 - DNA, 22 bp, Artificial Sequence
  Synthetic oligonucleotide; CTA chr11 5159268 5159289 5159285 5159290 +
atttaacttcttcctttccaat

SEQ ID NO: 72192 - DNA, 22 bp, Artificial Sequence
  Synthetic oligonucleotide; TTT chr11 5159272 5159293 5159289 5159294 +
aacttcttcctttccaatttgg

SEQ ID NO: 72193 - DNA, 22 bp, Artificial Sequence
  Synthetic oligonucleotide; TTA chr11 5159273 5159294 5159290 5159295 +
acttcttcctttccaatttgga

SEQ ID NO: 72194 - DNA, 22 bp, Artificial Sequence
  Synthetic oligonucleotide; CTT chr11 5159277 5159298 5159294 5159299 +
cttcctttccaatttggatgca

SEQ ID NO: 72195 - DNA, 22 bp, Artificial Sequence
  Synthetic oligonucleotide; TTC chr11 5159278 5159299 5159295 5159300 +
ttcctttccaatttggatgcac

SEQ ID NO: 72196 - DNA, 22 bp, Artificial Sequence
  Synthetic oligonucleotide; CTT chr11 5159280 5159301 5159297 5159302 +
cctttccaatttggatgcactt

SEQ ID NO: 72197 - DNA, 22 bp, Artificial Sequence
  Synthetic oligonucleotide; TTC chr11 5159281 5159302 5159298 5159303 +
ctttccaatttggatgcacttt

SEQ ID NO: 72198 - DNA, 22 bp, Artificial Sequence
  Synthetic oligonucleotide; CTT chr11 5159284 5159305 5159301 5159306 +
tccaatttggatgcactttctt

SEQ ID NO: 72199 - DNA, 22 bp, Artificial Sequence
  Synthetic oligonucleotide; TTT chr11 5159285 5159306 5159302 5159307 +
ccaatttggatgcactttcttt

SEQ ID NO: 72200 - DNA, 22 bp, Artificial Sequence
  Synthetic oligonucleotide; TTC chr11 5159286 5159307 5159303 5159308 +
caatttggatgcactttctttc

SEQ ID NO: 72201 - DNA, 22 bp, Artificial Sequence
  Synthetic oligonucleotide; TTT chr11 5159292 5159313 5159309 5159314 +
ggatgcactttctttctcttcc

SEQ ID NO: 72202 - DNA, 22 bp, Artificial Sequence
  Synthetic oligonucleotide; TTG chr11 5159293 5159314 5159310 5159315 +
gatgcactttctttctcttcct

SEQ ID NO: 72203 - DNA, 22 bp, Artificial Sequence
  Synthetic oligonucleotide; CTT chr11 5159302 5159323 5159319 5159324 +
tctttctcttcctgaatttctc

SEQ ID NO: 72204 - DNA, 22 bp, Artificial Sequence
  Synthetic oligonucleotide; TTT chr11 5159303 5159324 5159320 5159325 +
ctttctcttcctgaatttctct

SEQ ID NO: 72205 - DNA, 22 bp, Artificial Sequence
  Synthetic oligonucleotide; TTC chr11 5159304 5159325 5159321 5159326 +
tttctcttcctgaatttctctt

SEQ ID NO: 72206 - DNA, 22 bp, Artificial Sequence
  Synthetic oligonucleotide; CTT chr11 5159306 5159327 5159323 5159328 +
tctcttcctgaatttctctttc

SEQ ID NO: 72207 - DNA, 22 bp, Artificial Sequence
  Synthetic oligonucleotide; TTT chr11 5159307 5159328 5159324 5159329 +
ctcttcctgaatttctctttcc

SEQ ID NO: 72208 - DNA, 22 bp, Artificial Sequence
  Synthetic oligonucleotide; TTC chr11 5159308 5159329 5159325 5159330 +
tcttcctgaatttctctttcca

SEQ ID NO: 72209 - DNA, 22 bp, Artificial Sequence
  Synthetic oligonucleotide; CTC chr11 5159310 5159331 5159327 5159332 +
ttcctgaatttctctttccaag

SEQ ID NO: 72210 - DNA, 22 bp, Artificial Sequence
  Synthetic oligonucleotide; CTT chr11 5159312 5159333 5159329 5159334 +
cctgaatttctctttccaagac

SEQ ID NO: 72211 - DNA, 22 bp, Artificial Sequence
  Synthetic oligonucleotide; TTC chr11 5159313 5159334 5159330 5159335 +
ctgaatttctctttccaagact

SEQ ID NO: 72212 - DNA, 22 bp, Artificial Sequence
  Synthetic oligonucleotide; CTG chr11 5159316 5159337 5159333 5159338 +
aatttctctttccaagacttcc

SEQ ID NO: 72213 - DNA, 22 bp, Artificial Sequence
  Synthetic oligonucleotide; TTT chr11 5159321 5159342 5159338 5159343 +
ctctttccaagacttccaatat

SEQ ID NO: 72214 - DNA, 22 bp, Artificial Sequence
  Synthetic oligonucleotide; TTC chr11 5159322 5159343 5159339 5159344 +
tctttccaagacttccaatatt

SEQ ID NO: 72215 - DNA, 22 bp, Artificial Sequence
  Synthetic oligonucleotide; CTC chr11 5159324 5159345 5159341 5159346 +
tttccaagacttccaatattat

SEQ ID NO: 72216 - DNA, 22 bp, Artificial Sequence
  Synthetic oligonucleotide; CTT chr11 5159326 5159347 5159343 5159348 +
tccaagacttccaatattatgt

SEQ ID NO: 72217 - DNA, 22 bp, Artificial Sequence
  Synthetic oligonucleotide; TTT chr11 5159327 5159348 5159344 5159349 +
ccaagacttccaatattatgtt

SEQ ID NO: 72218 - DNA, 22 bp, Artificial Sequence
  Synthetic oligonucleotide; TTC chr11 5159328 5159349 5159345 5159350 +
caagacttccaatattatgtta

SEQ ID NO: 72219 - DNA, 22 bp, Artificial Sequence
  Synthetic oligonucleotide; CTT chr11 5159336 5159357 5159353 5159358 +
ccaatattatgttaaataatgg

SEQ ID NO: 72220 - DNA, 22 bp, Artificial Sequence
  Synthetic oligonucleotide; TTC chr11 5159337 5159358 5159354 5159359 +
caatattatgttaaataatggc

SEQ ID NO: 72221 - DNA, 22 bp, Artificial Sequence
  Synthetic oligonucleotide; TTA chr11 5159345 5159366 5159362 5159367 +
tgttaaataatggcaatgaaag

SEQ ID NO: 72222 - DNA, 22 bp, Artificial Sequence
  Synthetic oligonucleotide; TTA chr11 5159350 5159371 5159367 5159372 +
aataatggcaatgaaagtgagc

SEQ ID NO: 72223 - DNA, 22 bp, Artificial Sequence
  Synthetic oligonucleotide; TTC chr11 5159376 5159397 5159393 5159398 +
ttgccttatttcagtccttaga

SEQ ID NO: 72224 - DNA, 22 bp, Artificial Sequence
  Synthetic oligonucleotide; CTT chr11 5159378 5159399 5159395 5159400 +
gccttatttcagtccttagagg

SEQ ID NO: 72225 - DNA, 22 bp, Artificial Sequence
  Synthetic oligonucleotide; TTG chr11 5159379 5159400 5159396 5159401 +
ccttatttcagtccttagagga

SEQ ID NO: 72226 - DNA, 22 bp, Artificial Sequence
  Synthetic oligonucleotide; CTT chr11 5159383 5159404 5159400 5159405 +
atttcagtccttagaggaaagg

SEQ ID NO: 72227 - DNA, 22 bp, Artificial Sequence
  Synthetic oligonucleotide; TTA chr11 5159384 5159405 5159401 5159406 +
tttcagtccttagaggaaaggc

SEQ ID NO: 72228 - DNA, 22 bp, Artificial Sequence
  Synthetic oligonucleotide; TTT chr11 5159387 5159408 5159404 5159409 +
cagtccttagaggaaaggcctt

SEQ ID NO: 72229 - DNA, 22 bp, Artificial Sequence
  Synthetic oligonucleotide; TTC chr11 5159388 5159409 5159405 5159410 +
agtccttagaggaaaggccttc

SEQ ID NO: 72230 - DNA, 22 bp, Artificial Sequence
  Synthetic oligonucleotide; CTT chr11 5159395 5159416 5159412 5159417 +
agaggaaaggccttcaatgttt

SEQ ID NO: 72231 - DNA, 22 bp, Artificial Sequence
  Synthetic oligonucleotide; TTA chr11 5159396 5159417 5159413 5159418 +
gaggaaaggccttcaatgtttc

SEQ ID NO: 72232 - DNA, 22 bp, Artificial Sequence
  Synthetic oligonucleotide; CTT chr11 5159409 5159430 5159426 5159431 +
caatgtttctctgttcagcata

SEQ ID NO: 72233 - DNA, 22 bp, Artificial Sequence
  Synthetic oligonucleotide; TTC chr11 5159410 5159431 5159427 5159432 +
aatgtttctctgttcagcataa

SEQ ID NO: 72234 - DNA, 22 bp, Artificial Sequence
  Synthetic oligonucleotide; TTT chr11 5159417 5159438 5159434 5159439 +
ctctgttcagcataatgttagc

SEQ ID NO: 72235 - DNA, 22 bp, Artificial Sequence
  Synthetic oligonucleotide; TTC chr11 5159418 5159439 5159435 5159440 +
tctgttcagcataatgttagca

SEQ ID NO: 72236 - DNA, 22 bp, Artificial Sequence
  Synthetic oligonucleotide; CTC chr11 5159420 5159441 5159437 5159442 +
tgttcagcataatgttagcact

SEQ ID NO: 72237 - DNA, 22 bp, Artificial Sequence
  Synthetic oligonucleotide; CTG chr11 5159422 5159443 5159439 5159444 +
ttcagcataatgttagcacttg

SEQ ID NO: 72238 - DNA, 22 bp, Artificial Sequence
  Synthetic oligonucleotide; TTC chr11 5159425 5159446 5159442 5159447 +
agcataatgttagcacttggtt

SEQ ID NO: 72239 - DNA, 22 bp, Artificial Sequence
  Synthetic oligonucleotide; TTA chr11 5159437 5159458 5159454 5159459 +
gcacttggtttgtcctatatgg

SEQ ID NO: 72240 - DNA, 22 bp, Artificial Sequence
  Synthetic oligonucleotide; CTT chr11 5159443 5159464 5159460 5159465 +
ggtttgtcctatatggttttta

SEQ ID NO: 72241 - DNA, 22 bp, Artificial Sequence
  Synthetic oligonucleotide; TTG chr11 5159444 5159465 5159461 5159466 +
gtttgtcctatatggtttttat

SEQ ID NO: 72242 - DNA, 22 bp, Artificial Sequence
  Synthetic oligonucleotide; TTT chr11 5159448 5159469 5159465 5159470 +
gtcctatatggtttttattatt

SEQ ID NO: 72243 - DNA, 22 bp, Artificial Sequence
  Synthetic oligonucleotide; TTG chr11 5159449 5159470 5159466 5159471 +
tcctatatggtttttattattt

SEQ ID NO: 72244 - DNA, 22 bp, Artificial Sequence
  Synthetic oligonucleotide; CTA chr11 5159454 5159475 5159471 5159476 +
tatggtttttattattttgagg

SEQ ID NO: 72245 - DNA, 22 bp, Artificial Sequence
  Synthetic oligonucleotide; TTT chr11 5159462 5159483 5159479 5159484 +
ttattattttgaggtatgttcc

SEQ ID NO: 72246 - DNA, 22 bp, Artificial Sequence
  Synthetic oligonucleotide; TTT chr11 5159463 5159484 5159480 5159485 +
tattattttgaggtatgttcct

SEQ ID NO: 72247 - DNA, 22 bp, Artificial Sequence
  Synthetic oligonucleotide; TTT chr11 5159464 5159485 5159481 5159486 +
attattttgaggtatgttccta

SEQ ID NO: 72248 - DNA, 22 bp, Artificial Sequence
  Synthetic oligonucleotide; TTA chr11 5159465 5159486 5159482 5159487 +
ttattttgaggtatgttcctac

SEQ ID NO: 72249 - DNA, 22 bp, Artificial Sequence
  Synthetic oligonucleotide; TTA chr11 5159468 5159489 5159485 5159490 +
ttttgaggtatgttcctactgt

SEQ ID NO: 72250 - DNA, 22 bp, Artificial Sequence
  Synthetic oligonucleotide; TTT chr11 5159471 5159492 5159488 5159493 +
tgaggtatgttcctactgtacc

SEQ ID NO: 72251 - DNA, 22 bp, Artificial Sequence
  Synthetic oligonucleotide; TTT chr11 5159472 5159493 5159489 5159494 +
gaggtatgttcctactgtacct

SEQ ID NO: 72252 - DNA, 22 bp, Artificial Sequence
  Synthetic oligonucleotide; TTG chr11 5159473 5159494 5159490 5159495 +
aggtatgttcctactgtacctc

SEQ ID NO: 72253 - DNA, 22 bp, Artificial Sequence
  Synthetic oligonucleotide; TTC chr11 5159483 5159504 5159500 5159505 +
ctactgtacctcctttgaggtg

SEQ ID NO: 72254 - DNA, 22 bp, Artificial Sequence
  Synthetic oligonucleotide; CTA chr11 5159486 5159507 5159503 5159508 +
ctgtacctcctttgaggtgcat

SEQ ID NO: 72255 - DNA, 22 bp, Artificial Sequence
  Synthetic oligonucleotide; CTG chr11 5159489 5159510 5159506 5159511 +
tacctcctttgaggtgcatttg

SEQ ID NO: 72256 - DNA, 22 bp, Artificial Sequence
  Synthetic oligonucleotide; CTC chr11 5159495 5159516 5159512 5159517 +
ctttgaggtgcatttgttgttg

SEQ ID NO: 72257 - DNA, 22 bp, Artificial Sequence
  Synthetic oligonucleotide; CTT chr11 5159498 5159519 5159515 5159520 +
tgaggtgcatttgttgttgtgt

SEQ ID NO: 72258 - DNA, 22 bp, Artificial Sequence
  Synthetic oligonucleotide; TTT chr11 5159499 5159520 5159516 5159521 +
gaggtgcatttgttgttgtgtc

SEQ ID NO: 72259 - DNA, 22 bp, Artificial Sequence
  Synthetic oligonucleotide; TTG chr11 5159500 5159521 5159517 5159522 +
aggtgcatttgttgttgtgtcc

SEQ ID NO: 72260 - DNA, 22 bp, Artificial Sequence
  Synthetic oligonucleotide; TTT chr11 5159510 5159531 5159527 5159532 +
gttgttgtgtcctggtctggtt

SEQ ID NO: 72261 - DNA, 22 bp, Artificial Sequence
  Synthetic oligonucleotide; TTG chr11 5159511 5159532 5159528 5159533 +
ttgttgtgtcctggtctggttt

SEQ ID NO: 72262 - DNA, 22 bp, Artificial Sequence
  Synthetic oligonucleotide; TTG chr11 5159514 5159535 5159531 5159536 +
ttgtgtcctggtctggtttggg

SEQ ID NO: 72263 - DNA, 22 bp, Artificial Sequence
  Synthetic oligonucleotide; TTG chr11 5159517 5159538 5159534 5159539 +
tgtcctggtctggtttgggtat

SEQ ID NO: 72264 - DNA, 22 bp, Artificial Sequence
  Synthetic oligonucleotide; CTG chr11 5159524 5159545 5159541 5159546 +
gtctggtttgggtatattagag

SEQ ID NO: 72265 - DNA, 22 bp, Artificial Sequence
  Synthetic oligonucleotide; CTG chr11 5159529 5159550 5159546 5159551 +
gtttgggtatattagagtaatg

SEQ ID NO: 72266 - DNA, 22 bp, Artificial Sequence
  Synthetic oligonucleotide; TTT chr11 5159533 5159554 5159550 5159555 +
gggtatattagagtaatgcttg

SEQ ID NO: 72267 - DNA, 22 bp, Artificial Sequence
  Synthetic oligonucleotide; TTG chr11 5159534 5159555 5159551 5159556 +
ggtatattagagtaatgcttgc

SEQ ID NO: 72268 - DNA, 22 bp, Artificial Sequence
  Synthetic oligonucleotide; TTA chr11 5159543 5159564 5159560 5159565 +
gagtaatgcttgcctcatagaa

SEQ ID NO: 72269 - DNA, 22 bp, Artificial Sequence
  Synthetic oligonucleotide; CTT chr11 5159554 5159575 5159571 5159576 +
gcctcatagaataagtttagaa

SEQ ID NO: 72270 - DNA, 22 bp, Artificial Sequence
  Synthetic oligonucleotide; TTG chr11 5159555 5159576 5159572 5159577 +
cctcatagaataagtttagaag

SEQ ID NO: 72271 - DNA, 22 bp, Artificial Sequence
  Synthetic oligonucleotide; CTC chr11 5159559 5159580 5159576 5159581 +
atagaataagtttagaagtagg

SEQ ID NO: 72272 - DNA, 22 bp, Artificial Sequence
  Synthetic oligonucleotide; TTT chr11 5159572 5159593 5159589 5159594 +
agaagtaggcccttcttttcag

SEQ ID NO: 72273 - DNA, 22 bp, Artificial Sequence
  Synthetic oligonucleotide; TTA chr11 5159573 5159594 5159590 5159595 +
gaagtaggcccttcttttcagt

SEQ ID NO: 72274 - DNA, 22 bp, Artificial Sequence
  Synthetic oligonucleotide; CTT chr11 5159586 5159607 5159603 5159608 +
cttttcagtttttatttgtttg

SEQ ID NO: 72275 - DNA, 22 bp, Artificial Sequence
  Synthetic oligonucleotide; TTC chr11 5159587 5159608 5159604 5159609 +
ttttcagtttttatttgtttgt

SEQ ID NO: 72276 - DNA, 22 bp, Artificial Sequence
  Synthetic oligonucleotide; CTT chr11 5159589 5159610 5159606 5159611 +
ttcagtttttatttgtttgttt

SEQ ID NO: 72277 - DNA, 22 bp, Artificial Sequence
  Synthetic oligonucleotide; TTT chr11 5159590 5159611 5159607 5159612 +
tcagtttttatttgtttgtttg

SEQ ID NO: 72278 - DNA, 22 bp, Artificial Sequence
  Synthetic oligonucleotide; TTT chr11 5159591 5159612 5159608 5159613 +
cagtttttatttgtttgtttgt

SEQ ID NO: 72279 - DNA, 22 bp, Artificial Sequence
  Synthetic oligonucleotide; TTC chr11 5159592 5159613 5159609 5159614 +
agtttttatttgtttgtttgtt

SEQ ID NO: 72280 - DNA, 22 bp, Artificial Sequence
  Synthetic oligonucleotide; TTT chr11 5159597 5159618 5159614 5159619 +
ttatttgtttgtttgtttgagg

SEQ ID NO: 72281 - DNA, 22 bp, Artificial Sequence
  Synthetic oligonucleotide; TTT chr11 5159598 5159619 5159615 5159620 +
tatttgtttgtttgtttgagga

SEQ ID NO: 72282 - DNA, 22 bp, Artificial Sequence
  Synthetic oligonucleotide; TTT chr11 5159599 5159620 5159616 5159621 +
atttgtttgtttgtttgaggaa

SEQ ID NO: 72283 - DNA, 22 bp, Artificial Sequence
  Synthetic oligonucleotide; TTA chr11 5159600 5159621 5159617 5159622 +
tttgtttgtttgtttgaggaat

SEQ ID NO: 72284 - DNA, 22 bp, Artificial Sequence
  Synthetic oligonucleotide; TTT chr11 5159603 5159624 5159620 5159625 +
gtttgtttgtttgaggaatttg

SEQ ID NO: 72285 - DNA, 22 bp, Artificial Sequence
  Synthetic oligonucleotide; TTG chr11 5159604 5159625 5159621 5159626 +
tttgtttgtttgaggaatttga

SEQ ID NO: 72286 - DNA, 22 bp, Artificial Sequence
  Synthetic oligonucleotide; TTT chr11 5159607 5159628 5159624 5159629 +
gtttgtttgaggaatttgagta

SEQ ID NO: 72287 - DNA, 22 bp, Artificial Sequence
  Synthetic oligonucleotide; TTG chr11 5159608 5159629 5159625 5159630 +
tttgtttgaggaatttgagtac

SEQ ID NO: 72288 - DNA, 22 bp, Artificial Sequence
  Synthetic oligonucleotide; TTT chr11 5159611 5159632 5159628 5159633 +
gtttgaggaatttgagtacgat

SEQ ID NO: 72289 - DNA, 22 bp, Artificial Sequence
  Synthetic oligonucleotide; TTG chr11 5159612 5159633 5159629 5159634 +
tttgaggaatttgagtacgatt

SEQ ID NO: 72290 - DNA, 22 bp, Artificial Sequence
  Synthetic oligonucleotide; TTT chr11 5159615 5159636 5159632 5159637 +
gaggaatttgagtacgattagt

SEQ ID NO: 72291 - DNA, 22 bp, Artificial Sequence
  Synthetic oligonucleotide; TTG chr11 5159616 5159637 5159633 5159638 +
aggaatttgagtacgattagta

SEQ ID NO: 72292 - DNA, 22 bp, Artificial Sequence
  Synthetic oligonucleotide; TTT chr11 5159624 5159645 5159641 5159646 +
gagtacgattagtattagttct

SEQ ID NO: 72293 - DNA, 22 bp, Artificial Sequence
  Synthetic oligonucleotide; TTG chr11 5159625 5159646 5159642 5159647 +
agtacgattagtattagttcta

SEQ ID NO: 72294 - DNA, 22 bp, Artificial Sequence
  Synthetic oligonucleotide; TTA chr11 5159635 5159656 5159652 5159657 +
gtattagttctacttgaaatgt

SEQ ID NO: 72295 - DNA, 22 bp, Artificial Sequence
  Synthetic oligonucleotide; TTA chr11 5159641 5159662 5159658 5159663 +
gttctacttgaaatgtttggta

SEQ ID NO: 72296 - DNA, 22 bp, Artificial Sequence
  Synthetic oligonucleotide; TTC chr11 5159645 5159666 5159662 5159667 +
tacttgaaatgtttggtagccc

SEQ ID NO: 72297 - DNA, 22 bp, Artificial Sequence
  Synthetic oligonucleotide; CTA chr11 5159647 5159668 5159664 5159669 +
cttgaaatgtttggtagcccat

SEQ ID NO: 72298 - DNA, 22 bp, Artificial Sequence
  Synthetic oligonucleotide; CTT chr11 5159650 5159671 5159667 5159672 +
gaaatgtttggtagcccatcga

SEQ ID NO: 72299 - DNA, 22 bp, Artificial Sequence
  Synthetic oligonucleotide; TTG chr11 5159651 5159672 5159668 5159673 +
aaatgtttggtagcccatcgag

SEQ ID NO: 72300 - DNA, 22 bp, Artificial Sequence
  Synthetic oligonucleotide; TTT chr11 5159659 5159680 5159676 5159681 +
ggtagcccatcgagtcctgggc

SEQ ID NO: 72301 - DNA, 22 bp, Artificial Sequence
  Synthetic oligonucleotide; TTG chr11 5159660 5159681 5159677 5159682 +
gtagcccatcgagtcctgggct

SEQ ID NO: 72302 - DNA, 22 bp, Artificial Sequence
  Synthetic oligonucleotide; CTG chr11 5159678 5159699 5159695 5159700 +
ggcttttctttaataggaaact

SEQ ID NO: 72303 - DNA, 22 bp, Artificial Sequence
  Synthetic oligonucleotide; CTT chr11 5159683 5159704 5159700 5159705 +
ttctttaataggaaactttata

SEQ ID NO: 72304 - DNA, 22 bp, Artificial Sequence
  Synthetic oligonucleotide; TTT chr11 5159684 5159705 5159701 5159706 +
tctttaataggaaactttatat

SEQ ID NO: 72305 - DNA, 22 bp, Artificial Sequence
  Synthetic oligonucleotide; TTT chr11 5159685 5159706 5159702 5159707 +
ctttaataggaaactttatatt

SEQ ID NO: 72306 - DNA, 22 bp, Artificial Sequence
  Synthetic oligonucleotide; TTC chr11 5159686 5159707 5159703 5159708 +
tttaataggaaactttatatta

SEQ ID NO: 72307 - DNA, 22 bp, Artificial Sequence
  Synthetic oligonucleotide; CTT chr11 5159688 5159709 5159705 5159710 +
taataggaaactttatattaca

SEQ ID NO: 72308 - DNA, 22 bp, Artificial Sequence
  Synthetic oligonucleotide; TTT chr11 5159689 5159710 5159706 5159711 +
aataggaaactttatattacaa

SEQ ID NO: 72309 - DNA, 22 bp, Artificial Sequence
  Synthetic oligonucleotide; TTA chr11 5159690 5159711 5159707 5159712 +
ataggaaactttatattacaac

SEQ ID NO: 72310 - DNA, 22 bp, Artificial Sequence
  Synthetic oligonucleotide; CTT chr11 5159701 5159722 5159718 5159723 +
tatattacaactttaatcttgt

SEQ ID NO: 72311 - DNA, 22 bp, Artificial Sequence
  Synthetic oligonucleotide; TTT chr11 5159702 5159723 5159719 5159724 +
atattacaactttaatcttgtt

SEQ ID NO: 72312 - DNA, 22 bp, Artificial Sequence
  Synthetic oligonucleotide; TTA chr11 5159703 5159724 5159720 5159725 +
tattacaactttaatcttgtta

SEQ ID NO: 72313 - DNA, 22 bp, Artificial Sequence
  Synthetic oligonucleotide; TTA chr11 5159708 5159729 5159725 5159730 +
caactttaatcttgttattcat

SEQ ID NO: 72314 - DNA, 22 bp, Artificial Sequence
  Synthetic oligonucleotide; CTT chr11 5159714 5159735 5159731 5159736 +
taatcttgttattcattattgt

SEQ ID NO: 72315 - DNA, 22 bp, Artificial Sequence
  Synthetic oligonucleotide; TTT chr11 5159715 5159736 5159732 5159737 +
aatcttgttattcattattgtt

SEQ ID NO: 72316 - DNA, 22 bp, Artificial Sequence
  Synthetic oligonucleotide; TTA chr11 5159716 5159737 5159733 5159738 +
atcttgttattcattattgttc

SEQ ID NO: 72317 - DNA, 22 bp, Artificial Sequence
  Synthetic oligonucleotide; CTT chr11 5159721 5159742 5159738 5159743 +
gttattcattattgttctattg

SEQ ID NO: 72318 - DNA, 22 bp, Artificial Sequence
  Synthetic oligonucleotide; TTG chr11 5159722 5159743 5159739 5159744 +
ttattcattattgttctattga

SEQ ID NO: 72319 - DNA, 22 bp, Artificial Sequence
  Synthetic oligonucleotide; TTA chr11 5159725 5159746 5159742 5159747 +
ttcattattgttctattgaggt

SEQ ID NO: 72320 - DNA, 22 bp, Artificial Sequence
  Synthetic oligonucleotide; TTC chr11 5159728 5159749 5159745 5159750 +
attattgttctattgaggtttt

SEQ ID NO: 72321 - DNA, 22 bp, Artificial Sequence
  Synthetic oligonucleotide; TTA chr11 5159732 5159753 5159749 5159754 +
ttgttctattgaggttttctgt

SEQ ID NO: 72322 - DNA, 22 bp, Artificial Sequence
  Synthetic oligonucleotide; TTG chr11 5159735 5159756 5159752 5159757 +
ttctattgaggttttctgtttc

SEQ ID NO: 72323 - DNA, 22 bp, Artificial Sequence
  Synthetic oligonucleotide; TTC chr11 5159738 5159759 5159755 5159760 +
tattgaggttttctgtttctac

SEQ ID NO: 72324 - DNA, 22 bp, Artificial Sequence
  Synthetic oligonucleotide; CTA chr11 5159740 5159761 5159757 5159762 +
ttgaggttttctgtttctacat

SEQ ID NO: 72325 - DNA, 22 bp, Artificial Sequence
  Synthetic oligonucleotide; TTG chr11 5159743 5159764 5159760 5159765 +
aggttttctgtttctacatgct

SEQ ID NO: 72326 - DNA, 22 bp, Artificial Sequence
  Synthetic oligonucleotide; TTT chr11 5159749 5159770 5159766 5159771 +
tctgtttctacatgcttcagtc

SEQ ID NO: 72327 - DNA, 22 bp, Artificial Sequence
  Synthetic oligonucleotide; TTT chr11 5159750 5159771 5159767 5159772 +
ctgtttctacatgcttcagtct

SEQ ID NO: 72328 - DNA, 22 bp, Artificial Sequence
  Synthetic oligonucleotide; TTC chr11 5159751 5159772 5159768 5159773 +
tgtttctacatgcttcagtctt

SEQ ID NO: 72329 - DNA, 22 bp, Artificial Sequence
  Synthetic oligonucleotide; CTG chr11 5159753 5159774 5159770 5159775 +
tttctacatgcttcagtcttgc

SEQ ID NO: 72330 - DNA, 22 bp, Artificial Sequence
  Synthetic oligonucleotide; TTT chr11 5159756 5159777 5159773 5159778 +
ctacatgcttcagtcttgctag

SEQ ID NO: 72331 - DNA, 22 bp, Artificial Sequence
  Synthetic oligonucleotide; TTC chr11 5159757 5159778 5159774 5159779 +
tacatgcttcagtcttgctagg

SEQ ID NO: 72332 - DNA, 22 bp, Artificial Sequence
  Synthetic oligonucleotide; CTA chr11 5159759 5159780 5159776 5159781 +
catgcttcagtcttgctaggct

SEQ ID NO: 72333 - DNA, 22 bp, Artificial Sequence
  Synthetic oligonucleotide; CTT chr11 5159766 5159787 5159783 5159788 +
cagtcttgctaggctgtatgtg

SEQ ID NO: 72334 - DNA, 22 bp, Artificial Sequence
  Synthetic oligonucleotide; TTC chr11 5159767 5159788 5159784 5159789 +
agtcttgctaggctgtatgtgt

SEQ ID NO: 72335 - DNA, 22 bp, Artificial Sequence
  Synthetic oligonucleotide; CTT chr11 5159773 5159794 5159790 5159795 +
gctaggctgtatgtgtccagga

SEQ ID NO: 72336 - DNA, 22 bp, Artificial Sequence
  Synthetic oligonucleotide; TTG chr11 5159774 5159795 5159791 5159796 +
ctaggctgtatgtgtccaggaa

SEQ ID NO: 72337 - DNA, 22 bp, Artificial Sequence
  Synthetic oligonucleotide; CTA chr11 5159777 5159798 5159794 5159799 +
ggctgtatgtgtccaggaattt

SEQ ID NO: 72338 - DNA, 22 bp, Artificial Sequence
  Synthetic oligonucleotide; CTG chr11 5159782 5159803 5159799 5159804 +
tatgtgtccaggaatttatcca

SEQ ID NO: 72339 - DNA, 22 bp, Artificial Sequence
  Synthetic oligonucleotide; TTT chr11 5159799 5159820 5159816 5159821 +
atccatttattctagattttcc

SEQ ID NO: 72340 - DNA, 22 bp, Artificial Sequence
  Synthetic oligonucleotide; TTA chr11 5159800 5159821 5159817 5159822 +
tccatttattctagattttcca

SEQ ID NO: 72341 - DNA, 22 bp, Artificial Sequence
  Synthetic oligonucleotide; TTT chr11 5159807 5159828 5159824 5159829 +
attctagattttccaatttgtt

SEQ ID NO: 72342 - DNA, 22 bp, Artificial Sequence
  Synthetic oligonucleotide; TTA chr11 5159808 5159829 5159825 5159830 +
ttctagattttccaatttgttg

SEQ ID NO: 72343 - DNA, 22 bp, Artificial Sequence
  Synthetic oligonucleotide; TTC chr11 5159811 5159832 5159828 5159833 +
tagattttccaatttgttggaa

SEQ ID NO: 72344 - DNA, 22 bp, Artificial Sequence
  Synthetic oligonucleotide; CTA chr11 5159813 5159834 5159830 5159835 +
gattttccaatttgttggaata

SEQ ID NO: 72345 - DNA, 22 bp, Artificial Sequence
  Synthetic oligonucleotide; TTT chr11 5159818 5159839 5159835 5159840 +
tccaatttgttggaatacagtt

SEQ ID NO: 72346 - DNA, 22 bp, Artificial Sequence
  Synthetic oligonucleotide; TTT chr11 5159819 5159840 5159836 5159841 +
ccaatttgttggaatacagttg

SEQ ID NO: 72347 - DNA, 22 bp, Artificial Sequence
  Synthetic oligonucleotide; TTC chr11 5159820 5159841 5159837 5159842 +
caatttgttggaatacagttgt

SEQ ID NO: 72348 - DNA, 22 bp, Artificial Sequence
  Synthetic oligonucleotide; TTT chr11 5159826 5159847 5159843 5159848 +
gttggaatacagttgttcataa

SEQ ID NO: 72349 - DNA, 22 bp, Artificial Sequence
  Synthetic oligonucleotide; TTG chr11 5159827 5159848 5159844 5159849 +
ttggaatacagttgttcataat

SEQ ID NO: 72350 - DNA, 22 bp, Artificial Sequence
  Synthetic oligonucleotide; TTG chr11 5159830 5159851 5159847 5159852 +
gaatacagttgttcataatagt

SEQ ID NO: 72351 - DNA, 22 bp, Artificial Sequence
  Synthetic oligonucleotide; TTG chr11 5159841 5159862 5159858 5159863 +
ttcataatagtatctaatgagt

SEQ ID NO: 72352 - DNA, 22 bp, Artificial Sequence
  Synthetic oligonucleotide; TTC chr11 5159844 5159865 5159861 5159866 +
ataatagtatctaatgagtctt

SEQ ID NO: 72353 - DNA, 22 bp, Artificial Sequence
  Synthetic oligonucleotide; CTA chr11 5159857 5159878 5159874 5159879 +
atgagtctttgtgttgctgagg

SEQ ID NO: 72354 - DNA, 22 bp, Artificial Sequence
  Synthetic oligonucleotide; CTT chr11 5159866 5159887 5159883 5159888 +
tgtgttgctgaggtctcaattg

SEQ ID NO: 72355 - DNA, 22 bp, Artificial Sequence
  Synthetic oligonucleotide; TTT chr11 5159867 5159888 5159884 5159889 +
gtgttgctgaggtctcaattgt

SEQ ID NO: 72356 - DNA, 22 bp, Artificial Sequence
  Synthetic oligonucleotide; TTG chr11 5159868 5159889 5159885 5159890 +
tgttgctgaggtctcaattgtt

SEQ ID NO: 72357 - DNA, 22 bp, Artificial Sequence
  Synthetic oligonucleotide; TTG chr11 5159873 5159894 5159890 5159895 +
ctgaggtctcaattgttatatc

SEQ ID NO: 72358 - DNA, 22 bp, Artificial Sequence
  Synthetic oligonucleotide; CTG chr11 5159876 5159897 5159893 5159898 +
aggtctcaattgttatatcctc

SEQ ID NO: 72359 - DNA, 22 bp, Artificial Sequence
  Synthetic oligonucleotide; CTC chr11 5159883 5159904 5159900 5159905 +
aattgttatatcctctttttca

SEQ ID NO: 72360 - DNA, 22 bp, Artificial Sequence
  Synthetic oligonucleotide; TTG chr11 5159888 5159909 5159905 5159910 +
ttatatcctctttttcattttc

SEQ ID NO: 72361 - DNA, 22 bp, Artificial Sequence
  Synthetic oligonucleotide; TTA chr11 5159891 5159912 5159908 5159913 +
tatcctctttttcattttctaa

SEQ ID NO: 72362 - DNA, 22 bp, Artificial Sequence
  Synthetic oligonucleotide; CTC chr11 5159898 5159919 5159915 5159920 +
tttttcattttctaattttatt

SEQ ID NO: 72363 - DNA, 22 bp, Artificial Sequence
  Synthetic oligonucleotide; CTT chr11 5159900 5159921 5159917 5159922 +
tttcattttctaattttatttg

SEQ ID NO: 72364 - DNA, 22 bp, Artificial Sequence
  Synthetic oligonucleotide; TTT chr11 5159901 5159922 5159918 5159923 +
ttcattttctaattttatttga

SEQ ID NO: 72365 - DNA, 22 bp, Artificial Sequence
  Synthetic oligonucleotide; TTT chr11 5159902 5159923 5159919 5159924 +
tcattttctaattttatttgac

SEQ ID NO: 72366 - DNA, 22 bp, Artificial Sequence
  Synthetic oligonucleotide; TTT chr11 5159903 5159924 5159920 5159925 +
cattttctaattttatttgact

SEQ ID NO: 72367 - DNA, 22 bp, Artificial Sequence
  Synthetic oligonucleotide; TTC chr11 5159904 5159925 5159921 5159926 +
attttctaattttatttgactc

SEQ ID NO: 72368 - DNA, 22 bp, Artificial Sequence
  Synthetic oligonucleotide; TTT chr11 5159908 5159929 5159925 5159930 +
tctaattttatttgactctttt

SEQ ID NO: 72369 - DNA, 22 bp, Artificial Sequence
  Synthetic oligonucleotide; TTT chr11 5159909 5159930 5159926 5159931 +
ctaattttatttgactcttttt

SEQ ID NO: 72370 - DNA, 22 bp, Artificial Sequence
  Synthetic oligonucleotide; TTC chr11 5159910 5159931 5159927 5159932 +
taattttatttgactctttttt

SEQ ID NO: 72371 - DNA, 22 bp, Artificial Sequence
  Synthetic oligonucleotide; CTA chr11 5159912 5159933 5159929 5159934 +
attttatttgactcttttttct

SEQ ID NO: 72372 - DNA, 22 bp, Artificial Sequence
  Synthetic oligonucleotide; TTT chr11 5159916 5159937 5159933 5159938 +
tatttgactcttttttcttaaa

SEQ ID NO: 72373 - DNA, 22 bp, Artificial Sequence
  Synthetic oligonucleotide; TTT chr11 5159917 5159938 5159934 5159939 +
atttgactcttttttcttaaag

SEQ ID NO: 72374 - DNA, 22 bp, Artificial Sequence
  Synthetic oligonucleotide; TTA chr11 5159918 5159939 5159935 5159940 +
tttgactcttttttcttaaagt

SEQ ID NO: 72375 - DNA, 22 bp, Artificial Sequence
  Synthetic oligonucleotide; TTT chr11 5159921 5159942 5159938 5159943 +
gactcttttttcttaaagtttt

SEQ ID NO: 72376 - DNA, 22 bp, Artificial Sequence
  Synthetic oligonucleotide; TTG chr11 5159922 5159943 5159939 5159944 +
actcttttttcttaaagttttg

SEQ ID NO: 72377 - DNA, 22 bp, Artificial Sequence
  Synthetic oligonucleotide; CTC chr11 5159926 5159947 5159943 5159948 +
ttttttcttaaagttttgttga

SEQ ID NO: 72378 - DNA, 22 bp, Artificial Sequence
  Synthetic oligonucleotide; CTT chr11 5159928 5159949 5159945 5159950 +
ttttcttaaagttttgttgatt

SEQ ID NO: 72379 - DNA, 22 bp, Artificial Sequence
  Synthetic oligonucleotide; TTT chr11 5159929 5159950 5159946 5159951 +
tttcttaaagttttgttgattt

SEQ ID NO: 72380 - DNA, 22 bp, Artificial Sequence
  Synthetic oligonucleotide; TTT chr11 5159930 5159951 5159947 5159952 +
ttcttaaagttttgttgatttt

SEQ ID NO: 72381 - DNA, 22 bp, Artificial Sequence
  Synthetic oligonucleotide; TTT chr11 5159931 5159952 5159948 5159953 +
tcttaaagttttgttgattttg

SEQ ID NO: 72382 - DNA, 22 bp, Artificial Sequence
  Synthetic oligonucleotide; TTT chr11 5159932 5159953 5159949 5159954 +
cttaaagttttgttgattttgt

SEQ ID NO: 72383 - DNA, 22 bp, Artificial Sequence
  Synthetic oligonucleotide; TTC chr11 5159933 5159954 5159950 5159955 +
ttaaagttttgttgattttgtt

SEQ ID NO: 72384 - DNA, 22 bp, Artificial Sequence
  Synthetic oligonucleotide; CTT chr11 5159935 5159956 5159952 5159957 +
aaagttttgttgattttgttta

SEQ ID NO: 72385 - DNA, 22 bp, Artificial Sequence
  Synthetic oligonucleotide; TTA chr11 5159936 5159957 5159953 5159958 +
aagttttgttgattttgtttac

SEQ ID NO: 72386 - DNA, 22 bp, Artificial Sequence
  Synthetic oligonucleotide; TTT chr11 5159942 5159963 5159959 5159964 +
tgttgattttgtttacctttcc

SEQ ID NO: 72387 - DNA, 22 bp, Artificial Sequence
  Synthetic oligonucleotide; TTT chr11 5159943 5159964 5159960 5159965 +
gttgattttgtttacctttcca

SEQ ID NO: 72388 - DNA, 22 bp, Artificial Sequence
  Synthetic oligonucleotide; TTG chr11 5159944 5159965 5159961 5159966 +
ttgattttgtttacctttccaa

SEQ ID NO: 72389 - DNA, 22 bp, Artificial Sequence
  Synthetic oligonucleotide; TTG chr11 5159947 5159968 5159964 5159969 +
attttgtttacctttccaagaa

SEQ ID NO: 72390 - DNA, 22 bp, Artificial Sequence
  Synthetic oligonucleotide; TTT chr11 5159951 5159972 5159968 5159973 +
tgtttacctttccaagaaagca

SEQ ID NO: 72391 - DNA, 22 bp, Artificial Sequence
  Synthetic oligonucleotide; TTT chr11 5159952 5159973 5159969 5159974 +
gtttacctttccaagaaagcaa

SEQ ID NO: 72392 - DNA, 22 bp, Artificial Sequence
  Synthetic oligonucleotide; TTG chr11 5159953 5159974 5159970 5159975 +
tttacctttccaagaaagcaac

SEQ ID NO: 72393 - DNA, 22 bp, Artificial Sequence
  Synthetic oligonucleotide; TTT chr11 5159956 5159977 5159973 5159978 +
acctttccaagaaagcaactgt

SEQ ID NO: 72394 - DNA, 22 bp, Artificial Sequence
  Synthetic oligonucleotide; TTA chr11 5159957 5159978 5159974 5159979 +
cctttccaagaaagcaactgtt

SEQ ID NO: 72395 - DNA, 22 bp, Artificial Sequence
  Synthetic oligonucleotide; CTT chr11 5159961 5159982 5159978 5159983 +
tccaagaaagcaactgtttgtt

SEQ ID NO: 72396 - DNA, 22 bp, Artificial Sequence
  Synthetic oligonucleotide; TTT chr11 5159962 5159983 5159979 5159984 +
ccaagaaagcaactgtttgttt

SEQ ID NO: 72397 - DNA, 22 bp, Artificial Sequence
  Synthetic oligonucleotide; TTC chr11 5159963 5159984 5159980 5159985 +
caagaaagcaactgtttgtttt

SEQ ID NO: 72398 - DNA, 22 bp, Artificial Sequence
  Synthetic oligonucleotide; CTG chr11 5159977 5159998 5159994 5159999 +
tttgtttttaatgattttctgt

SEQ ID NO: 72399 - DNA, 22 bp, Artificial Sequence
  Synthetic oligonucleotide; TTT chr11 5159980 5160001 5159997 5160002 +
gtttttaatgattttctgtatt

SEQ ID NO: 72400 - DNA, 22 bp, Artificial Sequence
  Synthetic oligonucleotide; TTG chr11 5159981 5160002 5159998 5160003 +
tttttaatgattttctgtattt

SEQ ID NO: 72401 - DNA, 22 bp, Artificial Sequence
  Synthetic oligonucleotide; TTT chr11 5159984 5160005 5160001 5160006 +
ttaatgattttctgtatttttt

SEQ ID NO: 72402 - DNA, 22 bp, Artificial Sequence
  Synthetic oligonucleotide; TTT chr11 5159985 5160006 5160002 5160007 +
taatgattttctgtattttttg

SEQ ID NO: 72403 - DNA, 22 bp, Artificial Sequence
  Synthetic oligonucleotide; TTT chr11 5159986 5160007 5160003 5160008 +
aatgattttctgtattttttgg

SEQ ID NO: 72404 - DNA, 22 bp, Artificial Sequence
  Synthetic oligonucleotide; TTA chr11 5159987 5160008 5160004 5160009 +
atgattttctgtattttttggt

SEQ ID NO: 72405 - DNA, 22 bp, Artificial Sequence
  Synthetic oligonucleotide; TTT chr11 5159994 5160015 5160011 5160016 +
tctgtattttttggtctcaatt

SEQ ID NO: 72406 - DNA, 22 bp, Artificial Sequence
  Synthetic oligonucleotide; TTT chr11 5159995 5160016 5160012 5160017 +
ctgtattttttggtctcaattt

SEQ ID NO: 72407 - DNA, 22 bp, Artificial Sequence
  Synthetic oligonucleotide; TTC chr11 5159996 5160017 5160013 5160018 +
tgtattttttggtctcaatttc

SEQ ID NO: 72408 - DNA, 22 bp, Artificial Sequence
  Synthetic oligonucleotide; CTG chr11 5159998 5160019 5160015 5160020 +
tattttttggtctcaatttcat

SEQ ID NO: 72409 - DNA, 22 bp, Artificial Sequence
  Synthetic oligonucleotide; TTT chr11 5160003 5160024 5160020 5160025 +
tttggtctcaatttcatttgtt

SEQ ID NO: 72410 - DNA, 22 bp, Artificial Sequence
  Synthetic oligonucleotide; TTT chr11 5160004 5160025 5160021 5160026 +
ttggtctcaatttcatttgttt

SEQ ID NO: 72411 - DNA, 22 bp, Artificial Sequence
  Synthetic oligonucleotide; TTT chr11 5160005 5160026 5160022 5160027 +
tggtctcaatttcatttgtttc

SEQ ID NO: 72412 - DNA, 22 bp, Artificial Sequence
  Synthetic oligonucleotide; TTT chr11 5160006 5160027 5160023 5160028 +
ggtctcaatttcatttgtttct

SEQ ID NO: 72413 - DNA, 22 bp, Artificial Sequence
  Synthetic oligonucleotide; TTG chr11 5160007 5160028 5160024 5160029 +
gtctcaatttcatttgtttctt

SEQ ID NO: 72414 - DNA, 22 bp, Artificial Sequence
  Synthetic oligonucleotide; CTC chr11 5160012 5160033 5160029 5160034 +
aatttcatttgtttcttctctg

SEQ ID NO: 72415 - DNA, 22 bp, Artificial Sequence
  Synthetic oligonucleotide; TTT chr11 5160017 5160038 5160034 5160039 +
catttgtttcttctctgatctt

SEQ ID NO: 72416 - DNA, 22 bp, Artificial Sequence
  Synthetic oligonucleotide; TTC chr11 5160018 5160039 5160035 5160040 +
atttgtttcttctctgatcttt

SEQ ID NO: 72417 - DNA, 22 bp, Artificial Sequence
  Synthetic oligonucleotide; TTT chr11 5160022 5160043 5160039 5160044 +
gtttcttctctgatctttctta

SEQ ID NO: 72418 - DNA, 22 bp, Artificial Sequence
  Synthetic oligonucleotide; TTG chr11 5160023 5160044 5160040 5160045 +
tttcttctctgatctttcttat

SEQ ID NO: 72419 - DNA, 22 bp, Artificial Sequence
  Synthetic oligonucleotide; TTT chr11 5160026 5160047 5160043 5160048 +
cttctctgatctttcttatttc

SEQ ID NO: 72420 - DNA, 22 bp, Artificial Sequence
  Synthetic oligonucleotide; TTC chr11 5160027 5160048 5160044 5160049 +
ttctctgatctttcttatttct

SEQ ID NO: 72421 - DNA, 22 bp, Artificial Sequence
  Synthetic oligonucleotide; CTT chr11 5160029 5160050 5160046 5160051 +
ctctgatctttcttatttctcc

SEQ ID NO: 72422 - DNA, 22 bp, Artificial Sequence
  Synthetic oligonucleotide; TTC chr11 5160030 5160051 5160047 5160052 +
tctgatctttcttatttctccc

SEQ ID NO: 72423 - DNA, 22 bp, Artificial Sequence
  Synthetic oligonucleotide; CTC chr11 5160032 5160053 5160049 5160054 +
tgatctttcttatttctcccct

SEQ ID NO: 72424 - DNA, 22 bp, Artificial Sequence
  Synthetic oligonucleotide; CTG chr11 5160034 5160055 5160051 5160056 +
atctttcttatttctccccttc

SEQ ID NO: 72425 - DNA, 22 bp, Artificial Sequence
  Synthetic oligonucleotide; CTT chr11 5160039 5160060 5160056 5160061 +
tcttatttctccccttctatta

SEQ ID NO: 72426 - DNA, 22 bp, Artificial Sequence
  Synthetic oligonucleotide; TTT chr11 5160040 5160061 5160057 5160062 +
cttatttctccccttctattaa

SEQ ID NO: 72427 - DNA, 22 bp, Artificial Sequence
  Synthetic oligonucleotide; TTC chr11 5160041 5160062 5160058 5160063 +
ttatttctccccttctattaat

SEQ ID NO: 72428 - DNA, 22 bp, Artificial Sequence
  Synthetic oligonucleotide; CTT chr11 5160043 5160064 5160060 5160065 +
atttctccccttctattaattt

SEQ ID NO: 72429 - DNA, 22 bp, Artificial Sequence
  Synthetic oligonucleotide; TTA chr11 5160044 5160065 5160061 5160066 +
tttctccccttctattaatttt

SEQ ID NO: 72430 - DNA, 22 bp, Artificial Sequence
  Synthetic oligonucleotide; TTT chr11 5160047 5160068 5160064 5160069 +
ctccccttctattaattttgca

SEQ ID NO: 72431 - DNA, 22 bp, Artificial Sequence
  Synthetic oligonucleotide; TTC chr11 5160048 5160069 5160065 5160070 +
tccccttctattaattttgcat

SEQ ID NO: 72432 - DNA, 22 bp, Artificial Sequence
  Synthetic oligonucleotide; CTC chr11 5160050 5160071 5160067 5160072 +
cccttctattaattttgcattt

SEQ ID NO: 72433 - DNA, 22 bp, Artificial Sequence
  Synthetic oligonucleotide; CTT chr11 5160055 5160076 5160072 5160077 +
ctattaattttgcatttggttt

SEQ ID NO: 72434 - DNA, 22 bp, Artificial Sequence
  Synthetic oligonucleotide; TTC chr11 5160056 5160077 5160073 5160078 +
tattaattttgcatttggtttg

SEQ ID NO: 72435 - DNA, 22 bp, Artificial Sequence
  Synthetic oligonucleotide; CTA chr11 5160058 5160079 5160075 5160080 +
ttaattttgcatttggtttgtt

SEQ ID NO: 72436 - DNA, 22 bp, Artificial Sequence
  Synthetic oligonucleotide; TTA chr11 5160061 5160082 5160078 5160083 +
attttgcatttggtttgttctt

SEQ ID NO: 72437 - DNA, 22 bp, Artificial Sequence
  Synthetic oligonucleotide; TTT chr11 5160065 5160086 5160082 5160087 +
tgcatttggtttgttcttgctt

SEQ ID NO: 72438 - DNA, 22 bp, Artificial Sequence
  Synthetic oligonucleotide; TTT chr11 5160066 5160087 5160083 5160088 +
gcatttggtttgttcttgcttt

SEQ ID NO: 72439 - DNA, 22 bp, Artificial Sequence
  Synthetic oligonucleotide; TTG chr11 5160067 5160088 5160084 5160089 +
catttggtttgttcttgctttc

SEQ ID NO: 72440 - DNA, 22 bp, Artificial Sequence
  Synthetic oligonucleotide; TTT chr11 5160072 5160093 5160089 5160094 +
ggtttgttcttgctttcctatt

SEQ ID NO: 72441 - DNA, 22 bp, Artificial Sequence
  Synthetic oligonucleotide; TTG chr11 5160073 5160094 5160090 5160095 +
gtttgttcttgctttcctattt

SEQ ID NO: 72442 - DNA, 22 bp, Artificial Sequence
  Synthetic oligonucleotide; TTT chr11 5160077 5160098 5160094 5160099 +
gttcttgctttcctatttcctt

SEQ ID NO: 72443 - DNA, 22 bp, Artificial Sequence
  Synthetic oligonucleotide; TTG chr11 5160078 5160099 5160095 5160100 +
ttcttgctttcctatttccttg

SEQ ID NO: 72444 - DNA, 22 bp, Artificial Sequence
  Synthetic oligonucleotide; TTC chr11 5160081 5160102 5160098 5160103 +
ttgctttcctatttccttgagg

SEQ ID NO: 72445 - DNA, 22 bp, Artificial Sequence
  Synthetic oligonucleotide; CTT chr11 5160083 5160104 5160100 5160105 +
gctttcctatttccttgaggta

SEQ ID NO: 72446 - DNA, 22 bp, Artificial Sequence
  Synthetic oligonucleotide; TTG chr11 5160084 5160105 5160101 5160106 +
ctttcctatttccttgaggtac

SEQ ID NO: 72447 - DNA, 22 bp, Artificial Sequence
  Synthetic oligonucleotide; CTT chr11 5160087 5160108 5160104 5160109 +
tcctatttccttgaggtacatt

SEQ ID NO: 72448 - DNA, 22 bp, Artificial Sequence
  Synthetic oligonucleotide; TTT chr11 5160088 5160109 5160105 5160110 +
cctatttccttgaggtacattg

SEQ ID NO: 72449 - DNA, 22 bp, Artificial Sequence
  Synthetic oligonucleotide; TTC chr11 5160089 5160110 5160106 5160111 +
ctatttccttgaggtacattgt

SEQ ID NO: 72450 - DNA, 22 bp, Artificial Sequence
  Synthetic oligonucleotide; CTA chr11 5160092 5160113 5160109 5160114 +
tttccttgaggtacattgtttg

SEQ ID NO: 72451 - DNA, 22 bp, Artificial Sequence
  Synthetic oligonucleotide; TTT chr11 5160095 5160116 5160112 5160117 +
ccttgaggtacattgtttggtt

SEQ ID NO: 72452 - DNA, 22 bp, Artificial Sequence
  Synthetic oligonucleotide; TTC chr11 5160096 5160117 5160113 5160118 +
cttgaggtacattgtttggttg

SEQ ID NO: 72453 - DNA, 22 bp, Artificial Sequence
  Synthetic oligonucleotide; CTT chr11 5160099 5160120 5160116 5160121 +
gaggtacattgtttggttgctt

SEQ ID NO: 72454 - DNA, 22 bp, Artificial Sequence
  Synthetic oligonucleotide; TTG chr11 5160100 5160121 5160117 5160122 +
aggtacattgtttggttgctta

SEQ ID NO: 72455 - DNA, 22 bp, Artificial Sequence
  Synthetic oligonucleotide; TTG chr11 5160110 5160131 5160127 5160132 +
tttggttgcttagttgaagcct

SEQ ID NO: 72456 - DNA, 22 bp, Artificial Sequence
  Synthetic oligonucleotide; TTT chr11 5160113 5160134 5160130 5160135 +
ggttgcttagttgaagcctttc

SEQ ID NO: 72457 - DNA, 22 bp, Artificial Sequence
  Synthetic oligonucleotide; TTG chr11 5160114 5160135 5160131 5160136 +
gttgcttagttgaagcctttct

SEQ ID NO: 72458 - DNA, 22 bp, Artificial Sequence
  Synthetic oligonucleotide; TTG chr11 5160118 5160139 5160135 5160140 +
cttagttgaagcctttctactt

SEQ ID NO: 72459 - DNA, 22 bp, Artificial Sequence
  Synthetic oligonucleotide; CTT chr11 5160121 5160142 5160138 5160143 +
agttgaagcctttctacttttt

SEQ ID NO: 72460 - DNA, 22 bp, Artificial Sequence
  Synthetic oligonucleotide; TTA chr11 5160122 5160143 5160139 5160144 +
gttgaagcctttctactttttt

SEQ ID NO: 72461 - DNA, 22 bp, Artificial Sequence
  Synthetic oligonucleotide; TTG chr11 5160126 5160147 5160143 5160148 +
aagcctttctacttttttggat

SEQ ID NO: 72462 - DNA, 22 bp, Artificial Sequence
  Synthetic oligonucleotide; CTT chr11 5160133 5160154 5160150 5160155 +
tctacttttttggatataggtg

SEQ ID NO: 72463 - DNA, 22 bp, Artificial Sequence
  Synthetic oligonucleotide; TTT chr11 5160134 5160155 5160151 5160156 +
ctacttttttggatataggtgt

SEQ ID NO: 72464 - DNA, 22 bp, Artificial Sequence
  Synthetic oligonucleotide; TTC chr11 5160135 5160156 5160152 5160157 +
tacttttttggatataggtgtt

SEQ ID NO: 72465 - DNA, 22 bp, Artificial Sequence
  Synthetic oligonucleotide; CTA chr11 5160137 5160158 5160154 5160159 +
cttttttggatataggtgttta

SEQ ID NO: 72466 - DNA, 22 bp, Artificial Sequence
  Synthetic oligonucleotide; CTT chr11 5160140 5160161 5160157 5160162 +
ttttggatataggtgtttattg

SEQ ID NO: 72467 - DNA, 22 bp, Artificial Sequence
  Synthetic oligonucleotide; TTT chr11 5160141 5160162 5160158 5160163 +
tttggatataggtgtttattgc

SEQ ID NO: 72468 - DNA, 22 bp, Artificial Sequence
  Synthetic oligonucleotide; TTT chr11 5160142 5160163 5160159 5160164 +
ttggatataggtgtttattgct

SEQ ID NO: 72469 - DNA, 22 bp, Artificial Sequence
  Synthetic oligonucleotide; TTT chr11 5160143 5160164 5160160 5160165 +
tggatataggtgtttattgcta

SEQ ID NO: 72470 - DNA, 22 bp, Artificial Sequence
  Synthetic oligonucleotide; TTT chr11 5160144 5160165 5160161 5160166 +
ggatataggtgtttattgctat

SEQ ID NO: 72471 - DNA, 22 bp, Artificial Sequence
  Synthetic oligonucleotide; TTG chr11 5160145 5160166 5160162 5160167 +
gatataggtgtttattgctatg

SEQ ID NO: 72472 - DNA, 22 bp, Artificial Sequence
  Synthetic oligonucleotide; TTT chr11 5160158 5160179 5160175 5160180 +
attgctatgaacttccctctaa

SEQ ID NO: 72473 - DNA, 22 bp, Artificial Sequence
  Synthetic oligonucleotide; TTA chr11 5160159 5160180 5160176 5160181 +
ttgctatgaacttccctctaag

SEQ ID NO: 72474 - DNA, 22 bp, Artificial Sequence
  Synthetic oligonucleotide; TTG chr11 5160162 5160183 5160179 5160184 +
ctatgaacttccctctaagtac

SEQ ID NO: 72475 - DNA, 22 bp, Artificial Sequence
  Synthetic oligonucleotide; CTA chr11 5160165 5160186 5160182 5160187 +
tgaacttccctctaagtactgc

SEQ ID NO: 72476 - DNA, 22 bp, Artificial Sequence
  Synthetic oligonucleotide; CTT chr11 5160172 5160193 5160189 5160194 +
ccctctaagtactgcttttgcc

SEQ ID NO: 72477 - DNA, 22 bp, Artificial Sequence
  Synthetic oligonucleotide; TTC chr11 5160173 5160194 5160190 5160195 +
cctctaagtactgcttttgcca

SEQ ID NO: 72478 - DNA, 22 bp, Artificial Sequence
  Synthetic oligonucleotide; CTC chr11 5160177 5160198 5160194 5160199 +
taagtactgcttttgccatatc

SEQ ID NO: 72479 - DNA, 22 bp, Artificial Sequence
  Synthetic oligonucleotide; CTA chr11 5160179 5160200 5160196 5160201 +
agtactgcttttgccatatcct

SEQ ID NO: 72480 - DNA, 22 bp, Artificial Sequence
  Synthetic oligonucleotide; CTG chr11 5160186 5160207 5160203 5160208 +
cttttgccatatcctgtaggtt

SEQ ID NO: 72481 - DNA, 22 bp, Artificial Sequence
  Synthetic oligonucleotide; CTT chr11 5160189 5160210 5160206 5160211 +
ttgccatatcctgtaggttttg

SEQ ID NO: 72482 - DNA, 22 bp, Artificial Sequence
  Synthetic oligonucleotide; TTT chr11 5160190 5160211 5160207 5160212 +
tgccatatcctgtaggttttgg

SEQ ID NO: 72483 - DNA, 22 bp, Artificial Sequence
  Synthetic oligonucleotide; TTT chr11 5160191 5160212 5160208 5160213 +
gccatatcctgtaggttttggt

SEQ ID NO: 72484 - DNA, 22 bp, Artificial Sequence
  Synthetic oligonucleotide; TTG chr11 5160192 5160213 5160209 5160214 +
ccatatcctgtaggttttggta

SEQ ID NO: 72485 - DNA, 22 bp, Artificial Sequence
  Synthetic oligonucleotide; CTG chr11 5160202 5160223 5160219 5160224 +
taggttttggtatgttgtattt

SEQ ID NO: 72486 - DNA, 22 bp, Artificial Sequence
  Synthetic oligonucleotide; TTT chr11 5160209 5160230 5160226 5160231 +
tggtatgttgtatttccatttt

SEQ ID NO: 72487 - DNA, 22 bp, Artificial Sequence
  Synthetic oligonucleotide; TTT chr11 5160210 5160231 5160227 5160232 +
ggtatgttgtatttccattttc

SEQ ID NO: 72488 - DNA, 22 bp, Artificial Sequence
  Synthetic oligonucleotide; TTG chr11 5160211 5160232 5160228 5160233 +
gtatgttgtatttccattttca

SEQ ID NO: 72489 - DNA, 22 bp, Artificial Sequence
  Synthetic oligonucleotide; TTG chr11 5160219 5160240 5160236 5160241 +
tatttccattttcacttgtttc

SEQ ID NO: 72490 - DNA, 22 bp, Artificial Sequence
  Synthetic oligonucleotide; TTT chr11 5160224 5160245 5160241 5160246 +
ccattttcacttgtttcaagaa

SEQ ID NO: 72491 - DNA, 22 bp, Artificial Sequence
  Synthetic oligonucleotide; TTC chr11 5160225 5160246 5160242 5160247 +
cattttcacttgtttcaagaag

SEQ ID NO: 72492 - DNA, 22 bp, Artificial Sequence
  Synthetic oligonucleotide; TTT chr11 5160230 5160251 5160247 5160252 +
tcacttgtttcaagaagtttta

SEQ ID NO: 72493 - DNA, 22 bp, Artificial Sequence
  Synthetic oligonucleotide; TTT chr11 5160231 5160252 5160248 5160253 +
cacttgtttcaagaagttttaa

SEQ ID NO: 72494 - DNA, 22 bp, Artificial Sequence
  Synthetic oligonucleotide; TTC chr11 5160232 5160253 5160249 5160254 +
acttgtttcaagaagttttaaa

SEQ ID NO: 72495 - DNA, 22 bp, Artificial Sequence
  Synthetic oligonucleotide; CTT chr11 5160236 5160257 5160253 5160258 +
gtttcaagaagttttaaaattt

SEQ ID NO: 72496 - DNA, 22 bp, Artificial Sequence
  Synthetic oligonucleotide; TTG chr11 5160237 5160258 5160254 5160259 +
tttcaagaagttttaaaatttc

SEQ ID NO: 72497 - DNA, 22 bp, Artificial Sequence
  Synthetic oligonucleotide; TTT chr11 5160240 5160261 5160257 5160262 +
caagaagttttaaaatttcctt

SEQ ID NO: 72498 - DNA, 22 bp, Artificial Sequence
  Synthetic oligonucleotide; TTC chr11 5160241 5160262 5160258 5160263 +
aagaagttttaaaatttccttc

SEQ ID NO: 72499 - DNA, 22 bp, Artificial Sequence
  Synthetic oligonucleotide; TTT chr11 5160250 5160271 5160267 5160272 +
taaaatttccttcttaatttct

SEQ ID NO: 72500 - DNA, 22 bp, Artificial Sequence
  Synthetic oligonucleotide; TTT chr11 5160251 5160272 5160268 5160273 +
aaaatttccttcttaatttctt

SEQ ID NO: 72501 - DNA, 22 bp, Artificial Sequence
  Synthetic oligonucleotide; TTA chr11 5160252 5160273 5160269 5160274 +
aaatttccttcttaatttcttt

SEQ ID NO: 72502 - DNA, 22 bp, Artificial Sequence
  Synthetic oligonucleotide; TTT chr11 5160258 5160279 5160275 5160280 +
ccttcttaatttctttagtgac

SEQ ID NO: 72503 - DNA, 22 bp, Artificial Sequence
  Synthetic oligonucleotide; TTC chr11 5160259 5160280 5160276 5160281 +
cttcttaatttctttagtgact

SEQ ID NO: 72504 - DNA, 22 bp, Artificial Sequence
  Synthetic oligonucleotide; CTT chr11 5160262 5160283 5160279 5160284 +
cttaatttctttagtgactcat

SEQ ID NO: 72505 - DNA, 22 bp, Artificial Sequence
  Synthetic oligonucleotide; TTC chr11 5160263 5160284 5160280 5160285 +
ttaatttctttagtgactcatt

SEQ ID NO: 72506 - DNA, 22 bp, Artificial Sequence
  Synthetic oligonucleotide; CTT chr11 5160265 5160286 5160282 5160287 +
aatttctttagtgactcattgg

SEQ ID NO: 72507 - DNA, 22 bp, Artificial Sequence
  Synthetic oligonucleotide; TTA chr11 5160266 5160287 5160283 5160288 +
atttctttagtgactcattggt

SEQ ID NO: 72508 - DNA, 22 bp, Artificial Sequence
  Synthetic oligonucleotide; TTT chr11 5160270 5160291 5160287 5160292 +
ctttagtgactcattggttatt

SEQ ID NO: 72509 - DNA, 22 bp, Artificial Sequence
  Synthetic oligonucleotide; TTC chr11 5160271 5160292 5160288 5160293 +
tttagtgactcattggttattc

SEQ ID NO: 72510 - DNA, 22 bp, Artificial Sequence
  Synthetic oligonucleotide; CTT chr11 5160273 5160294 5160290 5160295 +
tagtgactcattggttattcag

SEQ ID NO: 72511 - DNA, 22 bp, Artificial Sequence
  Synthetic oligonucleotide; TTT chr11 5160274 5160295 5160291 5160296 +
agtgactcattggttattcagt

SEQ ID NO: 72512 - DNA, 22 bp, Artificial Sequence
  Synthetic oligonucleotide; TTA chr11 5160275 5160296 5160292 5160297 +
gtgactcattggttattcagtt

SEQ ID NO: 72513 - DNA, 22 bp, Artificial Sequence
  Synthetic oligonucleotide; CTC chr11 5160282 5160303 5160299 5160304 +
attggttattcagtttcatgcg

SEQ ID NO: 72514 - DNA, 22 bp, Artificial Sequence
  Synthetic oligonucleotide; TTG chr11 5160286 5160307 5160303 5160308 +
gttattcagtttcatgcgcatc

SEQ ID NO: 72515 - DNA, 22 bp, Artificial Sequence
  Synthetic oligonucleotide; TTA chr11 5160290 5160311 5160307 5160312 +
ttcagtttcatgcgcatccctg

SEQ ID NO: 72516 - DNA, 22 bp, Artificial Sequence
  Synthetic oligonucleotide; TTC chr11 5160293 5160314 5160310 5160315 +
agtttcatgcgcatccctgtga

SEQ ID NO: 72517 - DNA, 22 bp, Artificial Sequence
  Synthetic oligonucleotide; TTT chr11 5160298 5160319 5160315 5160320 +
catgcgcatccctgtgaggaga

SEQ ID NO: 72518 - DNA, 22 bp, Artificial Sequence
  Synthetic oligonucleotide; TTC chr11 5160299 5160320 5160316 5160321 +
atgcgcatccctgtgaggagac

SEQ ID NO: 72519 - DNA, 22 bp, Artificial Sequence
  Synthetic oligonucleotide; CTG chr11 5160312 5160333 5160329 5160334 +
tgaggagactaccaaacaggct

SEQ ID NO: 72520 - DNA, 22 bp, Artificial Sequence
  Synthetic oligonucleotide; CTA chr11 5160323 5160344 5160340 5160345 +
ccaaacaggctttgtgtgagca

SEQ ID NO: 72521 - DNA, 22 bp, Artificial Sequence
  Synthetic oligonucleotide; CTT chr11 5160335 5160356 5160352 5160357 +
tgtgtgagcaataaagcttttt

SEQ ID NO: 72522 - DNA, 22 bp, Artificial Sequence
  Synthetic oligonucleotide; TTT chr11 5160336 5160357 5160353 5160358 +
gtgtgagcaataaagcttttta

SEQ ID NO: 72523 - DNA, 22 bp, Artificial Sequence
  Synthetic oligonucleotide; TTG chr11 5160337 5160358 5160354 5160359 +
tgtgagcaataaagctttttat

SEQ ID NO: 72524 - DNA, 22 bp, Artificial Sequence
  Synthetic oligonucleotide; CTT chr11 5160354 5160375 5160371 5160376 +
tttatcacctgggtgcaggcgg

SEQ ID NO: 72525 - DNA, 22 bp, Artificial Sequence
  Synthetic oligonucleotide; TTT chr11 5160355 5160376 5160372 5160377 +
ttatcacctgggtgcaggcggg

SEQ ID NO: 72526 - DNA, 22 bp, Artificial Sequence
  Synthetic oligonucleotide; TTT chr11 5160356 5160377 5160373 5160378 +
tatcacctgggtgcaggcgggc

SEQ ID NO: 72527 - DNA, 22 bp, Artificial Sequence
  Synthetic oligonucleotide; TTT chr11 5160357 5160378 5160374 5160379 +
atcacctgggtgcaggcgggct

SEQ ID NO: 72528 - DNA, 22 bp, Artificial Sequence
  Synthetic oligonucleotide; TTA chr11 5160358 5160379 5160375 5160380 +
tcacctgggtgcaggcgggctg

SEQ ID NO: 72529 - DNA, 22 bp, Artificial Sequence
  Synthetic oligonucleotide; CTG chr11 5160365 5160386 5160382 5160387 +
ggtgcaggcgggctgagtccga

SEQ ID NO: 72530 - DNA, 22 bp, Artificial Sequence
  Synthetic oligonucleotide; CTG chr11 5160380 5160401 5160397 5160402 +
agtccgaaaagagagtcagcaa

SEQ ID NO: 72531 - DNA, 22 bp, Artificial Sequence
  Synthetic oligonucleotide; CTG chr11 5160423 5160444 5160440 5160445 +
ttttataagatttgggtaggta

SEQ ID NO: 72532 - DNA, 22 bp, Artificial Sequence
  Synthetic oligonucleotide; TTT chr11 5160426 5160447 5160443 5160448 +
tataagatttgggtaggtaaag

SEQ ID NO: 72533 - DNA, 22 bp, Artificial Sequence
  Synthetic oligonucleotide; TTT chr11 5160427 5160448 5160444 5160449 +
ataagatttgggtaggtaaagg

SEQ ID NO: 72534 - DNA, 22 bp, Artificial Sequence
  Synthetic oligonucleotide; TTA chr11 5160428 5160449 5160445 5160450 +
taagatttgggtaggtaaagga

SEQ ID NO: 72535 - DNA, 22 bp, Artificial Sequence
  Synthetic oligonucleotide; TTT chr11 5160436 5160457 5160453 5160458 +
gggtaggtaaaggaaaattaca

SEQ ID NO: 72536 - DNA, 22 bp, Artificial Sequence
  Synthetic oligonucleotide; TTG chr11 5160437 5160458 5160454 5160459 +
ggtaggtaaaggaaaattacag

SEQ ID NO: 72537 - DNA, 22 bp, Artificial Sequence
  Synthetic oligonucleotide; TTA chr11 5160456 5160477 5160473 5160478 +
cagtcaaaggggggttgttctc

SEQ ID NO: 72538 - DNA, 22 bp, Artificial Sequence
  Synthetic oligonucleotide; TTG chr11 5160473 5160494 5160490 5160495 +
ttctctggcgggcaggagtggg

SEQ ID NO: 72539 - DNA, 22 bp, Artificial Sequence
  Synthetic oligonucleotide; TTC chr11 5160476 5160497 5160493 5160498 +
tctggcgggcaggagtgggggg

SEQ ID NO: 72540 - DNA, 22 bp, Artificial Sequence
  Synthetic oligonucleotide; CTC chr11 5160478 5160499 5160495 5160500 +
tggcgggcaggagtggggggtc

SEQ ID NO: 72541 - DNA, 22 bp, Artificial Sequence
  Synthetic oligonucleotide; CTG chr11 5160480 5160501 5160497 5160502 +
gcgggcaggagtggggggtcac

SEQ ID NO: 72542 - DNA, 22 bp, Artificial Sequence
  Synthetic oligonucleotide; CTC chr11 5160511 5160532 5160528 5160533 +
agtaggggagcttttgagccag

SEQ ID NO: 72543 - DNA, 22 bp, Artificial Sequence
  Synthetic oligonucleotide; CTT chr11 5160524 5160545 5160541 5160546 +
ttgagccaggatgagccaggag

SEQ ID NO: 72544 - DNA, 22 bp, Artificial Sequence
  Synthetic oligonucleotide; TTT chr11 5160525 5160546 5160542 5160547 +
tgagccaggatgagccaggaga

SEQ ID NO: 72545 - DNA, 22 bp, Artificial Sequence
  Synthetic oligonucleotide; TTT chr11 5160526 5160547 5160543 5160548 +
gagccaggatgagccaggagaa

SEQ ID NO: 72546 - DNA, 22 bp, Artificial Sequence
  Synthetic oligonucleotide; TTG chr11 5160527 5160548 5160544 5160549 +
agccaggatgagccaggagaag

SEQ ID NO: 72547 - DNA, 22 bp, Artificial Sequence
  Synthetic oligonucleotide; CTT chr11 5160554 5160575 5160571 5160576 +
tcacaagacaatgtcatcagtt

SEQ ID NO: 72548 - DNA, 22 bp, Artificial Sequence
  Synthetic oligonucleotide; TTT chr11 5160555 5160576 5160572 5160577 +
cacaagacaatgtcatcagtta

SEQ ID NO: 72549 - DNA, 22 bp, Artificial Sequence
  Synthetic oligonucleotide; TTC chr11 5160556 5160577 5160573 5160578 +
acaagacaatgtcatcagttaa

SEQ ID NO: 72550 - DNA, 22 bp, Artificial Sequence
  Synthetic oligonucleotide; TTA chr11 5160577 5160598 5160594 5160599 +
aggcaggaacaggccattttca

SEQ ID NO: 72551 - DNA, 22 bp, Artificial Sequence
  Synthetic oligonucleotide; TTT chr11 5160596 5160617 5160613 5160618 +
tcacttcttttgtggtggaatg

SEQ ID NO: 72552 - DNA, 22 bp, Artificial Sequence
  Synthetic oligonucleotide; TTT chr11 5160597 5160618 5160614 5160619 +
cacttcttttgtggtggaatgt

SEQ ID NO: 72553 - DNA, 22 bp, Artificial Sequence
  Synthetic oligonucleotide; TTC chr11 5160598 5160619 5160615 5160620 +
acttcttttgtggtggaatgtc

SEQ ID NO: 72554 - DNA, 22 bp, Artificial Sequence
  Synthetic oligonucleotide; CTT chr11 5160602 5160623 5160619 5160624 +
cttttgtggtggaatgtcatca

SEQ ID NO: 72555 - DNA, 22 bp, Artificial Sequence
  Synthetic oligonucleotide; TTC chr11 5160603 5160624 5160620 5160625 +
ttttgtggtggaatgtcatcag

SEQ ID NO: 72556 - DNA, 22 bp, Artificial Sequence
  Synthetic oligonucleotide; CTT chr11 5160605 5160626 5160622 5160627 +
ttgtggtggaatgtcatcagtt

SEQ ID NO: 72557 - DNA, 22 bp, Artificial Sequence
  Synthetic oligonucleotide; TTT chr11 5160606 5160627 5160623 5160628 +
tgtggtggaatgtcatcagtta

SEQ ID NO: 72558 - DNA, 22 bp, Artificial Sequence
  Synthetic oligonucleotide; TTT chr11 5160607 5160628 5160624 5160629 +
gtggtggaatgtcatcagttaa

SEQ ID NO: 72559 - DNA, 22 bp, Artificial Sequence
  Synthetic oligonucleotide; TTG chr11 5160608 5160629 5160625 5160630 +
tggtggaatgtcatcagttaag

SEQ ID NO: 72560 - DNA, 22 bp, Artificial Sequence
  Synthetic oligonucleotide; TTA chr11 5160628 5160649 5160645 5160650 +
aggcaggaactggccatctgta

SEQ ID NO: 72561 - DNA, 22 bp, Artificial Sequence
  Synthetic oligonucleotide; CTG chr11 5160640 5160661 5160657 5160662 +
gccatctgtatgtgtacctgca

SEQ ID NO: 72562 - DNA, 22 bp, Artificial Sequence
  Synthetic oligonucleotide; CTG chr11 5160648 5160669 5160665 5160670 +
tatgtgtacctgcaggtcacag

SEQ ID NO: 72563 - DNA, 22 bp, Artificial Sequence
  Synthetic oligonucleotide; CTG chr11 5160660 5160681 5160677 5160682 +
caggtcacaggggacatgatgg

SEQ ID NO: 72564 - DNA, 22 bp, Artificial Sequence
  Synthetic oligonucleotide; CTT chr11 5160685 5160706 5160702 5160707 +
agcttgggctcagaggcctgac

SEQ ID NO: 72565 - DNA, 22 bp, Artificial Sequence
  Synthetic oligonucleotide; TTA chr11 5160686 5160707 5160703 5160708 +
gcttgggctcagaggcctgaca

SEQ ID NO: 72566 - DNA, 22 bp, Artificial Sequence
  Synthetic oligonucleotide; CTT chr11 5160690 5160711 5160707 5160712 +
gggctcagaggcctgacattcc

SEQ ID NO: 72567 - DNA, 22 bp, Artificial Sequence
  Synthetic oligonucleotide; TTG chr11 5160691 5160712 5160708 5160713 +
ggctcagaggcctgacattcct

SEQ ID NO: 72568 - DNA, 22 bp, Artificial Sequence
  Synthetic oligonucleotide; CTC chr11 5160696 5160717 5160713 5160718 +
agaggcctgacattcctgtctt

SEQ ID NO: 72569 - DNA, 22 bp, Artificial Sequence
  Synthetic oligonucleotide; CTG chr11 5160705 5160726 5160722 5160727 +
acattcctgtcttcttatatta

SEQ ID NO: 72570 - DNA, 22 bp, Artificial Sequence
  Synthetic oligonucleotide; TTC chr11 5160711 5160732 5160728 5160733 +
ctgtcttcttatattaataaga

SEQ ID NO: 72571 - DNA, 22 bp, Artificial Sequence
  Synthetic oligonucleotide; CTG chr11 5160714 5160735 5160731 5160736 +
tcttcttatattaataagaaaa

SEQ ID NO: 72572 - DNA, 22 bp, Artificial Sequence
  Synthetic oligonucleotide; CTT chr11 5160718 5160739 5160735 5160740 +
cttatattaataagaaaaataa

SEQ ID NO: 72573 - DNA, 22 bp, Artificial Sequence
  Synthetic oligonucleotide; TTC chr11 5160719 5160740 5160736 5160741 +
ttatattaataagaaaaataaa

SEQ ID NO: 72574 - DNA, 22 bp, Artificial Sequence
  Synthetic oligonucleotide; CTT chr11 5160721 5160742 5160738 5160743 +
atattaataagaaaaataaaac

SEQ ID NO: 72575 - DNA, 22 bp, Artificial Sequence
  Synthetic oligonucleotide; TTA chr11 5160722 5160743 5160739 5160744 +
tattaataagaaaaataaaaca

SEQ ID NO: 72576 - DNA, 22 bp, Artificial Sequence
  Synthetic oligonucleotide; TTA chr11 5160727 5160748 5160744 5160749 +
ataagaaaaataaaacataata

SEQ ID NO: 72577 - DNA, 22 bp, Artificial Sequence
  Synthetic oligonucleotide; TTG chr11 5160755 5160776 5160772 5160777 +
aagtgttggggcagcgaaaatt

SEQ ID NO: 72578 - DNA, 22 bp, Artificial Sequence
  Synthetic oligonucleotide; TTG chr11 5160763 5160784 5160780 5160785 +
gggcagcgaaaattttggggga

SEQ ID NO: 72579 - DNA, 22 bp, Artificial Sequence
  Synthetic oligonucleotide; TTT chr11 5160778 5160799 5160795 5160800 +
tgggggatggtatggagagata

SEQ ID NO: 72580 - DNA, 22 bp, Artificial Sequence
  Synthetic oligonucleotide; TTT chr11 5160779 5160800 5160796 5160801 +
gggggatggtatggagagataa

SEQ ID NO: 72581 - DNA, 22 bp, Artificial Sequence
  Synthetic oligonucleotide; TTG chr11 5160780 5160801 5160797 5160802 +
ggggatggtatggagagataat

SEQ ID NO: 72582 - DNA, 22 bp, Artificial Sequence
  Synthetic oligonucleotide; TTT chr11 5160813 5160834 5160830 5160835 +
ctcagggctgcttcgagcggga

SEQ ID NO: 72583 - DNA, 22 bp, Artificial Sequence
  Synthetic oligonucleotide; TTC chr11 5160814 5160835 5160831 5160836 +
tcagggctgcttcgagcgggat

SEQ ID NO: 72584 - DNA, 22 bp, Artificial Sequence
  Synthetic oligonucleotide; CTC chr11 5160816 5160837 5160833 5160838 +
agggctgcttcgagcgggatta

SEQ ID NO: 72585 - DNA, 22 bp, Artificial Sequence
  Synthetic oligonucleotide; CTG chr11 5160823 5160844 5160840 5160845 +
cttcgagcgggattaggggcgg

SEQ ID NO: 72586 - DNA, 22 bp, Artificial Sequence
  Synthetic oligonucleotide; CTT chr11 5160826 5160847 5160843 5160848 +
cgagcgggattaggggcggcgt

SEQ ID NO: 72587 - DNA, 22 bp, Artificial Sequence
  Synthetic oligonucleotide; TTC chr11 5160827 5160848 5160844 5160849 +
gagcgggattaggggcggcgtg

SEQ ID NO: 72588 - DNA, 22 bp, Artificial Sequence
  Synthetic oligonucleotide; TTA chr11 5160838 5160859 5160855 5160860 +
ggggcggcgtgggaacctagag

SEQ ID NO: 72589 - DNA, 22 bp, Artificial Sequence
  Synthetic oligonucleotide; CTA chr11 5160857 5160878 5160874 5160879 +
gagtgggagagattaagctgaa

SEQ ID NO: 72590 - DNA, 22 bp, Artificial Sequence
  Synthetic oligonucleotide; TTA chr11 5160872 5160893 5160889 5160894 +
agctgaaggaagattttgtggt

SEQ ID NO: 72591 - DNA, 22 bp, Artificial Sequence
  Synthetic oligonucleotide; CTG chr11 5160877 5160898 5160894 5160899 +
aaggaagattttgtggtaaggg

SEQ ID NO: 72592 - DNA, 22 bp, Artificial Sequence
  Synthetic oligonucleotide; TTT chr11 5160888 5160909 5160905 5160910 +
tgtggtaaggggtgatattgtg

SEQ ID NO: 72593 - DNA, 22 bp, Artificial Sequence
  Synthetic oligonucleotide; TTT chr11 5160889 5160910 5160906 5160911 +
gtggtaaggggtgatattgtgg

SEQ ID NO: 72594 - DNA, 22 bp, Artificial Sequence
  Synthetic oligonucleotide; TTG chr11 5160890 5160911 5160907 5160912 +
tggtaaggggtgatattgtggg

SEQ ID NO: 72595 - DNA, 22 bp, Artificial Sequence
  Synthetic oligonucleotide; TTG chr11 5160908 5160929 5160925 5160930 +
tggggttgttagaagaaacatt

SEQ ID NO: 72596 - DNA, 22 bp, Artificial Sequence
  Synthetic oligonucleotide; TTG chr11 5160916 5160937 5160933 5160938 +
ttagaagaaacatttgtcatgt

SEQ ID NO: 72597 - DNA, 22 bp, Artificial Sequence
  Synthetic oligonucleotide; TTA chr11 5160919 5160940 5160936 5160941 +
gaagaaacatttgtcatgtaga

SEQ ID NO: 72598 - DNA, 22 bp, Artificial Sequence
  Synthetic oligonucleotide; TTT chr11 5160931 5160952 5160948 5160953 +
gtcatgtagaattattggtgat

SEQ ID NO: 72599 - DNA, 22 bp, Artificial Sequence
  Synthetic oligonucleotide; TTG chr11 5160932 5160953 5160949 5160954 +
tcatgtagaattattggtgatg

SEQ ID NO: 72600 - DNA, 22 bp, Artificial Sequence
  Synthetic oligonucleotide; TTA chr11 5160945 5160966 5160962 5160967 +
ttggtgatggcctggatacggt

SEQ ID NO: 72601 - DNA, 22 bp, Artificial Sequence
  Synthetic oligonucleotide; TTG chr11 5160948 5160969 5160965 5160970 +
gtgatggcctggatacggtttt

SEQ ID NO: 72602 - DNA, 22 bp, Artificial Sequence
  Synthetic oligonucleotide; CTG chr11 5160959 5160980 5160976 5160981 +
gatacggttttgtatggattga

SEQ ID NO: 72603 - DNA, 22 bp, Artificial Sequence
  Synthetic oligonucleotide; TTT chr11 5160969 5160990 5160986 5160991 +
tgtatggattgaaaaaccaaat

SEQ ID NO: 72604 - DNA, 22 bp, Artificial Sequence
  Synthetic oligonucleotide; TTT chr11 5160970 5160991 5160987 5160992 +
gtatggattgaaaaaccaaatg

SEQ ID NO: 72605 - DNA, 22 bp, Artificial Sequence
  Synthetic oligonucleotide; TTG chr11 5160971 5160992 5160988 5160993 +
tatggattgaaaaaccaaatgg

SEQ ID NO: 72606 - DNA, 22 bp, Artificial Sequence
  Synthetic oligonucleotide; TTG chr11 5160980 5161001 5160997 5161002 +
aaaaaccaaatggaataagaga

SEQ ID NO: 72607 - DNA, 22 bp, Artificial Sequence
  Synthetic oligonucleotide; TTA chr11 5161021 5161042 5161038 5161043 +
aaggactaagaagtgggaggac

SEQ ID NO: 72608 - DNA, 22 bp, Artificial Sequence
  Synthetic oligonucleotide; CTA chr11 5161029 5161050 5161046 5161051 +
agaagtgggaggacctaggaca

SEQ ID NO: 72609 - DNA, 22 bp, Artificial Sequence
  Synthetic oligonucleotide; CTA chr11 5161046 5161067 5161063 5161068 +
ggacatctgattaaagagtgcc

SEQ ID NO: 72610 - DNA, 22 bp, Artificial Sequence
  Synthetic oligonucleotide; CTG chr11 5161055 5161076 5161072 5161077 +
attaaagagtgcctaaggagat

SEQ ID NO: 72611 - DNA, 22 bp, Artificial Sequence
  Synthetic oligonucleotide; TTA chr11 5161059 5161080 5161076 5161081 +
aagagtgcctaaggagattcaa

SEQ ID NO: 72612 - DNA, 22 bp, Artificial Sequence
  Synthetic oligonucleotide; CTA chr11 5161070 5161091 5161087 5161092 +
aggagattcaacatagtcctgc

SEQ ID NO: 72613 - DNA, 22 bp, Artificial Sequence
  Synthetic oligonucleotide; TTC chr11 5161079 5161100 5161096 5161101 +
aacatagtcctgccagcaaaga

SEQ ID NO: 72614 - DNA, 22 bp, Artificial Sequence
  Synthetic oligonucleotide; CTG chr11 5161091 5161112 5161108 5161113 +
ccagcaaagattatttatttac

SEQ ID NO: 72615 - DNA, 22 bp, Artificial Sequence
  Synthetic oligonucleotide; TTA chr11 5161104 5161125 5161121 5161126 +
tttatttacttcaagagttaag

SEQ ID NO: 72616 - DNA, 22 bp, Artificial Sequence
  Synthetic oligonucleotide; TTT chr11 5161107 5161128 5161124 5161129 +
atttacttcaagagttaagagt

SEQ ID NO: 72617 - DNA, 22 bp, Artificial Sequence
  Synthetic oligonucleotide; TTA chr11 5161108 5161129 5161125 5161130 +
tttacttcaagagttaagagtg

SEQ ID NO: 72618 - DNA, 22 bp, Artificial Sequence
  Synthetic oligonucleotide; TTT chr11 5161111 5161132 5161128 5161133 +
acttcaagagttaagagtggca

SEQ ID NO: 72619 - DNA, 22 bp, Artificial Sequence
  Synthetic oligonucleotide; TTA chr11 5161112 5161133 5161129 5161134 +
cttcaagagttaagagtggcag

SEQ ID NO: 72620 - DNA, 22 bp, Artificial Sequence
  Synthetic oligonucleotide; CTT chr11 5161115 5161136 5161132 5161137 +
caagagttaagagtggcagttt

SEQ ID NO: 72621 - DNA, 22 bp, Artificial Sequence
  Synthetic oligonucleotide; TTC chr11 5161116 5161137 5161133 5161138 +
aagagttaagagtggcagtttg

SEQ ID NO: 72622 - DNA, 22 bp, Artificial Sequence
  Synthetic oligonucleotide; TTA chr11 5161124 5161145 5161141 5161146 +
agagtggcagtttggggatagc

SEQ ID NO: 72623 - DNA, 22 bp, Artificial Sequence
  Synthetic oligonucleotide; TTT chr11 5161137 5161158 5161154 5161159 +
ggggatagcaccaggagatatc

SEQ ID NO: 72624 - DNA, 22 bp, Artificial Sequence
  Synthetic oligonucleotide; TTG chr11 5161138 5161159 5161155 5161160 +
gggatagcaccaggagatatca

SEQ ID NO: 72625 - DNA, 22 bp, Artificial Sequence
  Synthetic oligonucleotide; CTG chr11 5161164 5161185 5161181 5161186 +
tgatggcttggaaaaacagtgt

SEQ ID NO: 72626 - DNA, 22 bp, Artificial Sequence
  Synthetic oligonucleotide; CTT chr11 5161173 5161194 5161190 5161195 +
ggaaaaacagtgtaaaccggca

SEQ ID NO: 72627 - DNA, 22 bp, Artificial Sequence
  Synthetic oligonucleotide; TTG chr11 5161174 5161195 5161191 5161196 +
gaaaaacagtgtaaaccggcag

SEQ ID NO: 72628 - DNA, 22 bp, Artificial Sequence
  Synthetic oligonucleotide; TTG chr11 5161229 5161250 5161246 5161251 +
agaatggtgaataggagtatga

SEQ ID NO: 72629 - DNA, 22 bp, Artificial Sequence
  Synthetic oligonucleotide; CTA chr11 5161254 5161275 5161271 5161276 +
gacagaagatagcagggatgac

SEQ ID NO: 72630 - DNA, 22 bp, Artificial Sequence
  Synthetic oligonucleotide; TTT chr11 5161282 5161303 5161299 5161304 +
ttttggggcacattctaagttg

SEQ ID NO: 72631 - DNA, 22 bp, Artificial Sequence
  Synthetic oligonucleotide; TTT chr11 5161283 5161304 5161300 5161305 +
tttggggcacattctaagttgg

SEQ ID NO: 72632 - DNA, 22 bp, Artificial Sequence
  Synthetic oligonucleotide; TTT chr11 5161284 5161305 5161301 5161306 +
ttggggcacattctaagttggt

SEQ ID NO: 72633 - DNA, 22 bp, Artificial Sequence
  Synthetic oligonucleotide; TTT chr11 5161285 5161306 5161302 5161307 +
tggggcacattctaagttggtc

SEQ ID NO: 72634 - DNA, 22 bp, Artificial Sequence
  Synthetic oligonucleotide; TTT chr11 5161286 5161307 5161303 5161308 +
ggggcacattctaagttggtct

SEQ ID NO: 72635 - DNA, 22 bp, Artificial Sequence
  Synthetic oligonucleotide; TTG chr11 5161287 5161308 5161304 5161309 +
gggcacattctaagttggtctg

SEQ ID NO: 72636 - DNA, 22 bp, Artificial Sequence
  Synthetic oligonucleotide; TTC chr11 5161297 5161318 5161314 5161319 +
taagttggtctggtgtctggaa

SEQ ID NO: 72637 - DNA, 22 bp, Artificial Sequence
  Synthetic oligonucleotide; CTA chr11 5161299 5161320 5161316 5161321 +
agttggtctggtgtctggaatt

SEQ ID NO: 72638 - DNA, 22 bp, Artificial Sequence
  Synthetic oligonucleotide; TTG chr11 5161304 5161325 5161321 5161326 +
gtctggtgtctggaattagact

SEQ ID NO: 72639 - DNA, 22 bp, Artificial Sequence
  Synthetic oligonucleotide; CTG chr11 5161309 5161330 5161326 5161331 +
gtgtctggaattagactggggc

SEQ ID NO: 72640 - DNA, 22 bp, Artificial Sequence
  Synthetic oligonucleotide; CTG chr11 5161316 5161337 5161333 5161338 +
gaattagactggggcctaataa

SEQ ID NO: 72641 - DNA, 22 bp, Artificial Sequence
  Synthetic oligonucleotide; TTA chr11 5161322 5161343 5161339 5161344 +
gactggggcctaataaaaaggc

SEQ ID NO: 72642 - DNA, 22 bp, Artificial Sequence
  Synthetic oligonucleotide; CTG chr11 5161327 5161348 5161344 5161349 +
gggcctaataaaaaggcaaatc

SEQ ID NO: 72643 - DNA, 22 bp, Artificial Sequence
  Synthetic oligonucleotide; CTA chr11 5161334 5161355 5161351 5161356 +
ataaaaaggcaaatctatacag

SEQ ID NO: 72644 - DNA, 22 bp, Artificial Sequence
  Synthetic oligonucleotide; CTA chr11 5161351 5161372 5161368 5161373 +
tacaggagctcaaatgggctgt

SEQ ID NO: 72645 - DNA, 22 bp, Artificial Sequence
  Synthetic oligonucleotide; CTC chr11 5161362 5161383 5161379 5161384 +
aaatgggctgtaccctgtagca

SEQ ID NO: 72646 - DNA, 22 bp, Artificial Sequence
  Synthetic oligonucleotide; CTG chr11 5161372 5161393 5161389 5161394 +
taccctgtagcattctgaggac

SEQ ID NO: 72647 - DNA, 22 bp, Artificial Sequence
  Synthetic oligonucleotide; CTG chr11 5161379 5161400 5161396 5161401 +
tagcattctgaggacaggtctg

SEQ ID NO: 72648 - DNA, 22 bp, Artificial Sequence
  Synthetic oligonucleotide; TTC chr11 5161387 5161408 5161404 5161409 +
tgaggacaggtctgacttctga

SEQ ID NO: 72649 - DNA, 22 bp, Artificial Sequence
  Synthetic oligonucleotide; CTG chr11 5161389 5161410 5161406 5161411 +
aggacaggtctgacttctgaga

SEQ ID NO: 72650 - DNA, 22 bp, Artificial Sequence
  Synthetic oligonucleotide; CTG chr11 5161401 5161422 5161418 5161423 +
acttctgagaaagaaaagtggt

SEQ ID NO: 72651 - DNA, 22 bp, Artificial Sequence
  Synthetic oligonucleotide; CTT chr11 5161405 5161426 5161422 5161427 +
ctgagaaagaaaagtggtaaaa

SEQ ID NO: 72652 - DNA, 22 bp, Artificial Sequence
  Synthetic oligonucleotide; TTC chr11 5161406 5161427 5161423 5161428 +
tgagaaagaaaagtggtaaaag

SEQ ID NO: 72653 - DNA, 22 bp, Artificial Sequence
  Synthetic oligonucleotide; CTG chr11 5161408 5161429 5161425 5161430 +
agaaagaaaagtggtaaaagta

SEQ ID NO: 72654 - DNA, 22 bp, Artificial Sequence
  Synthetic oligonucleotide; TTG chr11 5161433 5161454 5161450 5161455 +
tccagtcctttttaagttggtg

SEQ ID NO: 72655 - DNA, 22 bp, Artificial Sequence
  Synthetic oligonucleotide; CTT chr11 5161443 5161464 5161460 5161465 +
tttaagttggtggctgagcttg

SEQ ID NO: 72656 - DNA, 22 bp, Artificial Sequence
  Synthetic oligonucleotide; TTT chr11 5161444 5161465 5161461 5161466 +
ttaagttggtggctgagcttgg

SEQ ID NO: 72657 - DNA, 22 bp, Artificial Sequence
  Synthetic oligonucleotide; TTT chr11 5161445 5161466 5161462 5161467 +
taagttggtggctgagcttggt

SEQ ID NO: 72658 - DNA, 22 bp, Artificial Sequence
  Synthetic oligonucleotide; TTT chr11 5161446 5161467 5161463 5161468 +
aagttggtggctgagcttggtg

SEQ ID NO: 72659 - DNA, 22 bp, Artificial Sequence
  Synthetic oligonucleotide; TTA chr11 5161447 5161468 5161464 5161469 +
agttggtggctgagcttggtga

SEQ ID NO: 72660 - DNA, 22 bp, Artificial Sequence
  Synthetic oligonucleotide; TTG chr11 5161452 5161473 5161469 5161474 +
gtggctgagcttggtgaggtgt

SEQ ID NO: 72661 - DNA, 22 bp, Artificial Sequence
  Synthetic oligonucleotide; CTG chr11 5161459 5161480 5161476 5161481 +
agcttggtgaggtgtgttttta

SEQ ID NO: 72662 - DNA, 22 bp, Artificial Sequence
  Synthetic oligonucleotide; CTT chr11 5161464 5161485 5161481 5161486 +
ggtgaggtgtgtttttaaaaga

SEQ ID NO: 72663 - DNA, 22 bp, Artificial Sequence
  Synthetic oligonucleotide; TTG chr11 5161465 5161486 5161482 5161487 +
gtgaggtgtgtttttaaaagac

SEQ ID NO: 72664 - DNA, 22 bp, Artificial Sequence
  Synthetic oligonucleotide; TTT chr11 5161478 5161499 5161495 5161500 +
ttaaaagacatttagtccgttc

SEQ ID NO: 72665 - DNA, 22 bp, Artificial Sequence
  Synthetic oligonucleotide; TTT chr11 5161479 5161500 5161496 5161501 +
taaaagacatttagtccgttct

SEQ ID NO: 72666 - DNA, 22 bp, Artificial Sequence
  Synthetic oligonucleotide; TTT chr11 5161480 5161501 5161497 5161502 +
aaaagacatttagtccgttcta

SEQ ID NO: 72667 - DNA, 22 bp, Artificial Sequence
  Synthetic oligonucleotide; TTA chr11 5161481 5161502 5161498 5161503 +
aaagacatttagtccgttctac

SEQ ID NO: 72668 - DNA, 22 bp, Artificial Sequence
  Synthetic oligonucleotide; TTT chr11 5161491 5161512 5161508 5161513 +
agtccgttctacttttcctgaa

SEQ ID NO: 72669 - DNA, 22 bp, Artificial Sequence
  Synthetic oligonucleotide; TTA chr11 5161492 5161513 5161509 5161514 +
gtccgttctacttttcctgaag

SEQ ID NO: 72670 - DNA, 22 bp, Artificial Sequence
  Synthetic oligonucleotide; TTC chr11 5161500 5161521 5161517 5161522 +
tacttttcctgaagacggagga

SEQ ID NO: 72671 - DNA, 22 bp, Artificial Sequence
  Synthetic oligonucleotide; CTA chr11 5161502 5161523 5161519 5161524 +
cttttcctgaagacggaggacc

SEQ ID NO: 72672 - DNA, 22 bp, Artificial Sequence
  Synthetic oligonucleotide; CTT chr11 5161505 5161526 5161522 5161527 +
ttcctgaagacggaggaccgta

SEQ ID NO: 72673 - DNA, 22 bp, Artificial Sequence
  Synthetic oligonucleotide; TTT chr11 5161506 5161527 5161523 5161528 +
tcctgaagacggaggaccgtaa

SEQ ID NO: 72674 - DNA, 22 bp, Artificial Sequence
  Synthetic oligonucleotide; TTT chr11 5161507 5161528 5161524 5161529 +
cctgaagacggaggaccgtaag

SEQ ID NO: 72675 - DNA, 22 bp, Artificial Sequence
  Synthetic oligonucleotide; TTC chr11 5161508 5161529 5161525 5161530 +
ctgaagacggaggaccgtaagg

SEQ ID NO: 72676 - DNA, 22 bp, Artificial Sequence
  Synthetic oligonucleotide; CTG chr11 5161511 5161532 5161528 5161533 +
aagacggaggaccgtaagggat

SEQ ID NO: 72677 - DNA, 22 bp, Artificial Sequence
  Synthetic oligonucleotide; TTT chr11 5161543 5161564 5161560 5161565 +
tactgaatactaagagcctgaa

SEQ ID NO: 72678 - DNA, 22 bp, Artificial Sequence
  Synthetic oligonucleotide; TTT chr11 5161544 5161565 5161561 5161566 +
actgaatactaagagcctgaaa

SEQ ID NO: 72679 - DNA, 22 bp, Artificial Sequence
  Synthetic oligonucleotide; TTA chr11 5161545 5161566 5161562 5161567 +
ctgaatactaagagcctgaaaa

SEQ ID NO: 72680 - DNA, 22 bp, Artificial Sequence
  Synthetic oligonucleotide; CTG chr11 5161548 5161569 5161565 5161570 +
aatactaagagcctgaaaaact

SEQ ID NO: 72681 - DNA, 22 bp, Artificial Sequence
  Synthetic oligonucleotide; CTA chr11 5161555 5161576 5161572 5161577 +
agagcctgaaaaactgcttggc

SEQ ID NO: 72682 - DNA, 22 bp, Artificial Sequence
  Synthetic oligonucleotide; CTG chr11 5161563 5161584 5161580 5161585 +
aaaaactgcttggctgatttga

SEQ ID NO: 72683 - DNA, 22 bp, Artificial Sequence
  Synthetic oligonucleotide; CTG chr11 5161571 5161592 5161588 5161593 +
cttggctgatttgactaataaa

SEQ ID NO: 72684 - DNA, 22 bp, Artificial Sequence
  Synthetic oligonucleotide; CTT chr11 5161574 5161595 5161591 5161596 +
ggctgatttgactaataaaggc

SEQ ID NO: 72685 - DNA, 22 bp, Artificial Sequence
  Synthetic oligonucleotide; TTG chr11 5161575 5161596 5161592 5161597 +
gctgatttgactaataaaggct

SEQ ID NO: 72686 - DNA, 22 bp, Artificial Sequence
  Synthetic oligonucleotide; CTG chr11 5161579 5161600 5161596 5161601 +
atttgactaataaaggctggtc

SEQ ID NO: 72687 - DNA, 22 bp, Artificial Sequence
  Synthetic oligonucleotide; TTT chr11 5161583 5161604 5161600 5161605 +
gactaataaaggctggtctgtt

SEQ ID NO: 72688 - DNA, 22 bp, Artificial Sequence
  Synthetic oligonucleotide; TTG chr11 5161584 5161605 5161601 5161606 +
actaataaaggctggtctgtta

SEQ ID NO: 72689 - DNA, 22 bp, Artificial Sequence
  Synthetic oligonucleotide; CTA chr11 5161588 5161609 5161605 5161610 +
ataaaggctggtctgttatcag

SEQ ID NO: 72690 - DNA, 22 bp, Artificial Sequence
  Synthetic oligonucleotide; CTG chr11 5161598 5161619 5161615 5161620 +
gtctgttatcagactgtataga

SEQ ID NO: 72691 - DNA, 22 bp, Artificial Sequence
  Synthetic oligonucleotide; CTG chr11 5161603 5161624 5161620 5161625 +
ttatcagactgtatagaggtag

SEQ ID NO: 72692 - DNA, 22 bp, Artificial Sequence
  Synthetic oligonucleotide; TTA chr11 5161606 5161627 5161623 5161628 +
tcagactgtatagaggtaggaa

SEQ ID NO: 72693 - DNA, 22 bp, Artificial Sequence
  Synthetic oligonucleotide; CTG chr11 5161614 5161635 5161631 5161636 +
tatagaggtaggaaggctaaac

SEQ ID NO: 72694 - DNA, 22 bp, Artificial Sequence
  Synthetic oligonucleotide; CTA chr11 5161633 5161654 5161650 5161655 +
aactgaggaattatgtctgaca

SEQ ID NO: 72695 - DNA, 22 bp, Artificial Sequence
  Synthetic oligonucleotide; CTG chr11 5161638 5161659 5161655 5161660 +
aggaattatgtctgacagaagg

SEQ ID NO: 72696 - DNA, 22 bp, Artificial Sequence
  Synthetic oligonucleotide; TTA chr11 5161646 5161667 5161663 5161668 +
tgtctgacagaagggaagaaat

SEQ ID NO: 72697 - DNA, 22 bp, Artificial Sequence
  Synthetic oligonucleotide; CTG chr11 5161652 5161673 5161669 5161674 +
acagaagggaagaaatgactgc

SEQ ID NO: 72698 - DNA, 22 bp, Artificial Sequence
  Synthetic oligonucleotide; CTG chr11 5161673 5161694 5161690 5161695 +
cggtggccttctcagaccctgt

SEQ ID NO: 72699 - DNA, 22 bp, Artificial Sequence
  Synthetic oligonucleotide; CTT chr11 5161683 5161704 5161700 5161705 +
ctcagaccctgtaggaaagacc

SEQ ID NO: 72700 - DNA, 22 bp, Artificial Sequence
  Synthetic oligonucleotide; TTC chr11 5161684 5161705 5161701 5161706 +
tcagaccctgtaggaaagacct

SEQ ID NO: 72701 - DNA, 22 bp, Artificial Sequence
  Synthetic oligonucleotide; CTC chr11 5161686 5161707 5161703 5161708 +
agaccctgtaggaaagacctct

SEQ ID NO: 72702 - DNA, 22 bp, Artificial Sequence
  Synthetic oligonucleotide; CTG chr11 5161694 5161715 5161711 5161716 +
taggaaagacctctacttatcc

SEQ ID NO: 72703 - DNA, 22 bp, Artificial Sequence
  Synthetic oligonucleotide; CTC chr11 5161707 5161728 5161724 5161729 +
tacttatccagtgaaagtgtct

SEQ ID NO: 72704 - DNA, 22 bp, Artificial Sequence
  Synthetic oligonucleotide; CTA chr11 5161709 5161730 5161726 5161731 +
cttatccagtgaaagtgtctac

SEQ ID NO: 72705 - DNA, 22 bp, Artificial Sequence
  Synthetic oligonucleotide; CTT chr11 5161712 5161733 5161729 5161734 +
atccagtgaaagtgtctaccta

SEQ ID NO: 72706 - DNA, 22 bp, Artificial Sequence
  Synthetic oligonucleotide; TTA chr11 5161713 5161734 5161730 5161735 +
tccagtgaaagtgtctacctag

SEQ ID NO: 72707 - DNA, 22 bp, Artificial Sequence
  Synthetic oligonucleotide; CTA chr11 5161730 5161751 5161747 5161752 +
cctagactaagaggtattttag

SEQ ID NO: 72708 - DNA, 22 bp, Artificial Sequence
  Synthetic oligonucleotide; CTA chr11 5161734 5161755 5161751 5161756 +
gactaagaggtattttagttat

SEQ ID NO: 72709 - DNA, 22 bp, Artificial Sequence
  Synthetic oligonucleotide; CTA chr11 5161739 5161760 5161756 5161761 +
agaggtattttagttatctgac

SEQ ID NO: 72710 - DNA, 22 bp, Artificial Sequence
  Synthetic oligonucleotide; TTT chr11 5161749 5161770 5161766 5161771 +
tagttatctgactcagggcatg

SEQ ID NO: 72711 - DNA, 22 bp, Artificial Sequence
  Synthetic oligonucleotide; TTT chr11 5161750 5161771 5161767 5161772 +
agttatctgactcagggcatgt

SEQ ID NO: 72712 - DNA, 22 bp, Artificial Sequence
  Synthetic oligonucleotide; TTA chr11 5161751 5161772 5161768 5161773 +
gttatctgactcagggcatgtt

SEQ ID NO: 72713 - DNA, 22 bp, Artificial Sequence
  Synthetic oligonucleotide; TTA chr11 5161755 5161776 5161772 5161777 +
tctgactcagggcatgttgagt

SEQ ID NO: 72714 - DNA, 22 bp, Artificial Sequence
  Synthetic oligonucleotide; CTG chr11 5161759 5161780 5161776 5161781 +
actcagggcatgttgagtaaat

SEQ ID NO: 72715 - DNA, 22 bp, Artificial Sequence
  Synthetic oligonucleotide; CTC chr11 5161763 5161784 5161780 5161785 +
agggcatgttgagtaaatctaa

SEQ ID NO: 72716 - DNA, 22 bp, Artificial Sequence
  Synthetic oligonucleotide; TTG chr11 5161774 5161795 5161791 5161796 +
agtaaatctaatttgccagtcc

SEQ ID NO: 72717 - DNA, 22 bp, Artificial Sequence
  Synthetic oligonucleotide; CTA chr11 5161784 5161805 5161801 5161806 +
atttgccagtcctgggtggggg

SEQ ID NO: 72718 - DNA, 22 bp, Artificial Sequence
  Synthetic oligonucleotide; TTT chr11 5161788 5161809 5161805 5161810 +
gccagtcctgggtgggggcaaa

SEQ ID NO: 72719 - DNA, 22 bp, Artificial Sequence
  Synthetic oligonucleotide; TTG chr11 5161789 5161810 5161806 5161811 +
ccagtcctgggtgggggcaaat

SEQ ID NO: 72720 - DNA, 22 bp, Artificial Sequence
  Synthetic oligonucleotide; CTG chr11 5161798 5161819 5161815 5161820 +
ggtgggggcaaatcctcgagct

SEQ ID NO: 72721 - DNA, 22 bp, Artificial Sequence
  Synthetic oligonucleotide; CTC chr11 5161815 5161836 5161832 5161837 +
gagcttgatgtgtagggaaggg

SEQ ID NO: 72722 - DNA, 22 bp, Artificial Sequence
  Synthetic oligonucleotide; CTT chr11 5161821 5161842 5161838 5161843 +
gatgtgtagggaagggaggggg

SEQ ID NO: 72723 - DNA, 22 bp, Artificial Sequence
  Synthetic oligonucleotide; TTG chr11 5161822 5161843 5161839 5161844 +
atgtgtagggaagggagggggc

SEQ ID NO: 72724 - DNA, 22 bp, Artificial Sequence
  Synthetic oligonucleotide; CTG chr11 5161847 5161868 5161864 5161869 +
aataatccctgaggagtagcag

SEQ ID NO: 72725 - DNA, 22 bp, Artificial Sequence
  Synthetic oligonucleotide; CTG chr11 5161858 5161879 5161875 5161880 +
aggagtagcagaatagcagatg

SEQ ID NO: 72726 - DNA, 22 bp, Artificial Sequence
  Synthetic oligonucleotide; CTG chr11 5161888 5161909 5161905 5161910 +
agaagttatttctttgaggata

SEQ ID NO: 72727 - DNA, 22 bp, Artificial Sequence
  Synthetic oligonucleotide; TTA chr11 5161896 5161917 5161913 5161918 +
tttctttgaggatagatttcta

SEQ ID NO: 72728 - DNA, 22 bp, Artificial Sequence
  Synthetic oligonucleotide; TTT chr11 5161899 5161920 5161916 5161921 +
ctttgaggatagatttctacga

SEQ ID NO: 72729 - DNA, 22 bp, Artificial Sequence
  Synthetic oligonucleotide; TTC chr11 5161900 5161921 5161917 5161922 +
tttgaggatagatttctacgat

SEQ ID NO: 72730 - DNA, 22 bp, Artificial Sequence
  Synthetic oligonucleotide; CTT chr11 5161902 5161923 5161919 5161924 +
tgaggatagatttctacgatgg

SEQ ID NO: 72731 - DNA, 22 bp, Artificial Sequence
  Synthetic oligonucleotide; TTT chr11 5161903 5161924 5161920 5161925 +
gaggatagatttctacgatgga

SEQ ID NO: 72732 - DNA, 22 bp, Artificial Sequence
  Synthetic oligonucleotide; TTG chr11 5161904 5161925 5161921 5161926 +
aggatagatttctacgatggaa

SEQ ID NO: 72733 - DNA, 22 bp, Artificial Sequence
  Synthetic oligonucleotide; TTT chr11 5161915 5161936 5161932 5161937 +
ctacgatggaaaggaaatgaga

SEQ ID NO: 72734 - DNA, 22 bp, Artificial Sequence
  Synthetic oligonucleotide; TTC chr11 5161916 5161937 5161933 5161938 +
tacgatggaaaggaaatgagag

SEQ ID NO: 72735 - DNA, 22 bp, Artificial Sequence
  Synthetic oligonucleotide; CTA chr11 5161918 5161939 5161935 5161940 +
cgatggaaaggaaatgagaggt

SEQ ID NO: 72736 - DNA, 22 bp, Artificial Sequence
  Synthetic oligonucleotide; TTC chr11 5161942 5161963 5161959 5161964 +
gaagaggcaggctagtggtttg

SEQ ID NO: 72737 - DNA, 22 bp, Artificial Sequence
  Synthetic oligonucleotide; CTA chr11 5161956 5161977 5161973 5161978 +
gtggtttgtactatagcatagc

SEQ ID NO: 72738 - DNA, 22 bp, Artificial Sequence
  Synthetic oligonucleotide; TTT chr11 5161963 5161984 5161980 5161985 +
gtactatagcatagcctgcctt

SEQ ID NO: 72739 - DNA, 22 bp, Artificial Sequence
  Synthetic oligonucleotide; TTG chr11 5161964 5161985 5161981 5161986 +
tactatagcatagcctgccttt

SEQ ID NO: 72740 - DNA, 22 bp, Artificial Sequence
  Synthetic oligonucleotide; CTA chr11 5161969 5161990 5161986 5161991 +
tagcatagcctgcctttgctgg

SEQ ID NO: 72741 - DNA, 22 bp, Artificial Sequence
  Synthetic oligonucleotide; CTG chr11 5161981 5162002 5161998 5162003 +
cctttgctggtgtgtggctatt

SEQ ID NO: 72742 - DNA, 22 bp, Artificial Sequence
  Synthetic oligonucleotide; CTT chr11 5161985 5162006 5162002 5162007 +
tgctggtgtgtggctattaggc

SEQ ID NO: 72743 - DNA, 22 bp, Artificial Sequence
  Synthetic oligonucleotide; TTT chr11 5161986 5162007 5162003 5162008 +
gctggtgtgtggctattaggcc

SEQ ID NO: 72744 - DNA, 22 bp, Artificial Sequence
  Synthetic oligonucleotide; TTG chr11 5161987 5162008 5162004 5162009 +
ctggtgtgtggctattaggcct

SEQ ID NO: 72745 - DNA, 22 bp, Artificial Sequence
  Synthetic oligonucleotide; CTG chr11 5161990 5162011 5162007 5162012 +
gtgtgtggctattaggcctggt

SEQ ID NO: 72746 - DNA, 22 bp, Artificial Sequence
  Synthetic oligonucleotide; CTA chr11 5162001 5162022 5162018 5162023 +
ttaggcctggtggaacggccat

SEQ ID NO: 72747 - DNA, 22 bp, Artificial Sequence
  Synthetic oligonucleotide; TTA chr11 5162004 5162025 5162021 5162026 +
ggcctggtggaacggccatcaa

SEQ ID NO: 72748 - DNA, 22 bp, Artificial Sequence
  Synthetic oligonucleotide; CTG chr11 5162010 5162031 5162027 5162032 +
gtggaacggccatcaataaatc

SEQ ID NO: 72749 - DNA, 22 bp, Artificial Sequence
  Synthetic oligonucleotide; TTG chr11 5162168 5162189 5162185 5162190 +
aagtccgggccaggaccaatgg

SEQ ID NO: 72750 - DNA, 22 bp, Artificial Sequence
  Synthetic oligonucleotide; TTG chr11 5162196 5162217 5162213 5162218 +
tgggacttaacaaagagtgagt

SEQ ID NO: 72751 - DNA, 22 bp, Artificial Sequence
  Synthetic oligonucleotide; CTT chr11 5162204 5162225 5162221 5162226 +
aacaaagagtgagtacagctga

SEQ ID NO: 72752 - DNA, 22 bp, Artificial Sequence
  Synthetic oligonucleotide; TTA chr11 5162205 5162226 5162222 5162227 +
acaaagagtgagtacagctgaa

SEQ ID NO: 72753 - DNA, 22 bp, Artificial Sequence
  Synthetic oligonucleotide; CTG chr11 5162225 5162246 5162242 5162247 +
aaggagccggggatcagaaagt

SEQ ID NO: 72754 - DNA, 22 bp, Artificial Sequence
  Synthetic oligonucleotide; TTT chr11 5162280 5162301 5162297 5162302 +
tagaagttatgagaaatgtgaa

SEQ ID NO: 72755 - DNA, 22 bp, Artificial Sequence
  Synthetic oligonucleotide; TTT chr11 5162281 5162302 5162298 5162303 +
agaagttatgagaaatgtgaag

SEQ ID NO: 72756 - DNA, 22 bp, Artificial Sequence
  Synthetic oligonucleotide; TTA chr11 5162282 5162303 5162299 5162304 +
gaagttatgagaaatgtgaaga

SEQ ID NO: 72757 - DNA, 22 bp, Artificial Sequence
  Synthetic oligonucleotide; TTA chr11 5162289 5162310 5162306 5162311 +
tgagaaatgtgaagagtgagct

SEQ ID NO: 72758 - DNA, 22 bp, Artificial Sequence
  Synthetic oligonucleotide; CTA chr11 5162312 5162333 5162329 5162334 +
agcatagtttgtgatttttagg

SEQ ID NO: 72759 - DNA, 22 bp, Artificial Sequence
  Synthetic oligonucleotide; TTT chr11 5162322 5162343 5162339 5162344 +
gtgatttttagggcctctaaaa

SEQ ID NO: 72760 - DNA, 22 bp, Artificial Sequence
  Synthetic oligonucleotide; TTG chr11 5162323 5162344 5162340 5162345 +
tgatttttagggcctctaaaag

SEQ ID NO: 72761 - DNA, 22 bp, Artificial Sequence
  Synthetic oligonucleotide; TTT chr11 5162329 5162350 5162346 5162351 +
ttagggcctctaaaagtattaa

SEQ ID NO: 72762 - DNA, 22 bp, Artificial Sequence
  Synthetic oligonucleotide; TTT chr11 5162330 5162351 5162347 5162352 +
tagggcctctaaaagtattaaa

SEQ ID NO: 72763 - DNA, 22 bp, Artificial Sequence
  Synthetic oligonucleotide; TTT chr11 5162331 5162352 5162348 5162353 +
agggcctctaaaagtattaaag

SEQ ID NO: 72764 - DNA, 22 bp, Artificial Sequence
  Synthetic oligonucleotide; TTA chr11 5162332 5162353 5162349 5162354 +
gggcctctaaaagtattaaagc

SEQ ID NO: 72765 - DNA, 22 bp, Artificial Sequence
  Synthetic oligonucleotide; CTC chr11 5162339 5162360 5162356 5162361 +
taaaagtattaaagcagcggca

SEQ ID NO: 72766 - DNA, 22 bp, Artificial Sequence
  Synthetic oligonucleotide; CTA chr11 5162341 5162362 5162358 5162363 +
aaagtattaaagcagcggcagc

SEQ ID NO: 72767 - DNA, 22 bp, Artificial Sequence
  Synthetic oligonucleotide; TTA chr11 5162350 5162371 5162367 5162372 +
aagcagcggcagccactgcatg

SEQ ID NO: 72768 - DNA, 22 bp, Artificial Sequence
  Synthetic oligonucleotide; CTG chr11 5162368 5162389 5162385 5162390 +
catgcagacctgagggctaggc

SEQ ID NO: 72769 - DNA, 22 bp, Artificial Sequence
  Synthetic oligonucleotide; CTG chr11 5162380 5162401 5162397 5162402 +
agggctaggctaaaacagtaag

SEQ ID NO: 72770 - DNA, 22 bp, Artificial Sequence
  Synthetic oligonucleotide; CTA chr11 5162387 5162408 5162404 5162409 +
ggctaaaacagtaaggtcaagt

SEQ ID NO: 72771 - DNA, 22 bp, Artificial Sequence
  Synthetic oligonucleotide; CTA chr11 5162392 5162413 5162409 5162414 +
aaacagtaaggtcaagttattt

SEQ ID NO: 72772 - DNA, 22 bp, Artificial Sequence
  Synthetic oligonucleotide; TTA chr11 5162411 5162432 5162428 5162433 +
tttggacagaaaggctacaggg

SEQ ID NO: 72773 - DNA, 22 bp, Artificial Sequence
  Synthetic oligonucleotide; TTT chr11 5162414 5162435 5162431 5162436 +
ggacagaaaggctacagggtgc

SEQ ID NO: 72774 - DNA, 22 bp, Artificial Sequence
  Synthetic oligonucleotide; TTG chr11 5162415 5162436 5162432 5162437 +
gacagaaaggctacagggtgca

SEQ ID NO: 72775 - DNA, 22 bp, Artificial Sequence
  Synthetic oligonucleotide; CTA chr11 5162428 5162449 5162445 5162450 +
cagggtgcagtcctggatcttg

SEQ ID NO: 72776 - DNA, 22 bp, Artificial Sequence
  Synthetic oligonucleotide; CTG chr11 5162443 5162464 5162460 5162465 +
gatcttgtgtaagaattctgac

SEQ ID NO: 72777 - DNA, 22 bp, Artificial Sequence
  Synthetic oligonucleotide; CTT chr11 5162449 5162470 5162466 5162471 +
gtgtaagaattctgaccgcact

SEQ ID NO: 72778 - DNA, 22 bp, Artificial Sequence
  Synthetic oligonucleotide; TTG chr11 5162450 5162471 5162467 5162472 +
tgtaagaattctgaccgcacta

SEQ ID NO: 72779 - DNA, 22 bp, Artificial Sequence
  Synthetic oligonucleotide; TTC chr11 5162461 5162482 5162478 5162483 +
tgaccgcactaactatgcctag

SEQ ID NO: 72780 - DNA, 22 bp, Artificial Sequence
  Synthetic oligonucleotide; CTG chr11 5162463 5162484 5162480 5162485 +
accgcactaactatgcctagga

SEQ ID NO: 72781 - DNA, 22 bp, Artificial Sequence
  Synthetic oligonucleotide; CTA chr11 5162472 5162493 5162489 5162494 +
actatgcctaggaaggaaagga

SEQ ID NO: 72782 - DNA, 22 bp, Artificial Sequence
  Synthetic oligonucleotide; CTA chr11 5162476 5162497 5162493 5162498 +
tgcctaggaaggaaaggagttg

SEQ ID NO: 72783 - DNA, 22 bp, Artificial Sequence
  Synthetic oligonucleotide; CTA chr11 5162482 5162503 5162499 5162504 +
ggaaggaaaggagttgttgttt

SEQ ID NO: 72784 - DNA, 22 bp, Artificial Sequence
  Synthetic oligonucleotide; TTG chr11 5162498 5162519 5162515 5162520 +
ttgttttgtagaagggattgag

SEQ ID NO: 72785 - DNA, 22 bp, Artificial Sequence
  Synthetic oligonucleotide; TTG chr11 5162501 5162522 5162518 5162523 +
ttttgtagaagggattgaggtt

SEQ ID NO: 72786 - DNA, 22 bp, Artificial Sequence
  Synthetic oligonucleotide; TTT chr11 5162504 5162525 5162521 5162526 +
tgtagaagggattgaggtttgg

SEQ ID NO: 72787 - DNA, 22 bp, Artificial Sequence
  Synthetic oligonucleotide; TTT chr11 5162505 5162526 5162522 5162527 +
gtagaagggattgaggtttggg

SEQ ID NO: 72788 - DNA, 22 bp, Artificial Sequence
  Synthetic oligonucleotide; TTG chr11 5162506 5162527 5162523 5162528 +
tagaagggattgaggtttggga

SEQ ID NO: 72789 - DNA, 22 bp, Artificial Sequence
  Synthetic oligonucleotide; TTG chr11 5162518 5162539 5162535 5162540 +
aggtttgggagattaatcggac

SEQ ID NO: 72790 - DNA, 22 bp, Artificial Sequence
  Synthetic oligonucleotide; TTT chr11 5162524 5162545 5162541 5162546 +
gggagattaatcggacacaatc

SEQ ID NO: 72791 - DNA, 22 bp, Artificial Sequence
  Synthetic oligonucleotide; TTG chr11 5162525 5162546 5162542 5162547 +
ggagattaatcggacacaatca

SEQ ID NO: 72792 - DNA, 22 bp, Artificial Sequence
  Synthetic oligonucleotide; TTA chr11 5162533 5162554 5162550 5162555 +
atcggacacaatcagcagggag

SEQ ID NO: 72793 - DNA, 22 bp, Artificial Sequence
  Synthetic oligonucleotide; TTT chr11 5162568 5162589 5162585 5162590 +
ttatgagaattatgccgagata

SEQ ID NO: 72794 - DNA, 22 bp, Artificial Sequence
  Synthetic oligonucleotide; TTT chr11 5162569 5162590 5162586 5162591 +
tatgagaattatgccgagatag

SEQ ID NO: 72795 - DNA, 22 bp, Artificial Sequence
  Synthetic oligonucleotide; TTT chr11 5162570 5162591 5162587 5162592 +
atgagaattatgccgagatagg

SEQ ID NO: 72796 - DNA, 22 bp, Artificial Sequence
  Synthetic oligonucleotide; TTA chr11 5162571 5162592 5162588 5162593 +
tgagaattatgccgagataggt

SEQ ID NO: 72797 - DNA, 22 bp, Artificial Sequence
  Synthetic oligonucleotide; TTA chr11 5162580 5162601 5162597 5162602 +
tgccgagataggtaacacatga

SEQ ID NO: 72798 - DNA, 22 bp, Artificial Sequence
  Synthetic oligonucleotide; TTT chr11 5162613 5162634 5162630 5162635 +
gggcttgactgaagtaatgggg

SEQ ID NO: 72799 - DNA, 22 bp, Artificial Sequence
  Synthetic oligonucleotide; TTG chr11 5162614 5162635 5162631 5162636 +
ggcttgactgaagtaatggggt

SEQ ID NO: 72800 - DNA, 22 bp, Artificial Sequence
  Synthetic oligonucleotide; CTT chr11 5162619 5162640 5162636 5162641 +
gactgaagtaatggggtctgtc

SEQ ID NO: 72801 - DNA, 22 bp, Artificial Sequence
  Synthetic oligonucleotide; TTG chr11 5162620 5162641 5162637 5162642 +
actgaagtaatggggtctgtct

SEQ ID NO: 72802 - DNA, 22 bp, Artificial Sequence
  Synthetic oligonucleotide; CTG chr11 5162624 5162645 5162641 5162646 +
aagtaatggggtctgtctgtga

SEQ ID NO: 72803 - DNA, 22 bp, Artificial Sequence
  Synthetic oligonucleotide; CTG chr11 5162639 5162660 5162656 5162661 +
tctgtgaagccttgcagcagta

SEQ ID NO: 72804 - DNA, 22 bp, Artificial Sequence
  Synthetic oligonucleotide; CTG chr11 5162643 5162664 5162660 5162665 +
tgaagccttgcagcagtacagc

SEQ ID NO: 72805 - DNA, 22 bp, Artificial Sequence
  Synthetic oligonucleotide; CTT chr11 5162652 5162673 5162669 5162674 +
gcagcagtacagcccaggtaat

SEQ ID NO: 72806 - DNA, 22 bp, Artificial Sequence
  Synthetic oligonucleotide; TTG chr11 5162653 5162674 5162670 5162675 +
cagcagtacagcccaggtaatt

SEQ ID NO: 72807 - DNA, 22 bp, Artificial Sequence
  Synthetic oligonucleotide; TTT chr11 5162676 5162697 5162693 5162698 +
gctgagcctaatgggtgtcagt

SEQ ID NO: 72808 - DNA, 22 bp, Artificial Sequence
  Synthetic oligonucleotide; TTG chr11 5162677 5162698 5162694 5162699 +
ctgagcctaatgggtgtcagtg

SEQ ID NO: 72809 - DNA, 22 bp, Artificial Sequence
  Synthetic oligonucleotide; CTG chr11 5162680 5162701 5162697 5162702 +
agcctaatgggtgtcagtgtca

SEQ ID NO: 72810 - DNA, 22 bp, Artificial Sequence
  Synthetic oligonucleotide; CTA chr11 5162686 5162707 5162703 5162708 +
atgggtgtcagtgtcagtccaa

SEQ ID NO: 72811 - DNA, 22 bp, Artificial Sequence
  Synthetic oligonucleotide; CTG chr11 5162728 5162749 5162745 5162750 +
gaatgaagggtgcaaaggaata

SEQ ID NO: 72812 - DNA, 22 bp, Artificial Sequence
  Synthetic oligonucleotide; TTT chr11 5162767 5162788 5162784 5162789 +
gagatccagaacagaataatgg

SEQ ID NO: 72813 - DNA, 22 bp, Artificial Sequence
  Synthetic oligonucleotide; TTG chr11 5162768 5162789 5162785 5162790 +
agatccagaacagaataatggg

SEQ ID NO: 72814 - DNA, 22 bp, Artificial Sequence
  Synthetic oligonucleotide; TTA chr11 5162793 5162814 5162810 5162815 +
tagatggaggtattgaggatag

SEQ ID NO: 72815 - DNA, 22 bp, Artificial Sequence
  Synthetic oligonucleotide; TTG chr11 5162808 5162829 5162825 5162830 +
aggataggagagtatatgggtt

SEQ ID NO: 72816 - DNA, 22 bp, Artificial Sequence
  Synthetic oligonucleotide; TTT chr11 5162831 5162852 5162848 5162853 +
ggcaccatggggtggataggca

SEQ ID NO: 72817 - DNA, 22 bp, Artificial Sequence
  Synthetic oligonucleotide; TTG chr11 5162832 5162853 5162849 5162854 +
gcaccatggggtggataggcaa

SEQ ID NO: 72818 - DNA, 22 bp, Artificial Sequence
  Synthetic oligonucleotide; TTT chr11 5162862 5162883 5162879 5162884 +
ggttgataagatgcagattctg

SEQ ID NO: 72819 - DNA, 22 bp, Artificial Sequence
  Synthetic oligonucleotide; TTG chr11 5162863 5162884 5162880 5162885 +
gttgataagatgcagattctga

SEQ ID NO: 72820 - DNA, 22 bp, Artificial Sequence
  Synthetic oligonucleotide; TTG chr11 5162867 5162888 5162884 5162889 +
ataagatgcagattctgaacta

SEQ ID NO: 72821 - DNA, 22 bp, Artificial Sequence
  Synthetic oligonucleotide; TTC chr11 5162882 5162903 5162899 5162904 +
tgaactaacctgtaaggcttgt

SEQ ID NO: 72822 - DNA, 22 bp, Artificial Sequence
  Synthetic oligonucleotide; CTG chr11 5162884 5162905 5162901 5162906 +
aactaacctgtaaggcttgtct

SEQ ID NO: 72823 - DNA, 22 bp, Artificial Sequence
  Synthetic oligonucleotide; CTA chr11 5162889 5162910 5162906 5162911 +
acctgtaaggcttgtctggttt

SEQ ID NO: 72824 - DNA, 22 bp, Artificial Sequence
  Synthetic oligonucleotide; CTG chr11 5162894 5162915 5162911 5162916 +
taaggcttgtctggttttagga

SEQ ID NO: 72825 - DNA, 22 bp, Artificial Sequence
  Synthetic oligonucleotide; CTT chr11 5162902 5162923 5162919 5162924 +
gtctggttttaggacaggtaaa

SEQ ID NO: 72826 - DNA, 22 bp, Artificial Sequence
  Synthetic oligonucleotide; TTG chr11 5162903 5162924 5162920 5162925 +
tctggttttaggacaggtaaaa

SEQ ID NO: 72827 - DNA, 22 bp, Artificial Sequence
  Synthetic oligonucleotide; CTG chr11 5162907 5162928 5162924 5162929 +
gttttaggacaggtaaaatggg

SEQ ID NO: 72828 - DNA, 22 bp, Artificial Sequence
  Synthetic oligonucleotide; TTT chr11 5162911 5162932 5162928 5162933 +
taggacaggtaaaatgggggaa

SEQ ID NO: 72829 - DNA, 22 bp, Artificial Sequence
  Synthetic oligonucleotide; TTT chr11 5162912 5162933 5162929 5162934 +
aggacaggtaaaatgggggaat

SEQ ID NO: 72830 - DNA, 22 bp, Artificial Sequence
  Synthetic oligonucleotide; TTA chr11 5162913 5162934 5162930 5162935 +
ggacaggtaaaatgggggaatg

SEQ ID NO: 72831 - DNA, 22 bp, Artificial Sequence
  Synthetic oligonucleotide; TTT chr11 5162948 5162969 5162965 5162970 +
ataggctttaaaaggccatgct

SEQ ID NO: 72832 - DNA, 22 bp, Artificial Sequence
  Synthetic oligonucleotide; TTA chr11 5162949 5162970 5162966 5162971 +
taggctttaaaaggccatgctg

SEQ ID NO: 72833 - DNA, 22 bp, Artificial Sequence
  Synthetic oligonucleotide; CTT chr11 5162956 5162977 5162973 5162978 +
taaaaggccatgctgtaacagg

SEQ ID NO: 72834 - DNA, 22 bp, Artificial Sequence
  Synthetic oligonucleotide; TTT chr11 5162957 5162978 5162974 5162979 +
aaaaggccatgctgtaacaggc

SEQ ID NO: 72835 - DNA, 22 bp, Artificial Sequence
  Synthetic oligonucleotide; TTA chr11 5162958 5162979 5162975 5162980 +
aaaggccatgctgtaacaggca

SEQ ID NO: 72836 - DNA, 22 bp, Artificial Sequence
  Synthetic oligonucleotide; CTG chr11 5162971 5162992 5162988 5162993 +
taacaggcaagtaataacaggc

SEQ ID NO: 72837 - DNA, 22 bp, Artificial Sequence
  Synthetic oligonucleotide; CTT chr11 5162995 5163016 5163012 5163017 +
taatcctttcaaagcatgctgt

SEQ ID NO: 72838 - DNA, 22 bp, Artificial Sequence
  Synthetic oligonucleotide; TTT chr11 5162996 5163017 5163013 5163018 +
aatcctttcaaagcatgctgtg

SEQ ID NO: 72839 - DNA, 22 bp, Artificial Sequence
  Synthetic oligonucleotide; TTA chr11 5162997 5163018 5163014 5163019 +
atcctttcaaagcatgctgtgg

SEQ ID NO: 72840 - DNA, 22 bp, Artificial Sequence
  Synthetic oligonucleotide; CTT chr11 5163003 5163024 5163020 5163025 +
tcaaagcatgctgtgggatggg

SEQ ID NO: 72841 - DNA, 22 bp, Artificial Sequence
  Synthetic oligonucleotide; TTT chr11 5163004 5163025 5163021 5163026 +
caaagcatgctgtgggatggga

SEQ ID NO: 72842 - DNA, 22 bp, Artificial Sequence
  Synthetic oligonucleotide; TTC chr11 5163005 5163026 5163022 5163027 +
aaagcatgctgtgggatgggat

SEQ ID NO: 72843 - DNA, 22 bp, Artificial Sequence
  Synthetic oligonucleotide; CTG chr11 5163016 5163037 5163033 5163038 +
tgggatgggatactggcattga

SEQ ID NO: 72844 - DNA, 22 bp, Artificial Sequence
  Synthetic oligonucleotide; CTG chr11 5163031 5163052 5163048 5163053 +
gcattgagcggggtaagagtga

SEQ ID NO: 72845 - DNA, 22 bp, Artificial Sequence
  Synthetic oligonucleotide; TTG chr11 5163037 5163058 5163054 5163059 +
agcggggtaagagtgattaggt

SEQ ID NO: 72846 - DNA, 22 bp, Artificial Sequence
  Synthetic oligonucleotide; TTA chr11 5163056 5163077 5163073 5163078 +
ggttttaatgggatggtaaggg

SEQ ID NO: 72847 - DNA, 22 bp, Artificial Sequence
  Synthetic oligonucleotide; TTT chr11 5163061 5163082 5163078 5163083 +
taatgggatggtaaggggcgca

SEQ ID NO: 72848 - DNA, 22 bp, Artificial Sequence
  Synthetic oligonucleotide; TTT chr11 5163062 5163083 5163079 5163084 +
aatgggatggtaaggggcgcat

SEQ ID NO: 72849 - DNA, 22 bp, Artificial Sequence
  Synthetic oligonucleotide; TTA chr11 5163063 5163084 5163080 5163085 +
atgggatggtaaggggcgcatg

SEQ ID NO: 72850 - DNA, 22 bp, Artificial Sequence
  Synthetic oligonucleotide; CTT chr11 5163117 5163138 5163134 5163139 +
atacttgtggattaaggtgggg

SEQ ID NO: 72851 - DNA, 22 bp, Artificial Sequence
  Synthetic oligonucleotide; TTA chr11 5163118 5163139 5163135 5163140 +
tacttgtggattaaggtgggga

SEQ ID NO: 72852 - DNA, 22 bp, Artificial Sequence
  Synthetic oligonucleotide; CTT chr11 5163123 5163144 5163140 5163145 +
gtggattaaggtggggagatac

SEQ ID NO: 72853 - DNA, 22 bp, Artificial Sequence
  Synthetic oligonucleotide; TTG chr11 5163124 5163145 5163141 5163146 +
tggattaaggtggggagataca

SEQ ID NO: 72854 - DNA, 22 bp, Artificial Sequence
  Synthetic oligonucleotide; TTA chr11 5163131 5163152 5163148 5163153 +
aggtggggagatacaaggggag

SEQ ID NO: 72855 - DNA, 22 bp, Artificial Sequence
  Synthetic oligonucleotide; CTT chr11 5163169 5163190 5163186 5163191 +
tgaactgggggaaaacatggca

SEQ ID NO: 72856 - DNA, 22 bp, Artificial Sequence
  Synthetic oligonucleotide; TTT chr11 5163170 5163191 5163187 5163192 +
gaactgggggaaaacatggcaa

SEQ ID NO: 72857 - DNA, 22 bp, Artificial Sequence
  Synthetic oligonucleotide; TTG chr11 5163171 5163192 5163188 5163193 +
aactgggggaaaacatggcaat

SEQ ID NO: 72858 - DNA, 22 bp, Artificial Sequence
  Synthetic oligonucleotide; CTG chr11 5163176 5163197 5163193 5163198 +
ggggaaaacatggcaatgaggt

SEQ ID NO: 72859 - DNA, 22 bp, Artificial Sequence
  Synthetic oligonucleotide; CTG chr11 5163205 5163226 5163222 5163227 +
tagcccaggaatagtcagggaa

SEQ ID NO: 72860 - DNA, 22 bp, Artificial Sequence
  Synthetic oligonucleotide; TTT chr11 5163238 5163259 5163255 5163260 +
agttaaagtgtctcggcctaat

SEQ ID NO: 72861 - DNA, 22 bp, Artificial Sequence
  Synthetic oligonucleotide; TTA chr11 5163239 5163260 5163256 5163261 +
gttaaagtgtctcggcctaata

SEQ ID NO: 72862 - DNA, 22 bp, Artificial Sequence
  Synthetic oligonucleotide; TTA chr11 5163243 5163264 5163260 5163265 +
aagtgtctcggcctaataaggg

SEQ ID NO: 72863 - DNA, 22 bp, Artificial Sequence
  Synthetic oligonucleotide; CTC chr11 5163252 5163273 5163269 5163274 +
ggcctaataagggaactggcag

SEQ ID NO: 72864 - DNA, 22 bp, Artificial Sequence
  Synthetic oligonucleotide; CTA chr11 5163258 5163279 5163275 5163280 +
ataagggaactggcaggtgggg

SEQ ID NO: 72865 - DNA, 22 bp, Artificial Sequence
  Synthetic oligonucleotide; CTG chr11 5163270 5163291 5163287 5163292 +
gcaggtggggataatgaaaaag

SEQ ID NO: 72866 - DNA, 22 bp, Artificial Sequence
  Synthetic oligonucleotide; CTT chr11 5163300 5163321 5163317 5163322 +
aaaagagtatcgtctcggttag

SEQ ID NO: 72867 - DNA, 22 bp, Artificial Sequence
  Synthetic oligonucleotide; TTA chr11 5163301 5163322 5163318 5163323 +
aaagagtatcgtctcggttagc

SEQ ID NO: 72868 - DNA, 22 bp, Artificial Sequence
  Synthetic oligonucleotide; CTC chr11 5163316 5163337 5163333 5163338 +
ggttagcaccagagttggggaa

SEQ ID NO: 72869 - DNA, 22 bp, Artificial Sequence
  Synthetic oligonucleotide; TTA chr11 5163321 5163342 5163338 5163343 +
gcaccagagttggggaatttta

SEQ ID NO: 72870 - DNA, 22 bp, Artificial Sequence
  Synthetic oligonucleotide; TTG chr11 5163333 5163354 5163350 5163355 +
gggaattttaagaggtttagaa

SEQ ID NO: 72871 - DNA, 22 bp, Artificial Sequence
  Synthetic oligonucleotide; TTT chr11 5163341 5163362 5163358 5163363 +
taagaggtttagaagcctggcc

SEQ ID NO: 72872 - DNA, 22 bp, Artificial Sequence
  Synthetic oligonucleotide; TTT chr11 5163342 5163363 5163359 5163364 +
aagaggtttagaagcctggcca

SEQ ID NO: 72873 - DNA, 22 bp, Artificial Sequence
  Synthetic oligonucleotide; TTA chr11 5163343 5163364 5163360 5163365 +
agaggtttagaagcctggccat

SEQ ID NO: 72874 - DNA, 22 bp, Artificial Sequence
  Synthetic oligonucleotide; TTT chr11 5163351 5163372 5163368 5163373 +
agaagcctggccatcaatacct

SEQ ID NO: 72875 - DNA, 22 bp, Artificial Sequence
  Synthetic oligonucleotide; TTA chr11 5163352 5163373 5163369 5163374 +
gaagcctggccatcaataccta

SEQ ID NO: 72876 - DNA, 22 bp, Artificial Sequence
  Synthetic oligonucleotide; CTG chr11 5163360 5163381 5163377 5163382 +
gccatcaatacctacaacagtt

SEQ ID NO: 72877 - DNA, 22 bp, Artificial Sequence
  Synthetic oligonucleotide; CTA chr11 5163374 5163395 5163391 5163396 +
caacagttatggaggcaaggga

SEQ ID NO: 72878 - DNA, 22 bp, Artificial Sequence
  Synthetic oligonucleotide; TTA chr11 5163383 5163404 5163400 5163405 +
tggaggcaagggaaacaggcct

SEQ ID NO: 72879 - DNA, 22 bp, Artificial Sequence
  Synthetic oligonucleotide; CTT chr11 5163406 5163427 5163423 5163428 +
tgaaaagaaggtaatgtggagt

SEQ ID NO: 72880 - DNA, 22 bp, Artificial Sequence
  Synthetic oligonucleotide; TTT chr11 5163407 5163428 5163424 5163429 +
gaaaagaaggtaatgtggagtg

SEQ ID NO: 72881 - DNA, 22 bp, Artificial Sequence
  Synthetic oligonucleotide; TTG chr11 5163408 5163429 5163425 5163430 +
aaaagaaggtaatgtggagtgg

SEQ ID NO: 72882 - DNA, 22 bp, Artificial Sequence
  Synthetic oligonucleotide; CTC chr11 5163438 5163459 5163455 5163460 +
catactgattaagaagggtaca

SEQ ID NO: 72883 - DNA, 22 bp, Artificial Sequence
  Synthetic oligonucleotide; CTG chr11 5163445 5163466 5163462 5163467 +
attaagaagggtacagacttac

SEQ ID NO: 72884 - DNA, 22 bp, Artificial Sequence
  Synthetic oligonucleotide; TTA chr11 5163449 5163470 5163466 5163471 +
agaagggtacagacttaccctc

SEQ ID NO: 72885 - DNA, 22 bp, Artificial Sequence
  Synthetic oligonucleotide; CTT chr11 5163465 5163486 5163482 5163487 +
accctccactgtgagaattacc

SEQ ID NO: 72886 - DNA, 22 bp, Artificial Sequence
  Synthetic oligonucleotide; TTA chr11 5163466 5163487 5163483 5163488 +
ccctccactgtgagaattacct

SEQ ID NO: 72887 - DNA, 22 bp, Artificial Sequence
  Synthetic oligonucleotide; CTC chr11 5163471 5163492 5163488 5163493 +
cactgtgagaattacctaaagc

SEQ ID NO: 72888 - DNA, 22 bp, Artificial Sequence
  Synthetic oligonucleotide; CTG chr11 5163476 5163497 5163493 5163498 +
tgagaattacctaaagctcggt

SEQ ID NO: 72889 - DNA, 22 bp, Artificial Sequence
  Synthetic oligonucleotide; TTA chr11 5163485 5163506 5163502 5163507 +
cctaaagctcggtgtctgtgat

SEQ ID NO: 72890 - DNA, 22 bp, Artificial Sequence
  Synthetic oligonucleotide; CTA chr11 5163489 5163510 5163506 5163511 +
aagctcggtgtctgtgatggtc

SEQ ID NO: 72891 - DNA, 22 bp, Artificial Sequence
  Synthetic oligonucleotide; CTC chr11 5163495 5163516 5163512 5163517 +
ggtgtctgtgatggtctacagg

SEQ ID NO: 72892 - DNA, 22 bp, Artificial Sequence
  Synthetic oligonucleotide; CTG chr11 5163503 5163524 5163520 5163525 +
tgatggtctacagggcttccga

SEQ ID NO: 72893 - DNA, 22 bp, Artificial Sequence
  Synthetic oligonucleotide; CTA chr11 5163513 5163534 5163530 5163535 +
cagggcttccgaggcgatcagg

SEQ ID NO: 72894 - DNA, 22 bp, Artificial Sequence
  Synthetic oligonucleotide; CTT chr11 5163521 5163542 5163538 5163543 +
ccgaggcgatcaggcagtggca

SEQ ID NO: 72895 - DNA, 22 bp, Artificial Sequence
  Synthetic oligonucleotide; TTC chr11 5163522 5163543 5163539 5163544 +
cgaggcgatcaggcagtggcag

SEQ ID NO: 72896 - DNA, 22 bp, Artificial Sequence
  Synthetic oligonucleotide; CTT chr11 5163548 5163569 5163565 5163570 +
cagctgcaaagccgagaagatc

SEQ ID NO: 72897 - DNA, 22 bp, Artificial Sequence
  Synthetic oligonucleotide; TTC chr11 5163549 5163570 5163566 5163571 +
agctgcaaagccgagaagatct

SEQ ID NO: 72898 - DNA, 22 bp, Artificial Sequence
  Synthetic oligonucleotide; CTG chr11 5163554 5163575 5163571 5163576 +
caaagccgagaagatctgggaa

SEQ ID NO: 72899 - DNA, 22 bp, Artificial Sequence
  Synthetic oligonucleotide; CTG chr11 5163572 5163593 5163589 5163594 +
ggaaggagtcagtcagggagcc

SEQ ID NO: 72900 - DNA, 22 bp, Artificial Sequence
  Synthetic oligonucleotide; CTT chr11 5163596 5163617 5163613 5163618 +
gggccagagttccaggggctct

SEQ ID NO: 72901 - DNA, 22 bp, Artificial Sequence
  Synthetic oligonucleotide; TTG chr11 5163597 5163618 5163614 5163619 +
ggccagagttccaggggctcta

SEQ ID NO: 72902 - DNA, 22 bp, Artificial Sequence
  Synthetic oligonucleotide; TTC chr11 5163608 5163629 5163625 5163630 +
caggggctctaggagtggctgc

SEQ ID NO: 72903 - DNA, 22 bp, Artificial Sequence
  Synthetic oligonucleotide; CTC chr11 5163617 5163638 5163634 5163639 +
taggagtggctgccaggtgagt

SEQ ID NO: 72904 - DNA, 22 bp, Artificial Sequence
  Synthetic oligonucleotide; CTA chr11 5163619 5163640 5163636 5163641 +
ggagtggctgccaggtgagttg

SEQ ID NO: 72905 - DNA, 22 bp, Artificial Sequence
  Synthetic oligonucleotide; CTG chr11 5163629 5163650 5163646 5163651 +
ccaggtgagttgaacagtccga

SEQ ID NO: 72906 - DNA, 22 bp, Artificial Sequence
  Synthetic oligonucleotide; TTG chr11 5163641 5163662 5163658 5163663 +
aacagtccgatttctagtgggg

SEQ ID NO: 72907 - DNA, 22 bp, Artificial Sequence
  Synthetic oligonucleotide; TTT chr11 5163654 5163675 5163671 5163676 +
ctagtggggtcctgcacagatg

SEQ ID NO: 72908 - DNA, 22 bp, Artificial Sequence
  Synthetic oligonucleotide; TTC chr11 5163655 5163676 5163672 5163677 +
tagtggggtcctgcacagatgg

SEQ ID NO: 72909 - DNA, 22 bp, Artificial Sequence
  Synthetic oligonucleotide; CTA chr11 5163657 5163678 5163674 5163679 +
gtggggtcctgcacagatggga

SEQ ID NO: 72910 - DNA, 22 bp, Artificial Sequence
  Synthetic oligonucleotide; CTG chr11 5163668 5163689 5163685 5163690 +
cacagatgggacacggcttagg

SEQ ID NO: 72911 - DNA, 22 bp, Artificial Sequence
  Synthetic oligonucleotide; CTT chr11 5163687 5163708 5163704 5163709 +
aggaggaatcctgggctgcggg

SEQ ID NO: 72912 - DNA, 22 bp, Artificial Sequence
  Synthetic oligonucleotide; TTA chr11 5163688 5163709 5163705 5163710 +
ggaggaatcctgggctgcgggc

SEQ ID NO: 72913 - DNA, 22 bp, Artificial Sequence
  Synthetic oligonucleotide; CTG chr11 5163700 5163721 5163717 5163722 +
ggctgcgggcattccttggcct

SEQ ID NO: 72914 - DNA, 22 bp, Artificial Sequence
  Synthetic oligonucleotide; CTG chr11 5163705 5163726 5163722 5163727 +
cgggcattccttggcctggtgg

SEQ ID NO: 72915 - DNA, 22 bp, Artificial Sequence
  Synthetic oligonucleotide; TTC chr11 5163714 5163735 5163731 5163736 +
cttggcctggtggccagatttc

SEQ ID NO: 72916 - DNA, 22 bp, Artificial Sequence
  Synthetic oligonucleotide; CTT chr11 5163717 5163738 5163734 5163739 +
ggcctggtggccagatttctgg

SEQ ID NO: 72917 - DNA, 22 bp, Artificial Sequence
  Synthetic oligonucleotide; TTG chr11 5163718 5163739 5163735 5163740 +
gcctggtggccagatttctggc

SEQ ID NO: 72918 - DNA, 22 bp, Artificial Sequence
  Synthetic oligonucleotide; CTG chr11 5163723 5163744 5163740 5163745 +
gtggccagatttctggcacttg

SEQ ID NO: 72919 - DNA, 22 bp, Artificial Sequence
  Synthetic oligonucleotide; TTT chr11 5163735 5163756 5163752 5163757 +
ctggcacttgtagcaagctcct

SEQ ID NO: 72920 - DNA, 22 bp, Artificial Sequence
  Synthetic oligonucleotide; TTC chr11 5163736 5163757 5163753 5163758 +
tggcacttgtagcaagctcctg

SEQ ID NO: 72921 - DNA, 22 bp, Artificial Sequence
  Synthetic oligonucleotide; CTG chr11 5163738 5163759 5163755 5163760 +
gcacttgtagcaagctcctggg

SEQ ID NO: 72922 - DNA, 22 bp, Artificial Sequence
  Synthetic oligonucleotide; CTT chr11 5163744 5163765 5163761 5163766 +
gtagcaagctcctgggggaggt

SEQ ID NO: 72923 - DNA, 22 bp, Artificial Sequence
  Synthetic oligonucleotide; TTG chr11 5163745 5163766 5163762 5163767 +
tagcaagctcctgggggaggtg

SEQ ID NO: 72924 - DNA, 22 bp, Artificial Sequence
  Synthetic oligonucleotide; CTC chr11 5163755 5163776 5163772 5163777 +
ctgggggaggtggttccggagg

SEQ ID NO: 72925 - DNA, 22 bp, Artificial Sequence
  Synthetic oligonucleotide; CTG chr11 5163758 5163779 5163775 5163780 +
ggggaggtggttccggaggaac

SEQ ID NO: 72926 - DNA, 22 bp, Artificial Sequence
  Synthetic oligonucleotide; TTC chr11 5163771 5163792 5163788 5163793 +
cggaggaacgcctggccactgc

SEQ ID NO: 72927 - DNA, 22 bp, Artificial Sequence
  Synthetic oligonucleotide; CTG chr11 5163785 5163806 5163802 5163807 +
gccactgcggtttaggcatttg

SEQ ID NO: 72928 - DNA, 22 bp, Artificial Sequence
  Synthetic oligonucleotide; CTG chr11 5163792 5163813 5163809 5163814 +
cggtttaggcatttggaagttc

SEQ ID NO: 72929 - DNA, 22 bp, Artificial Sequence
  Synthetic oligonucleotide; TTT chr11 5163798 5163819 5163815 5163820 +
aggcatttggaagttcttgtgt

SEQ ID NO: 72930 - DNA, 22 bp, Artificial Sequence
  Synthetic oligonucleotide; TTA chr11 5163799 5163820 5163816 5163821 +
ggcatttggaagttcttgtgtg

SEQ ID NO: 72931 - DNA, 22 bp, Artificial Sequence
  Synthetic oligonucleotide; TTT chr11 5163806 5163827 5163823 5163828 +
ggaagttcttgtgtgctggaga

SEQ ID NO: 72932 - DNA, 22 bp, Artificial Sequence
  Synthetic oligonucleotide; TTG chr11 5163807 5163828 5163824 5163829 +
gaagttcttgtgtgctggagat

SEQ ID NO: 72933 - DNA, 22 bp, Artificial Sequence
  Synthetic oligonucleotide; TTC chr11 5163814 5163835 5163831 5163836 +
ttgtgtgctggagatgtggctg

SEQ ID NO: 72934 - DNA, 22 bp, Artificial Sequence
  Synthetic oligonucleotide; CTT chr11 5163816 5163837 5163833 5163838 +
gtgtgctggagatgtggctggg

SEQ ID NO: 72935 - DNA, 22 bp, Artificial Sequence
  Synthetic oligonucleotide; TTG chr11 5163817 5163838 5163834 5163839 +
tgtgctggagatgtggctgggg

SEQ ID NO: 72936 - DNA, 22 bp, Artificial Sequence
  Synthetic oligonucleotide; CTG chr11 5163824 5163845 5163841 5163846 +
gagatgtggctggggtttgtct

SEQ ID NO: 72937 - DNA, 22 bp, Artificial Sequence
  Synthetic oligonucleotide; CTG chr11 5163836 5163857 5163853 5163858 +
gggtttgtctcacagtggaggc

SEQ ID NO: 72938 - DNA, 22 bp, Artificial Sequence
  Synthetic oligonucleotide; TTT chr11 5163842 5163863 5163859 5163864 +
gtctcacagtggaggcaaggaa

SEQ ID NO: 72939 - DNA, 22 bp, Artificial Sequence
  Synthetic oligonucleotide; TTG chr11 5163843 5163864 5163860 5163865 +
tctcacagtggaggcaaggaat

SEQ ID NO: 72940 - DNA, 22 bp, Artificial Sequence
  Synthetic oligonucleotide; CTC chr11 5163847 5163868 5163864 5163869 +
acagtggaggcaaggaattgca

SEQ ID NO: 72941 - DNA, 22 bp, Artificial Sequence
  Synthetic oligonucleotide; TTG chr11 5163867 5163888 5163884 5163889 +
caactcaaaaatatgttgctac

SEQ ID NO: 72942 - DNA, 22 bp, Artificial Sequence
  Synthetic oligonucleotide; CTC chr11 5163873 5163894 5163890 5163895 +
aaaaatatgttgctacttggct

SEQ ID NO: 72943 - DNA, 22 bp, Artificial Sequence
  Synthetic oligonucleotide; TTG chr11 5163885 5163906 5163902 5163907 +
ctacttggctgcctctactcta

SEQ ID NO: 72944 - DNA, 22 bp, Artificial Sequence
  Synthetic oligonucleotide; CTA chr11 5163888 5163909 5163905 5163910 +
cttggctgcctctactctatta

SEQ ID NO: 72945 - DNA, 22 bp, Artificial Sequence
  Synthetic oligonucleotide; CTT chr11 5163891 5163912 5163908 5163913 +
ggctgcctctactctattattg

SEQ ID NO: 72946 - DNA, 22 bp, Artificial Sequence
  Synthetic oligonucleotide; TTG chr11 5163892 5163913 5163909 5163914 +
gctgcctctactctattattgt

SEQ ID NO: 72947 - DNA, 22 bp, Artificial Sequence
  Synthetic oligonucleotide; CTG chr11 5163896 5163917 5163913 5163918 +
cctctactctattattgtacac

SEQ ID NO: 72948 - DNA, 22 bp, Artificial Sequence
  Synthetic oligonucleotide; CTC chr11 5163900 5163921 5163917 5163922 +
tactctattattgtacaccttg

SEQ ID NO: 72949 - DNA, 22 bp, Artificial Sequence
  Synthetic oligonucleotide; CTA chr11 5163902 5163923 5163919 5163924 +
ctctattattgtacaccttgaa

SEQ ID NO: 72950 - DNA, 22 bp, Artificial Sequence
  Synthetic oligonucleotide; CTC chr11 5163905 5163926 5163922 5163927 +
tattattgtacaccttgaaggt

SEQ ID NO: 72951 - DNA, 22 bp, Artificial Sequence
  Synthetic oligonucleotide; CTA chr11 5163907 5163928 5163924 5163929 +
ttattgtacaccttgaaggtga

SEQ ID NO: 72952 - DNA, 22 bp, Artificial Sequence
  Synthetic oligonucleotide; TTA chr11 5163910 5163931 5163927 5163932 +
ttgtacaccttgaaggtgaggt

SEQ ID NO: 72953 - DNA, 22 bp, Artificial Sequence
  Synthetic oligonucleotide; TTG chr11 5163913 5163934 5163930 5163935 +
tacaccttgaaggtgaggttaa

SEQ ID NO: 72954 - DNA, 22 bp, Artificial Sequence
  Synthetic oligonucleotide; CTT chr11 5163921 5163942 5163938 5163943 +
gaaggtgaggttaattgagtcc

SEQ ID NO: 72955 - DNA, 22 bp, Artificial Sequence
  Synthetic oligonucleotide; TTG chr11 5163922 5163943 5163939 5163944 +
aaggtgaggttaattgagtcct

SEQ ID NO: 72956 - DNA, 22 bp, Artificial Sequence
  Synthetic oligonucleotide; TTA chr11 5163934 5163955 5163951 5163956 +
attgagtcctgttgtggggttt

SEQ ID NO: 72957 - DNA, 22 bp, Artificial Sequence
  Synthetic oligonucleotide; TTG chr11 5163938 5163959 5163955 5163960 +
agtcctgttgtggggtttgagg

SEQ ID NO: 72958 - DNA, 22 bp, Artificial Sequence
  Synthetic oligonucleotide; CTG chr11 5163945 5163966 5163962 5163967 +
ttgtggggtttgaggtccagaa

SEQ ID NO: 72959 - DNA, 22 bp, Artificial Sequence
  Synthetic oligonucleotide; TTG chr11 5163948 5163969 5163965 5163970 +
tggggtttgaggtccagaattt

SEQ ID NO: 72960 - DNA, 22 bp, Artificial Sequence
  Synthetic oligonucleotide; TTT chr11 5163956 5163977 5163973 5163978 +
gaggtccagaatttaatttttg

SEQ ID NO: 72961 - DNA, 22 bp, Artificial Sequence
  Synthetic oligonucleotide; TTG chr11 5163957 5163978 5163974 5163979 +
aggtccagaatttaatttttgg

SEQ ID NO: 72962 - DNA, 22 bp, Artificial Sequence
  Synthetic oligonucleotide; TTT chr11 5163970 5163991 5163987 5163992 +
aatttttggagttttatttaat

SEQ ID NO: 72963 - DNA, 22 bp, Artificial Sequence
  Synthetic oligonucleotide; TTA chr11 5163971 5163992 5163988 5163993 +
atttttggagttttatttaatg

SEQ ID NO: 72964 - DNA, 22 bp, Artificial Sequence
  Synthetic oligonucleotide; TTT chr11 5163975 5163996 5163992 5163997 +
ttggagttttatttaatgtcag

SEQ ID NO: 72965 - DNA, 22 bp, Artificial Sequence
  Synthetic oligonucleotide; TTT chr11 5163976 5163997 5163993 5163998 +
tggagttttatttaatgtcagg

SEQ ID NO: 72966 - DNA, 22 bp, Artificial Sequence
  Synthetic oligonucleotide; TTT chr11 5163977 5163998 5163994 5163999 +
ggagttttatttaatgtcagga

SEQ ID NO: 72967 - DNA, 22 bp, Artificial Sequence
  Synthetic oligonucleotide; TTG chr11 5163978 5163999 5163995 5164000 +
gagttttatttaatgtcaggag

SEQ ID NO: 72968 - DNA, 22 bp, Artificial Sequence
  Synthetic oligonucleotide; TTT chr11 5163984 5164005 5164001 5164006 +
tatttaatgtcaggagcagatt

SEQ ID NO: 72969 - DNA, 22 bp, Artificial Sequence
  Synthetic oligonucleotide; TTT chr11 5163985 5164006 5164002 5164007 +
atttaatgtcaggagcagattg

SEQ ID NO: 72970 - DNA, 22 bp, Artificial Sequence
  Synthetic oligonucleotide; TTA chr11 5163986 5164007 5164003 5164008 +
tttaatgtcaggagcagattgg

SEQ ID NO: 72971 - DNA, 22 bp, Artificial Sequence
  Synthetic oligonucleotide; TTT chr11 5163989 5164010 5164006 5164011 +
aatgtcaggagcagattgggta

SEQ ID NO: 72972 - DNA, 22 bp, Artificial Sequence
  Synthetic oligonucleotide; TTA chr11 5163990 5164011 5164007 5164012 +
atgtcaggagcagattgggtaa

SEQ ID NO: 72973 - DNA, 22 bp, Artificial Sequence
  Synthetic oligonucleotide; TTG chr11 5164007 5164028 5164024 5164029 +
ggtaataaaatgtatattgaga

SEQ ID NO: 72974 - DNA, 22 bp, Artificial Sequence
  Synthetic oligonucleotide; TTG chr11 5164026 5164047 5164043 5164048 +
agaataaagtggccttttgtcc

SEQ ID NO: 72975 - DNA, 22 bp, Artificial Sequence
  Synthetic oligonucleotide; CTT chr11 5164042 5164063 5164059 5164064 +
ttgtccttttagggtctagggc

SEQ ID NO: 72976 - DNA, 22 bp, Artificial Sequence
  Synthetic oligonucleotide; TTT chr11 5164043 5164064 5164060 5164065 +
tgtccttttagggtctagggct

SEQ ID NO: 72977 - DNA, 22 bp, Artificial Sequence
  Synthetic oligonucleotide; TTT chr11 5164044 5164065 5164061 5164066 +
gtccttttagggtctagggctg

SEQ ID NO: 72978 - DNA, 22 bp, Artificial Sequence
  Synthetic oligonucleotide; TTG chr11 5164045 5164066 5164062 5164067 +
tccttttagggtctagggctgt

SEQ ID NO: 72979 - DNA, 22 bp, Artificial Sequence
  Synthetic oligonucleotide; CTT chr11 5164050 5164071 5164067 5164072 +
ttagggtctagggctgtaaagc

SEQ ID NO: 72980 - DNA, 22 bp, Artificial Sequence
  Synthetic oligonucleotide; TTT chr11 5164051 5164072 5164068 5164073 +
tagggtctagggctgtaaagcg

SEQ ID NO: 72981 - DNA, 22 bp, Artificial Sequence
  Synthetic oligonucleotide; TTT chr11 5164052 5164073 5164069 5164074 +
agggtctagggctgtaaagcgt

SEQ ID NO: 72982 - DNA, 22 bp, Artificial Sequence
  Synthetic oligonucleotide; TTA chr11 5164053 5164074 5164070 5164075 +
gggtctagggctgtaaagcgtc

SEQ ID NO: 72983 - DNA, 22 bp, Artificial Sequence
  Synthetic oligonucleotide; CTA chr11 5164060 5164081 5164077 5164082 +
gggctgtaaagcgtctcagggt

SEQ ID NO: 72984 - DNA, 22 bp, Artificial Sequence
  Synthetic oligonucleotide; CTG chr11 5164066 5164087 5164083 5164088 +
taaagcgtctcagggttgctgc

SEQ ID NO: 72985 - DNA, 22 bp, Artificial Sequence
  Synthetic oligonucleotide; CTC chr11 5164077 5164098 5164094 5164099 +
agggttgctgccgaacgagcca

SEQ ID NO: 72986 - DNA, 22 bp, Artificial Sequence
  Synthetic oligonucleotide; TTG chr11 5164084 5164105 5164101 5164106 +
ctgccgaacgagccatgaactg

SEQ ID NO: 72987 - DNA, 22 bp, Artificial Sequence
  Synthetic oligonucleotide; CTG chr11 5164087 5164108 5164104 5164109 +
ccgaacgagccatgaactgggc

SEQ ID NO: 72988 - DNA, 22 bp, Artificial Sequence
  Synthetic oligonucleotide; CTG chr11 5164106 5164127 5164123 5164128 +
ggctgggtttttcatatttgat

SEQ ID NO: 72989 - DNA, 22 bp, Artificial Sequence
  Synthetic oligonucleotide; CTG chr11 5164111 5164132 5164128 5164133 +
ggtttttcatatttgatgaaag

SEQ ID NO: 72990 - DNA, 22 bp, Artificial Sequence
  Synthetic oligonucleotide; TTT chr11 5164116 5164137 5164133 5164138 +
ttcatatttgatgaaagagcct

SEQ ID NO: 72991 - DNA, 22 bp, Artificial Sequence
  Synthetic oligonucleotide; TTT chr11 5164117 5164138 5164134 5164139 +
tcatatttgatgaaagagccta

SEQ ID NO: 72992 - DNA, 22 bp, Artificial Sequence
  Synthetic oligonucleotide; TTT chr11 5164118 5164139 5164135 5164140 +
catatttgatgaaagagcctaa

SEQ ID NO: 72993 - DNA, 22 bp, Artificial Sequence
  Synthetic oligonucleotide; TTC chr11 5164119 5164140 5164136 5164141 +
atatttgatgaaagagcctaaa

SEQ ID NO: 72994 - DNA, 22 bp, Artificial Sequence
  Synthetic oligonucleotide; TTT chr11 5164125 5164146 5164142 5164147 +
gatgaaagagcctaaacgctct

SEQ ID NO: 72995 - DNA, 22 bp, Artificial Sequence
  Synthetic oligonucleotide; TTG chr11 5164126 5164147 5164143 5164148 +
atgaaagagcctaaacgctctg

SEQ ID NO: 72996 - DNA, 22 bp, Artificial Sequence
  Synthetic oligonucleotide; CTA chr11 5164139 5164160 5164156 5164161 +
aacgctctgattcgggagaggt

SEQ ID NO: 72997 - DNA, 22 bp, Artificial Sequence
  Synthetic oligonucleotide; CTC chr11 5164146 5164167 5164163 5164168 +
tgattcgggagaggtcggataa

SEQ ID NO: 72998 - DNA, 22 bp, Artificial Sequence
  Synthetic oligonucleotide; CTG chr11 5164148 5164169 5164165 5164170 +
attcgggagaggtcggataaag

SEQ ID NO: 72999 - DNA, 22 bp, Artificial Sequence
  Synthetic oligonucleotide; TTC chr11 5164152 5164173 5164169 5164174 +
gggagaggtcggataaagaaaa

SEQ ID NO: 73000 - DNA, 22 bp, Artificial Sequence
  Synthetic oligonucleotide; TTA chr11 5164184 5164205 5164201 5164206 +
accttgactacgcctttagctt

SEQ ID NO: 73001 - DNA, 22 bp, Artificial Sequence
  Synthetic oligonucleotide; CTT chr11 5164189 5164210 5164206 5164211 +
gactacgcctttagcttcagcc

SEQ ID NO: 73002 - DNA, 22 bp, Artificial Sequence
  Synthetic oligonucleotide; TTG chr11 5164190 5164211 5164207 5164212 +
actacgcctttagcttcagcca

SEQ ID NO: 73003 - DNA, 22 bp, Artificial Sequence
  Synthetic oligonucleotide; CTA chr11 5164194 5164215 5164211 5164216 +
cgcctttagcttcagccacctt

SEQ ID NO: 73004 - DNA, 22 bp, Artificial Sequence
  Synthetic oligonucleotide; CTT chr11 5164200 5164221 5164217 5164222 +
tagcttcagccaccttcttaat

SEQ ID NO: 73005 - DNA, 22 bp, Artificial Sequence
  Synthetic oligonucleotide; TTT chr11 5164201 5164222 5164218 5164223 +
agcttcagccaccttcttaata

SEQ ID NO: 73006 - DNA, 22 bp, Artificial Sequence
  Synthetic oligonucleotide; TTA chr11 5164202 5164223 5164219 5164224 +
gcttcagccaccttcttaatag

SEQ ID NO: 73007 - DNA, 22 bp, Artificial Sequence
  Synthetic oligonucleotide; CTT chr11 5164206 5164227 5164223 5164228 +
cagccaccttcttaataggaaa

SEQ ID NO: 73008 - DNA, 22 bp, Artificial Sequence
  Synthetic oligonucleotide; TTC chr11 5164207 5164228 5164224 5164229 +
agccaccttcttaataggaaat

SEQ ID NO: 73009 - DNA, 22 bp, Artificial Sequence
  Synthetic oligonucleotide; CTT chr11 5164216 5164237 5164233 5164238 +
cttaataggaaattgctgggca

SEQ ID NO: 73010 - DNA, 22 bp, Artificial Sequence
  Synthetic oligonucleotide; TTC chr11 5164217 5164238 5164234 5164239 +
ttaataggaaattgctgggcag

SEQ ID NO: 73011 - DNA, 22 bp, Artificial Sequence
  Synthetic oligonucleotide; CTT chr11 5164219 5164240 5164236 5164241 +
aataggaaattgctgggcaggt

SEQ ID NO: 73012 - DNA, 22 bp, Artificial Sequence
  Synthetic oligonucleotide; TTA chr11 5164220 5164241 5164237 5164242 +
ataggaaattgctgggcaggtt

SEQ ID NO: 73013 - DNA, 22 bp, Artificial Sequence
  Synthetic oligonucleotide; TTG chr11 5164231 5164252 5164248 5164253 +
ctgggcaggttggggagggcta

SEQ ID NO: 73014 - DNA, 22 bp, Artificial Sequence
  Synthetic oligonucleotide; CTG chr11 5164234 5164255 5164251 5164256 +
ggcaggttggggagggctagtc

SEQ ID NO: 73015 - DNA, 22 bp, Artificial Sequence
  Synthetic oligonucleotide; TTG chr11 5164243 5164264 5164260 5164265 +
gggagggctagtcacggaatga

SEQ ID NO: 73016 - DNA, 22 bp, Artificial Sequence
  Synthetic oligonucleotide; CTA chr11 5164253 5164274 5164270 5164275 +
gtcacggaatgaaactgtaaac

SEQ ID NO: 73017 - DNA, 22 bp, Artificial Sequence
  Synthetic oligonucleotide; CTG chr11 5164270 5164291 5164287 5164292 +
taaaccggaccgggtgtgagga

SEQ ID NO: 73018 - DNA, 22 bp, Artificial Sequence
  Synthetic oligonucleotide; TTA chr11 5164313 5164334 5164330 5164335 +
cagggtggaggagctgaggctg

SEQ ID NO: 73019 - DNA, 22 bp, Artificial Sequence
  Synthetic oligonucleotide; CTG chr11 5164329 5164350 5164346 5164351 +
aggctgaggaagatttgggacc

SEQ ID NO: 73020 - DNA, 22 bp, Artificial Sequence
  Synthetic oligonucleotide; CTG chr11 5164335 5164356 5164352 5164357 +
aggaagatttgggacctagctc

SEQ ID NO: 73021 - DNA, 22 bp, Artificial Sequence
  Synthetic oligonucleotide; TTT chr11 5164345 5164366 5164362 5164367 +
gggacctagctcggcctggcaa

SEQ ID NO: 73022 - DNA, 22 bp, Artificial Sequence
  Synthetic oligonucleotide; TTG chr11 5164346 5164367 5164363 5164368 +
ggacctagctcggcctggcaag

SEQ ID NO: 73023 - DNA, 22 bp, Artificial Sequence
  Synthetic oligonucleotide; CTA chr11 5164353 5164374 5164370 5164375 +
gctcggcctggcaaggagcagc

SEQ ID NO: 73024 - DNA, 22 bp, Artificial Sequence
  Synthetic oligonucleotide; CTC chr11 5164357 5164378 5164374 5164379 +
ggcctggcaaggagcagcctgg

SEQ ID NO: 73025 - DNA, 22 bp, Artificial Sequence
  Synthetic oligonucleotide; CTG chr11 5164363 5164384 5164380 5164385 +
gcaaggagcagcctggggagga

SEQ ID NO: 73026 - DNA, 22 bp, Artificial Sequence
  Synthetic oligonucleotide; CTG chr11 5164378 5164399 5164395 5164400 +
gggaggaggggagacgtcagat

SEQ ID NO: 73027 - DNA, 22 bp, Artificial Sequence
  Synthetic oligonucleotide; CTG chr11 5164407 5164428 5164424 5164429 +
tagaaaaggaagattagaaaga

SEQ ID NO: 73028 - DNA, 22 bp, Artificial Sequence
  Synthetic oligonucleotide; TTA chr11 5164423 5164444 5164440 5164445 +
gaaagactcagcgacgcttgga

SEQ ID NO: 73029 - DNA, 22 bp, Artificial Sequence
  Synthetic oligonucleotide; CTC chr11 5164432 5164453 5164449 5164454 +
agcgacgcttggagttgggact

SEQ ID NO: 73030 - DNA, 22 bp, Artificial Sequence
  Synthetic oligonucleotide; CTT chr11 5164442 5164463 5164459 5164464 +
ggagttgggactgaggggacag

SEQ ID NO: 73031 - DNA, 22 bp, Artificial Sequence
  Synthetic oligonucleotide; TTG chr11 5164443 5164464 5164460 5164465 +
gagttgggactgaggggacagg

SEQ ID NO: 73032 - DNA, 22 bp, Artificial Sequence
  Synthetic oligonucleotide; TTG chr11 5164449 5164470 5164466 5164471 +
ggactgaggggacaggcgggag

SEQ ID NO: 73033 - DNA, 22 bp, Artificial Sequence
  Synthetic oligonucleotide; CTG chr11 5164455 5164476 5164472 5164477 +
aggggacaggcgggagggaaag

SEQ ID NO: 73034 - DNA, 22 bp, Artificial Sequence
  Synthetic oligonucleotide; TTT chr11 5164488 5164509 5164505 5164510 +
gggacaagttgcattgggaaga

SEQ ID NO: 73035 - DNA, 22 bp, Artificial Sequence
  Synthetic oligonucleotide; TTG chr11 5164489 5164510 5164506 5164511 +
ggacaagttgcattgggaagag

SEQ ID NO: 73036 - DNA, 22 bp, Artificial Sequence
  Synthetic oligonucleotide; TTG chr11 5164499 5164520 5164516 5164521 +
cattgggaagagactagggagg

SEQ ID NO: 73037 - DNA, 22 bp, Artificial Sequence
  Synthetic oligonucleotide; TTG chr11 5164504 5164525 5164521 5164526 +
ggaagagactagggagggacca

SEQ ID NO: 73038 - DNA, 22 bp, Artificial Sequence
  Synthetic oligonucleotide; CTA chr11 5164515 5164536 5164532 5164537 +
gggagggaccaatgtgtaaaag

SEQ ID NO: 73039 - DNA, 22 bp, Artificial Sequence
  Synthetic oligonucleotide; CTG chr11 5164545 5164566 5164562 5164567 +
gacgtcaggcacctcagactgt

SEQ ID NO: 73040 - DNA, 22 bp, Artificial Sequence
  Synthetic oligonucleotide; CTC chr11 5164560 5164581 5164577 5164582 +
agactgtttgcctgttttacga

SEQ ID NO: 73041 - DNA, 22 bp, Artificial Sequence
  Synthetic oligonucleotide; CTG chr11 5164566 5164587 5164583 5164588 +
tttgcctgttttacgacaaaaa

SEQ ID NO: 73042 - DNA, 22 bp, Artificial Sequence
  Synthetic oligonucleotide; TTT chr11 5164569 5164590 5164586 5164591 +
gcctgttttacgacaaaaatta

SEQ ID NO: 73043 - DNA, 22 bp, Artificial Sequence
  Synthetic oligonucleotide; TTG chr11 5164570 5164591 5164587 5164592 +
cctgttttacgacaaaaattat

SEQ ID NO: 73044 - DNA, 22 bp, Artificial Sequence
  Synthetic oligonucleotide; CTG chr11 5164574 5164595 5164591 5164596 +
ttttacgacaaaaattatttag

SEQ ID NO: 73045 - DNA, 22 bp, Artificial Sequence
  Synthetic oligonucleotide; TTT chr11 5164577 5164598 5164594 5164599 +
tacgacaaaaattatttagatc

SEQ ID NO: 73046 - DNA, 22 bp, Artificial Sequence
  Synthetic oligonucleotide; TTT chr11 5164578 5164599 5164595 5164600 +
acgacaaaaattatttagatct

SEQ ID NO: 73047 - DNA, 22 bp, Artificial Sequence
  Synthetic oligonucleotide; TTA chr11 5164579 5164600 5164596 5164601 +
cgacaaaaattatttagatctt

SEQ ID NO: 73048 - DNA, 22 bp, Artificial Sequence
  Synthetic oligonucleotide; TTA chr11 5164591 5164612 5164608 5164613 +
tttagatcttgaagaatggaaa

SEQ ID NO: 73049 - DNA, 22 bp, Artificial Sequence
  Synthetic oligonucleotide; TTT chr11 5164594 5164615 5164611 5164616 +
agatcttgaagaatggaaaaat

SEQ ID NO: 73050 - DNA, 22 bp, Artificial Sequence
  Synthetic oligonucleotide; TTA chr11 5164595 5164616 5164612 5164617 +
gatcttgaagaatggaaaaatt

SEQ ID NO: 73051 - DNA, 22 bp, Artificial Sequence
  Synthetic oligonucleotide; CTT chr11 5164601 5164622 5164618 5164623 +
gaagaatggaaaaattgaaagt

SEQ ID NO: 73052 - DNA, 22 bp, Artificial Sequence
  Synthetic oligonucleotide; TTG chr11 5164602 5164623 5164619 5164624 +
aagaatggaaaaattgaaagtg

SEQ ID NO: 73053 - DNA, 22 bp, Artificial Sequence
  Synthetic oligonucleotide; TTG chr11 5164618 5164639 5164635 5164640 +
aaagtgccattttctggctatt

SEQ ID NO: 73054 - DNA, 22 bp, Artificial Sequence
  Synthetic oligonucleotide; TTT chr11 5164630 5164651 5164647 5164652 +
tctggctatttggaaccactgt

SEQ ID NO: 73055 - DNA, 22 bp, Artificial Sequence
  Synthetic oligonucleotide; TTT chr11 5164631 5164652 5164648 5164653 +
ctggctatttggaaccactgtc

SEQ ID NO: 73056 - DNA, 22 bp, Artificial Sequence
  Synthetic oligonucleotide; TTC chr11 5164632 5164653 5164649 5164654 +
tggctatttggaaccactgtcg

SEQ ID NO: 73057 - DNA, 22 bp, Artificial Sequence
  Synthetic oligonucleotide; CTG chr11 5164634 5164655 5164651 5164656 +
gctatttggaaccactgtcgag

SEQ ID NO: 73058 - DNA, 22 bp, Artificial Sequence
  Synthetic oligonucleotide; CTA chr11 5164638 5164659 5164655 5164660 +
tttggaaccactgtcgagtttg

SEQ ID NO: 73059 - DNA, 22 bp, Artificial Sequence
  Synthetic oligonucleotide; TTT chr11 5164641 5164662 5164658 5164663 +
ggaaccactgtcgagtttgtat

SEQ ID NO: 73060 - DNA, 22 bp, Artificial Sequence
  Synthetic oligonucleotide; TTG chr11 5164642 5164663 5164659 5164664 +
gaaccactgtcgagtttgtatt

SEQ ID NO: 73061 - DNA, 22 bp, Artificial Sequence
  Synthetic oligonucleotide; CTG chr11 5164651 5164672 5164668 5164673 +
tcgagtttgtattggagtcaag

SEQ ID NO: 73062 - DNA, 22 bp, Artificial Sequence
  Synthetic oligonucleotide; TTT chr11 5164659 5164680 5164676 5164681 +
gtattggagtcaagcggccttg

SEQ ID NO: 73063 - DNA, 22 bp, Artificial Sequence
  Synthetic oligonucleotide; TTG chr11 5164660 5164681 5164677 5164682 +
tattggagtcaagcggccttgc

SEQ ID NO: 73064 - DNA, 22 bp, Artificial Sequence
  Synthetic oligonucleotide; TTG chr11 5164665 5164686 5164682 5164687 +
gagtcaagcggccttgcagaag

SEQ ID NO: 73065 - DNA, 22 bp, Artificial Sequence
  Synthetic oligonucleotide; CTT chr11 5164680 5164701 5164697 5164702 +
gcagaagaaaataaggcattta

SEQ ID NO: 73066 - DNA, 22 bp, Artificial Sequence
  Synthetic oligonucleotide; TTG chr11 5164681 5164702 5164698 5164703 +
cagaagaaaataaggcatttag

SEQ ID NO: 73067 - DNA, 22 bp, Artificial Sequence
  Synthetic oligonucleotide; TTT chr11 5164701 5164722 5164718 5164723 +
aggttttaggtcaggtgtgagt

SEQ ID NO: 73068 - DNA, 22 bp, Artificial Sequence
  Synthetic oligonucleotide; TTA chr11 5164702 5164723 5164719 5164724 +
ggttttaggtcaggtgtgagtt

SEQ ID NO: 73069 - DNA, 22 bp, Artificial Sequence
  Synthetic oligonucleotide; TTT chr11 5164707 5164728 5164724 5164729 +
taggtcaggtgtgagttgaaga

SEQ ID NO: 73070 - DNA, 22 bp, Artificial Sequence
  Synthetic oligonucleotide; TTT chr11 5164708 5164729 5164725 5164730 +
aggtcaggtgtgagttgaagag

SEQ ID NO: 73071 - DNA, 22 bp, Artificial Sequence
  Synthetic oligonucleotide; TTA chr11 5164709 5164730 5164726 5164731 +
ggtcaggtgtgagttgaagagg

SEQ ID NO: 73072 - DNA, 22 bp, Artificial Sequence
  Synthetic oligonucleotide; TTG chr11 5164725 5164746 5164742 5164747 +
aagaggttttaagttcttgaga

SEQ ID NO: 73073 - DNA, 22 bp, Artificial Sequence
  Synthetic oligonucleotide; TTT chr11 5164734 5164755 5164751 5164756 +
taagttcttgagagcacaggct

SEQ ID NO: 73074 - DNA, 22 bp, Artificial Sequence
  Synthetic oligonucleotide; TTT chr11 5164735 5164756 5164752 5164757 +
aagttcttgagagcacaggcta

SEQ ID NO: 73075 - DNA, 22 bp, Artificial Sequence
  Synthetic oligonucleotide; TTA chr11 5164736 5164757 5164753 5164758 +
agttcttgagagcacaggctaa

SEQ ID NO: 73076 - DNA, 22 bp, Artificial Sequence
  Synthetic oligonucleotide; TTC chr11 5164741 5164762 5164758 5164763 +
ttgagagcacaggctaagggag

SEQ ID NO: 73077 - DNA, 22 bp, Artificial Sequence
  Synthetic oligonucleotide; CTT chr11 5164743 5164764 5164760 5164765 +
gagagcacaggctaagggagag

SEQ ID NO: 73078 - DNA, 22 bp, Artificial Sequence
  Synthetic oligonucleotide; TTG chr11 5164744 5164765 5164761 5164766 +
agagcacaggctaagggagagg

SEQ ID NO: 73079 - DNA, 22 bp, Artificial Sequence
  Synthetic oligonucleotide; CTA chr11 5164757 5164778 5164774 5164779 +
agggagagggaggaatggaggg

SEQ ID NO: 73080 - DNA, 22 bp, Artificial Sequence
  Synthetic oligonucleotide; TTG chr11 5164789 5164810 5164806 5164811 +
cccctagtgaaggaggcaagcc

SEQ ID NO: 73081 - DNA, 22 bp, Artificial Sequence
  Synthetic oligonucleotide; CTA chr11 5164795 5164816 5164812 5164817 +
gtgaaggaggcaagcccagaga

SEQ ID NO: 73082 - DNA, 22 bp, Artificial Sequence
  Synthetic oligonucleotide; TTC chr11 5164851 5164872 5164868 5164873 +
gggggttcttactcaccagaaa

SEQ ID NO: 73083 - DNA, 22 bp, Artificial Sequence
  Synthetic oligonucleotide; TTC chr11 5164859 5164880 5164876 5164881 +
ttactcaccagaaaaatgggca

SEQ ID NO: 73084 - DNA, 22 bp, Artificial Sequence
  Synthetic oligonucleotide; CTT chr11 5164861 5164882 5164878 5164883 +
actcaccagaaaaatgggcaag

SEQ ID NO: 73085 - DNA, 22 bp, Artificial Sequence
  Synthetic oligonucleotide; TTA chr11 5164862 5164883 5164879 5164884 +
ctcaccagaaaaatgggcaagg

SEQ ID NO: 73086 - DNA, 22 bp, Artificial Sequence
  Synthetic oligonucleotide; CTC chr11 5164865 5164886 5164882 5164887 +
accagaaaaatgggcaaggggt

SEQ ID NO: 73087 - DNA, 22 bp, Artificial Sequence
  Synthetic oligonucleotide; TTG chr11 5164889 5164910 5164906 5164911 +
gggcacggaaataaggggttgg

SEQ ID NO: 73088 - DNA, 22 bp, Artificial Sequence
  Synthetic oligonucleotide; TTG chr11 5164910 5164931 5164927 5164932 +
gggtgcagagataagaggtcag

SEQ ID NO: 73089 - DNA, 22 bp, Artificial Sequence
  Synthetic oligonucleotide; TTG chr11 5164952 5164973 5164969 5164974 +
gggtgcagagataagaggttgg

SEQ ID NO: 73090 - DNA, 22 bp, Artificial Sequence
  Synthetic oligonucleotide; TTG chr11 5164973 5164994 5164990 5164995 +
gggcacagaaataagggatcgg

SEQ ID NO: 73091 - DNA, 22 bp, Artificial Sequence
  Synthetic oligonucleotide; TTG chr11 5165015 5165036 5165032 5165037 +
gggtgcagaaataagggatcag

SEQ ID NO: 73092 - DNA, 22 bp, Artificial Sequence
  Synthetic oligonucleotide; TTG chr11 5165078 5165099 5165095 5165100 +
gggtgcagagataagaggatgg

SEQ ID NO: 73093 - DNA, 22 bp, Artificial Sequence
  Synthetic oligonucleotide; CTG chr11 5165127 5165148 5165144 5165149 +
agataagaggttggggcacaga

SEQ ID NO: 73094 - DNA, 22 bp, Artificial Sequence
  Synthetic oligonucleotide; TTG chr11 5165140 5165161 5165157 5165162 +
gggcacagaaataagggattgg

SEQ ID NO: 73095 - DNA, 22 bp, Artificial Sequence
  Synthetic oligonucleotide; TTG chr11 5165161 5165182 5165178 5165183 +
gggttcttgcccccagaaaagc

SEQ ID NO: 73096 - DNA, 22 bp, Artificial Sequence
  Synthetic oligonucleotide; TTC chr11 5165167 5165188 5165184 5165189 +
ttgcccccagaaaagcagtgaa

SEQ ID NO: 73097 - DNA, 22 bp, Artificial Sequence
  Synthetic oligonucleotide; CTT chr11 5165169 5165190 5165186 5165191 +
gcccccagaaaagcagtgaagg

SEQ ID NO: 73098 - DNA, 22 bp, Artificial Sequence
  Synthetic oligonucleotide; TTG chr11 5165170 5165191 5165187 5165192 +
cccccagaaaagcagtgaaggg

SEQ ID NO: 73099 - DNA, 22 bp, Artificial Sequence
  Synthetic oligonucleotide; TTG chr11 5165217 5165238 5165234 5165239 +
gggtacttacccccctccagaa

SEQ ID NO: 73100 - DNA, 22 bp, Artificial Sequence
  Synthetic oligonucleotide; CTT chr11 5165225 5165246 5165242 5165247 +
acccccctccagaaaagtggga

SEQ ID NO: 73101 - DNA, 22 bp, Artificial Sequence
  Synthetic oligonucleotide; TTA chr11 5165226 5165247 5165243 5165248 +
cccccctccagaaaagtgggat

SEQ ID NO: 73102 - DNA, 22 bp, Artificial Sequence
  Synthetic oligonucleotide; CTC chr11 5165234 5165255 5165251 5165256 +
cagaaaagtgggatttgccgct

SEQ ID NO: 73103 - DNA, 22 bp, Artificial Sequence
  Synthetic oligonucleotide; TTT chr11 5165250 5165271 5165267 5165272 +
gccgctaagggtgaaggaccaa

SEQ ID NO: 73104 - DNA, 22 bp, Artificial Sequence
  Synthetic oligonucleotide; TTG chr11 5165251 5165272 5165268 5165273 +
ccgctaagggtgaaggaccaag

SEQ ID NO: 73105 - DNA, 22 bp, Artificial Sequence
  Synthetic oligonucleotide; CTA chr11 5165257 5165278 5165274 5165279 +
agggtgaaggaccaaggcaggc

SEQ ID NO: 73106 - DNA, 22 bp, Artificial Sequence
  Synthetic oligonucleotide; CTG chr11 5165286 5165307 5165303 5165308 +
cgtggtctgacacctctgaaac

SEQ ID NO: 73107 - DNA, 22 bp, Artificial Sequence
  Synthetic oligonucleotide; CTG chr11 5165295 5165316 5165312 5165317 +
acacctctgaaacatggtttaa

SEQ ID NO: 73108 - DNA, 22 bp, Artificial Sequence
  Synthetic oligonucleotide; CTC chr11 5165302 5165323 5165319 5165324 +
tgaaacatggtttaataatcag

SEQ ID NO: 73109 - DNA, 22 bp, Artificial Sequence
  Synthetic oligonucleotide; CTG chr11 5165304 5165325 5165321 5165326 +
aaacatggtttaataatcagag

SEQ ID NO: 73110 - DNA, 22 bp, Artificial Sequence
  Synthetic oligonucleotide; TTT chr11 5165315 5165336 5165332 5165337 +
aataatcagagaggtgtccctg

SEQ ID NO: 73111 - DNA, 22 bp, Artificial Sequence
  Synthetic oligonucleotide; TTA chr11 5165316 5165337 5165333 5165338 +
ataatcagagaggtgtccctgc

SEQ ID NO: 73112 - DNA, 22 bp, Artificial Sequence
  Synthetic oligonucleotide; CTG chr11 5165337 5165358 5165354 5165359 +
caatgattaaacaccaagggaa

SEQ ID NO: 73113 - DNA, 22 bp, Artificial Sequence
  Synthetic oligonucleotide; TTA chr11 5165346 5165367 5165363 5165368 +
aacaccaagggaaggctgcctt

SEQ ID NO: 73114 - DNA, 22 bp, Artificial Sequence
  Synthetic oligonucleotide; CTG chr11 5165364 5165385 5165381 5165386 +
ccttcccagtccgtgactggca

SEQ ID NO: 73115 - DNA, 22 bp, Artificial Sequence
  Synthetic oligonucleotide; CTT chr11 5165368 5165389 5165385 5165390 +
cccagtccgtgactggcaccgg

SEQ ID NO: 73116 - DNA, 22 bp, Artificial Sequence
  Synthetic oligonucleotide; TTC chr11 5165369 5165390 5165386 5165391 +
ccagtccgtgactggcaccgga

SEQ ID NO: 73117 - DNA, 22 bp, Artificial Sequence
  Synthetic oligonucleotide; CTG chr11 5165383 5165404 5165400 5165405 +
gcaccggagttttgggtccacg

SEQ ID NO: 73118 - DNA, 22 bp, Artificial Sequence
  Synthetic oligonucleotide; TTT chr11 5165395 5165416 5165412 5165417 +
tgggtccacggataaaacatgt

SEQ ID NO: 73119 - DNA, 22 bp, Artificial Sequence
  Synthetic oligonucleotide; TTT chr11 5165396 5165417 5165413 5165418 +
gggtccacggataaaacatgtc

SEQ ID NO: 73120 - DNA, 22 bp, Artificial Sequence
  Synthetic oligonucleotide; TTG chr11 5165397 5165418 5165414 5165419 +
ggtccacggataaaacatgtct

SEQ ID NO: 73121 - DNA, 22 bp, Artificial Sequence
  Synthetic oligonucleotide; CTC chr11 5165420 5165441 5165437 5165442 +
ctttgtctctactggaaaatga

SEQ ID NO: 73122 - DNA, 22 bp, Artificial Sequence
  Synthetic oligonucleotide; CTT chr11 5165423 5165444 5165440 5165445 +
tgtctctactggaaaatgaaag

SEQ ID NO: 73123 - DNA, 22 bp, Artificial Sequence
  Synthetic oligonucleotide; TTT chr11 5165424 5165445 5165441 5165446 +
gtctctactggaaaatgaaagg

SEQ ID NO: 73124 - DNA, 22 bp, Artificial Sequence
  Synthetic oligonucleotide; TTG chr11 5165425 5165446 5165442 5165447 +
tctctactggaaaatgaaagga

SEQ ID NO: 73125 - DNA, 22 bp, Artificial Sequence
  Synthetic oligonucleotide; CTC chr11 5165429 5165450 5165446 5165451 +
tactggaaaatgaaaggaattg

SEQ ID NO: 73126 - DNA, 22 bp, Artificial Sequence
  Synthetic oligonucleotide; CTA chr11 5165431 5165452 5165448 5165453 +
ctggaaaatgaaaggaattgaa

SEQ ID NO: 73127 - DNA, 22 bp, Artificial Sequence
  Synthetic oligonucleotide; CTG chr11 5165434 5165455 5165451 5165456 +
gaaaatgaaaggaattgaaatt

SEQ ID NO: 73128 - DNA, 22 bp, Artificial Sequence
  Synthetic oligonucleotide; TTG chr11 5165451 5165472 5165468 5165473 +
aaattaagagaagggagaaatt

SEQ ID NO: 73129 - DNA, 22 bp, Artificial Sequence
  Synthetic oligonucleotide; TTA chr11 5165457 5165478 5165474 5165479 +
agagaagggagaaattgaagtg

SEQ ID NO: 73130 - DNA, 22 bp, Artificial Sequence
  Synthetic oligonucleotide; TTG chr11 5165474 5165495 5165491 5165496 +
aagtgtggtgccaagattgaaa

SEQ ID NO: 73131 - DNA, 22 bp, Artificial Sequence
  Synthetic oligonucleotide; TTG chr11 5165493 5165514 5165510 5165515 +
aaaggagaaagaagttgaggga

SEQ ID NO: 73132 - DNA, 22 bp, Artificial Sequence
  Synthetic oligonucleotide; TTG chr11 5165510 5165531 5165527 5165532 +
agggatagtgagggaggttgga

SEQ ID NO: 73133 - DNA, 22 bp, Artificial Sequence
  Synthetic oligonucleotide; TTG chr11 5165530 5165551 5165547 5165552 +
gagaagacagtaaaaagaggcc

SEQ ID NO: 73134 - DNA, 22 bp, Artificial Sequence
  Synthetic oligonucleotide; CTT chr11 5165556 5165577 5165573 5165578 +
accggatttgaaattggtgaaa

SEQ ID NO: 73135 - DNA, 22 bp, Artificial Sequence
  Synthetic oligonucleotide; TTA chr11 5165557 5165578 5165574 5165579 +
ccggatttgaaattggtgaaat

SEQ ID NO: 73136 - DNA, 22 bp, Artificial Sequence
  Synthetic oligonucleotide; TTT chr11 5165565 5165586 5165582 5165587 +
gaaattggtgaaatgtttcttg

SEQ ID NO: 73137 - DNA, 22 bp, Artificial Sequence
  Synthetic oligonucleotide; TTG chr11 5165566 5165587 5165583 5165588 +
aaattggtgaaatgtttcttgg

SEQ ID NO: 73138 - DNA, 22 bp, Artificial Sequence
  Synthetic oligonucleotide; TTG chr11 5165572 5165593 5165589 5165594 +
gtgaaatgtttcttgggctggt

SEQ ID NO: 73139 - DNA, 22 bp, Artificial Sequence
  Synthetic oligonucleotide; TTT chr11 5165583 5165604 5165600 5165605 +
cttgggctggtcagtttgagga

SEQ ID NO: 73140 - DNA, 22 bp, Artificial Sequence
  Synthetic oligonucleotide; TTC chr11 5165584 5165605 5165601 5165606 +
ttgggctggtcagtttgaggac

SEQ ID NO: 73141 - DNA, 22 bp, Artificial Sequence
  Synthetic oligonucleotide; CTT chr11 5165586 5165607 5165603 5165608 +
gggctggtcagtttgaggacct

SEQ ID NO: 73142 - DNA, 22 bp, Artificial Sequence
  Synthetic oligonucleotide; TTG chr11 5165587 5165608 5165604 5165609 +
ggctggtcagtttgaggacctg

SEQ ID NO: 73143 - DNA, 22 bp, Artificial Sequence
  Synthetic oligonucleotide; CTG chr11 5165592 5165613 5165609 5165614 +
gtcagtttgaggacctgaggtc

SEQ ID NO: 73144 - DNA, 22 bp, Artificial Sequence
  Synthetic oligonucleotide; TTT chr11 5165600 5165621 5165617 5165622 +
gaggacctgaggtcgtaggtgg

SEQ ID NO: 73145 - DNA, 22 bp, Artificial Sequence
  Synthetic oligonucleotide; TTG chr11 5165601 5165622 5165618 5165623 +
aggacctgaggtcgtaggtgga

SEQ ID NO: 73146 - DNA, 22 bp, Artificial Sequence
  Synthetic oligonucleotide; CTG chr11 5165609 5165630 5165626 5165631 +
aggtcgtaggtggatctttctc

SEQ ID NO: 73147 - DNA, 22 bp, Artificial Sequence
  Synthetic oligonucleotide; CTT chr11 5165627 5165648 5165644 5165649 +
tctcacggagcaaagagcagga

SEQ ID NO: 73148 - DNA, 22 bp, Artificial Sequence
  Synthetic oligonucleotide; TTT chr11 5165628 5165649 5165645 5165650 +
ctcacggagcaaagagcaggag

SEQ ID NO: 73149 - DNA, 22 bp, Artificial Sequence
  Synthetic oligonucleotide; TTC chr11 5165629 5165650 5165646 5165651 +
tcacggagcaaagagcaggagg

SEQ ID NO: 73150 - DNA, 22 bp, Artificial Sequence
  Synthetic oligonucleotide; CTC chr11 5165631 5165652 5165648 5165653 +
acggagcaaagagcaggaggac

SEQ ID NO: 73151 - DNA, 22 bp, Artificial Sequence
  Synthetic oligonucleotide; TTG chr11 5165662 5165683 5165679 5165684 +
atctcccaagggaggtccccca

SEQ ID NO: 73152 - DNA, 22 bp, Artificial Sequence
  Synthetic oligonucleotide; CTC chr11 5165667 5165688 5165684 5165689 +
ccaagggaggtcccccaatctg

SEQ ID NO: 73153 - DNA, 22 bp, Artificial Sequence
  Synthetic oligonucleotide; CTG chr11 5165689 5165710 5165706 5165711 +
agtcacggcaccaaatttcatg

SEQ ID NO: 73154 - DNA, 22 bp, Artificial Sequence
  Synthetic oligonucleotide; TTT chr11 5165707 5165728 5165724 5165729 +
catgcgcgtccatatgaagaga

SEQ ID NO: 73155 - DNA, 22 bp, Artificial Sequence
  Synthetic oligonucleotide; TTC chr11 5165708 5165729 5165725 5165730 +
atgcgcgtccatatgaagagac

SEQ ID NO: 73156 - DNA, 22 bp, Artificial Sequence
  Synthetic oligonucleotide; CTA chr11 5165732 5165753 5165749 5165754 +
ccaaacaggctttgtgtaagca

SEQ ID NO: 73157 - DNA, 22 bp, Artificial Sequence
  Synthetic oligonucleotide; CTT chr11 5165744 5165765 5165761 5165766 +
tgtgtaagcaacaaggctgttt

SEQ ID NO: 73158 - DNA, 22 bp, Artificial Sequence
  Synthetic oligonucleotide; TTT chr11 5165745 5165766 5165762 5165767 +
gtgtaagcaacaaggctgttta

SEQ ID NO: 73159 - DNA, 22 bp, Artificial Sequence
  Synthetic oligonucleotide; TTG chr11 5165746 5165767 5165763 5165768 +
tgtaagcaacaaggctgtttat

SEQ ID NO: 73160 - DNA, 22 bp, Artificial Sequence
  Synthetic oligonucleotide; CTG chr11 5165763 5165784 5165780 5165785 +
tttatttcacctgggtgcaggc

SEQ ID NO: 73161 - DNA, 22 bp, Artificial Sequence
  Synthetic oligonucleotide; TTT chr11 5165766 5165787 5165783 5165788 +
atttcacctgggtgcaggcagg

SEQ ID NO: 73162 - DNA, 22 bp, Artificial Sequence
  Synthetic oligonucleotide; TTA chr11 5165767 5165788 5165784 5165789 +
tttcacctgggtgcaggcaggc

SEQ ID NO: 73163 - DNA, 22 bp, Artificial Sequence
  Synthetic oligonucleotide; TTT chr11 5165770 5165791 5165787 5165792 +
cacctgggtgcaggcaggctga

SEQ ID NO: 73164 - DNA, 22 bp, Artificial Sequence
  Synthetic oligonucleotide; TTC chr11 5165771 5165792 5165788 5165793 +
acctgggtgcaggcaggctgag

SEQ ID NO: 73165 - DNA, 22 bp, Artificial Sequence
  Synthetic oligonucleotide; CTG chr11 5165776 5165797 5165793 5165798 +
ggtgcaggcaggctgagtccaa

SEQ ID NO: 73166 - DNA, 22 bp, Artificial Sequence
  Synthetic oligonucleotide; CTG chr11 5165791 5165812 5165808 5165813 +
agtccaaaaagagagtcagcaa

SEQ ID NO: 73167 - DNA, 22 bp, Artificial Sequence
  Synthetic oligonucleotide; CTG chr11 5165834 5165855 5165851 5165856 +
ttttataagatttgggtaggta

SEQ ID NO: 73168 - DNA, 22 bp, Artificial Sequence
  Synthetic oligonucleotide; TTT chr11 5165837 5165858 5165854 5165859 +
tataagatttgggtaggtaaag

SEQ ID NO: 73169 - DNA, 22 bp, Artificial Sequence
  Synthetic oligonucleotide; TTT chr11 5165838 5165859 5165855 5165860 +
ataagatttgggtaggtaaagg

SEQ ID NO: 73170 - DNA, 22 bp, Artificial Sequence
  Synthetic oligonucleotide; TTA chr11 5165839 5165860 5165856 5165861 +
taagatttgggtaggtaaagga

SEQ ID NO: 73171 - DNA, 22 bp, Artificial Sequence
  Synthetic oligonucleotide; TTT chr11 5165847 5165868 5165864 5165869 +
gggtaggtaaaggaaaattaca

SEQ ID NO: 73172 - DNA, 22 bp, Artificial Sequence
  Synthetic oligonucleotide; TTG chr11 5165848 5165869 5165865 5165870 +
ggtaggtaaaggaaaattacag

SEQ ID NO: 73173 - DNA, 22 bp, Artificial Sequence
  Synthetic oligonucleotide; TTA chr11 5165867 5165888 5165884 5165889 +
cagtcaaaggggggttgttctc

SEQ ID NO: 73174 - DNA, 22 bp, Artificial Sequence
  Synthetic oligonucleotide; TTG chr11 5165884 5165905 5165901 5165906 +
ttctctggcgggcaggagtggg

SEQ ID NO: 73175 - DNA, 22 bp, Artificial Sequence
  Synthetic oligonucleotide; TTC chr11 5165887 5165908 5165904 5165909 +
tctggcgggcaggagtgggggt

SEQ ID NO: 73176 - DNA, 22 bp, Artificial Sequence
  Synthetic oligonucleotide; CTC chr11 5165889 5165910 5165906 5165911 +
tggcgggcaggagtgggggtca

SEQ ID NO: 73177 - DNA, 22 bp, Artificial Sequence
  Synthetic oligonucleotide; CTG chr11 5165891 5165912 5165908 5165913 +
gcgggcaggagtgggggtcaca

SEQ ID NO: 73178 - DNA, 22 bp, Artificial Sequence
  Synthetic oligonucleotide; CTC chr11 5165921 5165942 5165938 5165943 +
agtaggggagcttttgagccag

SEQ ID NO: 73179 - DNA, 22 bp, Artificial Sequence
  Synthetic oligonucleotide; CTT chr11 5165934 5165955 5165951 5165956 +
ttgagccaggatgagccaggag

SEQ ID NO: 73180 - DNA, 22 bp, Artificial Sequence
  Synthetic oligonucleotide; TTT chr11 5165935 5165956 5165952 5165957 +
tgagccaggatgagccaggaga

SEQ ID NO: 73181 - DNA, 22 bp, Artificial Sequence
  Synthetic oligonucleotide; TTT chr11 5165936 5165957 5165953 5165958 +
gagccaggatgagccaggagaa

SEQ ID NO: 73182 - DNA, 22 bp, Artificial Sequence
  Synthetic oligonucleotide; TTG chr11 5165937 5165958 5165954 5165959 +
agccaggatgagccaggagaag

SEQ ID NO: 73183 - DNA, 22 bp, Artificial Sequence
  Synthetic oligonucleotide; TTT chr11 5165965 5165986 5165982 5165987 +
cacaagacaatgtcatcagtta

SEQ ID NO: 73184 - DNA, 22 bp, Artificial Sequence
  Synthetic oligonucleotide; TTC chr11 5165966 5165987 5165983 5165988 +
acaagacaatgtcatcagttaa

SEQ ID NO: 73185 - DNA, 22 bp, Artificial Sequence
  Synthetic oligonucleotide; TTA chr11 5165987 5166008 5166004 5166009 +
aggcaggaacaggccattttca

SEQ ID NO: 73186 - DNA, 22 bp, Artificial Sequence
  Synthetic oligonucleotide; TTT chr11 5166006 5166027 5166023 5166028 +
tcacttcttttgtggtggaatg

SEQ ID NO: 73187 - DNA, 22 bp, Artificial Sequence
  Synthetic oligonucleotide; TTT chr11 5166007 5166028 5166024 5166029 +
cacttcttttgtggtggaatgt

SEQ ID NO: 73188 - DNA, 22 bp, Artificial Sequence
  Synthetic oligonucleotide; TTC chr11 5166008 5166029 5166025 5166030 +
acttcttttgtggtggaatgtc

SEQ ID NO: 73189 - DNA, 22 bp, Artificial Sequence
  Synthetic oligonucleotide; CTT chr11 5166012 5166033 5166029 5166034 +
cttttgtggtggaatgtcatca

SEQ ID NO: 73190 - DNA, 22 bp, Artificial Sequence
  Synthetic oligonucleotide; TTC chr11 5166013 5166034 5166030 5166035 +
ttttgtggtggaatgtcatcag

SEQ ID NO: 73191 - DNA, 22 bp, Artificial Sequence
  Synthetic oligonucleotide; CTT chr11 5166015 5166036 5166032 5166037 +
ttgtggtggaatgtcatcagtt

SEQ ID NO: 73192 - DNA, 22 bp, Artificial Sequence
  Synthetic oligonucleotide; TTT chr11 5166016 5166037 5166033 5166038 +
tgtggtggaatgtcatcagtta

SEQ ID NO: 73193 - DNA, 22 bp, Artificial Sequence
  Synthetic oligonucleotide; TTT chr11 5166017 5166038 5166034 5166039 +
gtggtggaatgtcatcagttaa

SEQ ID NO: 73194 - DNA, 22 bp, Artificial Sequence
  Synthetic oligonucleotide; TTG chr11 5166018 5166039 5166035 5166040 +
tggtggaatgtcatcagttaag

SEQ ID NO: 73195 - DNA, 22 bp, Artificial Sequence
  Synthetic oligonucleotide; TTA chr11 5166038 5166059 5166055 5166060 +
aggcagaaactggccatctgta

SEQ ID NO: 73196 - DNA, 22 bp, Artificial Sequence
  Synthetic oligonucleotide; CTG chr11 5166050 5166071 5166067 5166072 +
gccatctgtatgtgtatatgca

SEQ ID NO: 73197 - DNA, 22 bp, Artificial Sequence
  Synthetic oligonucleotide; CTG chr11 5166058 5166079 5166075 5166080 +
tatgtgtatatgcaggtcacag

SEQ ID NO: 73198 - DNA, 22 bp, Artificial Sequence
  Synthetic oligonucleotide; CTT chr11 5166095 5166116 5166112 5166117 +
agcttgggctcagaggcctgac

SEQ ID NO: 73199 - DNA, 22 bp, Artificial Sequence
  Synthetic oligonucleotide; TTA chr11 5166096 5166117 5166113 5166118 +
gcttgggctcagaggcctgaca

SEQ ID NO: 73200 - DNA, 22 bp, Artificial Sequence
  Synthetic oligonucleotide; CTT chr11 5166100 5166121 5166117 5166122 +
gggctcagaggcctgacattca

SEQ ID NO: 73201 - DNA, 22 bp, Artificial Sequence
  Synthetic oligonucleotide; TTG chr11 5166101 5166122 5166118 5166123 +
ggctcagaggcctgacattcag

SEQ ID NO: 73202 - DNA, 22 bp, Artificial Sequence
  Synthetic oligonucleotide; CTC chr11 5166106 5166127 5166123 5166128 +
agaggcctgacattcaggagca

SEQ ID NO: 73203 - DNA, 22 bp, Artificial Sequence
  Synthetic oligonucleotide; CTG chr11 5166115 5166136 5166132 5166137 +
acattcaggagcatactgtttg

SEQ ID NO: 73204 - DNA, 22 bp, Artificial Sequence
  Synthetic oligonucleotide; TTC chr11 5166121 5166142 5166138 5166143 +
aggagcatactgtttgatttcc

SEQ ID NO: 73205 - DNA, 22 bp, Artificial Sequence
  Synthetic oligonucleotide; CTG chr11 5166133 5166154 5166150 5166155 +
tttgatttccatatgtttctat

SEQ ID NO: 73206 - DNA, 22 bp, Artificial Sequence
  Synthetic oligonucleotide; TTT chr11 5166136 5166157 5166153 5166158 +
gatttccatatgtttctatatt

SEQ ID NO: 73207 - DNA, 22 bp, Artificial Sequence
  Synthetic oligonucleotide; TTG chr11 5166137 5166158 5166154 5166159 +
atttccatatgtttctatattt

SEQ ID NO: 73208 - DNA, 22 bp, Artificial Sequence
  Synthetic oligonucleotide; TTT chr11 5166141 5166162 5166158 5166163 +
ccatatgtttctatattttctg

SEQ ID NO: 73209 - DNA, 22 bp, Artificial Sequence
  Synthetic oligonucleotide; TTC chr11 5166142 5166163 5166159 5166164 +
catatgtttctatattttctga

SEQ ID NO: 73210 - DNA, 22 bp, Artificial Sequence
  Synthetic oligonucleotide; TTT chr11 5166151 5166172 5166168 5166173 +
ctatattttctgatgatcttct

SEQ ID NO: 73211 - DNA, 22 bp, Artificial Sequence
  Synthetic oligonucleotide; TTC chr11 5166152 5166173 5166169 5166174 +
tatattttctgatgatcttctt

SEQ ID NO: 73212 - DNA, 22 bp, Artificial Sequence
  Synthetic oligonucleotide; CTA chr11 5166154 5166175 5166171 5166176 +
tattttctgatgatcttcttgt

SEQ ID NO: 73213 - DNA, 22 bp, Artificial Sequence
  Synthetic oligonucleotide; TTT chr11 5166159 5166180 5166176 5166181 +
tctgatgatcttcttgttattc

SEQ ID NO: 73214 - DNA, 22 bp, Artificial Sequence
  Synthetic oligonucleotide; TTT chr11 5166160 5166181 5166177 5166182 +
ctgatgatcttcttgttattca

SEQ ID NO: 73215 - DNA, 22 bp, Artificial Sequence
  Synthetic oligonucleotide; TTC chr11 5166161 5166182 5166178 5166183 +
tgatgatcttcttgttattcat

SEQ ID NO: 73216 - DNA, 22 bp, Artificial Sequence
  Synthetic oligonucleotide; CTG chr11 5166163 5166184 5166180 5166185 +
atgatcttcttgttattcattt

SEQ ID NO: 73217 - DNA, 22 bp, Artificial Sequence
  Synthetic oligonucleotide; CTT chr11 5166171 5166192 5166188 5166193 +
cttgttattcatttctagtttt

SEQ ID NO: 73218 - DNA, 22 bp, Artificial Sequence
  Synthetic oligonucleotide; TTC chr11 5166172 5166193 5166189 5166194 +
ttgttattcatttctagtttta

SEQ ID NO: 73219 - DNA, 22 bp, Artificial Sequence
  Synthetic oligonucleotide; CTT chr11 5166174 5166195 5166191 5166196 +
gttattcatttctagttttatt

SEQ ID NO: 73220 - DNA, 22 bp, Artificial Sequence
  Synthetic oligonucleotide; TTG chr11 5166175 5166196 5166192 5166197 +
ttattcatttctagttttattc

SEQ ID NO: 73221 - DNA, 22 bp, Artificial Sequence
  Synthetic oligonucleotide; TTA chr11 5166178 5166199 5166195 5166200 +
ttcatttctagttttattccac

SEQ ID NO: 73222 - DNA, 22 bp, Artificial Sequence
  Synthetic oligonucleotide; TTC chr11 5166181 5166202 5166198 5166203 +
atttctagttttattccactgt

SEQ ID NO: 73223 - DNA, 22 bp, Artificial Sequence
  Synthetic oligonucleotide; TTT chr11 5166185 5166206 5166202 5166207 +
ctagttttattccactgtggtc

SEQ ID NO: 73224 - DNA, 22 bp, Artificial Sequence
  Synthetic oligonucleotide; TTC chr11 5166186 5166207 5166203 5166208 +
tagttttattccactgtggtca

SEQ ID NO: 73225 - DNA, 22 bp, Artificial Sequence
  Synthetic oligonucleotide; CTA chr11 5166188 5166209 5166205 5166210 +
gttttattccactgtggtcaga

SEQ ID NO: 73226 - DNA, 22 bp, Artificial Sequence
  Synthetic oligonucleotide; TTT chr11 5166192 5166213 5166209 5166214 +
tattccactgtggtcagaaaat

SEQ ID NO: 73227 - DNA, 22 bp, Artificial Sequence
  Synthetic oligonucleotide; TTT chr11 5166193 5166214 5166210 5166215 +
attccactgtggtcagaaaata

SEQ ID NO: 73228 - DNA, 22 bp, Artificial Sequence
  Synthetic oligonucleotide; TTA chr11 5166194 5166215 5166211 5166216 +
ttccactgtggtcagaaaatat

SEQ ID NO: 73229 - DNA, 22 bp, Artificial Sequence
  Synthetic oligonucleotide; TTC chr11 5166197 5166218 5166214 5166219 +
cactgtggtcagaaaatatact

SEQ ID NO: 73230 - DNA, 22 bp, Artificial Sequence
  Synthetic oligonucleotide; CTG chr11 5166202 5166223 5166219 5166224 +
tggtcagaaaatatacttgata

SEQ ID NO: 73231 - DNA, 22 bp, Artificial Sequence
  Synthetic oligonucleotide; CTT chr11 5166220 5166241 5166237 5166242 +
gataaaatttctacttctgaaa

SEQ ID NO: 73232 - DNA, 22 bp, Artificial Sequence
  Synthetic oligonucleotide; TTG chr11 5166221 5166242 5166238 5166243 +
ataaaatttctacttctgaaaa

SEQ ID NO: 73233 - DNA, 22 bp, Artificial Sequence
  Synthetic oligonucleotide; TTT chr11 5166230 5166251 5166247 5166252 +
ctacttctgaaaaatttgtaca

SEQ ID NO: 73234 - DNA, 22 bp, Artificial Sequence
  Synthetic oligonucleotide; TTC chr11 5166231 5166252 5166248 5166253 +
tacttctgaaaaatttgtacaa

SEQ ID NO: 73235 - DNA, 22 bp, Artificial Sequence
  Synthetic oligonucleotide; CTA chr11 5166233 5166254 5166250 5166255 +
cttctgaaaaatttgtacaaac

SEQ ID NO: 73236 - DNA, 22 bp, Artificial Sequence
  Synthetic oligonucleotide; CTT chr11 5166236 5166257 5166253 5166258 +
ctgaaaaatttgtacaaactta

SEQ ID NO: 73237 - DNA, 22 bp, Artificial Sequence
  Synthetic oligonucleotide; TTC chr11 5166237 5166258 5166254 5166259 +
tgaaaaatttgtacaaacttac

SEQ ID NO: 73238 - DNA, 22 bp, Artificial Sequence
  Synthetic oligonucleotide; CTG chr11 5166239 5166260 5166256 5166261 +
aaaaatttgtacaaacttacct

SEQ ID NO: 73239 - DNA, 22 bp, Artificial Sequence
  Synthetic oligonucleotide; TTT chr11 5166247 5166268 5166264 5166269 +
gtacaaacttaccttgtggcct

SEQ ID NO: 73240 - DNA, 22 bp, Artificial Sequence
  Synthetic oligonucleotide; TTG chr11 5166248 5166269 5166265 5166270 +
tacaaacttaccttgtggccta

SEQ ID NO: 73241 - DNA, 22 bp, Artificial Sequence
  Synthetic oligonucleotide; CTT chr11 5166257 5166278 5166274 5166279 +
accttgtggcctaacatatggc

SEQ ID NO: 73242 - DNA, 22 bp, Artificial Sequence
  Synthetic oligonucleotide; TTA chr11 5166258 5166279 5166275 5166280 +
ccttgtggcctaacatatggcc

SEQ ID NO: 73243 - DNA, 22 bp, Artificial Sequence
  Synthetic oligonucleotide; CTT chr11 5166262 5166283 5166279 5166284 +
gtggcctaacatatggccttat

SEQ ID NO: 73244 - DNA, 22 bp, Artificial Sequence
  Synthetic oligonucleotide; TTG chr11 5166263 5166284 5166280 5166285 +
tggcctaacatatggccttatt

SEQ ID NO: 73245 - DNA, 22 bp, Artificial Sequence
  Synthetic oligonucleotide; CTA chr11 5166270 5166291 5166287 5166292 +
acatatggccttatttaggaaa

SEQ ID NO: 73246 - DNA, 22 bp, Artificial Sequence
  Synthetic oligonucleotide; CTT chr11 5166282 5166303 5166299 5166304 +
atttaggaaaatgttgtacatg

SEQ ID NO: 73247 - DNA, 22 bp, Artificial Sequence
  Synthetic oligonucleotide; TTA chr11 5166283 5166304 5166300 5166305 +
tttaggaaaatgttgtacatgc

SEQ ID NO: 73248 - DNA, 22 bp, Artificial Sequence
  Synthetic oligonucleotide; TTT chr11 5166286 5166307 5166303 5166308 +
aggaaaatgttgtacatgctgc

SEQ ID NO: 73249 - DNA, 22 bp, Artificial Sequence
  Synthetic oligonucleotide; TTA chr11 5166287 5166308 5166304 5166309 +
ggaaaatgttgtacatgctgct

SEQ ID NO: 73250 - DNA, 22 bp, Artificial Sequence
  Synthetic oligonucleotide; TTG chr11 5166298 5166319 5166315 5166320 +
tacatgctgctttaaagaaatg

SEQ ID NO: 73251 - DNA, 22 bp, Artificial Sequence
  Synthetic oligonucleotide; CTG chr11 5166307 5166328 5166324 5166329 +
ctttaaagaaatgtatcttctt

SEQ ID NO: 73252 - DNA, 22 bp, Artificial Sequence
  Synthetic oligonucleotide; CTT chr11 5166310 5166331 5166327 5166332 +
taaagaaatgtatcttcttcag

SEQ ID NO: 73253 - DNA, 22 bp, Artificial Sequence
  Synthetic oligonucleotide; TTT chr11 5166311 5166332 5166328 5166333 +
aaagaaatgtatcttcttcagc

SEQ ID NO: 73254 - DNA, 22 bp, Artificial Sequence
  Synthetic oligonucleotide; TTA chr11 5166312 5166333 5166329 5166334 +
aagaaatgtatcttcttcagca

SEQ ID NO: 73255 - DNA, 22 bp, Artificial Sequence
  Synthetic oligonucleotide; CTT chr11 5166326 5166347 5166343 5166348 +
cttcagcagttgggggacaagt

SEQ ID NO: 73256 - DNA, 22 bp, Artificial Sequence
  Synthetic oligonucleotide; TTC chr11 5166327 5166348 5166344 5166349 +
ttcagcagttgggggacaagtt

SEQ ID NO: 73257 - DNA, 22 bp, Artificial Sequence
  Synthetic oligonucleotide; CTT chr11 5166329 5166350 5166346 5166351 +
cagcagttgggggacaagttct

SEQ ID NO: 73258 - DNA, 22 bp, Artificial Sequence
  Synthetic oligonucleotide; TTC chr11 5166330 5166351 5166347 5166352 +
agcagttgggggacaagttctg

SEQ ID NO: 73259 - DNA, 22 bp, Artificial Sequence
  Synthetic oligonucleotide; TTG chr11 5166338 5166359 5166355 5166360 +
ggggacaagttctgttaatgtc

SEQ ID NO: 73260 - DNA, 22 bp, Artificial Sequence
  Synthetic oligonucleotide; TTC chr11 5166350 5166371 5166367 5166372 +
tgttaatgtcagttgggtctat

SEQ ID NO: 73261 - DNA, 22 bp, Artificial Sequence
  Synthetic oligonucleotide; CTG chr11 5166352 5166373 5166369 5166374 +
ttaatgtcagttgggtctatta

SEQ ID NO: 73262 - DNA, 22 bp, Artificial Sequence
  Synthetic oligonucleotide; TTA chr11 5166355 5166376 5166372 5166377 +
atgtcagttgggtctattagat

SEQ ID NO: 73263 - DNA, 22 bp, Artificial Sequence
  Synthetic oligonucleotide; TTG chr11 5166365 5166386 5166382 5166387 +
ggtctattagatatagtgggta

SEQ ID NO: 73264 - DNA, 22 bp, Artificial Sequence
  Synthetic oligonucleotide; CTA chr11 5166371 5166392 5166388 5166393 +
ttagatatagtgggtacattaa

SEQ ID NO: 73265 - DNA, 22 bp, Artificial Sequence
  Synthetic oligonucleotide; TTA chr11 5166374 5166395 5166391 5166396 +
gatatagtgggtacattaactg

SEQ ID NO: 73266 - DNA, 22 bp, Artificial Sequence
  Synthetic oligonucleotide; TTA chr11 5166392 5166413 5166409 5166414 +
actgtgttgttcatttgttgat

SEQ ID NO: 73267 - DNA, 22 bp, Artificial Sequence
  Synthetic oligonucleotide; CTG chr11 5166396 5166417 5166413 5166418 +
tgttgttcatttgttgattttt

SEQ ID NO: 73268 - DNA, 22 bp, Artificial Sequence
  Synthetic oligonucleotide; TTG chr11 5166401 5166422 5166418 5166423 +
ttcatttgttgatttttagtct

SEQ ID NO: 73269 - DNA, 22 bp, Artificial Sequence
  Synthetic oligonucleotide; TTC chr11 5166404 5166425 5166421 5166426 +
atttgttgatttttagtctggc

SEQ ID NO: 73270 - DNA, 22 bp, Artificial Sequence
  Synthetic oligonucleotide; TTT chr11 5166408 5166429 5166425 5166430 +
gttgatttttagtctggccgat

SEQ ID NO: 73271 - DNA, 22 bp, Artificial Sequence
  Synthetic oligonucleotide; TTG chr11 5166409 5166430 5166426 5166431 +
ttgatttttagtctggccgatc

SEQ ID NO: 73272 - DNA, 22 bp, Artificial Sequence
  Synthetic oligonucleotide; TTG chr11 5166412 5166433 5166429 5166434 +
atttttagtctggccgatctgt

SEQ ID NO: 73273 - DNA, 22 bp, Artificial Sequence
  Synthetic oligonucleotide; TTT chr11 5166416 5166437 5166433 5166438 +
ttagtctggccgatctgttcat

SEQ ID NO: 73274 - DNA, 22 bp, Artificial Sequence
  Synthetic oligonucleotide; TTT chr11 5166417 5166438 5166434 5166439 +
tagtctggccgatctgttcatt

SEQ ID NO: 73275 - DNA, 22 bp, Artificial Sequence
  Synthetic oligonucleotide; TTT chr11 5166418 5166439 5166435 5166440 +
agtctggccgatctgttcatta

SEQ ID NO: 73276 - DNA, 22 bp, Artificial Sequence
  Synthetic oligonucleotide; TTA chr11 5166419 5166440 5166436 5166441 +
gtctggccgatctgttcattac

SEQ ID NO: 73277 - DNA, 22 bp, Artificial Sequence
  Synthetic oligonucleotide; CTG chr11 5166424 5166445 5166441 5166446 +
gccgatctgttcattactgaga

SEQ ID NO: 73278 - DNA, 22 bp, Artificial Sequence
  Synthetic oligonucleotide; CTG chr11 5166433 5166454 5166450 5166455 +
ttcattactgagactgaagtgt

SEQ ID NO: 73279 - DNA, 22 bp, Artificial Sequence
  Synthetic oligonucleotide; TTC chr11 5166436 5166457 5166453 5166458 +
attactgagactgaagtgttta

SEQ ID NO: 73280 - DNA, 22 bp, Artificial Sequence
  Synthetic oligonucleotide; TTA chr11 5166440 5166461 5166457 5166462 +
ctgagactgaagtgtttaaagt

SEQ ID NO: 73281 - DNA, 22 bp, Artificial Sequence
  Synthetic oligonucleotide; CTG chr11 5166443 5166464 5166460 5166465 +
agactgaagtgtttaaagttcc

SEQ ID NO: 73282 - DNA, 22 bp, Artificial Sequence
  Synthetic oligonucleotide; CTG chr11 5166449 5166470 5166466 5166471 +
aagtgtttaaagttccctacta

SEQ ID NO: 73283 - DNA, 22 bp, Artificial Sequence
  Synthetic oligonucleotide; TTT chr11 5166457 5166478 5166474 5166479 +
aaagttccctactattattgta

SEQ ID NO: 73284 - DNA, 22 bp, Artificial Sequence
  Synthetic oligonucleotide; TTA chr11 5166458 5166479 5166475 5166480 +
aagttccctactattattgtat

SEQ ID NO: 73285 - DNA, 22 bp, Artificial Sequence
  Synthetic oligonucleotide; TTC chr11 5166464 5166485 5166481 5166486 +
cctactattattgtattgcagt

SEQ ID NO: 73286 - DNA, 22 bp, Artificial Sequence
  Synthetic oligonucleotide; CTA chr11 5166468 5166489 5166485 5166490 +
ctattattgtattgcagtctgt

SEQ ID NO: 73287 - DNA, 22 bp, Artificial Sequence
  Synthetic oligonucleotide; CTA chr11 5166471 5166492 5166488 5166493 +
ttattgtattgcagtctgtctc

SEQ ID NO: 73288 - DNA, 22 bp, Artificial Sequence
  Synthetic oligonucleotide; TTA chr11 5166474 5166495 5166491 5166496 +
ttgtattgcagtctgtctcgcc

SEQ ID NO: 73289 - DNA, 22 bp, Artificial Sequence
  Synthetic oligonucleotide; TTG chr11 5166477 5166498 5166494 5166499 +
tattgcagtctgtctcgccctt

SEQ ID NO: 73290 - DNA, 22 bp, Artificial Sequence
  Synthetic oligonucleotide; TTG chr11 5166482 5166503 5166499 5166504 +
cagtctgtctcgccctttagga

SEQ ID NO: 73291 - DNA, 22 bp, Artificial Sequence
  Synthetic oligonucleotide; CTG chr11 5166489 5166510 5166506 5166511 +
tctcgccctttaggactattaa

SEQ ID NO: 73292 - DNA, 22 bp, Artificial Sequence
  Synthetic oligonucleotide; CTC chr11 5166493 5166514 5166510 5166515 +
gccctttaggactattaatgtt

SEQ ID NO: 73293 - DNA, 22 bp, Artificial Sequence
  Synthetic oligonucleotide; CTT chr11 5166499 5166520 5166516 5166521 +
taggactattaatgttttcctt

SEQ ID NO: 73294 - DNA, 22 bp, Artificial Sequence
  Synthetic oligonucleotide; TTT chr11 5166500 5166521 5166517 5166522 +
aggactattaatgttttcctta

SEQ ID NO: 73295 - DNA, 22 bp, Artificial Sequence
  Synthetic oligonucleotide; TTA chr11 5166501 5166522 5166518 5166523 +
ggactattaatgttttccttat

SEQ ID NO: 73296 - DNA, 22 bp, Artificial Sequence
  Synthetic oligonucleotide; CTA chr11 5166507 5166528 5166524 5166529 +
ttaatgttttccttatatactt

SEQ ID NO: 73297 - DNA, 22 bp, Artificial Sequence
  Synthetic oligonucleotide; TTA chr11 5166510 5166531 5166527 5166532 +
atgttttccttatatacttggg

SEQ ID NO: 73298 - DNA, 22 bp, Artificial Sequence
  Synthetic oligonucleotide; TTT chr11 5166516 5166537 5166533 5166538 +
tccttatatacttgggaacttt

SEQ ID NO: 73299 - DNA, 22 bp, Artificial Sequence
  Synthetic oligonucleotide; TTT chr11 5166517 5166538 5166534 5166539 +
ccttatatacttgggaactttg

SEQ ID NO: 73300 - DNA, 22 bp, Artificial Sequence
  Synthetic oligonucleotide; TTC chr11 5166518 5166539 5166535 5166540 +
cttatatacttgggaactttga

SEQ ID NO: 73301 - DNA, 22 bp, Artificial Sequence
  Synthetic oligonucleotide; CTT chr11 5166521 5166542 5166538 5166543 +
atatacttgggaactttgatgt

SEQ ID NO: 73302 - DNA, 22 bp, Artificial Sequence
  Synthetic oligonucleotide; TTA chr11 5166522 5166543 5166539 5166544 +
tatacttgggaactttgatgtt

SEQ ID NO: 73303 - DNA, 22 bp, Artificial Sequence
  Synthetic oligonucleotide; CTT chr11 5166529 5166550 5166546 5166551 +
gggaactttgatgttggataca

SEQ ID NO: 73304 - DNA, 22 bp, Artificial Sequence
  Synthetic oligonucleotide; TTG chr11 5166530 5166551 5166547 5166552 +
ggaactttgatgttggatacat

SEQ ID NO: 73305 - DNA, 22 bp, Artificial Sequence
  Synthetic oligonucleotide; CTT chr11 5166537 5166558 5166554 5166559 +
tgatgttggatacatcaatatt

SEQ ID NO: 73306 - DNA, 22 bp, Artificial Sequence
  Synthetic oligonucleotide; TTT chr11 5166538 5166559 5166555 5166560 +
gatgttggatacatcaatattt

SEQ ID NO: 73307 - DNA, 22 bp, Artificial Sequence
  Synthetic oligonucleotide; TTG chr11 5166539 5166560 5166556 5166561 +
atgttggatacatcaatattta

SEQ ID NO: 73308 - DNA, 22 bp, Artificial Sequence
  Synthetic oligonucleotide; TTG chr11 5166545 5166566 5166562 5166567 +
gatacatcaatatttataattg

SEQ ID NO: 73309 - DNA, 22 bp, Artificial Sequence
  Synthetic oligonucleotide; TTT chr11 5166560 5166581 5166577 5166582 +
ataattgtatcctcttgctgaa

SEQ ID NO: 73310 - DNA, 22 bp, Artificial Sequence
  Synthetic oligonucleotide; TTA chr11 5166561 5166582 5166578 5166583 +
taattgtatcctcttgctgaat

SEQ ID NO: 73311 - DNA, 22 bp, Artificial Sequence
  Synthetic oligonucleotide; TTG chr11 5166567 5166588 5166584 5166589 +
tatcctcttgctgaattgaccc

SEQ ID NO: 73312 - DNA, 22 bp, Artificial Sequence
  Synthetic oligonucleotide; CTC chr11 5166574 5166595 5166591 5166596 +
ttgctgaattgacccctttatt

SEQ ID NO: 73313 - DNA, 22 bp, Artificial Sequence
  Synthetic oligonucleotide; CTT chr11 5166576 5166597 5166593 5166598 +
gctgaattgacccctttattat

SEQ ID NO: 73314 - DNA, 22 bp, Artificial Sequence
  Synthetic oligonucleotide; TTG chr11 5166577 5166598 5166594 5166599 +
ctgaattgacccctttattatt

SEQ ID NO: 73315 - DNA, 22 bp, Artificial Sequence
  Synthetic oligonucleotide; CTG chr11 5166580 5166601 5166597 5166602 +
aattgacccctttattattata

SEQ ID NO: 73316 - DNA, 22 bp, Artificial Sequence
  Synthetic oligonucleotide; TTG chr11 5166585 5166606 5166602 5166607 +
acccctttattattatacagtg

SEQ ID NO: 73317 - DNA, 22 bp, Artificial Sequence
  Synthetic oligonucleotide; CTT chr11 5166592 5166613 5166609 5166614 +
tattattatacagtgaccctcc

SEQ ID NO: 73318 - DNA, 22 bp, Artificial Sequence
  Synthetic oligonucleotide; TTT chr11 5166593 5166614 5166610 5166615 +
attattatacagtgaccctcct

SEQ ID NO: 73319 - DNA, 22 bp, Artificial Sequence
  Synthetic oligonucleotide; TTA chr11 5166594 5166615 5166611 5166616 +
ttattatacagtgaccctcctt

SEQ ID NO: 73320 - DNA, 22 bp, Artificial Sequence
  Synthetic oligonucleotide; TTA chr11 5166597 5166618 5166614 5166619 +
ttatacagtgaccctccttatc

SEQ ID NO: 73321 - DNA, 22 bp, Artificial Sequence
  Synthetic oligonucleotide; TTA chr11 5166600 5166621 5166617 5166622 +
tacagtgaccctccttatcttt

SEQ ID NO: 73322 - DNA, 22 bp, Artificial Sequence
  Synthetic oligonucleotide; CTC chr11 5166613 5166634 5166630 5166635 +
cttatcttttcttacagttttt

SEQ ID NO: 73323 - DNA, 22 bp, Artificial Sequence
  Synthetic oligonucleotide; CTT chr11 5166616 5166637 5166633 5166638 +
atcttttcttacagtttttaaa

SEQ ID NO: 73324 - DNA, 22 bp, Artificial Sequence
  Synthetic oligonucleotide; TTA chr11 5166617 5166638 5166634 5166639 +
tcttttcttacagtttttaaat

SEQ ID NO: 73325 - DNA, 22 bp, Artificial Sequence
  Synthetic oligonucleotide; CTT chr11 5166621 5166642 5166638 5166643 +
ttcttacagtttttaaatttgt

SEQ ID NO: 73326 - DNA, 22 bp, Artificial Sequence
  Synthetic oligonucleotide; TTT chr11 5166622 5166643 5166639 5166644 +
tcttacagtttttaaatttgta

SEQ ID NO: 73327 - DNA, 22 bp, Artificial Sequence
  Synthetic oligonucleotide; TTT chr11 5166623 5166644 5166640 5166645 +
cttacagtttttaaatttgtag

SEQ ID NO: 73328 - DNA, 22 bp, Artificial Sequence
  Synthetic oligonucleotide; TTC chr11 5166624 5166645 5166641 5166646 +
ttacagtttttaaatttgtagt

SEQ ID NO: 73329 - DNA, 22 bp, Artificial Sequence
  Synthetic oligonucleotide; CTT chr11 5166626 5166647 5166643 5166648 +
acagtttttaaatttgtagtct

SEQ ID NO: 73330 - DNA, 22 bp, Artificial Sequence
  Synthetic oligonucleotide; TTA chr11 5166627 5166648 5166644 5166649 +
cagtttttaaatttgtagtcta

SEQ ID NO: 73331 - DNA, 22 bp, Artificial Sequence
  Synthetic oligonucleotide; TTT chr11 5166633 5166654 5166650 5166655 +
ttaaatttgtagtctattttat

SEQ ID NO: 73332 - DNA, 22 bp, Artificial Sequence
  Synthetic oligonucleotide; TTT chr11 5166634 5166655 5166651 5166656 +
taaatttgtagtctattttatc

SEQ ID NO: 73333 - DNA, 22 bp, Artificial Sequence
  Synthetic oligonucleotide; TTT chr11 5166635 5166656 5166652 5166657 +
aaatttgtagtctattttatct

SEQ ID NO: 73334 - DNA, 22 bp, Artificial Sequence
  Synthetic oligonucleotide; TTA chr11 5166636 5166657 5166653 5166658 +
aatttgtagtctattttatctg

SEQ ID NO: 73335 - DNA, 22 bp, Artificial Sequence
  Synthetic oligonucleotide; TTT chr11 5166641 5166662 5166658 5166663 +
gtagtctattttatctgattta

SEQ ID NO: 73336 - DNA, 22 bp, Artificial Sequence
  Synthetic oligonucleotide; TTG chr11 5166642 5166663 5166659 5166664 +
tagtctattttatctgatttaa

SEQ ID NO: 73337 - DNA, 22 bp, Artificial Sequence
  Synthetic oligonucleotide; CTA chr11 5166649 5166670 5166666 5166671 +
ttttatctgatttaagtacaat

SEQ ID NO: 73338 - DNA, 22 bp, Artificial Sequence
  Synthetic oligonucleotide; TTT chr11 5166652 5166673 5166669 5166674 +
tatctgatttaagtacaattac

SEQ ID NO: 73339 - DNA, 22 bp, Artificial Sequence
  Synthetic oligonucleotide; TTT chr11 5166653 5166674 5166670 5166675 +
atctgatttaagtacaattact

SEQ ID NO: 73340 - DNA, 22 bp, Artificial Sequence
  Synthetic oligonucleotide; TTA chr11 5166654 5166675 5166671 5166676 +
tctgatttaagtacaattacta

SEQ ID NO: 73341 - DNA, 22 bp, Artificial Sequence
  Synthetic oligonucleotide; CTG chr11 5166658 5166679 5166675 5166680 +
atttaagtacaattactactgc

SEQ ID NO: 73342 - DNA, 22 bp, Artificial Sequence
  Synthetic oligonucleotide; TTT chr11 5166662 5166683 5166679 5166684 +
aagtacaattactactgctctt

SEQ ID NO: 73343 - DNA, 22 bp, Artificial Sequence
  Synthetic oligonucleotide; TTA chr11 5166663 5166684 5166680 5166685 +
agtacaattactactgctcttt

SEQ ID NO: 73344 - DNA, 22 bp, Artificial Sequence
  Synthetic oligonucleotide; TTA chr11 5166673 5166694 5166690 5166695 +
ctactgctctttctggtttcca

SEQ ID NO: 73345 - DNA, 22 bp, Artificial Sequence
  Synthetic oligonucleotide; CTA chr11 5166676 5166697 5166693 5166698 +
ctgctctttctggtttccagtt

SEQ ID NO: 73346 - DNA, 22 bp, Artificial Sequence
  Synthetic oligonucleotide; CTG chr11 5166679 5166700 5166696 5166701 +
ctctttctggtttccagttcat

SEQ ID NO: 73347 - DNA, 22 bp, Artificial Sequence
  Synthetic oligonucleotide; CTC chr11 5166682 5166703 5166699 5166704 +
tttctggtttccagttcatgga

SEQ ID NO: 73348 - DNA, 22 bp, Artificial Sequence
  Synthetic oligonucleotide; CTT chr11 5166684 5166705 5166701 5166706 +
tctggtttccagttcatggaat

SEQ ID NO: 73349 - DNA, 22 bp, Artificial Sequence
  Synthetic oligonucleotide; TTT chr11 5166685 5166706 5166702 5166707 +
ctggtttccagttcatggaatt

SEQ ID NO: 73350 - DNA, 22 bp, Artificial Sequence
  Synthetic oligonucleotide; TTC chr11 5166686 5166707 5166703 5166708 +
tggtttccagttcatggaattt

SEQ ID NO: 73351 - DNA, 22 bp, Artificial Sequence
  Synthetic oligonucleotide; CTG chr11 5166688 5166709 5166705 5166710 +
gtttccagttcatggaattttt

SEQ ID NO: 73352 - DNA, 22 bp, Artificial Sequence
  Synthetic oligonucleotide; TTT chr11 5166692 5166713 5166709 5166714 +
ccagttcatggaatttttttcc

SEQ ID NO: 73353 - DNA, 22 bp, Artificial Sequence
  Synthetic oligonucleotide; TTC chr11 5166693 5166714 5166710 5166715 +
cagttcatggaatttttttcca

SEQ ID NO: 73354 - DNA, 22 bp, Artificial Sequence
  Synthetic oligonucleotide; TTC chr11 5166699 5166720 5166716 5166721 +
atggaatttttttccaaccctt

SEQ ID NO: 73355 - DNA, 22 bp, Artificial Sequence
  Synthetic oligonucleotide; TTT chr11 5166708 5166729 5166725 5166730 +
ttttccaacccttcactttcat

SEQ ID NO: 73356 - DNA, 22 bp, Artificial Sequence
  Synthetic oligonucleotide; TTT chr11 5166709 5166730 5166726 5166731 +
tttccaacccttcactttcatt

SEQ ID NO: 73357 - DNA, 22 bp, Artificial Sequence
  Synthetic oligonucleotide; TTT chr11 5166710 5166731 5166727 5166732 +
ttccaacccttcactttcattt

SEQ ID NO: 73358 - DNA, 22 bp, Artificial Sequence
  Synthetic oligonucleotide; TTT chr11 5166711 5166732 5166728 5166733 +
tccaacccttcactttcattta

SEQ ID NO: 73359 - DNA, 22 bp, Artificial Sequence
  Synthetic oligonucleotide; TTT chr11 5166712 5166733 5166729 5166734 +
ccaacccttcactttcatttat

SEQ ID NO: 73360 - DNA, 22 bp, Artificial Sequence
  Synthetic oligonucleotide; TTC chr11 5166713 5166734 5166730 5166735 +
caacccttcactttcatttatg

SEQ ID NO: 73361 - DNA, 22 bp, Artificial Sequence
  Synthetic oligonucleotide; CTT chr11 5166721 5166742 5166738 5166743 +
cactttcatttatgtgtgcctt

SEQ ID NO: 73362 - DNA, 22 bp, Artificial Sequence
  Synthetic oligonucleotide; TTC chr11 5166722 5166743 5166739 5166744 +
actttcatttatgtgtgccttt

SEQ ID NO: 73363 - DNA, 22 bp, Artificial Sequence
  Synthetic oligonucleotide; CTT chr11 5166726 5166747 5166743 5166748 +
tcatttatgtgtgcctttatag

SEQ ID NO: 73364 - DNA, 22 bp, Artificial Sequence
  Synthetic oligonucleotide; TTT chr11 5166727 5166748 5166744 5166749 +
catttatgtgtgcctttatagg

SEQ ID NO: 73365 - DNA, 22 bp, Artificial Sequence
  Synthetic oligonucleotide; TTC chr11 5166728 5166749 5166745 5166750 +
atttatgtgtgcctttataggt

SEQ ID NO: 73366 - DNA, 22 bp, Artificial Sequence
  Synthetic oligonucleotide; TTT chr11 5166732 5166753 5166749 5166754 +
atgtgtgcctttataggtgaag

SEQ ID NO: 73367 - DNA, 22 bp, Artificial Sequence
  Synthetic oligonucleotide; TTA chr11 5166733 5166754 5166750 5166755 +
tgtgtgcctttataggtgaagt

SEQ ID NO: 73368 - DNA, 22 bp, Artificial Sequence
  Synthetic oligonucleotide; CTT chr11 5166743 5166764 5166760 5166765 +
tataggtgaagtgggtttcttg

SEQ ID NO: 73369 - DNA, 22 bp, Artificial Sequence
  Synthetic oligonucleotide; TTT chr11 5166744 5166765 5166761 5166766 +
ataggtgaagtgggtttcttga

SEQ ID NO: 73370 - DNA, 22 bp, Artificial Sequence
  Synthetic oligonucleotide; TTA chr11 5166745 5166766 5166762 5166767 +
taggtgaagtgggtttcttgaa

SEQ ID NO: 73371 - DNA, 22 bp, Artificial Sequence
  Synthetic oligonucleotide; TTT chr11 5166761 5166782 5166778 5166783 +
cttgaagatcgcataaagttgg

SEQ ID NO: 73372 - DNA, 22 bp, Artificial Sequence
  Synthetic oligonucleotide; TTC chr11 5166762 5166783 5166779 5166784 +
ttgaagatcgcataaagttgga

SEQ ID NO: 73373 - DNA, 22 bp, Artificial Sequence
  Synthetic oligonucleotide; CTT chr11 5166764 5166785 5166781 5166786 +
gaagatcgcataaagttggata

SEQ ID NO: 73374 - DNA, 22 bp, Artificial Sequence
  Synthetic oligonucleotide; TTG chr11 5166765 5166786 5166782 5166787 +
aagatcgcataaagttggatat

SEQ ID NO: 73375 - DNA, 22 bp, Artificial Sequence
  Synthetic oligonucleotide; TTG chr11 5166782 5166803 5166799 5166804 +
gatattgtttctttatccattt

SEQ ID NO: 73376 - DNA, 22 bp, Artificial Sequence
  Synthetic oligonucleotide; TTG chr11 5166789 5166810 5166806 5166811 +
tttctttatccatttaccattc

SEQ ID NO: 73377 - DNA, 22 bp, Artificial Sequence
  Synthetic oligonucleotide; TTT chr11 5166792 5166813 5166809 5166814 +
ctttatccatttaccattctat

SEQ ID NO: 73378 - DNA, 22 bp, Artificial Sequence
  Synthetic oligonucleotide; TTC chr11 5166793 5166814 5166810 5166815 +
tttatccatttaccattctatt

SEQ ID NO: 73379 - DNA, 22 bp, Artificial Sequence
  Synthetic oligonucleotide; CTT chr11 5166795 5166816 5166812 5166817 +
tatccatttaccattctattac

SEQ ID NO: 73380 - DNA, 22 bp, Artificial Sequence
  Synthetic oligonucleotide; TTT chr11 5166796 5166817 5166813 5166818 +
atccatttaccattctattact

SEQ ID NO: 73381 - DNA, 22 bp, Artificial Sequence
  Synthetic oligonucleotide; TTA chr11 5166797 5166818 5166814 5166819 +
tccatttaccattctattactt

SEQ ID NO: 73382 - DNA, 22 bp, Artificial Sequence
  Synthetic oligonucleotide; TTT chr11 5166804 5166825 5166821 5166826 +
accattctattacttttaattg

SEQ ID NO: 73383 - DNA, 22 bp, Artificial Sequence
  Synthetic oligonucleotide; TTA chr11 5166805 5166826 5166822 5166827 +
ccattctattacttttaattgg

SEQ ID NO: 73384 - DNA, 22 bp, Artificial Sequence
  Synthetic oligonucleotide; TTC chr11 5166811 5166832 5166828 5166833 +
tattacttttaattggggaact

SEQ ID NO: 73385 - DNA, 22 bp, Artificial Sequence
  Synthetic oligonucleotide; CTA chr11 5166813 5166834 5166830 5166835 +
ttacttttaattggggaactga

SEQ ID NO: 73386 - DNA, 22 bp, Artificial Sequence
  Synthetic oligonucleotide; TTA chr11 5166816 5166837 5166833 5166838 +
cttttaattggggaactgagac

SEQ ID NO: 73387 - DNA, 22 bp, Artificial Sequence
  Synthetic oligonucleotide; CTT chr11 5166819 5166840 5166836 5166841 +
ttaattggggaactgagactat

SEQ ID NO: 73388 - DNA, 22 bp, Artificial Sequence
  Synthetic oligonucleotide; TTT chr11 5166820 5166841 5166837 5166842 +
taattggggaactgagactatt

SEQ ID NO: 73389 - DNA, 22 bp, Artificial Sequence
  Synthetic oligonucleotide; TTT chr11 5166821 5166842 5166838 5166843 +
aattggggaactgagactattt

SEQ ID NO: 73390 - DNA, 22 bp, Artificial Sequence
  Synthetic oligonucleotide; TTA chr11 5166822 5166843 5166839 5166844 +
attggggaactgagactattta

SEQ ID NO: 73391 - DNA, 22 bp, Artificial Sequence
  Synthetic oligonucleotide; TTG chr11 5166826 5166847 5166843 5166848 +
gggaactgagactatttacact

SEQ ID NO: 73392 - DNA, 22 bp, Artificial Sequence
  Synthetic oligonucleotide; CTG chr11 5166834 5166855 5166851 5166856 +
agactatttacactcagtgtag

SEQ ID NO: 73393 - DNA, 22 bp, Artificial Sequence
  Synthetic oligonucleotide; CTA chr11 5166840 5166861 5166857 5166862 +
tttacactcagtgtagttacta

SEQ ID NO: 73394 - DNA, 22 bp, Artificial Sequence
  Synthetic oligonucleotide; TTT chr11 5166843 5166864 5166860 5166865 +
acactcagtgtagttactaagt

SEQ ID NO: 73395 - DNA, 22 bp, Artificial Sequence
  Synthetic oligonucleotide; TTA chr11 5166844 5166865 5166861 5166866 +
cactcagtgtagttactaagta

SEQ ID NO: 73396 - DNA, 22 bp, Artificial Sequence
  Synthetic oligonucleotide; CTC chr11 5166849 5166870 5166866 5166871 +
agtgtagttactaagtaaggat

SEQ ID NO: 73397 - DNA, 22 bp, Artificial Sequence
  Synthetic oligonucleotide; TTA chr11 5166859 5166880 5166876 5166881 +
ctaagtaaggatttcctttttt

SEQ ID NO: 73398 - DNA, 22 bp, Artificial Sequence
  Synthetic oligonucleotide; CTA chr11 5166862 5166883 5166879 5166884 +
agtaaggatttccttttttttt

SEQ ID NO: 73399 - DNA, 22 bp, Artificial Sequence
  Synthetic oligonucleotide; TTT chr11 5166873 5166894 5166890 5166895 +
cctttttttttttttttttttt

SEQ ID NO: 73400 - DNA, 22 bp, Artificial Sequence
  Synthetic oligonucleotide; TTC chr11 5166874 5166895 5166891 5166896 +
cttttttttttttttttttttt

SEQ ID NO: 73401 - DNA, 22 bp, Artificial Sequence
  Synthetic oligonucleotide; CTT chr11 5166877 5166898 5166894 5166899 +
tttttttttttttttttttttt

SEQ ID NO: 73402 - DNA, 22 bp, Artificial Sequence
  Synthetic oligonucleotide; TTT chr11 5166878 5166899 5166895 5166900 +
tttttttttttttttttttttt

SEQ ID NO: 73403 - DNA, 22 bp, Artificial Sequence
  Synthetic oligonucleotide; TTT chr11 5166879 5166900 5166896 5166901 +
tttttttttttttttttttttg

SEQ ID NO: 73404 - DNA, 22 bp, Artificial Sequence
  Synthetic oligonucleotide; TTT chr11 5166880 5166901 5166897 5166902 +
ttttttttttttttttttttgc

SEQ ID NO: 73405 - DNA, 22 bp, Artificial Sequence
  Synthetic oligonucleotide; TTT chr11 5166881 5166902 5166898 5166903 +
tttttttttttttttttttgct

SEQ ID NO: 73406 - DNA, 22 bp, Artificial Sequence
  Synthetic oligonucleotide; TTT chr11 5166882 5166903 5166899 5166904 +
ttttttttttttttttttgctt

SEQ ID NO: 73407 - DNA, 22 bp, Artificial Sequence
  Synthetic oligonucleotide; TTT chr11 5166883 5166904 5166900 5166905 +
tttttttttttttttttgctta

SEQ ID NO: 73408 - DNA, 22 bp, Artificial Sequence
  Synthetic oligonucleotide; TTT chr11 5166884 5166905 5166901 5166906 +
ttttttttttttttttgcttat

SEQ ID NO: 73409 - DNA, 22 bp, Artificial Sequence
  Synthetic oligonucleotide; TTT chr11 5166885 5166906 5166902 5166907 +
tttttttttttttttgcttatt

SEQ ID NO: 73410 - DNA, 22 bp, Artificial Sequence
  Synthetic oligonucleotide; TTT chr11 5166886 5166907 5166903 5166908 +
ttttttttttttttgcttattt

SEQ ID NO: 73411 - DNA, 22 bp, Artificial Sequence
  Synthetic oligonucleotide; TTT chr11 5166887 5166908 5166904 5166909 +
tttttttttttttgcttatttt

SEQ ID NO: 73412 - DNA, 22 bp, Artificial Sequence
  Synthetic oligonucleotide; TTT chr11 5166888 5166909 5166905 5166910 +
ttttttttttttgcttattttt

SEQ ID NO: 73413 - DNA, 22 bp, Artificial Sequence
  Synthetic oligonucleotide; TTT chr11 5166889 5166910 5166906 5166911 +
tttttttttttgcttatttttg

SEQ ID NO: 73414 - DNA, 22 bp, Artificial Sequence
  Synthetic oligonucleotide; TTT chr11 5166890 5166911 5166907 5166912 +
ttttttttttgcttatttttgg

SEQ ID NO: 73415 - DNA, 22 bp, Artificial Sequence
  Synthetic oligonucleotide; TTT chr11 5166891 5166912 5166908 5166913 +
tttttttttgcttatttttggc

SEQ ID NO: 73416 - DNA, 22 bp, Artificial Sequence
  Synthetic oligonucleotide; TTT chr11 5166892 5166913 5166909 5166914 +
ttttttttgcttatttttggct

SEQ ID NO: 73417 - DNA, 22 bp, Artificial Sequence
  Synthetic oligonucleotide; TTT chr11 5166893 5166914 5166910 5166915 +
tttttttgcttatttttggctg

SEQ ID NO: 73418 - DNA, 22 bp, Artificial Sequence
  Synthetic oligonucleotide; TTT chr11 5166894 5166915 5166911 5166916 +
ttttttgcttatttttggctgt

SEQ ID NO: 73419 - DNA, 22 bp, Artificial Sequence
  Synthetic oligonucleotide; TTT chr11 5166895 5166916 5166912 5166917 +
tttttgcttatttttggctgta

SEQ ID NO: 73420 - DNA, 22 bp, Artificial Sequence
  Synthetic oligonucleotide; TTT chr11 5166896 5166917 5166913 5166918 +
ttttgcttatttttggctgtat

SEQ ID NO: 73421 - DNA, 22 bp, Artificial Sequence
  Synthetic oligonucleotide; TTT chr11 5166897 5166918 5166914 5166919 +
tttgcttatttttggctgtatg

SEQ ID NO: 73422 - DNA, 22 bp, Artificial Sequence
  Synthetic oligonucleotide; TTT chr11 5166898 5166919 5166915 5166920 +
ttgcttatttttggctgtatgg

SEQ ID NO: 73423 - DNA, 22 bp, Artificial Sequence
  Synthetic oligonucleotide; TTT chr11 5166899 5166920 5166916 5166921 +
tgcttatttttggctgtatgga

SEQ ID NO: 73424 - DNA, 22 bp, Artificial Sequence
  Synthetic oligonucleotide; TTT chr11 5166900 5166921 5166917 5166922 +
gcttatttttggctgtatggag

SEQ ID NO: 73425 - DNA, 22 bp, Artificial Sequence
  Synthetic oligonucleotide; TTG chr11 5166901 5166922 5166918 5166923 +
cttatttttggctgtatggaga

SEQ ID NO: 73426 - DNA, 22 bp, Artificial Sequence
  Synthetic oligonucleotide; CTT chr11 5166904 5166925 5166921 5166926 +
atttttggctgtatggagactc

SEQ ID NO: 73427 - DNA, 22 bp, Artificial Sequence
  Synthetic oligonucleotide; TTA chr11 5166905 5166926 5166922 5166927 +
tttttggctgtatggagactcc

SEQ ID NO: 73428 - DNA, 22 bp, Artificial Sequence
  Synthetic oligonucleotide; TTT chr11 5166908 5166929 5166925 5166930 +
ttggctgtatggagactcctct

SEQ ID NO: 73429 - DNA, 22 bp, Artificial Sequence
  Synthetic oligonucleotide; TTT chr11 5166909 5166930 5166926 5166931 +
tggctgtatggagactcctctc

SEQ ID NO: 73430 - DNA, 22 bp, Artificial Sequence
  Synthetic oligonucleotide; TTT chr11 5166910 5166931 5166927 5166932 +
ggctgtatggagactcctctct

SEQ ID NO: 73431 - DNA, 22 bp, Artificial Sequence
  Synthetic oligonucleotide; TTG chr11 5166911 5166932 5166928 5166933 +
gctgtatggagactcctctctt

SEQ ID NO: 73432 - DNA, 22 bp, Artificial Sequence
  Synthetic oligonucleotide; CTG chr11 5166915 5166936 5166932 5166937 +
tatggagactcctctcttcctt

SEQ ID NO: 73433 - DNA, 22 bp, Artificial Sequence
  Synthetic oligonucleotide; CTC chr11 5166926 5166947 5166943 5166948 +
ctctcttccttttttttccttc

SEQ ID NO: 73434 - DNA, 22 bp, Artificial Sequence
  Synthetic oligonucleotide; CTC chr11 5166929 5166950 5166946 5166951 +
tcttccttttttttccttcatg

SEQ ID NO: 73435 - DNA, 22 bp, Artificial Sequence
  Synthetic oligonucleotide; CTC chr11 5166931 5166952 5166948 5166953 +
ttccttttttttccttcatggt

SEQ ID NO: 73436 - DNA, 22 bp, Artificial Sequence
  Synthetic oligonucleotide; CTT chr11 5166933 5166954 5166950 5166955 +
ccttttttttccttcatggtta

SEQ ID NO: 73437 - DNA, 22 bp, Artificial Sequence
  Synthetic oligonucleotide; TTC chr11 5166934 5166955 5166951 5166956 +
cttttttttccttcatggttat

SEQ ID NO: 73438 - DNA, 22 bp, Artificial Sequence
  Synthetic oligonucleotide; CTT chr11 5166937 5166958 5166954 5166959 +
ttttttccttcatggttatgtg

SEQ ID NO: 73439 - DNA, 22 bp, Artificial Sequence
  Synthetic oligonucleotide; TTT chr11 5166938 5166959 5166955 5166960 +
tttttccttcatggttatgtga

SEQ ID NO: 73440 - DNA, 22 bp, Artificial Sequence
  Synthetic oligonucleotide; TTT chr11 5166939 5166960 5166956 5166961 +
ttttccttcatggttatgtgat

SEQ ID NO: 73441 - DNA, 22 bp, Artificial Sequence
  Synthetic oligonucleotide; TTT chr11 5166940 5166961 5166957 5166962 +
tttccttcatggttatgtgatt

SEQ ID NO: 73442 - DNA, 22 bp, Artificial Sequence
  Synthetic oligonucleotide; TTT chr11 5166941 5166962 5166958 5166963 +
ttccttcatggttatgtgatta

SEQ ID NO: 73443 - DNA, 22 bp, Artificial Sequence
  Synthetic oligonucleotide; TTT chr11 5166942 5166963 5166959 5166964 +
tccttcatggttatgtgattat

SEQ ID NO: 73444 - DNA, 22 bp, Artificial Sequence
  Synthetic oligonucleotide; TTT chr11 5166943 5166964 5166960 5166965 +
ccttcatggttatgtgattatc

SEQ ID NO: 73445 - DNA, 22 bp, Artificial Sequence
  Synthetic oligonucleotide; TTC chr11 5166944 5166965 5166961 5166966 +
cttcatggttatgtgattatct

SEQ ID NO: 73446 - DNA, 22 bp, Artificial Sequence
  Synthetic oligonucleotide; CTT chr11 5166947 5166968 5166964 5166969 +
catggttatgtgattatctctg

SEQ ID NO: 73447 - DNA, 22 bp, Artificial Sequence
  Synthetic oligonucleotide; TTC chr11 5166948 5166969 5166965 5166970 +
atggttatgtgattatctctgg

SEQ ID NO: 73448 - DNA, 22 bp, Artificial Sequence
  Synthetic oligonucleotide; TTA chr11 5166955 5166976 5166972 5166977 +
tgtgattatctctggtagcata

SEQ ID NO: 73449 - DNA, 22 bp, Artificial Sequence
  Synthetic oligonucleotide; TTA chr11 5166963 5166984 5166980 5166985 +
tctctggtagcatattttaatt

SEQ ID NO: 73450 - DNA, 22 bp, Artificial Sequence
  Synthetic oligonucleotide; CTC chr11 5166967 5166988 5166984 5166989 +
tggtagcatattttaatttgtt

SEQ ID NO: 73451 - DNA, 22 bp, Artificial Sequence
  Synthetic oligonucleotide; CTG chr11 5166969 5166990 5166986 5166991 +
gtagcatattttaatttgttac

SEQ ID NO: 73452 - DNA, 22 bp, Artificial Sequence
  Synthetic oligonucleotide; TTT chr11 5166980 5167001 5166997 5167002 +
taatttgttactttttattttt

SEQ ID NO: 73453 - DNA, 22 bp, Artificial Sequence
  Synthetic oligonucleotide; TTT chr11 5166981 5167002 5166998 5167003 +
aatttgttactttttattttta

SEQ ID NO: 73454 - DNA, 22 bp, Artificial Sequence
  Synthetic oligonucleotide; TTA chr11 5166982 5167003 5166999 5167004 +
atttgttactttttatttttag

SEQ ID NO: 73455 - DNA, 22 bp, Artificial Sequence
  Synthetic oligonucleotide; TTT chr11 5166986 5167007 5167003 5167008 +
gttactttttatttttagtaaa

SEQ ID NO: 73456 - DNA, 22 bp, Artificial Sequence
  Synthetic oligonucleotide; TTG chr11 5166987 5167008 5167004 5167009 +
ttactttttatttttagtaaat

SEQ ID NO: 73457 - DNA, 22 bp, Artificial Sequence
  Synthetic oligonucleotide; TTA chr11 5166990 5167011 5167007 5167012 +
ctttttatttttagtaaatcta

SEQ ID NO: 73458 - DNA, 22 bp, Artificial Sequence
  Synthetic oligonucleotide; CTT chr11 5166993 5167014 5167010 5167015 +
tttatttttagtaaatctatta

SEQ ID NO: 73459 - DNA, 22 bp, Artificial Sequence
  Synthetic oligonucleotide; TTT chr11 5166994 5167015 5167011 5167016 +
ttatttttagtaaatctattat

SEQ ID NO: 73460 - DNA, 22 bp, Artificial Sequence
  Synthetic oligonucleotide; TTT chr11 5166995 5167016 5167012 5167017 +
tatttttagtaaatctattata

SEQ ID NO: 73461 - DNA, 22 bp, Artificial Sequence
  Synthetic oligonucleotide; TTT chr11 5166996 5167017 5167013 5167018 +
atttttagtaaatctattatag

SEQ ID NO: 73462 - DNA, 22 bp, Artificial Sequence
  Synthetic oligonucleotide; TTA chr11 5166997 5167018 5167014 5167019 +
tttttagtaaatctattataga

SEQ ID NO: 73463 - DNA, 22 bp, Artificial Sequence
  Synthetic oligonucleotide; TTT chr11 5167000 5167021 5167017 5167022 +
ttagtaaatctattatagattt

SEQ ID NO: 73464 - DNA, 22 bp, Artificial Sequence
  Synthetic oligonucleotide; TTT chr11 5167001 5167022 5167018 5167023 +
tagtaaatctattatagatttt

SEQ ID NO: 73465 - DNA, 22 bp, Artificial Sequence
  Synthetic oligonucleotide; TTT chr11 5167002 5167023 5167019 5167024 +
agtaaatctattatagattttt

SEQ ID NO: 73466 - DNA, 22 bp, Artificial Sequence
  Synthetic oligonucleotide; TTA chr11 5167003 5167024 5167020 5167025 +
gtaaatctattatagatttttg

SEQ ID NO: 73467 - DNA, 22 bp, Artificial Sequence
  Synthetic oligonucleotide; CTA chr11 5167012 5167033 5167029 5167034 +
ttatagatttttgtgctgtggt

SEQ ID NO: 73468 - DNA, 22 bp, Artificial Sequence
  Synthetic oligonucleotide; TTA chr11 5167015 5167036 5167032 5167037 +
tagatttttgtgctgtggttac

SEQ ID NO: 73469 - DNA, 22 bp, Artificial Sequence
  Synthetic oligonucleotide; TTT chr11 5167022 5167043 5167039 5167044 +
ttgtgctgtggttaccatgggg

SEQ ID NO: 73470 - DNA, 22 bp, Artificial Sequence
  Synthetic oligonucleotide; TTT chr11 5167023 5167044 5167040 5167045 +
tgtgctgtggttaccatggggc

SEQ ID NO: 73471 - DNA, 22 bp, Artificial Sequence
  Synthetic oligonucleotide; TTT chr11 5167024 5167045 5167041 5167046 +
gtgctgtggttaccatggggct

SEQ ID NO: 73472 - DNA, 22 bp, Artificial Sequence
  Synthetic oligonucleotide; TTG chr11 5167025 5167046 5167042 5167047 +
tgctgtggttaccatggggctt

SEQ ID NO: 73473 - DNA, 22 bp, Artificial Sequence
  Synthetic oligonucleotide; CTG chr11 5167030 5167051 5167047 5167052 +
tggttaccatggggcttacaag

SEQ ID NO: 73474 - DNA, 22 bp, Artificial Sequence
  Synthetic oligonucleotide; TTA chr11 5167036 5167057 5167053 5167058 +
ccatggggcttacaagaaacat

SEQ ID NO: 73475 - DNA, 22 bp, Artificial Sequence
  Synthetic oligonucleotide; CTT chr11 5167047 5167068 5167064 5167069 +
acaagaaacatcttataaatat

SEQ ID NO: 73476 - DNA, 22 bp, Artificial Sequence
  Synthetic oligonucleotide; TTA chr11 5167048 5167069 5167065 5167070 +
caagaaacatcttataaatata

SEQ ID NO: 73477 - DNA, 22 bp, Artificial Sequence
  Synthetic oligonucleotide; CTT chr11 5167061 5167082 5167078 5167083 +
ataaatatagcaagttatttta

SEQ ID NO: 73478 - DNA, 22 bp, Artificial Sequence
  Synthetic oligonucleotide; TTA chr11 5167062 5167083 5167079 5167084 +
taaatatagcaagttattttaa

SEQ ID NO: 73479 - DNA, 22 bp, Artificial Sequence
  Synthetic oligonucleotide; TTA chr11 5167078 5167099 5167095 5167100 +
ttttaaaggatgacgaattatc

SEQ ID NO: 73480 - DNA, 22 bp, Artificial Sequence
  Synthetic oligonucleotide; TTT chr11 5167081 5167102 5167098 5167103 +
taaaggatgacgaattatctta

SEQ ID NO: 73481 - DNA, 22 bp, Artificial Sequence
  Synthetic oligonucleotide; TTT chr11 5167082 5167103 5167099 5167104 +
aaaggatgacgaattatcttag

SEQ ID NO: 73482 - DNA, 22 bp, Artificial Sequence
  Synthetic oligonucleotide; TTA chr11 5167083 5167104 5167100 5167105 +
aaggatgacgaattatcttaga

SEQ ID NO: 73483 - DNA, 22 bp, Artificial Sequence
  Synthetic oligonucleotide; TTA chr11 5167098 5167119 5167115 5167120 +
tcttagatcgcaaataaaggaa

SEQ ID NO: 73484 - DNA, 22 bp, Artificial Sequence
  Synthetic oligonucleotide; CTT chr11 5167102 5167123 5167119 5167124 +
agatcgcaaataaaggaatata

SEQ ID NO: 73485 - DNA, 22 bp, Artificial Sequence
  Synthetic oligonucleotide; TTA chr11 5167103 5167124 5167120 5167125 +
gatcgcaaataaaggaatataa

SEQ ID NO: 73486 - DNA, 22 bp, Artificial Sequence
  Synthetic oligonucleotide; TTC chr11 5167153 5167174 5167170 5167175 +
tacactttaactccactccacc

SEQ ID NO: 73487 - DNA, 22 bp, Artificial Sequence
  Synthetic oligonucleotide; CTA chr11 5167155 5167176 5167172 5167177 +
cactttaactccactccacccc

SEQ ID NO: 73488 - DNA, 22 bp, Artificial Sequence
  Synthetic oligonucleotide; CTT chr11 5167160 5167181 5167177 5167182 +
taactccactccacccccacat

SEQ ID NO: 73489 - DNA, 22 bp, Artificial Sequence
  Synthetic oligonucleotide; TTT chr11 5167161 5167182 5167178 5167183 +
aactccactccacccccacatt

SEQ ID NO: 73490 - DNA, 22 bp, Artificial Sequence
  Synthetic oligonucleotide; TTA chr11 5167162 5167183 5167179 5167184 +
actccactccacccccacattt

SEQ ID NO: 73491 - DNA, 22 bp, Artificial Sequence
  Synthetic oligonucleotide; CTC chr11 5167166 5167187 5167183 5167188 +
cactccacccccacattttgac

SEQ ID NO: 73492 - DNA, 22 bp, Artificial Sequence
  Synthetic oligonucleotide; CTC chr11 5167171 5167192 5167188 5167193 +
cacccccacattttgacttttg

SEQ ID NO: 73493 - DNA, 22 bp, Artificial Sequence
  Synthetic oligonucleotide; TTT chr11 5167184 5167205 5167201 5167206 +
tgacttttgtctcattttacat

SEQ ID NO: 73494 - DNA, 22 bp, Artificial Sequence
  Synthetic oligonucleotide; TTT chr11 5167185 5167206 5167202 5167207 +
gacttttgtctcattttacata

SEQ ID NO: 73495 - DNA, 22 bp, Artificial Sequence
  Synthetic oligonucleotide; TTG chr11 5167186 5167207 5167203 5167208 +
acttttgtctcattttacatat

SEQ ID NO: 73496 - DNA, 22 bp, Artificial Sequence
  Synthetic oligonucleotide; CTT chr11 5167190 5167211 5167207 5167212 +
ttgtctcattttacatatttta

SEQ ID NO: 73497 - DNA, 22 bp, Artificial Sequence
  Synthetic oligonucleotide; TTT chr11 5167191 5167212 5167208 5167213 +
tgtctcattttacatattttat

SEQ ID NO: 73498 - DNA, 22 bp, Artificial Sequence
  Synthetic oligonucleotide; TTT chr11 5167192 5167213 5167209 5167214 +
gtctcattttacatattttata

SEQ ID NO: 73499 - DNA, 22 bp, Artificial Sequence
  Synthetic oligonucleotide; TTG chr11 5167193 5167214 5167210 5167215 +
tctcattttacatattttatat

SEQ ID NO: 73500 - DNA, 22 bp, Artificial Sequence
  Synthetic oligonucleotide; CTC chr11 5167197 5167218 5167214 5167219 +
attttacatattttatattacc

SEQ ID NO: 73501 - DNA, 22 bp, Artificial Sequence
  Synthetic oligonucleotide; TTT chr11 5167201 5167222 5167218 5167223 +
tacatattttatattacctaca

SEQ ID NO: 73502 - DNA, 22 bp, Artificial Sequence
  Synthetic oligonucleotide; TTT chr11 5167202 5167223 5167219 5167224 +
acatattttatattacctacat

SEQ ID NO: 73503 - DNA, 22 bp, Artificial Sequence
  Synthetic oligonucleotide; TTA chr11 5167203 5167224 5167220 5167225 +
catattttatattacctacatc

SEQ ID NO: 73504 - DNA, 22 bp, Artificial Sequence
  Synthetic oligonucleotide; TTT chr11 5167210 5167231 5167227 5167232 +
tatattacctacatcttaaaag

SEQ ID NO: 73505 - DNA, 22 bp, Artificial Sequence
  Synthetic oligonucleotide; TTT chr11 5167211 5167232 5167228 5167233 +
atattacctacatcttaaaagg

SEQ ID NO: 73506 - DNA, 22 bp, Artificial Sequence
  Synthetic oligonucleotide; TTA chr11 5167212 5167233 5167229 5167234 +
tattacctacatcttaaaaggt

SEQ ID NO: 73507 - DNA, 22 bp, Artificial Sequence
  Synthetic oligonucleotide; TTA chr11 5167217 5167238 5167234 5167239 +
cctacatcttaaaaggttgcta

SEQ ID NO: 73508 - DNA, 22 bp, Artificial Sequence
  Synthetic oligonucleotide; CTA chr11 5167221 5167242 5167238 5167243 +
catcttaaaaggttgctatagc

SEQ ID NO: 73509 - DNA, 22 bp, Artificial Sequence
  Synthetic oligonucleotide; CTT chr11 5167227 5167248 5167244 5167249 +
aaaaggttgctatagctattac

SEQ ID NO: 73510 - DNA, 22 bp, Artificial Sequence
  Synthetic oligonucleotide; TTA chr11 5167228 5167249 5167245 5167250 +
aaaggttgctatagctattact

SEQ ID NO: 73511 - DNA, 22 bp, Artificial Sequence
  Synthetic oligonucleotide; TTG chr11 5167236 5167257 5167253 5167258 +
ctatagctattactgtttttga

SEQ ID NO: 73512 - DNA, 22 bp, Artificial Sequence
  Synthetic oligonucleotide; CTA chr11 5167239 5167260 5167256 5167261 +
tagctattactgtttttgaaag

SEQ ID NO: 73513 - DNA, 22 bp, Artificial Sequence
  Synthetic oligonucleotide; CTA chr11 5167245 5167266 5167262 5167267 +
ttactgtttttgaaagatttgt

SEQ ID NO: 73514 - DNA, 22 bp, Artificial Sequence
  Synthetic oligonucleotide; TTA chr11 5167248 5167269 5167265 5167270 +
ctgtttttgaaagatttgtttt

SEQ ID NO: 73515 - DNA, 22 bp, Artificial Sequence
  Synthetic oligonucleotide; CTG chr11 5167251 5167272 5167268 5167273 +
tttttgaaagatttgttttttg

SEQ ID NO: 73516 - DNA, 22 bp, Artificial Sequence
  Synthetic oligonucleotide; TTT chr11 5167254 5167275 5167271 5167276 +
ttgaaagatttgttttttgggt

SEQ ID NO: 73517 - DNA, 22 bp, Artificial Sequence
  Synthetic oligonucleotide; TTT chr11 5167255 5167276 5167272 5167277 +
tgaaagatttgttttttgggtt

SEQ ID NO: 73518 - DNA, 22 bp, Artificial Sequence
  Synthetic oligonucleotide; TTT chr11 5167256 5167277 5167273 5167278 +
gaaagatttgttttttgggttt

SEQ ID NO: 73519 - DNA, 22 bp, Artificial Sequence
  Synthetic oligonucleotide; TTG chr11 5167257 5167278 5167274 5167279 +
aaagatttgttttttgggtttc

SEQ ID NO: 73520 - DNA, 22 bp, Artificial Sequence
  Synthetic oligonucleotide; TTT chr11 5167265 5167286 5167282 5167287 +
gttttttgggtttcatactgga

SEQ ID NO: 73521 - DNA, 22 bp, Artificial Sequence
  Synthetic oligonucleotide; TTG chr11 5167266 5167287 5167283 5167288 +
ttttttgggtttcatactggag

SEQ ID NO: 73522 - DNA, 22 bp, Artificial Sequence
  Synthetic oligonucleotide; TTT chr11 5167269 5167290 5167286 5167291 +
tttgggtttcatactggagttc

SEQ ID NO: 73523 - DNA, 22 bp, Artificial Sequence
  Synthetic oligonucleotide; TTT chr11 5167270 5167291 5167287 5167292 +
ttgggtttcatactggagttct

SEQ ID NO: 73524 - DNA, 22 bp, Artificial Sequence
  Synthetic oligonucleotide; TTT chr11 5167271 5167292 5167288 5167293 +
tgggtttcatactggagttctg

SEQ ID NO: 73525 - DNA, 22 bp, Artificial Sequence
  Synthetic oligonucleotide; TTT chr11 5167272 5167293 5167289 5167294 +
gggtttcatactggagttctgt

SEQ ID NO: 73526 - DNA, 22 bp, Artificial Sequence
  Synthetic oligonucleotide; TTG chr11 5167273 5167294 5167290 5167295 +
ggtttcatactggagttctgtg

SEQ ID NO: 73527 - DNA, 22 bp, Artificial Sequence
  Synthetic oligonucleotide; TTT chr11 5167278 5167299 5167295 5167300 +
catactggagttctgtgtggat

SEQ ID NO: 73528 - DNA, 22 bp, Artificial Sequence
  Synthetic oligonucleotide; TTC chr11 5167279 5167300 5167296 5167301 +
atactggagttctgtgtggatt

SEQ ID NO: 73529 - DNA, 22 bp, Artificial Sequence
  Synthetic oligonucleotide; CTG chr11 5167285 5167306 5167302 5167307 +
gagttctgtgtggattgcacac

SEQ ID NO: 73530 - DNA, 22 bp, Artificial Sequence
  Synthetic oligonucleotide; TTC chr11 5167291 5167312 5167308 5167313 +
tgtgtggattgcacaccaaaaa

SEQ ID NO: 73531 - DNA, 22 bp, Artificial Sequence
  Synthetic oligonucleotide; CTG chr11 5167293 5167314 5167310 5167315 +
tgtggattgcacaccaaaaaat

SEQ ID NO: 73532 - DNA, 22 bp, Artificial Sequence
  Synthetic oligonucleotide; TTG chr11 5167302 5167323 5167319 5167324 +
cacaccaaaaaatacagtaatg

SEQ ID NO: 73533 - DNA, 22 bp, Artificial Sequence
  Synthetic oligonucleotide; TTC chr11 5167332 5167353 5167349 5167354 +
taggtttgtctatgtacttaat

SEQ ID NO: 73534 - DNA, 22 bp, Artificial Sequence
  Synthetic oligonucleotide; CTA chr11 5167334 5167355 5167351 5167356 +
ggtttgtctatgtacttaattt

SEQ ID NO: 73535 - DNA, 22 bp, Artificial Sequence
  Synthetic oligonucleotide; TTT chr11 5167339 5167360 5167356 5167361 +
gtctatgtacttaattttacca

SEQ ID NO: 73536 - DNA, 22 bp, Artificial Sequence
  Synthetic oligonucleotide; TTG chr11 5167340 5167361 5167357 5167362 +
tctatgtacttaattttaccag

SEQ ID NO: 73537 - DNA, 22 bp, Artificial Sequence
  Synthetic oligonucleotide; CTA chr11 5167344 5167365 5167361 5167366 +
tgtacttaattttaccagtggg

SEQ ID NO: 73538 - DNA, 22 bp, Artificial Sequence
  Synthetic oligonucleotide; CTT chr11 5167351 5167372 5167368 5167373 +
aattttaccagtgggtttcata

SEQ ID NO: 73539 - DNA, 22 bp, Artificial Sequence
  Synthetic oligonucleotide; TTA chr11 5167352 5167373 5167369 5167374 +
attttaccagtgggtttcatac

SEQ ID NO: 73540 - DNA, 22 bp, Artificial Sequence
  Synthetic oligonucleotide; TTT chr11 5167356 5167377 5167373 5167378 +
taccagtgggtttcatactttg

SEQ ID NO: 73541 - DNA, 22 bp, Artificial Sequence
  Synthetic oligonucleotide; TTT chr11 5167357 5167378 5167374 5167379 +
accagtgggtttcatactttga

SEQ ID NO: 73542 - DNA, 22 bp, Artificial Sequence
  Synthetic oligonucleotide; TTA chr11 5167358 5167379 5167375 5167380 +
ccagtgggtttcatactttgaa

SEQ ID NO: 73543 - DNA, 22 bp, Artificial Sequence
  Synthetic oligonucleotide; TTT chr11 5167369 5167390 5167386 5167391 +
catactttgaaaagttttcttt

SEQ ID NO: 73544 - DNA, 22 bp, Artificial Sequence
  Synthetic oligonucleotide; TTC chr11 5167370 5167391 5167387 5167392 +
atactttgaaaagttttctttt

SEQ ID NO: 73545 - DNA, 22 bp, Artificial Sequence
  Synthetic oligonucleotide; CTT chr11 5167376 5167397 5167393 5167398 +
tgaaaagttttcttttgcatgt

SEQ ID NO: 73546 - DNA, 22 bp, Artificial Sequence
  Synthetic oligonucleotide; TTT chr11 5167377 5167398 5167394 5167399 +
gaaaagttttcttttgcatgtt

SEQ ID NO: 73547 - DNA, 22 bp, Artificial Sequence
  Synthetic oligonucleotide; TTG chr11 5167378 5167399 5167395 5167400 +
aaaagttttcttttgcatgtta

SEQ ID NO: 73548 - DNA, 22 bp, Artificial Sequence
  Synthetic oligonucleotide; TTT chr11 5167386 5167407 5167403 5167408 +
tcttttgcatgttaatgtcttt

SEQ ID NO: 73549 - DNA, 22 bp, Artificial Sequence
  Synthetic oligonucleotide; TTT chr11 5167387 5167408 5167404 5167409 +
cttttgcatgttaatgtctttt

SEQ ID NO: 73550 - DNA, 22 bp, Artificial Sequence
  Synthetic oligonucleotide; TTC chr11 5167388 5167409 5167405 5167410 +
ttttgcatgttaatgtcttttt

SEQ ID NO: 73551 - DNA, 22 bp, Artificial Sequence
  Synthetic oligonucleotide; CTT chr11 5167390 5167411 5167407 5167412 +
ttgcatgttaatgtcttttttc

SEQ ID NO: 73552 - DNA, 22 bp, Artificial Sequence
  Synthetic oligonucleotide; TTT chr11 5167391 5167412 5167408 5167413 +
tgcatgttaatgtcttttttct

SEQ ID NO: 73553 - DNA, 22 bp, Artificial Sequence
  Synthetic oligonucleotide; TTT chr11 5167392 5167413 5167409 5167414 +
gcatgttaatgtcttttttctt

SEQ ID NO: 73554 - DNA, 22 bp, Artificial Sequence
  Synthetic oligonucleotide; TTG chr11 5167393 5167414 5167410 5167415 +
catgttaatgtcttttttcttt

SEQ ID NO: 73555 - DNA, 22 bp, Artificial Sequence
  Synthetic oligonucleotide; TTA chr11 5167400 5167421 5167417 5167422 +
atgtcttttttctttcagattg

SEQ ID NO: 73556 - DNA, 22 bp, Artificial Sequence
  Synthetic oligonucleotide; CTT chr11 5167407 5167428 5167424 5167429 +
ttttctttcagattgcataact

SEQ ID NO: 73557 - DNA, 22 bp, Artificial Sequence
  Synthetic oligonucleotide; TTT chr11 5167408 5167429 5167425 5167430 +
tttctttcagattgcataactc

SEQ ID NO: 73558 - DNA, 22 bp, Artificial Sequence
  Synthetic oligonucleotide; TTT chr11 5167409 5167430 5167426 5167431 +
ttctttcagattgcataactcc

SEQ ID NO: 73559 - DNA, 22 bp, Artificial Sequence
  Synthetic oligonucleotide; TTT chr11 5167410 5167431 5167427 5167432 +
tctttcagattgcataactccc

SEQ ID NO: 73560 - DNA, 22 bp, Artificial Sequence
  Synthetic oligonucleotide; TTT chr11 5167411 5167432 5167428 5167433 +
ctttcagattgcataactccct

SEQ ID NO: 73561 - DNA, 22 bp, Artificial Sequence
  Synthetic oligonucleotide; TTC chr11 5167412 5167433 5167429 5167434 +
tttcagattgcataactccctt

SEQ ID NO: 73562 - DNA, 22 bp, Artificial Sequence
  Synthetic oligonucleotide; CTT chr11 5167414 5167435 5167431 5167436 +
tcagattgcataactcccttta

SEQ ID NO: 73563 - DNA, 22 bp, Artificial Sequence
  Synthetic oligonucleotide; TTT chr11 5167415 5167436 5167432 5167437 +
cagattgcataactccctttag

SEQ ID NO: 73564 - DNA, 22 bp, Artificial Sequence
  Synthetic oligonucleotide; TTC chr11 5167416 5167437 5167433 5167438 +
agattgcataactccctttagc

SEQ ID NO: 73565 - DNA, 22 bp, Artificial Sequence
  Synthetic oligonucleotide; TTG chr11 5167422 5167443 5167439 5167444 +
cataactccctttagcattttt

SEQ ID NO: 73566 - DNA, 22 bp, Artificial Sequence
  Synthetic oligonucleotide; CTC chr11 5167430 5167451 5167447 5167452 +
cctttagcattttttgcaagat

SEQ ID NO: 73567 - DNA, 22 bp, Artificial Sequence
  Synthetic oligonucleotide; CTT chr11 5167434 5167455 5167451 5167456 +
tagcattttttgcaagatggtc

SEQ ID NO: 73568 - DNA, 22 bp, Artificial Sequence
  Synthetic oligonucleotide; TTT chr11 5167435 5167456 5167452 5167457 +
agcattttttgcaagatggtct

SEQ ID NO: 73569 - DNA, 22 bp, Artificial Sequence
  Synthetic oligonucleotide; TTA chr11 5167436 5167457 5167453 5167458 +
gcattttttgcaagatggtctg

SEQ ID NO: 73570 - DNA, 22 bp, Artificial Sequence
  Synthetic oligonucleotide; TTT chr11 5167442 5167463 5167459 5167464 +
tttgcaagatggtctggtgttg

SEQ ID NO: 73571 - DNA, 22 bp, Artificial Sequence
  Synthetic oligonucleotide; TTT chr11 5167443 5167464 5167460 5167465 +
ttgcaagatggtctggtgttgg

SEQ ID NO: 73572 - DNA, 22 bp, Artificial Sequence
  Synthetic oligonucleotide; TTT chr11 5167444 5167465 5167461 5167466 +
tgcaagatggtctggtgttggt

SEQ ID NO: 73573 - DNA, 22 bp, Artificial Sequence
  Synthetic oligonucleotide; TTT chr11 5167445 5167466 5167462 5167467 +
gcaagatggtctggtgttggtg

SEQ ID NO: 73574 - DNA, 22 bp, Artificial Sequence
  Synthetic oligonucleotide; TTG chr11 5167446 5167467 5167463 5167468 +
caagatggtctggtgttggtga

SEQ ID NO: 73575 - DNA, 22 bp, Artificial Sequence
  Synthetic oligonucleotide; CTG chr11 5167458 5167479 5167475 5167480 +
gtgttggtgaattctctcaact

SEQ ID NO: 73576 - DNA, 22 bp, Artificial Sequence
  Synthetic oligonucleotide; TTG chr11 5167464 5167485 5167481 5167486 +
gtgaattctctcaacttttgtt

SEQ ID NO: 73577 - DNA, 22 bp, Artificial Sequence
  Synthetic oligonucleotide; TTC chr11 5167472 5167493 5167489 5167494 +
tctcaacttttgtttgtctggg

SEQ ID NO: 73578 - DNA, 22 bp, Artificial Sequence
  Synthetic oligonucleotide; CTC chr11 5167474 5167495 5167491 5167496 +
tcaacttttgtttgtctgggaa

SEQ ID NO: 73579 - DNA, 22 bp, Artificial Sequence
  Synthetic oligonucleotide; CTC chr11 5167476 5167497 5167493 5167498 +
aacttttgtttgtctgggaaag

SEQ ID NO: 73580 - DNA, 22 bp, Artificial Sequence
  Synthetic oligonucleotide; CTT chr11 5167481 5167502 5167498 5167503 +
ttgtttgtctgggaaagacttt

SEQ ID NO: 73581 - DNA, 22 bp, Artificial Sequence
  Synthetic oligonucleotide; TTT chr11 5167482 5167503 5167499 5167504 +
tgtttgtctgggaaagacttta

SEQ ID NO: 73582 - DNA, 22 bp, Artificial Sequence
  Synthetic oligonucleotide; TTT chr11 5167483 5167504 5167500 5167505 +
gtttgtctgggaaagactttat

SEQ ID NO: 73583 - DNA, 22 bp, Artificial Sequence
  Synthetic oligonucleotide; TTG chr11 5167484 5167505 5167501 5167506 +
tttgtctgggaaagactttata

SEQ ID NO: 73584 - DNA, 22 bp, Artificial Sequence
  Synthetic oligonucleotide; TTT chr11 5167487 5167508 5167504 5167509 +
gtctgggaaagactttatatat

SEQ ID NO: 73585 - DNA, 22 bp, Artificial Sequence
  Synthetic oligonucleotide; TTG chr11 5167488 5167509 5167505 5167510 +
tctgggaaagactttatatatt

SEQ ID NO: 73586 - DNA, 22 bp, Artificial Sequence
  Synthetic oligonucleotide; CTG chr11 5167492 5167513 5167509 5167514 +
ggaaagactttatatattgctt

SEQ ID NO: 73587 - DNA, 22 bp, Artificial Sequence
  Synthetic oligonucleotide; CTT chr11 5167502 5167523 5167519 5167524 +
tatatattgcttatatttgaat

SEQ ID NO: 73588 - DNA, 22 bp, Artificial Sequence
  Synthetic oligonucleotide; TTT chr11 5167503 5167524 5167520 5167525 +
atatattgcttatatttgaata

SEQ ID NO: 73589 - DNA, 22 bp, Artificial Sequence
  Synthetic oligonucleotide; TTA chr11 5167504 5167525 5167521 5167526 +
tatattgcttatatttgaataa

SEQ ID NO: 73590 - DNA, 22 bp, Artificial Sequence
  Synthetic oligonucleotide; TTG chr11 5167511 5167532 5167528 5167533 +
cttatatttgaataacagtttt

SEQ ID NO: 73591 - DNA, 22 bp, Artificial Sequence
  Synthetic oligonucleotide; CTT chr11 5167514 5167535 5167531 5167536 +
atatttgaataacagttttacc

SEQ ID NO: 73592 - DNA, 22 bp, Artificial Sequence
  Synthetic oligonucleotide; TTA chr11 5167515 5167536 5167532 5167537 +
tatttgaataacagttttaccc

SEQ ID NO: 73593 - DNA, 22 bp, Artificial Sequence
  Synthetic oligonucleotide; TTT chr11 5167520 5167541 5167537 5167542 +
gaataacagttttaccctataa

SEQ ID NO: 73594 - DNA, 22 bp, Artificial Sequence
  Synthetic oligonucleotide; TTG chr11 5167521 5167542 5167538 5167543 +
aataacagttttaccctataaa

SEQ ID NO: 73595 - DNA, 22 bp, Artificial Sequence
  Synthetic oligonucleotide; TTT chr11 5167532 5167553 5167549 5167554 +
taccctataaaatattcttgaa

SEQ ID NO: 73596 - DNA, 22 bp, Artificial Sequence
  Synthetic oligonucleotide; TTT chr11 5167533 5167554 5167550 5167555 +
accctataaaatattcttgaat

SEQ ID NO: 73597 - DNA, 22 bp, Artificial Sequence
  Synthetic oligonucleotide; TTA chr11 5167534 5167555 5167551 5167556 +
ccctataaaatattcttgaata

SEQ ID NO: 73598 - DNA, 22 bp, Artificial Sequence
  Synthetic oligonucleotide; CTA chr11 5167539 5167560 5167556 5167561 +
taaaatattcttgaatatcagt

SEQ ID NO: 73599 - DNA, 22 bp, Artificial Sequence
  Synthetic oligonucleotide; TTC chr11 5167549 5167570 5167566 5167571 +
ttgaatatcagttttcttttat

SEQ ID NO: 73600 - DNA, 22 bp, Artificial Sequence
  Synthetic oligonucleotide; CTT chr11 5167551 5167572 5167568 5167573 +
gaatatcagttttcttttatcc

SEQ ID NO: 73601 - DNA, 22 bp, Artificial Sequence
  Synthetic oligonucleotide; TTG chr11 5167552 5167573 5167569 5167574 +
aatatcagttttcttttatccc

SEQ ID NO: 73602 - DNA, 22 bp, Artificial Sequence
  Synthetic oligonucleotide; TTT chr11 5167563 5167584 5167580 5167585 +
tcttttatccctgagcgctttg

SEQ ID NO: 73603 - DNA, 22 bp, Artificial Sequence
  Synthetic oligonucleotide; TTT chr11 5167564 5167585 5167581 5167586 +
cttttatccctgagcgctttga

SEQ ID NO: 73604 - DNA, 22 bp, Artificial Sequence
  Synthetic oligonucleotide; TTC chr11 5167565 5167586 5167582 5167587 +
ttttatccctgagcgctttgaa

SEQ ID NO: 73605 - DNA, 22 bp, Artificial Sequence
  Synthetic oligonucleotide; CTT chr11 5167567 5167588 5167584 5167589 +
ttatccctgagcgctttgaaaa

SEQ ID NO: 73606 - DNA, 22 bp, Artificial Sequence
  Synthetic oligonucleotide; TTT chr11 5167568 5167589 5167585 5167590 +
tatccctgagcgctttgaaaat

SEQ ID NO: 73607 - DNA, 22 bp, Artificial Sequence
  Synthetic oligonucleotide; TTT chr11 5167569 5167590 5167586 5167591 +
atccctgagcgctttgaaaatt

SEQ ID NO: 73608 - DNA, 22 bp, Artificial Sequence
  Synthetic oligonucleotide; TTA chr11 5167570 5167591 5167587 5167592 +
tccctgagcgctttgaaaattt

SEQ ID NO: 73609 - DNA, 22 bp, Artificial Sequence
  Synthetic oligonucleotide; CTG chr11 5167576 5167597 5167593 5167598 +
agcgctttgaaaatttcattcg

SEQ ID NO: 73610 - DNA, 22 bp, Artificial Sequence
  Synthetic oligonucleotide; CTT chr11 5167583 5167604 5167600 5167605 +
tgaaaatttcattcgactctct

SEQ ID NO: 73611 - DNA, 22 bp, Artificial Sequence
  Synthetic oligonucleotide; TTT chr11 5167584 5167605 5167601 5167606 +
gaaaatttcattcgactctctc

SEQ ID NO: 73612 - DNA, 22 bp, Artificial Sequence
  Synthetic oligonucleotide; TTG chr11 5167585 5167606 5167602 5167607 +
aaaatttcattcgactctctct

SEQ ID NO: 73613 - DNA, 22 bp, Artificial Sequence
  Synthetic oligonucleotide; TTT chr11 5167592 5167613 5167609 5167614 +
cattcgactctctcttggactg

SEQ ID NO: 73614 - DNA, 22 bp, Artificial Sequence
  Synthetic oligonucleotide; TTC chr11 5167593 5167614 5167610 5167615 +
attcgactctctcttggactgt

SEQ ID NO: 73615 - DNA, 22 bp, Artificial Sequence
  Synthetic oligonucleotide; TTC chr11 5167597 5167618 5167614 5167619 +
gactctctcttggactgtgtga

SEQ ID NO: 73616 - DNA, 22 bp, Artificial Sequence
  Synthetic oligonucleotide; CTC chr11 5167602 5167623 5167619 5167624 +
tctcttggactgtgtgatttct

SEQ ID NO: 73617 - DNA, 22 bp, Artificial Sequence
  Synthetic oligonucleotide; CTC chr11 5167604 5167625 5167621 5167626 +
tcttggactgtgtgatttctat

SEQ ID NO: 73618 - DNA, 22 bp, Artificial Sequence
  Synthetic oligonucleotide; CTC chr11 5167606 5167627 5167623 5167628 +
ttggactgtgtgatttctattg

SEQ ID NO: 73619 - DNA, 22 bp, Artificial Sequence
  Synthetic oligonucleotide; CTT chr11 5167608 5167629 5167625 5167630 +
ggactgtgtgatttctattgag

SEQ ID NO: 73620 - DNA, 22 bp, Artificial Sequence
  Synthetic oligonucleotide; TTG chr11 5167609 5167630 5167626 5167631 +
gactgtgtgatttctattgaga

SEQ ID NO: 73621 - DNA, 22 bp, Artificial Sequence
  Synthetic oligonucleotide; CTG chr11 5167614 5167635 5167631 5167636 +
tgtgatttctattgagatgttt

SEQ ID NO: 73622 - DNA, 22 bp, Artificial Sequence
  Synthetic oligonucleotide; TTT chr11 5167622 5167643 5167639 5167644 +
ctattgagatgtttgttgtcac

SEQ ID NO: 73623 - DNA, 22 bp, Artificial Sequence
  Synthetic oligonucleotide; TTC chr11 5167623 5167644 5167640 5167645 +
tattgagatgtttgttgtcaca

SEQ ID NO: 73624 - DNA, 22 bp, Artificial Sequence
  Synthetic oligonucleotide; CTA chr11 5167625 5167646 5167642 5167647 +
ttgagatgtttgttgtcacagg

SEQ ID NO: 73625 - DNA, 22 bp, Artificial Sequence
  Synthetic oligonucleotide; TTG chr11 5167628 5167649 5167645 5167650 +
agatgtttgttgtcacaggatt

SEQ ID NO: 73626 - DNA, 22 bp, Artificial Sequence
  Synthetic oligonucleotide; TTT chr11 5167636 5167657 5167653 5167658 +
gttgtcacaggatttggagctc

SEQ ID NO: 73627 - DNA, 22 bp, Artificial Sequence
  Synthetic oligonucleotide; TTG chr11 5167637 5167658 5167654 5167659 +
ttgtcacaggatttggagctcc

SEQ ID NO: 73628 - DNA, 22 bp, Artificial Sequence
  Synthetic oligonucleotide; TTG chr11 5167640 5167661 5167657 5167662 +
tcacaggatttggagctccttt

SEQ ID NO: 73629 - DNA, 22 bp, Artificial Sequence
  Synthetic oligonucleotide; TTT chr11 5167651 5167672 5167668 5167673 +
ggagctcctttatatgctattt

SEQ ID NO: 73630 - DNA, 22 bp, Artificial Sequence
  Synthetic oligonucleotide; TTG chr11 5167652 5167673 5167669 5167674 +
gagctcctttatatgctatttg

SEQ ID NO: 73631 - DNA, 22 bp, Artificial Sequence
  Synthetic oligonucleotide; CTC chr11 5167658 5167679 5167675 5167680 +
ctttatatgctatttgtttctc

SEQ ID NO: 73632 - DNA, 22 bp, Artificial Sequence
  Synthetic oligonucleotide; CTT chr11 5167661 5167682 5167678 5167683 +
tatatgctatttgtttctcatc

SEQ ID NO: 73633 - DNA, 22 bp, Artificial Sequence
  Synthetic oligonucleotide; TTT chr11 5167662 5167683 5167679 5167684 +
atatgctatttgtttctcatct

SEQ ID NO: 73634 - DNA, 22 bp, Artificial Sequence
  Synthetic oligonucleotide; TTA chr11 5167663 5167684 5167680 5167685 +
tatgctatttgtttctcatctc

SEQ ID NO: 73635 - DNA, 22 bp, Artificial Sequence
  Synthetic oligonucleotide; CTA chr11 5167670 5167691 5167687 5167692 +
tttgtttctcatctcttctgct

SEQ ID NO: 73636 - DNA, 22 bp, Artificial Sequence
  Synthetic oligonucleotide; TTT chr11 5167673 5167694 5167690 5167695 +
gtttctcatctcttctgctttt

SEQ ID NO: 73637 - DNA, 22 bp, Artificial Sequence
  Synthetic oligonucleotide; TTG chr11 5167674 5167695 5167691 5167696 +
tttctcatctcttctgctttta

SEQ ID NO: 73638 - DNA, 22 bp, Artificial Sequence
  Synthetic oligonucleotide; TTT chr11 5167677 5167698 5167694 5167699 +
ctcatctcttctgcttttagga

SEQ ID NO: 73639 - DNA, 22 bp, Artificial Sequence
  Synthetic oligonucleotide; TTC chr11 5167678 5167699 5167695 5167700 +
tcatctcttctgcttttaggat

SEQ ID NO: 73640 - DNA, 22 bp, Artificial Sequence
  Synthetic oligonucleotide; CTC chr11 5167680 5167701 5167697 5167702 +
atctcttctgcttttaggatca

SEQ ID NO: 73641 - DNA, 22 bp, Artificial Sequence
  Synthetic oligonucleotide; CTC chr11 5167685 5167706 5167702 5167707 +
ttctgcttttaggatcatcttt

SEQ ID NO: 73642 - DNA, 22 bp, Artificial Sequence
  Synthetic oligonucleotide; CTT chr11 5167687 5167708 5167704 5167709 +
ctgcttttaggatcatcttttt

SEQ ID NO: 73643 - DNA, 22 bp, Artificial Sequence
  Synthetic oligonucleotide; TTC chr11 5167688 5167709 5167705 5167710 +
tgcttttaggatcatctttttg

SEQ ID NO: 73644 - DNA, 22 bp, Artificial Sequence
  Synthetic oligonucleotide; CTG chr11 5167690 5167711 5167707 5167712 +
cttttaggatcatctttttgtc

SEQ ID NO: 73645 - DNA, 22 bp, Artificial Sequence
  Synthetic oligonucleotide; CTT chr11 5167693 5167714 5167710 5167715 +
ttaggatcatctttttgtcctt

SEQ ID NO: 73646 - DNA, 22 bp, Artificial Sequence
  Synthetic oligonucleotide; TTT chr11 5167694 5167715 5167711 5167716 +
taggatcatctttttgtccttg

SEQ ID NO: 73647 - DNA, 22 bp, Artificial Sequence
  Synthetic oligonucleotide; TTT chr11 5167695 5167716 5167712 5167717 +
aggatcatctttttgtccttga

SEQ ID NO: 73648 - DNA, 22 bp, Artificial Sequence
  Synthetic oligonucleotide; TTA chr11 5167696 5167717 5167713 5167718 +
ggatcatctttttgtccttgac

SEQ ID NO: 73649 - DNA, 22 bp, Artificial Sequence
  Synthetic oligonucleotide; CTT chr11 5167706 5167727 5167723 5167728 +
tttgtccttgacctgatgtctt

SEQ ID NO: 73650 - DNA, 22 bp, Artificial Sequence
  Synthetic oligonucleotide; TTT chr11 5167707 5167728 5167724 5167729 +
ttgtccttgacctgatgtcttg

SEQ ID NO: 73651 - DNA, 22 bp, Artificial Sequence
  Synthetic oligonucleotide; TTT chr11 5167708 5167729 5167725 5167730 +
tgtccttgacctgatgtcttgg

SEQ ID NO: 73652 - DNA, 22 bp, Artificial Sequence
  Synthetic oligonucleotide; TTT chr11 5167709 5167730 5167726 5167731 +
gtccttgacctgatgtcttggc

SEQ ID NO: 73653 - DNA, 22 bp, Artificial Sequence
  Synthetic oligonucleotide; TTG chr11 5167710 5167731 5167727 5167732 +
tccttgacctgatgtcttggcg

SEQ ID NO: 73654 - DNA, 22 bp, Artificial Sequence
  Synthetic oligonucleotide; CTT chr11 5167715 5167736 5167732 5167737 +
gacctgatgtcttggcgtagta

SEQ ID NO: 73655 - DNA, 22 bp, Artificial Sequence
  Synthetic oligonucleotide; TTG chr11 5167716 5167737 5167733 5167738 +
acctgatgtcttggcgtagtac

SEQ ID NO: 73656 - DNA, 22 bp, Artificial Sequence
  Synthetic oligonucleotide; CTG chr11 5167721 5167742 5167738 5167743 +
atgtcttggcgtagtactctac

SEQ ID NO: 73657 - DNA, 22 bp, Artificial Sequence
  Synthetic oligonucleotide; CTT chr11 5167728 5167749 5167745 5167750 +
ggcgtagtactctactatatct

SEQ ID NO: 73658 - DNA, 22 bp, Artificial Sequence
  Synthetic oligonucleotide; TTG chr11 5167729 5167750 5167746 5167751 +
gcgtagtactctactatatcta

SEQ ID NO: 73659 - DNA, 22 bp, Artificial Sequence
  Synthetic oligonucleotide; CTC chr11 5167740 5167761 5167757 5167762 +
tactatatctaggactacactt

SEQ ID NO: 73660 - DNA, 22 bp, Artificial Sequence
  Synthetic oligonucleotide; CTA chr11 5167742 5167763 5167759 5167764 +
ctatatctaggactacacttag

SEQ ID NO: 73661 - DNA, 22 bp, Artificial Sequence
  Synthetic oligonucleotide; CTA chr11 5167745 5167766 5167762 5167767 +
tatctaggactacacttagaat

SEQ ID NO: 73662 - DNA, 22 bp, Artificial Sequence
  Synthetic oligonucleotide; CTA chr11 5167751 5167772 5167768 5167773 +
ggactacacttagaatgaataa

SEQ ID NO: 73663 - DNA, 22 bp, Artificial Sequence
  Synthetic oligonucleotide; CTA chr11 5167757 5167778 5167774 5167779 +
cacttagaatgaataatatgta

SEQ ID NO: 73664 - DNA, 22 bp, Artificial Sequence
  Synthetic oligonucleotide; CTT chr11 5167762 5167783 5167779 5167784 +
agaatgaataatatgtaataaa

SEQ ID NO: 73665 - DNA, 22 bp, Artificial Sequence
  Synthetic oligonucleotide; TTA chr11 5167763 5167784 5167780 5167785 +
gaatgaataatatgtaataaaa

SEQ ID NO: 73666 - DNA, 22 bp, Artificial Sequence
  Synthetic oligonucleotide; TTG chr11 5167807 5167828 5167824 5167829 +
ctggcttaaaaagtatttattt

SEQ ID NO: 73667 - DNA, 22 bp, Artificial Sequence
  Synthetic oligonucleotide; CTG chr11 5167810 5167831 5167827 5167832 +
gcttaaaaagtatttatttatt

SEQ ID NO: 73668 - DNA, 22 bp, Artificial Sequence
  Synthetic oligonucleotide; CTT chr11 5167814 5167835 5167831 5167836 +
aaaaagtatttatttattgtaa

SEQ ID NO: 73669 - DNA, 22 bp, Artificial Sequence
  Synthetic oligonucleotide; TTA chr11 5167815 5167836 5167832 5167837 +
aaaagtatttatttattgtaag

SEQ ID NO: 73670 - DNA, 22 bp, Artificial Sequence
  Synthetic oligonucleotide; TTT chr11 5167825 5167846 5167842 5167847 +
atttattgtaagcataagaaaa

SEQ ID NO: 73671 - DNA, 22 bp, Artificial Sequence
  Synthetic oligonucleotide; TTA chr11 5167826 5167847 5167843 5167848 +
tttattgtaagcataagaaaat

SEQ ID NO: 73672 - DNA, 22 bp, Artificial Sequence
  Synthetic oligonucleotide; TTT chr11 5167829 5167850 5167846 5167851 +
attgtaagcataagaaaatttg

SEQ ID NO: 73673 - DNA, 22 bp, Artificial Sequence
  Synthetic oligonucleotide; TTA chr11 5167830 5167851 5167847 5167852 +
ttgtaagcataagaaaatttga

SEQ ID NO: 73674 - DNA, 22 bp, Artificial Sequence
  Synthetic oligonucleotide; TTG chr11 5167833 5167854 5167850 5167855 +
taagcataagaaaatttgaccg

SEQ ID NO: 73675 - DNA, 22 bp, Artificial Sequence
  Synthetic oligonucleotide; TTT chr11 5167850 5167871 5167867 5167872 +
gaccgatgtaatcttagatgat

SEQ ID NO: 73676 - DNA, 22 bp, Artificial Sequence
  Synthetic oligonucleotide; TTG chr11 5167851 5167872 5167868 5167873 +
accgatgtaatcttagatgata

SEQ ID NO: 73677 - DNA, 22 bp, Artificial Sequence
  Synthetic oligonucleotide; CTT chr11 5167865 5167886 5167882 5167887 +
agatgatagttctaaaagtgtt

SEQ ID NO: 73678 - DNA, 22 bp, Artificial Sequence
  Synthetic oligonucleotide; TTA chr11 5167866 5167887 5167883 5167888 +
gatgatagttctaaaagtgttg

SEQ ID NO: 73679 - DNA, 22 bp, Artificial Sequence
  Synthetic oligonucleotide; TTC chr11 5167877 5167898 5167894 5167899 +
taaaagtgttggttgaggaagt

SEQ ID NO: 73680 - DNA, 22 bp, Artificial Sequence
  Synthetic oligonucleotide; CTA chr11 5167879 5167900 5167896 5167901 +
aaagtgttggttgaggaagtag

SEQ ID NO: 73681 - DNA, 22 bp, Artificial Sequence
  Synthetic oligonucleotide; TTG chr11 5167888 5167909 5167905 5167910 +
gttgaggaagtagaagagaatc

SEQ ID NO: 73682 - DNA, 22 bp, Artificial Sequence
  Synthetic oligonucleotide; TTG chr11 5167892 5167913 5167909 5167914 +
aggaagtagaagagaatcagta

SEQ ID NO: 73683 - DNA, 22 bp, Artificial Sequence
  Synthetic oligonucleotide; CTA chr11 5167918 5167939 5167935 5167940 +
agcagttaaactaatgtgggaa

SEQ ID NO: 73684 - DNA, 22 bp, Artificial Sequence
  Synthetic oligonucleotide; TTA chr11 5167926 5167947 5167943 5167948 +
aactaatgtgggaaggcccctt

SEQ ID NO: 73685 - DNA, 22 bp, Artificial Sequence
  Synthetic oligonucleotide; CTA chr11 5167931 5167952 5167948 5167953 +
atgtgggaaggccccttttata

SEQ ID NO: 73686 - DNA, 22 bp, Artificial Sequence
  Synthetic oligonucleotide; CTT chr11 5167948 5167969 5167965 5167970 +
ttataaagatcctcttgagaaa

SEQ ID NO: 73687 - DNA, 22 bp, Artificial Sequence
  Synthetic oligonucleotide; TTT chr11 5167949 5167970 5167966 5167971 +
tataaagatcctcttgagaaaa

SEQ ID NO: 73688 - DNA, 22 bp, Artificial Sequence
  Synthetic oligonucleotide; TTT chr11 5167950 5167971 5167967 5167972 +
ataaagatcctcttgagaaaac

SEQ ID NO: 73689 - DNA, 22 bp, Artificial Sequence
  Synthetic oligonucleotide; TTA chr11 5167951 5167972 5167968 5167973 +
taaagatcctcttgagaaaacc

SEQ ID NO: 73690 - DNA, 22 bp, Artificial Sequence
  Synthetic oligonucleotide; CTC chr11 5167962 5167983 5167979 5167984 +
ttgagaaaacctttatacatta

SEQ ID NO: 73691 - DNA, 22 bp, Artificial Sequence
  Synthetic oligonucleotide; CTT chr11 5167964 5167985 5167981 5167986 +
gagaaaacctttatacattatt

SEQ ID NO: 73692 - DNA, 22 bp, Artificial Sequence
  Synthetic oligonucleotide; TTG chr11 5167965 5167986 5167982 5167987 +
agaaaacctttatacattatta

SEQ ID NO: 73693 - DNA, 22 bp, Artificial Sequence
  Synthetic oligonucleotide; CTT chr11 5167975 5167996 5167992 5167997 +
tatacattattaatatatgact

SEQ ID NO: 73694 - DNA, 22 bp, Artificial Sequence
  Synthetic oligonucleotide; TTT chr11 5167976 5167997 5167993 5167998 +
atacattattaatatatgacta

SEQ ID NO: 73695 - DNA, 22 bp, Artificial Sequence
  Synthetic oligonucleotide; TTA chr11 5167977 5167998 5167994 5167999 +
tacattattaatatatgactat

SEQ ID NO: 73696 - DNA, 22 bp, Artificial Sequence
  Synthetic oligonucleotide; TTA chr11 5167984 5168005 5168001 5168006 +
ttaatatatgactataattaga

SEQ ID NO: 73697 - DNA, 22 bp, Artificial Sequence
  Synthetic oligonucleotide; TTA chr11 5167987 5168008 5168004 5168009 +
atatatgactataattagagga

SEQ ID NO: 73698 - DNA, 22 bp, Artificial Sequence
  Synthetic oligonucleotide; CTA chr11 5167998 5168019 5168015 5168020 +
taattagaggaaacagaggtga

SEQ ID NO: 73699 - DNA, 22 bp, Artificial Sequence
  Synthetic oligonucleotide; TTA chr11 5168004 5168025 5168021 5168026 +
gaggaaacagaggtgagtgaat

SEQ ID NO: 73700 - DNA, 22 bp, Artificial Sequence
  Synthetic oligonucleotide; TTT chr11 5168028 5168049 5168045 5168050 +
tgtcctcatgaatctcaaagga

SEQ ID NO: 73701 - DNA, 22 bp, Artificial Sequence
  Synthetic oligonucleotide; TTT chr11 5168029 5168050 5168046 5168051 +
gtcctcatgaatctcaaaggag

SEQ ID NO: 73702 - DNA, 22 bp, Artificial Sequence
  Synthetic oligonucleotide; TTG chr11 5168030 5168051 5168047 5168052 +
tcctcatgaatctcaaaggaga

SEQ ID NO: 73703 - DNA, 22 bp, Artificial Sequence
  Synthetic oligonucleotide; CTC chr11 5168035 5168056 5168052 5168057 +
atgaatctcaaaggagaaaatg

SEQ ID NO: 73704 - DNA, 22 bp, Artificial Sequence
  Synthetic oligonucleotide; CTC chr11 5168044 5168065 5168061 5168066 +
aaaggagaaaatggtttacaga

SEQ ID NO: 73705 - DNA, 22 bp, Artificial Sequence
  Synthetic oligonucleotide; TTT chr11 5168061 5168082 5168078 5168083 +
acagaattgcttggtgttcttc

SEQ ID NO: 73706 - DNA, 22 bp, Artificial Sequence
  Synthetic oligonucleotide; TTA chr11 5168062 5168083 5168079 5168084 +
cagaattgcttggtgttcttca

SEQ ID NO: 73707 - DNA, 22 bp, Artificial Sequence
  Synthetic oligonucleotide; TTG chr11 5168070 5168091 5168087 5168092 +
cttggtgttcttcagattccaa

SEQ ID NO: 73708 - DNA, 22 bp, Artificial Sequence
  Synthetic oligonucleotide; CTT chr11 5168073 5168094 5168090 5168095 +
ggtgttcttcagattccaattt

SEQ ID NO: 73709 - DNA, 22 bp, Artificial Sequence
  Synthetic oligonucleotide; TTG chr11 5168074 5168095 5168091 5168096 +
gtgttcttcagattccaatttt

SEQ ID NO: 73710 - DNA, 22 bp, Artificial Sequence
  Synthetic oligonucleotide; TTC chr11 5168080 5168101 5168097 5168102 +
ttcagattccaattttaaagtc

SEQ ID NO: 73711 - DNA, 22 bp, Artificial Sequence
  Synthetic oligonucleotide; CTT chr11 5168082 5168103 5168099 5168104 +
cagattccaattttaaagtcaa

SEQ ID NO: 73712 - DNA, 22 bp, Artificial Sequence
  Synthetic oligonucleotide; TTC chr11 5168083 5168104 5168100 5168105 +
agattccaattttaaagtcaaa

SEQ ID NO: 73713 - DNA, 22 bp, Artificial Sequence
  Synthetic oligonucleotide; TTC chr11 5168089 5168110 5168106 5168111 +
caattttaaagtcaaatctgaa

SEQ ID NO: 73714 - DNA, 22 bp, Artificial Sequence
  Synthetic oligonucleotide; TTT chr11 5168095 5168116 5168112 5168117 +
taaagtcaaatctgaattttaa

SEQ ID NO: 73715 - DNA, 22 bp, Artificial Sequence
  Synthetic oligonucleotide; TTT chr11 5168096 5168117 5168113 5168118 +
aaagtcaaatctgaattttaag

SEQ ID NO: 73716 - DNA, 22 bp, Artificial Sequence
  Synthetic oligonucleotide; TTA chr11 5168097 5168118 5168114 5168119 +
aagtcaaatctgaattttaagt

SEQ ID NO: 73717 - DNA, 22 bp, Artificial Sequence
  Synthetic oligonucleotide; CTG chr11 5168109 5168130 5168126 5168131 +
aattttaagttatgggaccact

SEQ ID NO: 73718 - DNA, 22 bp, Artificial Sequence
  Synthetic oligonucleotide; TTT chr11 5168114 5168135 5168131 5168136 +
taagttatgggaccactgataa

SEQ ID NO: 73719 - DNA, 22 bp, Artificial Sequence
  Synthetic oligonucleotide; TTT chr11 5168115 5168136 5168132 5168137 +
aagttatgggaccactgataat

SEQ ID NO: 73720 - DNA, 22 bp, Artificial Sequence
  Synthetic oligonucleotide; TTA chr11 5168116 5168137 5168133 5168138 +
agttatgggaccactgataata

SEQ ID NO: 73721 - DNA, 22 bp, Artificial Sequence
  Synthetic oligonucleotide; TTA chr11 5168121 5168142 5168138 5168143 +
tgggaccactgataatatggtg

SEQ ID NO: 73722 - DNA, 22 bp, Artificial Sequence
  Synthetic oligonucleotide; CTG chr11 5168132 5168153 5168149 5168154 +
ataatatggtgggctaaagaat

SEQ ID NO: 73723 - DNA, 22 bp, Artificial Sequence
  Synthetic oligonucleotide; CTA chr11 5168148 5168169 5168165 5168170 +
aagaatcaggtttttagttgga

SEQ ID NO: 73724 - DNA, 22 bp, Artificial Sequence
  Synthetic oligonucleotide; TTT chr11 5168161 5168182 5168178 5168183 +
ttagttggattgtctggttttg

SEQ ID NO: 73725 - DNA, 22 bp, Artificial Sequence
  Synthetic oligonucleotide; TTT chr11 5168162 5168183 5168179 5168184 +
tagttggattgtctggttttga

SEQ ID NO: 73726 - DNA, 22 bp, Artificial Sequence
  Synthetic oligonucleotide; TTT chr11 5168163 5168184 5168180 5168185 +
agttggattgtctggttttgag

SEQ ID NO: 73727 - DNA, 22 bp, Artificial Sequence
  Synthetic oligonucleotide; TTA chr11 5168164 5168185 5168181 5168186 +
gttggattgtctggttttgagt

SEQ ID NO: 73728 - DNA, 22 bp, Artificial Sequence
  Synthetic oligonucleotide; TTG chr11 5168168 5168189 5168185 5168190 +
gattgtctggttttgagttgtg

SEQ ID NO: 73729 - DNA, 22 bp, Artificial Sequence
  Synthetic oligonucleotide; TTG chr11 5168173 5168194 5168190 5168195 +
tctggttttgagttgtgattct

SEQ ID NO: 73730 - DNA, 22 bp, Artificial Sequence
  Synthetic oligonucleotide; CTG chr11 5168177 5168198 5168194 5168199 +
gttttgagttgtgattctgcca

SEQ ID NO: 73731 - DNA, 22 bp, Artificial Sequence
  Synthetic oligonucleotide; TTT chr11 5168181 5168202 5168198 5168203 +
tgagttgtgattctgccactta

SEQ ID NO: 73732 - DNA, 22 bp, Artificial Sequence
  Synthetic oligonucleotide; TTT chr11 5168182 5168203 5168199 5168204 +
gagttgtgattctgccacttat

SEQ ID NO: 73733 - DNA, 22 bp, Artificial Sequence
  Synthetic oligonucleotide; TTG chr11 5168183 5168204 5168200 5168205 +
agttgtgattctgccacttatt

SEQ ID NO: 73734 - DNA, 22 bp, Artificial Sequence
  Synthetic oligonucleotide; TTG chr11 5168188 5168209 5168205 5168210 +
tgattctgccacttattaactc

SEQ ID NO: 73735 - DNA, 22 bp, Artificial Sequence
  Synthetic oligonucleotide; TTC chr11 5168194 5168215 5168211 5168216 +
tgccacttattaactctttgac

SEQ ID NO: 73736 - DNA, 22 bp, Artificial Sequence
  Synthetic oligonucleotide; CTG chr11 5168196 5168217 5168213 5168218 +
ccacttattaactctttgactt

SEQ ID NO: 73737 - DNA, 22 bp, Artificial Sequence
  Synthetic oligonucleotide; CTT chr11 5168202 5168223 5168219 5168224 +
attaactctttgacttggggca

SEQ ID NO: 73738 - DNA, 22 bp, Artificial Sequence
  Synthetic oligonucleotide; TTA chr11 5168203 5168224 5168220 5168225 +
ttaactctttgacttggggcat

SEQ ID NO: 73739 - DNA, 22 bp, Artificial Sequence
  Synthetic oligonucleotide; TTA chr11 5168206 5168227 5168223 5168228 +
actctttgacttggggcatgat

SEQ ID NO: 73740 - DNA, 22 bp, Artificial Sequence
  Synthetic oligonucleotide; CTC chr11 5168210 5168231 5168227 5168232 +
tttgacttggggcatgatgact

SEQ ID NO: 73741 - DNA, 22 bp, Artificial Sequence
  Synthetic oligonucleotide; CTT chr11 5168212 5168233 5168229 5168234 +
tgacttggggcatgatgacttg

SEQ ID NO: 73742 - DNA, 22 bp, Artificial Sequence
  Synthetic oligonucleotide; TTT chr11 5168213 5168234 5168230 5168235 +
gacttggggcatgatgacttga

SEQ ID NO: 73743 - DNA, 22 bp, Artificial Sequence
  Synthetic oligonucleotide; TTG chr11 5168214 5168235 5168231 5168236 +
acttggggcatgatgacttgac

SEQ ID NO: 73744 - DNA, 22 bp, Artificial Sequence
  Synthetic oligonucleotide; CTT chr11 5168218 5168239 5168235 5168240 +
ggggcatgatgacttgacttct

SEQ ID NO: 73745 - DNA, 22 bp, Artificial Sequence
  Synthetic oligonucleotide; TTG chr11 5168219 5168240 5168236 5168241 +
gggcatgatgacttgacttctc

SEQ ID NO: 73746 - DNA, 22 bp, Artificial Sequence
  Synthetic oligonucleotide; CTT chr11 5168233 5168254 5168250 5168255 +
gacttctctatgtttctgtttc

SEQ ID NO: 73747 - DNA, 22 bp, Artificial Sequence
  Synthetic oligonucleotide; TTG chr11 5168234 5168255 5168251 5168256 +
acttctctatgtttctgtttct

SEQ ID NO: 73748 - DNA, 22 bp, Artificial Sequence
  Synthetic oligonucleotide; CTT chr11 5168238 5168259 5168255 5168260 +
ctctatgtttctgtttctacat

SEQ ID NO: 73749 - DNA, 22 bp, Artificial Sequence
  Synthetic oligonucleotide; TTC chr11 5168239 5168260 5168256 5168261 +
tctatgtttctgtttctacatt

SEQ ID NO: 73750 - DNA, 22 bp, Artificial Sequence
  Synthetic oligonucleotide; CTC chr11 5168241 5168262 5168258 5168263 +
tatgtttctgtttctacatttg

SEQ ID NO: 73751 - DNA, 22 bp, Artificial Sequence
  Synthetic oligonucleotide; CTA chr11 5168243 5168264 5168260 5168265 +
tgtttctgtttctacatttgta

SEQ ID NO: 73752 - DNA, 22 bp, Artificial Sequence
  Synthetic oligonucleotide; TTT chr11 5168248 5168269 5168265 5168270 +
ctgtttctacatttgtaacatg

SEQ ID NO: 73753 - DNA, 22 bp, Artificial Sequence
  Synthetic oligonucleotide; TTC chr11 5168249 5168270 5168266 5168271 +
tgtttctacatttgtaacatgt

SEQ ID NO: 73754 - DNA, 22 bp, Artificial Sequence
  Synthetic oligonucleotide; CTG chr11 5168251 5168272 5168268 5168273 +
tttctacatttgtaacatgtag

SEQ ID NO: 73755 - DNA, 22 bp, Artificial Sequence
  Synthetic oligonucleotide; TTT chr11 5168254 5168275 5168271 5168276 +
ctacatttgtaacatgtagaca

SEQ ID NO: 73756 - DNA, 22 bp, Artificial Sequence
  Synthetic oligonucleotide; TTC chr11 5168255 5168276 5168272 5168277 +
tacatttgtaacatgtagacaa

SEQ ID NO: 73757 - DNA, 22 bp, Artificial Sequence
  Synthetic oligonucleotide; CTA chr11 5168257 5168278 5168274 5168279 +
catttgtaacatgtagacaaac

SEQ ID NO: 73758 - DNA, 22 bp, Artificial Sequence
  Synthetic oligonucleotide; TTT chr11 5168262 5168283 5168279 5168284 +
gtaacatgtagacaaactgata

SEQ ID NO: 73759 - DNA, 22 bp, Artificial Sequence
  Synthetic oligonucleotide; TTG chr11 5168263 5168284 5168280 5168285 +
taacatgtagacaaactgataa

SEQ ID NO: 73760 - DNA, 22 bp, Artificial Sequence
  Synthetic oligonucleotide; CTG chr11 5168281 5168302 5168298 5168303 +
ataatttcttcatatatttgtt

SEQ ID NO: 73761 - DNA, 22 bp, Artificial Sequence
  Synthetic oligonucleotide; TTT chr11 5168288 5168309 5168305 5168310 +
cttcatatatttgttccgtgga

SEQ ID NO: 73762 - DNA, 22 bp, Artificial Sequence
  Synthetic oligonucleotide; TTC chr11 5168289 5168310 5168306 5168311 +
ttcatatatttgttccgtggat

SEQ ID NO: 73763 - DNA, 22 bp, Artificial Sequence
  Synthetic oligonucleotide; CTT chr11 5168291 5168312 5168308 5168313 +
catatatttgttccgtggatta

SEQ ID NO: 73764 - DNA, 22 bp, Artificial Sequence
  Synthetic oligonucleotide; TTC chr11 5168292 5168313 5168309 5168314 +
atatatttgttccgtggattaa

SEQ ID NO: 73765 - DNA, 22 bp, Artificial Sequence
  Synthetic oligonucleotide; TTT chr11 5168300 5168321 5168317 5168322 +
gttccgtggattaaatgaacta

SEQ ID NO: 73766 - DNA, 22 bp, Artificial Sequence
  Synthetic oligonucleotide; TTG chr11 5168301 5168322 5168318 5168323 +
ttccgtggattaaatgaactaa

SEQ ID NO: 73767 - DNA, 22 bp, Artificial Sequence
  Synthetic oligonucleotide; TTC chr11 5168304 5168325 5168321 5168326 +
cgtggattaaatgaactaatct

SEQ ID NO: 73768 - DNA, 22 bp, Artificial Sequence
  Synthetic oligonucleotide; TTA chr11 5168313 5168334 5168330 5168335 +
aatgaactaatctatataaatc

SEQ ID NO: 73769 - DNA, 22 bp, Artificial Sequence
  Synthetic oligonucleotide; CTA chr11 5168322 5168343 5168339 5168344 +
atctatataaatcacttagtat

SEQ ID NO: 73770 - DNA, 22 bp, Artificial Sequence
  Synthetic oligonucleotide; CTA chr11 5168327 5168348 5168344 5168349 +
tataaatcacttagtatggtac

SEQ ID NO: 73771 - DNA, 22 bp, Artificial Sequence
  Synthetic oligonucleotide; CTT chr11 5168339 5168360 5168356 5168361 +
agtatggtacactatagctcgt

SEQ ID NO: 73772 - DNA, 22 bp, Artificial Sequence
  Synthetic oligonucleotide; TTA chr11 5168340 5168361 5168357 5168362 +
gtatggtacactatagctcgtg

SEQ ID NO: 73773 - DNA, 22 bp, Artificial Sequence
  Synthetic oligonucleotide; CTA chr11 5168353 5168374 5168370 5168375 +
tagctcgtgacagagaaatttg

SEQ ID NO: 73774 - DNA, 22 bp, Artificial Sequence
  Synthetic oligonucleotide; CTC chr11 5168359 5168380 5168376 5168381 +
gtgacagagaaatttgtgactt

SEQ ID NO: 73775 - DNA, 22 bp, Artificial Sequence
  Synthetic oligonucleotide; TTT chr11 5168374 5168395 5168391 5168396 +
gtgactttaatttttatgtact

SEQ ID NO: 73776 - DNA, 22 bp, Artificial Sequence
  Synthetic oligonucleotide; TTG chr11 5168375 5168396 5168392 5168397 +
tgactttaatttttatgtactt

SEQ ID NO: 73777 - DNA, 22 bp, Artificial Sequence
  Synthetic oligonucleotide; CTT chr11 5168381 5168402 5168398 5168403 +
taatttttatgtacttgagttt

SEQ ID NO: 73778 - DNA, 22 bp, Artificial Sequence
  Synthetic oligonucleotide; TTT chr11 5168382 5168403 5168399 5168404 +
aatttttatgtacttgagttta

SEQ ID NO: 73779 - DNA, 22 bp, Artificial Sequence
  Synthetic oligonucleotide; TTA chr11 5168383 5168404 5168400 5168405 +
atttttatgtacttgagtttaa

SEQ ID NO: 73780 - DNA, 22 bp, Artificial Sequence
  Synthetic oligonucleotide; TTT chr11 5168387 5168408 5168404 5168409 +
ttatgtacttgagtttaaaatt

SEQ ID NO: 73781 - DNA, 22 bp, Artificial Sequence
  Synthetic oligonucleotide; TTT chr11 5168388 5168409 5168405 5168410 +
tatgtacttgagtttaaaatta

SEQ ID NO: 73782 - DNA, 22 bp, Artificial Sequence
  Synthetic oligonucleotide; TTT chr11 5168389 5168410 5168406 5168411 +
atgtacttgagtttaaaattag

SEQ ID NO: 73783 - DNA, 22 bp, Artificial Sequence
  Synthetic oligonucleotide; TTA chr11 5168390 5168411 5168407 5168412 +
tgtacttgagtttaaaattagc

SEQ ID NO: 73784 - DNA, 22 bp, Artificial Sequence
  Synthetic oligonucleotide; CTT chr11 5168397 5168418 5168414 5168419 +
gagtttaaaattagcatttaga

SEQ ID NO: 73785 - DNA, 22 bp, Artificial Sequence
  Synthetic oligonucleotide; TTG chr11 5168398 5168419 5168415 5168420 +
agtttaaaattagcatttagag

SEQ ID NO: 73786 - DNA, 22 bp, Artificial Sequence
  Synthetic oligonucleotide; TTT chr11 5168403 5168424 5168420 5168425 +
aaaattagcatttagagagact

SEQ ID NO: 73787 - DNA, 22 bp, Artificial Sequence
  Synthetic oligonucleotide; TTA chr11 5168404 5168425 5168421 5168426 +
aaattagcatttagagagactg

SEQ ID NO: 73788 - DNA, 22 bp, Artificial Sequence
  Synthetic oligonucleotide; TTA chr11 5168410 5168431 5168427 5168432 +
gcatttagagagactgtcagga

SEQ ID NO: 73789 - DNA, 22 bp, Artificial Sequence
  Synthetic oligonucleotide; TTT chr11 5168416 5168437 5168433 5168438 +
agagagactgtcaggaattgtg

SEQ ID NO: 73790 - DNA, 22 bp, Artificial Sequence
  Synthetic oligonucleotide; TTA chr11 5168417 5168438 5168434 5168439 +
gagagactgtcaggaattgtga

SEQ ID NO: 73791 - DNA, 22 bp, Artificial Sequence
  Synthetic oligonucleotide; CTG chr11 5168426 5168447 5168443 5168448 +
tcaggaattgtgaaatttgact

SEQ ID NO: 73792 - DNA, 22 bp, Artificial Sequence
  Synthetic oligonucleotide; TTG chr11 5168436 5168457 5168453 5168458 +
tgaaatttgactgtgtattcac

SEQ ID NO: 73793 - DNA, 22 bp, Artificial Sequence
  Synthetic oligonucleotide; TTT chr11 5168444 5168465 5168461 5168466 +
gactgtgtattcacgtattgta

SEQ ID NO: 73794 - DNA, 22 bp, Artificial Sequence
  Synthetic oligonucleotide; TTG chr11 5168445 5168466 5168462 5168467 +
actgtgtattcacgtattgtag

SEQ ID NO: 73795 - DNA, 22 bp, Artificial Sequence
  Synthetic oligonucleotide; CTG chr11 5168449 5168470 5168466 5168471 +
tgtattcacgtattgtagtcag

SEQ ID NO: 73796 - DNA, 22 bp, Artificial Sequence
  Synthetic oligonucleotide; TTC chr11 5168456 5168477 5168473 5168478 +
acgtattgtagtcagatttggt

SEQ ID NO: 73797 - DNA, 22 bp, Artificial Sequence
  Synthetic oligonucleotide; TTG chr11 5168464 5168485 5168481 5168486 +
tagtcagatttggtgaaaaagt

SEQ ID NO: 73798 - DNA, 22 bp, Artificial Sequence
  Synthetic oligonucleotide; TTT chr11 5168475 5168496 5168492 5168497 +
ggtgaaaaagtaattacttaat

SEQ ID NO: 73799 - DNA, 22 bp, Artificial Sequence
  Synthetic oligonucleotide; TTG chr11 5168476 5168497 5168493 5168498 +
gtgaaaaagtaattacttaata

SEQ ID NO: 73800 - DNA, 22 bp, Artificial Sequence
  Synthetic oligonucleotide; TTA chr11 5168491 5168512 5168508 5168513 +
cttaataaaatataattactta

SEQ ID NO: 73801 - DNA, 22 bp, Artificial Sequence
  Synthetic oligonucleotide; CTT chr11 5168494 5168515 5168511 5168516 +
aataaaatataattacttattg

SEQ ID NO: 73802 - DNA, 22 bp, Artificial Sequence
  Synthetic oligonucleotide; TTA chr11 5168495 5168516 5168512 5168517 +
ataaaatataattacttattga

SEQ ID NO: 73803 - DNA, 22 bp, Artificial Sequence
  Synthetic oligonucleotide; TTA chr11 5168509 5168530 5168526 5168531 +
cttattgagcaaattttactag

SEQ ID NO: 73804 - DNA, 22 bp, Artificial Sequence
  Synthetic oligonucleotide; CTT chr11 5168512 5168533 5168529 5168534 +
attgagcaaattttactaggaa

SEQ ID NO: 73805 - DNA, 22 bp, Artificial Sequence
  Synthetic oligonucleotide; TTA chr11 5168513 5168534 5168530 5168535 +
ttgagcaaattttactaggaac

SEQ ID NO: 73806 - DNA, 22 bp, Artificial Sequence
  Synthetic oligonucleotide; TTG chr11 5168516 5168537 5168533 5168538 +
agcaaattttactaggaacttt

SEQ ID NO: 73807 - DNA, 22 bp, Artificial Sequence
  Synthetic oligonucleotide; TTT chr11 5168525 5168546 5168542 5168547 +
tactaggaactttgctaattgc

SEQ ID NO: 73808 - DNA, 22 bp, Artificial Sequence
  Synthetic oligonucleotide; TTT chr11 5168526 5168547 5168543 5168548 +
actaggaactttgctaattgct

SEQ ID NO: 73809 - DNA, 22 bp, Artificial Sequence
  Synthetic oligonucleotide; TTA chr11 5168527 5168548 5168544 5168549 +
ctaggaactttgctaattgctt

SEQ ID NO: 73810 - DNA, 22 bp, Artificial Sequence
  Synthetic oligonucleotide; CTA chr11 5168530 5168551 5168547 5168552 +
ggaactttgctaattgcttaat

SEQ ID NO: 73811 - DNA, 22 bp, Artificial Sequence
  Synthetic oligonucleotide; CTT chr11 5168537 5168558 5168554 5168559 +
tgctaattgcttaatgtgcacc

SEQ ID NO: 73812 - DNA, 22 bp, Artificial Sequence
  Synthetic oligonucleotide; TTT chr11 5168538 5168559 5168555 5168560 +
gctaattgcttaatgtgcacca

SEQ ID NO: 73813 - DNA, 22 bp, Artificial Sequence
  Synthetic oligonucleotide; TTG chr11 5168539 5168560 5168556 5168561 +
ctaattgcttaatgtgcaccat

SEQ ID NO: 73814 - DNA, 22 bp, Artificial Sequence
  Synthetic oligonucleotide; CTA chr11 5168542 5168563 5168559 5168564 +
attgcttaatgtgcaccatttc

SEQ ID NO: 73815 - DNA, 22 bp, Artificial Sequence
  Synthetic oligonucleotide; TTG chr11 5168546 5168567 5168563 5168568 +
cttaatgtgcaccatttcattt

SEQ ID NO: 73816 - DNA, 22 bp, Artificial Sequence
  Synthetic oligonucleotide; CTT chr11 5168549 5168570 5168566 5168571 +
aatgtgcaccatttcatttaat

SEQ ID NO: 73817 - DNA, 22 bp, Artificial Sequence
  Synthetic oligonucleotide; TTA chr11 5168550 5168571 5168567 5168572 +
atgtgcaccatttcatttaatc

SEQ ID NO: 73818 - DNA, 22 bp, Artificial Sequence
  Synthetic oligonucleotide; TTT chr11 5168563 5168584 5168580 5168585 +
catttaatcttcaagatcataa

SEQ ID NO: 73819 - DNA, 22 bp, Artificial Sequence
  Synthetic oligonucleotide; TTC chr11 5168564 5168585 5168581 5168586 +
atttaatcttcaagatcataaa

SEQ ID NO: 73820 - DNA, 22 bp, Artificial Sequence
  Synthetic oligonucleotide; TTT chr11 5168568 5168589 5168585 5168590 +
aatcttcaagatcataaaagct

SEQ ID NO: 73821 - DNA, 22 bp, Artificial Sequence
  Synthetic oligonucleotide; TTA chr11 5168569 5168590 5168586 5168591 +
atcttcaagatcataaaagctg

SEQ ID NO: 73822 - DNA, 22 bp, Artificial Sequence
  Synthetic oligonucleotide; CTT chr11 5168574 5168595 5168591 5168596 +
caagatcataaaagctggattt

SEQ ID NO: 73823 - DNA, 22 bp, Artificial Sequence
  Synthetic oligonucleotide; TTC chr11 5168575 5168596 5168592 5168597 +
aagatcataaaagctggatttt

SEQ ID NO: 73824 - DNA, 22 bp, Artificial Sequence
  Synthetic oligonucleotide; CTG chr11 5168591 5168612 5168608 5168613 +
gattttattttcttattcattt

SEQ ID NO: 73825 - DNA, 22 bp, Artificial Sequence
  Synthetic oligonucleotide; TTT chr11 5168596 5168617 5168613 5168618 +
tattttcttattcatttataaa

SEQ ID NO: 73826 - DNA, 22 bp, Artificial Sequence
  Synthetic oligonucleotide; TTT chr11 5168597 5168618 5168614 5168619 +
attttcttattcatttataaat

SEQ ID NO: 73827 - DNA, 22 bp, Artificial Sequence
  Synthetic oligonucleotide; TTA chr11 5168598 5168619 5168615 5168620 +
ttttcttattcatttataaatg

SEQ ID NO: 73828 - DNA, 22 bp, Artificial Sequence
  Synthetic oligonucleotide; TTT chr11 5168601 5168622 5168618 5168623 +
tcttattcatttataaatgaat

SEQ ID NO: 73829 - DNA, 22 bp, Artificial Sequence
  Synthetic oligonucleotide; TTT chr11 5168602 5168623 5168619 5168624 +
cttattcatttataaatgaata

SEQ ID NO: 73830 - DNA, 22 bp, Artificial Sequence
  Synthetic oligonucleotide; TTC chr11 5168603 5168624 5168620 5168625 +
ttattcatttataaatgaataa

SEQ ID NO: 73831 - DNA, 22 bp, Artificial Sequence
  Synthetic oligonucleotide; CTT chr11 5168605 5168626 5168622 5168627 +
attcatttataaatgaataaat

SEQ ID NO: 73832 - DNA, 22 bp, Artificial Sequence
  Synthetic oligonucleotide; TTA chr11 5168606 5168627 5168623 5168628 +
ttcatttataaatgaataaatt

SEQ ID NO: 73833 - DNA, 22 bp, Artificial Sequence
  Synthetic oligonucleotide; TTC chr11 5168609 5168630 5168626 5168631 +
atttataaatgaataaattata

SEQ ID NO: 73834 - DNA, 22 bp, Artificial Sequence
  Synthetic oligonucleotide; TTT chr11 5168613 5168634 5168630 5168635 +
ataaatgaataaattatattca

SEQ ID NO: 73835 - DNA, 22 bp, Artificial Sequence
  Synthetic oligonucleotide; TTA chr11 5168614 5168635 5168631 5168636 +
taaatgaataaattatattcaa

SEQ ID NO: 73836 - DNA, 22 bp, Artificial Sequence
  Synthetic oligonucleotide; TTA chr11 5168629 5168650 5168646 5168651 +
tattcaaacaggtcatactact

SEQ ID NO: 73837 - DNA, 22 bp, Artificial Sequence
  Synthetic oligonucleotide; TTC chr11 5168634 5168655 5168651 5168656 +
aaacaggtcatactactagcaa

SEQ ID NO: 73838 - DNA, 22 bp, Artificial Sequence
  Synthetic oligonucleotide; CTA chr11 5168649 5168670 5168666 5168671 +
ctagcaagatcccacaattact

SEQ ID NO: 73839 - DNA, 22 bp, Artificial Sequence
  Synthetic oligonucleotide; CTA chr11 5168652 5168673 5168669 5168674 +
gcaagatcccacaattactaat

SEQ ID NO: 73840 - DNA, 22 bp, Artificial Sequence
  Synthetic oligonucleotide; TTA chr11 5168669 5168690 5168686 5168691 +
ctaatagcaagatagctaagat

SEQ ID NO: 73841 - DNA, 22 bp, Artificial Sequence
  Synthetic oligonucleotide; CTA chr11 5168672 5168693 5168689 5168694 +
atagcaagatagctaagatttc

SEQ ID NO: 73842 - DNA, 22 bp, Artificial Sequence
  Synthetic oligonucleotide; CTA chr11 5168687 5168708 5168704 5168709 +
agatttcaacctaggtacatct

SEQ ID NO: 73843 - DNA, 22 bp, Artificial Sequence
  Synthetic oligonucleotide; TTT chr11 5168693 5168714 5168710 5168715 +
caacctaggtacatctggttca

SEQ ID NO: 73844 - DNA, 22 bp, Artificial Sequence
  Synthetic oligonucleotide; TTC chr11 5168694 5168715 5168711 5168716 +
aacctaggtacatctggttcaa

SEQ ID NO: 73845 - DNA, 22 bp, Artificial Sequence
  Synthetic oligonucleotide; CTA chr11 5168700 5168721 5168717 5168722 +
ggtacatctggttcaagtgtat

SEQ ID NO: 73846 - DNA, 22 bp, Artificial Sequence
  Synthetic oligonucleotide; CTG chr11 5168710 5168731 5168727 5168732 +
gttcaagtgtataacatcacac

SEQ ID NO: 73847 - DNA, 22 bp, Artificial Sequence
  Synthetic oligonucleotide; TTC chr11 5168714 5168735 5168731 5168736 +
aagtgtataacatcacactgag

SEQ ID NO: 73848 - DNA, 22 bp, Artificial Sequence
  Synthetic oligonucleotide; CTG chr11 5168734 5168755 5168751 5168756 +
aggacttggctcttgggtgtac

SEQ ID NO: 73849 - DNA, 22 bp, Artificial Sequence
  Synthetic oligonucleotide; CTT chr11 5168741 5168762 5168758 5168763 +
ggctcttgggtgtacaagtttt

SEQ ID NO: 73850 - DNA, 22 bp, Artificial Sequence
  Synthetic oligonucleotide; TTG chr11 5168742 5168763 5168759 5168764 +
gctcttgggtgtacaagttttc

SEQ ID NO: 73851 - DNA, 22 bp, Artificial Sequence
  Synthetic oligonucleotide; CTC chr11 5168746 5168767 5168763 5168768 +
ttgggtgtacaagttttccatt

SEQ ID NO: 73852 - DNA, 22 bp, Artificial Sequence
  Synthetic oligonucleotide; CTT chr11 5168748 5168769 5168765 5168770 +
gggtgtacaagttttccattgt

SEQ ID NO: 73853 - DNA, 22 bp, Artificial Sequence
  Synthetic oligonucleotide; TTG chr11 5168749 5168770 5168766 5168771 +
ggtgtacaagttttccattgtg

SEQ ID NO: 73854 - DNA, 22 bp, Artificial Sequence
  Synthetic oligonucleotide; TTT chr11 5168762 5168783 5168779 5168784 +
tccattgtgtgaacttgataaa

SEQ ID NO: 73855 - DNA, 22 bp, Artificial Sequence
  Synthetic oligonucleotide; TTT chr11 5168763 5168784 5168780 5168785 +
ccattgtgtgaacttgataaag

SEQ ID NO: 73856 - DNA, 22 bp, Artificial Sequence
  Synthetic oligonucleotide; TTC chr11 5168764 5168785 5168781 5168786 +
cattgtgtgaacttgataaagt

SEQ ID NO: 73857 - DNA, 22 bp, Artificial Sequence
  Synthetic oligonucleotide; TTG chr11 5168769 5168790 5168786 5168791 +
tgtgaacttgataaagttacaa

SEQ ID NO: 73858 - DNA, 22 bp, Artificial Sequence
  Synthetic oligonucleotide; CTT chr11 5168778 5168799 5168795 5168800 +
gataaagttacaaaaattatct

SEQ ID NO: 73859 - DNA, 22 bp, Artificial Sequence
  Synthetic oligonucleotide; TTG chr11 5168779 5168800 5168796 5168801 +
ataaagttacaaaaattatctc

SEQ ID NO: 73860 - DNA, 22 bp, Artificial Sequence
  Synthetic oligonucleotide; TTA chr11 5168788 5168809 5168805 5168810 +
caaaaattatctcttagttttt

SEQ ID NO: 73861 - DNA, 22 bp, Artificial Sequence
  Synthetic oligonucleotide; TTA chr11 5168797 5168818 5168814 5168819 +
tctcttagttttttcatgtata

SEQ ID NO: 73862 - DNA, 22 bp, Artificial Sequence
  Synthetic oligonucleotide; CTC chr11 5168801 5168822 5168818 5168823 +
ttagttttttcatgtataccat

SEQ ID NO: 73863 - DNA, 22 bp, Artificial Sequence
  Synthetic oligonucleotide; CTT chr11 5168803 5168824 5168820 5168825 +
agttttttcatgtataccataa

SEQ ID NO: 73864 - DNA, 22 bp, Artificial Sequence
  Synthetic oligonucleotide; TTA chr11 5168804 5168825 5168821 5168826 +
gttttttcatgtataccataag

SEQ ID NO: 73865 - DNA, 22 bp, Artificial Sequence
  Synthetic oligonucleotide; TTT chr11 5168808 5168829 5168825 5168830 +
tttcatgtataccataagaata

SEQ ID NO: 73866 - DNA, 22 bp, Artificial Sequence
  Synthetic oligonucleotide; TTT chr11 5168809 5168830 5168826 5168831 +
ttcatgtataccataagaatag

SEQ ID NO: 73867 - DNA, 22 bp, Artificial Sequence
  Synthetic oligonucleotide; TTT chr11 5168810 5168831 5168827 5168832 +
tcatgtataccataagaatagt

SEQ ID NO: 73868 - DNA, 22 bp, Artificial Sequence
  Synthetic oligonucleotide; TTT chr11 5168811 5168832 5168828 5168833 +
catgtataccataagaatagta

SEQ ID NO: 73869 - DNA, 22 bp, Artificial Sequence
  Synthetic oligonucleotide; TTC chr11 5168812 5168833 5168829 5168834 +
atgtataccataagaatagtaa

SEQ ID NO: 73870 - DNA, 22 bp, Artificial Sequence
  Synthetic oligonucleotide; CTG chr11 5168844 5168865 5168861 5168866 +
taatggaggttaccaataatta

SEQ ID NO: 73871 - DNA, 22 bp, Artificial Sequence
  Synthetic oligonucleotide; TTA chr11 5168856 5168877 5168873 5168878 +
ccaataattattgttaaggaag

SEQ ID NO: 73872 - DNA, 22 bp, Artificial Sequence
  Synthetic oligonucleotide; TTA chr11 5168866 5168887 5168883 5168888 +
ttgttaaggaagggcttctaaa

SEQ ID NO: 73873 - DNA, 22 bp, Artificial Sequence
  Synthetic oligonucleotide; TTG chr11 5168869 5168890 5168886 5168891 +
ttaaggaagggcttctaaatta

SEQ ID NO: 73874 - DNA, 22 bp, Artificial Sequence
  Synthetic oligonucleotide; TTA chr11 5168872 5168893 5168889 5168894 +
aggaagggcttctaaattactc

SEQ ID NO: 73875 - DNA, 22 bp, Artificial Sequence
  Synthetic oligonucleotide; CTT chr11 5168883 5168904 5168900 5168905 +
ctaaattactctgaaattttga

SEQ ID NO: 73876 - DNA, 22 bp, Artificial Sequence
  Synthetic oligonucleotide; TTC chr11 5168884 5168905 5168901 5168906 +
taaattactctgaaattttgag

SEQ ID NO: 73877 - DNA, 22 bp, Artificial Sequence
  Synthetic oligonucleotide; CTA chr11 5168886 5168907 5168903 5168908 +
aattactctgaaattttgagaa

SEQ ID NO: 73878 - DNA, 22 bp, Artificial Sequence
  Synthetic oligonucleotide; TTA chr11 5168891 5168912 5168908 5168913 +
ctctgaaattttgagaattttt

SEQ ID NO: 73879 - DNA, 22 bp, Artificial Sequence
  Synthetic oligonucleotide; CTC chr11 5168894 5168915 5168911 5168916 +
tgaaattttgagaatttttttt

SEQ ID NO: 73880 - DNA, 22 bp, Artificial Sequence
  Synthetic oligonucleotide; CTG chr11 5168896 5168917 5168913 5168918 +
aaattttgagaattttttttta

SEQ ID NO: 73881 - DNA, 22 bp, Artificial Sequence
  Synthetic oligonucleotide; TTT chr11 5168902 5168923 5168919 5168924 +
tgagaatttttttttaaatccc

SEQ ID NO: 73882 - DNA, 22 bp, Artificial Sequence
  Synthetic oligonucleotide; TTT chr11 5168903 5168924 5168920 5168925 +
gagaatttttttttaaatccca

SEQ ID NO: 73883 - DNA, 22 bp, Artificial Sequence
  Synthetic oligonucleotide; TTG chr11 5168904 5168925 5168921 5168926 +
agaatttttttttaaatcccat

SEQ ID NO: 73884 - DNA, 22 bp, Artificial Sequence
  Synthetic oligonucleotide; TTT chr11 5168911 5168932 5168928 5168933 +
ttttttaaatcccatgttgttt

SEQ ID NO: 73885 - DNA, 22 bp, Artificial Sequence
  Synthetic oligonucleotide; TTT chr11 5168912 5168933 5168929 5168934 +
tttttaaatcccatgttgtttt

SEQ ID NO: 73886 - DNA, 22 bp, Artificial Sequence
  Synthetic oligonucleotide; TTT chr11 5168913 5168934 5168930 5168935 +
ttttaaatcccatgttgttttt

SEQ ID NO: 73887 - DNA, 22 bp, Artificial Sequence
  Synthetic oligonucleotide; TTT chr11 5168914 5168935 5168931 5168936 +
tttaaatcccatgttgttttta

SEQ ID NO: 73888 - DNA, 22 bp, Artificial Sequence
  Synthetic oligonucleotide; TTT chr11 5168915 5168936 5168932 5168937 +
ttaaatcccatgttgtttttat

SEQ ID NO: 73889 - DNA, 22 bp, Artificial Sequence
  Synthetic oligonucleotide; TTT chr11 5168916 5168937 5168933 5168938 +
taaatcccatgttgtttttatg

SEQ ID NO: 73890 - DNA, 22 bp, Artificial Sequence
  Synthetic oligonucleotide; TTT chr11 5168917 5168938 5168934 5168939 +
aaatcccatgttgtttttatga

SEQ ID NO: 73891 - DNA, 22 bp, Artificial Sequence
  Synthetic oligonucleotide; TTA chr11 5168918 5168939 5168935 5168940 +
aatcccatgttgtttttatgac

SEQ ID NO: 73892 - DNA, 22 bp, Artificial Sequence
  Synthetic oligonucleotide; TTG chr11 5168930 5168951 5168947 5168952 +
tttttatgacttcactacattg

SEQ ID NO: 73893 - DNA, 22 bp, Artificial Sequence
  Synthetic oligonucleotide; TTT chr11 5168933 5168954 5168950 5168955 +
ttatgacttcactacattgaac

SEQ ID NO: 73894 - DNA, 22 bp, Artificial Sequence
  Synthetic oligonucleotide; TTT chr11 5168934 5168955 5168951 5168956 +
tatgacttcactacattgaaca

SEQ ID NO: 73895 - DNA, 22 bp, Artificial Sequence
  Synthetic oligonucleotide; TTT chr11 5168935 5168956 5168952 5168957 +
atgacttcactacattgaacac

SEQ ID NO: 73896 - DNA, 22 bp, Artificial Sequence
  Synthetic oligonucleotide; TTA chr11 5168936 5168957 5168953 5168958 +
tgacttcactacattgaacact

SEQ ID NO: 73897 - DNA, 22 bp, Artificial Sequence
  Synthetic oligonucleotide; CTT chr11 5168942 5168963 5168959 5168964 +
cactacattgaacactttcaaa

SEQ ID NO: 73898 - DNA, 22 bp, Artificial Sequence
  Synthetic oligonucleotide; TTC chr11 5168943 5168964 5168960 5168965 +
actacattgaacactttcaaag

SEQ ID NO: 73899 - DNA, 22 bp, Artificial Sequence
  Synthetic oligonucleotide; CTA chr11 5168947 5168968 5168964 5168969 +
cattgaacactttcaaaggtgt

SEQ ID NO: 73900 - DNA, 22 bp, Artificial Sequence
  Synthetic oligonucleotide; TTG chr11 5168952 5168973 5168969 5168974 +
aacactttcaaaggtgtttcat

SEQ ID NO: 73901 - DNA, 22 bp, Artificial Sequence
  Synthetic oligonucleotide; CTT chr11 5168959 5168980 5168976 5168981 +
tcaaaggtgtttcatacattaa

SEQ ID NO: 73902 - DNA, 22 bp, Artificial Sequence
  Synthetic oligonucleotide; TTT chr11 5168960 5168981 5168977 5168982 +
caaaggtgtttcatacattaaa

SEQ ID NO: 73903 - DNA, 22 bp, Artificial Sequence
  Synthetic oligonucleotide; TTC chr11 5168961 5168982 5168978 5168983 +
aaaggtgtttcatacattaaaa

SEQ ID NO: 73904 - DNA, 22 bp, Artificial Sequence
  Synthetic oligonucleotide; TTT chr11 5168971 5168992 5168988 5168993 +
catacattaaaaattttttaag

SEQ ID NO: 73905 - DNA, 22 bp, Artificial Sequence
  Synthetic oligonucleotide; TTC chr11 5168972 5168993 5168989 5168994 +
atacattaaaaattttttaagt

SEQ ID NO: 73906 - DNA, 22 bp, Artificial Sequence
  Synthetic oligonucleotide; TTA chr11 5168980 5169001 5168997 5169002 +
aaaattttttaagtccataaat

SEQ ID NO: 73907 - DNA, 22 bp, Artificial Sequence
  Synthetic oligonucleotide; TTT chr11 5168987 5169008 5169004 5169009 +
tttaagtccataaattaatttc

SEQ ID NO: 73908 - DNA, 22 bp, Artificial Sequence
  Synthetic oligonucleotide; TTT chr11 5168988 5169009 5169005 5169010 +
ttaagtccataaattaatttcg

SEQ ID NO: 73909 - DNA, 22 bp, Artificial Sequence
  Synthetic oligonucleotide; TTT chr11 5168989 5169010 5169006 5169011 +
taagtccataaattaatttcga

SEQ ID NO: 73910 - DNA, 22 bp, Artificial Sequence
  Synthetic oligonucleotide; TTT chr11 5168990 5169011 5169007 5169012 +
aagtccataaattaatttcgag

SEQ ID NO: 73911 - DNA, 22 bp, Artificial Sequence
  Synthetic oligonucleotide; TTA chr11 5168991 5169012 5169008 5169013 +
agtccataaattaatttcgagg

SEQ ID NO: 73912 - DNA, 22 bp, Artificial Sequence
  Synthetic oligonucleotide; TTA chr11 5169004 5169025 5169021 5169026 +
atttcgaggaaaacagaaaaaa

SEQ ID NO: 73913 - DNA, 22 bp, Artificial Sequence
  Synthetic oligonucleotide; TTT chr11 5169008 5169029 5169025 5169030 +
cgaggaaaacagaaaaaaatat

SEQ ID NO: 73914 - DNA, 22 bp, Artificial Sequence
  Synthetic oligonucleotide; TTC chr11 5169009 5169030 5169026 5169031 +
gaggaaaacagaaaaaaatata

SEQ ID NO: 73915 - DNA, 22 bp, Artificial Sequence
  Synthetic oligonucleotide; TTT chr11 5169036 5169057 5169053 5169058 +
tgccactcattacttgatacat

SEQ ID NO: 73916 - DNA, 22 bp, Artificial Sequence
  Synthetic oligonucleotide; TTT chr11 5169037 5169058 5169054 5169059 +
gccactcattacttgatacata

SEQ ID NO: 73917 - DNA, 22 bp, Artificial Sequence
  Synthetic oligonucleotide; TTG chr11 5169038 5169059 5169055 5169060 +
ccactcattacttgatacatat

SEQ ID NO: 73918 - DNA, 22 bp, Artificial Sequence
  Synthetic oligonucleotide; CTC chr11 5169044 5169065 5169061 5169066 +
attacttgatacatatttttat

SEQ ID NO: 73919 - DNA, 22 bp, Artificial Sequence
  Synthetic oligonucleotide; TTA chr11 5169048 5169069 5169065 5169070 +
cttgatacatatttttatttga

SEQ ID NO: 73920 - DNA, 22 bp, Artificial Sequence
  Synthetic oligonucleotide; CTT chr11 5169051 5169072 5169068 5169073 +
gatacatatttttatttgacca

SEQ ID NO: 73921 - DNA, 22 bp, Artificial Sequence
  Synthetic oligonucleotide; TTG chr11 5169052 5169073 5169069 5169074 +
atacatatttttatttgaccaa

SEQ ID NO: 73922 - DNA, 22 bp, Artificial Sequence
  Synthetic oligonucleotide; TTT chr11 5169062 5169083 5169079 5169084 +
ttatttgaccaaaccttctatt

SEQ ID NO: 73923 - DNA, 22 bp, Artificial Sequence
  Synthetic oligonucleotide; TTT chr11 5169063 5169084 5169080 5169085 +
tatttgaccaaaccttctatta

SEQ ID NO: 73924 - DNA, 22 bp, Artificial Sequence
  Synthetic oligonucleotide; TTT chr11 5169064 5169085 5169081 5169086 +
atttgaccaaaccttctattag

SEQ ID NO: 73925 - DNA, 22 bp, Artificial Sequence
  Synthetic oligonucleotide; TTA chr11 5169065 5169086 5169082 5169087 +
tttgaccaaaccttctattagt

SEQ ID NO: 73926 - DNA, 22 bp, Artificial Sequence
  Synthetic oligonucleotide; TTT chr11 5169068 5169089 5169085 5169090 +
gaccaaaccttctattagttac

SEQ ID NO: 73927 - DNA, 22 bp, Artificial Sequence
  Synthetic oligonucleotide; TTG chr11 5169069 5169090 5169086 5169091 +
accaaaccttctattagttact

SEQ ID NO: 73928 - DNA, 22 bp, Artificial Sequence
  Synthetic oligonucleotide; CTT chr11 5169079 5169100 5169096 5169101 +
ctattagttacttggttggctg

SEQ ID NO: 73929 - DNA, 22 bp, Artificial Sequence
  Synthetic oligonucleotide; TTC chr11 5169080 5169101 5169097 5169102 +
tattagttacttggttggctga

SEQ ID NO: 73930 - DNA, 22 bp, Artificial Sequence
  Synthetic oligonucleotide; CTA chr11 5169082 5169103 5169099 5169104 +
ttagttacttggttggctgata

SEQ ID NO: 73931 - DNA, 22 bp, Artificial Sequence
  Synthetic oligonucleotide; TTA chr11 5169085 5169106 5169102 5169107 +
gttacttggttggctgataatc

SEQ ID NO: 73932 - DNA, 22 bp, Artificial Sequence
  Synthetic oligonucleotide; TTA chr11 5169089 5169110 5169106 5169111 +
cttggttggctgataatcactc

SEQ ID NO: 73933 - DNA, 22 bp, Artificial Sequence
  Synthetic oligonucleotide; CTT chr11 5169092 5169113 5169109 5169114 +
ggttggctgataatcactcaag

SEQ ID NO: 73934 - DNA, 22 bp, Artificial Sequence
  Synthetic oligonucleotide; TTG chr11 5169093 5169114 5169110 5169115 +
gttggctgataatcactcaaga

SEQ ID NO: 73935 - DNA, 22 bp, Artificial Sequence
  Synthetic oligonucleotide; TTG chr11 5169097 5169118 5169114 5169119 +
gctgataatcactcaagactgt

SEQ ID NO: 73936 - DNA, 22 bp, Artificial Sequence
  Synthetic oligonucleotide; CTG chr11 5169101 5169122 5169118 5169123 +
ataatcactcaagactgtgtgg

SEQ ID NO: 73937 - DNA, 22 bp, Artificial Sequence
  Synthetic oligonucleotide; CTC chr11 5169111 5169132 5169128 5169133 +
aagactgtgtggtttaatagga

SEQ ID NO: 73938 - DNA, 22 bp, Artificial Sequence
  Synthetic oligonucleotide; CTG chr11 5169118 5169139 5169135 5169140 +
tgtggtttaataggatattcac

SEQ ID NO: 73939 - DNA, 22 bp, Artificial Sequence
  Synthetic oligonucleotide; TTT chr11 5169126 5169147 5169143 5169148 +
aataggatattcactgtggttc

SEQ ID NO: 73940 - DNA, 22 bp, Artificial Sequence
  Synthetic oligonucleotide; TTA chr11 5169127 5169148 5169144 5169149 +
ataggatattcactgtggttca

SEQ ID NO: 73941 - DNA, 22 bp, Artificial Sequence
  Synthetic oligonucleotide; TTC chr11 5169138 5169159 5169155 5169160 +
actgtggttcatggaaattcaa

SEQ ID NO: 73942 - DNA, 22 bp, Artificial Sequence
  Synthetic oligonucleotide; CTG chr11 5169142 5169163 5169159 5169164 +
tggttcatggaaattcaaaatt

SEQ ID NO: 73943 - DNA, 22 bp, Artificial Sequence
  Synthetic oligonucleotide; TTC chr11 5169148 5169169 5169165 5169170 +
atggaaattcaaaattatctga

SEQ ID NO: 73944 - DNA, 22 bp, Artificial Sequence
  Synthetic oligonucleotide; TTC chr11 5169158 5169179 5169175 5169180 +
aaaattatctgaagaaaacaaa

SEQ ID NO: 73945 - DNA, 22 bp, Artificial Sequence
  Synthetic oligonucleotide; TTA chr11 5169165 5169186 5169182 5169187 +
tctgaagaaaacaaaaagttgg

SEQ ID NO: 73946 - DNA, 22 bp, Artificial Sequence
  Synthetic oligonucleotide; CTG chr11 5169169 5169190 5169186 5169191 +
aagaaaacaaaaagttgggctc

SEQ ID NO: 73947 - DNA, 22 bp, Artificial Sequence
  Synthetic oligonucleotide; TTG chr11 5169186 5169207 5169203 5169208 +
ggctctgcaatccctgtctgag

SEQ ID NO: 73948 - DNA, 22 bp, Artificial Sequence
  Synthetic oligonucleotide; CTC chr11 5169191 5169212 5169208 5169213 +
tgcaatccctgtctgagggatt

SEQ ID NO: 73949 - DNA, 22 bp, Artificial Sequence
  Synthetic oligonucleotide; CTG chr11 5169193 5169214 5169210 5169215 +
caatccctgtctgagggatttt

SEQ ID NO: 73950 - DNA, 22 bp, Artificial Sequence
  Synthetic oligonucleotide; CTG chr11 5169202 5169223 5169219 5169224 +
tctgagggattttctagaattc

SEQ ID NO: 73951 - DNA, 22 bp, Artificial Sequence
  Synthetic oligonucleotide; CTG chr11 5169206 5169227 5169223 5169228 +
agggattttctagaattcttct

SEQ ID NO: 73952 - DNA, 22 bp, Artificial Sequence
  Synthetic oligonucleotide; TTT chr11 5169214 5169235 5169231 5169236 +
tctagaattcttctggtcctcc

SEQ ID NO: 73953 - DNA, 22 bp, Artificial Sequence
  Synthetic oligonucleotide; TTT chr11 5169215 5169236 5169232 5169237 +
ctagaattcttctggtcctccc

SEQ ID NO: 73954 - DNA, 22 bp, Artificial Sequence
  Synthetic oligonucleotide; TTC chr11 5169216 5169237 5169233 5169238 +
tagaattcttctggtcctccct

SEQ ID NO: 73955 - DNA, 22 bp, Artificial Sequence
  Synthetic oligonucleotide; CTA chr11 5169218 5169239 5169235 5169240 +
gaattcttctggtcctccctac

SEQ ID NO: 73956 - DNA, 22 bp, Artificial Sequence
  Synthetic oligonucleotide; TTC chr11 5169224 5169245 5169241 5169246 +
ttctggtcctccctaccttttt

SEQ ID NO: 73957 - DNA, 22 bp, Artificial Sequence
  Synthetic oligonucleotide; CTT chr11 5169226 5169247 5169243 5169248 +
ctggtcctccctacctttttgt

SEQ ID NO: 73958 - DNA, 22 bp, Artificial Sequence
  Synthetic oligonucleotide; TTC chr11 5169227 5169248 5169244 5169249 +
tggtcctccctacctttttgtt

SEQ ID NO: 73959 - DNA, 22 bp, Artificial Sequence
  Synthetic oligonucleotide; CTG chr11 5169229 5169250 5169246 5169251 +
gtcctccctacctttttgtttg

SEQ ID NO: 73960 - DNA, 22 bp, Artificial Sequence
  Synthetic oligonucleotide; CTC chr11 5169235 5169256 5169252 5169257 +
cctacctttttgtttgtcagaa

SEQ ID NO: 73961 - DNA, 22 bp, Artificial Sequence
  Synthetic oligonucleotide; CTA chr11 5169239 5169260 5169256 5169261 +
cctttttgtttgtcagaagctt

SEQ ID NO: 73962 - DNA, 22 bp, Artificial Sequence
  Synthetic oligonucleotide; CTT chr11 5169243 5169264 5169260 5169265 +
tttgtttgtcagaagcttgtct

SEQ ID NO: 73963 - DNA, 22 bp, Artificial Sequence
  Synthetic oligonucleotide; TTT chr11 5169244 5169265 5169261 5169266 +
ttgtttgtcagaagcttgtcta

SEQ ID NO: 73964 - DNA, 22 bp, Artificial Sequence
  Synthetic oligonucleotide; TTT chr11 5169245 5169266 5169262 5169267 +
tgtttgtcagaagcttgtctac

SEQ ID NO: 73965 - DNA, 22 bp, Artificial Sequence
  Synthetic oligonucleotide; TTT chr11 5169246 5169267 5169263 5169268 +
gtttgtcagaagcttgtctact

SEQ ID NO: 73966 - DNA, 22 bp, Artificial Sequence
  Synthetic oligonucleotide; TTG chr11 5169247 5169268 5169264 5169269 +
tttgtcagaagcttgtctacta

SEQ ID NO: 73967 - DNA, 22 bp, Artificial Sequence
  Synthetic oligonucleotide; TTT chr11 5169250 5169271 5169267 5169272 +
gtcagaagcttgtctactaccg

SEQ ID NO: 73968 - DNA, 22 bp, Artificial Sequence
  Synthetic oligonucleotide; TTG chr11 5169251 5169272 5169268 5169273 +
tcagaagcttgtctactaccga

SEQ ID NO: 73969 - DNA, 22 bp, Artificial Sequence
  Synthetic oligonucleotide; CTT chr11 5169261 5169282 5169278 5169283 +
gtctactaccgagtgattgatg

SEQ ID NO: 73970 - DNA, 22 bp, Artificial Sequence
  Synthetic oligonucleotide; TTG chr11 5169262 5169283 5169279 5169284 +
tctactaccgagtgattgatgt

SEQ ID NO: 73971 - DNA, 22 bp, Artificial Sequence
  Synthetic oligonucleotide; CTA chr11 5169266 5169287 5169283 5169288 +
ctaccgagtgattgatgtcacc

SEQ ID NO: 73972 - DNA, 22 bp, Artificial Sequence
  Synthetic oligonucleotide; CTA chr11 5169269 5169290 5169286 5169291 +
ccgagtgattgatgtcaccaaa

SEQ ID NO: 73973 - DNA, 22 bp, Artificial Sequence
  Synthetic oligonucleotide; TTG chr11 5169280 5169301 5169297 5169302 +
atgtcaccaaagactattgcag

SEQ ID NO: 73974 - DNA, 22 bp, Artificial Sequence
  Synthetic oligonucleotide; CTA chr11 5169296 5169317 5169313 5169318 +
ttgcaggagtaggccttgcttt

SEQ ID NO: 73975 - DNA, 22 bp, Artificial Sequence
  Synthetic oligonucleotide; TTG chr11 5169299 5169320 5169316 5169321 +
caggagtaggccttgctttttc

SEQ ID NO: 73976 - DNA, 22 bp, Artificial Sequence
  Synthetic oligonucleotide; CTT chr11 5169313 5169334 5169330 5169335 +
gctttttctgttttttagttat

SEQ ID NO: 73977 - DNA, 22 bp, Artificial Sequence
  Synthetic oligonucleotide; TTG chr11 5169314 5169335 5169331 5169336 +
ctttttctgttttttagttatt

SEQ ID NO: 73978 - DNA, 22 bp, Artificial Sequence
  Synthetic oligonucleotide; CTT chr11 5169317 5169338 5169334 5169339 +
tttctgttttttagttattttc

SEQ ID NO: 73979 - DNA, 22 bp, Artificial Sequence
  Synthetic oligonucleotide; TTT chr11 5169318 5169339 5169335 5169340 +
ttctgttttttagttattttct

SEQ ID NO: 73980 - DNA, 22 bp, Artificial Sequence
  Synthetic oligonucleotide; TTT chr11 5169319 5169340 5169336 5169341 +
tctgttttttagttattttctt

SEQ ID NO: 73981 - DNA, 22 bp, Artificial Sequence
  Synthetic oligonucleotide; TTT chr11 5169320 5169341 5169337 5169342 +
ctgttttttagttattttcttc

SEQ ID NO: 73982 - DNA, 22 bp, Artificial Sequence
  Synthetic oligonucleotide; TTC chr11 5169321 5169342 5169338 5169343 +
tgttttttagttattttcttct

SEQ ID NO: 73983 - DNA, 22 bp, Artificial Sequence
  Synthetic oligonucleotide; CTG chr11 5169323 5169344 5169340 5169345 +
ttttttagttattttcttctaa

SEQ ID NO: 73984 - DNA, 22 bp, Artificial Sequence
  Synthetic oligonucleotide; TTT chr11 5169326 5169347 5169343 5169348 +
tttagttattttcttctaaaac

SEQ ID NO: 73985 - DNA, 22 bp, Artificial Sequence
  Synthetic oligonucleotide; TTT chr11 5169327 5169348 5169344 5169349 +
ttagttattttcttctaaaaca

SEQ ID NO: 73986 - DNA, 22 bp, Artificial Sequence
  Synthetic oligonucleotide; TTT chr11 5169328 5169349 5169345 5169350 +
tagttattttcttctaaaacag

SEQ ID NO: 73987 - DNA, 22 bp, Artificial Sequence
  Synthetic oligonucleotide; TTT chr11 5169329 5169350 5169346 5169351 +
agttattttcttctaaaacagt

SEQ ID NO: 73988 - DNA, 22 bp, Artificial Sequence
  Synthetic oligonucleotide; TTA chr11 5169330 5169351 5169347 5169352 +
gttattttcttctaaaacagta

SEQ ID NO: 73989 - DNA, 22 bp, Artificial Sequence
  Synthetic oligonucleotide; TTA chr11 5169334 5169355 5169351 5169356 +
ttttcttctaaaacagtatttt

SEQ ID NO: 73990 - DNA, 22 bp, Artificial Sequence
  Synthetic oligonucleotide; TTT chr11 5169337 5169358 5169354 5169359 +
tcttctaaaacagtattttcaa

SEQ ID NO: 73991 - DNA, 22 bp, Artificial Sequence
  Synthetic oligonucleotide; TTT chr11 5169338 5169359 5169355 5169360 +
cttctaaaacagtattttcaag

SEQ ID NO: 73992 - DNA, 22 bp, Artificial Sequence
  Synthetic oligonucleotide; TTC chr11 5169339 5169360 5169356 5169361 +
ttctaaaacagtattttcaagt

SEQ ID NO: 73993 - DNA, 22 bp, Artificial Sequence
  Synthetic oligonucleotide; CTT chr11 5169341 5169362 5169358 5169363 +
ctaaaacagtattttcaagtag

SEQ ID NO: 73994 - DNA, 22 bp, Artificial Sequence
  Synthetic oligonucleotide; TTC chr11 5169342 5169363 5169359 5169364 +
taaaacagtattttcaagtagt

SEQ ID NO: 73995 - DNA, 22 bp, Artificial Sequence
  Synthetic oligonucleotide; CTA chr11 5169344 5169365 5169361 5169366 +
aaacagtattttcaagtagttg

SEQ ID NO: 73996 - DNA, 22 bp, Artificial Sequence
  Synthetic oligonucleotide; TTT chr11 5169355 5169376 5169372 5169377 +
tcaagtagttgtggtttttttt

SEQ ID NO: 73997 - DNA, 22 bp, Artificial Sequence
  Synthetic oligonucleotide; TTT chr11 5169356 5169377 5169373 5169378 +
caagtagttgtggttttttttc

SEQ ID NO: 73998 - DNA, 22 bp, Artificial Sequence
  Synthetic oligonucleotide; TTC chr11 5169357 5169378 5169374 5169379 +
aagtagttgtggttttttttct

SEQ ID NO: 73999 - DNA, 22 bp, Artificial Sequence
  Synthetic oligonucleotide; TTG chr11 5169366 5169387 5169383 5169388 +
tggttttttttctttctagtat

SEQ ID NO: 74000 - DNA, 22 bp, Artificial Sequence
  Synthetic oligonucleotide; TTT chr11 5169372 5169393 5169389 5169394 +
tttttctttctagtattgaact

SEQ ID NO: 74001 - DNA, 22 bp, Artificial Sequence
  Synthetic oligonucleotide; TTT chr11 5169373 5169394 5169390 5169395 +
ttttctttctagtattgaactc

SEQ ID NO: 74002 - DNA, 22 bp, Artificial Sequence
  Synthetic oligonucleotide; TTT chr11 5169374 5169395 5169391 5169396 +
tttctttctagtattgaactca

SEQ ID NO: 74003 - DNA, 22 bp, Artificial Sequence
  Synthetic oligonucleotide; TTT chr11 5169375 5169396 5169392 5169397 +
ttctttctagtattgaactcat

SEQ ID NO: 74004 - DNA, 22 bp, Artificial Sequence
  Synthetic oligonucleotide; TTT chr11 5169376 5169397 5169393 5169398 +
tctttctagtattgaactcatt

SEQ ID NO: 74005 - DNA, 22 bp, Artificial Sequence
  Synthetic oligonucleotide; TTT chr11 5169377 5169398 5169394 5169399 +
ctttctagtattgaactcatta

SEQ ID NO: 74006 - DNA, 22 bp, Artificial Sequence
  Synthetic oligonucleotide; TTC chr11 5169378 5169399 5169395 5169400 +
tttctagtattgaactcattaa

SEQ ID NO: 74007 - DNA, 22 bp, Artificial Sequence
  Synthetic oligonucleotide; CTT chr11 5169380 5169401 5169397 5169402 +
tctagtattgaactcattaaaa

SEQ ID NO: 74008 - DNA, 22 bp, Artificial Sequence
  Synthetic oligonucleotide; TTT chr11 5169381 5169402 5169398 5169403 +
ctagtattgaactcattaaaaa

SEQ ID NO: 74009 - DNA, 22 bp, Artificial Sequence
  Synthetic oligonucleotide; TTC chr11 5169382 5169403 5169399 5169404 +
tagtattgaactcattaaaaat

SEQ ID NO: 74010 - DNA, 22 bp, Artificial Sequence
  Synthetic oligonucleotide; CTA chr11 5169384 5169405 5169401 5169406 +
gtattgaactcattaaaaataa

SEQ ID NO: 74011 - DNA, 22 bp, Artificial Sequence
  Synthetic oligonucleotide; TTG chr11 5169390 5169411 5169407 5169412 +
aactcattaaaaataaaatagc

SEQ ID NO: 74012 - DNA, 22 bp, Artificial Sequence
  Synthetic oligonucleotide; CTC chr11 5169395 5169416 5169412 5169417 +
attaaaaataaaatagctttct

SEQ ID NO: 74013 - DNA, 22 bp, Artificial Sequence
  Synthetic oligonucleotide; TTA chr11 5169399 5169420 5169416 5169421 +
aaaataaaatagctttctaaag

SEQ ID NO: 74014 - DNA, 22 bp, Artificial Sequence
  Synthetic oligonucleotide; CTT chr11 5169414 5169435 5169431 5169436 +
tctaaagccaaacagtttcctc

SEQ ID NO: 74015 - DNA, 22 bp, Artificial Sequence
  Synthetic oligonucleotide; TTT chr11 5169415 5169436 5169432 5169437 +
ctaaagccaaacagtttcctcc

SEQ ID NO: 74016 - DNA, 22 bp, Artificial Sequence
  Synthetic oligonucleotide; TTC chr11 5169416 5169437 5169433 5169438 +
taaagccaaacagtttcctcct

SEQ ID NO: 74017 - DNA, 22 bp, Artificial Sequence
  Synthetic oligonucleotide; CTA chr11 5169418 5169439 5169435 5169440 +
aagccaaacagtttcctcctga

SEQ ID NO: 74018 - DNA, 22 bp, Artificial Sequence
  Synthetic oligonucleotide; TTT chr11 5169432 5169453 5169449 5169454 +
cctcctgaccagttaaaagtta

SEQ ID NO: 74019 - DNA, 22 bp, Artificial Sequence
  Synthetic oligonucleotide; TTC chr11 5169433 5169454 5169450 5169455 +
ctcctgaccagttaaaagttat

SEQ ID NO: 74020 - DNA, 22 bp, Artificial Sequence
  Synthetic oligonucleotide; CTC chr11 5169436 5169457 5169453 5169458 +
ctgaccagttaaaagttatctc

SEQ ID NO: 74021 - DNA, 22 bp, Artificial Sequence
  Synthetic oligonucleotide; CTG chr11 5169439 5169460 5169456 5169461 +
accagttaaaagttatctctgc

SEQ ID NO: 74022 - DNA, 22 bp, Artificial Sequence
  Synthetic oligonucleotide; TTA chr11 5169447 5169468 5169464 5169469 +
aaagttatctctgcttcatggt

SEQ ID NO: 74023 - DNA, 22 bp, Artificial Sequence
  Synthetic oligonucleotide; TTA chr11 5169454 5169475 5169471 5169476 +
tctctgcttcatggtgcatatt

SEQ ID NO: 74024 - DNA, 22 bp, Artificial Sequence
  Synthetic oligonucleotide; CTC chr11 5169458 5169479 5169475 5169480 +
tgcttcatggtgcatattcaat

SEQ ID NO: 74025 - DNA, 22 bp, Artificial Sequence
  Synthetic oligonucleotide; CTG chr11 5169460 5169481 5169477 5169482 +
cttcatggtgcatattcaatta

SEQ ID NO: 74026 - DNA, 22 bp, Artificial Sequence
  Synthetic oligonucleotide; CTT chr11 5169463 5169484 5169480 5169485 +
catggtgcatattcaattaaga

SEQ ID NO: 74027 - DNA, 22 bp, Artificial Sequence
  Synthetic oligonucleotide; TTC chr11 5169464 5169485 5169481 5169486 +
atggtgcatattcaattaagat

SEQ ID NO: 74028 - DNA, 22 bp, Artificial Sequence
  Synthetic oligonucleotide; TTC chr11 5169477 5169498 5169494 5169499 +
aattaagatttaacattagcac

SEQ ID NO: 74029 - DNA, 22 bp, Artificial Sequence
  Synthetic oligonucleotide; TTA chr11 5169482 5169503 5169499 5169504 +
agatttaacattagcacactga

SEQ ID NO: 74030 - DNA, 22 bp, Artificial Sequence
  Synthetic oligonucleotide; TTT chr11 5169488 5169509 5169505 5169510 +
aacattagcacactgagtataa

SEQ ID NO: 74031 - DNA, 22 bp, Artificial Sequence
  Synthetic oligonucleotide; TTA chr11 5169489 5169510 5169506 5169511 +
acattagcacactgagtataat

SEQ ID NO: 74032 - DNA, 22 bp, Artificial Sequence
  Synthetic oligonucleotide; TTA chr11 5169495 5169516 5169512 5169517 +
gcacactgagtataattttttt

SEQ ID NO: 74033 - DNA, 22 bp, Artificial Sequence
  Synthetic oligonucleotide; CTG chr11 5169503 5169524 5169520 5169525 +
agtataatttttttaagaatct

SEQ ID NO: 74034 - DNA, 22 bp, Artificial Sequence
  Synthetic oligonucleotide; TTT chr11 5169513 5169534 5169530 5169535 +
ttttaagaatctttttattaca

SEQ ID NO: 74035 - DNA, 22 bp, Artificial Sequence
  Synthetic oligonucleotide; TTT chr11 5169514 5169535 5169531 5169536 +
tttaagaatctttttattacag

SEQ ID NO: 74036 - DNA, 22 bp, Artificial Sequence
  Synthetic oligonucleotide; TTT chr11 5169515 5169536 5169532 5169537 +
ttaagaatctttttattacaga

SEQ ID NO: 74037 - DNA, 22 bp, Artificial Sequence
  Synthetic oligonucleotide; TTT chr11 5169516 5169537 5169533 5169538 +
taagaatctttttattacagaa

SEQ ID NO: 74038 - DNA, 22 bp, Artificial Sequence
  Synthetic oligonucleotide; TTT chr11 5169517 5169538 5169534 5169539 +
aagaatctttttattacagaaa

SEQ ID NO: 74039 - DNA, 22 bp, Artificial Sequence
  Synthetic oligonucleotide; TTA chr11 5169518 5169539 5169535 5169540 +
agaatctttttattacagaaat

SEQ ID NO: 74040 - DNA, 22 bp, Artificial Sequence
  Synthetic oligonucleotide; CTT chr11 5169526 5169547 5169543 5169548 +
tttattacagaaattgtaaact

SEQ ID NO: 74041 - DNA, 22 bp, Artificial Sequence
  Synthetic oligonucleotide; TTT chr11 5169527 5169548 5169544 5169549 +
ttattacagaaattgtaaacta

SEQ ID NO: 74042 - DNA, 22 bp, Artificial Sequence
  Synthetic oligonucleotide; TTT chr11 5169528 5169549 5169545 5169550 +
tattacagaaattgtaaactac

SEQ ID NO: 74043 - DNA, 22 bp, Artificial Sequence
  Synthetic oligonucleotide; TTT chr11 5169529 5169550 5169546 5169551 +
attacagaaattgtaaactaca

SEQ ID NO: 74044 - DNA, 22 bp, Artificial Sequence
  Synthetic oligonucleotide; TTA chr11 5169530 5169551 5169547 5169552 +
ttacagaaattgtaaactacac

SEQ ID NO: 74045 - DNA, 22 bp, Artificial Sequence
  Synthetic oligonucleotide; TTA chr11 5169533 5169554 5169550 5169555 +
cagaaattgtaaactacacaaa

SEQ ID NO: 74046 - DNA, 22 bp, Artificial Sequence
  Synthetic oligonucleotide; TTG chr11 5169542 5169563 5169559 5169564 +
taaactacacaaagtaaacaga

SEQ ID NO: 74047 - DNA, 22 bp, Artificial Sequence
  Synthetic oligonucleotide; CTA chr11 5169549 5169570 5169566 5169571 +
cacaaagtaaacagaatattat

SEQ ID NO: 74048 - DNA, 22 bp, Artificial Sequence
  Synthetic oligonucleotide; TTA chr11 5169570 5169591 5169587 5169592 +
taattaatttccaggcacccat

SEQ ID NO: 74049 - DNA, 22 bp, Artificial Sequence
  Synthetic oligonucleotide; TTA chr11 5169576 5169597 5169593 5169598 +
atttccaggcacccatgacaca

SEQ ID NO: 74050 - DNA, 22 bp, Artificial Sequence
  Synthetic oligonucleotide; TTT chr11 5169580 5169601 5169597 5169602 +
ccaggcacccatgacacaactt

SEQ ID NO: 74051 - DNA, 22 bp, Artificial Sequence
  Synthetic oligonucleotide; TTC chr11 5169581 5169602 5169598 5169603 +
caggcacccatgacacaacttc

SEQ ID NO: 74052 - DNA, 22 bp, Artificial Sequence
  Synthetic oligonucleotide; CTT chr11 5169602 5169623 5169619 5169624 +
caacaattatcaacattacacc

SEQ ID NO: 74053 - DNA, 22 bp, Artificial Sequence
  Synthetic oligonucleotide; TTC chr11 5169603 5169624 5169620 5169625 +
aacaattatcaacattacacca

SEQ ID NO: 74054 - DNA, 22 bp, Artificial Sequence
  Synthetic oligonucleotide; TTA chr11 5169611 5169632 5169628 5169633 +
tcaacattacaccattcttgta

SEQ ID NO: 74055 - DNA, 22 bp, Artificial Sequence
  Synthetic oligonucleotide; TTA chr11 5169620 5169641 5169637 5169642 +
caccattcttgtattttccaca

SEQ ID NO: 74056 - DNA, 22 bp, Artificial Sequence
  Synthetic oligonucleotide; TTC chr11 5169628 5169649 5169645 5169650 +
ttgtattttccacacttgtatt

SEQ ID NO: 74057 - DNA, 22 bp, Artificial Sequence
  Synthetic oligonucleotide; CTT chr11 5169630 5169651 5169647 5169652 +
gtattttccacacttgtattca

SEQ ID NO: 74058 - DNA, 22 bp, Artificial Sequence
  Synthetic oligonucleotide; TTG chr11 5169631 5169652 5169648 5169653 +
tattttccacacttgtattcac

SEQ ID NO: 74059 - DNA, 22 bp, Artificial Sequence
  Synthetic oligonucleotide; TTT chr11 5169636 5169657 5169653 5169658 +
tccacacttgtattcactatga

SEQ ID NO: 74060 - DNA, 22 bp, Artificial Sequence
  Synthetic oligonucleotide; TTT chr11 5169637 5169658 5169654 5169659 +
ccacacttgtattcactatgaa

SEQ ID NO: 74061 - DNA, 22 bp, Artificial Sequence
  Synthetic oligonucleotide; TTC chr11 5169638 5169659 5169655 5169660 +
cacacttgtattcactatgaaa

SEQ ID NO: 74062 - DNA, 22 bp, Artificial Sequence
  Synthetic oligonucleotide; CTT chr11 5169645 5169666 5169662 5169667 +
gtattcactatgaaatctaatc

SEQ ID NO: 74063 - DNA, 22 bp, Artificial Sequence
  Synthetic oligonucleotide; TTG chr11 5169646 5169667 5169663 5169668 +
tattcactatgaaatctaatca

SEQ ID NO: 74064 - DNA, 22 bp, Artificial Sequence
  Synthetic oligonucleotide; TTC chr11 5169651 5169672 5169668 5169673 +
actatgaaatctaatcatctgt

SEQ ID NO: 74065 - DNA, 22 bp, Artificial Sequence
  Synthetic oligonucleotide; CTA chr11 5169655 5169676 5169672 5169677 +
tgaaatctaatcatctgtatta

SEQ ID NO: 74066 - DNA, 22 bp, Artificial Sequence
  Synthetic oligonucleotide; CTA chr11 5169664 5169685 5169681 5169686 +
atcatctgtattattattacta

SEQ ID NO: 74067 - DNA, 22 bp, Artificial Sequence
  Synthetic oligonucleotide; CTG chr11 5169672 5169693 5169689 5169694 +
tattattattactattttcctt

SEQ ID NO: 74068 - DNA, 22 bp, Artificial Sequence
  Synthetic oligonucleotide; TTA chr11 5169677 5169698 5169694 5169699 +
ttattactattttcctttttgt

SEQ ID NO: 74069 - DNA, 22 bp, Artificial Sequence
  Synthetic oligonucleotide; TTA chr11 5169680 5169701 5169697 5169702 +
ttactattttcctttttgttat

SEQ ID NO: 74070 - DNA, 22 bp, Artificial Sequence
  Synthetic oligonucleotide; TTA chr11 5169683 5169704 5169700 5169705 +
ctattttcctttttgttattat

SEQ ID NO: 74071 - DNA, 22 bp, Artificial Sequence
  Synthetic oligonucleotide; CTA chr11 5169686 5169707 5169703 5169708 +
ttttcctttttgttattattat

SEQ ID NO: 74072 - DNA, 22 bp, Artificial Sequence
  Synthetic oligonucleotide; TTT chr11 5169689 5169710 5169706 5169711 +
tcctttttgttattattatcat

SEQ ID NO: 74073 - DNA, 22 bp, Artificial Sequence
  Synthetic oligonucleotide; TTT chr11 5169690 5169711 5169707 5169712 +
cctttttgttattattatcatt

SEQ ID NO: 74074 - DNA, 22 bp, Artificial Sequence
  Synthetic oligonucleotide; TTC chr11 5169691 5169712 5169708 5169713 +
ctttttgttattattatcattc

SEQ ID NO: 74075 - DNA, 22 bp, Artificial Sequence
  Synthetic oligonucleotide; CTT chr11 5169694 5169715 5169711 5169716 +
tttgttattattatcattcaga

SEQ ID NO: 74076 - DNA, 22 bp, Artificial Sequence
  Synthetic oligonucleotide; TTT chr11 5169695 5169716 5169712 5169717 +
ttgttattattatcattcagaa

SEQ ID NO: 74077 - DNA, 22 bp, Artificial Sequence
  Synthetic oligonucleotide; TTT chr11 5169696 5169717 5169713 5169718 +
tgttattattatcattcagaag

SEQ ID NO: 74078 - DNA, 22 bp, Artificial Sequence
  Synthetic oligonucleotide; TTT chr11 5169697 5169718 5169714 5169719 +
gttattattatcattcagaagt

SEQ ID NO: 74079 - DNA, 22 bp, Artificial Sequence
  Synthetic oligonucleotide; TTG chr11 5169698 5169719 5169715 5169720 +
ttattattatcattcagaagtt

SEQ ID NO: 74080 - DNA, 22 bp, Artificial Sequence
  Synthetic oligonucleotide; TTA chr11 5169701 5169722 5169718 5169723 +
ttattatcattcagaagttttg

SEQ ID NO: 74081 - DNA, 22 bp, Artificial Sequence
  Synthetic oligonucleotide; TTA chr11 5169704 5169725 5169721 5169726 +
ttatcattcagaagttttgatg

SEQ ID NO: 74082 - DNA, 22 bp, Artificial Sequence
  Synthetic oligonucleotide; TTA chr11 5169707 5169728 5169724 5169729 +
tcattcagaagttttgatgtaa

SEQ ID NO: 74083 - DNA, 22 bp, Artificial Sequence
  Synthetic oligonucleotide; TTC chr11 5169713 5169734 5169730 5169735 +
agaagttttgatgtaaaattga

SEQ ID NO: 74084 - DNA, 22 bp, Artificial Sequence
  Synthetic oligonucleotide; TTT chr11 5169721 5169742 5169738 5169743 +
tgatgtaaaattgatgtaccta

SEQ ID NO: 74085 - DNA, 22 bp, Artificial Sequence
  Synthetic oligonucleotide; TTT chr11 5169722 5169743 5169739 5169744 +
gatgtaaaattgatgtacctag

SEQ ID NO: 74086 - DNA, 22 bp, Artificial Sequence
  Synthetic oligonucleotide; TTG chr11 5169723 5169744 5169740 5169745 +
atgtaaaattgatgtacctaga

SEQ ID NO: 74087 - DNA, 22 bp, Artificial Sequence
  Synthetic oligonucleotide; TTG chr11 5169734 5169755 5169751 5169756 +
atgtacctagaaatgtgcaaat

SEQ ID NO: 74088 - DNA, 22 bp, Artificial Sequence
  Synthetic oligonucleotide; CTA chr11 5169743 5169764 5169760 5169765 +
gaaatgtgcaaatcttagctgt

SEQ ID NO: 74089 - DNA, 22 bp, Artificial Sequence
  Synthetic oligonucleotide; CTT chr11 5169759 5169780 5169776 5169781 +
agctgtaccgttttgacaaatt

SEQ ID NO: 74090 - DNA, 22 bp, Artificial Sequence
  Synthetic oligonucleotide; TTA chr11 5169760 5169781 5169777 5169782 +
gctgtaccgttttgacaaattg

SEQ ID NO: 74091 - DNA, 22 bp, Artificial Sequence
  Synthetic oligonucleotide; CTG chr11 5169764 5169785 5169781 5169786 +
taccgttttgacaaattgacaa

SEQ ID NO: 74092 - DNA, 22 bp, Artificial Sequence
  Synthetic oligonucleotide; TTT chr11 5169772 5169793 5169789 5169794 +
tgacaaattgacaaaacaatgt

SEQ ID NO: 74093 - DNA, 22 bp, Artificial Sequence
  Synthetic oligonucleotide; TTT chr11 5169773 5169794 5169790 5169795 +
gacaaattgacaaaacaatgtc

SEQ ID NO: 74094 - DNA, 22 bp, Artificial Sequence
  Synthetic oligonucleotide; TTG chr11 5169774 5169795 5169791 5169796 +
acaaattgacaaaacaatgtca

SEQ ID NO: 74095 - DNA, 22 bp, Artificial Sequence
  Synthetic oligonucleotide; TTG chr11 5169782 5169803 5169799 5169804 +
acaaaacaatgtcaccacatcc

SEQ ID NO: 74096 - DNA, 22 bp, Artificial Sequence
  Synthetic oligonucleotide; CTA chr11 5169807 5169828 5169824 5169829 +
acacaacaaaatatttccatct

SEQ ID NO: 74097 - DNA, 22 bp, Artificial Sequence
  Synthetic oligonucleotide; TTT chr11 5169823 5169844 5169840 5169845 +
ccatctccccagaaattgcctc

SEQ ID NO: 74098 - DNA, 22 bp, Artificial Sequence
  Synthetic oligonucleotide; TTC chr11 5169824 5169845 5169841 5169846 +
catctccccagaaattgcctca

SEQ ID NO: 74099 - DNA, 22 bp, Artificial Sequence
  Synthetic oligonucleotide; CTC chr11 5169830 5169851 5169847 5169852 +
cccagaaattgcctcatgtctc

SEQ ID NO: 74100 - DNA, 22 bp, Artificial Sequence
  Synthetic oligonucleotide; TTG chr11 5169841 5169862 5169858 5169863 +
cctcatgtctctccccattctt

SEQ ID NO: 74101 - DNA, 22 bp, Artificial Sequence
  Synthetic oligonucleotide; CTC chr11 5169845 5169866 5169862 5169867 +
atgtctctccccattcttccat

SEQ ID NO: 74102 - DNA, 22 bp, Artificial Sequence
  Synthetic oligonucleotide; CTC chr11 5169852 5169873 5169869 5169874 +
tccccattcttccatctttata

SEQ ID NO: 74103 - DNA, 22 bp, Artificial Sequence
  Synthetic oligonucleotide; CTC chr11 5169854 5169875 5169871 5169876 +
cccattcttccatctttatatc

SEQ ID NO: 74104 - DNA, 22 bp, Artificial Sequence
  Synthetic oligonucleotide; TTC chr11 5169861 5169882 5169878 5169883 +
ttccatctttatatccatcaga

SEQ ID NO: 74105 - DNA, 22 bp, Artificial Sequence
  Synthetic oligonucleotide; CTT chr11 5169863 5169884 5169880 5169885 +
ccatctttatatccatcagagg

SEQ ID NO: 74106 - DNA, 22 bp, Artificial Sequence
  Synthetic oligonucleotide; TTC chr11 5169864 5169885 5169881 5169886 +
catctttatatccatcagaggt

SEQ ID NO: 74107 - DNA, 22 bp, Artificial Sequence
  Synthetic oligonucleotide; CTT chr11 5169870 5169891 5169887 5169892 +
tatatccatcagaggtaagcag

SEQ ID NO: 74108 - DNA, 22 bp, Artificial Sequence
  Synthetic oligonucleotide; TTT chr11 5169871 5169892 5169888 5169893 +
atatccatcagaggtaagcagg

SEQ ID NO: 74109 - DNA, 22 bp, Artificial Sequence
  Synthetic oligonucleotide; TTA chr11 5169872 5169893 5169889 5169894 +
tatccatcagaggtaagcaggg

SEQ ID NO: 74110 - DNA, 22 bp, Artificial Sequence
  Synthetic oligonucleotide; TTC chr11 5169897 5169918 5169914 5169919 +
tgattttttgacattaaattag

SEQ ID NO: 74111 - DNA, 22 bp, Artificial Sequence
  Synthetic oligonucleotide; CTG chr11 5169899 5169920 5169916 5169921 +
attttttgacattaaattagat

SEQ ID NO: 74112 - DNA, 22 bp, Artificial Sequence
  Synthetic oligonucleotide; TTT chr11 5169903 5169924 5169920 5169925 +
tttgacattaaattagatgtac

SEQ ID NO: 74113 - DNA, 22 bp, Artificial Sequence
  Synthetic oligonucleotide; TTT chr11 5169904 5169925 5169921 5169926 +
ttgacattaaattagatgtaca

SEQ ID NO: 74114 - DNA, 22 bp, Artificial Sequence
  Synthetic oligonucleotide; TTT chr11 5169905 5169926 5169922 5169927 +
tgacattaaattagatgtacat

SEQ ID NO: 74115 - DNA, 22 bp, Artificial Sequence
  Synthetic oligonucleotide; TTT chr11 5169906 5169927 5169923 5169928 +
gacattaaattagatgtacatg

SEQ ID NO: 74116 - DNA, 22 bp, Artificial Sequence
  Synthetic oligonucleotide; TTG chr11 5169907 5169928 5169924 5169929 +
acattaaattagatgtacatgt

SEQ ID NO: 74117 - DNA, 22 bp, Artificial Sequence
  Synthetic oligonucleotide; TTA chr11 5169913 5169934 5169930 5169935 +
aattagatgtacatgttctgaa

SEQ ID NO: 74118 - DNA, 22 bp, Artificial Sequence
  Synthetic oligonucleotide; TTA chr11 5169918 5169939 5169935 5169940 +
gatgtacatgttctgaaactat

SEQ ID NO: 74119 - DNA, 22 bp, Artificial Sequence
  Synthetic oligonucleotide; TTC chr11 5169931 5169952 5169948 5169953 +
tgaaactatacaaacaaaataa

SEQ ID NO: 74120 - DNA, 22 bp, Artificial Sequence
  Synthetic oligonucleotide; CTG chr11 5169933 5169954 5169950 5169955 +
aaactatacaaacaaaataata

SEQ ID NO: 74121 - DNA, 22 bp, Artificial Sequence
  Synthetic oligonucleotide; CTA chr11 5169939 5169960 5169956 5169961 +
tacaaacaaaataatacaatat

SEQ ID NO: 74122 - DNA, 22 bp, Artificial Sequence
  Synthetic oligonucleotide; CTC chr11 5169967 5169988 5169984 5169989 +
ttttgtgtcctgattattttcc

SEQ ID NO: 74123 - DNA, 22 bp, Artificial Sequence
  Synthetic oligonucleotide; CTT chr11 5169969 5169990 5169986 5169991 +
ttgtgtcctgattattttcctt

SEQ ID NO: 74124 - DNA, 22 bp, Artificial Sequence
  Synthetic oligonucleotide; TTT chr11 5169970 5169991 5169987 5169992 +
tgtgtcctgattattttccttc

SEQ ID NO: 74125 - DNA, 22 bp, Artificial Sequence
  Synthetic oligonucleotide; TTT chr11 5169971 5169992 5169988 5169993 +
gtgtcctgattattttccttca

SEQ ID NO: 74126 - DNA, 22 bp, Artificial Sequence
  Synthetic oligonucleotide; TTG chr11 5169972 5169993 5169989 5169994 +
tgtcctgattattttccttcac

SEQ ID NO: 74127 - DNA, 22 bp, Artificial Sequence
  Synthetic oligonucleotide; CTG chr11 5169979 5170000 5169996 5170001 +
attattttccttcacaagtatg

SEQ ID NO: 74128 - DNA, 22 bp, Artificial Sequence
  Synthetic oligonucleotide; TTA chr11 5169983 5170004 5170000 5170005 +
ttttccttcacaagtatgtatc

SEQ ID NO: 74129 - DNA, 22 bp, Artificial Sequence
  Synthetic oligonucleotide; TTT chr11 5169986 5170007 5170003 5170008 +
tccttcacaagtatgtatcact

SEQ ID NO: 74130 - DNA, 22 bp, Artificial Sequence
  Synthetic oligonucleotide; TTT chr11 5169987 5170008 5170004 5170009 +
ccttcacaagtatgtatcacta

SEQ ID NO: 74131 - DNA, 22 bp, Artificial Sequence
  Synthetic oligonucleotide; TTC chr11 5169988 5170009 5170005 5170010 +
cttcacaagtatgtatcactaa

SEQ ID NO: 74132 - DNA, 22 bp, Artificial Sequence
  Synthetic oligonucleotide; CTT chr11 5169991 5170012 5170008 5170013 +
cacaagtatgtatcactaattt

SEQ ID NO: 74133 - DNA, 22 bp, Artificial Sequence
  Synthetic oligonucleotide; TTC chr11 5169992 5170013 5170009 5170014 +
acaagtatgtatcactaatttt

SEQ ID NO: 74134 - DNA, 22 bp, Artificial Sequence
  Synthetic oligonucleotide; CTA chr11 5170009 5170030 5170026 5170031 +
attttaatataaccagaaactt

SEQ ID NO: 74135 - DNA, 22 bp, Artificial Sequence
  Synthetic oligonucleotide; TTT chr11 5170013 5170034 5170030 5170035 +
taatataaccagaaacttaaac

SEQ ID NO: 74136 - DNA, 22 bp, Artificial Sequence
  Synthetic oligonucleotide; TTT chr11 5170014 5170035 5170031 5170036 +
aatataaccagaaacttaaacc

SEQ ID NO: 74137 - DNA, 22 bp, Artificial Sequence
  Synthetic oligonucleotide; TTA chr11 5170015 5170036 5170032 5170037 +
atataaccagaaacttaaacct

SEQ ID NO: 74138 - DNA, 22 bp, Artificial Sequence
  Synthetic oligonucleotide; CTT chr11 5170031 5170052 5170048 5170053 +
aaacctccccaagactctttct

SEQ ID NO: 74139 - DNA, 22 bp, Artificial Sequence
  Synthetic oligonucleotide; TTA chr11 5170032 5170053 5170049 5170054 +
aacctccccaagactctttcta

SEQ ID NO: 74140 - DNA, 22 bp, Artificial Sequence
  Synthetic oligonucleotide; CTC chr11 5170038 5170059 5170055 5170060 +
cccaagactctttctacatatt

SEQ ID NO: 74141 - DNA, 22 bp, Artificial Sequence
  Synthetic oligonucleotide; CTC chr11 5170048 5170069 5170065 5170070 +
tttctacatattcccagaacca

SEQ ID NO: 74142 - DNA, 22 bp, Artificial Sequence
  Synthetic oligonucleotide; CTT chr11 5170050 5170071 5170067 5170072 +
tctacatattcccagaaccaaa

SEQ ID NO: 74143 - DNA, 22 bp, Artificial Sequence
  Synthetic oligonucleotide; TTT chr11 5170051 5170072 5170068 5170073 +
ctacatattcccagaaccaaat

SEQ ID NO: 74144 - DNA, 22 bp, Artificial Sequence
  Synthetic oligonucleotide; TTC chr11 5170052 5170073 5170069 5170074 +
tacatattcccagaaccaaatg

SEQ ID NO: 74145 - DNA, 22 bp, Artificial Sequence
  Synthetic oligonucleotide; CTA chr11 5170054 5170075 5170071 5170076 +
catattcccagaaccaaatgtc

SEQ ID NO: 74146 - DNA, 22 bp, Artificial Sequence
  Synthetic oligonucleotide; TTC chr11 5170061 5170082 5170078 5170083 +
ccagaaccaaatgtcactgaat

SEQ ID NO: 74147 - DNA, 22 bp, Artificial Sequence
  Synthetic oligonucleotide; CTG chr11 5170080 5170101 5170097 5170102 +
aattgagtattcaaggattcag

SEQ ID NO: 74148 - DNA, 22 bp, Artificial Sequence
  Synthetic oligonucleotide; TTG chr11 5170085 5170106 5170102 5170107 +
agtattcaaggattcagcacac

SEQ ID NO: 74149 - DNA, 22 bp, Artificial Sequence
  Synthetic oligonucleotide; TTC chr11 5170092 5170113 5170109 5170114 +
aaggattcagcacacaaagtgt

SEQ ID NO: 74150 - DNA, 22 bp, Artificial Sequence
  Synthetic oligonucleotide; TTC chr11 5170100 5170121 5170117 5170122 +
agcacacaaagtgtgtcatcac

SEQ ID NO: 74151 - DNA, 22 bp, Artificial Sequence
  Synthetic oligonucleotide; CTG chr11 5170136 5170157 5170153 5170158 +
tgttctatgcctcctcccacaa

SEQ ID NO: 74152 - DNA, 22 bp, Artificial Sequence
  Synthetic oligonucleotide; TTC chr11 5170141 5170162 5170158 5170163 +
tatgcctcctcccacaatttta

SEQ ID NO: 74153 - DNA, 22 bp, Artificial Sequence
  Synthetic oligonucleotide; CTA chr11 5170143 5170164 5170160 5170165 +
tgcctcctcccacaattttatt

SEQ ID NO: 74154 - DNA, 22 bp, Artificial Sequence
  Synthetic oligonucleotide; CTC chr11 5170149 5170170 5170166 5170171 +
ctcccacaattttatttcagag

SEQ ID NO: 74155 - DNA, 22 bp, Artificial Sequence
  Synthetic oligonucleotide; CTC chr11 5170152 5170173 5170169 5170174 +
ccacaattttatttcagagtaa

SEQ ID NO: 74156 - DNA, 22 bp, Artificial Sequence
  Synthetic oligonucleotide; TTT chr11 5170161 5170182 5170178 5170183 +
tatttcagagtaatgccatttc

SEQ ID NO: 74157 - DNA, 22 bp, Artificial Sequence
  Synthetic oligonucleotide; TTT chr11 5170162 5170183 5170179 5170184 +
atttcagagtaatgccatttcc

SEQ ID NO: 74158 - DNA, 22 bp, Artificial Sequence
  Synthetic oligonucleotide; TTA chr11 5170163 5170184 5170180 5170185 +
tttcagagtaatgccatttcct

SEQ ID NO: 74159 - DNA, 22 bp, Artificial Sequence
  Synthetic oligonucleotide; TTT chr11 5170166 5170187 5170183 5170188 +
cagagtaatgccatttcctatt

SEQ ID NO: 74160 - DNA, 22 bp, Artificial Sequence
  Synthetic oligonucleotide; TTC chr11 5170167 5170188 5170184 5170189 +
agagtaatgccatttcctattc

SEQ ID NO: 74161 - DNA, 22 bp, Artificial Sequence
  Synthetic oligonucleotide; TTT chr11 5170182 5170203 5170199 5170204 +
cctattctcagggaaatatata

SEQ ID NO: 74162 - DNA, 22 bp, Artificial Sequence
  Synthetic oligonucleotide; TTC chr11 5170183 5170204 5170200 5170205 +
ctattctcagggaaatatataa

SEQ ID NO: 74163 - DNA, 22 bp, Artificial Sequence
  Synthetic oligonucleotide; CTA chr11 5170186 5170207 5170203 5170208 +
ttctcagggaaatatataaaac

SEQ ID NO: 74164 - DNA, 22 bp, Artificial Sequence
  Synthetic oligonucleotide; TTC chr11 5170189 5170210 5170206 5170211 +
tcagggaaatatataaaactgt

SEQ ID NO: 74165 - DNA, 22 bp, Artificial Sequence
  Synthetic oligonucleotide; CTC chr11 5170191 5170212 5170208 5170213 +
agggaaatatataaaactgttt

SEQ ID NO: 74166 - DNA, 22 bp, Artificial Sequence
  Synthetic oligonucleotide; CTG chr11 5170210 5170231 5170227 5170232 +
ttttttttcttcatctacaaaa

SEQ ID NO: 74167 - DNA, 22 bp, Artificial Sequence
  Synthetic oligonucleotide; TTT chr11 5170213 5170234 5170230 5170235 +
tttttcttcatctacaaaatgt

SEQ ID NO: 74168 - DNA, 22 bp, Artificial Sequence
  Synthetic oligonucleotide; TTT chr11 5170214 5170235 5170231 5170236 +
ttttcttcatctacaaaatgtt

SEQ ID NO: 74169 - DNA, 22 bp, Artificial Sequence
  Synthetic oligonucleotide; TTT chr11 5170215 5170236 5170232 5170237 +
tttcttcatctacaaaatgtta

SEQ ID NO: 74170 - DNA, 22 bp, Artificial Sequence
  Synthetic oligonucleotide; TTT chr11 5170216 5170237 5170233 5170238 +
ttcttcatctacaaaatgttaa

SEQ ID NO: 74171 - DNA, 22 bp, Artificial Sequence
  Synthetic oligonucleotide; TTT chr11 5170217 5170238 5170234 5170239 +
tcttcatctacaaaatgttaaa

SEQ ID NO: 74172 - DNA, 22 bp, Artificial Sequence
  Synthetic oligonucleotide; TTT chr11 5170218 5170239 5170235 5170240 +
cttcatctacaaaatgttaaag

SEQ ID NO: 74173 - DNA, 22 bp, Artificial Sequence
  Synthetic oligonucleotide; TTC chr11 5170219 5170240 5170236 5170241 +
ttcatctacaaaatgttaaagc

SEQ ID NO: 74174 - DNA, 22 bp, Artificial Sequence
  Synthetic oligonucleotide; CTT chr11 5170221 5170242 5170238 5170243 +
catctacaaaatgttaaagctc

SEQ ID NO: 74175 - DNA, 22 bp, Artificial Sequence
  Synthetic oligonucleotide; TTC chr11 5170222 5170243 5170239 5170244 +
atctacaaaatgttaaagctca

SEQ ID NO: 74176 - DNA, 22 bp, Artificial Sequence
  Synthetic oligonucleotide; CTA chr11 5170227 5170248 5170244 5170249 +
caaaatgttaaagctcattaac

SEQ ID NO: 74177 - DNA, 22 bp, Artificial Sequence
  Synthetic oligonucleotide; TTA chr11 5170237 5170258 5170254 5170259 +
aagctcattaacaagcaataat

SEQ ID NO: 74178 - DNA, 22 bp, Artificial Sequence
  Synthetic oligonucleotide; CTC chr11 5170243 5170264 5170260 5170265 +
attaacaagcaataataagcca

SEQ ID NO: 74179 - DNA, 22 bp, Artificial Sequence
  Synthetic oligonucleotide; TTA chr11 5170247 5170268 5170264 5170269 +
acaagcaataataagccatgga

SEQ ID NO: 74180 - DNA, 22 bp, Artificial Sequence
  Synthetic oligonucleotide; TTT chr11 5170273 5170294 5170290 5170295 +
ttcatatttgcaaagctaatat

SEQ ID NO: 74181 - DNA, 22 bp, Artificial Sequence
  Synthetic oligonucleotide; TTT chr11 5170274 5170295 5170291 5170296 +
tcatatttgcaaagctaatatt

SEQ ID NO: 74182 - DNA, 22 bp, Artificial Sequence
  Synthetic oligonucleotide; TTT chr11 5170275 5170296 5170292 5170297 +
catatttgcaaagctaatattc

SEQ ID NO: 74183 - DNA, 22 bp, Artificial Sequence
  Synthetic oligonucleotide; TTC chr11 5170276 5170297 5170293 5170298 +
atatttgcaaagctaatattca

SEQ ID NO: 74184 - DNA, 22 bp, Artificial Sequence
  Synthetic oligonucleotide; TTT chr11 5170282 5170303 5170299 5170304 +
gcaaagctaatattcaggtaat

SEQ ID NO: 74185 - DNA, 22 bp, Artificial Sequence
  Synthetic oligonucleotide; TTG chr11 5170283 5170304 5170300 5170305 +
caaagctaatattcaggtaata

SEQ ID NO: 74186 - DNA, 22 bp, Artificial Sequence
  Synthetic oligonucleotide; CTA chr11 5170291 5170312 5170308 5170313 +
atattcaggtaataaagcctga

SEQ ID NO: 74187 - DNA, 22 bp, Artificial Sequence
  Synthetic oligonucleotide; TTC chr11 5170297 5170318 5170314 5170319 +
aggtaataaagcctgatctaag

SEQ ID NO: 74188 - DNA, 22 bp, Artificial Sequence
  Synthetic oligonucleotide; CTG chr11 5170312 5170333 5170329 5170334 +
atctaagtgcctgtgctgtcag

SEQ ID NO: 74189 - DNA, 22 bp, Artificial Sequence
  Synthetic oligonucleotide; CTA chr11 5170317 5170338 5170334 5170339 +
agtgcctgtgctgtcagggtat

SEQ ID NO: 74190 - DNA, 22 bp, Artificial Sequence
  Synthetic oligonucleotide; CTG chr11 5170325 5170346 5170342 5170347 +
tgctgtcagggtatcttcagtc

SEQ ID NO: 74191 - DNA, 22 bp, Artificial Sequence
  Synthetic oligonucleotide; CTG chr11 5170330 5170351 5170347 5170352 +
tcagggtatcttcagtctccat

SEQ ID NO: 74192 - DNA, 22 bp, Artificial Sequence
  Synthetic oligonucleotide; CTT chr11 5170342 5170363 5170359 5170364 +
cagtctccattagaactcaccc

SEQ ID NO: 74193 - DNA, 22 bp, Artificial Sequence
  Synthetic oligonucleotide; TTC chr11 5170343 5170364 5170360 5170365 +
agtctccattagaactcacccc

SEQ ID NO: 74194 - DNA, 22 bp, Artificial Sequence
  Synthetic oligonucleotide; CTC chr11 5170349 5170370 5170366 5170371 +
cattagaactcacccctcttcc

SEQ ID NO: 74195 - DNA, 22 bp, Artificial Sequence
  Synthetic oligonucleotide; TTA chr11 5170354 5170375 5170371 5170376 +
gaactcacccctcttcctggat

SEQ ID NO: 74196 - DNA, 22 bp, Artificial Sequence
  Synthetic oligonucleotide; CTC chr11 5170360 5170381 5170377 5170382 +
acccctcttcctggatagtgta

SEQ ID NO: 74197 - DNA, 22 bp, Artificial Sequence
  Synthetic oligonucleotide; CTC chr11 5170367 5170388 5170384 5170389 +
ttcctggatagtgtaagaacaa

SEQ ID NO: 74198 - DNA, 22 bp, Artificial Sequence
  Synthetic oligonucleotide; CTT chr11 5170369 5170390 5170386 5170391 +
cctggatagtgtaagaacaacg

SEQ ID NO: 74199 - DNA, 22 bp, Artificial Sequence
  Synthetic oligonucleotide; TTC chr11 5170370 5170391 5170387 5170392 +
ctggatagtgtaagaacaacgc

SEQ ID NO: 74200 - DNA, 22 bp, Artificial Sequence
  Synthetic oligonucleotide; CTG chr11 5170373 5170394 5170390 5170395 +
gatagtgtaagaacaacgctgt

SEQ ID NO: 74201 - DNA, 22 bp, Artificial Sequence
  Synthetic oligonucleotide; CTG chr11 5170394 5170415 5170411 5170416 +
ttgcgaatttctttgattttga

SEQ ID NO: 74202 - DNA, 22 bp, Artificial Sequence
  Synthetic oligonucleotide; TTG chr11 5170397 5170418 5170414 5170419 +
cgaatttctttgattttgatac

SEQ ID NO: 74203 - DNA, 22 bp, Artificial Sequence
  Synthetic oligonucleotide; TTT chr11 5170404 5170425 5170421 5170426 +
ctttgattttgatactatagac

SEQ ID NO: 74204 - DNA, 22 bp, Artificial Sequence
  Synthetic oligonucleotide; TTC chr11 5170405 5170426 5170422 5170427 +
tttgattttgatactatagaca

SEQ ID NO: 74205 - DNA, 22 bp, Artificial Sequence
  Synthetic oligonucleotide; CTT chr11 5170407 5170428 5170424 5170429 +
tgattttgatactatagacaat

SEQ ID NO: 74206 - DNA, 22 bp, Artificial Sequence
  Synthetic oligonucleotide; TTT chr11 5170408 5170429 5170425 5170430 +
gattttgatactatagacaatg

SEQ ID NO: 74207 - DNA, 22 bp, Artificial Sequence
  Synthetic oligonucleotide; TTG chr11 5170409 5170430 5170426 5170431 +
attttgatactatagacaatgg

SEQ ID NO: 74208 - DNA, 22 bp, Artificial Sequence
  Synthetic oligonucleotide; TTT chr11 5170413 5170434 5170430 5170435 +
tgatactatagacaatggggtt

SEQ ID NO: 74209 - DNA, 22 bp, Artificial Sequence
  Synthetic oligonucleotide; TTT chr11 5170414 5170435 5170431 5170436 +
gatactatagacaatggggttg

SEQ ID NO: 74210 - DNA, 22 bp, Artificial Sequence
  Synthetic oligonucleotide; TTG chr11 5170415 5170436 5170432 5170437 +
atactatagacaatggggttga

SEQ ID NO: 74211 - DNA, 22 bp, Artificial Sequence
  Synthetic oligonucleotide; CTA chr11 5170421 5170442 5170438 5170443 +
tagacaatggggttgaccacag

SEQ ID NO: 74212 - DNA, 22 bp, Artificial Sequence
  Synthetic oligonucleotide; TTG chr11 5170436 5170457 5170453 5170458 +
accacaggaggaaaaaagaggt

SEQ ID NO: 74213 - DNA, 22 bp, Artificial Sequence
  Synthetic oligonucleotide; TTG chr11 5170466 5170487 5170483 5170488 +
gccgtgacagtctggaaaagtg

SEQ ID NO: 74214 - DNA, 22 bp, Artificial Sequence
  Synthetic oligonucleotide; CTG chr11 5170480 5170501 5170497 5170502 +
gaaaagtggaggtaaatgccgt

SEQ ID NO: 74215 - DNA, 22 bp, Artificial Sequence
  Synthetic oligonucleotide; CTG chr11 5170529 5170550 5170546 5170551 +
atcatgggcacatagtacacaa

SEQ ID NO: 74216 - DNA, 22 bp, Artificial Sequence
  Synthetic oligonucleotide; TTG chr11 5170583 5170604 5170600 5170605 +
agtgcctgccaccgccctgctc

SEQ ID NO: 74217 - DNA, 22 bp, Artificial Sequence
  Synthetic oligonucleotide; CTG chr11 5170591 5170612 5170608 5170613 +
ccaccgccctgctccagaagct

SEQ ID NO: 74218 - DNA, 22 bp, Artificial Sequence
  Synthetic oligonucleotide; CTG chr11 5170602 5170623 5170619 5170624 +
ctccagaagctatttccagtac

SEQ ID NO: 74219 - DNA, 22 bp, Artificial Sequence
  Synthetic oligonucleotide; CTC chr11 5170605 5170626 5170622 5170627 +
cagaagctatttccagtactgt

SEQ ID NO: 74220 - DNA, 22 bp, Artificial Sequence
  Synthetic oligonucleotide; CTA chr11 5170614 5170635 5170631 5170636 +
tttccagtactgtatgaagaat

SEQ ID NO: 74221 - DNA, 22 bp, Artificial Sequence
  Synthetic oligonucleotide; TTT chr11 5170617 5170638 5170634 5170639 +
ccagtactgtatgaagaatcag

SEQ ID NO: 74222 - DNA, 22 bp, Artificial Sequence
  Synthetic oligonucleotide; TTC chr11 5170618 5170639 5170635 5170640 +
cagtactgtatgaagaatcagc

SEQ ID NO: 74223 - DNA, 22 bp, Artificial Sequence
  Synthetic oligonucleotide; CTG chr11 5170626 5170647 5170643 5170648 +
tatgaagaatcagcacataaga

SEQ ID NO: 74224 - DNA, 22 bp, Artificial Sequence
  Synthetic oligonucleotide; CTA chr11 5170712 5170733 5170729 5170734 +
ttgggacgtgtgtctccacagg

SEQ ID NO: 74225 - DNA, 22 bp, Artificial Sequence
  Synthetic oligonucleotide; TTG chr11 5170715 5170736 5170732 5170737 +
ggacgtgtgtctccacagggca

SEQ ID NO: 74226 - DNA, 22 bp, Artificial Sequence
  Synthetic oligonucleotide; CTC chr11 5170728 5170749 5170745 5170750 +
cacagggcaatttgatcagatc

SEQ ID NO: 74227 - DNA, 22 bp, Artificial Sequence
  Synthetic oligonucleotide; TTT chr11 5170741 5170762 5170758 5170763 +
gatcagatctgagtggaggcaa

SEQ ID NO: 74228 - DNA, 22 bp, Artificial Sequence
  Synthetic oligonucleotide; TTG chr11 5170742 5170763 5170759 5170764 +
atcagatctgagtggaggcaat

SEQ ID NO: 74229 - DNA, 22 bp, Artificial Sequence
  Synthetic oligonucleotide; CTG chr11 5170752 5170773 5170769 5170774 +
agtggaggcaataagagtgtgt

SEQ ID NO: 74230 - DNA, 22 bp, Artificial Sequence
  Synthetic oligonucleotide; TTG chr11 5170784 5170805 5170801 5170806 +
tggccacagaaaggcagacgcc

SEQ ID NO: 74231 - DNA, 22 bp, Artificial Sequence
  Synthetic oligonucleotide; CTC chr11 5170808 5170829 5170825 5170830 +
aggagaaagagcagtgggagca

SEQ ID NO: 74232 - DNA, 22 bp, Artificial Sequence
  Synthetic oligonucleotide; TTA chr11 5170839 5170860 5170856 5170861 +
cactgcgcaaggcaatggcggc

SEQ ID NO: 74233 - DNA, 22 bp, Artificial Sequence
  Synthetic oligonucleotide; CTG chr11 5170844 5170865 5170861 5170866 +
cgcaaggcaatggcggcacccg

SEQ ID NO: 74234 - DNA, 22 bp, Artificial Sequence
  Synthetic oligonucleotide; TTG chr11 5170887 5170908 5170904 5170909 +
tcagaatggttgtgtagcgcag

SEQ ID NO: 74235 - DNA, 22 bp, Artificial Sequence
  Synthetic oligonucleotide; TTG chr11 5170899 5170920 5170916 5170921 +
tgtagcgcagtgggctgtagat

SEQ ID NO: 74236 - DNA, 22 bp, Artificial Sequence
  Synthetic oligonucleotide; CTG chr11 5170916 5170937 5170933 5170938 +
tagatggccacaaagcggtcca

SEQ ID NO: 74237 - DNA, 22 bp, Artificial Sequence
  Synthetic oligonucleotide; CTG chr11 5170941 5170962 5170958 5170963 +
acattgccagaaggacacctga

SEQ ID NO: 74238 - DNA, 22 bp, Artificial Sequence
  Synthetic oligonucleotide; TTG chr11 5170947 5170968 5170964 5170969 +
ccagaaggacacctgactccat

SEQ ID NO: 74239 - DNA, 22 bp, Artificial Sequence
  Synthetic oligonucleotide; CTG chr11 5170962 5170983 5170979 5170984 +
actccataagagtgaaagagtg

SEQ ID NO: 74240 - DNA, 22 bp, Artificial Sequence
  Synthetic oligonucleotide; CTC chr11 5170966 5170987 5170983 5170988 +
cataagagtgaaagagtgcata

SEQ ID NO: 74241 - DNA, 22 bp, Artificial Sequence
  Synthetic oligonucleotide; CTG chr11 5170999 5171020 5171016 5171021 +
gagcaggcaaccaccaaaactg

SEQ ID NO: 74242 - DNA, 22 bp, Artificial Sequence
  Synthetic oligonucleotide; CTG chr11 5171021 5171042 5171038 5171043 +
acatcgttaatgccaaagagga

SEQ ID NO: 74243 - DNA, 22 bp, Artificial Sequence
  Synthetic oligonucleotide; TTA chr11 5171030 5171051 5171047 5171052 +
atgccaaagaggaatatgctta

SEQ ID NO: 74244 - DNA, 22 bp, Artificial Sequence
  Synthetic oligonucleotide; CTT chr11 5171051 5171072 5171068 5171073 +
aacacagtgggcatggtggaag

SEQ ID NO: 74245 - DNA, 22 bp, Artificial Sequence
  Synthetic oligonucleotide; TTA chr11 5171052 5171073 5171069 5171074 +
acacagtgggcatggtggaagc

SEQ ID NO: 74246 - DNA, 22 bp, Artificial Sequence
  Synthetic oligonucleotide; TTC chr11 5171089 5171110 5171106 5171111 +
aacaaaggccggcatggccaga

SEQ ID NO: 74247 - DNA, 22 bp, Artificial Sequence
  Synthetic oligonucleotide; TTG chr11 5171128 5171149 5171145 5171150 +
gtgcaaggaagagtcaattcgg

SEQ ID NO: 74248 - DNA, 22 bp, Artificial Sequence
  Synthetic oligonucleotide; TTC chr11 5171148 5171169 5171165 5171170 +
ggatgatgtgaagaatgatgcc

SEQ ID NO: 74249 - DNA, 22 bp, Artificial Sequence
  Synthetic oligonucleotide; TTT chr11 5171174 5171195 5171191 5171196 +
cccggaaagatgatggtgtata

SEQ ID NO: 74250 - DNA, 22 bp, Artificial Sequence
  Synthetic oligonucleotide; TTC chr11 5171175 5171196 5171192 5171197 +
ccggaaagatgatggtgtatat

SEQ ID NO: 74251 - DNA, 22 bp, Artificial Sequence
  Synthetic oligonucleotide; TTC chr11 5171231 5171252 5171248 5171253 +
tgcctccagtcccgggatgcca

SEQ ID NO: 74252 - DNA, 22 bp, Artificial Sequence
  Synthetic oligonucleotide; CTG chr11 5171233 5171254 5171250 5171255 +
cctccagtcccgggatgccaac

SEQ ID NO: 74253 - DNA, 22 bp, Artificial Sequence
  Synthetic oligonucleotide; CTC chr11 5171237 5171258 5171254 5171259 +
cagtcccgggatgccaacgaga

SEQ ID NO: 74254 - DNA, 22 bp, Artificial Sequence
  Synthetic oligonucleotide; TTG chr11 5171269 5171290 5171286 5171291 +
taggtgtgaatgttatggaacg

SEQ ID NO: 74255 - DNA, 22 bp, Artificial Sequence
  Synthetic oligonucleotide; TTA chr11 5171284 5171305 5171301 5171306 +
tggaacgtttgaaaacgtcatg

SEQ ID NO: 74256 - DNA, 22 bp, Artificial Sequence
  Synthetic oligonucleotide; TTT chr11 5171294 5171315 5171311 5171316 +
gaaaacgtcatggtgatacttc

SEQ ID NO: 74257 - DNA, 22 bp, Artificial Sequence
  Synthetic oligonucleotide; TTG chr11 5171295 5171316 5171312 5171317 +
aaaacgtcatggtgatacttcc

SEQ ID NO: 74258 - DNA, 22 bp, Artificial Sequence
  Synthetic oligonucleotide; CTT chr11 5171315 5171336 5171332 5171337 +
cctctgaagatattgagaagca

SEQ ID NO: 74259 - DNA, 22 bp, Artificial Sequence
  Synthetic oligonucleotide; TTC chr11 5171316 5171337 5171333 5171338 +
ctctgaagatattgagaagcac

SEQ ID NO: 74260 - DNA, 22 bp, Artificial Sequence
  Synthetic oligonucleotide; CTC chr11 5171319 5171340 5171336 5171341 +
tgaagatattgagaagcacatg

SEQ ID NO: 74261 - DNA, 22 bp, Artificial Sequence
  Synthetic oligonucleotide; CTG chr11 5171321 5171342 5171338 5171343 +
aagatattgagaagcacatgga

SEQ ID NO: 74262 - DNA, 22 bp, Artificial Sequence
  Synthetic oligonucleotide; TTG chr11 5171330 5171351 5171347 5171352 +
agaagcacatggagactggaat

SEQ ID NO: 74263 - DNA, 22 bp, Artificial Sequence
  Synthetic oligonucleotide; CTG chr11 5171348 5171369 5171365 5171370 +
gaatatataagtttctactcag

SEQ ID NO: 74264 - DNA, 22 bp, Artificial Sequence
  Synthetic oligonucleotide; TTT chr11 5171362 5171383 5171379 5171384 +
ctactcagttattgcacatcaa

SEQ ID NO: 74265 - DNA, 22 bp, Artificial Sequence
  Synthetic oligonucleotide; TTC chr11 5171363 5171384 5171380 5171385 +
tactcagttattgcacatcaag

SEQ ID NO: 74266 - DNA, 22 bp, Artificial Sequence
  Synthetic oligonucleotide; CTA chr11 5171365 5171386 5171382 5171387 +
ctcagttattgcacatcaagtt

SEQ ID NO: 74267 - DNA, 22 bp, Artificial Sequence
  Synthetic oligonucleotide; CTC chr11 5171368 5171389 5171385 5171390 +
agttattgcacatcaagttctg

SEQ ID NO: 74268 - DNA, 22 bp, Artificial Sequence
  Synthetic oligonucleotide; TTA chr11 5171373 5171394 5171390 5171395 +
ttgcacatcaagttctgagcta

SEQ ID NO: 74269 - DNA, 22 bp, Artificial Sequence
  Synthetic oligonucleotide; TTG chr11 5171376 5171397 5171393 5171398 +
cacatcaagttctgagctaaca

SEQ ID NO: 74270 - DNA, 22 bp, Artificial Sequence
  Synthetic oligonucleotide; TTC chr11 5171388 5171409 5171405 5171410 +
tgagctaacagtcatatctaag

SEQ ID NO: 74271 - DNA, 22 bp, Artificial Sequence
  Synthetic oligonucleotide; CTG chr11 5171390 5171411 5171407 5171412 +
agctaacagtcatatctaagac

SEQ ID NO: 74272 - DNA, 22 bp, Artificial Sequence
  Synthetic oligonucleotide; CTA chr11 5171395 5171416 5171412 5171417 +
acagtcatatctaagacatttc

SEQ ID NO: 74273 - DNA, 22 bp, Artificial Sequence
  Synthetic oligonucleotide; CTA chr11 5171408 5171429 5171425 5171430 +
agacatttcctcagaaaaaggg

SEQ ID NO: 74274 - DNA, 22 bp, Artificial Sequence
  Synthetic oligonucleotide; TTT chr11 5171416 5171437 5171433 5171438 +
cctcagaaaaagggataaaaaa

SEQ ID NO: 74275 - DNA, 22 bp, Artificial Sequence
  Synthetic oligonucleotide; TTC chr11 5171417 5171438 5171434 5171439 +
ctcagaaaaagggataaaaaat

SEQ ID NO: 74276 - DNA, 22 bp, Artificial Sequence
  Synthetic oligonucleotide; CTC chr11 5171420 5171441 5171437 5171442 +
agaaaaagggataaaaaattta

SEQ ID NO: 74277 - DNA, 22 bp, Artificial Sequence
  Synthetic oligonucleotide; TTT chr11 5171441 5171462 5171458 5171463 +
atttctgaaacaagggcacagg

SEQ ID NO: 74278 - DNA, 22 bp, Artificial Sequence
  Synthetic oligonucleotide; TTA chr11 5171442 5171463 5171459 5171464 +
tttctgaaacaagggcacaggt

SEQ ID NO: 74279 - DNA, 22 bp, Artificial Sequence
  Synthetic oligonucleotide; TTT chr11 5171445 5171466 5171462 5171467 +
ctgaaacaagggcacaggtaag

SEQ ID NO: 74280 - DNA, 22 bp, Artificial Sequence
  Synthetic oligonucleotide; TTC chr11 5171446 5171467 5171463 5171468 +
tgaaacaagggcacaggtaagc

SEQ ID NO: 74281 - DNA, 22 bp, Artificial Sequence
  Synthetic oligonucleotide; CTG chr11 5171448 5171469 5171465 5171470 +
aaacaagggcacaggtaagcca

SEQ ID NO: 74282 - DNA, 22 bp, Artificial Sequence
  Synthetic oligonucleotide; CTA chr11 5171492 5171513 5171509 5171514 +
atgggtcatgcagaaaagtatt

SEQ ID NO: 74283 - DNA, 22 bp, Artificial Sequence
  Synthetic oligonucleotide; TTC chr11 5171515 5171536 5171532 5171537 +
caacatagcctatatgccagat

SEQ ID NO: 74284 - DNA, 22 bp, Artificial Sequence
  Synthetic oligonucleotide; CTA chr11 5171527 5171548 5171544 5171549 +
tatgccagataaggcattaata

SEQ ID NO: 74285 - DNA, 22 bp, Artificial Sequence
  Synthetic oligonucleotide; TTA chr11 5171546 5171567 5171563 5171568 +
atagaaatctcaagttgggtca

SEQ ID NO: 74286 - DNA, 22 bp, Artificial Sequence
  Synthetic oligonucleotide; CTC chr11 5171557 5171578 5171574 5171579 +
aagttgggtcatctatggcagt

SEQ ID NO: 74287 - DNA, 22 bp, Artificial Sequence
  Synthetic oligonucleotide; TTG chr11 5171563 5171584 5171580 5171585 +
ggtcatctatggcagtgaaaaa

SEQ ID NO: 74288 - DNA, 22 bp, Artificial Sequence
  Synthetic oligonucleotide; CTA chr11 5171572 5171593 5171589 5171594 +
tggcagtgaaaaacagttaaaa

SEQ ID NO: 74289 - DNA, 22 bp, Artificial Sequence
  Synthetic oligonucleotide; TTA chr11 5171591 5171612 5171608 5171613 +
aaataagcatagagatgacaga

SEQ ID NO: 74290 - DNA, 22 bp, Artificial Sequence
  Synthetic oligonucleotide; TTC chr11 5171616 5171637 5171633 5171638 +
acatggaaattatgactgaaga

SEQ ID NO: 74291 - DNA, 22 bp, Artificial Sequence
  Synthetic oligonucleotide; TTA chr11 5171628 5171649 5171645 5171650 +
tgactgaagaaactgctaactt

SEQ ID NO: 74292 - DNA, 22 bp, Artificial Sequence
  Synthetic oligonucleotide; CTG chr11 5171634 5171655 5171651 5171656 +
aagaaactgctaacttgtagtg

SEQ ID NO: 74293 - DNA, 22 bp, Artificial Sequence
  Synthetic oligonucleotide; CTG chr11 5171643 5171664 5171660 5171665 +
ctaacttgtagtgtttataaag

SEQ ID NO: 74294 - DNA, 22 bp, Artificial Sequence
  Synthetic oligonucleotide; CTA chr11 5171646 5171667 5171663 5171668 +
acttgtagtgtttataaagaga

SEQ ID NO: 74295 - DNA, 22 bp, Artificial Sequence
  Synthetic oligonucleotide; CTT chr11 5171650 5171671 5171667 5171672 +
gtagtgtttataaagagagtag

SEQ ID NO: 74296 - DNA, 22 bp, Artificial Sequence
  Synthetic oligonucleotide; TTG chr11 5171651 5171672 5171668 5171673 +
tagtgtttataaagagagtaga

SEQ ID NO: 74297 - DNA, 22 bp, Artificial Sequence
  Synthetic oligonucleotide; TTT chr11 5171659 5171680 5171676 5171681 +
ataaagagagtagatgaatagc

SEQ ID NO: 74298 - DNA, 22 bp, Artificial Sequence
  Synthetic oligonucleotide; TTA chr11 5171660 5171681 5171677 5171682 +
taaagagagtagatgaatagct

SEQ ID NO: 74299 - DNA, 22 bp, Artificial Sequence
  Synthetic oligonucleotide; CTA chr11 5171683 5171704 5171700 5171705 +
aagtaatataacactaataaag

SEQ ID NO: 74300 - DNA, 22 bp, Artificial Sequence
  Synthetic oligonucleotide; CTA chr11 5171699 5171720 5171716 5171721 +
ataaagagtattgatggttcta

SEQ ID NO: 74301 - DNA, 22 bp, Artificial Sequence
  Synthetic oligonucleotide; TTG chr11 5171712 5171733 5171729 5171734 +
atggttctaacatttaattgac

SEQ ID NO: 74302 - DNA, 22 bp, Artificial Sequence
  Synthetic oligonucleotide; TTC chr11 5171719 5171740 5171736 5171741 +
taacatttaattgacgtgtaat

SEQ ID NO: 74303 - DNA, 22 bp, Artificial Sequence
  Synthetic oligonucleotide; CTA chr11 5171721 5171742 5171738 5171743 +
acatttaattgacgtgtaatct

SEQ ID NO: 74304 - DNA, 22 bp, Artificial Sequence
  Synthetic oligonucleotide; TTT chr11 5171727 5171748 5171744 5171749 +
aattgacgtgtaatcttgggat

SEQ ID NO: 74305 - DNA, 22 bp, Artificial Sequence
  Synthetic oligonucleotide; TTA chr11 5171728 5171749 5171745 5171750 +
attgacgtgtaatcttgggatt

SEQ ID NO: 74306 - DNA, 22 bp, Artificial Sequence
  Synthetic oligonucleotide; TTG chr11 5171732 5171753 5171749 5171754 +
acgtgtaatcttgggattatat

SEQ ID NO: 74307 - DNA, 22 bp, Artificial Sequence
  Synthetic oligonucleotide; CTT chr11 5171744 5171765 5171761 5171766 +
gggattatattaaagttgattt

SEQ ID NO: 74308 - DNA, 22 bp, Artificial Sequence
  Synthetic oligonucleotide; TTG chr11 5171745 5171766 5171762 5171767 +
ggattatattaaagttgattta

SEQ ID NO: 74309 - DNA, 22 bp, Artificial Sequence
  Synthetic oligonucleotide; TTA chr11 5171751 5171772 5171768 5171773 +
tattaaagttgatttatattgc

SEQ ID NO: 74310 - DNA, 22 bp, Artificial Sequence
  Synthetic oligonucleotide; TTA chr11 5171756 5171777 5171773 5171778 +
aagttgatttatattgcaagtt

SEQ ID NO: 74311 - DNA, 22 bp, Artificial Sequence
  Synthetic oligonucleotide; TTG chr11 5171762 5171783 5171779 5171784 +
atttatattgcaagttatctga

SEQ ID NO: 74312 - DNA, 22 bp, Artificial Sequence
  Synthetic oligonucleotide; TTT chr11 5171766 5171787 5171783 5171788 +
atattgcaagttatctgagacc

SEQ ID NO: 74313 - DNA, 22 bp, Artificial Sequence
  Synthetic oligonucleotide; TTA chr11 5171767 5171788 5171784 5171789 +
tattgcaagttatctgagaccc

SEQ ID NO: 74314 - DNA, 22 bp, Artificial Sequence
  Synthetic oligonucleotide; TTG chr11 5171772 5171793 5171789 5171794 +
caagttatctgagacccagata

SEQ ID NO: 74315 - DNA, 22 bp, Artificial Sequence
  Synthetic oligonucleotide; TTA chr11 5171779 5171800 5171796 5171801 +
tctgagacccagatatttgcta

SEQ ID NO: 74316 - DNA, 22 bp, Artificial Sequence
  Synthetic oligonucleotide; CTG chr11 5171783 5171804 5171800 5171805 +
agacccagatatttgctataaa

SEQ ID NO: 74317 - DNA, 22 bp, Artificial Sequence
  Synthetic oligonucleotide; TTT chr11 5171797 5171818 5171814 5171819 +
gctataaagacaataatagtat

SEQ ID NO: 74318 - DNA, 22 bp, Artificial Sequence
  Synthetic oligonucleotide; TTG chr11 5171798 5171819 5171815 5171820 +
ctataaagacaataatagtatt

SEQ ID NO: 74319 - DNA, 22 bp, Artificial Sequence
  Synthetic oligonucleotide; CTA chr11 5171801 5171822 5171818 5171823 +
taaagacaataatagtatttta

SEQ ID NO: 74320 - DNA, 22 bp, Artificial Sequence
  Synthetic oligonucleotide; TTT chr11 5171821 5171842 5171838 5171843 +
taaagtaatatttatatattgt

SEQ ID NO: 74321 - DNA, 22 bp, Artificial Sequence
  Synthetic oligonucleotide; TTT chr11 5171822 5171843 5171839 5171844 +
aaagtaatatttatatattgtt

SEQ ID NO: 74322 - DNA, 22 bp, Artificial Sequence
  Synthetic oligonucleotide; TTA chr11 5171823 5171844 5171840 5171845 +
aagtaatatttatatattgttt

SEQ ID NO: 74323 - DNA, 22 bp, Artificial Sequence
  Synthetic oligonucleotide; TTT chr11 5171834 5171855 5171851 5171856 +
atatattgtttatcattatatg

SEQ ID NO: 74324 - DNA, 22 bp, Artificial Sequence
  Synthetic oligonucleotide; TTA chr11 5171835 5171856 5171852 5171857 +
tatattgtttatcattatatgt

SEQ ID NO: 74325 - DNA, 22 bp, Artificial Sequence
  Synthetic oligonucleotide; TTG chr11 5171842 5171863 5171859 5171864 +
tttatcattatatgtggaatat

SEQ ID NO: 74326 - DNA, 22 bp, Artificial Sequence
  Synthetic oligonucleotide; TTT chr11 5171845 5171866 5171862 5171867 +
atcattatatgtggaatatagt

SEQ ID NO: 74327 - DNA, 22 bp, Artificial Sequence
  Synthetic oligonucleotide; TTA chr11 5171846 5171867 5171863 5171868 +
tcattatatgtggaatatagta

SEQ ID NO: 74328 - DNA, 22 bp, Artificial Sequence
  Synthetic oligonucleotide; TTA chr11 5171852 5171873 5171869 5171874 +
tatgtggaatatagtaaatatt

SEQ ID NO: 74329 - DNA, 22 bp, Artificial Sequence
  Synthetic oligonucleotide; TTA chr11 5171875 5171896 5171892 5171897 +
aatgtatagaataaaaagaaca

SEQ ID NO: 74330 - DNA, 22 bp, Artificial Sequence
  Synthetic oligonucleotide; TTT chr11 5171901 5171922 5171918 5171923 +
aatatattagaacacaaggata

SEQ ID NO: 74331 - DNA, 22 bp, Artificial Sequence
  Synthetic oligonucleotide; TTA chr11 5171902 5171923 5171919 5171924 +
atatattagaacacaaggatag

SEQ ID NO: 74332 - DNA, 22 bp, Artificial Sequence
  Synthetic oligonucleotide; TTA chr11 5171910 5171931 5171927 5171932 +
gaacacaaggatagtttctcct

SEQ ID NO: 74333 - DNA, 22 bp, Artificial Sequence
  Synthetic oligonucleotide; TTT chr11 5171927 5171948 5171944 5171949 +
ctcctagaataaagtattttcc

SEQ ID NO: 74334 - DNA, 22 bp, Artificial Sequence
  Synthetic oligonucleotide; TTC chr11 5171928 5171949 5171945 5171950 +
tcctagaataaagtattttcca

SEQ ID NO: 74335 - DNA, 22 bp, Artificial Sequence
  Synthetic oligonucleotide; CTC chr11 5171930 5171951 5171947 5171952 +
ctagaataaagtattttccatt

SEQ ID NO: 74336 - DNA, 22 bp, Artificial Sequence
  Synthetic oligonucleotide; CTA chr11 5171933 5171954 5171950 5171955 +
gaataaagtattttccattttt

SEQ ID NO: 74337 - DNA, 22 bp, Artificial Sequence
  Synthetic oligonucleotide; TTT chr11 5171946 5171967 5171963 5171968 +
tccatttttttctttaacttac

SEQ ID NO: 74338 - DNA, 22 bp, Artificial Sequence
  Synthetic oligonucleotide; TTT chr11 5171947 5171968 5171964 5171969 +
ccatttttttctttaacttacc

SEQ ID NO: 74339 - DNA, 22 bp, Artificial Sequence
  Synthetic oligonucleotide; TTC chr11 5171948 5171969 5171965 5171970 +
catttttttctttaacttacca

SEQ ID NO: 74340 - DNA, 22 bp, Artificial Sequence
  Synthetic oligonucleotide; TTT chr11 5171953 5171974 5171970 5171975 +
ttttctttaacttaccagttca

SEQ ID NO: 74341 - DNA, 22 bp, Artificial Sequence
  Synthetic oligonucleotide; TTT chr11 5171954 5171975 5171971 5171976 +
tttctttaacttaccagttcac

SEQ ID NO: 74342 - DNA, 22 bp, Artificial Sequence
  Synthetic oligonucleotide; TTT chr11 5171955 5171976 5171972 5171977 +
ttctttaacttaccagttcact

SEQ ID NO: 74343 - DNA, 22 bp, Artificial Sequence
  Synthetic oligonucleotide; TTT chr11 5171956 5171977 5171973 5171978 +
tctttaacttaccagttcactc

SEQ ID NO: 74344 - DNA, 22 bp, Artificial Sequence
  Synthetic oligonucleotide; TTT chr11 5171957 5171978 5171974 5171979 +
ctttaacttaccagttcactct

SEQ ID NO: 74345 - DNA, 22 bp, Artificial Sequence
  Synthetic oligonucleotide; TTC chr11 5171958 5171979 5171975 5171980 +
tttaacttaccagttcactctt

SEQ ID NO: 74346 - DNA, 22 bp, Artificial Sequence
  Synthetic oligonucleotide; CTT chr11 5171960 5171981 5171977 5171982 +
taacttaccagttcactctttc

SEQ ID NO: 74347 - DNA, 22 bp, Artificial Sequence
  Synthetic oligonucleotide; TTT chr11 5171961 5171982 5171978 5171983 +
aacttaccagttcactctttct

SEQ ID NO: 74348 - DNA, 22 bp, Artificial Sequence
  Synthetic oligonucleotide; TTA chr11 5171962 5171983 5171979 5171984 +
acttaccagttcactctttctc

SEQ ID NO: 74349 - DNA, 22 bp, Artificial Sequence
  Synthetic oligonucleotide; CTT chr11 5171966 5171987 5171983 5171988 +
accagttcactctttctccacc

SEQ ID NO: 74350 - DNA, 22 bp, Artificial Sequence
  Synthetic oligonucleotide; TTA chr11 5171967 5171988 5171984 5171989 +
ccagttcactctttctccacct

SEQ ID NO: 74351 - DNA, 22 bp, Artificial Sequence
  Synthetic oligonucleotide; TTC chr11 5171974 5171995 5171991 5171996 +
actctttctccacctgctatcc

SEQ ID NO: 74352 - DNA, 22 bp, Artificial Sequence
  Synthetic oligonucleotide; CTC chr11 5171978 5171999 5171995 5172000 +
tttctccacctgctatccatag

SEQ ID NO: 74353 - DNA, 22 bp, Artificial Sequence
  Synthetic oligonucleotide; CTT chr11 5171980 5172001 5171997 5172002 +
tctccacctgctatccatagat

SEQ ID NO: 74354 - DNA, 22 bp, Artificial Sequence
  Synthetic oligonucleotide; TTT chr11 5171981 5172002 5171998 5172003 +
ctccacctgctatccatagatt

SEQ ID NO: 74355 - DNA, 22 bp, Artificial Sequence
  Synthetic oligonucleotide; TTC chr11 5171982 5172003 5171999 5172004 +
tccacctgctatccatagatta

SEQ ID NO: 74356 - DNA, 22 bp, Artificial Sequence
  Synthetic oligonucleotide; CTC chr11 5171984 5172005 5172001 5172006 +
cacctgctatccatagattaga

SEQ ID NO: 74357 - DNA, 22 bp, Artificial Sequence
  Synthetic oligonucleotide; CTG chr11 5171990 5172011 5172007 5172012 +
ctatccatagattagaaaagct

SEQ ID NO: 74358 - DNA, 22 bp, Artificial Sequence
  Synthetic oligonucleotide; CTA chr11 5171993 5172014 5172010 5172015 +
tccatagattagaaaagctcct

SEQ ID NO: 74359 - DNA, 22 bp, Artificial Sequence
  Synthetic oligonucleotide; TTA chr11 5172004 5172025 5172021 5172026 +
gaaaagctcctctgtattttgc

SEQ ID NO: 74360 - DNA, 22 bp, Artificial Sequence
  Synthetic oligonucleotide; CTC chr11 5172013 5172034 5172030 5172035 +
ctctgtattttgcagaagggtc

SEQ ID NO: 74361 - DNA, 22 bp, Artificial Sequence
  Synthetic oligonucleotide; CTC chr11 5172016 5172037 5172033 5172038 +
tgtattttgcagaagggtcagt

SEQ ID NO: 74362 - DNA, 22 bp, Artificial Sequence
  Synthetic oligonucleotide; CTG chr11 5172018 5172039 5172035 5172040 +
tattttgcagaagggtcagtct

SEQ ID NO: 74363 - DNA, 22 bp, Artificial Sequence
  Synthetic oligonucleotide; TTT chr11 5172023 5172044 5172040 5172045 +
tgcagaagggtcagtcttctgc

SEQ ID NO: 74364 - DNA, 22 bp, Artificial Sequence
  Synthetic oligonucleotide; TTT chr11 5172024 5172045 5172041 5172046 +
gcagaagggtcagtcttctgct

SEQ ID NO: 74365 - DNA, 22 bp, Artificial Sequence
  Synthetic oligonucleotide; TTG chr11 5172025 5172046 5172042 5172047 +
cagaagggtcagtcttctgctg

SEQ ID NO: 74366 - DNA, 22 bp, Artificial Sequence
  Synthetic oligonucleotide; CTT chr11 5172041 5172062 5172058 5172063 +
ctgctggaaccgggtcagggag

SEQ ID NO: 74367 - DNA, 22 bp, Artificial Sequence
  Synthetic oligonucleotide; TTC chr11 5172042 5172063 5172059 5172064 +
tgctggaaccgggtcagggagc

SEQ ID NO: 74368 - DNA, 22 bp, Artificial Sequence
  Synthetic oligonucleotide; CTG chr11 5172044 5172065 5172061 5172066 +
ctggaaccgggtcagggagcaa

SEQ ID NO: 74369 - DNA, 22 bp, Artificial Sequence
  Synthetic oligonucleotide; CTG chr11 5172047 5172068 5172064 5172069 +
gaaccgggtcagggagcaagat

SEQ ID NO: 74370 - DNA, 22 bp, Artificial Sequence
  Synthetic oligonucleotide; CTC chr11 5172087 5172108 5172104 5172109 +
acaagtcacatgtgatggtggg

SEQ ID NO: 74371 - DNA, 22 bp, Artificial Sequence
  Synthetic oligonucleotide; CTA chr11 5172113 5172134 5172130 5172135 +
gggtacaggcttagagatattt

SEQ ID NO: 74372 - DNA, 22 bp, Artificial Sequence
  Synthetic oligonucleotide; CTT chr11 5172125 5172146 5172142 5172147 +
agagatatttatctgggaacaa

SEQ ID NO: 74373 - DNA, 22 bp, Artificial Sequence
  Synthetic oligonucleotide; TTA chr11 5172126 5172147 5172143 5172148 +
gagatatttatctgggaacaag

SEQ ID NO: 74374 - DNA, 22 bp, Artificial Sequence
  Synthetic oligonucleotide; TTT chr11 5172135 5172156 5172152 5172157 +
atctgggaacaagtttattaac

SEQ ID NO: 74375 - DNA, 22 bp, Artificial Sequence
  Synthetic oligonucleotide; TTA chr11 5172136 5172157 5172153 5172158 +
tctgggaacaagtttattaaca

SEQ ID NO: 74376 - DNA, 22 bp, Artificial Sequence
  Synthetic oligonucleotide; CTG chr11 5172140 5172161 5172157 5172162 +
ggaacaagtttattaacactaa

SEQ ID NO: 74377 - DNA, 22 bp, Artificial Sequence
  Synthetic oligonucleotide; TTT chr11 5172151 5172172 5172168 5172173 +
attaacactaaagttccactta

SEQ ID NO: 74378 - DNA, 22 bp, Artificial Sequence
  Synthetic oligonucleotide; TTA chr11 5172152 5172173 5172169 5172174 +
ttaacactaaagttccacttat

SEQ ID NO: 74379 - DNA, 22 bp, Artificial Sequence
  Synthetic oligonucleotide; TTA chr11 5172155 5172176 5172172 5172177 +
acactaaagttccacttatctg

SEQ ID NO: 74380 - DNA, 22 bp, Artificial Sequence
  Synthetic oligonucleotide; CTA chr11 5172161 5172182 5172178 5172183 +
aagttccacttatctgcagcag

SEQ ID NO: 74381 - DNA, 22 bp, Artificial Sequence
  Synthetic oligonucleotide; TTC chr11 5172167 5172188 5172184 5172189 +
cacttatctgcagcagagcctt

SEQ ID NO: 74382 - DNA, 22 bp, Artificial Sequence
  Synthetic oligonucleotide; CTT chr11 5172172 5172193 5172189 5172194 +
atctgcagcagagccttaggta

SEQ ID NO: 74383 - DNA, 22 bp, Artificial Sequence
  Synthetic oligonucleotide; TTA chr11 5172173 5172194 5172190 5172195 +
tctgcagcagagccttaggtat

SEQ ID NO: 74384 - DNA, 22 bp, Artificial Sequence
  Synthetic oligonucleotide; CTG chr11 5172177 5172198 5172194 5172199 +
cagcagagccttaggtattaac

SEQ ID NO: 74385 - DNA, 22 bp, Artificial Sequence
  Synthetic oligonucleotide; CTT chr11 5172189 5172210 5172206 5172211 +
aggtattaacgttggaggccag

SEQ ID NO: 74386 - DNA, 22 bp, Artificial Sequence
  Synthetic oligonucleotide; TTA chr11 5172190 5172211 5172207 5172212 +
ggtattaacgttggaggccaga

SEQ ID NO: 74387 - DNA, 22 bp, Artificial Sequence
  Synthetic oligonucleotide; TTA chr11 5172197 5172218 5172214 5172219 +
acgttggaggccagaaatggaa

SEQ ID NO: 74388 - DNA, 22 bp, Artificial Sequence
  Synthetic oligonucleotide; TTG chr11 5172203 5172224 5172220 5172225 +
gaggccagaaatggaattcagg

SEQ ID NO: 74389 - DNA, 22 bp, Artificial Sequence
  Synthetic oligonucleotide; TTC chr11 5172222 5172243 5172239 5172244 +
aggatggggctcagaaataaga

SEQ ID NO: 74390 - DNA, 22 bp, Artificial Sequence
  Synthetic oligonucleotide; CTC chr11 5172234 5172255 5172251 5172256 +
agaaataagaatgtgaccaagg

SEQ ID NO: 74391 - DNA, 22 bp, Artificial Sequence
  Synthetic oligonucleotide; CTG chr11 5172259 5172280 5172276 5172281 +
aactcttcttcccgtgttgggc

SEQ ID NO: 74392 - DNA, 22 bp, Artificial Sequence
  Synthetic oligonucleotide; CTC chr11 5172264 5172285 5172281 5172286 +
ttcttcccgtgttgggccaggg

SEQ ID NO: 74393 - DNA, 22 bp, Artificial Sequence
  Synthetic oligonucleotide; CTT chr11 5172266 5172287 5172283 5172288 +
cttcccgtgttgggccagggct

SEQ ID NO: 74394 - DNA, 22 bp, Artificial Sequence
  Synthetic oligonucleotide; TTC chr11 5172267 5172288 5172284 5172289 +
ttcccgtgttgggccagggctc

SEQ ID NO: 74395 - DNA, 22 bp, Artificial Sequence
  Synthetic oligonucleotide; CTT chr11 5172269 5172290 5172286 5172291 +
cccgtgttgggccagggctctt

SEQ ID NO: 74396 - DNA, 22 bp, Artificial Sequence
  Synthetic oligonucleotide; TTC chr11 5172270 5172291 5172287 5172292 +
ccgtgttgggccagggctcttc

SEQ ID NO: 74397 - DNA, 22 bp, Artificial Sequence
  Synthetic oligonucleotide; TTG chr11 5172278 5172299 5172295 5172300 +
ggccagggctcttcgttaggca

SEQ ID NO: 74398 - DNA, 22 bp, Artificial Sequence
  Synthetic oligonucleotide; CTC chr11 5172289 5172310 5172306 5172311 +
ttcgttaggcataatcagtggg

SEQ ID NO: 74399 - DNA, 22 bp, Artificial Sequence
  Synthetic oligonucleotide; CTT chr11 5172291 5172312 5172308 5172313 +
cgttaggcataatcagtgggat

SEQ ID NO: 74400 - DNA, 22 bp, Artificial Sequence
  Synthetic oligonucleotide; TTC chr11 5172292 5172313 5172309 5172314 +
gttaggcataatcagtgggata

SEQ ID NO: 74401 - DNA, 22 bp, Artificial Sequence
  Synthetic oligonucleotide; TTA chr11 5172296 5172317 5172313 5172318 +
ggcataatcagtgggatagtaa

SEQ ID NO: 74402 - DNA, 22 bp, Artificial Sequence
  Synthetic oligonucleotide; TTT chr11 5172327 5172348 5172344 5172349 +
ccaaataaaaatgccctgattt

SEQ ID NO: 74403 - DNA, 22 bp, Artificial Sequence
  Synthetic oligonucleotide; TTC chr11 5172328 5172349 5172345 5172350 +
caaataaaaatgccctgatttt

SEQ ID NO: 74404 - DNA, 22 bp, Artificial Sequence
  Synthetic oligonucleotide; CTG chr11 5172345 5172366 5172362 5172367 +
atttttaccagttaccgatttt

SEQ ID NO: 74405 - DNA, 22 bp, Artificial Sequence
  Synthetic oligonucleotide; TTT chr11 5172349 5172370 5172366 5172371 +
ttaccagttaccgattttttgt

SEQ ID NO: 74406 - DNA, 22 bp, Artificial Sequence
  Synthetic oligonucleotide; TTT chr11 5172350 5172371 5172367 5172372 +
taccagttaccgattttttgtg

SEQ ID NO: 74407 - DNA, 22 bp, Artificial Sequence
  Synthetic oligonucleotide; TTT chr11 5172351 5172372 5172368 5172373 +
accagttaccgattttttgtgt

SEQ ID NO: 74408 - DNA, 22 bp, Artificial Sequence
  Synthetic oligonucleotide; TTA chr11 5172352 5172373 5172369 5172374 +
ccagttaccgattttttgtgtt

SEQ ID NO: 74409 - DNA, 22 bp, Artificial Sequence
  Synthetic oligonucleotide; TTA chr11 5172359 5172380 5172376 5172381 +
ccgattttttgtgttttaatga

SEQ ID NO: 74410 - DNA, 22 bp, Artificial Sequence
  Synthetic oligonucleotide; TTT chr11 5172366 5172387 5172383 5172388 +
tttgtgttttaatgactcctac

SEQ ID NO: 74411 - DNA, 22 bp, Artificial Sequence
  Synthetic oligonucleotide; TTT chr11 5172367 5172388 5172384 5172389 +
ttgtgttttaatgactcctacc

SEQ ID NO: 74412 - DNA, 22 bp, Artificial Sequence
  Synthetic oligonucleotide; TTT chr11 5172368 5172389 5172385 5172390 +
tgtgttttaatgactcctacca

SEQ ID NO: 74413 - DNA, 22 bp, Artificial Sequence
  Synthetic oligonucleotide; TTT chr11 5172369 5172390 5172386 5172391 +
gtgttttaatgactcctaccat

SEQ ID NO: 74414 - DNA, 22 bp, Artificial Sequence
  Synthetic oligonucleotide; TTG chr11 5172370 5172391 5172387 5172392 +
tgttttaatgactcctaccatg

SEQ ID NO: 74415 - DNA, 22 bp, Artificial Sequence
  Synthetic oligonucleotide; TTT chr11 5172375 5172396 5172392 5172397 +
taatgactcctaccatgatcaa

SEQ ID NO: 74416 - DNA, 22 bp, Artificial Sequence
  Synthetic oligonucleotide; TTT chr11 5172376 5172397 5172393 5172398 +
aatgactcctaccatgatcaat

SEQ ID NO: 74417 - DNA, 22 bp, Artificial Sequence
  Synthetic oligonucleotide; TTA chr11 5172377 5172398 5172394 5172399 +
atgactcctaccatgatcaatt

SEQ ID NO: 74418 - DNA, 22 bp, Artificial Sequence
  Synthetic oligonucleotide; CTC chr11 5172384 5172405 5172401 5172406 +
ctaccatgatcaatttcagact

SEQ ID NO: 74419 - DNA, 22 bp, Artificial Sequence
  Synthetic oligonucleotide; CTA chr11 5172387 5172408 5172404 5172409 +
ccatgatcaatttcagactacc

SEQ ID NO: 74420 - DNA, 22 bp, Artificial Sequence
  Synthetic oligonucleotide; TTT chr11 5172400 5172421 5172417 5172422 +
cagactaccaaagagatgctat

SEQ ID NO: 74421 - DNA, 22 bp, Artificial Sequence
  Synthetic oligonucleotide; TTC chr11 5172401 5172422 5172418 5172423 +
agactaccaaagagatgctatt

SEQ ID NO: 74422 - DNA, 22 bp, Artificial Sequence
  Synthetic oligonucleotide; CTA chr11 5172407 5172428 5172424 5172429 +
ccaaagagatgctattaaatgc

SEQ ID NO: 74423 - DNA, 22 bp, Artificial Sequence
  Synthetic oligonucleotide; CTA chr11 5172421 5172442 5172438 5172443 +
ttaaatgcagagctgagatgag

SEQ ID NO: 74424 - DNA, 22 bp, Artificial Sequence
  Synthetic oligonucleotide; TTA chr11 5172424 5172445 5172441 5172446 +
aatgcagagctgagatgagcat

SEQ ID NO: 74425 - DNA, 22 bp, Artificial Sequence
  Synthetic oligonucleotide; CTG chr11 5172436 5172457 5172453 5172458 +
agatgagcataatcagctttcc

SEQ ID NO: 74426 - DNA, 22 bp, Artificial Sequence
  Synthetic oligonucleotide; CTT chr11 5172455 5172476 5172472 5172477 +
tcctaagctggtgcaagccagc

SEQ ID NO: 74427 - DNA, 22 bp, Artificial Sequence
  Synthetic oligonucleotide; TTT chr11 5172456 5172477 5172473 5172478 +
cctaagctggtgcaagccagca

SEQ ID NO: 74428 - DNA, 22 bp, Artificial Sequence
  Synthetic oligonucleotide; TTC chr11 5172457 5172478 5172474 5172479 +
ctaagctggtgcaagccagcac

SEQ ID NO: 74429 - DNA, 22 bp, Artificial Sequence
  Synthetic oligonucleotide; CTA chr11 5172460 5172481 5172477 5172482 +
agctggtgcaagccagcacatt

SEQ ID NO: 74430 - DNA, 22 bp, Artificial Sequence
  Synthetic oligonucleotide; CTG chr11 5172465 5172486 5172482 5172487 +
gtgcaagccagcacattatacc

SEQ ID NO: 74431 - DNA, 22 bp, Artificial Sequence
  Synthetic oligonucleotide; TTA chr11 5172483 5172504 5172500 5172505 +
taccattaggcataactatagt

SEQ ID NO: 74432 - DNA, 22 bp, Artificial Sequence
  Synthetic oligonucleotide; TTA chr11 5172491 5172512 5172508 5172513 +
ggcataactatagttgatccta

SEQ ID NO: 74433 - DNA, 22 bp, Artificial Sequence
  Synthetic oligonucleotide; CTA chr11 5172501 5172522 5172518 5172523 +
tagttgatcctagacctcagat

SEQ ID NO: 74434 - DNA, 22 bp, Artificial Sequence
  Synthetic oligonucleotide; TTG chr11 5172507 5172528 5172524 5172529 +
atcctagacctcagatacttac

SEQ ID NO: 74435 - DNA, 22 bp, Artificial Sequence
  Synthetic oligonucleotide; CTA chr11 5172513 5172534 5172530 5172535 +
gacctcagatacttacctaggt

SEQ ID NO: 74436 - DNA, 22 bp, Artificial Sequence
  Synthetic oligonucleotide; CTC chr11 5172519 5172540 5172536 5172541 +
agatacttacctaggtggaact

SEQ ID NO: 74437 - DNA, 22 bp, Artificial Sequence
  Synthetic oligonucleotide; CTT chr11 5172527 5172548 5172544 5172549 +
acctaggtggaactgagagcta

SEQ ID NO: 74438 - DNA, 22 bp, Artificial Sequence
  Synthetic oligonucleotide; TTA chr11 5172528 5172549 5172545 5172550 +
cctaggtggaactgagagctac

SEQ ID NO: 74439 - DNA, 22 bp, Artificial Sequence
  Synthetic oligonucleotide; CTA chr11 5172532 5172553 5172549 5172554 +
ggtggaactgagagctaccaca

SEQ ID NO: 74440 - DNA, 22 bp, Artificial Sequence
  Synthetic oligonucleotide; CTG chr11 5172542 5172563 5172559 5172564 +
agagctaccacatcaatccatg

SEQ ID NO: 74441 - DNA, 22 bp, Artificial Sequence
  Synthetic oligonucleotide; CTA chr11 5172549 5172570 5172566 5172571 +
ccacatcaatccatgcatacta

SEQ ID NO: 74442 - DNA, 22 bp, Artificial Sequence
  Synthetic oligonucleotide; CTA chr11 5172571 5172592 5172588 5172593 +
tttgttactgtttactttcaac

SEQ ID NO: 74443 - DNA, 22 bp, Artificial Sequence
  Synthetic oligonucleotide; TTT chr11 5172574 5172595 5172591 5172596 +
gttactgtttactttcaactgg

SEQ ID NO: 74444 - DNA, 22 bp, Artificial Sequence
  Synthetic oligonucleotide; TTG chr11 5172575 5172596 5172592 5172597 +
ttactgtttactttcaactggg

SEQ ID NO: 74445 - DNA, 22 bp, Artificial Sequence
  Synthetic oligonucleotide; TTA chr11 5172578 5172599 5172595 5172600 +
ctgtttactttcaactgggctg

SEQ ID NO: 74446 - DNA, 22 bp, Artificial Sequence
  Synthetic oligonucleotide; CTG chr11 5172581 5172602 5172598 5172603 +
tttactttcaactgggctgtgg

SEQ ID NO: 74447 - DNA, 22 bp, Artificial Sequence
  Synthetic oligonucleotide; TTT chr11 5172584 5172605 5172601 5172606 +
actttcaactgggctgtggaca

SEQ ID NO: 74448 - DNA, 22 bp, Artificial Sequence
  Synthetic oligonucleotide; TTA chr11 5172585 5172606 5172602 5172607 +
ctttcaactgggctgtggacat

SEQ ID NO: 74449 - DNA, 22 bp, Artificial Sequence
  Synthetic oligonucleotide; CTT chr11 5172588 5172609 5172605 5172610 +
tcaactgggctgtggacatagt

SEQ ID NO: 74450 - DNA, 22 bp, Artificial Sequence
  Synthetic oligonucleotide; TTT chr11 5172589 5172610 5172606 5172611 +
caactgggctgtggacatagtt

SEQ ID NO: 74451 - DNA, 22 bp, Artificial Sequence
  Synthetic oligonucleotide; TTC chr11 5172590 5172611 5172607 5172612 +
aactgggctgtggacatagtta

SEQ ID NO: 74452 - DNA, 22 bp, Artificial Sequence
  Synthetic oligonucleotide; CTG chr11 5172595 5172616 5172612 5172617 +
ggctgtggacatagttactacc

SEQ ID NO: 74453 - DNA, 22 bp, Artificial Sequence
  Synthetic oligonucleotide; CTG chr11 5172600 5172621 5172617 5172622 +
tggacatagttactacctccct

SEQ ID NO: 74454 - DNA, 22 bp, Artificial Sequence
  Synthetic oligonucleotide; TTA chr11 5172612 5172633 5172629 5172634 +
ctacctccctgtatatgtgctt

SEQ ID NO: 74455 - DNA, 22 bp, Artificial Sequence
  Synthetic oligonucleotide; CTA chr11 5172615 5172636 5172632 5172637 +
cctccctgtatatgtgcttagt

SEQ ID NO: 74456 - DNA, 22 bp, Artificial Sequence
  Synthetic oligonucleotide; CTC chr11 5172619 5172640 5172636 5172641 +
cctgtatatgtgcttagttgac

SEQ ID NO: 74457 - DNA, 22 bp, Artificial Sequence
  Synthetic oligonucleotide; CTG chr11 5172623 5172644 5172640 5172645 +
tatatgtgcttagttgactgga

SEQ ID NO: 74458 - DNA, 22 bp, Artificial Sequence
  Synthetic oligonucleotide; CTT chr11 5172634 5172655 5172651 5172656 +
agttgactggaggacatagaga

SEQ ID NO: 74459 - DNA, 22 bp, Artificial Sequence
  Synthetic oligonucleotide; TTA chr11 5172635 5172656 5172652 5172657 +
gttgactggaggacatagagac

SEQ ID NO: 74460 - DNA, 22 bp, Artificial Sequence
  Synthetic oligonucleotide; TTG chr11 5172639 5172660 5172656 5172661 +
actggaggacatagagacagaa

SEQ ID NO: 74461 - DNA, 22 bp, Artificial Sequence
  Synthetic oligonucleotide; CTG chr11 5172643 5172664 5172660 5172665 +
gaggacatagagacagaatgat

SEQ ID NO: 74462 - DNA, 22 bp, Artificial Sequence
  Synthetic oligonucleotide; TTC chr11 5172667 5172688 5172684 5172689 +
agtatccctcaagaagcaatta

SEQ ID NO: 74463 - DNA, 22 bp, Artificial Sequence
  Synthetic oligonucleotide; CTC chr11 5172677 5172698 5172694 5172699 +
aagaagcaattaaccaagaata

SEQ ID NO: 74464 - DNA, 22 bp, Artificial Sequence
  Synthetic oligonucleotide; TTA chr11 5172689 5172710 5172706 5172711 +
accaagaataattattcccaga

SEQ ID NO: 74465 - DNA, 22 bp, Artificial Sequence
  Synthetic oligonucleotide; TTA chr11 5172703 5172724 5172720 5172725 +
ttcccagaaacttcgggtgtat

SEQ ID NO: 74466 - DNA, 22 bp, Artificial Sequence
  Synthetic oligonucleotide; TTC chr11 5172706 5172727 5172723 5172728 +
ccagaaacttcgggtgtattag

SEQ ID NO: 74467 - DNA, 22 bp, Artificial Sequence
  Synthetic oligonucleotide; CTT chr11 5172716 5172737 5172733 5172738 +
cgggtgtattagagagaaaggg

SEQ ID NO: 74468 - DNA, 22 bp, Artificial Sequence
  Synthetic oligonucleotide; TTC chr11 5172717 5172738 5172734 5172739 +
gggtgtattagagagaaagggg

SEQ ID NO: 74469 - DNA, 22 bp, Artificial Sequence
  Synthetic oligonucleotide; TTA chr11 5172727 5172748 5172744 5172749 +
gagagaaaggggggaatagttc

SEQ ID NO: 74470 - DNA, 22 bp, Artificial Sequence
  Synthetic oligonucleotide; TTC chr11 5172749 5172770 5172766 5172771 +
ctgagaagcatgctggagagag

SEQ ID NO: 74471 - DNA, 22 bp, Artificial Sequence
  Synthetic oligonucleotide; CTG chr11 5172752 5172773 5172769 5172774 +
agaagcatgctggagagagtat

SEQ ID NO: 74472 - DNA, 22 bp, Artificial Sequence
  Synthetic oligonucleotide; CTG chr11 5172764 5172785 5172781 5172786 +
gagagagtatacataagaacat

SEQ ID NO: 74473 - DNA, 22 bp, Artificial Sequence
  Synthetic oligonucleotide; TTA chr11 5172827 5172848 5172844 5172849 +
cacaatatcattaattataatt

SEQ ID NO: 74474 - DNA, 22 bp, Artificial Sequence
  Synthetic oligonucleotide; TTA chr11 5172840 5172861 5172857 5172862 +
attataatttaaatataagaca

SEQ ID NO: 74475 - DNA, 22 bp, Artificial Sequence
  Synthetic oligonucleotide; TTA chr11 5172844 5172865 5172861 5172866 +
taatttaaatataagacattgg

SEQ ID NO: 74476 - DNA, 22 bp, Artificial Sequence
  Synthetic oligonucleotide; TTT chr11 5172850 5172871 5172867 5172872 +
aaatataagacattggtttata

SEQ ID NO: 74477 - DNA, 22 bp, Artificial Sequence
  Synthetic oligonucleotide; TTA chr11 5172851 5172872 5172868 5172873 +
aatataagacattggtttatat

SEQ ID NO: 74478 - DNA, 22 bp, Artificial Sequence
  Synthetic oligonucleotide; TTG chr11 5172865 5172886 5172882 5172887 +
gtttatatttcttatatacttc

SEQ ID NO: 74479 - DNA, 22 bp, Artificial Sequence
  Synthetic oligonucleotide; TTT chr11 5172869 5172890 5172886 5172891 +
atatttcttatatacttccccc

SEQ ID NO: 74480 - DNA, 22 bp, Artificial Sequence
  Synthetic oligonucleotide; TTA chr11 5172870 5172891 5172887 5172892 +
tatttcttatatacttcccccg

SEQ ID NO: 74481 - DNA, 22 bp, Artificial Sequence
  Synthetic oligonucleotide; TTT chr11 5172875 5172896 5172892 5172897 +
cttatatacttcccccgcatct

SEQ ID NO: 74482 - DNA, 22 bp, Artificial Sequence
  Synthetic oligonucleotide; TTC chr11 5172876 5172897 5172893 5172898 +
ttatatacttcccccgcatctt

SEQ ID NO: 74483 - DNA, 22 bp, Artificial Sequence
  Synthetic oligonucleotide; CTT chr11 5172878 5172899 5172895 5172900 +
atatacttcccccgcatcttat

SEQ ID NO: 74484 - DNA, 22 bp, Artificial Sequence
  Synthetic oligonucleotide; TTA chr11 5172879 5172900 5172896 5172901 +
tatacttcccccgcatcttatc

SEQ ID NO: 74485 - DNA, 22 bp, Artificial Sequence
  Synthetic oligonucleotide; CTT chr11 5172886 5172907 5172903 5172908 +
cccccgcatcttatcttcatta

SEQ ID NO: 74486 - DNA, 22 bp, Artificial Sequence
  Synthetic oligonucleotide; TTC chr11 5172887 5172908 5172904 5172909 +
ccccgcatcttatcttcattaa

SEQ ID NO: 74487 - DNA, 22 bp, Artificial Sequence
  Synthetic oligonucleotide; CTT chr11 5172898 5172919 5172915 5172920 +
atcttcattaattttttcatac

SEQ ID NO: 74488 - DNA, 22 bp, Artificial Sequence
  Synthetic oligonucleotide; TTA chr11 5172899 5172920 5172916 5172921 +
tcttcattaattttttcataca

SEQ ID NO: 74489 - DNA, 22 bp, Artificial Sequence
  Synthetic oligonucleotide; CTT chr11 5172903 5172924 5172920 5172925 +
cattaattttttcatacacaat

SEQ ID NO: 74490 - DNA, 22 bp, Artificial Sequence
  Synthetic oligonucleotide; TTC chr11 5172904 5172925 5172921 5172926 +
attaattttttcatacacaatc

SEQ ID NO: 74491 - DNA, 22 bp, Artificial Sequence
  Synthetic oligonucleotide; TTA chr11 5172908 5172929 5172925 5172930 +
attttttcatacacaatcattt

SEQ ID NO: 74492 - DNA, 22 bp, Artificial Sequence
  Synthetic oligonucleotide; TTT chr11 5172912 5172933 5172929 5172934 +
tttcatacacaatcatttacaa

SEQ ID NO: 74493 - DNA, 22 bp, Artificial Sequence
  Synthetic oligonucleotide; TTT chr11 5172913 5172934 5172930 5172935 +
ttcatacacaatcatttacaaa

SEQ ID NO: 74494 - DNA, 22 bp, Artificial Sequence
  Synthetic oligonucleotide; TTT chr11 5172914 5172935 5172931 5172936 +
tcatacacaatcatttacaaaa

SEQ ID NO: 74495 - DNA, 22 bp, Artificial Sequence
  Synthetic oligonucleotide; TTT chr11 5172915 5172936 5172932 5172937 +
catacacaatcatttacaaaac

SEQ ID NO: 74496 - DNA, 22 bp, Artificial Sequence
  Synthetic oligonucleotide; TTC chr11 5172916 5172937 5172933 5172938 +
atacacaatcatttacaaaact

SEQ ID NO: 74497 - DNA, 22 bp, Artificial Sequence
  Synthetic oligonucleotide; TTT chr11 5172930 5172951 5172947 5172952 +
acaaaacttttatgtagtcagg

SEQ ID NO: 74498 - DNA, 22 bp, Artificial Sequence
  Synthetic oligonucleotide; TTA chr11 5172931 5172952 5172948 5172953 +
caaaacttttatgtagtcaggt

SEQ ID NO: 74499 - DNA, 22 bp, Artificial Sequence
  Synthetic oligonucleotide; CTT chr11 5172939 5172960 5172956 5172961 +
ttatgtagtcaggttaacatac

SEQ ID NO: 74500 - DNA, 22 bp, Artificial Sequence
  Synthetic oligonucleotide; TTT chr11 5172940 5172961 5172957 5172962 +
tatgtagtcaggttaacataca

SEQ ID NO: 74501 - DNA, 22 bp, Artificial Sequence
  Synthetic oligonucleotide; TTT chr11 5172941 5172962 5172958 5172963 +
atgtagtcaggttaacatacat

SEQ ID NO: 74502 - DNA, 22 bp, Artificial Sequence
  Synthetic oligonucleotide; TTA chr11 5172942 5172963 5172959 5172964 +
tgtagtcaggttaacatacatt

SEQ ID NO: 74503 - DNA, 22 bp, Artificial Sequence
  Synthetic oligonucleotide; TTA chr11 5172955 5172976 5172972 5172977 +
acatacattttattaatattat

SEQ ID NO: 74504 - DNA, 22 bp, Artificial Sequence
  Synthetic oligonucleotide; TTT chr11 5172965 5172986 5172982 5172987 +
tattaatattatatacttttca

SEQ ID NO: 74505 - DNA, 22 bp, Artificial Sequence
  Synthetic oligonucleotide; TTT chr11 5172966 5172987 5172983 5172988 +
attaatattatatacttttcat

SEQ ID NO: 74506 - DNA, 22 bp, Artificial Sequence
  Synthetic oligonucleotide; TTA chr11 5172967 5172988 5172984 5172989 +
ttaatattatatacttttcatt

SEQ ID NO: 74507 - DNA, 22 bp, Artificial Sequence
  Synthetic oligonucleotide; TTA chr11 5172970 5172991 5172987 5172992 +
atattatatacttttcattctt

SEQ ID NO: 74508 - DNA, 22 bp, Artificial Sequence
  Synthetic oligonucleotide; TTA chr11 5172976 5172997 5172993 5172998 +
tatacttttcattcttaagaag

SEQ ID NO: 74509 - DNA, 22 bp, Artificial Sequence
  Synthetic oligonucleotide; CTT chr11 5172983 5173004 5173000 5173005 +
ttcattcttaagaagctattcc

SEQ ID NO: 74510 - DNA, 22 bp, Artificial Sequence
  Synthetic oligonucleotide; TTT chr11 5172984 5173005 5173001 5173006 +
tcattcttaagaagctattcca

SEQ ID NO: 74511 - DNA, 22 bp, Artificial Sequence
  Synthetic oligonucleotide; TTT chr11 5172985 5173006 5173002 5173007 +
cattcttaagaagctattccat

SEQ ID NO: 74512 - DNA, 22 bp, Artificial Sequence
  Synthetic oligonucleotide; TTC chr11 5172986 5173007 5173003 5173008 +
attcttaagaagctattccata

SEQ ID NO: 74513 - DNA, 22 bp, Artificial Sequence
  Synthetic oligonucleotide; TTC chr11 5172990 5173011 5173007 5173012 +
ttaagaagctattccatataca

SEQ ID NO: 74514 - DNA, 22 bp, Artificial Sequence
  Synthetic oligonucleotide; CTT chr11 5172992 5173013 5173009 5173014 +
aagaagctattccatatacaaa

SEQ ID NO: 74515 - DNA, 22 bp, Artificial Sequence
  Synthetic oligonucleotide; TTA chr11 5172993 5173014 5173010 5173015 +
agaagctattccatatacaaag

SEQ ID NO: 74516 - DNA, 22 bp, Artificial Sequence
  Synthetic oligonucleotide; CTA chr11 5173001 5173022 5173018 5173023 +
ttccatatacaaagtaaaaagt

SEQ ID NO: 74517 - DNA, 22 bp, Artificial Sequence
  Synthetic oligonucleotide; TTC chr11 5173004 5173025 5173021 5173026 +
catatacaaagtaaaaagtgga

SEQ ID NO: 74518 - DNA, 22 bp, Artificial Sequence
  Synthetic oligonucleotide; TTG chr11 5173040 5173061 5173057 5173062 +
gatctagagctagagacggaac

SEQ ID NO: 74519 - DNA, 22 bp, Artificial Sequence
  Synthetic oligonucleotide; CTA chr11 5173046 5173067 5173063 5173068 +
gagctagagacggaactgcaga

SEQ ID NO: 74520 - DNA, 22 bp, Artificial Sequence
  Synthetic oligonucleotide; CTA chr11 5173052 5173073 5173069 5173074 +
gagacggaactgcagataggga

SEQ ID NO: 74521 - DNA, 22 bp, Artificial Sequence
  Synthetic oligonucleotide; CTG chr11 5173064 5173085 5173081 5173086 +
cagatagggatagtggtgtaga

SEQ ID NO: 74522 - DNA, 22 bp, Artificial Sequence
  Synthetic oligonucleotide; TTA chr11 5173144 5173165 5173161 5173166 +
gagattcttgattccacctgaa

SEQ ID NO: 74523 - DNA, 22 bp, Artificial Sequence
  Synthetic oligonucleotide; TTC chr11 5173151 5173172 5173168 5173173 +
ttgattccacctgaaatttgtt

SEQ ID NO: 74524 - DNA, 22 bp, Artificial Sequence
  Synthetic oligonucleotide; CTT chr11 5173153 5173174 5173170 5173175 +
gattccacctgaaatttgtttg

SEQ ID NO: 74525 - DNA, 22 bp, Artificial Sequence
  Synthetic oligonucleotide; TTG chr11 5173154 5173175 5173171 5173176 +
attccacctgaaatttgtttgg

SEQ ID NO: 74526 - DNA, 22 bp, Artificial Sequence
  Synthetic oligonucleotide; TTC chr11 5173158 5173179 5173175 5173180 +
cacctgaaatttgtttggggga

SEQ ID NO: 74527 - DNA, 22 bp, Artificial Sequence
  Synthetic oligonucleotide; CTG chr11 5173164 5173185 5173181 5173186 +
aaatttgtttgggggacttggg

SEQ ID NO: 74528 - DNA, 22 bp, Artificial Sequence
  Synthetic oligonucleotide; TTT chr11 5173170 5173191 5173187 5173192 +
gtttgggggacttgggtaatta

SEQ ID NO: 74529 - DNA, 22 bp, Artificial Sequence
  Synthetic oligonucleotide; TTG chr11 5173171 5173192 5173188 5173193 +
tttgggggacttgggtaattag

SEQ ID NO: 74530 - DNA, 22 bp, Artificial Sequence
  Synthetic oligonucleotide; TTT chr11 5173174 5173195 5173191 5173196 +
gggggacttgggtaattagaat

SEQ ID NO: 74531 - DNA, 22 bp, Artificial Sequence
  Synthetic oligonucleotide; TTG chr11 5173175 5173196 5173192 5173197 +
ggggacttgggtaattagaatt

SEQ ID NO: 74532 - DNA, 22 bp, Artificial Sequence
  Synthetic oligonucleotide; CTT chr11 5173183 5173204 5173200 5173205 +
gggtaattagaattttacttaa

SEQ ID NO: 74533 - DNA, 22 bp, Artificial Sequence
  Synthetic oligonucleotide; TTG chr11 5173184 5173205 5173201 5173206 +
ggtaattagaattttacttaag

SEQ ID NO: 74534 - DNA, 22 bp, Artificial Sequence
  Synthetic oligonucleotide; TTA chr11 5173192 5173213 5173209 5173214 +
gaattttacttaagtattctca

SEQ ID NO: 74535 - DNA, 22 bp, Artificial Sequence
  Synthetic oligonucleotide; TTT chr11 5173198 5173219 5173215 5173220 +
tacttaagtattctcaaacata

SEQ ID NO: 74536 - DNA, 22 bp, Artificial Sequence
  Synthetic oligonucleotide; TTT chr11 5173199 5173220 5173216 5173221 +
acttaagtattctcaaacatat

SEQ ID NO: 74537 - DNA, 22 bp, Artificial Sequence
  Synthetic oligonucleotide; TTA chr11 5173200 5173221 5173217 5173222 +
cttaagtattctcaaacatata

SEQ ID NO: 74538 - DNA, 22 bp, Artificial Sequence
  Synthetic oligonucleotide; CTT chr11 5173203 5173224 5173220 5173225 +
aagtattctcaaacatataaac

SEQ ID NO: 74539 - DNA, 22 bp, Artificial Sequence
  Synthetic oligonucleotide; TTA chr11 5173204 5173225 5173221 5173226 +
agtattctcaaacatataaaca

SEQ ID NO: 74540 - DNA, 22 bp, Artificial Sequence
  Synthetic oligonucleotide; TTC chr11 5173211 5173232 5173228 5173233 +
tcaaacatataaacaatttttc

SEQ ID NO: 74541 - DNA, 22 bp, Artificial Sequence
  Synthetic oligonucleotide; CTC chr11 5173213 5173234 5173230 5173235 +
aaacatataaacaatttttcta

SEQ ID NO: 74542 - DNA, 22 bp, Artificial Sequence
  Synthetic oligonucleotide; TTT chr11 5173230 5173251 5173247 5173252 +
ttctaataccaagtataagatc

SEQ ID NO: 74543 - DNA, 22 bp, Artificial Sequence
  Synthetic oligonucleotide; TTT chr11 5173231 5173252 5173248 5173253 +
tctaataccaagtataagatca

SEQ ID NO: 74544 - DNA, 22 bp, Artificial Sequence
  Synthetic oligonucleotide; TTT chr11 5173232 5173253 5173249 5173254 +
ctaataccaagtataagatcaa

SEQ ID NO: 74545 - DNA, 22 bp, Artificial Sequence
  Synthetic oligonucleotide; TTC chr11 5173233 5173254 5173250 5173255 +
taataccaagtataagatcaag

SEQ ID NO: 74546 - DNA, 22 bp, Artificial Sequence
  Synthetic oligonucleotide; CTA chr11 5173235 5173256 5173252 5173257 +
ataccaagtataagatcaaggg

SEQ ID NO: 74547 - DNA, 22 bp, Artificial Sequence
  Synthetic oligonucleotide; TTG chr11 5173260 5173281 5173277 5173282 +
gtctccaagcatgatgagggat

SEQ ID NO: 74548 - DNA, 22 bp, Artificial Sequence
  Synthetic oligonucleotide; CTC chr11 5173265 5173286 5173282 5173287 +
caagcatgatgagggattacat

SEQ ID NO: 74549 - DNA, 22 bp, Artificial Sequence
  Synthetic oligonucleotide; TTA chr11 5173284 5173305 5173301 5173306 +
catacattttattttatatttt

SEQ ID NO: 74550 - DNA, 22 bp, Artificial Sequence
  Synthetic oligonucleotide; TTT chr11 5173293 5173314 5173310 5173315 +
tattttatatttttatataaat

SEQ ID NO: 74551 - DNA, 22 bp, Artificial Sequence
  Synthetic oligonucleotide; TTT chr11 5173294 5173315 5173311 5173316 +
attttatatttttatataaata

SEQ ID NO: 74552 - DNA, 22 bp, Artificial Sequence
  Synthetic oligonucleotide; TTA chr11 5173295 5173316 5173312 5173317 +
ttttatatttttatataaatat

SEQ ID NO: 74553 - DNA, 22 bp, Artificial Sequence
  Synthetic oligonucleotide; TTT chr11 5173298 5173319 5173315 5173320 +
tatatttttatataaatatgga

SEQ ID NO: 74554 - DNA, 22 bp, Artificial Sequence
  Synthetic oligonucleotide; TTT chr11 5173299 5173320 5173316 5173321 +
atatttttatataaatatggat

SEQ ID NO: 74555 - DNA, 22 bp, Artificial Sequence
  Synthetic oligonucleotide; TTA chr11 5173300 5173321 5173317 5173322 +
tatttttatataaatatggatc

SEQ ID NO: 74556 - DNA, 22 bp, Artificial Sequence
  Synthetic oligonucleotide; TTT chr11 5173305 5173326 5173322 5173327 +
ttatataaatatggatctaatt

SEQ ID NO: 74557 - DNA, 22 bp, Artificial Sequence
  Synthetic oligonucleotide; TTT chr11 5173306 5173327 5173323 5173328 +
tatataaatatggatctaattc

SEQ ID NO: 74558 - DNA, 22 bp, Artificial Sequence
  Synthetic oligonucleotide; TTT chr11 5173307 5173328 5173324 5173329 +
atataaatatggatctaattct

SEQ ID NO: 74559 - DNA, 22 bp, Artificial Sequence
  Synthetic oligonucleotide; TTA chr11 5173308 5173329 5173325 5173330 +
tataaatatggatctaattcta

SEQ ID NO: 74560 - DNA, 22 bp, Artificial Sequence
  Synthetic oligonucleotide; CTA chr11 5173324 5173345 5173341 5173346 +
attctagactgttttctgttgt

SEQ ID NO: 74561 - DNA, 22 bp, Artificial Sequence
  Synthetic oligonucleotide; TTC chr11 5173328 5173349 5173345 5173350 +
tagactgttttctgttgtttga

SEQ ID NO: 74562 - DNA, 22 bp, Artificial Sequence
  Synthetic oligonucleotide; CTA chr11 5173330 5173351 5173347 5173352 +
gactgttttctgttgtttgatc

SEQ ID NO: 74563 - DNA, 22 bp, Artificial Sequence
  Synthetic oligonucleotide; CTG chr11 5173335 5173356 5173352 5173357 +
ttttctgttgtttgatctgtgt

SEQ ID NO: 74564 - DNA, 22 bp, Artificial Sequence
  Synthetic oligonucleotide; TTT chr11 5173338 5173359 5173355 5173360 +
tctgttgtttgatctgtgtcct

SEQ ID NO: 74565 - DNA, 22 bp, Artificial Sequence
  Synthetic oligonucleotide; TTT chr11 5173339 5173360 5173356 5173361 +
ctgttgtttgatctgtgtcctt

SEQ ID NO: 74566 - DNA, 22 bp, Artificial Sequence
  Synthetic oligonucleotide; TTC chr11 5173340 5173361 5173357 5173362 +
tgttgtttgatctgtgtccttt

SEQ ID NO: 74567 - DNA, 22 bp, Artificial Sequence
  Synthetic oligonucleotide; CTG chr11 5173342 5173363 5173359 5173364 +
ttgtttgatctgtgtccttttt

SEQ ID NO: 74568 - DNA, 22 bp, Artificial Sequence
  Synthetic oligonucleotide; TTG chr11 5173345 5173366 5173362 5173367 +
tttgatctgtgtcctttttgcc

SEQ ID NO: 74569 - DNA, 22 bp, Artificial Sequence
  Synthetic oligonucleotide; TTT chr11 5173348 5173369 5173365 5173370 +
gatctgtgtcctttttgccaca

SEQ ID NO: 74570 - DNA, 22 bp, Artificial Sequence
  Synthetic oligonucleotide; TTG chr11 5173349 5173370 5173366 5173371 +
atctgtgtcctttttgccacat

SEQ ID NO: 74571 - DNA, 22 bp, Artificial Sequence
  Synthetic oligonucleotide; CTG chr11 5173354 5173375 5173371 5173376 +
tgtcctttttgccacatgcaca

SEQ ID NO: 74572 - DNA, 22 bp, Artificial Sequence
  Synthetic oligonucleotide; CTT chr11 5173361 5173382 5173378 5173383 +
tttgccacatgcacatactgcc

SEQ ID NO: 74573 - DNA, 22 bp, Artificial Sequence
  Synthetic oligonucleotide; TTT chr11 5173362 5173383 5173379 5173384 +
ttgccacatgcacatactgccg

SEQ ID NO: 74574 - DNA, 22 bp, Artificial Sequence
  Synthetic oligonucleotide; TTT chr11 5173363 5173384 5173380 5173385 +
tgccacatgcacatactgccgt

SEQ ID NO: 74575 - DNA, 22 bp, Artificial Sequence
  Synthetic oligonucleotide; TTT chr11 5173364 5173385 5173381 5173386 +
gccacatgcacatactgccgtt

SEQ ID NO: 74576 - DNA, 22 bp, Artificial Sequence
  Synthetic oligonucleotide; TTG chr11 5173365 5173386 5173382 5173387 +
ccacatgcacatactgccgttc

SEQ ID NO: 74577 - DNA, 22 bp, Artificial Sequence
  Synthetic oligonucleotide; CTG chr11 5173381 5173402 5173398 5173403 +
ccgttcttattctgtttttata

SEQ ID NO: 74578 - DNA, 22 bp, Artificial Sequence
  Synthetic oligonucleotide; TTC chr11 5173387 5173408 5173404 5173409 +
ttattctgtttttatatacaac

SEQ ID NO: 74579 - DNA, 22 bp, Artificial Sequence
  Synthetic oligonucleotide; CTT chr11 5173389 5173410 5173406 5173411 +
attctgtttttatatacaactt

SEQ ID NO: 74580 - DNA, 22 bp, Artificial Sequence
  Synthetic oligonucleotide; TTA chr11 5173390 5173411 5173407 5173412 +
ttctgtttttatatacaacttc

SEQ ID NO: 74581 - DNA, 22 bp, Artificial Sequence
  Synthetic oligonucleotide; TTC chr11 5173393 5173414 5173410 5173415 +
tgtttttatatacaacttcata

SEQ ID NO: 74582 - DNA, 22 bp, Artificial Sequence
  Synthetic oligonucleotide; CTG chr11 5173395 5173416 5173412 5173417 +
tttttatatacaacttcatatt

SEQ ID NO: 74583 - DNA, 22 bp, Artificial Sequence
  Synthetic oligonucleotide; TTT chr11 5173398 5173419 5173415 5173420 +
ttatatacaacttcatattcaa

SEQ ID NO: 74584 - DNA, 22 bp, Artificial Sequence
  Synthetic oligonucleotide; TTT chr11 5173399 5173420 5173416 5173421 +
tatatacaacttcatattcaat

SEQ ID NO: 74585 - DNA, 22 bp, Artificial Sequence
  Synthetic oligonucleotide; TTT chr11 5173400 5173421 5173417 5173422 +
atatacaacttcatattcaatt

SEQ ID NO: 74586 - DNA, 22 bp, Artificial Sequence
  Synthetic oligonucleotide; TTA chr11 5173401 5173422 5173418 5173423 +
tatacaacttcatattcaattg

SEQ ID NO: 74587 - DNA, 22 bp, Artificial Sequence
  Synthetic oligonucleotide; CTT chr11 5173411 5173432 5173428 5173433 +
catattcaattggtcaagctat

SEQ ID NO: 74588 - DNA, 22 bp, Artificial Sequence
  Synthetic oligonucleotide; TTC chr11 5173412 5173433 5173429 5173434 +
atattcaattggtcaagctata

SEQ ID NO: 74589 - DNA, 22 bp, Artificial Sequence
  Synthetic oligonucleotide; TTC chr11 5173418 5173439 5173435 5173440 +
aattggtcaagctatatttttg

SEQ ID NO: 74590 - DNA, 22 bp, Artificial Sequence
  Synthetic oligonucleotide; TTG chr11 5173423 5173444 5173440 5173445 +
gtcaagctatatttttgttgtc

SEQ ID NO: 74591 - DNA, 22 bp, Artificial Sequence
  Synthetic oligonucleotide; CTA chr11 5173432 5173453 5173449 5173454 +
tatttttgttgtcatgctaact

SEQ ID NO: 74592 - DNA, 22 bp, Artificial Sequence
  Synthetic oligonucleotide; TTT chr11 5173437 5173458 5173454 5173459 +
ttgttgtcatgctaactttgta

SEQ ID NO: 74593 - DNA, 22 bp, Artificial Sequence
  Synthetic oligonucleotide; TTT chr11 5173438 5173459 5173455 5173460 +
tgttgtcatgctaactttgtat

SEQ ID NO: 74594 - DNA, 22 bp, Artificial Sequence
  Synthetic oligonucleotide; TTT chr11 5173439 5173460 5173456 5173461 +
gttgtcatgctaactttgtatt

SEQ ID NO: 74595 - DNA, 22 bp, Artificial Sequence
  Synthetic oligonucleotide; TTG chr11 5173440 5173461 5173457 5173462 +
ttgtcatgctaactttgtattc

SEQ ID NO: 74596 - DNA, 22 bp, Artificial Sequence
  Synthetic oligonucleotide; TTG chr11 5173443 5173464 5173460 5173465 +
tcatgctaactttgtattcttt

SEQ ID NO: 74597 - DNA, 22 bp, Artificial Sequence
  Synthetic oligonucleotide; CTA chr11 5173451 5173472 5173468 5173473 +
actttgtattctttcaaataag

SEQ ID NO: 74598 - DNA, 22 bp, Artificial Sequence
  Synthetic oligonucleotide; CTT chr11 5173455 5173476 5173472 5173477 +
tgtattctttcaaataaggatt

SEQ ID NO: 74599 - DNA, 22 bp, Artificial Sequence
  Synthetic oligonucleotide; TTT chr11 5173456 5173477 5173473 5173478 +
gtattctttcaaataaggatta

SEQ ID NO: 74600 - DNA, 22 bp, Artificial Sequence
  Synthetic oligonucleotide; TTG chr11 5173457 5173478 5173474 5173479 +
tattctttcaaataaggattaa

SEQ ID NO: 74601 - DNA, 22 bp, Artificial Sequence
  Synthetic oligonucleotide; TTC chr11 5173462 5173483 5173479 5173484 +
tttcaaataaggattaaaagcc

SEQ ID NO: 74602 - DNA, 22 bp, Artificial Sequence
  Synthetic oligonucleotide; CTT chr11 5173464 5173485 5173481 5173486 +
tcaaataaggattaaaagccag

SEQ ID NO: 74603 - DNA, 22 bp, Artificial Sequence
  Synthetic oligonucleotide; TTT chr11 5173465 5173486 5173482 5173487 +
caaataaggattaaaagccagc

SEQ ID NO: 74604 - DNA, 22 bp, Artificial Sequence
  Synthetic oligonucleotide; TTC chr11 5173466 5173487 5173483 5173488 +
aaataaggattaaaagccagca

SEQ ID NO: 74605 - DNA, 22 bp, Artificial Sequence
  Synthetic oligonucleotide; TTA chr11 5173478 5173499 5173495 5173500 +
aaagccagcatgcataaaaatt

SEQ ID NO: 74606 - DNA, 22 bp, Artificial Sequence
  Synthetic oligonucleotide; TTG chr11 5173501 5173522 5173518 5173523 +
tgtaatgacctaaattgaacta

SEQ ID NO: 74607 - DNA, 22 bp, Artificial Sequence
  Synthetic oligonucleotide; CTA chr11 5173513 5173534 5173530 5173535 +
aattgaactaaagccataacac

SEQ ID NO: 74608 - DNA, 22 bp, Artificial Sequence
  Synthetic oligonucleotide; TTG chr11 5173518 5173539 5173535 5173540 +
aactaaagccataacaccctcg

SEQ ID NO: 74609 - DNA, 22 bp, Artificial Sequence
  Synthetic oligonucleotide; CTA chr11 5173523 5173544 5173540 5173545 +
aagccataacaccctcggaagg

SEQ ID NO: 74610 - DNA, 22 bp, Artificial Sequence
  Synthetic oligonucleotide; CTC chr11 5173539 5173560 5173556 5173561 +
ggaaggaagcatgggtaaatct

SEQ ID NO: 74611 - DNA, 22 bp, Artificial Sequence
  Synthetic oligonucleotide; CTT chr11 5173562 5173583 5173579 5173584 +
catgaactttgattttacaata

SEQ ID NO: 74612 - DNA, 22 bp, Artificial Sequence
  Synthetic oligonucleotide; TTC chr11 5173563 5173584 5173580 5173585 +
atgaactttgattttacaatag

SEQ ID NO: 74613 - DNA, 22 bp, Artificial Sequence
  Synthetic oligonucleotide; CTT chr11 5173571 5173592 5173588 5173593 +
tgattttacaatagattcttag

SEQ ID NO: 74614 - DNA, 22 bp, Artificial Sequence
  Synthetic oligonucleotide; TTT chr11 5173572 5173593 5173589 5173594 +
gattttacaatagattcttaga

SEQ ID NO: 74615 - DNA, 22 bp, Artificial Sequence
  Synthetic oligonucleotide; TTG chr11 5173573 5173594 5173590 5173595 +
attttacaatagattcttagat

SEQ ID NO: 74616 - DNA, 22 bp, Artificial Sequence
  Synthetic oligonucleotide; TTT chr11 5173577 5173598 5173594 5173599 +
tacaatagattcttagatatga

SEQ ID NO: 74617 - DNA, 22 bp, Artificial Sequence
  Synthetic oligonucleotide; TTT chr11 5173578 5173599 5173595 5173600 +
acaatagattcttagatatgac

SEQ ID NO: 74618 - DNA, 22 bp, Artificial Sequence
  Synthetic oligonucleotide; TTA chr11 5173579 5173600 5173596 5173601 +
caatagattcttagatatgaca

SEQ ID NO: 74619 - DNA, 22 bp, Artificial Sequence
  Synthetic oligonucleotide; TTC chr11 5173589 5173610 5173606 5173611 +
ttagatatgacacaaaaagtat

SEQ ID NO: 74620 - DNA, 22 bp, Artificial Sequence
  Synthetic oligonucleotide; CTT chr11 5173591 5173612 5173608 5173613 +
agatatgacacaaaaagtatga

SEQ ID NO: 74621 - DNA, 22 bp, Artificial Sequence
  Synthetic oligonucleotide; TTA chr11 5173592 5173613 5173609 5173614 +
gatatgacacaaaaagtatgag

SEQ ID NO: 74622 - DNA, 22 bp, Artificial Sequence
  Synthetic oligonucleotide; TTG chr11 5173639 5173660 5173656 5173661 +
gatttcatttaaaaagttcatg

SEQ ID NO: 74623 - DNA, 22 bp, Artificial Sequence
  Synthetic oligonucleotide; TTT chr11 5173644 5173665 5173661 5173666 +
catttaaaaagttcatgcaaca

SEQ ID NO: 74624 - DNA, 22 bp, Artificial Sequence
  Synthetic oligonucleotide; TTC chr11 5173645 5173666 5173662 5173667 +
atttaaaaagttcatgcaacaa

SEQ ID NO: 74625 - DNA, 22 bp, Artificial Sequence
  Synthetic oligonucleotide; TTT chr11 5173649 5173670 5173666 5173671 +
aaaaagttcatgcaacaaacga

SEQ ID NO: 74626 - DNA, 22 bp, Artificial Sequence
  Synthetic oligonucleotide; TTA chr11 5173650 5173671 5173667 5173672 +
aaaagttcatgcaacaaacgac

SEQ ID NO: 74627 - DNA, 22 bp, Artificial Sequence
  Synthetic oligonucleotide; TTC chr11 5173658 5173679 5173675 5173680 +
atgcaacaaacgactttaagaa

SEQ ID NO: 74628 - DNA, 22 bp, Artificial Sequence
  Synthetic oligonucleotide; CTT chr11 5173674 5173695 5173691 5173696 +
taagaaagtaaaaagacaacct

SEQ ID NO: 74629 - DNA, 22 bp, Artificial Sequence
  Synthetic oligonucleotide; TTT chr11 5173675 5173696 5173692 5173697 +
aagaaagtaaaaagacaaccta

SEQ ID NO: 74630 - DNA, 22 bp, Artificial Sequence
  Synthetic oligonucleotide; TTA chr11 5173676 5173697 5173693 5173698 +
agaaagtaaaaagacaacctat

SEQ ID NO: 74631 - DNA, 22 bp, Artificial Sequence
  Synthetic oligonucleotide; CTA chr11 5173697 5173718 5173714 5173719 +
taagatgagagaacatctttgc

SEQ ID NO: 74632 - DNA, 22 bp, Artificial Sequence
  Synthetic oligonucleotide; CTT chr11 5173716 5173737 5173733 5173738 +
tgcaaattatgtatttcataag

SEQ ID NO: 74633 - DNA, 22 bp, Artificial Sequence
  Synthetic oligonucleotide; TTT chr11 5173717 5173738 5173734 5173739 +
gcaaattatgtatttcataagt

SEQ ID NO: 74634 - DNA, 22 bp, Artificial Sequence
  Synthetic oligonucleotide; TTG chr11 5173718 5173739 5173735 5173740 +
caaattatgtatttcataagtt

SEQ ID NO: 74635 - DNA, 22 bp, Artificial Sequence
  Synthetic oligonucleotide; TTA chr11 5173725 5173746 5173742 5173747 +
tgtatttcataagtttaatatc

SEQ ID NO: 74636 - DNA, 22 bp, Artificial Sequence
  Synthetic oligonucleotide; TTT chr11 5173732 5173753 5173749 5173754 +
cataagtttaatatccagaatg

SEQ ID NO: 74637 - DNA, 22 bp, Artificial Sequence
  Synthetic oligonucleotide; TTC chr11 5173733 5173754 5173750 5173755 +
ataagtttaatatccagaatgt

SEQ ID NO: 74638 - DNA, 22 bp, Artificial Sequence
  Synthetic oligonucleotide; TTT chr11 5173741 5173762 5173758 5173763 +
aatatccagaatgtatgaaaaa

SEQ ID NO: 74639 - DNA, 22 bp, Artificial Sequence
  Synthetic oligonucleotide; TTA chr11 5173742 5173763 5173759 5173764 +
atatccagaatgtatgaaaaag

SEQ ID NO: 74640 - DNA, 22 bp, Artificial Sequence
  Synthetic oligonucleotide; CTA chr11 5173769 5173790 5173786 5173791 +
caactcaaaaacaaaaagacaa

SEQ ID NO: 74641 - DNA, 22 bp, Artificial Sequence
  Synthetic oligonucleotide; CTC chr11 5173775 5173796 5173792 5173797 +
aaaaacaaaaagacaaacaact

SEQ ID NO: 74642 - DNA, 22 bp, Artificial Sequence
  Synthetic oligonucleotide; CTC chr11 5173798 5173819 5173815 5173820 +
aatttaaaaatatgcaaatgat

SEQ ID NO: 74643 - DNA, 22 bp, Artificial Sequence
  Synthetic oligonucleotide; TTT chr11 5173803 5173824 5173820 5173825 +
aaaaatatgcaaatgatgggaa

SEQ ID NO: 74644 - DNA, 22 bp, Artificial Sequence
  Synthetic oligonucleotide; TTA chr11 5173804 5173825 5173821 5173826 +
aaaatatgcaaatgatgggaat

SEQ ID NO: 74645 - DNA, 22 bp, Artificial Sequence
  Synthetic oligonucleotide; TTT chr11 5173835 5173856 5173852 5173857 +
ctagaaagaagatatacaaatg

SEQ ID NO: 74646 - DNA, 22 bp, Artificial Sequence
  Synthetic oligonucleotide; TTC chr11 5173836 5173857 5173853 5173858 +
tagaaagaagatatacaaatga

SEQ ID NO: 74647 - DNA, 22 bp, Artificial Sequence
  Synthetic oligonucleotide; CTA chr11 5173838 5173859 5173855 5173860 +
gaaagaagatatacaaatgaac

SEQ ID NO: 74648 - DNA, 22 bp, Artificial Sequence
  Synthetic oligonucleotide; TTG chr11 5173864 5173885 5173881 5173886 +
gcacataaaatgcaaaccaaaa

SEQ ID NO: 74649 - DNA, 22 bp, Artificial Sequence
  Synthetic oligonucleotide; CTA chr11 5173902 5173923 5173919 5173924 +
cttcaaacttactagaatgtct

SEQ ID NO: 74650 - DNA, 22 bp, Artificial Sequence
  Synthetic oligonucleotide; CTT chr11 5173905 5173926 5173922 5173927 +
caaacttactagaatgtctata

SEQ ID NO: 74651 - DNA, 22 bp, Artificial Sequence
  Synthetic oligonucleotide; TTC chr11 5173906 5173927 5173923 5173928 +
aaacttactagaatgtctatac

SEQ ID NO: 74652 - DNA, 22 bp, Artificial Sequence
  Synthetic oligonucleotide; CTT chr11 5173912 5173933 5173929 5173934 +
actagaatgtctatactttaag

SEQ ID NO: 74653 - DNA, 22 bp, Artificial Sequence
  Synthetic oligonucleotide; TTA chr11 5173913 5173934 5173930 5173935 +
ctagaatgtctatactttaaga

SEQ ID NO: 74654 - DNA, 22 bp, Artificial Sequence
  Synthetic oligonucleotide; CTA chr11 5173916 5173937 5173933 5173938 +
gaatgtctatactttaagagaa

SEQ ID NO: 74655 - DNA, 22 bp, Artificial Sequence
  Synthetic oligonucleotide; CTA chr11 5173925 5173946 5173942 5173947 +
tactttaagagaaacaaaacaa

SEQ ID NO: 74656 - DNA, 22 bp, Artificial Sequence
  Synthetic oligonucleotide; CTT chr11 5173930 5173951 5173947 5173952 +
taagagaaacaaaacaaatgaa

SEQ ID NO: 74657 - DNA, 22 bp, Artificial Sequence
  Synthetic oligonucleotide; TTT chr11 5173931 5173952 5173948 5173953 +
aagagaaacaaaacaaatgaaa

SEQ ID NO: 74658 - DNA, 22 bp, Artificial Sequence
  Synthetic oligonucleotide; TTA chr11 5173932 5173953 5173949 5173954 +
agagaaacaaaacaaatgaaaa

SEQ ID NO: 74659 - DNA, 22 bp, Artificial Sequence
  Synthetic oligonucleotide; TTG chr11 5173967 5173988 5173984 5173989 +
acaaagatataagaaaattgga

SEQ ID NO: 74660 - DNA, 22 bp, Artificial Sequence
  Synthetic oligonucleotide; TTG chr11 5173987 5174008 5174004 5174009 +
gaatcctcatatattgctgcta

SEQ ID NO: 74661 - DNA, 22 bp, Artificial Sequence
  Synthetic oligonucleotide; CTC chr11 5173995 5174016 5174012 5174017 +
atatattgctgctaaaaatgtt

SEQ ID NO: 74662 - DNA, 22 bp, Artificial Sequence
  Synthetic oligonucleotide; TTG chr11 5174003 5174024 5174020 5174025 +
ctgctaaaaatgttaagtggtg

SEQ ID NO: 74663 - DNA, 22 bp, Artificial Sequence
  Synthetic oligonucleotide; CTG chr11 5174006 5174027 5174023 5174028 +
ctaaaaatgttaagtggtgcaa

SEQ ID NO: 74664 - DNA, 22 bp, Artificial Sequence
  Synthetic oligonucleotide; CTA chr11 5174009 5174030 5174026 5174031 +
aaaatgttaagtggtgcaactt

SEQ ID NO: 74665 - DNA, 22 bp, Artificial Sequence
  Synthetic oligonucleotide; TTA chr11 5174018 5174039 5174035 5174040 +
agtggtgcaacttctgtagaaa

SEQ ID NO: 74666 - DNA, 22 bp, Artificial Sequence
  Synthetic oligonucleotide; CTT chr11 5174031 5174052 5174048 5174053 +
ctgtagaaaatattttgacagt

SEQ ID NO: 74667 - DNA, 22 bp, Artificial Sequence
  Synthetic oligonucleotide; TTC chr11 5174032 5174053 5174049 5174054 +
tgtagaaaatattttgacagtt

SEQ ID NO: 74668 - DNA, 22 bp, Artificial Sequence
  Synthetic oligonucleotide; CTG chr11 5174034 5174055 5174051 5174056 +
tagaaaatattttgacagttct

SEQ ID NO: 74669 - DNA, 22 bp, Artificial Sequence
  Synthetic oligonucleotide; TTT chr11 5174046 5174067 5174063 5174068 +
tgacagttcttcaaaaacttag

SEQ ID NO: 74670 - DNA, 22 bp, Artificial Sequence
  Synthetic oligonucleotide; TTT chr11 5174047 5174068 5174064 5174069 +
gacagttcttcaaaaacttagg

SEQ ID NO: 74671 - DNA, 22 bp, Artificial Sequence
  Synthetic oligonucleotide; TTG chr11 5174048 5174069 5174065 5174070 +
acagttcttcaaaaacttaggc

SEQ ID NO: 74672 - DNA, 22 bp, Artificial Sequence
  Synthetic oligonucleotide; TTC chr11 5174055 5174076 5174072 5174077 +
ttcaaaaacttaggcactgaat

SEQ ID NO: 74673 - DNA, 22 bp, Artificial Sequence
  Synthetic oligonucleotide; CTT chr11 5174057 5174078 5174074 5174079 +
caaaaacttaggcactgaataa

SEQ ID NO: 74674 - DNA, 22 bp, Artificial Sequence
  Synthetic oligonucleotide; TTC chr11 5174058 5174079 5174075 5174080 +
aaaaacttaggcactgaataac

SEQ ID NO: 74675 - DNA, 22 bp, Artificial Sequence
  Synthetic oligonucleotide; CTT chr11 5174066 5174087 5174083 5174088 +
aggcactgaataacatatgacc

SEQ ID NO: 74676 - DNA, 22 bp, Artificial Sequence
  Synthetic oligonucleotide; TTA chr11 5174067 5174088 5174084 5174089 +
ggcactgaataacatatgaccc

SEQ ID NO: 74677 - DNA, 22 bp, Artificial Sequence
  Synthetic oligonucleotide; CTG chr11 5174074 5174095 5174091 5174096 +
aataacatatgaccccaaaatt

SEQ ID NO: 74678 - DNA, 22 bp, Artificial Sequence
  Synthetic oligonucleotide; TTC chr11 5174097 5174118 5174114 5174119 +
ctctcctaggtatatattaaaa

SEQ ID NO: 74679 - DNA, 22 bp, Artificial Sequence
  Synthetic oligonucleotide; CTC chr11 5174100 5174121 5174117 5174122 +
tcctaggtatatattaaaaata

SEQ ID NO: 74680 - DNA, 22 bp, Artificial Sequence
  Synthetic oligonucleotide; CTC chr11 5174102 5174123 5174119 5174124 +
ctaggtatatattaaaaatata

SEQ ID NO: 74681 - DNA, 22 bp, Artificial Sequence
  Synthetic oligonucleotide; CTA chr11 5174105 5174126 5174122 5174127 +
ggtatatattaaaaatatatat

SEQ ID NO: 74682 - DNA, 22 bp, Artificial Sequence
  Synthetic oligonucleotide; TTA chr11 5174116 5174137 5174133 5174138 +
aaaatatatataaagatttaaa

SEQ ID NO: 74683 - DNA, 22 bp, Artificial Sequence
  Synthetic oligonucleotide; TTT chr11 5174135 5174156 5174152 5174157 +
aaacaggtacttgtactgaaat

SEQ ID NO: 74684 - DNA, 22 bp, Artificial Sequence
  Synthetic oligonucleotide; TTA chr11 5174136 5174157 5174153 5174158 +
aacaggtacttgtactgaaatg

SEQ ID NO: 74685 - DNA, 22 bp, Artificial Sequence
  Synthetic oligonucleotide; CTT chr11 5174147 5174168 5174164 5174169 +
gtactgaaatgttcattgtagc

SEQ ID NO: 74686 - DNA, 22 bp, Artificial Sequence
  Synthetic oligonucleotide; TTG chr11 5174148 5174169 5174165 5174170 +
tactgaaatgttcattgtagca

SEQ ID NO: 74687 - DNA, 22 bp, Artificial Sequence
  Synthetic oligonucleotide; CTG chr11 5174153 5174174 5174170 5174175 +
aaatgttcattgtagcattatt

SEQ ID NO: 74688 - DNA, 22 bp, Artificial Sequence
  Synthetic oligonucleotide; TTC chr11 5174161 5174182 5174178 5174183 +
attgtagcattattcacaatag

SEQ ID NO: 74689 - DNA, 22 bp, Artificial Sequence
  Synthetic oligonucleotide; TTG chr11 5174165 5174186 5174182 5174187 +
tagcattattcacaatagccaa

SEQ ID NO: 74690 - DNA, 22 bp, Artificial Sequence
  Synthetic oligonucleotide; TTA chr11 5174173 5174194 5174190 5174195 +
ttcacaatagccaaaaggtgga

SEQ ID NO: 74691 - DNA, 22 bp, Artificial Sequence
  Synthetic oligonucleotide; TTC chr11 5174176 5174197 5174193 5174198 +
acaatagccaaaaggtggaaac

SEQ ID NO: 74692 - DNA, 22 bp, Artificial Sequence
  Synthetic oligonucleotide; TTA chr11 5174264 5174285 5174281 5174286 +
tgtagcaataaaaaagaatgaa

SEQ ID NO: 74693 - DNA, 22 bp, Artificial Sequence
  Synthetic oligonucleotide; CTT chr11 5174307 5174328 5174324 5174329 +
atttaatgtcatgaataggttt

SEQ ID NO: 74694 - DNA, 22 bp, Artificial Sequence
  Synthetic oligonucleotide; TTA chr11 5174308 5174329 5174325 5174330 +
tttaatgtcatgaataggtttt

SEQ ID NO: 74695 - DNA, 22 bp, Artificial Sequence
  Synthetic oligonucleotide; TTT chr11 5174311 5174332 5174328 5174333 +
aatgtcatgaataggtttttgg

SEQ ID NO: 74696 - DNA, 22 bp, Artificial Sequence
  Synthetic oligonucleotide; TTA chr11 5174312 5174333 5174329 5174334 +
atgtcatgaataggtttttgga

SEQ ID NO: 74697 - DNA, 22 bp, Artificial Sequence
  Synthetic oligonucleotide; TTT chr11 5174329 5174350 5174346 5174351 +
ttggaaatggcaactttaagtg

SEQ ID NO: 74698 - DNA, 22 bp, Artificial Sequence
  Synthetic oligonucleotide; TTT chr11 5174330 5174351 5174347 5174352 +
tggaaatggcaactttaagtga

SEQ ID NO: 74699 - DNA, 22 bp, Artificial Sequence
  Synthetic oligonucleotide; TTT chr11 5174331 5174352 5174348 5174353 +
ggaaatggcaactttaagtgaa

SEQ ID NO: 74700 - DNA, 22 bp, Artificial Sequence
  Synthetic oligonucleotide; TTG chr11 5174332 5174353 5174349 5174354 +
gaaatggcaactttaagtgaaa

SEQ ID NO: 74701 - DNA, 22 bp, Artificial Sequence
  Synthetic oligonucleotide; CTT chr11 5174345 5174366 5174362 5174367 +
taagtgaaatgatgtaaaacag

SEQ ID NO: 74702 - DNA, 22 bp, Artificial Sequence
  Synthetic oligonucleotide; TTT chr11 5174346 5174367 5174363 5174368 +
aagtgaaatgatgtaaaacaga

SEQ ID NO: 74703 - DNA, 22 bp, Artificial Sequence
  Synthetic oligonucleotide; TTA chr11 5174347 5174368 5174364 5174369 +
agtgaaatgatgtaaaacagat

SEQ ID NO: 74704 - DNA, 22 bp, Artificial Sequence
  Synthetic oligonucleotide; CTC chr11 5174373 5174394 5174390 5174395 +
aaataacactgttttagccaac

SEQ ID NO: 74705 - DNA, 22 bp, Artificial Sequence
  Synthetic oligonucleotide; CTG chr11 5174384 5174405 5174401 5174406 +
ttttagccaacactgttagatg

SEQ ID NO: 74706 - DNA, 22 bp, Artificial Sequence
  Synthetic oligonucleotide; TTT chr11 5174387 5174408 5174404 5174409 +
tagccaacactgttagatgaga

SEQ ID NO: 74707 - DNA, 22 bp, Artificial Sequence
  Synthetic oligonucleotide; TTT chr11 5174388 5174409 5174405 5174410 +
agccaacactgttagatgagaa

SEQ ID NO: 74708 - DNA, 22 bp, Artificial Sequence
  Synthetic oligonucleotide; TTA chr11 5174389 5174410 5174406 5174411 +
gccaacactgttagatgagaaa

SEQ ID NO: 74709 - DNA, 22 bp, Artificial Sequence
  Synthetic oligonucleotide; CTG chr11 5174399 5174420 5174416 5174421 +
ttagatgagaaaaaaaatggat

SEQ ID NO: 74710 - DNA, 22 bp, Artificial Sequence
  Synthetic oligonucleotide; TTA chr11 5174402 5174423 5174419 5174424 +
gatgagaaaaaaaatggatatc

SEQ ID NO: 74711 - DNA, 22 bp, Artificial Sequence
  Synthetic oligonucleotide; TTA chr11 5174428 5174449 5174445 5174450 +
tatgtcacttggcttaaagttt

SEQ ID NO: 74712 - DNA, 22 bp, Artificial Sequence
  Synthetic oligonucleotide; CTT chr11 5174438 5174459 5174455 5174460 +
ggcttaaagtttcagtttccaa

SEQ ID NO: 74713 - DNA, 22 bp, Artificial Sequence
  Synthetic oligonucleotide; TTG chr11 5174439 5174460 5174456 5174461 +
gcttaaagtttcagtttccaag

SEQ ID NO: 74714 - DNA, 22 bp, Artificial Sequence
  Synthetic oligonucleotide; CTT chr11 5174443 5174464 5174460 5174465 +
aaagtttcagtttccaagaatc

SEQ ID NO: 74715 - DNA, 22 bp, Artificial Sequence
  Synthetic oligonucleotide; TTA chr11 5174444 5174465 5174461 5174466 +
aagtttcagtttccaagaatct

SEQ ID NO: 74716 - DNA, 22 bp, Artificial Sequence
  Synthetic oligonucleotide; TTT chr11 5174450 5174471 5174467 5174472 +
cagtttccaagaatctatgaat

SEQ ID NO: 74717 - DNA, 22 bp, Artificial Sequence
  Synthetic oligonucleotide; TTC chr11 5174451 5174472 5174468 5174473 +
agtttccaagaatctatgaatg

SEQ ID NO: 74718 - DNA, 22 bp, Artificial Sequence
  Synthetic oligonucleotide; TTT chr11 5174456 5174477 5174473 5174478 +
ccaagaatctatgaatggacaa

SEQ ID NO: 74719 - DNA, 22 bp, Artificial Sequence
  Synthetic oligonucleotide; TTC chr11 5174457 5174478 5174474 5174479 +
caagaatctatgaatggacaac

SEQ ID NO: 74720 - DNA, 22 bp, Artificial Sequence
  Synthetic oligonucleotide; CTA chr11 5174467 5174488 5174484 5174489 +
tgaatggacaacattaagcaaa

SEQ ID NO: 74721 - DNA, 22 bp, Artificial Sequence
  Synthetic oligonucleotide; TTA chr11 5174483 5174504 5174500 5174505 +
agcaaagacttaccactataca

SEQ ID NO: 74722 - DNA, 22 bp, Artificial Sequence
  Synthetic oligonucleotide; CTT chr11 5174494 5174515 5174511 5174516 +
accactatacatgttatggcat

SEQ ID NO: 74723 - DNA, 22 bp, Artificial Sequence
  Synthetic oligonucleotide; TTA chr11 5174495 5174516 5174512 5174517 +
ccactatacatgttatggcatg

SEQ ID NO: 74724 - DNA, 22 bp, Artificial Sequence
  Synthetic oligonucleotide; CTA chr11 5174501 5174522 5174518 5174523 +
tacatgttatggcatggatgga

SEQ ID NO: 74725 - DNA, 22 bp, Artificial Sequence
  Synthetic oligonucleotide; TTA chr11 5174510 5174531 5174527 5174532 +
tggcatggatggactttgaaac

SEQ ID NO: 74726 - DNA, 22 bp, Artificial Sequence
  Synthetic oligonucleotide; CTT chr11 5174526 5174547 5174543 5174548 +
tgaaaccttatgttgggtaaaa

SEQ ID NO: 74727 - DNA, 22 bp, Artificial Sequence
  Synthetic oligonucleotide; TTT chr11 5174527 5174548 5174544 5174549 +
gaaaccttatgttgggtaaaat

SEQ ID NO: 74728 - DNA, 22 bp, Artificial Sequence
  Synthetic oligonucleotide; TTG chr11 5174528 5174549 5174545 5174550 +
aaaccttatgttgggtaaaata

SEQ ID NO: 74729 - DNA, 22 bp, Artificial Sequence
  Synthetic oligonucleotide; CTT chr11 5174535 5174556 5174552 5174557 +
atgttgggtaaaataagccaga

SEQ ID NO: 74730 - DNA, 22 bp, Artificial Sequence
  Synthetic oligonucleotide; TTA chr11 5174536 5174557 5174553 5174558 +
tgttgggtaaaataagccagac

SEQ ID NO: 74731 - DNA, 22 bp, Artificial Sequence
  Synthetic oligonucleotide; TTG chr11 5174541 5174562 5174558 5174563 +
ggtaaaataagccagacacaaa

SEQ ID NO: 74732 - DNA, 22 bp, Artificial Sequence
  Synthetic oligonucleotide; TTG chr11 5174576 5174597 5174593 5174598 +
tatgaatctatttatatgaatt

SEQ ID NO: 74733 - DNA, 22 bp, Artificial Sequence
  Synthetic oligonucleotide; CTA chr11 5174586 5174607 5174603 5174608 +
tttatatgaattatctaaaata

SEQ ID NO: 74734 - DNA, 22 bp, Artificial Sequence
  Synthetic oligonucleotide; TTT chr11 5174589 5174610 5174606 5174611 +
atatgaattatctaaaatagac

SEQ ID NO: 74735 - DNA, 22 bp, Artificial Sequence
  Synthetic oligonucleotide; TTA chr11 5174590 5174611 5174607 5174612 +
tatgaattatctaaaatagact

SEQ ID NO: 74736 - DNA, 22 bp, Artificial Sequence
  Synthetic oligonucleotide; TTA chr11 5174599 5174620 5174616 5174621 +
tctaaaatagactgatttagag

SEQ ID NO: 74737 - DNA, 22 bp, Artificial Sequence
  Synthetic oligonucleotide; CTA chr11 5174603 5174624 5174620 5174625 +
aaatagactgatttagagaaac

SEQ ID NO: 74738 - DNA, 22 bp, Artificial Sequence
  Synthetic oligonucleotide; CTG chr11 5174613 5174634 5174630 5174635 +
atttagagaaacatatagtaga

SEQ ID NO: 74739 - DNA, 22 bp, Artificial Sequence
  Synthetic oligonucleotide; TTT chr11 5174617 5174638 5174634 5174639 +
agagaaacatatagtagattag

SEQ ID NO: 74740 - DNA, 22 bp, Artificial Sequence
  Synthetic oligonucleotide; TTA chr11 5174618 5174639 5174635 5174640 +
gagaaacatatagtagattaga

SEQ ID NO: 74741 - DNA, 22 bp, Artificial Sequence
  Synthetic oligonucleotide; TTA chr11 5174638 5174659 5174655 5174660 +
gaggttactatgggactgggga

SEQ ID NO: 74742 - DNA, 22 bp, Artificial Sequence
  Synthetic oligonucleotide; TTA chr11 5174645 5174666 5174662 5174667 +
ctatgggactggggagttactg

SEQ ID NO: 74743 - DNA, 22 bp, Artificial Sequence
  Synthetic oligonucleotide; CTA chr11 5174648 5174669 5174665 5174670 +
tgggactggggagttactgcct

SEQ ID NO: 74744 - DNA, 22 bp, Artificial Sequence
  Synthetic oligonucleotide; CTG chr11 5174656 5174677 5174673 5174678 +
gggagttactgcctaacaagta

SEQ ID NO: 74745 - DNA, 22 bp, Artificial Sequence
  Synthetic oligonucleotide; TTA chr11 5174664 5174685 5174681 5174686 +
ctgcctaacaagtatagcattt

SEQ ID NO: 74746 - DNA, 22 bp, Artificial Sequence
  Synthetic oligonucleotide; CTG chr11 5174667 5174688 5174684 5174689 +
cctaacaagtatagcatttctg

SEQ ID NO: 74747 - DNA, 22 bp, Artificial Sequence
  Synthetic oligonucleotide; CTA chr11 5174671 5174692 5174688 5174693 +
acaagtatagcatttctgcttg

SEQ ID NO: 74748 - DNA, 22 bp, Artificial Sequence
  Synthetic oligonucleotide; TTT chr11 5174686 5174707 5174703 5174708 +
ctgcttggatgatgaaaaagtt

SEQ ID NO: 74749 - DNA, 22 bp, Artificial Sequence
  Synthetic oligonucleotide; TTC chr11 5174687 5174708 5174704 5174709 +
tgcttggatgatgaaaaagttt

SEQ ID NO: 74750 - DNA, 22 bp, Artificial Sequence
  Synthetic oligonucleotide; CTG chr11 5174689 5174710 5174706 5174711 +
cttggatgatgaaaaagttttg

SEQ ID NO: 74751 - DNA, 22 bp, Artificial Sequence
  Synthetic oligonucleotide; CTT chr11 5174692 5174713 5174709 5174714 +
ggatgatgaaaaagttttggca

SEQ ID NO: 74752 - DNA, 22 bp, Artificial Sequence
  Synthetic oligonucleotide; TTG chr11 5174693 5174714 5174710 5174715 +
gatgatgaaaaagttttggcat

SEQ ID NO: 74753 - DNA, 22 bp, Artificial Sequence
  Synthetic oligonucleotide; TTT chr11 5174709 5174730 5174726 5174731 +
tggcatgagatcatggtgatag

SEQ ID NO: 74754 - DNA, 22 bp, Artificial Sequence
  Synthetic oligonucleotide; TTT chr11 5174710 5174731 5174727 5174732 +
ggcatgagatcatggtgatagc

SEQ ID NO: 74755 - DNA, 22 bp, Artificial Sequence
  Synthetic oligonucleotide; TTG chr11 5174711 5174732 5174728 5174733 +
gcatgagatcatggtgatagcg

SEQ ID NO: 74756 - DNA, 22 bp, Artificial Sequence
  Synthetic oligonucleotide; TTG chr11 5174744 5174765 5174761 5174766 +
ttaatataattaatgccacata

SEQ ID NO: 74757 - DNA, 22 bp, Artificial Sequence
  Synthetic oligonucleotide; TTA chr11 5174747 5174768 5174764 5174769 +
atataattaatgccacataatt

SEQ ID NO: 74758 - DNA, 22 bp, Artificial Sequence
  Synthetic oligonucleotide; TTA chr11 5174756 5174777 5174773 5174778 +
atgccacataattatacttaaa

SEQ ID NO: 74759 - DNA, 22 bp, Artificial Sequence
  Synthetic oligonucleotide; TTA chr11 5174770 5174791 5174787 5174792 +
tacttaaaaatggttaatatgg

SEQ ID NO: 74760 - DNA, 22 bp, Artificial Sequence
  Synthetic oligonucleotide; CTT chr11 5174775 5174796 5174792 5174797 +
aaaaatggttaatatggtgagc

SEQ ID NO: 74761 - DNA, 22 bp, Artificial Sequence
  Synthetic oligonucleotide; TTA chr11 5174776 5174797 5174793 5174798 +
aaaatggttaatatggtgagct

SEQ ID NO: 74762 - DNA, 22 bp, Artificial Sequence
  Synthetic oligonucleotide; TTA chr11 5174786 5174807 5174803 5174808 +
atatggtgagctttattatata

SEQ ID NO: 74763 - DNA, 22 bp, Artificial Sequence
  Synthetic oligonucleotide; CTT chr11 5174799 5174820 5174816 5174821 +
tattatatatgatatacggtat

SEQ ID NO: 74764 - DNA, 22 bp, Artificial Sequence
  Synthetic oligonucleotide; TTT chr11 5174800 5174821 5174817 5174822 +
attatatatgatatacggtatt

SEQ ID NO: 74765 - DNA, 22 bp, Artificial Sequence
  Synthetic oligonucleotide; TTA chr11 5174801 5174822 5174818 5174823 +
ttatatatgatatacggtatta

SEQ ID NO: 74766 - DNA, 22 bp, Artificial Sequence
  Synthetic oligonucleotide; TTA chr11 5174804 5174825 5174821 5174826 +
tatatgatatacggtattatat

SEQ ID NO: 74767 - DNA, 22 bp, Artificial Sequence
  Synthetic oligonucleotide; TTA chr11 5174823 5174844 5174840 5174845 +
tatgtagcatatttataaactt

SEQ ID NO: 74768 - DNA, 22 bp, Artificial Sequence
  Synthetic oligonucleotide; TTT chr11 5174837 5174858 5174854 5174859 +
ataaactttatcacaataaaaa

SEQ ID NO: 74769 - DNA, 22 bp, Artificial Sequence
  Synthetic oligonucleotide; TTA chr11 5174838 5174859 5174855 5174860 +
taaactttatcacaataaaaat

SEQ ID NO: 74770 - DNA, 22 bp, Artificial Sequence
  Synthetic oligonucleotide; CTT chr11 5174845 5174866 5174862 5174867 +
tatcacaataaaaatggaaaga

SEQ ID NO: 74771 - DNA, 22 bp, Artificial Sequence
  Synthetic oligonucleotide; TTT chr11 5174846 5174867 5174863 5174868 +
atcacaataaaaatggaaagaa

SEQ ID NO: 74772 - DNA, 22 bp, Artificial Sequence
  Synthetic oligonucleotide; TTA chr11 5174847 5174868 5174864 5174869 +
tcacaataaaaatggaaagaaa

SEQ ID NO: 74773 - DNA, 22 bp, Artificial Sequence
  Synthetic oligonucleotide; TTT chr11 5174872 5174893 5174889 5174894 +
aaaacaagacaaatttttattt

SEQ ID NO: 74774 - DNA, 22 bp, Artificial Sequence
  Synthetic oligonucleotide; TTA chr11 5174873 5174894 5174890 5174895 +
aaacaagacaaatttttatttt

SEQ ID NO: 74775 - DNA, 22 bp, Artificial Sequence
  Synthetic oligonucleotide; TTT chr11 5174888 5174909 5174905 5174910 +
ttattttgattagggttgaatt

SEQ ID NO: 74776 - DNA, 22 bp, Artificial Sequence
  Synthetic oligonucleotide; TTT chr11 5174889 5174910 5174906 5174911 +
tattttgattagggttgaattg

SEQ ID NO: 74777 - DNA, 22 bp, Artificial Sequence
  Synthetic oligonucleotide; TTT chr11 5174890 5174911 5174907 5174912 +
attttgattagggttgaattga

SEQ ID NO: 74778 - DNA, 22 bp, Artificial Sequence
  Synthetic oligonucleotide; TTA chr11 5174891 5174912 5174908 5174913 +
ttttgattagggttgaattgaa

SEQ ID NO: 74779 - DNA, 22 bp, Artificial Sequence
  Synthetic oligonucleotide; TTT chr11 5174894 5174915 5174911 5174916 +
tgattagggttgaattgaattt

SEQ ID NO: 74780 - DNA, 22 bp, Artificial Sequence
  Synthetic oligonucleotide; TTT chr11 5174895 5174916 5174912 5174917 +
gattagggttgaattgaattta

SEQ ID NO: 74781 - DNA, 22 bp, Artificial Sequence
  Synthetic oligonucleotide; TTG chr11 5174896 5174917 5174913 5174918 +
attagggttgaattgaatttat

SEQ ID NO: 74782 - DNA, 22 bp, Artificial Sequence
  Synthetic oligonucleotide; TTA chr11 5174900 5174921 5174917 5174922 +
gggttgaattgaatttattatg

SEQ ID NO: 74783 - DNA, 22 bp, Artificial Sequence
  Synthetic oligonucleotide; TTG chr11 5174906 5174927 5174923 5174928 +
aattgaatttattatgagttgt

SEQ ID NO: 74784 - DNA, 22 bp, Artificial Sequence
  Synthetic oligonucleotide; TTG chr11 5174911 5174932 5174928 5174933 +
aatttattatgagttgtttctg

SEQ ID NO: 74785 - DNA, 22 bp, Artificial Sequence
  Synthetic oligonucleotide; TTT chr11 5174916 5174937 5174933 5174938 +
attatgagttgtttctgagaga

SEQ ID NO: 74786 - DNA, 22 bp, Artificial Sequence
  Synthetic oligonucleotide; TTA chr11 5174917 5174938 5174934 5174939 +
ttatgagttgtttctgagagaa

SEQ ID NO: 74787 - DNA, 22 bp, Artificial Sequence
  Synthetic oligonucleotide; TTA chr11 5174920 5174941 5174937 5174942 +
tgagttgtttctgagagaattg

SEQ ID NO: 74788 - DNA, 22 bp, Artificial Sequence
  Synthetic oligonucleotide; TTG chr11 5174927 5174948 5174944 5174949 +
tttctgagagaattgttacaat

SEQ ID NO: 74789 - DNA, 22 bp, Artificial Sequence
  Synthetic oligonucleotide; TTT chr11 5174930 5174951 5174947 5174952 +
ctgagagaattgttacaataaa

SEQ ID NO: 74790 - DNA, 22 bp, Artificial Sequence
  Synthetic oligonucleotide; TTC chr11 5174931 5174952 5174948 5174953 +
tgagagaattgttacaataaac

SEQ ID NO: 74791 - DNA, 22 bp, Artificial Sequence
  Synthetic oligonucleotide; CTG chr11 5174933 5174954 5174950 5174955 +
agagaattgttacaataaacaa

SEQ ID NO: 74792 - DNA, 22 bp, Artificial Sequence
  Synthetic oligonucleotide; TTG chr11 5174942 5174963 5174959 5174964 +
ttacaataaacaatgtataata

SEQ ID NO: 74793 - DNA, 22 bp, Artificial Sequence
  Synthetic oligonucleotide; TTA chr11 5174945 5174966 5174962 5174967 +
caataaacaatgtataataaac

SEQ ID NO: 74794 - DNA, 22 bp, Artificial Sequence
  Synthetic oligonucleotide; TTA chr11 5174972 5174993 5174989 5174994 +
tttcatttattttaggcacata

SEQ ID NO: 74795 - DNA, 22 bp, Artificial Sequence
  Synthetic oligonucleotide; TTT chr11 5174975 5174996 5174992 5174997 +
catttattttaggcacatatac

SEQ ID NO: 74796 - DNA, 22 bp, Artificial Sequence
  Synthetic oligonucleotide; TTC chr11 5174976 5174997 5174993 5174998 +
atttattttaggcacatataca

SEQ ID NO: 74797 - DNA, 22 bp, Artificial Sequence
  Synthetic oligonucleotide; TTT chr11 5174980 5175001 5174997 5175002 +
attttaggcacatatacagttc

SEQ ID NO: 74798 - DNA, 22 bp, Artificial Sequence
  Synthetic oligonucleotide; TTA chr11 5174981 5175002 5174998 5175003 +
ttttaggcacatatacagttct

SEQ ID NO: 74799 - DNA, 22 bp, Artificial Sequence
  Synthetic oligonucleotide; TTT chr11 5174984 5175005 5175001 5175006 +
taggcacatatacagttctatt

SEQ ID NO: 74800 - DNA, 22 bp, Artificial Sequence
  Synthetic oligonucleotide; TTT chr11 5174985 5175006 5175002 5175007 +
aggcacatatacagttctatta

SEQ ID NO: 74801 - DNA, 22 bp, Artificial Sequence
  Synthetic oligonucleotide; TTA chr11 5174986 5175007 5175003 5175008 +
ggcacatatacagttctattat

SEQ ID NO: 74802 - DNA, 22 bp, Artificial Sequence
  Synthetic oligonucleotide; TTC chr11 5175002 5175023 5175019 5175024 +
tattatcattttgggttttatt

SEQ ID NO: 74803 - DNA, 22 bp, Artificial Sequence
  Synthetic oligonucleotide; CTA chr11 5175004 5175025 5175021 5175026 +
ttatcattttgggttttatttt

SEQ ID NO: 74804 - DNA, 22 bp, Artificial Sequence
  Synthetic oligonucleotide; TTA chr11 5175007 5175028 5175024 5175029 +
tcattttgggttttattttttg

SEQ ID NO: 74805 - DNA, 22 bp, Artificial Sequence
  Synthetic oligonucleotide; TTT chr11 5175013 5175034 5175030 5175035 +
tgggttttattttttgtttttc

SEQ ID NO: 74806 - DNA, 22 bp, Artificial Sequence
  Synthetic oligonucleotide; TTT chr11 5175014 5175035 5175031 5175036 +
gggttttattttttgtttttct

SEQ ID NO: 74807 - DNA, 22 bp, Artificial Sequence
  Synthetic oligonucleotide; TTG chr11 5175015 5175036 5175032 5175037 +
ggttttattttttgtttttctt

SEQ ID NO: 74808 - DNA, 22 bp, Artificial Sequence
  Synthetic oligonucleotide; TTT chr11 5175020 5175041 5175037 5175042 +
tattttttgtttttctttttgt

SEQ ID NO: 74809 - DNA, 22 bp, Artificial Sequence
  Synthetic oligonucleotide; TTT chr11 5175021 5175042 5175038 5175043 +
attttttgtttttctttttgtt

SEQ ID NO: 74810 - DNA, 22 bp, Artificial Sequence
  Synthetic oligonucleotide; TTA chr11 5175022 5175043 5175039 5175044 +
ttttttgtttttctttttgttt

SEQ ID NO: 74811 - DNA, 22 bp, Artificial Sequence
  Synthetic oligonucleotide; TTT chr11 5175025 5175046 5175042 5175047 +
tttgtttttctttttgtttttg

SEQ ID NO: 74812 - DNA, 22 bp, Artificial Sequence
  Synthetic oligonucleotide; TTT chr11 5175026 5175047 5175043 5175048 +
ttgtttttctttttgtttttgt

SEQ ID NO: 74813 - DNA, 22 bp, Artificial Sequence
  Synthetic oligonucleotide; TTT chr11 5175027 5175048 5175044 5175049 +
tgtttttctttttgtttttgtt

SEQ ID NO: 74814 - DNA, 22 bp, Artificial Sequence
  Synthetic oligonucleotide; TTT chr11 5175028 5175049 5175045 5175050 +
gtttttctttttgtttttgttt

SEQ ID NO: 74815 - DNA, 22 bp, Artificial Sequence
  Synthetic oligonucleotide; TTG chr11 5175029 5175050 5175046 5175051 +
tttttctttttgtttttgtttt

SEQ ID NO: 74816 - DNA, 22 bp, Artificial Sequence
  Synthetic oligonucleotide; TTT chr11 5175032 5175053 5175049 5175054 +
ttctttttgtttttgttttacg

SEQ ID NO: 74817 - DNA, 22 bp, Artificial Sequence
  Synthetic oligonucleotide; TTT chr11 5175033 5175054 5175050 5175055 +
tctttttgtttttgttttacgt

SEQ ID NO: 74818 - DNA, 22 bp, Artificial Sequence
  Synthetic oligonucleotide; TTT chr11 5175034 5175055 5175051 5175056 +
ctttttgtttttgttttacgta

SEQ ID NO: 74819 - DNA, 22 bp, Artificial Sequence
  Synthetic oligonucleotide; TTC chr11 5175035 5175056 5175052 5175057 +
tttttgtttttgttttacgtat

SEQ ID NO: 74820 - DNA, 22 bp, Artificial Sequence
  Synthetic oligonucleotide; CTT chr11 5175037 5175058 5175054 5175059 +
tttgtttttgttttacgtattt

SEQ ID NO: 74821 - DNA, 22 bp, Artificial Sequence
  Synthetic oligonucleotide; TTT chr11 5175038 5175059 5175055 5175060 +
ttgtttttgttttacgtatttt

SEQ ID NO: 74822 - DNA, 22 bp, Artificial Sequence
  Synthetic oligonucleotide; TTT chr11 5175039 5175060 5175056 5175061 +
tgtttttgttttacgtattttt

SEQ ID NO: 74823 - DNA, 22 bp, Artificial Sequence
  Synthetic oligonucleotide; TTT chr11 5175040 5175061 5175057 5175062 +
gtttttgttttacgtatttttg

SEQ ID NO: 74824 - DNA, 22 bp, Artificial Sequence
  Synthetic oligonucleotide; TTG chr11 5175041 5175062 5175058 5175063 +
tttttgttttacgtatttttgg

SEQ ID NO: 74825 - DNA, 22 bp, Artificial Sequence
  Synthetic oligonucleotide; TTT chr11 5175044 5175065 5175061 5175066 +
ttgttttacgtatttttggttt

SEQ ID NO: 74826 - DNA, 22 bp, Artificial Sequence
  Synthetic oligonucleotide; TTT chr11 5175045 5175066 5175062 5175067 +
tgttttacgtatttttggtttt

SEQ ID NO: 74827 - DNA, 22 bp, Artificial Sequence
  Synthetic oligonucleotide; TTT chr11 5175046 5175067 5175063 5175068 +
gttttacgtatttttggttttt

SEQ ID NO: 74828 - DNA, 22 bp, Artificial Sequence
  Synthetic oligonucleotide; TTG chr11 5175047 5175068 5175064 5175069 +
ttttacgtatttttggtttttt

SEQ ID NO: 74829 - DNA, 22 bp, Artificial Sequence
  Synthetic oligonucleotide; TTT chr11 5175050 5175071 5175067 5175072 +
tacgtatttttggtttttttga

SEQ ID NO: 74830 - DNA, 22 bp, Artificial Sequence
  Synthetic oligonucleotide; TTT chr11 5175051 5175072 5175068 5175073 +
acgtatttttggtttttttgag

SEQ ID NO: 74831 - DNA, 22 bp, Artificial Sequence
  Synthetic oligonucleotide; TTA chr11 5175052 5175073 5175069 5175074 +
cgtatttttggtttttttgaga

SEQ ID NO: 74832 - DNA, 22 bp, Artificial Sequence
  Synthetic oligonucleotide; TTT chr11 5175059 5175080 5175076 5175081 +
ttggtttttttgagatggagtc

SEQ ID NO: 74833 - DNA, 22 bp, Artificial Sequence
  Synthetic oligonucleotide; TTT chr11 5175060 5175081 5175077 5175082 +
tggtttttttgagatggagtct

SEQ ID NO: 74834 - DNA, 22 bp, Artificial Sequence
  Synthetic oligonucleotide; TTT chr11 5175061 5175082 5175078 5175083 +
ggtttttttgagatggagtctc

SEQ ID NO: 74835 - DNA, 22 bp, Artificial Sequence
  Synthetic oligonucleotide; TTG chr11 5175062 5175083 5175079 5175084 +
gtttttttgagatggagtctct

SEQ ID NO: 74836 - DNA, 22 bp, Artificial Sequence
  Synthetic oligonucleotide; TTT chr11 5175066 5175087 5175083 5175088 +
ttttgagatggagtctctctct

SEQ ID NO: 74837 - DNA, 22 bp, Artificial Sequence
  Synthetic oligonucleotide; TTT chr11 5175067 5175088 5175084 5175089 +
tttgagatggagtctctctctg

SEQ ID NO: 74838 - DNA, 22 bp, Artificial Sequence
  Synthetic oligonucleotide; TTT chr11 5175068 5175089 5175085 5175090 +
ttgagatggagtctctctctgt

SEQ ID NO: 74839 - DNA, 22 bp, Artificial Sequence
  Synthetic oligonucleotide; TTT chr11 5175069 5175090 5175086 5175091 +
tgagatggagtctctctctgtg

SEQ ID NO: 74840 - DNA, 22 bp, Artificial Sequence
  Synthetic oligonucleotide; TTT chr11 5175070 5175091 5175087 5175092 +
gagatggagtctctctctgtgg

SEQ ID NO: 74841 - DNA, 22 bp, Artificial Sequence
  Synthetic oligonucleotide; TTG chr11 5175071 5175092 5175088 5175093 +
agatggagtctctctctgtggt

SEQ ID NO: 74842 - DNA, 22 bp, Artificial Sequence
  Synthetic oligonucleotide; CTC chr11 5175083 5175104 5175100 5175105 +
tctctgtggtccaggctagagt

SEQ ID NO: 74843 - DNA, 22 bp, Artificial Sequence
  Synthetic oligonucleotide; CTC chr11 5175085 5175106 5175102 5175107 +
tctgtggtccaggctagagtga

SEQ ID NO: 74844 - DNA, 22 bp, Artificial Sequence
  Synthetic oligonucleotide; CTC chr11 5175087 5175108 5175104 5175109 +
tgtggtccaggctagagtgagg

SEQ ID NO: 74845 - DNA, 22 bp, Artificial Sequence
  Synthetic oligonucleotide; CTG chr11 5175089 5175110 5175106 5175111 +
tggtccaggctagagtgaggtg

SEQ ID NO: 74846 - DNA, 22 bp, Artificial Sequence
  Synthetic oligonucleotide; CTA chr11 5175101 5175122 5175118 5175123 +
gagtgaggtgacgcgatctcgg

SEQ ID NO: 74847 - DNA, 22 bp, Artificial Sequence
  Synthetic oligonucleotide; CTC chr11 5175121 5175142 5175138 5175143 +
ggctcactgcaacctccgcctc

SEQ ID NO: 74848 - DNA, 22 bp, Artificial Sequence
  Synthetic oligonucleotide; CTC chr11 5175126 5175147 5175143 5175148 +
actgcaacctccgcctccagaa

SEQ ID NO: 74849 - DNA, 22 bp, Artificial Sequence
  Synthetic oligonucleotide; CTG chr11 5175130 5175151 5175147 5175152 +
caacctccgcctccagaattca

SEQ ID NO: 74850 - DNA, 22 bp, Artificial Sequence
  Synthetic oligonucleotide; CTC chr11 5175137 5175158 5175154 5175159 +
cgcctccagaattcaaatcatt

SEQ ID NO: 74851 - DNA, 22 bp, Artificial Sequence
  Synthetic oligonucleotide; CTC chr11 5175143 5175164 5175160 5175165 +
cagaattcaaatcattctcctg

SEQ ID NO: 74852 - DNA, 22 bp, Artificial Sequence
  Synthetic oligonucleotide; TTC chr11 5175151 5175172 5175168 5175173 +
aaatcattctcctgcctcagcc

SEQ ID NO: 74853 - DNA, 22 bp, Artificial Sequence
  Synthetic oligonucleotide; TTC chr11 5175160 5175181 5175177 5175182 +
tcctgcctcagcctcccatgta

SEQ ID NO: 74854 - DNA, 22 bp, Artificial Sequence
  Synthetic oligonucleotide; CTC chr11 5175162 5175183 5175179 5175184 +
ctgcctcagcctcccatgtagc

SEQ ID NO: 74855 - DNA, 22 bp, Artificial Sequence
  Synthetic oligonucleotide; CTG chr11 5175165 5175186 5175182 5175187 +
cctcagcctcccatgtagctgg

SEQ ID NO: 74856 - DNA, 22 bp, Artificial Sequence
  Synthetic oligonucleotide; CTC chr11 5175169 5175190 5175186 5175191 +
agcctcccatgtagctgggatt

SEQ ID NO: 74857 - DNA, 22 bp, Artificial Sequence
  Synthetic oligonucleotide; CTC chr11 5175175 5175196 5175192 5175197 +
ccatgtagctgggattacaggt

SEQ ID NO: 74858 - DNA, 22 bp, Artificial Sequence
  Synthetic oligonucleotide; CTG chr11 5175186 5175207 5175203 5175208 +
ggattacaggtgtgcgccacca

SEQ ID NO: 74859 - DNA, 22 bp, Artificial Sequence
  Synthetic oligonucleotide; TTA chr11 5175192 5175213 5175209 5175214 +
caggtgtgcgccaccacgtctg

SEQ ID NO: 74860 - DNA, 22 bp, Artificial Sequence
  Synthetic oligonucleotide; CTG chr11 5175214 5175235 5175231 5175236 +
gcctctatcatcattttgaatg

SEQ ID NO: 74861 - DNA, 22 bp, Artificial Sequence
  Synthetic oligonucleotide; CTC chr11 5175219 5175240 5175236 5175241 +
tatcatcattttgaatgtgaca

SEQ ID NO: 74862 - DNA, 22 bp, Artificial Sequence
  Synthetic oligonucleotide; CTA chr11 5175221 5175242 5175238 5175243 +
tcatcattttgaatgtgacatt

SEQ ID NO: 74863 - DNA, 22 bp, Artificial Sequence
  Synthetic oligonucleotide; TTT chr11 5175230 5175251 5175247 5175252 +
tgaatgtgacatttttcccatt

SEQ ID NO: 74864 - DNA, 22 bp, Artificial Sequence
  Synthetic oligonucleotide; TTT chr11 5175231 5175252 5175248 5175253 +
gaatgtgacatttttcccattc

SEQ ID NO: 74865 - DNA, 22 bp, Artificial Sequence
  Synthetic oligonucleotide; TTG chr11 5175232 5175253 5175249 5175254 +
aatgtgacatttttcccattct

SEQ ID NO: 74866 - DNA, 22 bp, Artificial Sequence
  Synthetic oligonucleotide; TTT chr11 5175244 5175265 5175261 5175266 +
ttcccattctattttcctattg

SEQ ID NO: 74867 - DNA, 22 bp, Artificial Sequence
  Synthetic oligonucleotide; TTT chr11 5175245 5175266 5175262 5175267 +
tcccattctattttcctattgg

SEQ ID NO: 74868 - DNA, 22 bp, Artificial Sequence
  Synthetic oligonucleotide; TTT chr11 5175246 5175267 5175263 5175268 +
cccattctattttcctattggt

SEQ ID NO: 74869 - DNA, 22 bp, Artificial Sequence
  Synthetic oligonucleotide; TTC chr11 5175247 5175268 5175264 5175269 +
ccattctattttcctattggtt

SEQ ID NO: 74870 - DNA, 22 bp, Artificial Sequence
  Synthetic oligonucleotide; TTC chr11 5175253 5175274 5175270 5175275 +
tattttcctattggttcttgca

SEQ ID NO: 74871 - DNA, 22 bp, Artificial Sequence
  Synthetic oligonucleotide; CTA chr11 5175255 5175276 5175272 5175277 +
ttttcctattggttcttgcagt

SEQ ID NO: 74872 - DNA, 22 bp, Artificial Sequence
  Synthetic oligonucleotide; TTT chr11 5175258 5175279 5175275 5175280 +
tcctattggttcttgcagttgc

SEQ ID NO: 74873 - DNA, 22 bp, Artificial Sequence
  Synthetic oligonucleotide; TTT chr11 5175259 5175280 5175276 5175281 +
cctattggttcttgcagttgca

SEQ ID NO: 74874 - DNA, 22 bp, Artificial Sequence
  Synthetic oligonucleotide; TTC chr11 5175260 5175281 5175277 5175282 +
ctattggttcttgcagttgcat

SEQ ID NO: 74875 - DNA, 22 bp, Artificial Sequence
  Synthetic oligonucleotide; CTA chr11 5175263 5175284 5175280 5175285 +
ttggttcttgcagttgcataaa

SEQ ID NO: 74876 - DNA, 22 bp, Artificial Sequence
  Synthetic oligonucleotide; TTG chr11 5175266 5175287 5175283 5175288 +
gttcttgcagttgcataaaaca

SEQ ID NO: 74877 - DNA, 22 bp, Artificial Sequence
  Synthetic oligonucleotide; TTC chr11 5175270 5175291 5175287 5175292 +
ttgcagttgcataaaacattat

SEQ ID NO: 74878 - DNA, 22 bp, Artificial Sequence
  Synthetic oligonucleotide; CTT chr11 5175272 5175293 5175289 5175294 +
gcagttgcataaaacattattg

SEQ ID NO: 74879 - DNA, 22 bp, Artificial Sequence
  Synthetic oligonucleotide; TTG chr11 5175273 5175294 5175290 5175295 +
cagttgcataaaacattattga

SEQ ID NO: 74880 - DNA, 22 bp, Artificial Sequence
  Synthetic oligonucleotide; TTG chr11 5175279 5175300 5175296 5175301 +
cataaaacattattgattttta

SEQ ID NO: 74881 - DNA, 22 bp, Artificial Sequence
  Synthetic oligonucleotide; TTA chr11 5175291 5175312 5175308 5175313 +
ttgatttttatgttgtccttat

SEQ ID NO: 74882 - DNA, 22 bp, Artificial Sequence
  Synthetic oligonucleotide; TTG chr11 5175294 5175315 5175311 5175316 +
atttttatgttgtccttatata

SEQ ID NO: 74883 - DNA, 22 bp, Artificial Sequence
  Synthetic oligonucleotide; TTT chr11 5175298 5175319 5175315 5175320 +
ttatgttgtccttatataactc

SEQ ID NO: 74884 - DNA, 22 bp, Artificial Sequence
  Synthetic oligonucleotide; TTT chr11 5175299 5175320 5175316 5175321 +
tatgttgtccttatataactct

SEQ ID NO: 74885 - DNA, 22 bp, Artificial Sequence
  Synthetic oligonucleotide; TTT chr11 5175300 5175321 5175317 5175322 +
atgttgtccttatataactctt

SEQ ID NO: 74886 - DNA, 22 bp, Artificial Sequence
  Synthetic oligonucleotide; TTA chr11 5175301 5175322 5175318 5175323 +
tgttgtccttatataactcttt

SEQ ID NO: 74887 - DNA, 22 bp, Artificial Sequence
  Synthetic oligonucleotide; TTG chr11 5175306 5175327 5175323 5175328 +
tccttatataactctttttact

SEQ ID NO: 74888 - DNA, 22 bp, Artificial Sequence
  Synthetic oligonucleotide; CTT chr11 5175311 5175332 5175328 5175333 +
atataactctttttactttcag

SEQ ID NO: 74889 - DNA, 22 bp, Artificial Sequence
  Synthetic oligonucleotide; TTA chr11 5175312 5175333 5175329 5175334 +
tataactctttttactttcagg

SEQ ID NO: 74890 - DNA, 22 bp, Artificial Sequence
  Synthetic oligonucleotide; CTC chr11 5175320 5175341 5175337 5175342 +
tttttactttcaggtgacttat

SEQ ID NO: 74891 - DNA, 22 bp, Artificial Sequence
  Synthetic oligonucleotide; CTT chr11 5175322 5175343 5175339 5175344 +
tttactttcaggtgacttatac

SEQ ID NO: 74892 - DNA, 22 bp, Artificial Sequence
  Synthetic oligonucleotide; TTT chr11 5175323 5175344 5175340 5175345 +
ttactttcaggtgacttatact

SEQ ID NO: 74893 - DNA, 22 bp, Artificial Sequence
  Synthetic oligonucleotide; TTT chr11 5175324 5175345 5175341 5175346 +
tactttcaggtgacttatactt

SEQ ID NO: 74894 - DNA, 22 bp, Artificial Sequence
  Synthetic oligonucleotide; TTT chr11 5175325 5175346 5175342 5175347 +
actttcaggtgacttatactta

SEQ ID NO: 74895 - DNA, 22 bp, Artificial Sequence
  Synthetic oligonucleotide; TTA chr11 5175326 5175347 5175343 5175348 +
ctttcaggtgacttatacttaa

SEQ ID NO: 74896 - DNA, 22 bp, Artificial Sequence
  Synthetic oligonucleotide; CTT chr11 5175329 5175350 5175346 5175351 +
tcaggtgacttatacttaaatg

SEQ ID NO: 74897 - DNA, 22 bp, Artificial Sequence
  Synthetic oligonucleotide; TTT chr11 5175330 5175351 5175347 5175352 +
caggtgacttatacttaaatga

SEQ ID NO: 74898 - DNA, 22 bp, Artificial Sequence
  Synthetic oligonucleotide; TTC chr11 5175331 5175352 5175348 5175353 +
aggtgacttatacttaaatgat

SEQ ID NO: 74899 - DNA, 22 bp, Artificial Sequence
  Synthetic oligonucleotide; CTT chr11 5175340 5175361 5175357 5175362 +
atacttaaatgatcatatcata

SEQ ID NO: 74900 - DNA, 22 bp, Artificial Sequence
  Synthetic oligonucleotide; TTA chr11 5175341 5175362 5175358 5175363 +
tacttaaatgatcatatcatat

SEQ ID NO: 74901 - DNA, 22 bp, Artificial Sequence
  Synthetic oligonucleotide; CTT chr11 5175346 5175367 5175363 5175368 +
aaatgatcatatcatatacaaa

SEQ ID NO: 74902 - DNA, 22 bp, Artificial Sequence
  Synthetic oligonucleotide; TTA chr11 5175347 5175368 5175364 5175369 +
aatgatcatatcatatacaaaa

SEQ ID NO: 74903 - DNA, 22 bp, Artificial Sequence
  Synthetic oligonucleotide; TTA chr11 5175377 5175398 5175394 5175399 +
aaaaataaaggcaaagatgtaa

SEQ ID NO: 74904 - DNA, 22 bp, Artificial Sequence
  Synthetic oligonucleotide; TTA chr11 5175422 5175443 5175439 5175444 +
caatttggtcttttttctcccc

SEQ ID NO: 74905 - DNA, 22 bp, Artificial Sequence
  Synthetic oligonucleotide; TTT chr11 5175428 5175449 5175445 5175450 +
ggtcttttttctccccccgaaa

SEQ ID NO: 74906 - DNA, 22 bp, Artificial Sequence
  Synthetic oligonucleotide; TTG chr11 5175429 5175450 5175446 5175451 +
gtcttttttctccccccgaaat

SEQ ID NO: 74907 - DNA, 22 bp, Artificial Sequence
  Synthetic oligonucleotide; CTT chr11 5175434 5175455 5175451 5175456 +
ttttctccccccgaaatcaaaa

SEQ ID NO: 74908 - DNA, 22 bp, Artificial Sequence
  Synthetic oligonucleotide; TTT chr11 5175435 5175456 5175452 5175457 +
tttctccccccgaaatcaaaat

SEQ ID NO: 74909 - DNA, 22 bp, Artificial Sequence
  Synthetic oligonucleotide; TTT chr11 5175436 5175457 5175453 5175458 +
ttctccccccgaaatcaaaatt

SEQ ID NO: 74910 - DNA, 22 bp, Artificial Sequence
  Synthetic oligonucleotide; TTT chr11 5175437 5175458 5175454 5175459 +
tctccccccgaaatcaaaattt

SEQ ID NO: 74911 - DNA, 22 bp, Artificial Sequence
  Synthetic oligonucleotide; TTT chr11 5175438 5175459 5175455 5175460 +
ctccccccgaaatcaaaatttt

SEQ ID NO: 74912 - DNA, 22 bp, Artificial Sequence
  Synthetic oligonucleotide; TTC chr11 5175439 5175460 5175456 5175461 +
tccccccgaaatcaaaattttg

SEQ ID NO: 74913 - DNA, 22 bp, Artificial Sequence
  Synthetic oligonucleotide; CTC chr11 5175441 5175462 5175458 5175463 +
cccccgaaatcaaaattttgct

SEQ ID NO: 74914 - DNA, 22 bp, Artificial Sequence
  Synthetic oligonucleotide; TTT chr11 5175459 5175480 5175476 5175481 +
tgcttgattgatattaactaag

SEQ ID NO: 74915 - DNA, 22 bp, Artificial Sequence
  Synthetic oligonucleotide; TTT chr11 5175460 5175481 5175477 5175482 +
gcttgattgatattaactaaga

SEQ ID NO: 74916 - DNA, 22 bp, Artificial Sequence
  Synthetic oligonucleotide; TTG chr11 5175461 5175482 5175478 5175483 +
cttgattgatattaactaagac

SEQ ID NO: 74917 - DNA, 22 bp, Artificial Sequence
  Synthetic oligonucleotide; CTT chr11 5175464 5175485 5175481 5175486 +
gattgatattaactaagacctc

SEQ ID NO: 74918 - DNA, 22 bp, Artificial Sequence
  Synthetic oligonucleotide; TTG chr11 5175465 5175486 5175482 5175487 +
attgatattaactaagacctca

SEQ ID NO: 74919 - DNA, 22 bp, Artificial Sequence
  Synthetic oligonucleotide; TTG chr11 5175469 5175490 5175486 5175491 +
atattaactaagacctcagtta

SEQ ID NO: 74920 - DNA, 22 bp, Artificial Sequence
  Synthetic oligonucleotide; TTA chr11 5175475 5175496 5175492 5175497 +
actaagacctcagttataaaac

SEQ ID NO: 74921 - DNA, 22 bp, Artificial Sequence
  Synthetic oligonucleotide; CTA chr11 5175479 5175500 5175496 5175501 +
agacctcagttataaaacaata

SEQ ID NO: 74922 - DNA, 22 bp, Artificial Sequence
  Synthetic oligonucleotide; CTC chr11 5175486 5175507 5175503 5175508 +
agttataaaacaatagtctgta

SEQ ID NO: 74923 - DNA, 22 bp, Artificial Sequence
  Synthetic oligonucleotide; TTA chr11 5175491 5175512 5175508 5175513 +
taaaacaatagtctgtagtggt

SEQ ID NO: 74924 - DNA, 22 bp, Artificial Sequence
  Synthetic oligonucleotide; CTG chr11 5175506 5175527 5175523 5175528 +
tagtggtactggtcttggatct

SEQ ID NO: 74925 - DNA, 22 bp, Artificial Sequence
  Synthetic oligonucleotide; CTG chr11 5175517 5175538 5175534 5175539 +
gtcttggatctcttgctcattt

SEQ ID NO: 74926 - DNA, 22 bp, Artificial Sequence
  Synthetic oligonucleotide; CTT chr11 5175522 5175543 5175539 5175544 +
ggatctcttgctcatttgaaat

SEQ ID NO: 74927 - DNA, 22 bp, Artificial Sequence
  Synthetic oligonucleotide; TTG chr11 5175523 5175544 5175540 5175545 +
gatctcttgctcatttgaaata

SEQ ID NO: 74928 - DNA, 22 bp, Artificial Sequence
  Synthetic oligonucleotide; CTC chr11 5175529 5175550 5175546 5175551 +
ttgctcatttgaaatactattc

SEQ ID NO: 74929 - DNA, 22 bp, Artificial Sequence
  Synthetic oligonucleotide; CTT chr11 5175531 5175552 5175548 5175553 +
gctcatttgaaatactattctc

SEQ ID NO: 74930 - DNA, 22 bp, Artificial Sequence
  Synthetic oligonucleotide; TTG chr11 5175532 5175553 5175549 5175554 +
ctcatttgaaatactattctca

SEQ ID NO: 74931 - DNA, 22 bp, Artificial Sequence
  Synthetic oligonucleotide; CTC chr11 5175535 5175556 5175552 5175557 +
atttgaaatactattctcacct

SEQ ID NO: 74932 - DNA, 22 bp, Artificial Sequence
  Synthetic oligonucleotide; TTT chr11 5175539 5175560 5175556 5175561 +
gaaatactattctcaccttatc

SEQ ID NO: 74933 - DNA, 22 bp, Artificial Sequence
  Synthetic oligonucleotide; TTG chr11 5175540 5175561 5175557 5175562 +
aaatactattctcaccttatca

SEQ ID NO: 74934 - DNA, 22 bp, Artificial Sequence
  Synthetic oligonucleotide; CTA chr11 5175548 5175569 5175565 5175570 +
ttctcaccttatcaatcactta

SEQ ID NO: 74935 - DNA, 22 bp, Artificial Sequence
  Synthetic oligonucleotide; TTC chr11 5175551 5175572 5175568 5175573 +
tcaccttatcaatcacttagca

SEQ ID NO: 74936 - DNA, 22 bp, Artificial Sequence
  Synthetic oligonucleotide; CTC chr11 5175553 5175574 5175570 5175575 +
accttatcaatcacttagcacc

SEQ ID NO: 74937 - DNA, 22 bp, Artificial Sequence
  Synthetic oligonucleotide; CTT chr11 5175558 5175579 5175575 5175580 +
atcaatcacttagcaccctgta

SEQ ID NO: 74938 - DNA, 22 bp, Artificial Sequence
  Synthetic oligonucleotide; TTA chr11 5175559 5175580 5175576 5175581 +
tcaatcacttagcaccctgtac

SEQ ID NO: 74939 - DNA, 22 bp, Artificial Sequence
  Synthetic oligonucleotide; CTT chr11 5175569 5175590 5175586 5175591 +
agcaccctgtaccttttgtttt

SEQ ID NO: 74940 - DNA, 22 bp, Artificial Sequence
  Synthetic oligonucleotide; TTA chr11 5175570 5175591 5175587 5175592 +
gcaccctgtaccttttgttttt

SEQ ID NO: 74941 - DNA, 22 bp, Artificial Sequence
  Synthetic oligonucleotide; CTG chr11 5175578 5175599 5175595 5175600 +
taccttttgttttttgtttttg

SEQ ID NO: 74942 - DNA, 22 bp, Artificial Sequence
  Synthetic oligonucleotide; CTT chr11 5175584 5175605 5175601 5175606 +
ttgttttttgtttttgctaatt

SEQ ID NO: 74943 - DNA, 22 bp, Artificial Sequence
  Synthetic oligonucleotide; TTT chr11 5175585 5175606 5175602 5175607 +
tgttttttgtttttgctaattc

SEQ ID NO: 74944 - DNA, 22 bp, Artificial Sequence
  Synthetic oligonucleotide; TTT chr11 5175586 5175607 5175603 5175608 +
gttttttgtttttgctaattct

SEQ ID NO: 74945 - DNA, 22 bp, Artificial Sequence
  Synthetic oligonucleotide; TTG chr11 5175587 5175608 5175604 5175609 +
ttttttgtttttgctaattctg

SEQ ID NO: 74946 - DNA, 22 bp, Artificial Sequence
  Synthetic oligonucleotide; TTT chr11 5175590 5175611 5175607 5175612 +
tttgtttttgctaattctgtct

SEQ ID NO: 74947 - DNA, 22 bp, Artificial Sequence
  Synthetic oligonucleotide; TTT chr11 5175591 5175612 5175608 5175613 +
ttgtttttgctaattctgtcta

SEQ ID NO: 74948 - DNA, 22 bp, Artificial Sequence
  Synthetic oligonucleotide; TTT chr11 5175592 5175613 5175609 5175614 +
tgtttttgctaattctgtctag

SEQ ID NO: 74949 - DNA, 22 bp, Artificial Sequence
  Synthetic oligonucleotide; TTT chr11 5175593 5175614 5175610 5175615 +
gtttttgctaattctgtctaga

SEQ ID NO: 74950 - DNA, 22 bp, Artificial Sequence
  Synthetic oligonucleotide; TTG chr11 5175594 5175615 5175611 5175616 +
tttttgctaattctgtctagaa

SEQ ID NO: 74951 - DNA, 22 bp, Artificial Sequence
  Synthetic oligonucleotide; TTT chr11 5175597 5175618 5175614 5175619 +
ttgctaattctgtctagaacac

SEQ ID NO: 74952 - DNA, 22 bp, Artificial Sequence
  Synthetic oligonucleotide; TTT chr11 5175598 5175619 5175615 5175620 +
tgctaattctgtctagaacacc

SEQ ID NO: 74953 - DNA, 22 bp, Artificial Sequence
  Synthetic oligonucleotide; TTT chr11 5175599 5175620 5175616 5175621 +
gctaattctgtctagaacacca

SEQ ID NO: 74954 - DNA, 22 bp, Artificial Sequence
  Synthetic oligonucleotide; TTG chr11 5175600 5175621 5175617 5175622 +
ctaattctgtctagaacaccat

SEQ ID NO: 74955 - DNA, 22 bp, Artificial Sequence
  Synthetic oligonucleotide; CTA chr11 5175603 5175624 5175620 5175625 +
attctgtctagaacaccatatc

SEQ ID NO: 74956 - DNA, 22 bp, Artificial Sequence
  Synthetic oligonucleotide; TTC chr11 5175607 5175628 5175624 5175629 +
tgtctagaacaccatatcagtt

SEQ ID NO: 74957 - DNA, 22 bp, Artificial Sequence
  Synthetic oligonucleotide; CTG chr11 5175609 5175630 5175626 5175631 +
tctagaacaccatatcagtttt

SEQ ID NO: 74958 - DNA, 22 bp, Artificial Sequence
  Synthetic oligonucleotide; CTA chr11 5175613 5175634 5175630 5175635 +
gaacaccatatcagttttagct

SEQ ID NO: 74959 - DNA, 22 bp, Artificial Sequence
  Synthetic oligonucleotide; TTT chr11 5175630 5175651 5175647 5175652 +
tagctaagtgcttccaaaactc

SEQ ID NO: 74960 - DNA, 22 bp, Artificial Sequence
  Synthetic oligonucleotide; TTT chr11 5175631 5175652 5175648 5175653 +
agctaagtgcttccaaaactcc

SEQ ID NO: 74961 - DNA, 22 bp, Artificial Sequence
  Synthetic oligonucleotide; TTA chr11 5175632 5175653 5175649 5175654 +
gctaagtgcttccaaaactccc

SEQ ID NO: 74962 - DNA, 22 bp, Artificial Sequence
  Synthetic oligonucleotide; CTA chr11 5175636 5175657 5175653 5175658 +
agtgcttccaaaactccctgct

SEQ ID NO: 74963 - DNA, 22 bp, Artificial Sequence
  Synthetic oligonucleotide; CTT chr11 5175643 5175664 5175660 5175665 +
ccaaaactccctgctttaaaat

SEQ ID NO: 74964 - DNA, 22 bp, Artificial Sequence
  Synthetic oligonucleotide; TTC chr11 5175644 5175665 5175661 5175666 +
caaaactccctgctttaaaatt

SEQ ID NO: 74965 - DNA, 22 bp, Artificial Sequence
  Synthetic oligonucleotide; CTC chr11 5175652 5175673 5175669 5175674 +
cctgctttaaaattgtttggtt

SEQ ID NO: 74966 - DNA, 22 bp, Artificial Sequence
  Synthetic oligonucleotide; CTG chr11 5175656 5175677 5175673 5175678 +
ctttaaaattgtttggtttctg

SEQ ID NO: 74967 - DNA, 22 bp, Artificial Sequence
  Synthetic oligonucleotide; CTT chr11 5175659 5175680 5175676 5175681 +
taaaattgtttggtttctgccc

SEQ ID NO: 74968 - DNA, 22 bp, Artificial Sequence
  Synthetic oligonucleotide; TTT chr11 5175660 5175681 5175677 5175682 +
aaaattgtttggtttctgccct

SEQ ID NO: 74969 - DNA, 22 bp, Artificial Sequence
  Synthetic oligonucleotide; TTA chr11 5175661 5175682 5175678 5175683 +
aaattgtttggtttctgccctt

SEQ ID NO: 74970 - DNA, 22 bp, Artificial Sequence
  Synthetic oligonucleotide; TTG chr11 5175667 5175688 5175684 5175689 +
tttggtttctgcccttttttgg

SEQ ID NO: 74971 - DNA, 22 bp, Artificial Sequence
  Synthetic oligonucleotide; TTT chr11 5175670 5175691 5175687 5175692 +
ggtttctgcccttttttggacc

SEQ ID NO: 74972 - DNA, 22 bp, Artificial Sequence
  Synthetic oligonucleotide; TTG chr11 5175671 5175692 5175688 5175693 +
gtttctgcccttttttggacct

SEQ ID NO: 74973 - DNA, 22 bp, Artificial Sequence
  Synthetic oligonucleotide; TTT chr11 5175675 5175696 5175692 5175697 +
ctgcccttttttggacctttcc

SEQ ID NO: 74974 - DNA, 22 bp, Artificial Sequence
  Synthetic oligonucleotide; TTC chr11 5175676 5175697 5175693 5175698 +
tgcccttttttggacctttcct

SEQ ID NO: 74975 - DNA, 22 bp, Artificial Sequence
  Synthetic oligonucleotide; CTG chr11 5175678 5175699 5175695 5175700 +
cccttttttggacctttccttt

SEQ ID NO: 74976 - DNA, 22 bp, Artificial Sequence
  Synthetic oligonucleotide; CTT chr11 5175683 5175704 5175700 5175705 +
ttttggacctttcctttccttt

SEQ ID NO: 74977 - DNA, 22 bp, Artificial Sequence
  Synthetic oligonucleotide; TTT chr11 5175684 5175705 5175701 5175706 +
tttggacctttcctttcctttc

SEQ ID NO: 74978 - DNA, 22 bp, Artificial Sequence
  Synthetic oligonucleotide; TTT chr11 5175685 5175706 5175702 5175707 +
ttggacctttcctttcctttcc

SEQ ID NO: 74979 - DNA, 22 bp, Artificial Sequence
  Synthetic oligonucleotide; TTT chr11 5175686 5175707 5175703 5175708 +
tggacctttcctttcctttcct

SEQ ID NO: 74980 - DNA, 22 bp, Artificial Sequence
  Synthetic oligonucleotide; TTT chr11 5175687 5175708 5175704 5175709 +
ggacctttcctttcctttcctt

SEQ ID NO: 74981 - DNA, 22 bp, Artificial Sequence
  Synthetic oligonucleotide; TTG chr11 5175688 5175709 5175705 5175710 +
gacctttcctttcctttccttt

SEQ ID NO: 74982 - DNA, 22 bp, Artificial Sequence
  Synthetic oligonucleotide; CTT chr11 5175694 5175715 5175711 5175716 +
tcctttcctttcctttcctttc

SEQ ID NO: 74983 - DNA, 22 bp, Artificial Sequence
  Synthetic oligonucleotide; TTT chr11 5175695 5175716 5175712 5175717 +
cctttcctttcctttcctttcc

SEQ ID NO: 74984 - DNA, 22 bp, Artificial Sequence
  Synthetic oligonucleotide; TTC chr11 5175696 5175717 5175713 5175718 +
ctttcctttcctttcctttcct

SEQ ID NO: 74985 - DNA, 22 bp, Artificial Sequence
  Synthetic oligonucleotide; CTT chr11 5175699 5175720 5175716 5175721 +
tcctttcctttcctttcctttc

SEQ ID NO: 74986 - DNA, 22 bp, Artificial Sequence
  Synthetic oligonucleotide; TTT chr11 5175700 5175721 5175717 5175722 +
cctttcctttcctttcctttcc

SEQ ID NO: 74987 - DNA, 22 bp, Artificial Sequence
  Synthetic oligonucleotide; TTC chr11 5175701 5175722 5175718 5175723 +
ctttcctttcctttcctttcct

SEQ ID NO: 74988 - DNA, 22 bp, Artificial Sequence
  Synthetic oligonucleotide; CTT chr11 5175704 5175725 5175721 5175726 +
tcctttcctttcctttcctttc

SEQ ID NO: 74989 - DNA, 22 bp, Artificial Sequence
  Synthetic oligonucleotide; TTT chr11 5175705 5175726 5175722 5175727 +
cctttcctttcctttcctttcc

SEQ ID NO: 74990 - DNA, 22 bp, Artificial Sequence
  Synthetic oligonucleotide; TTC chr11 5175706 5175727 5175723 5175728 +
ctttcctttcctttcctttcct

SEQ ID NO: 74991 - DNA, 22 bp, Artificial Sequence
  Synthetic oligonucleotide; CTT chr11 5175709 5175730 5175726 5175731 +
tcctttcctttcctttcctttc

SEQ ID NO: 74992 - DNA, 22 bp, Artificial Sequence
  Synthetic oligonucleotide; TTT chr11 5175710 5175731 5175727 5175732 +
cctttcctttcctttcctttcc

SEQ ID NO: 74993 - DNA, 22 bp, Artificial Sequence
  Synthetic oligonucleotide; TTC chr11 5175711 5175732 5175728 5175733 +
ctttcctttcctttcctttcct

SEQ ID NO: 74994 - DNA, 22 bp, Artificial Sequence
  Synthetic oligonucleotide; CTT chr11 5175714 5175735 5175731 5175736 +
tcctttcctttcctttcctttt

SEQ ID NO: 74995 - DNA, 22 bp, Artificial Sequence
  Synthetic oligonucleotide; TTT chr11 5175715 5175736 5175732 5175737 +
cctttcctttcctttccttttt

SEQ ID NO: 74996 - DNA, 22 bp, Artificial Sequence
  Synthetic oligonucleotide; TTC chr11 5175716 5175737 5175733 5175738 +
ctttcctttcctttcctttttc

SEQ ID NO: 74997 - DNA, 22 bp, Artificial Sequence
  Synthetic oligonucleotide; CTT chr11 5175719 5175740 5175736 5175741 +
tcctttcctttcctttttcctt

SEQ ID NO: 74998 - DNA, 22 bp, Artificial Sequence
  Synthetic oligonucleotide; TTT chr11 5175720 5175741 5175737 5175742 +
cctttcctttcctttttccttt

SEQ ID NO: 74999 - DNA, 22 bp, Artificial Sequence
  Synthetic oligonucleotide; TTC chr11 5175721 5175742 5175738 5175743 +
ctttcctttcctttttcctttc

SEQ ID NO: 75000 - DNA, 22 bp, Artificial Sequence
  Synthetic oligonucleotide; CTT chr11 5175724 5175745 5175741 5175746 +
tcctttcctttttcctttcctt

SEQ ID NO: 75001 - DNA, 22 bp, Artificial Sequence
  Synthetic oligonucleotide; TTT chr11 5175725 5175746 5175742 5175747 +
cctttcctttttcctttccttt

SEQ ID NO: 75002 - DNA, 22 bp, Artificial Sequence
  Synthetic oligonucleotide; TTC chr11 5175726 5175747 5175743 5175748 +
ctttcctttttcctttcctttc

SEQ ID NO: 75003 - DNA, 22 bp, Artificial Sequence
  Synthetic oligonucleotide; CTT chr11 5175729 5175750 5175746 5175751 +
tcctttttcctttcctttcctt

SEQ ID NO: 75004 - DNA, 22 bp, Artificial Sequence
  Synthetic oligonucleotide; TTT chr11 5175730 5175751 5175747 5175752 +
cctttttcctttcctttccttc

SEQ ID NO: 75005 - DNA, 22 bp, Artificial Sequence
  Synthetic oligonucleotide; TTC chr11 5175731 5175752 5175748 5175753 +
ctttttcctttcctttccttcc

SEQ ID NO: 75006 - DNA, 22 bp, Artificial Sequence
  Synthetic oligonucleotide; CTT chr11 5175734 5175755 5175751 5175756 +
tttcctttcctttccttccctt

SEQ ID NO: 75007 - DNA, 22 bp, Artificial Sequence
  Synthetic oligonucleotide; TTT chr11 5175735 5175756 5175752 5175757 +
ttcctttcctttccttcccttc

SEQ ID NO: 75008 - DNA, 22 bp, Artificial Sequence
  Synthetic oligonucleotide; TTT chr11 5175736 5175757 5175753 5175758 +
tcctttcctttccttcccttcc

SEQ ID NO: 75009 - DNA, 22 bp, Artificial Sequence
  Synthetic oligonucleotide; TTT chr11 5175737 5175758 5175754 5175759 +
cctttcctttccttcccttccc

SEQ ID NO: 75010 - DNA, 22 bp, Artificial Sequence
  Synthetic oligonucleotide; TTC chr11 5175738 5175759 5175755 5175760 +
ctttcctttccttcccttccct

SEQ ID NO: 75011 - DNA, 22 bp, Artificial Sequence
  Synthetic oligonucleotide; CTT chr11 5175741 5175762 5175758 5175763 +
tcctttccttcccttccctttc

SEQ ID NO: 75012 - DNA, 22 bp, Artificial Sequence
  Synthetic oligonucleotide; TTT chr11 5175742 5175763 5175759 5175764 +
cctttccttcccttccctttcc

SEQ ID NO: 75013 - DNA, 22 bp, Artificial Sequence
  Synthetic oligonucleotide; TTC chr11 5175743 5175764 5175760 5175765 +
ctttccttcccttccctttcct

SEQ ID NO: 75014 - DNA, 22 bp, Artificial Sequence
  Synthetic oligonucleotide; CTT chr11 5175746 5175767 5175763 5175768 +
tccttcccttccctttcctttc

SEQ ID NO: 75015 - DNA, 22 bp, Artificial Sequence
  Synthetic oligonucleotide; TTT chr11 5175747 5175768 5175764 5175769 +
ccttcccttccctttcctttcc

SEQ ID NO: 75016 - DNA, 22 bp, Artificial Sequence
  Synthetic oligonucleotide; TTC chr11 5175748 5175769 5175765 5175770 +
cttcccttccctttcctttccc

SEQ ID NO: 75017 - DNA, 22 bp, Artificial Sequence
  Synthetic oligonucleotide; CTT chr11 5175751 5175772 5175768 5175773 +
cccttccctttcctttcccttc

SEQ ID NO: 75018 - DNA, 22 bp, Artificial Sequence
  Synthetic oligonucleotide; TTC chr11 5175752 5175773 5175769 5175774 +
ccttccctttcctttcccttcc

SEQ ID NO: 75019 - DNA, 22 bp, Artificial Sequence
  Synthetic oligonucleotide; CTT chr11 5175756 5175777 5175773 5175778 +
ccctttcctttcccttccctcc

SEQ ID NO: 75020 - DNA, 22 bp, Artificial Sequence
  Synthetic oligonucleotide; TTC chr11 5175757 5175778 5175774 5175779 +
cctttcctttcccttccctccc

SEQ ID NO: 75021 - DNA, 22 bp, Artificial Sequence
  Synthetic oligonucleotide; CTT chr11 5175761 5175782 5175778 5175783 +
tcctttcccttccctccctttc

SEQ ID NO: 75022 - DNA, 22 bp, Artificial Sequence
  Synthetic oligonucleotide; TTT chr11 5175762 5175783 5175779 5175784 +
cctttcccttccctccctttcc

SEQ ID NO: 75023 - DNA, 22 bp, Artificial Sequence
  Synthetic oligonucleotide; TTC chr11 5175763 5175784 5175780 5175785 +
ctttcccttccctccctttccc

SEQ ID NO: 75024 - DNA, 22 bp, Artificial Sequence
  Synthetic oligonucleotide; CTT chr11 5175766 5175787 5175783 5175788 +
tcccttccctccctttcccttt

SEQ ID NO: 75025 - DNA, 22 bp, Artificial Sequence
  Synthetic oligonucleotide; TTT chr11 5175767 5175788 5175784 5175789 +
cccttccctccctttccctttc

SEQ ID NO: 75026 - DNA, 22 bp, Artificial Sequence
  Synthetic oligonucleotide; TTC chr11 5175768 5175789 5175785 5175790 +
ccttccctccctttccctttcc

SEQ ID NO: 75027 - DNA, 22 bp, Artificial Sequence
  Synthetic oligonucleotide; CTT chr11 5175772 5175793 5175789 5175794 +
ccctccctttccctttcccttt

SEQ ID NO: 75028 - DNA, 22 bp, Artificial Sequence
  Synthetic oligonucleotide; TTC chr11 5175773 5175794 5175790 5175795 +
cctccctttccctttccctttc

SEQ ID NO: 75029 - DNA, 22 bp, Artificial Sequence
  Synthetic oligonucleotide; CTC chr11 5175777 5175798 5175794 5175799 +
cctttccctttccctttccctt

SEQ ID NO: 75030 - DNA, 22 bp, Artificial Sequence
  Synthetic oligonucleotide; CTT chr11 5175781 5175802 5175798 5175803 +
tccctttccctttccctttccc

SEQ ID NO: 75031 - DNA, 22 bp, Artificial Sequence
  Synthetic oligonucleotide; TTT chr11 5175782 5175803 5175799 5175804 +
ccctttccctttccctttccct

SEQ ID NO: 75032 - DNA, 22 bp, Artificial Sequence
  Synthetic oligonucleotide; TTC chr11 5175783 5175804 5175800 5175805 +
cctttccctttccctttccctt

SEQ ID NO: 75033 - DNA, 22 bp, Artificial Sequence
  Synthetic oligonucleotide; CTT chr11 5175787 5175808 5175804 5175809 +
tccctttccctttccctttccc

SEQ ID NO: 75034 - DNA, 22 bp, Artificial Sequence
  Synthetic oligonucleotide; TTT chr11 5175788 5175809 5175805 5175810 +
ccctttccctttccctttccct

SEQ ID NO: 75035 - DNA, 22 bp, Artificial Sequence
  Synthetic oligonucleotide; TTC chr11 5175789 5175810 5175806 5175811 +
cctttccctttccctttccctt

SEQ ID NO: 75036 - DNA, 22 bp, Artificial Sequence
  Synthetic oligonucleotide; CTT chr11 5175793 5175814 5175810 5175815 +
tccctttccctttccctttccc

SEQ ID NO: 75037 - DNA, 22 bp, Artificial Sequence
  Synthetic oligonucleotide; TTT chr11 5175794 5175815 5175811 5175816 +
ccctttccctttccctttccct

SEQ ID NO: 75038 - DNA, 22 bp, Artificial Sequence
  Synthetic oligonucleotide; TTC chr11 5175795 5175816 5175812 5175817 +
cctttccctttccctttccctt

SEQ ID NO: 75039 - DNA, 22 bp, Artificial Sequence
  Synthetic oligonucleotide; CTT chr11 5175799 5175820 5175816 5175821 +
tccctttccctttcccttcctg

SEQ ID NO: 75040 - DNA, 22 bp, Artificial Sequence
  Synthetic oligonucleotide; TTT chr11 5175800 5175821 5175817 5175822 +
ccctttccctttcccttcctgc

SEQ ID NO: 75041 - DNA, 22 bp, Artificial Sequence
  Synthetic oligonucleotide; TTC chr11 5175801 5175822 5175818 5175823 +
cctttccctttcccttcctgct

SEQ ID NO: 75042 - DNA, 22 bp, Artificial Sequence
  Synthetic oligonucleotide; CTT chr11 5175805 5175826 5175822 5175827 +
tccctttcccttcctgctgaag

SEQ ID NO: 75043 - DNA, 22 bp, Artificial Sequence
  Synthetic oligonucleotide; TTT chr11 5175806 5175827 5175823 5175828 +
ccctttcccttcctgctgaagg

SEQ ID NO: 75044 - DNA, 22 bp, Artificial Sequence
  Synthetic oligonucleotide; TTC chr11 5175807 5175828 5175824 5175829 +
cctttcccttcctgctgaagga

SEQ ID NO: 75045 - DNA, 22 bp, Artificial Sequence
  Synthetic oligonucleotide; CTT chr11 5175811 5175832 5175828 5175833 +
tcccttcctgctgaaggattac

SEQ ID NO: 75046 - DNA, 22 bp, Artificial Sequence
  Synthetic oligonucleotide; TTT chr11 5175812 5175833 5175829 5175834 +
cccttcctgctgaaggattact

SEQ ID NO: 75047 - DNA, 22 bp, Artificial Sequence
  Synthetic oligonucleotide; TTC chr11 5175813 5175834 5175830 5175835 +
ccttcctgctgaaggattactg

SEQ ID NO: 75048 - DNA, 22 bp, Artificial Sequence
  Synthetic oligonucleotide; CTT chr11 5175817 5175838 5175834 5175839 +
cctgctgaaggattactggtta

SEQ ID NO: 75049 - DNA, 22 bp, Artificial Sequence
  Synthetic oligonucleotide; TTC chr11 5175818 5175839 5175835 5175840 +
ctgctgaaggattactggttaa

SEQ ID NO: 75050 - DNA, 22 bp, Artificial Sequence
  Synthetic oligonucleotide; CTG chr11 5175821 5175842 5175838 5175843 +
ctgaaggattactggttaagga

SEQ ID NO: 75051 - DNA, 22 bp, Artificial Sequence
  Synthetic oligonucleotide; CTG chr11 5175824 5175845 5175841 5175846 +
aaggattactggttaaggagac

SEQ ID NO: 75052 - DNA, 22 bp, Artificial Sequence
  Synthetic oligonucleotide; TTA chr11 5175832 5175853 5175849 5175854 +
ctggttaaggagacagtagaac

SEQ ID NO: 75053 - DNA, 22 bp, Artificial Sequence
  Synthetic oligonucleotide; CTG chr11 5175835 5175856 5175852 5175857 +
gttaaggagacagtagaacatg

SEQ ID NO: 75054 - DNA, 22 bp, Artificial Sequence
  Synthetic oligonucleotide; TTA chr11 5175839 5175860 5175856 5175861 +
aggagacagtagaacatgaaaa

SEQ ID NO: 75055 - DNA, 22 bp, Artificial Sequence
  Synthetic oligonucleotide; CTT chr11 5175864 5175885 5175881 5175886 +
cttctcatgtccagggcaatgg

SEQ ID NO: 75056 - DNA, 22 bp, Artificial Sequence
  Synthetic oligonucleotide; TTC chr11 5175865 5175886 5175882 5175887 +
ttctcatgtccagggcaatggc

SEQ ID NO: 75057 - DNA, 22 bp, Artificial Sequence
  Synthetic oligonucleotide; CTT chr11 5175867 5175888 5175884 5175889 +
ctcatgtccagggcaatggctc

SEQ ID NO: 75058 - DNA, 22 bp, Artificial Sequence
  Synthetic oligonucleotide; TTC chr11 5175868 5175889 5175885 5175890 +
tcatgtccagggcaatggctca

SEQ ID NO: 75059 - DNA, 22 bp, Artificial Sequence
  Synthetic oligonucleotide; CTC chr11 5175870 5175891 5175887 5175892 +
atgtccagggcaatggctcagt

SEQ ID NO: 75060 - DNA, 22 bp, Artificial Sequence
  Synthetic oligonucleotide; CTC chr11 5175889 5175910 5175906 5175911 +
agtaatgttaaattcagcagct

SEQ ID NO: 75061 - DNA, 22 bp, Artificial Sequence
  Synthetic oligonucleotide; TTA chr11 5175899 5175920 5175916 5175921 +
aattcagcagctgcatagcaac

SEQ ID NO: 75062 - DNA, 22 bp, Artificial Sequence
  Synthetic oligonucleotide; TTC chr11 5175904 5175925 5175921 5175926 +
agcagctgcatagcaacagcca

SEQ ID NO: 75063 - DNA, 22 bp, Artificial Sequence
  Synthetic oligonucleotide; CTG chr11 5175912 5175933 5175929 5175934 +
catagcaacagccatttcctaa

SEQ ID NO: 75064 - DNA, 22 bp, Artificial Sequence
  Synthetic oligonucleotide; TTT chr11 5175929 5175950 5175946 5175951 +
cctaaatcctttcagaatctga

SEQ ID NO: 75065 - DNA, 22 bp, Artificial Sequence
  Synthetic oligonucleotide; TTC chr11 5175930 5175951 5175947 5175952 +
ctaaatcctttcagaatctgag

SEQ ID NO: 75066 - DNA, 22 bp, Artificial Sequence
  Synthetic oligonucleotide; CTA chr11 5175933 5175954 5175950 5175955 +
aatcctttcagaatctgagtgc

SEQ ID NO: 75067 - DNA, 22 bp, Artificial Sequence
  Synthetic oligonucleotide; CTT chr11 5175940 5175961 5175957 5175962 +
tcagaatctgagtgctcaactg

SEQ ID NO: 75068 - DNA, 22 bp, Artificial Sequence
  Synthetic oligonucleotide; TTT chr11 5175941 5175962 5175958 5175963 +
cagaatctgagtgctcaactga

SEQ ID NO: 75069 - DNA, 22 bp, Artificial Sequence
  Synthetic oligonucleotide; TTC chr11 5175942 5175963 5175959 5175964 +
agaatctgagtgctcaactgaa

SEQ ID NO: 75070 - DNA, 22 bp, Artificial Sequence
  Synthetic oligonucleotide; CTG chr11 5175950 5175971 5175967 5175972 +
agtgctcaactgaaagtttatt

SEQ ID NO: 75071 - DNA, 22 bp, Artificial Sequence
  Synthetic oligonucleotide; CTC chr11 5175957 5175978 5175974 5175979 +
aactgaaagtttatttagagat

SEQ ID NO: 75072 - DNA, 22 bp, Artificial Sequence
  Synthetic oligonucleotide; CTG chr11 5175962 5175983 5175979 5175984 +
aaagtttatttagagattgtaa

SEQ ID NO: 75073 - DNA, 22 bp, Artificial Sequence
  Synthetic oligonucleotide; TTT chr11 5175969 5175990 5175986 5175991 +
atttagagattgtaaattcaat

SEQ ID NO: 75074 - DNA, 22 bp, Artificial Sequence
  Synthetic oligonucleotide; TTA chr11 5175970 5175991 5175987 5175992 +
tttagagattgtaaattcaatc

SEQ ID NO: 75075 - DNA, 22 bp, Artificial Sequence
  Synthetic oligonucleotide; TTT chr11 5175973 5175994 5175990 5175995 +
agagattgtaaattcaatcatt

SEQ ID NO: 75076 - DNA, 22 bp, Artificial Sequence
  Synthetic oligonucleotide; TTA chr11 5175974 5175995 5175991 5175996 +
gagattgtaaattcaatcattt

SEQ ID NO: 75077 - DNA, 22 bp, Artificial Sequence
  Synthetic oligonucleotide; TTG chr11 5175981 5176002 5175998 5176003 +
taaattcaatcatttttacttc

SEQ ID NO: 75078 - DNA, 22 bp, Artificial Sequence
  Synthetic oligonucleotide; TTC chr11 5175988 5176009 5176005 5176010 +
aatcatttttacttctaccatt

SEQ ID NO: 75079 - DNA, 22 bp, Artificial Sequence
  Synthetic oligonucleotide; TTT chr11 5175996 5176017 5176013 5176018 +
ttacttctaccattttaactgt

SEQ ID NO: 75080 - DNA, 22 bp, Artificial Sequence
  Synthetic oligonucleotide; TTT chr11 5175997 5176018 5176014 5176019 +
tacttctaccattttaactgtc

SEQ ID NO: 75081 - DNA, 22 bp, Artificial Sequence
  Synthetic oligonucleotide; TTT chr11 5175998 5176019 5176015 5176020 +
acttctaccattttaactgtca

SEQ ID NO: 75082 - DNA, 22 bp, Artificial Sequence
  Synthetic oligonucleotide; TTA chr11 5175999 5176020 5176016 5176021 +
cttctaccattttaactgtcaa

SEQ ID NO: 75083 - DNA, 22 bp, Artificial Sequence
  Synthetic oligonucleotide; CTT chr11 5176002 5176023 5176019 5176024 +
ctaccattttaactgtcaaaat

SEQ ID NO: 75084 - DNA, 22 bp, Artificial Sequence
  Synthetic oligonucleotide; TTC chr11 5176003 5176024 5176020 5176025 +
taccattttaactgtcaaaatg

SEQ ID NO: 75085 - DNA, 22 bp, Artificial Sequence
  Synthetic oligonucleotide; CTA chr11 5176005 5176026 5176022 5176027 +
ccattttaactgtcaaaatgac

SEQ ID NO: 75086 - DNA, 22 bp, Artificial Sequence
  Synthetic oligonucleotide; TTT chr11 5176011 5176032 5176028 5176033 +
taactgtcaaaatgacatgtat

SEQ ID NO: 75087 - DNA, 22 bp, Artificial Sequence
  Synthetic oligonucleotide; TTT chr11 5176012 5176033 5176029 5176034 +
aactgtcaaaatgacatgtata

SEQ ID NO: 75088 - DNA, 22 bp, Artificial Sequence
  Synthetic oligonucleotide; TTA chr11 5176013 5176034 5176030 5176035 +
actgtcaaaatgacatgtatat

SEQ ID NO: 75089 - DNA, 22 bp, Artificial Sequence
  Synthetic oligonucleotide; CTG chr11 5176017 5176038 5176034 5176039 +
tcaaaatgacatgtatatgtta

SEQ ID NO: 75090 - DNA, 22 bp, Artificial Sequence
  Synthetic oligonucleotide; TTA chr11 5176039 5176060 5176056 5176061 +
ctgtgtagctatatatgtatat

SEQ ID NO: 75091 - DNA, 22 bp, Artificial Sequence
  Synthetic oligonucleotide; CTG chr11 5176042 5176063 5176059 5176064 +
tgtagctatatatgtatatatg

SEQ ID NO: 75092 - DNA, 22 bp, Artificial Sequence
  Synthetic oligonucleotide; CTA chr11 5176050 5176071 5176067 5176072 +
tatatgtatatatgattatata

SEQ ID NO: 75093 - DNA, 22 bp, Artificial Sequence
  Synthetic oligonucleotide; TTA chr11 5176068 5176089 5176085 5176090 +
tatatattcatatacctattta

SEQ ID NO: 75094 - DNA, 22 bp, Artificial Sequence
  Synthetic oligonucleotide; TTC chr11 5176077 5176098 5176094 5176099 +
atatacctatttaagatatcat

SEQ ID NO: 75095 - DNA, 22 bp, Artificial Sequence
  Synthetic oligonucleotide; CTA chr11 5176086 5176107 5176103 5176108 +
tttaagatatcatgttgcatgc

SEQ ID NO: 75096 - DNA, 22 bp, Artificial Sequence
  Synthetic oligonucleotide; TTT chr11 5176089 5176110 5176106 5176111 +
aagatatcatgttgcatgcatt

SEQ ID NO: 75097 - DNA, 22 bp, Artificial Sequence
  Synthetic oligonucleotide; TTA chr11 5176090 5176111 5176107 5176112 +
agatatcatgttgcatgcattt

SEQ ID NO: 75098 - DNA, 22 bp, Artificial Sequence
  Synthetic oligonucleotide; TTG chr11 5176103 5176124 5176120 5176125 +
catgcattttggatgtgaaatt

SEQ ID NO: 75099 - DNA, 22 bp, Artificial Sequence
  Synthetic oligonucleotide; TTT chr11 5176112 5176133 5176129 5176134 +
tggatgtgaaattggcattttc

SEQ ID NO: 75100 - DNA, 22 bp, Artificial Sequence
  Synthetic oligonucleotide; TTT chr11 5176113 5176134 5176130 5176135 +
ggatgtgaaattggcattttct

SEQ ID NO: 75101 - DNA, 22 bp, Artificial Sequence
  Synthetic oligonucleotide; TTG chr11 5176114 5176135 5176131 5176136 +
gatgtgaaattggcattttctt

SEQ ID NO: 75102 - DNA, 22 bp, Artificial Sequence
  Synthetic oligonucleotide; TTG chr11 5176126 5176147 5176143 5176148 +
gcattttcttagctccccactg

SEQ ID NO: 75103 - DNA, 22 bp, Artificial Sequence
  Synthetic oligonucleotide; TTT chr11 5176132 5176153 5176149 5176154 +
tcttagctccccactgctaaaa

SEQ ID NO: 75104 - DNA, 22 bp, Artificial Sequence
  Synthetic oligonucleotide; TTT chr11 5176133 5176154 5176150 5176155 +
cttagctccccactgctaaaat

SEQ ID NO: 75105 - DNA, 22 bp, Artificial Sequence
  Synthetic oligonucleotide; TTC chr11 5176134 5176155 5176151 5176156 +
ttagctccccactgctaaaatc

SEQ ID NO: 75106 - DNA, 22 bp, Artificial Sequence
  Synthetic oligonucleotide; CTT chr11 5176136 5176157 5176153 5176158 +
agctccccactgctaaaatcaa

SEQ ID NO: 75107 - DNA, 22 bp, Artificial Sequence
  Synthetic oligonucleotide; TTA chr11 5176137 5176158 5176154 5176159 +
gctccccactgctaaaatcaag

SEQ ID NO: 75108 - DNA, 22 bp, Artificial Sequence
  Synthetic oligonucleotide; CTC chr11 5176141 5176162 5176158 5176163 +
cccactgctaaaatcaagtata

SEQ ID NO: 75109 - DNA, 22 bp, Artificial Sequence
  Synthetic oligonucleotide; CTG chr11 5176148 5176169 5176165 5176170 +
ctaaaatcaagtatacaaaatc

SEQ ID NO: 75110 - DNA, 22 bp, Artificial Sequence
  Synthetic oligonucleotide; CTA chr11 5176151 5176172 5176168 5176173 +
aaatcaagtatacaaaatcttc

SEQ ID NO: 75111 - DNA, 22 bp, Artificial Sequence
  Synthetic oligonucleotide; CTT chr11 5176172 5176193 5176189 5176194 +
cctacctttcagtcaaatcctc

SEQ ID NO: 75112 - DNA, 22 bp, Artificial Sequence
  Synthetic oligonucleotide; TTC chr11 5176173 5176194 5176190 5176195 +
ctacctttcagtcaaatcctct

SEQ ID NO: 75113 - DNA, 22 bp, Artificial Sequence
  Synthetic oligonucleotide; CTA chr11 5176176 5176197 5176193 5176198 +
cctttcagtcaaatcctctgtc

SEQ ID NO: 75114 - DNA, 22 bp, Artificial Sequence
  Synthetic oligonucleotide; CTT chr11 5176180 5176201 5176197 5176202 +
tcagtcaaatcctctgtcatca

SEQ ID NO: 75115 - DNA, 22 bp, Artificial Sequence
  Synthetic oligonucleotide; TTT chr11 5176181 5176202 5176198 5176203 +
cagtcaaatcctctgtcatcat

SEQ ID NO: 75116 - DNA, 22 bp, Artificial Sequence
  Synthetic oligonucleotide; TTC chr11 5176182 5176203 5176199 5176204 +
agtcaaatcctctgtcatcata

SEQ ID NO: 75117 - DNA, 22 bp, Artificial Sequence
  Synthetic oligonucleotide; CTC chr11 5176194 5176215 5176211 5176216 +
tgtcatcatactgcaatctatc

SEQ ID NO: 75118 - DNA, 22 bp, Artificial Sequence
  Synthetic oligonucleotide; CTG chr11 5176196 5176217 5176213 5176218 +
tcatcatactgcaatctatcta

SEQ ID NO: 75119 - DNA, 22 bp, Artificial Sequence
  Synthetic oligonucleotide; CTG chr11 5176207 5176228 5176224 5176229 +
caatctatctattccctcattt

SEQ ID NO: 75120 - DNA, 22 bp, Artificial Sequence
  Synthetic oligonucleotide; CTA chr11 5176214 5176235 5176231 5176236 +
tctattccctcattttccatca

SEQ ID NO: 75121 - DNA, 22 bp, Artificial Sequence
  Synthetic oligonucleotide; CTA chr11 5176218 5176239 5176235 5176240 +
ttccctcattttccatcatatt

SEQ ID NO: 75122 - DNA, 22 bp, Artificial Sequence
  Synthetic oligonucleotide; TTC chr11 5176221 5176242 5176238 5176243 +
cctcattttccatcatattatt

SEQ ID NO: 75123 - DNA, 22 bp, Artificial Sequence
  Synthetic oligonucleotide; CTC chr11 5176225 5176246 5176242 5176247 +
attttccatcatattattactt

SEQ ID NO: 75124 - DNA, 22 bp, Artificial Sequence
  Synthetic oligonucleotide; TTT chr11 5176229 5176250 5176246 5176251 +
tccatcatattattacttttat

SEQ ID NO: 75125 - DNA, 22 bp, Artificial Sequence
  Synthetic oligonucleotide; TTT chr11 5176230 5176251 5176247 5176252 +
ccatcatattattacttttatg

SEQ ID NO: 75126 - DNA, 22 bp, Artificial Sequence
  Synthetic oligonucleotide; TTC chr11 5176231 5176252 5176248 5176253 +
catcatattattacttttatgg

SEQ ID NO: 75127 - DNA, 22 bp, Artificial Sequence
  Synthetic oligonucleotide; TTA chr11 5176241 5176262 5176258 5176263 +
ttacttttatggagaaatgcaa

SEQ ID NO: 75128 - DNA, 22 bp, Artificial Sequence
  Synthetic oligonucleotide; TTA chr11 5176244 5176265 5176261 5176266 +
cttttatggagaaatgcaacgc

SEQ ID NO: 75129 - DNA, 22 bp, Artificial Sequence
  Synthetic oligonucleotide; CTT chr11 5176247 5176268 5176264 5176269 +
ttatggagaaatgcaacgctga

SEQ ID NO: 75130 - DNA, 22 bp, Artificial Sequence
  Synthetic oligonucleotide; TTT chr11 5176248 5176269 5176265 5176270 +
tatggagaaatgcaacgctgag

SEQ ID NO: 75131 - DNA, 22 bp, Artificial Sequence
  Synthetic oligonucleotide; TTT chr11 5176249 5176270 5176266 5176271 +
atggagaaatgcaacgctgagt

SEQ ID NO: 75132 - DNA, 22 bp, Artificial Sequence
  Synthetic oligonucleotide; TTA chr11 5176250 5176271 5176267 5176272 +
tggagaaatgcaacgctgagtg

SEQ ID NO: 75133 - DNA, 22 bp, Artificial Sequence
  Synthetic oligonucleotide; CTG chr11 5176268 5176289 5176285 5176290 +
agtgtaaatttcacattagaat

SEQ ID NO: 75134 - DNA, 22 bp, Artificial Sequence
  Synthetic oligonucleotide; TTT chr11 5176279 5176300 5176296 5176301 +
cacattagaatgtccaaaacat

SEQ ID NO: 75135 - DNA, 22 bp, Artificial Sequence
  Synthetic oligonucleotide; TTC chr11 5176280 5176301 5176297 5176302 +
acattagaatgtccaaaacatt

SEQ ID NO: 75136 - DNA, 22 bp, Artificial Sequence
  Synthetic oligonucleotide; TTA chr11 5176286 5176307 5176303 5176308 +
gaatgtccaaaacattgtgtag

SEQ ID NO: 75137 - DNA, 22 bp, Artificial Sequence
  Synthetic oligonucleotide; TTG chr11 5176303 5176324 5176320 5176325 +
tgtagagtagaaaaaaaaacta

SEQ ID NO: 75138 - DNA, 22 bp, Artificial Sequence
  Synthetic oligonucleotide; CTA chr11 5176325 5176346 5176342 5176347 +
tatgaagtttaacagatgtact

SEQ ID NO: 75139 - DNA, 22 bp, Artificial Sequence
  Synthetic oligonucleotide; TTT chr11 5176335 5176356 5176352 5176357 +
aacagatgtactgagaaatgca

SEQ ID NO: 75140 - DNA, 22 bp, Artificial Sequence
  Synthetic oligonucleotide; TTA chr11 5176336 5176357 5176353 5176358 +
acagatgtactgagaaatgcaa

SEQ ID NO: 75141 - DNA, 22 bp, Artificial Sequence
  Synthetic oligonucleotide; CTG chr11 5176348 5176369 5176365 5176370 +
agaaatgcaaatattttgaaga

SEQ ID NO: 75142 - DNA, 22 bp, Artificial Sequence
  Synthetic oligonucleotide; TTT chr11 5176364 5176385 5176381 5176386 +
tgaagacaattcaaaatagcac

SEQ ID NO: 75143 - DNA, 22 bp, Artificial Sequence
  Synthetic oligonucleotide; TTT chr11 5176365 5176386 5176382 5176387 +
gaagacaattcaaaatagcact

SEQ ID NO: 75144 - DNA, 22 bp, Artificial Sequence
  Synthetic oligonucleotide; TTG chr11 5176366 5176387 5176383 5176388 +
aagacaattcaaaatagcactt

SEQ ID NO: 75145 - DNA, 22 bp, Artificial Sequence
  Synthetic oligonucleotide; TTC chr11 5176376 5176397 5176393 5176398 +
aaaatagcacttaaatatttag

SEQ ID NO: 75146 - DNA, 22 bp, Artificial Sequence
  Synthetic oligonucleotide; CTT chr11 5176388 5176409 5176405 5176410 +
aaatatttagtgtagtactagc

SEQ ID NO: 75147 - DNA, 22 bp, Artificial Sequence
  Synthetic oligonucleotide; TTA chr11 5176389 5176410 5176406 5176411 +
aatatttagtgtagtactagca

SEQ ID NO: 75148 - DNA, 22 bp, Artificial Sequence
  Synthetic oligonucleotide; TTT chr11 5176396 5176417 5176413 5176418 +
agtgtagtactagcagaaacaa

SEQ ID NO: 75149 - DNA, 22 bp, Artificial Sequence
  Synthetic oligonucleotide; TTA chr11 5176397 5176418 5176414 5176419 +
gtgtagtactagcagaaacaaa

SEQ ID NO: 75150 - DNA, 22 bp, Artificial Sequence
  Synthetic oligonucleotide; CTA chr11 5176408 5176429 5176425 5176430 +
gcagaaacaaattaattagatt

SEQ ID NO: 75151 - DNA, 22 bp, Artificial Sequence
  Synthetic oligonucleotide; TTA chr11 5176422 5176443 5176439 5176444 +
attagattttttagaatgtttt

SEQ ID NO: 75152 - DNA, 22 bp, Artificial Sequence
  Synthetic oligonucleotide; TTA chr11 5176426 5176447 5176443 5176448 +
gattttttagaatgttttatgt

SEQ ID NO: 75153 - DNA, 22 bp, Artificial Sequence
  Synthetic oligonucleotide; TTT chr11 5176431 5176452 5176448 5176453 +
tttagaatgttttatgtattct

SEQ ID NO: 75154 - DNA, 22 bp, Artificial Sequence
  Synthetic oligonucleotide; TTT chr11 5176432 5176453 5176449 5176454 +
ttagaatgttttatgtattctc

SEQ ID NO: 75155 - DNA, 22 bp, Artificial Sequence
  Synthetic oligonucleotide; TTT chr11 5176433 5176454 5176450 5176455 +
tagaatgttttatgtattctcc

SEQ ID NO: 75156 - DNA, 22 bp, Artificial Sequence
  Synthetic oligonucleotide; TTT chr11 5176434 5176455 5176451 5176456 +
agaatgttttatgtattctccc

SEQ ID NO: 75157 - DNA, 22 bp, Artificial Sequence
  Synthetic oligonucleotide; TTA chr11 5176435 5176456 5176452 5176457 +
gaatgttttatgtattctccct

SEQ ID NO: 75158 - DNA, 22 bp, Artificial Sequence
  Synthetic oligonucleotide; TTT chr11 5176443 5176464 5176460 5176465 +
tatgtattctcccttcccaata

SEQ ID NO: 75159 - DNA, 22 bp, Artificial Sequence
  Synthetic oligonucleotide; TTT chr11 5176444 5176465 5176461 5176466 +
atgtattctcccttcccaataa

SEQ ID NO: 75160 - DNA, 22 bp, Artificial Sequence
  Synthetic oligonucleotide; TTA chr11 5176445 5176466 5176462 5176467 +
tgtattctcccttcccaataat

SEQ ID NO: 75161 - DNA, 22 bp, Artificial Sequence
  Synthetic oligonucleotide; TTC chr11 5176452 5176473 5176469 5176474 +
tcccttcccaataatggaaata

SEQ ID NO: 75162 - DNA, 22 bp, Artificial Sequence
  Synthetic oligonucleotide; CTC chr11 5176454 5176475 5176471 5176476 +
ccttcccaataatggaaatact

SEQ ID NO: 75163 - DNA, 22 bp, Artificial Sequence
  Synthetic oligonucleotide; CTT chr11 5176458 5176479 5176475 5176480 +
cccaataatggaaatactgtag

SEQ ID NO: 75164 - DNA, 22 bp, Artificial Sequence
  Synthetic oligonucleotide; TTC chr11 5176459 5176480 5176476 5176481 +
ccaataatggaaatactgtagg

SEQ ID NO: 75165 - DNA, 22 bp, Artificial Sequence
  Synthetic oligonucleotide; CTG chr11 5176477 5176498 5176494 5176499 +
taggaagtctatttctaacttt

SEQ ID NO: 75166 - DNA, 22 bp, Artificial Sequence
  Synthetic oligonucleotide; CTA chr11 5176488 5176509 5176505 5176510 +
tttctaactttcttattctttg

SEQ ID NO: 75167 - DNA, 22 bp, Artificial Sequence
  Synthetic oligonucleotide; TTT chr11 5176491 5176512 5176508 5176513 +
ctaactttcttattctttggtg

SEQ ID NO: 75168 - DNA, 22 bp, Artificial Sequence
  Synthetic oligonucleotide; TTC chr11 5176492 5176513 5176509 5176514 +
taactttcttattctttggtgc

SEQ ID NO: 75169 - DNA, 22 bp, Artificial Sequence
  Synthetic oligonucleotide; CTA chr11 5176494 5176515 5176511 5176516 +
actttcttattctttggtgcac

SEQ ID NO: 75170 - DNA, 22 bp, Artificial Sequence
  Synthetic oligonucleotide; CTT chr11 5176498 5176519 5176515 5176520 +
tcttattctttggtgcacaaac

SEQ ID NO: 75171 - DNA, 22 bp, Artificial Sequence
  Synthetic oligonucleotide; TTT chr11 5176499 5176520 5176516 5176521 +
cttattctttggtgcacaaacg

SEQ ID NO: 75172 - DNA, 22 bp, Artificial Sequence
  Synthetic oligonucleotide; TTC chr11 5176500 5176521 5176517 5176522 +
ttattctttggtgcacaaacgt

SEQ ID NO: 75173 - DNA, 22 bp, Artificial Sequence
  Synthetic oligonucleotide; CTT chr11 5176502 5176523 5176519 5176524 +
attctttggtgcacaaacgtgt

SEQ ID NO: 75174 - DNA, 22 bp, Artificial Sequence
  Synthetic oligonucleotide; TTA chr11 5176503 5176524 5176520 5176525 +
ttctttggtgcacaaacgtgtg

SEQ ID NO: 75175 - DNA, 22 bp, Artificial Sequence
  Synthetic oligonucleotide; TTC chr11 5176506 5176527 5176523 5176528 +
tttggtgcacaaacgtgtgtgt

SEQ ID NO: 75176 - DNA, 22 bp, Artificial Sequence
  Synthetic oligonucleotide; CTT chr11 5176508 5176529 5176525 5176530 +
tggtgcacaaacgtgtgtgtgt

SEQ ID NO: 75177 - DNA, 22 bp, Artificial Sequence
  Synthetic oligonucleotide; TTT chr11 5176509 5176530 5176526 5176531 +
ggtgcacaaacgtgtgtgtgtg

SEQ ID NO: 75178 - DNA, 22 bp, Artificial Sequence
  Synthetic oligonucleotide; TTG chr11 5176510 5176531 5176527 5176532 +
gtgcacaaacgtgtgtgtgtgt

SEQ ID NO: 75179 - DNA, 22 bp, Artificial Sequence
  Synthetic oligonucleotide; TTA chr11 5176618 5176639 5176635 5176640 +
agtgtgtgtatatgtaaatcta

SEQ ID NO: 75180 - DNA, 22 bp, Artificial Sequence
  Synthetic oligonucleotide; CTA chr11 5176640 5176661 5176657 5176662 +
agtgttaatacatgtataaatt

SEQ ID NO: 75181 - DNA, 22 bp, Artificial Sequence
  Synthetic oligonucleotide; TTA chr11 5176647 5176668 5176664 5176669 +
atacatgtataaatttctataa

SEQ ID NO: 75182 - DNA, 22 bp, Artificial Sequence
  Synthetic oligonucleotide; TTT chr11 5176663 5176684 5176680 5176685 +
ctataaaaatcacagaaaaagc

SEQ ID NO: 75183 - DNA, 22 bp, Artificial Sequence
  Synthetic oligonucleotide; TTC chr11 5176664 5176685 5176681 5176686 +
tataaaaatcacagaaaaagct

SEQ ID NO: 75184 - DNA, 22 bp, Artificial Sequence
  Synthetic oligonucleotide; CTA chr11 5176666 5176687 5176683 5176688 +
taaaaatcacagaaaaagctaa

SEQ ID NO: 75185 - DNA, 22 bp, Artificial Sequence
  Synthetic oligonucleotide; CTA chr11 5176687 5176708 5176704 5176709 +
agcataagccaagcatgagtag

SEQ ID NO: 75186 - DNA, 22 bp, Artificial Sequence
  Synthetic oligonucleotide; TTT chr11 5176713 5176734 5176730 5176735 +
caagtgtttaagatagtacctc

SEQ ID NO: 75187 - DNA, 22 bp, Artificial Sequence
  Synthetic oligonucleotide; TTC chr11 5176714 5176735 5176731 5176736 +
aagtgtttaagatagtacctca

SEQ ID NO: 75188 - DNA, 22 bp, Artificial Sequence
  Synthetic oligonucleotide; TTT chr11 5176722 5176743 5176739 5176744 +
aagatagtacctcagatttctc

SEQ ID NO: 75189 - DNA, 22 bp, Artificial Sequence
  Synthetic oligonucleotide; TTA chr11 5176723 5176744 5176740 5176745 +
agatagtacctcagatttctca

SEQ ID NO: 75190 - DNA, 22 bp, Artificial Sequence
  Synthetic oligonucleotide; CTC chr11 5176735 5176756 5176752 5176757 +
agatttctcaaagttttttttt

SEQ ID NO: 75191 - DNA, 22 bp, Artificial Sequence
  Synthetic oligonucleotide; TTT chr11 5176741 5176762 5176758 5176763 +
ctcaaagttttttttttgtctt

SEQ ID NO: 75192 - DNA, 22 bp, Artificial Sequence
  Synthetic oligonucleotide; TTC chr11 5176742 5176763 5176759 5176764 +
tcaaagttttttttttgtcttt

SEQ ID NO: 75193 - DNA, 22 bp, Artificial Sequence
  Synthetic oligonucleotide; CTC chr11 5176744 5176765 5176761 5176766 +
aaagttttttttttgtctttct

SEQ ID NO: 75194 - DNA, 22 bp, Artificial Sequence
  Synthetic oligonucleotide; TTT chr11 5176751 5176772 5176768 5176773 +
tttttttgtctttctttaggtg

SEQ ID NO: 75195 - DNA, 22 bp, Artificial Sequence
  Synthetic oligonucleotide; TTT chr11 5176752 5176773 5176769 5176774 +
ttttttgtctttctttaggtgt

SEQ ID NO: 75196 - DNA, 22 bp, Artificial Sequence
  Synthetic oligonucleotide; TTT chr11 5176753 5176774 5176770 5176775 +
tttttgtctttctttaggtgta

SEQ ID NO: 75197 - DNA, 22 bp, Artificial Sequence
  Synthetic oligonucleotide; TTT chr11 5176754 5176775 5176771 5176776 +
ttttgtctttctttaggtgtaa

SEQ ID NO: 75198 - DNA, 22 bp, Artificial Sequence
  Synthetic oligonucleotide; TTT chr11 5176755 5176776 5176772 5176777 +
tttgtctttctttaggtgtaaa

SEQ ID NO: 75199 - DNA, 22 bp, Artificial Sequence
  Synthetic oligonucleotide; TTT chr11 5176756 5176777 5176773 5176778 +
ttgtctttctttaggtgtaaat

SEQ ID NO: 75200 - DNA, 22 bp, Artificial Sequence
  Synthetic oligonucleotide; TTT chr11 5176757 5176778 5176774 5176779 +
tgtctttctttaggtgtaaata

SEQ ID NO: 75201 - DNA, 22 bp, Artificial Sequence
  Synthetic oligonucleotide; TTT chr11 5176758 5176779 5176775 5176780 +
gtctttctttaggtgtaaataa

SEQ ID NO: 75202 - DNA, 22 bp, Artificial Sequence
  Synthetic oligonucleotide; TTG chr11 5176759 5176780 5176776 5176781 +
tctttctttaggtgtaaataag

SEQ ID NO: 75203 - DNA, 22 bp, Artificial Sequence
  Synthetic oligonucleotide; CTT chr11 5176763 5176784 5176780 5176785 +
tctttaggtgtaaataaggtca

SEQ ID NO: 75204 - DNA, 22 bp, Artificial Sequence
  Synthetic oligonucleotide; TTT chr11 5176764 5176785 5176781 5176786 +
ctttaggtgtaaataaggtcat

SEQ ID NO: 75205 - DNA, 22 bp, Artificial Sequence
  Synthetic oligonucleotide; TTC chr11 5176765 5176786 5176782 5176787 +
tttaggtgtaaataaggtcatt

SEQ ID NO: 75206 - DNA, 22 bp, Artificial Sequence
  Synthetic oligonucleotide; CTT chr11 5176767 5176788 5176784 5176789 +
taggtgtaaataaggtcatttt

SEQ ID NO: 75207 - DNA, 22 bp, Artificial Sequence
  Synthetic oligonucleotide; TTT chr11 5176768 5176789 5176785 5176790 +
aggtgtaaataaggtcattttt

SEQ ID NO: 75208 - DNA, 22 bp, Artificial Sequence
  Synthetic oligonucleotide; TTA chr11 5176769 5176790 5176786 5176791 +
ggtgtaaataaggtcatttttt

SEQ ID NO: 75209 - DNA, 22 bp, Artificial Sequence
  Synthetic oligonucleotide; TTT chr11 5176788 5176809 5176805 5176810 +
tttaaacattctcatggcattg

SEQ ID NO: 75210 - DNA, 22 bp, Artificial Sequence
  Synthetic oligonucleotide; TTT chr11 5176789 5176810 5176806 5176811 +
ttaaacattctcatggcattgt

SEQ ID NO: 75211 - DNA, 22 bp, Artificial Sequence
  Synthetic oligonucleotide; TTT chr11 5176790 5176811 5176807 5176812 +
taaacattctcatggcattgtt

SEQ ID NO: 75212 - DNA, 22 bp, Artificial Sequence
  Synthetic oligonucleotide; TTT chr11 5176791 5176812 5176808 5176813 +
aaacattctcatggcattgttc

SEQ ID NO: 75213 - DNA, 22 bp, Artificial Sequence
  Synthetic oligonucleotide; TTA chr11 5176792 5176813 5176809 5176814 +
aacattctcatggcattgttct

SEQ ID NO: 75214 - DNA, 22 bp, Artificial Sequence
  Synthetic oligonucleotide; TTC chr11 5176799 5176820 5176816 5176821 +
tcatggcattgttctaggcttt

SEQ ID NO: 75215 - DNA, 22 bp, Artificial Sequence
  Synthetic oligonucleotide; CTC chr11 5176801 5176822 5176818 5176823 +
atggcattgttctaggctttta

SEQ ID NO: 75216 - DNA, 22 bp, Artificial Sequence
  Synthetic oligonucleotide; TTG chr11 5176810 5176831 5176827 5176832 +
ttctaggcttttaagaaggaga

SEQ ID NO: 75217 - DNA, 22 bp, Artificial Sequence
  Synthetic oligonucleotide; TTC chr11 5176813 5176834 5176830 5176835 +
taggcttttaagaaggagagat

SEQ ID NO: 75218 - DNA, 22 bp, Artificial Sequence
  Synthetic oligonucleotide; CTA chr11 5176815 5176836 5176832 5176837 +
ggcttttaagaaggagagattg

SEQ ID NO: 75219 - DNA, 22 bp, Artificial Sequence
  Synthetic oligonucleotide; CTT chr11 5176820 5176841 5176837 5176842 +
ttaagaaggagagattgtaaaa

SEQ ID NO: 75220 - DNA, 22 bp, Artificial Sequence
  Synthetic oligonucleotide; TTT chr11 5176821 5176842 5176838 5176843 +
taagaaggagagattgtaaaaa

SEQ ID NO: 75221 - DNA, 22 bp, Artificial Sequence
  Synthetic oligonucleotide; TTT chr11 5176822 5176843 5176839 5176844 +
aagaaggagagattgtaaaaat

SEQ ID NO: 75222 - DNA, 22 bp, Artificial Sequence
  Synthetic oligonucleotide; TTA chr11 5176823 5176844 5176840 5176845 +
agaaggagagattgtaaaaatt

SEQ ID NO: 75223 - DNA, 22 bp, Artificial Sequence
  Synthetic oligonucleotide; TTG chr11 5176837 5176858 5176854 5176859 +
taaaaatttgtattgatgtgaa

SEQ ID NO: 75224 - DNA, 22 bp, Artificial Sequence
  Synthetic oligonucleotide; TTT chr11 5176846 5176867 5176863 5176868 +
gtattgatgtgaagggattaag

SEQ ID NO: 75225 - DNA, 22 bp, Artificial Sequence
  Synthetic oligonucleotide; TTG chr11 5176847 5176868 5176864 5176869 +
tattgatgtgaagggattaagg

SEQ ID NO: 75226 - DNA, 22 bp, Artificial Sequence
  Synthetic oligonucleotide; TTG chr11 5176852 5176873 5176869 5176874 +
atgtgaagggattaaggtatag

SEQ ID NO: 75227 - DNA, 22 bp, Artificial Sequence
  Synthetic oligonucleotide; TTA chr11 5176866 5176887 5176883 5176888 +
aggtatagtctgtagataatat

SEQ ID NO: 75228 - DNA, 22 bp, Artificial Sequence
  Synthetic oligonucleotide; CTG chr11 5176878 5176899 5176895 5176900 +
tagataatatcatagataatta

SEQ ID NO: 75229 - DNA, 22 bp, Artificial Sequence
  Synthetic oligonucleotide; TTA chr11 5176900 5176921 5176917 5176922 +
cttttgctgggattacattctt

SEQ ID NO: 75230 - DNA, 22 bp, Artificial Sequence
  Synthetic oligonucleotide; CTT chr11 5176903 5176924 5176920 5176925 +
ttgctgggattacattcttttt

SEQ ID NO: 75231 - DNA, 22 bp, Artificial Sequence
  Synthetic oligonucleotide; TTT chr11 5176904 5176925 5176921 5176926 +
tgctgggattacattctttttt

SEQ ID NO: 75232 - DNA, 22 bp, Artificial Sequence
  Synthetic oligonucleotide; TTT chr11 5176905 5176926 5176922 5176927 +
gctgggattacattctttttta

SEQ ID NO: 75233 - DNA, 22 bp, Artificial Sequence
  Synthetic oligonucleotide; TTG chr11 5176906 5176927 5176923 5176928 +
ctgggattacattcttttttat

SEQ ID NO: 75234 - DNA, 22 bp, Artificial Sequence
  Synthetic oligonucleotide; CTG chr11 5176909 5176930 5176926 5176931 +
ggattacattcttttttattta

SEQ ID NO: 75235 - DNA, 22 bp, Artificial Sequence
  Synthetic oligonucleotide; TTA chr11 5176915 5176936 5176932 5176937 +
cattcttttttatttaagtttc

SEQ ID NO: 75236 - DNA, 22 bp, Artificial Sequence
  Synthetic oligonucleotide; TTC chr11 5176920 5176941 5176937 5176942 +
ttttttatttaagtttcttgga

SEQ ID NO: 75237 - DNA, 22 bp, Artificial Sequence
  Synthetic oligonucleotide; CTT chr11 5176922 5176943 5176939 5176944 +
ttttatttaagtttcttggaaa

SEQ ID NO: 75238 - DNA, 22 bp, Artificial Sequence
  Synthetic oligonucleotide; TTT chr11 5176923 5176944 5176940 5176945 +
tttatttaagtttcttggaaaa

SEQ ID NO: 75239 - DNA, 22 bp, Artificial Sequence
  Synthetic oligonucleotide; TTT chr11 5176924 5176945 5176941 5176946 +
ttatttaagtttcttggaaaat

SEQ ID NO: 75240 - DNA, 22 bp, Artificial Sequence
  Synthetic oligonucleotide; TTT chr11 5176925 5176946 5176942 5176947 +
tatttaagtttcttggaaaata

SEQ ID NO: 75241 - DNA, 22 bp, Artificial Sequence
  Synthetic oligonucleotide; TTT chr11 5176926 5176947 5176943 5176948 +
atttaagtttcttggaaaatat

SEQ ID NO: 75242 - DNA, 22 bp, Artificial Sequence
  Synthetic oligonucleotide; TTA chr11 5176927 5176948 5176944 5176949 +
tttaagtttcttggaaaatatt

SEQ ID NO: 75243 - DNA, 22 bp, Artificial Sequence
  Synthetic oligonucleotide; TTT chr11 5176930 5176951 5176947 5176952 +
aagtttcttggaaaatattctc

SEQ ID NO: 75244 - DNA, 22 bp, Artificial Sequence
  Synthetic oligonucleotide; TTA chr11 5176931 5176952 5176948 5176953 +
agtttcttggaaaatattctcc

SEQ ID NO: 75245 - DNA, 22 bp, Artificial Sequence
  Synthetic oligonucleotide; TTT chr11 5176936 5176957 5176953 5176958 +
cttggaaaatattctccttaat

SEQ ID NO: 75246 - DNA, 22 bp, Artificial Sequence
  Synthetic oligonucleotide; TTC chr11 5176937 5176958 5176954 5176959 +
ttggaaaatattctccttaatc

SEQ ID NO: 75247 - DNA, 22 bp, Artificial Sequence
  Synthetic oligonucleotide; CTT chr11 5176939 5176960 5176956 5176961 +
ggaaaatattctccttaatctt

SEQ ID NO: 75248 - DNA, 22 bp, Artificial Sequence
  Synthetic oligonucleotide; TTG chr11 5176940 5176961 5176957 5176962 +
gaaaatattctccttaatcttc

SEQ ID NO: 75249 - DNA, 22 bp, Artificial Sequence
  Synthetic oligonucleotide; TTC chr11 5176950 5176971 5176967 5176972 +
tccttaatcttctctagctttt

SEQ ID NO: 75250 - DNA, 22 bp, Artificial Sequence
  Synthetic oligonucleotide; CTC chr11 5176952 5176973 5176969 5176974 +
cttaatcttctctagcttttta

SEQ ID NO: 75251 - DNA, 22 bp, Artificial Sequence
  Synthetic oligonucleotide; CTT chr11 5176955 5176976 5176972 5176977 +
aatcttctctagctttttaaaa

SEQ ID NO: 75252 - DNA, 22 bp, Artificial Sequence
  Synthetic oligonucleotide; TTA chr11 5176956 5176977 5176973 5176978 +
atcttctctagctttttaaaaa

SEQ ID NO: 75253 - DNA, 22 bp, Artificial Sequence
  Synthetic oligonucleotide; CTT chr11 5176961 5176982 5176978 5176983 +
ctctagctttttaaaaaatgtt

SEQ ID NO: 75254 - DNA, 22 bp, Artificial Sequence
  Synthetic oligonucleotide; TTC chr11 5176962 5176983 5176979 5176984 +
tctagctttttaaaaaatgttt

SEQ ID NO: 75255 - DNA, 22 bp, Artificial Sequence
  Synthetic oligonucleotide; CTC chr11 5176964 5176985 5176981 5176986 +
tagctttttaaaaaatgtttat

SEQ ID NO: 75256 - DNA, 22 bp, Artificial Sequence
  Synthetic oligonucleotide; CTA chr11 5176966 5176987 5176983 5176988 +
gctttttaaaaaatgtttattt

SEQ ID NO: 75257 - DNA, 22 bp, Artificial Sequence
  Synthetic oligonucleotide; CTT chr11 5176970 5176991 5176987 5176992 +
tttaaaaaatgtttattttaaa

SEQ ID NO: 75258 - DNA, 22 bp, Artificial Sequence
  Synthetic oligonucleotide; TTT chr11 5176971 5176992 5176988 5176993 +
ttaaaaaatgtttattttaaaa

SEQ ID NO: 75259 - DNA, 22 bp, Artificial Sequence
  Synthetic oligonucleotide; TTT chr11 5176972 5176993 5176989 5176994 +
taaaaaatgtttattttaaaaa

SEQ ID NO: 75260 - DNA, 22 bp, Artificial Sequence
  Synthetic oligonucleotide; TTT chr11 5176973 5176994 5176990 5176995 +
aaaaaatgtttattttaaaaat

SEQ ID NO: 75261 - DNA, 22 bp, Artificial Sequence
  Synthetic oligonucleotide; TTA chr11 5176974 5176995 5176991 5176996 +
aaaaatgtttattttaaaaatt

SEQ ID NO: 75262 - DNA, 22 bp, Artificial Sequence
  Synthetic oligonucleotide; TTT chr11 5176984 5177005 5177001 5177006 +
attttaaaaatttatttatcac

SEQ ID NO: 75263 - DNA, 22 bp, Artificial Sequence
  Synthetic oligonucleotide; TTA chr11 5176985 5177006 5177002 5177007 +
ttttaaaaatttatttatcacc

SEQ ID NO: 75264 - DNA, 22 bp, Artificial Sequence
  Synthetic oligonucleotide; TTT chr11 5176988 5177009 5177005 5177010 +
taaaaatttatttatcacccag

SEQ ID NO: 75265 - DNA, 22 bp, Artificial Sequence
  Synthetic oligonucleotide; TTT chr11 5176989 5177010 5177006 5177011 +
aaaaatttatttatcacccagg

SEQ ID NO: 75266 - DNA, 22 bp, Artificial Sequence
  Synthetic oligonucleotide; TTA chr11 5176990 5177011 5177007 5177012 +
aaaatttatttatcacccaggt

SEQ ID NO: 75267 - DNA, 22 bp, Artificial Sequence
  Synthetic oligonucleotide; TTT chr11 5176997 5177018 5177014 5177019 +
atttatcacccaggtatagaaa

SEQ ID NO: 75268 - DNA, 22 bp, Artificial Sequence
  Synthetic oligonucleotide; TTA chr11 5176998 5177019 5177015 5177020 +
tttatcacccaggtatagaaat

SEQ ID NO: 75269 - DNA, 22 bp, Artificial Sequence
  Synthetic oligonucleotide; TTT chr11 5177001 5177022 5177018 5177023 +
atcacccaggtatagaaatttt

SEQ ID NO: 75270 - DNA, 22 bp, Artificial Sequence
  Synthetic oligonucleotide; TTA chr11 5177002 5177023 5177019 5177024 +
tcacccaggtatagaaattttc

SEQ ID NO: 75271 - DNA, 22 bp, Artificial Sequence
  Synthetic oligonucleotide; TTT chr11 5177022 5177043 5177039 5177044 +
tcaatcattttacttcttcagt

SEQ ID NO: 75272 - DNA, 22 bp, Artificial Sequence
  Synthetic oligonucleotide; TTT chr11 5177023 5177044 5177040 5177045 +
caatcattttacttcttcagtg

SEQ ID NO: 75273 - DNA, 22 bp, Artificial Sequence
  Synthetic oligonucleotide; TTC chr11 5177024 5177045 5177041 5177046 +
aatcattttacttcttcagtga

SEQ ID NO: 75274 - DNA, 22 bp, Artificial Sequence
  Synthetic oligonucleotide; TTT chr11 5177032 5177053 5177049 5177054 +
tacttcttcagtgatgtttctg

SEQ ID NO: 75275 - DNA, 22 bp, Artificial Sequence
  Synthetic oligonucleotide; TTT chr11 5177033 5177054 5177050 5177055 +
acttcttcagtgatgtttctgt

SEQ ID NO: 75276 - DNA, 22 bp, Artificial Sequence
  Synthetic oligonucleotide; TTA chr11 5177034 5177055 5177051 5177056 +
cttcttcagtgatgtttctgtt

SEQ ID NO: 75277 - DNA, 22 bp, Artificial Sequence
  Synthetic oligonucleotide; CTT chr11 5177037 5177058 5177054 5177059 +
cttcagtgatgtttctgttgat

SEQ ID NO: 75278 - DNA, 22 bp, Artificial Sequence
  Synthetic oligonucleotide; TTC chr11 5177038 5177059 5177055 5177060 +
ttcagtgatgtttctgttgatg

SEQ ID NO: 75279 - DNA, 22 bp, Artificial Sequence
  Synthetic oligonucleotide; CTT chr11 5177040 5177061 5177057 5177062 +
cagtgatgtttctgttgatgcc

SEQ ID NO: 75280 - DNA, 22 bp, Artificial Sequence
  Synthetic oligonucleotide; TTC chr11 5177041 5177062 5177058 5177063 +
agtgatgtttctgttgatgcca

SEQ ID NO: 75281 - DNA, 22 bp, Artificial Sequence
  Synthetic oligonucleotide; TTT chr11 5177051 5177072 5177068 5177073 +
ctgttgatgccatgatgctcca

SEQ ID NO: 75282 - DNA, 22 bp, Artificial Sequence
  Synthetic oligonucleotide; TTC chr11 5177052 5177073 5177069 5177074 +
tgttgatgccatgatgctccat

SEQ ID NO: 75283 - DNA, 22 bp, Artificial Sequence
  Synthetic oligonucleotide; CTG chr11 5177054 5177075 5177071 5177076 +
ttgatgccatgatgctccattg

SEQ ID NO: 75284 - DNA, 22 bp, Artificial Sequence
  Synthetic oligonucleotide; TTG chr11 5177057 5177078 5177074 5177079 +
atgccatgatgctccattgatg

SEQ ID NO: 75285 - DNA, 22 bp, Artificial Sequence
  Synthetic oligonucleotide; CTC chr11 5177071 5177092 5177088 5177093 +
cattgatgacttgggtctaaaa

SEQ ID NO: 75286 - DNA, 22 bp, Artificial Sequence
  Synthetic oligonucleotide; TTG chr11 5177076 5177097 5177093 5177098 +
atgacttgggtctaaaatctcc

SEQ ID NO: 75287 - DNA, 22 bp, Artificial Sequence
  Synthetic oligonucleotide; CTT chr11 5177083 5177104 5177100 5177105 +
gggtctaaaatctccactatag

SEQ ID NO: 75288 - DNA, 22 bp, Artificial Sequence
  Synthetic oligonucleotide; TTG chr11 5177084 5177105 5177101 5177106 +
ggtctaaaatctccactatagg

SEQ ID NO: 75289 - DNA, 22 bp, Artificial Sequence
  Synthetic oligonucleotide; CTA chr11 5177090 5177111 5177107 5177112 +
aaatctccactatagggggaaa

SEQ ID NO: 75290 - DNA, 22 bp, Artificial Sequence
  Synthetic oligonucleotide; CTC chr11 5177097 5177118 5177114 5177119 +
cactatagggggaaatgtgtat

SEQ ID NO: 75291 - DNA, 22 bp, Artificial Sequence
  Synthetic oligonucleotide; CTA chr11 5177102 5177123 5177119 5177124 +
tagggggaaatgtgtatcagat

SEQ ID NO: 75292 - DNA, 22 bp, Artificial Sequence
  Synthetic oligonucleotide; TTT chr11 5177126 5177147 5177143 5177148 +
tacatcatccaggcaatctcat

SEQ ID NO: 75293 - DNA, 22 bp, Artificial Sequence
  Synthetic oligonucleotide; TTT chr11 5177127 5177148 5177144 5177149 +
acatcatccaggcaatctcata

SEQ ID NO: 75294 - DNA, 22 bp, Artificial Sequence
  Synthetic oligonucleotide; TTA chr11 5177128 5177149 5177145 5177150 +
catcatccaggcaatctcatat

SEQ ID NO: 75295 - DNA, 22 bp, Artificial Sequence
  Synthetic oligonucleotide; CTC chr11 5177146 5177167 5177163 5177168 +
atatttgttaatttaatattgg

SEQ ID NO: 75296 - DNA, 22 bp, Artificial Sequence
  Synthetic oligonucleotide; TTT chr11 5177152 5177173 5177169 5177174 +
gttaatttaatattggttatta

SEQ ID NO: 75297 - DNA, 22 bp, Artificial Sequence
  Synthetic oligonucleotide; TTG chr11 5177153 5177174 5177170 5177175 +
ttaatttaatattggttattat

SEQ ID NO: 75298 - DNA, 22 bp, Artificial Sequence
  Synthetic oligonucleotide; TTA chr11 5177156 5177177 5177173 5177178 +
atttaatattggttattatttg

SEQ ID NO: 75299 - DNA, 22 bp, Artificial Sequence
  Synthetic oligonucleotide; TTT chr11 5177160 5177181 5177177 5177182 +
aatattggttattatttgcttt

SEQ ID NO: 75300 - DNA, 22 bp, Artificial Sequence
  Synthetic oligonucleotide; TTA chr11 5177161 5177182 5177178 5177183 +
atattggttattatttgcttta

SEQ ID NO: 75301 - DNA, 22 bp, Artificial Sequence
  Synthetic oligonucleotide; TTG chr11 5177167 5177188 5177184 5177189 +
gttattatttgctttaattcac

SEQ ID NO: 75302 - DNA, 22 bp, Artificial Sequence
  Synthetic oligonucleotide; TTA chr11 5177171 5177192 5177188 5177193 +
ttatttgctttaattcactatt

SEQ ID NO: 75303 - DNA, 22 bp, Artificial Sequence
  Synthetic oligonucleotide; TTA chr11 5177174 5177195 5177191 5177196 +
tttgctttaattcactattatt

SEQ ID NO: 75304 - DNA, 22 bp, Artificial Sequence
  Synthetic oligonucleotide; TTT chr11 5177177 5177198 5177194 5177199 +
gctttaattcactattattcac

SEQ ID NO: 75305 - DNA, 22 bp, Artificial Sequence
  Synthetic oligonucleotide; TTG chr11 5177178 5177199 5177195 5177200 +
ctttaattcactattattcact

SEQ ID NO: 75306 - DNA, 22 bp, Artificial Sequence
  Synthetic oligonucleotide; CTT chr11 5177181 5177202 5177198 5177203 +
taattcactattattcacttgt

SEQ ID NO: 75307 - DNA, 22 bp, Artificial Sequence
  Synthetic oligonucleotide; TTT chr11 5177182 5177203 5177199 5177204 +
aattcactattattcacttgtt

SEQ ID NO: 75308 - DNA, 22 bp, Artificial Sequence
  Synthetic oligonucleotide; TTA chr11 5177183 5177204 5177200 5177205 +
attcactattattcacttgttg

SEQ ID NO: 75309 - DNA, 22 bp, Artificial Sequence
  Synthetic oligonucleotide; TTC chr11 5177187 5177208 5177204 5177209 +
actattattcacttgttgaata

SEQ ID NO: 75310 - DNA, 22 bp, Artificial Sequence
  Synthetic oligonucleotide; CTA chr11 5177191 5177212 5177208 5177213 +
ttattcacttgttgaatacata

SEQ ID NO: 75311 - DNA, 22 bp, Artificial Sequence
  Synthetic oligonucleotide; TTA chr11 5177194 5177215 5177211 5177216 +
ttcacttgttgaatacatatgt

SEQ ID NO: 75312 - DNA, 22 bp, Artificial Sequence
  Synthetic oligonucleotide; TTC chr11 5177197 5177218 5177214 5177219 +
acttgttgaatacatatgtatt

SEQ ID NO: 75313 - DNA, 22 bp, Artificial Sequence
  Synthetic oligonucleotide; CTT chr11 5177201 5177222 5177218 5177223 +
gttgaatacatatgtattatgt

SEQ ID NO: 75314 - DNA, 22 bp, Artificial Sequence
  Synthetic oligonucleotide; TTG chr11 5177202 5177223 5177219 5177224 +
ttgaatacatatgtattatgtg

SEQ ID NO: 75315 - DNA, 22 bp, Artificial Sequence
  Synthetic oligonucleotide; TTG chr11 5177205 5177226 5177222 5177227 +
aatacatatgtattatgtgtct

SEQ ID NO: 75316 - DNA, 22 bp, Artificial Sequence
  Synthetic oligonucleotide; TTA chr11 5177220 5177241 5177237 5177242 +
tgtgtctattccatacaagaga

SEQ ID NO: 75317 - DNA, 22 bp, Artificial Sequence
  Synthetic oligonucleotide; CTA chr11 5177228 5177249 5177245 5177250 +
ttccatacaagagactttgtga

SEQ ID NO: 75318 - DNA, 22 bp, Artificial Sequence
  Synthetic oligonucleotide; TTC chr11 5177231 5177252 5177248 5177253 +
catacaagagactttgtgagat

SEQ ID NO: 75319 - DNA, 22 bp, Artificial Sequence
  Synthetic oligonucleotide; CTT chr11 5177245 5177266 5177262 5177267 +
tgtgagatgtcagtgagttaga

SEQ ID NO: 75320 - DNA, 22 bp, Artificial Sequence
  Synthetic oligonucleotide; TTT chr11 5177246 5177267 5177263 5177268 +
gtgagatgtcagtgagttagaa

SEQ ID NO: 75321 - DNA, 22 bp, Artificial Sequence
  Synthetic oligonucleotide; TTG chr11 5177247 5177268 5177264 5177269 +
tgagatgtcagtgagttagaaa

SEQ ID NO: 75322 - DNA, 22 bp, Artificial Sequence
  Synthetic oligonucleotide; TTA chr11 5177265 5177286 5177282 5177287 +
gaaaatattctagggataacat

SEQ ID NO: 75323 - DNA, 22 bp, Artificial Sequence
  Synthetic oligonucleotide; TTC chr11 5177275 5177296 5177292 5177297 +
tagggataacattttaacttaa

SEQ ID NO: 75324 - DNA, 22 bp, Artificial Sequence
  Synthetic oligonucleotide; CTA chr11 5177277 5177298 5177294 5177299 +
gggataacattttaacttaagt

SEQ ID NO: 75325 - DNA, 22 bp, Artificial Sequence
  Synthetic oligonucleotide; TTT chr11 5177289 5177310 5177306 5177311 +
taacttaagtaacaggtgttga

SEQ ID NO: 75326 - DNA, 22 bp, Artificial Sequence
  Synthetic oligonucleotide; TTT chr11 5177290 5177311 5177307 5177312 +
aacttaagtaacaggtgttgac

SEQ ID NO: 75327 - DNA, 22 bp, Artificial Sequence
  Synthetic oligonucleotide; TTA chr11 5177291 5177312 5177308 5177313 +
acttaagtaacaggtgttgaca

SEQ ID NO: 75328 - DNA, 22 bp, Artificial Sequence
  Synthetic oligonucleotide; CTT chr11 5177295 5177316 5177312 5177317 +
aagtaacaggtgttgacaaaaa

SEQ ID NO: 75329 - DNA, 22 bp, Artificial Sequence
  Synthetic oligonucleotide; TTA chr11 5177296 5177317 5177313 5177318 +
agtaacaggtgttgacaaaaat

SEQ ID NO: 75330 - DNA, 22 bp, Artificial Sequence
  Synthetic oligonucleotide; TTG chr11 5177310 5177331 5177327 5177332 +
acaaaaataatattatggcttc

SEQ ID NO: 75331 - DNA, 22 bp, Artificial Sequence
  Synthetic oligonucleotide; TTA chr11 5177325 5177346 5177342 5177347 +
tggcttcatgttattggttcaa

SEQ ID NO: 75332 - DNA, 22 bp, Artificial Sequence
  Synthetic oligonucleotide; CTT chr11 5177331 5177352 5177348 5177353 +
catgttattggttcaagtctct

SEQ ID NO: 75333 - DNA, 22 bp, Artificial Sequence
  Synthetic oligonucleotide; TTC chr11 5177332 5177353 5177349 5177354 +
atgttattggttcaagtctctg

SEQ ID NO: 75334 - DNA, 22 bp, Artificial Sequence
  Synthetic oligonucleotide; TTA chr11 5177338 5177359 5177355 5177360 +
ttggttcaagtctctgcagagt

SEQ ID NO: 75335 - DNA, 22 bp, Artificial Sequence
  Synthetic oligonucleotide; TTG chr11 5177341 5177362 5177358 5177363 +
gttcaagtctctgcagagtaca

SEQ ID NO: 75336 - DNA, 22 bp, Artificial Sequence
  Synthetic oligonucleotide; TTC chr11 5177345 5177366 5177362 5177367 +
aagtctctgcagagtacagcgg

SEQ ID NO: 75337 - DNA, 22 bp, Artificial Sequence
  Synthetic oligonucleotide; CTC chr11 5177352 5177373 5177369 5177374 +
tgcagagtacagcgggagtgtt

SEQ ID NO: 75338 - DNA, 22 bp, Artificial Sequence
  Synthetic oligonucleotide; CTG chr11 5177354 5177375 5177371 5177376 +
cagagtacagcgggagtgttgt

SEQ ID NO: 75339 - DNA, 22 bp, Artificial Sequence
  Synthetic oligonucleotide; TTG chr11 5177375 5177396 5177392 5177397 +
tacatttcagcagaatttcaga

SEQ ID NO: 75340 - DNA, 22 bp, Artificial Sequence
  Synthetic oligonucleotide; TTT chr11 5177382 5177403 5177399 5177404 +
cagcagaatttcagactgacta

SEQ ID NO: 75341 - DNA, 22 bp, Artificial Sequence
  Synthetic oligonucleotide; TTC chr11 5177383 5177404 5177400 5177405 +
agcagaatttcagactgactat

SEQ ID NO: 75342 - DNA, 22 bp, Artificial Sequence
  Synthetic oligonucleotide; TTT chr11 5177393 5177414 5177410 5177415 +
cagactgactataaaaagccca

SEQ ID NO: 75343 - DNA, 22 bp, Artificial Sequence
  Synthetic oligonucleotide; TTC chr11 5177394 5177415 5177411 5177416 +
agactgactataaaaagcccag

SEQ ID NO: 75344 - DNA, 22 bp, Artificial Sequence
  Synthetic oligonucleotide; CTG chr11 5177400 5177421 5177417 5177422 +
actataaaaagcccagtgactg

SEQ ID NO: 75345 - DNA, 22 bp, Artificial Sequence
  Synthetic oligonucleotide; CTA chr11 5177404 5177425 5177421 5177426 +
taaaaagcccagtgactgactc

SEQ ID NO: 75346 - DNA, 22 bp, Artificial Sequence
  Synthetic oligonucleotide; CTG chr11 5177422 5177443 5177439 5177444 +
actcaaaaccccacttcctagc

SEQ ID NO: 75347 - DNA, 22 bp, Artificial Sequence
  Synthetic oligonucleotide; CTC chr11 5177426 5177447 5177443 5177448 +
aaaaccccacttcctagctcta

SEQ ID NO: 75348 - DNA, 22 bp, Artificial Sequence
  Synthetic oligonucleotide; CTT chr11 5177438 5177459 5177455 5177460 +
cctagctctacgtaggaaaagt

SEQ ID NO: 75349 - DNA, 22 bp, Artificial Sequence
  Synthetic oligonucleotide; TTC chr11 5177439 5177460 5177456 5177461 +
ctagctctacgtaggaaaagtc

SEQ ID NO: 75350 - DNA, 22 bp, Artificial Sequence
  Synthetic oligonucleotide; CTA chr11 5177442 5177463 5177459 5177464 +
gctctacgtaggaaaagtcaat

SEQ ID NO: 75351 - DNA, 22 bp, Artificial Sequence
  Synthetic oligonucleotide; CTC chr11 5177446 5177467 5177463 5177468 +
tacgtaggaaaagtcaatctgg

SEQ ID NO: 75352 - DNA, 22 bp, Artificial Sequence
  Synthetic oligonucleotide; CTA chr11 5177448 5177469 5177465 5177470 +
cgtaggaaaagtcaatctggat

SEQ ID NO: 75353 - DNA, 22 bp, Artificial Sequence
  Synthetic oligonucleotide; CTG chr11 5177467 5177488 5177484 5177489 +
gattaaaccctaaaatatattt

SEQ ID NO: 75354 - DNA, 22 bp, Artificial Sequence
  Synthetic oligonucleotide; TTA chr11 5177472 5177493 5177489 5177494 +
aaccctaaaatatatttctctt

SEQ ID NO: 75355 - DNA, 22 bp, Artificial Sequence
  Synthetic oligonucleotide; CTA chr11 5177479 5177500 5177496 5177501 +
aaatatatttctcttttctcga

SEQ ID NO: 75356 - DNA, 22 bp, Artificial Sequence
  Synthetic oligonucleotide; TTT chr11 5177489 5177510 5177506 5177511 +
ctcttttctcgattatctttat

SEQ ID NO: 75357 - DNA, 22 bp, Artificial Sequence
  Synthetic oligonucleotide; TTC chr11 5177490 5177511 5177507 5177512 +
tcttttctcgattatctttata

SEQ ID NO: 75358 - DNA, 22 bp, Artificial Sequence
  Synthetic oligonucleotide; CTC chr11 5177492 5177513 5177509 5177514 +
ttttctcgattatctttatata

SEQ ID NO: 75359 - DNA, 22 bp, Artificial Sequence
  Synthetic oligonucleotide; CTT chr11 5177494 5177515 5177511 5177516 +
ttctcgattatctttatatatt

SEQ ID NO: 75360 - DNA, 22 bp, Artificial Sequence
  Synthetic oligonucleotide; TTT chr11 5177495 5177516 5177512 5177517 +
tctcgattatctttatatattt

SEQ ID NO: 75361 - DNA, 22 bp, Artificial Sequence
  Synthetic oligonucleotide; TTT chr11 5177496 5177517 5177513 5177518 +
ctcgattatctttatatatttt

SEQ ID NO: 75362 - DNA, 22 bp, Artificial Sequence
  Synthetic oligonucleotide; TTC chr11 5177497 5177518 5177514 5177519 +
tcgattatctttatatattttt

SEQ ID NO: 75363 - DNA, 22 bp, Artificial Sequence
  Synthetic oligonucleotide; CTC chr11 5177499 5177520 5177516 5177521 +
gattatctttatatatttttaa

SEQ ID NO: 75364 - DNA, 22 bp, Artificial Sequence
  Synthetic oligonucleotide; TTA chr11 5177504 5177525 5177521 5177526 +
tctttatatatttttaagttaa

SEQ ID NO: 75365 - DNA, 22 bp, Artificial Sequence
  Synthetic oligonucleotide; CTT chr11 5177508 5177529 5177525 5177530 +
tatatatttttaagttaaaatt

SEQ ID NO: 75366 - DNA, 22 bp, Artificial Sequence
  Synthetic oligonucleotide; TTT chr11 5177509 5177530 5177526 5177531 +
atatatttttaagttaaaattc

SEQ ID NO: 75367 - DNA, 22 bp, Artificial Sequence
  Synthetic oligonucleotide; TTA chr11 5177510 5177531 5177527 5177532 +
tatatttttaagttaaaattca

SEQ ID NO: 75368 - DNA, 22 bp, Artificial Sequence
  Synthetic oligonucleotide; TTT chr11 5177517 5177538 5177534 5177539 +
ttaagttaaaattcatgaaaat

SEQ ID NO: 75369 - DNA, 22 bp, Artificial Sequence
  Synthetic oligonucleotide; TTT chr11 5177518 5177539 5177535 5177540 +
taagttaaaattcatgaaaata

SEQ ID NO: 75370 - DNA, 22 bp, Artificial Sequence
  Synthetic oligonucleotide; TTT chr11 5177519 5177540 5177536 5177541 +
aagttaaaattcatgaaaatag

SEQ ID NO: 75371 - DNA, 22 bp, Artificial Sequence
  Synthetic oligonucleotide; TTA chr11 5177520 5177541 5177537 5177542 +
agttaaaattcatgaaaatagt

SEQ ID NO: 75372 - DNA, 22 bp, Artificial Sequence
  Synthetic oligonucleotide; TTA chr11 5177525 5177546 5177542 5177547 +
aaattcatgaaaatagtatttc

SEQ ID NO: 75373 - DNA, 22 bp, Artificial Sequence
  Synthetic oligonucleotide; TTC chr11 5177531 5177552 5177548 5177553 +
atgaaaatagtatttctgaaaa

SEQ ID NO: 75374 - DNA, 22 bp, Artificial Sequence
  Synthetic oligonucleotide; TTT chr11 5177546 5177567 5177563 5177568 +
ctgaaaaaatggagaatttcat

SEQ ID NO: 75375 - DNA, 22 bp, Artificial Sequence
  Synthetic oligonucleotide; TTC chr11 5177547 5177568 5177564 5177569 +
tgaaaaaatggagaatttcatt

SEQ ID NO: 75376 - DNA, 22 bp, Artificial Sequence
  Synthetic oligonucleotide; CTG chr11 5177549 5177570 5177566 5177571 +
aaaaaatggagaatttcattaa

SEQ ID NO: 75377 - DNA, 22 bp, Artificial Sequence
  Synthetic oligonucleotide; TTT chr11 5177565 5177586 5177582 5177587 +
cattaaagtattttttttttca

SEQ ID NO: 75378 - DNA, 22 bp, Artificial Sequence
  Synthetic oligonucleotide; TTC chr11 5177566 5177587 5177583 5177588 +
attaaagtattttttttttcaa

SEQ ID NO: 75379 - DNA, 22 bp, Artificial Sequence
  Synthetic oligonucleotide; TTA chr11 5177570 5177591 5177587 5177592 +
aagtattttttttttcaaaacc

SEQ ID NO: 75380 - DNA, 22 bp, Artificial Sequence
  Synthetic oligonucleotide; TTT chr11 5177578 5177599 5177595 5177600 +
tttttttcaaaacctttgatct

SEQ ID NO: 75381 - DNA, 22 bp, Artificial Sequence
  Synthetic oligonucleotide; TTT chr11 5177579 5177600 5177596 5177601 +
ttttttcaaaacctttgatctt

SEQ ID NO: 75382 - DNA, 22 bp, Artificial Sequence
  Synthetic oligonucleotide; TTT chr11 5177580 5177601 5177597 5177602 +
tttttcaaaacctttgatcttt

SEQ ID NO: 75383 - DNA, 22 bp, Artificial Sequence
  Synthetic oligonucleotide; TTT chr11 5177581 5177602 5177598 5177603 +
ttttcaaaacctttgatctttg

SEQ ID NO: 75384 - DNA, 22 bp, Artificial Sequence
  Synthetic oligonucleotide; TTT chr11 5177582 5177603 5177599 5177604 +
tttcaaaacctttgatctttga

SEQ ID NO: 75385 - DNA, 22 bp, Artificial Sequence
  Synthetic oligonucleotide; TTT chr11 5177583 5177604 5177600 5177605 +
ttcaaaacctttgatctttgag

SEQ ID NO: 75386 - DNA, 22 bp, Artificial Sequence
  Synthetic oligonucleotide; TTT chr11 5177584 5177605 5177601 5177606 +
tcaaaacctttgatctttgagt

SEQ ID NO: 75387 - DNA, 22 bp, Artificial Sequence
  Synthetic oligonucleotide; TTT chr11 5177585 5177606 5177602 5177607 +
caaaacctttgatctttgagtg

SEQ ID NO: 75388 - DNA, 22 bp, Artificial Sequence
  Synthetic oligonucleotide; TTC chr11 5177586 5177607 5177603 5177608 +
aaaacctttgatctttgagtgc

SEQ ID NO: 75389 - DNA, 22 bp, Artificial Sequence
  Synthetic oligonucleotide; CTT chr11 5177594 5177615 5177611 5177616 +
tgatctttgagtgccttagcaa

SEQ ID NO: 75390 - DNA, 22 bp, Artificial Sequence
  Synthetic oligonucleotide; TTT chr11 5177595 5177616 5177612 5177617 +
gatctttgagtgccttagcaaa

SEQ ID NO: 75391 - DNA, 22 bp, Artificial Sequence
  Synthetic oligonucleotide; TTG chr11 5177596 5177617 5177613 5177618 +
atctttgagtgccttagcaaaa

SEQ ID NO: 75392 - DNA, 22 bp, Artificial Sequence
  Synthetic oligonucleotide; CTT chr11 5177601 5177622 5177618 5177623 +
tgagtgccttagcaaaattccg

SEQ ID NO: 75393 - DNA, 22 bp, Artificial Sequence
  Synthetic oligonucleotide; TTT chr11 5177602 5177623 5177619 5177624 +
gagtgccttagcaaaattccgt

SEQ ID NO: 75394 - DNA, 22 bp, Artificial Sequence
  Synthetic oligonucleotide; TTG chr11 5177603 5177624 5177620 5177625 +
agtgccttagcaaaattccgtg

SEQ ID NO: 75395 - DNA, 22 bp, Artificial Sequence
  Synthetic oligonucleotide; CTT chr11 5177611 5177632 5177628 5177633 +
agcaaaattccgtggacacttt

SEQ ID NO: 75396 - DNA, 22 bp, Artificial Sequence
  Synthetic oligonucleotide; TTA chr11 5177612 5177633 5177629 5177634 +
gcaaaattccgtggacactttg

SEQ ID NO: 75397 - DNA, 22 bp, Artificial Sequence
  Synthetic oligonucleotide; TTC chr11 5177621 5177642 5177638 5177643 +
cgtggacactttgatagacacc

SEQ ID NO: 75398 - DNA, 22 bp, Artificial Sequence
  Synthetic oligonucleotide; CTT chr11 5177632 5177653 5177649 5177654 +
tgatagacaccatcattttaag

SEQ ID NO: 75399 - DNA, 22 bp, Artificial Sequence
  Synthetic oligonucleotide; TTT chr11 5177633 5177654 5177650 5177655 +
gatagacaccatcattttaagt

SEQ ID NO: 75400 - DNA, 22 bp, Artificial Sequence
  Synthetic oligonucleotide; TTG chr11 5177634 5177655 5177651 5177656 +
atagacaccatcattttaagtg

SEQ ID NO: 75401 - DNA, 22 bp, Artificial Sequence
  Synthetic oligonucleotide; TTT chr11 5177650 5177671 5177667 5177672 +
taagtgtgtttgaggatttcta

SEQ ID NO: 75402 - DNA, 22 bp, Artificial Sequence
  Synthetic oligonucleotide; TTT chr11 5177651 5177672 5177668 5177673 +
aagtgtgtttgaggatttctat

SEQ ID NO: 75403 - DNA, 22 bp, Artificial Sequence
  Synthetic oligonucleotide; TTA chr11 5177652 5177673 5177669 5177674 +
agtgtgtttgaggatttctatg

SEQ ID NO: 75404 - DNA, 22 bp, Artificial Sequence
  Synthetic oligonucleotide; TTT chr11 5177661 5177682 5177678 5177683 +
gaggatttctatggattgtatt

SEQ ID NO: 75405 - DNA, 22 bp, Artificial Sequence
  Synthetic oligonucleotide; TTG chr11 5177662 5177683 5177679 5177684 +
aggatttctatggattgtattt

SEQ ID NO: 75406 - DNA, 22 bp, Artificial Sequence
  Synthetic oligonucleotide; TTT chr11 5177669 5177690 5177686 5177691 +
ctatggattgtatttattctat

SEQ ID NO: 75407 - DNA, 22 bp, Artificial Sequence
  Synthetic oligonucleotide; TTC chr11 5177670 5177691 5177687 5177692 +
tatggattgtatttattctatt

SEQ ID NO: 75408 - DNA, 22 bp, Artificial Sequence
  Synthetic oligonucleotide; CTA chr11 5177672 5177693 5177689 5177694 +
tggattgtatttattctattcc

SEQ ID NO: 75409 - DNA, 22 bp, Artificial Sequence
  Synthetic oligonucleotide; TTG chr11 5177679 5177700 5177696 5177701 +
tatttattctattccctaaaac

SEQ ID NO: 75410 - DNA, 22 bp, Artificial Sequence
  Synthetic oligonucleotide; TTT chr11 5177684 5177705 5177701 5177706 +
attctattccctaaaacagact

SEQ ID NO: 75411 - DNA, 22 bp, Artificial Sequence
  Synthetic oligonucleotide; TTA chr11 5177685 5177706 5177702 5177707 +
ttctattccctaaaacagactt

SEQ ID NO: 75412 - DNA, 22 bp, Artificial Sequence
  Synthetic oligonucleotide; TTC chr11 5177688 5177709 5177705 5177710 +
tattccctaaaacagacttttt

SEQ ID NO: 75413 - DNA, 22 bp, Artificial Sequence
  Synthetic oligonucleotide; CTA chr11 5177690 5177711 5177707 5177712 +
ttccctaaaacagactttttaa

SEQ ID NO: 75414 - DNA, 22 bp, Artificial Sequence
  Synthetic oligonucleotide; TTC chr11 5177693 5177714 5177710 5177715 +
cctaaaacagactttttaatct

SEQ ID NO: 75415 - DNA, 22 bp, Artificial Sequence
  Synthetic oligonucleotide; CTA chr11 5177697 5177718 5177714 5177719 +
aaacagactttttaatcttaac

SEQ ID NO: 75416 - DNA, 22 bp, Artificial Sequence
  Synthetic oligonucleotide; CTT chr11 5177707 5177728 5177724 5177729 +
tttaatcttaacagcatacact

SEQ ID NO: 75417 - DNA, 22 bp, Artificial Sequence
  Synthetic oligonucleotide; TTT chr11 5177708 5177729 5177725 5177730 +
ttaatcttaacagcatacactg

SEQ ID NO: 75418 - DNA, 22 bp, Artificial Sequence
  Synthetic oligonucleotide; TTT chr11 5177709 5177730 5177726 5177731 +
taatcttaacagcatacactga

SEQ ID NO: 75419 - DNA, 22 bp, Artificial Sequence
  Synthetic oligonucleotide; TTT chr11 5177710 5177731 5177727 5177732 +
aatcttaacagcatacactgat

SEQ ID NO: 75420 - DNA, 22 bp, Artificial Sequence
  Synthetic oligonucleotide; TTA chr11 5177711 5177732 5177728 5177733 +
atcttaacagcatacactgata

SEQ ID NO: 75421 - DNA, 22 bp, Artificial Sequence
  Synthetic oligonucleotide; CTT chr11 5177716 5177737 5177733 5177738 +
aacagcatacactgataggaga

SEQ ID NO: 75422 - DNA, 22 bp, Artificial Sequence
  Synthetic oligonucleotide; TTA chr11 5177717 5177738 5177734 5177739 +
acagcatacactgataggagag

SEQ ID NO: 75423 - DNA, 22 bp, Artificial Sequence
  Synthetic oligonucleotide; CTG chr11 5177730 5177751 5177747 5177752 +
ataggagagaaaagcaaaatca

SEQ ID NO: 75424 - DNA, 22 bp, Artificial Sequence
  Synthetic oligonucleotide; CTC chr11 5177755 5177776 5177772 5177777 +
gatctttaatttgtttggtctt

SEQ ID NO: 75425 - DNA, 22 bp, Artificial Sequence
  Synthetic oligonucleotide; CTT chr11 5177761 5177782 5177778 5177783 +
taatttgtttggtcttcacccc

SEQ ID NO: 75426 - DNA, 22 bp, Artificial Sequence
  Synthetic oligonucleotide; TTT chr11 5177762 5177783 5177779 5177784 +
aatttgtttggtcttcacccca

SEQ ID NO: 75427 - DNA, 22 bp, Artificial Sequence
  Synthetic oligonucleotide; TTA chr11 5177763 5177784 5177780 5177785 +
atttgtttggtcttcaccccat

SEQ ID NO: 75428 - DNA, 22 bp, Artificial Sequence
  Synthetic oligonucleotide; TTT chr11 5177767 5177788 5177784 5177789 +
gtttggtcttcaccccataaat

SEQ ID NO: 75429 - DNA, 22 bp, Artificial Sequence
  Synthetic oligonucleotide; TTG chr11 5177768 5177789 5177785 5177790 +
tttggtcttcaccccataaatg

SEQ ID NO: 75430 - DNA, 22 bp, Artificial Sequence
  Synthetic oligonucleotide; TTT chr11 5177771 5177792 5177788 5177793 +
ggtcttcaccccataaatgatg

SEQ ID NO: 75431 - DNA, 22 bp, Artificial Sequence
  Synthetic oligonucleotide; TTG chr11 5177772 5177793 5177789 5177794 +
gtcttcaccccataaatgatgg

SEQ ID NO: 75432 - DNA, 22 bp, Artificial Sequence
  Synthetic oligonucleotide; CTT chr11 5177777 5177798 5177794 5177799 +
caccccataaatgatggggttt

SEQ ID NO: 75433 - DNA, 22 bp, Artificial Sequence
  Synthetic oligonucleotide; TTC chr11 5177778 5177799 5177795 5177800 +
accccataaatgatggggttta

SEQ ID NO: 75434 - DNA, 22 bp, Artificial Sequence
  Synthetic oligonucleotide; TTT chr11 5177799 5177820 5177816 5177821 +
agcatagggggcactaacacat

SEQ ID NO: 75435 - DNA, 22 bp, Artificial Sequence
  Synthetic oligonucleotide; TTA chr11 5177800 5177821 5177817 5177822 +
gcatagggggcactaacacata

SEQ ID NO: 75436 - DNA, 22 bp, Artificial Sequence
  Synthetic oligonucleotide; CTA chr11 5177815 5177836 5177832 5177837 +
acacatagagactgcccactag

SEQ ID NO: 75437 - DNA, 22 bp, Artificial Sequence
  Synthetic oligonucleotide; CTG chr11 5177829 5177850 5177846 5177851 +
cccactaggatgtgaatgtggt

SEQ ID NO: 75438 - DNA, 22 bp, Artificial Sequence
  Synthetic oligonucleotide; CTA chr11 5177836 5177857 5177853 5177858 +
ggatgtgaatgtggtgagggat

SEQ ID NO: 75439 - DNA, 22 bp, Artificial Sequence
  Synthetic oligonucleotide; TTT chr11 5177863 5177884 5177880 5177885 +
tacctccaaagcgatgggcaag

SEQ ID NO: 75440 - DNA, 22 bp, Artificial Sequence
  Synthetic oligonucleotide; TTT chr11 5177864 5177885 5177881 5177886 +
acctccaaagcgatgggcaaga

SEQ ID NO: 75441 - DNA, 22 bp, Artificial Sequence
  Synthetic oligonucleotide; TTA chr11 5177865 5177886 5177882 5177887 +
cctccaaagcgatgggcaagaa

SEQ ID NO: 75442 - DNA, 22 bp, Artificial Sequence
  Synthetic oligonucleotide; CTC chr11 5177869 5177890 5177886 5177891 +
caaagcgatgggcaagaaatga

SEQ ID NO: 75443 - DNA, 22 bp, Artificial Sequence
  Synthetic oligonucleotide; CTG chr11 5177902 5177923 5177919 5177924 +
gggtatagaacataaatatgac

SEQ ID NO: 75444 - DNA, 22 bp, Artificial Sequence
  Synthetic oligonucleotide; CTA chr11 5177949 5177970 5177966 5177971 +
agggccttgaacctggcagccc

SEQ ID NO: 75445 - DNA, 22 bp, Artificial Sequence
  Synthetic oligonucleotide; CTT chr11 5177957 5177978 5177974 5177979 +
gaacctggcagcccaggaagat

SEQ ID NO: 75446 - DNA, 22 bp, Artificial Sequence
  Synthetic oligonucleotide; TTG chr11 5177958 5177979 5177975 5177980 +
aacctggcagcccaggaagata

SEQ ID NO: 75447 - DNA, 22 bp, Artificial Sequence
  Synthetic oligonucleotide; CTG chr11 5177964 5177985 5177981 5177986 +
gcagcccaggaagatatctgaa

SEQ ID NO: 75448 - DNA, 22 bp, Artificial Sequence
  Synthetic oligonucleotide; CTG chr11 5177984 5178005 5178001 5178006 +
aaacactgagtgaaggatcatt

SEQ ID NO: 75449 - DNA, 22 bp, Artificial Sequence
  Synthetic oligonucleotide; CTG chr11 5177992 5178013 5178009 5178014 +
agtgaaggatcattgtgtagga

SEQ ID NO: 75450 - DNA, 22 bp, Artificial Sequence
  Synthetic oligonucleotide; TTG chr11 5178007 5178028 5178024 5178029 +
tgtaggatataatgataagcac

SEQ ID NO: 75451 - DNA, 22 bp, Artificial Sequence
  Synthetic oligonucleotide; CTA chr11 5178031 5178052 5178048 5178053 +
tatccagtcctgtagagagtag

SEQ ID NO: 75452 - DNA, 22 bp, Artificial Sequence
  Synthetic oligonucleotide; CTG chr11 5178043 5178064 5178060 5178065 +
tagagagtagggccacagtgag

SEQ ID NO: 75453 - DNA, 22 bp, Artificial Sequence
  Synthetic oligonucleotide; TTG chr11 5178081 5178102 5178098 5178103 +
acattgatattgccacaagcca

SEQ ID NO: 75454 - DNA, 22 bp, Artificial Sequence
  Synthetic oligonucleotide; TTG chr11 5178087 5178108 5178104 5178109 +
atattgccacaagccaatctgg

SEQ ID NO: 75455 - DNA, 22 bp, Artificial Sequence
  Synthetic oligonucleotide; TTG chr11 5178093 5178114 5178110 5178115 +
ccacaagccaatctggcaatgt

SEQ ID NO: 75456 - DNA, 22 bp, Artificial Sequence
  Synthetic oligonucleotide; CTG chr11 5178108 5178129 5178125 5178130 +
gcaatgtgctcacagtaggaat

SEQ ID NO: 75457 - DNA, 22 bp, Artificial Sequence
  Synthetic oligonucleotide; CTC chr11 5178119 5178140 5178136 5178141 +
acagtaggaatgaggaatgatg

SEQ ID NO: 75458 - DNA, 22 bp, Artificial Sequence
  Synthetic oligonucleotide; TTT chr11 5178144 5178165 5178161 5178166 +
ctcccacaatatgtaagtcggt

SEQ ID NO: 75459 - DNA, 22 bp, Artificial Sequence
  Synthetic oligonucleotide; TTC chr11 5178145 5178166 5178162 5178167 +
tcccacaatatgtaagtcggta

SEQ ID NO: 75460 - DNA, 22 bp, Artificial Sequence
  Synthetic oligonucleotide; CTC chr11 5178147 5178168 5178164 5178169 +
ccacaatatgtaagtcggtata

SEQ ID NO: 75461 - DNA, 22 bp, Artificial Sequence
  Synthetic oligonucleotide; CTC chr11 5178204 5178225 5178221 5178226 +
ctgaccacagctgctatgccaa

SEQ ID NO: 75462 - DNA, 22 bp, Artificial Sequence
  Synthetic oligonucleotide; CTG chr11 5178207 5178228 5178224 5178229 +
accacagctgctatgccaatct

SEQ ID NO: 75463 - DNA, 22 bp, Artificial Sequence
  Synthetic oligonucleotide; CTG chr11 5178217 5178238 5178234 5178239 +
ctatgccaatcttcctgacggc

SEQ ID NO: 75464 - DNA, 22 bp, Artificial Sequence
  Synthetic oligonucleotide; CTA chr11 5178220 5178241 5178237 5178242 +
tgccaatcttcctgacggctga

SEQ ID NO: 75465 - DNA, 22 bp, Artificial Sequence
  Synthetic oligonucleotide; CTT chr11 5178230 5178251 5178247 5178252 +
cctgacggctgatgaggttaaa

SEQ ID NO: 75466 - DNA, 22 bp, Artificial Sequence
  Synthetic oligonucleotide; TTC chr11 5178231 5178252 5178248 5178253 +
ctgacggctgatgaggttaaaa

SEQ ID NO: 75467 - DNA, 22 bp, Artificial Sequence
  Synthetic oligonucleotide; CTG chr11 5178234 5178255 5178251 5178256 +
acggctgatgaggttaaaatgg

SEQ ID NO: 75468 - DNA, 22 bp, Artificial Sequence
  Synthetic oligonucleotide; CTG chr11 5178241 5178262 5178258 5178263 +
atgaggttaaaatggtgtatct

SEQ ID NO: 75469 - DNA, 22 bp, Artificial Sequence
  Synthetic oligonucleotide; TTA chr11 5178250 5178271 5178267 5178272 +
aaatggtgtatctcagtgggta

SEQ ID NO: 75470 - DNA, 22 bp, Artificial Sequence
  Synthetic oligonucleotide; CTC chr11 5178264 5178285 5178281 5178286 +
agtgggtaacagatggccacat

SEQ ID NO: 75471 - DNA, 22 bp, Artificial Sequence
  Synthetic oligonucleotide; TTG chr11 5178304 5178325 5178321 5178326 +
ccaggagaatagcagattctgc

SEQ ID NO: 75472 - DNA, 22 bp, Artificial Sequence
  Synthetic oligonucleotide; TTC chr11 5178323 5178344 5178340 5178345 +
tgccacaaagatgaaatgtatg

SEQ ID NO: 75473 - DNA, 22 bp, Artificial Sequence
  Synthetic oligonucleotide; CTG chr11 5178325 5178346 5178342 5178347 +
ccacaaagatgaaatgtatgaa

SEQ ID NO: 75474 - DNA, 22 bp, Artificial Sequence
  Synthetic oligonucleotide; CTG chr11 5178356 5178377 5178373 5178378 +
agacacacaactaccaaaggat

SEQ ID NO: 75475 - DNA, 22 bp, Artificial Sequence
  Synthetic oligonucleotide; CTA chr11 5178369 5178390 5178386 5178391 +
ccaaaggatatgtccatggagt

SEQ ID NO: 75476 - DNA, 22 bp, Artificial Sequence
  Synthetic oligonucleotide; CTT chr11 5178416 5178437 5178433 5178438 +
aggggctgcagcagtggcgagc

SEQ ID NO: 75477 - DNA, 22 bp, Artificial Sequence
  Synthetic oligonucleotide; TTA chr11 5178417 5178438 5178434 5178439 +
ggggctgcagcagtggcgagca

SEQ ID NO: 75478 - DNA, 22 bp, Artificial Sequence
  Synthetic oligonucleotide; CTG chr11 5178424 5178445 5178441 5178446 +
cagcagtggcgagcaggaagtc

SEQ ID NO: 75479 - DNA, 22 bp, Artificial Sequence
  Synthetic oligonucleotide; CTG chr11 5178451 5178472 5178468 5178473 +
aggccagcatggataggaagag

SEQ ID NO: 75480 - DNA, 22 bp, Artificial Sequence
  Synthetic oligonucleotide; CTC chr11 5178485 5178506 5178502 5178507 +
atggagactgcgctcagtcatg

SEQ ID NO: 75481 - DNA, 22 bp, Artificial Sequence
  Synthetic oligonucleotide; CTG chr11 5178495 5178516 5178512 5178517 +
cgctcagtcatgatcaggaaga

SEQ ID NO: 75482 - DNA, 22 bp, Artificial Sequence
  Synthetic oligonucleotide; CTC chr11 5178500 5178521 5178517 5178522 +
agtcatgatcaggaagatcaag

SEQ ID NO: 75483 - DNA, 22 bp, Artificial Sequence
  Synthetic oligonucleotide; TTG chr11 5178531 5178552 5178548 5178553 +
cctgcaacagccacaatgtaca

SEQ ID NO: 75484 - DNA, 22 bp, Artificial Sequence
  Synthetic oligonucleotide; CTG chr11 5178535 5178556 5178552 5178557 +
caacagccacaatgtacataaa

SEQ ID NO: 75485 - DNA, 22 bp, Artificial Sequence
  Synthetic oligonucleotide; CTT chr11 5178592 5178613 5178609 5178614 +
ccagccctgggattcccatcag

SEQ ID NO: 75486 - DNA, 22 bp, Artificial Sequence
  Synthetic oligonucleotide; TTC chr11 5178593 5178614 5178610 5178615 +
cagccctgggattcccatcagg

SEQ ID NO: 75487 - DNA, 22 bp, Artificial Sequence
  Synthetic oligonucleotide; CTG chr11 5178601 5178622 5178618 5178623 +
ggattcccatcaggacatacca

SEQ ID NO: 75488 - DNA, 22 bp, Artificial Sequence
  Synthetic oligonucleotide; TTC chr11 5178607 5178628 5178624 5178629 +
ccatcaggacataccacacatc

SEQ ID NO: 75489 - DNA, 22 bp, Artificial Sequence
  Synthetic oligonucleotide; CTG chr11 5178632 5178653 5178649 5178654 +
ggaattagtgtgattgcgaaag

SEQ ID NO: 75490 - DNA, 22 bp, Artificial Sequence
  Synthetic oligonucleotide; TTA chr11 5178639 5178660 5178656 5178661 +
gtgtgattgcgaaagaaaggag

SEQ ID NO: 75491 - DNA, 22 bp, Artificial Sequence
  Synthetic oligonucleotide; TTG chr11 5178648 5178669 5178665 5178670 +
cgaaagaaaggagccgtatgta

SEQ ID NO: 75492 - DNA, 22 bp, Artificial Sequence
  Synthetic oligonucleotide; TTT chr11 5178676 5178697 5178693 5178698 +
attccaggcctagtgccattag

SEQ ID NO: 75493 - DNA, 22 bp, Artificial Sequence
  Synthetic oligonucleotide; TTA chr11 5178677 5178698 5178694 5178699 +
ttccaggcctagtgccattagt

SEQ ID NO: 75494 - DNA, 22 bp, Artificial Sequence
  Synthetic oligonucleotide; TTC chr11 5178680 5178701 5178697 5178702 +
caggcctagtgccattagtgaa

SEQ ID NO: 75495 - DNA, 22 bp, Artificial Sequence
  Synthetic oligonucleotide; CTA chr11 5178688 5178709 5178705 5178710 +
gtgccattagtgaaagactaca

SEQ ID NO: 75496 - DNA, 22 bp, Artificial Sequence
  Synthetic oligonucleotide; TTA chr11 5178697 5178718 5178714 5178719 +
gtgaaagactacaaagttgagg

SEQ ID NO: 75497 - DNA, 22 bp, Artificial Sequence
  Synthetic oligonucleotide; CTA chr11 5178708 5178729 5178725 5178730 +
caaagttgaggatttagaaaca

SEQ ID NO: 75498 - DNA, 22 bp, Artificial Sequence
  Synthetic oligonucleotide; TTG chr11 5178716 5178737 5178733 5178738 +
aggatttagaaacactacctta

SEQ ID NO: 75499 - DNA, 22 bp, Artificial Sequence
  Synthetic oligonucleotide; TTT chr11 5178723 5178744 5178740 5178745 +
agaaacactaccttaggctgaa

SEQ ID NO: 75500 - DNA, 22 bp, Artificial Sequence
  Synthetic oligonucleotide; TTA chr11 5178724 5178745 5178741 5178746 +
gaaacactaccttaggctgaat

SEQ ID NO: 75501 - DNA, 22 bp, Artificial Sequence
  Synthetic oligonucleotide; CTA chr11 5178733 5178754 5178750 5178755 +
ccttaggctgaatgaggtctca

SEQ ID NO: 75502 - DNA, 22 bp, Artificial Sequence
  Synthetic oligonucleotide; CTT chr11 5178737 5178758 5178754 5178759 +
aggctgaatgaggtctcatcag

SEQ ID NO: 75503 - DNA, 22 bp, Artificial Sequence
  Synthetic oligonucleotide; TTA chr11 5178738 5178759 5178755 5178760 +
ggctgaatgaggtctcatcaga

SEQ ID NO: 75504 - DNA, 22 bp, Artificial Sequence
  Synthetic oligonucleotide; CTG chr11 5178743 5178764 5178760 5178765 +
aatgaggtctcatcagatttgt

SEQ ID NO: 75505 - DNA, 22 bp, Artificial Sequence
  Synthetic oligonucleotide; CTC chr11 5178754 5178775 5178771 5178776 +
atcagatttgttttctttccaa

SEQ ID NO: 75506 - DNA, 22 bp, Artificial Sequence
  Synthetic oligonucleotide; TTT chr11 5178763 5178784 5178780 5178785 +
gttttctttccaatgttttctt

SEQ ID NO: 75507 - DNA, 22 bp, Artificial Sequence
  Synthetic oligonucleotide; TTG chr11 5178764 5178785 5178781 5178786 +
ttttctttccaatgttttcttc

SEQ ID NO: 75508 - DNA, 22 bp, Artificial Sequence
  Synthetic oligonucleotide; TTT chr11 5178767 5178788 5178784 5178789 +
tctttccaatgttttcttctct

SEQ ID NO: 75509 - DNA, 22 bp, Artificial Sequence
  Synthetic oligonucleotide; TTT chr11 5178768 5178789 5178785 5178790 +
ctttccaatgttttcttctctg

SEQ ID NO: 75510 - DNA, 22 bp, Artificial Sequence
  Synthetic oligonucleotide; TTC chr11 5178769 5178790 5178786 5178791 +
tttccaatgttttcttctctgg

SEQ ID NO: 75511 - DNA, 22 bp, Artificial Sequence
  Synthetic oligonucleotide; CTT chr11 5178771 5178792 5178788 5178793 +
tccaatgttttcttctctggga

SEQ ID NO: 75512 - DNA, 22 bp, Artificial Sequence
  Synthetic oligonucleotide; TTT chr11 5178772 5178793 5178789 5178794 +
ccaatgttttcttctctgggaa

SEQ ID NO: 75513 - DNA, 22 bp, Artificial Sequence
  Synthetic oligonucleotide; TTC chr11 5178773 5178794 5178790 5178795 +
caatgttttcttctctgggaaa

SEQ ID NO: 75514 - DNA, 22 bp, Artificial Sequence
  Synthetic oligonucleotide; TTT chr11 5178781 5178802 5178798 5178803 +
tcttctctgggaaaggagagta

SEQ ID NO: 75515 - DNA, 22 bp, Artificial Sequence
  Synthetic oligonucleotide; TTT chr11 5178782 5178803 5178799 5178804 +
cttctctgggaaaggagagtaa

SEQ ID NO: 75516 - DNA, 22 bp, Artificial Sequence
  Synthetic oligonucleotide; TTC chr11 5178783 5178804 5178800 5178805 +
ttctctgggaaaggagagtaaa

SEQ ID NO: 75517 - DNA, 22 bp, Artificial Sequence
  Synthetic oligonucleotide; CTT chr11 5178785 5178806 5178802 5178807 +
ctctgggaaaggagagtaaaat

SEQ ID NO: 75518 - DNA, 22 bp, Artificial Sequence
  Synthetic oligonucleotide; TTC chr11 5178786 5178807 5178803 5178808 +
tctgggaaaggagagtaaaatg

SEQ ID NO: 75519 - DNA, 22 bp, Artificial Sequence
  Synthetic oligonucleotide; CTC chr11 5178788 5178809 5178805 5178810 +
tgggaaaggagagtaaaatggg

SEQ ID NO: 75520 - DNA, 22 bp, Artificial Sequence
  Synthetic oligonucleotide; CTG chr11 5178790 5178811 5178807 5178812 +
ggaaaggagagtaaaatgggtt

SEQ ID NO: 75521 - DNA, 22 bp, Artificial Sequence
  Synthetic oligonucleotide; TTA chr11 5178813 5178834 5178830 5178835 +
atagaccgaatatataagtcct

SEQ ID NO: 75522 - DNA, 22 bp, Artificial Sequence
  Synthetic oligonucleotide; CTA chr11 5178836 5178857 5178853 5178858 +
ccaaataattaattttttgtac

SEQ ID NO: 75523 - DNA, 22 bp, Artificial Sequence
  Synthetic oligonucleotide; TTA chr11 5178847 5178868 5178864 5178869 +
attttttgtaccttaaaaaatt

SEQ ID NO: 75524 - DNA, 22 bp, Artificial Sequence
  Synthetic oligonucleotide; TTT chr11 5178851 5178872 5178868 5178873 +
tttgtaccttaaaaaattagta

SEQ ID NO: 75525 - DNA, 22 bp, Artificial Sequence
  Synthetic oligonucleotide; TTT chr11 5178852 5178873 5178869 5178874 +
ttgtaccttaaaaaattagtag

SEQ ID NO: 75526 - DNA, 22 bp, Artificial Sequence
  Synthetic oligonucleotide; TTT chr11 5178853 5178874 5178870 5178875 +
tgtaccttaaaaaattagtaga

SEQ ID NO: 75527 - DNA, 22 bp, Artificial Sequence
  Synthetic oligonucleotide; TTT chr11 5178854 5178875 5178871 5178876 +
gtaccttaaaaaattagtagat

SEQ ID NO: 75528 - DNA, 22 bp, Artificial Sequence
  Synthetic oligonucleotide; TTG chr11 5178855 5178876 5178872 5178877 +
taccttaaaaaattagtagata

SEQ ID NO: 75529 - DNA, 22 bp, Artificial Sequence
  Synthetic oligonucleotide; CTT chr11 5178861 5178882 5178878 5178883 +
aaaaaattagtagatattattt

SEQ ID NO: 75530 - DNA, 22 bp, Artificial Sequence
  Synthetic oligonucleotide; TTA chr11 5178862 5178883 5178879 5178884 +
aaaaattagtagatattattta

SEQ ID NO: 75531 - DNA, 22 bp, Artificial Sequence
  Synthetic oligonucleotide; TTA chr11 5178870 5178891 5178887 5178892 +
gtagatattatttaataactgc

SEQ ID NO: 75532 - DNA, 22 bp, Artificial Sequence
  Synthetic oligonucleotide; TTA chr11 5178880 5178901 5178897 5178902 +
tttaataactgcttaatatgtg

SEQ ID NO: 75533 - DNA, 22 bp, Artificial Sequence
  Synthetic oligonucleotide; TTT chr11 5178883 5178904 5178900 5178905 +
aataactgcttaatatgtgtca

SEQ ID NO: 75534 - DNA, 22 bp, Artificial Sequence
  Synthetic oligonucleotide; TTA chr11 5178884 5178905 5178901 5178906 +
ataactgcttaatatgtgtcat

SEQ ID NO: 75535 - DNA, 22 bp, Artificial Sequence
  Synthetic oligonucleotide; CTG chr11 5178891 5178912 5178908 5178913 +
cttaatatgtgtcatactactt

SEQ ID NO: 75536 - DNA, 22 bp, Artificial Sequence
  Synthetic oligonucleotide; CTT chr11 5178894 5178915 5178911 5178916 +
aatatgtgtcatactactttac

SEQ ID NO: 75537 - DNA, 22 bp, Artificial Sequence
  Synthetic oligonucleotide; TTA chr11 5178895 5178916 5178912 5178917 +
atatgtgtcatactactttaca

SEQ ID NO: 75538 - DNA, 22 bp, Artificial Sequence
  Synthetic oligonucleotide; CTA chr11 5178910 5178931 5178927 5178932 +
ctttacaaatattaacttatta

SEQ ID NO: 75539 - DNA, 22 bp, Artificial Sequence
  Synthetic oligonucleotide; CTT chr11 5178913 5178934 5178930 5178935 +
tacaaatattaacttattaaat

SEQ ID NO: 75540 - DNA, 22 bp, Artificial Sequence
  Synthetic oligonucleotide; TTT chr11 5178914 5178935 5178931 5178936 +
acaaatattaacttattaaatc

SEQ ID NO: 75541 - DNA, 22 bp, Artificial Sequence
  Synthetic oligonucleotide; TTA chr11 5178915 5178936 5178932 5178937 +
caaatattaacttattaaatct

SEQ ID NO: 75542 - DNA, 22 bp, Artificial Sequence
  Synthetic oligonucleotide; TTA chr11 5178924 5178945 5178941 5178946 +
acttattaaatcttcacaataa

SEQ ID NO: 75543 - DNA, 22 bp, Artificial Sequence
  Synthetic oligonucleotide; CTT chr11 5178928 5178949 5178945 5178950 +
attaaatcttcacaataaccta

SEQ ID NO: 75544 - DNA, 22 bp, Artificial Sequence
  Synthetic oligonucleotide; TTA chr11 5178929 5178950 5178946 5178951 +
ttaaatcttcacaataacctat

SEQ ID NO: 75545 - DNA, 22 bp, Artificial Sequence
  Synthetic oligonucleotide; TTA chr11 5178932 5178953 5178949 5178954 +
aatcttcacaataacctattga

SEQ ID NO: 75546 - DNA, 22 bp, Artificial Sequence
  Synthetic oligonucleotide; CTT chr11 5178938 5178959 5178955 5178960 +
cacaataacctattgaaaagcc

SEQ ID NO: 75547 - DNA, 22 bp, Artificial Sequence
  Synthetic oligonucleotide; TTC chr11 5178939 5178960 5178956 5178961 +
acaataacctattgaaaagccc

SEQ ID NO: 75548 - DNA, 22 bp, Artificial Sequence
  Synthetic oligonucleotide; CTA chr11 5178950 5178971 5178967 5178972 +
ttgaaaagccctttaaataacc

SEQ ID NO: 75549 - DNA, 22 bp, Artificial Sequence
  Synthetic oligonucleotide; TTG chr11 5178953 5178974 5178970 5178975 +
aaaagccctttaaataaccatt

SEQ ID NO: 75550 - DNA, 22 bp, Artificial Sequence
  Synthetic oligonucleotide; CTT chr11 5178963 5178984 5178980 5178985 +
taaataaccattatataaatac

SEQ ID NO: 75551 - DNA, 22 bp, Artificial Sequence
  Synthetic oligonucleotide; TTT chr11 5178964 5178985 5178981 5178986 +
aaataaccattatataaatact

SEQ ID NO: 75552 - DNA, 22 bp, Artificial Sequence
  Synthetic oligonucleotide; TTA chr11 5178965 5178986 5178982 5178987 +
aataaccattatataaatacta

SEQ ID NO: 75553 - DNA, 22 bp, Artificial Sequence
  Synthetic oligonucleotide; TTA chr11 5178976 5178997 5178993 5178998 +
tataaatactattatttctaca

SEQ ID NO: 75554 - DNA, 22 bp, Artificial Sequence
  Synthetic oligonucleotide; CTA chr11 5178987 5179008 5179004 5179009 +
ttatttctacagatgtaaaaaa

SEQ ID NO: 75555 - DNA, 22 bp, Artificial Sequence
  Synthetic oligonucleotide; TTA chr11 5178990 5179011 5179007 5179012 +
tttctacagatgtaaaaaaaac

SEQ ID NO: 75556 - DNA, 22 bp, Artificial Sequence
  Synthetic oligonucleotide; TTT chr11 5178993 5179014 5179010 5179015 +
ctacagatgtaaaaaaaaccca

SEQ ID NO: 75557 - DNA, 22 bp, Artificial Sequence
  Synthetic oligonucleotide; TTC chr11 5178994 5179015 5179011 5179016 +
tacagatgtaaaaaaaacccac

SEQ ID NO: 75558 - DNA, 22 bp, Artificial Sequence
  Synthetic oligonucleotide; CTA chr11 5178996 5179017 5179013 5179018 +
cagatgtaaaaaaaacccacag

SEQ ID NO: 75559 - DNA, 22 bp, Artificial Sequence
  Synthetic oligonucleotide; CTT chr11 5179022 5179043 5179039 5179044 +
tcagcctcttaccctaggccct

SEQ ID NO: 75560 - DNA, 22 bp, Artificial Sequence
  Synthetic oligonucleotide; TTT chr11 5179023 5179044 5179040 5179045 +
cagcctcttaccctaggcccta

SEQ ID NO: 75561 - DNA, 22 bp, Artificial Sequence
  Synthetic oligonucleotide; TTC chr11 5179024 5179045 5179041 5179046 +
agcctcttaccctaggccctac

SEQ ID NO: 75562 - DNA, 22 bp, Artificial Sequence
  Synthetic oligonucleotide; CTC chr11 5179030 5179051 5179047 5179052 +
ttaccctaggccctactggatt

SEQ ID NO: 75563 - DNA, 22 bp, Artificial Sequence
  Synthetic oligonucleotide; CTT chr11 5179032 5179053 5179049 5179054 +
accctaggccctactggattta

SEQ ID NO: 75564 - DNA, 22 bp, Artificial Sequence
  Synthetic oligonucleotide; TTA chr11 5179033 5179054 5179050 5179055 +
ccctaggccctactggatttaa

SEQ ID NO: 75565 - DNA, 22 bp, Artificial Sequence
  Synthetic oligonucleotide; CTA chr11 5179038 5179059 5179055 5179060 +
ggccctactggatttaaagtaa

SEQ ID NO: 75566 - DNA, 22 bp, Artificial Sequence
  Synthetic oligonucleotide; CTA chr11 5179045 5179066 5179062 5179067 +
ctggatttaaagtaaggcagga

SEQ ID NO: 75567 - DNA, 22 bp, Artificial Sequence
  Synthetic oligonucleotide; CTG chr11 5179048 5179069 5179065 5179070 +
gatttaaagtaaggcaggataa

SEQ ID NO: 75568 - DNA, 22 bp, Artificial Sequence
  Synthetic oligonucleotide; TTT chr11 5179053 5179074 5179070 5179075 +
aaagtaaggcaggataaatctg

SEQ ID NO: 75569 - DNA, 22 bp, Artificial Sequence
  Synthetic oligonucleotide; TTA chr11 5179054 5179075 5179071 5179076 +
aagtaaggcaggataaatctga

SEQ ID NO: 75570 - DNA, 22 bp, Artificial Sequence
  Synthetic oligonucleotide; CTG chr11 5179075 5179096 5179092 5179097 +
aaagctttgatctttactacca

SEQ ID NO: 75571 - DNA, 22 bp, Artificial Sequence
  Synthetic oligonucleotide; CTT chr11 5179082 5179103 5179099 5179104 +
tgatctttactaccatccaatg

SEQ ID NO: 75572 - DNA, 22 bp, Artificial Sequence
  Synthetic oligonucleotide; TTT chr11 5179083 5179104 5179100 5179105 +
gatctttactaccatccaatgc

SEQ ID NO: 75573 - DNA, 22 bp, Artificial Sequence
  Synthetic oligonucleotide; TTG chr11 5179084 5179105 5179101 5179106 +
atctttactaccatccaatgct

SEQ ID NO: 75574 - DNA, 22 bp, Artificial Sequence
  Synthetic oligonucleotide; CTT chr11 5179089 5179110 5179106 5179111 +
tactaccatccaatgctgccta

SEQ ID NO: 75575 - DNA, 22 bp, Artificial Sequence
  Synthetic oligonucleotide; TTT chr11 5179090 5179111 5179107 5179112 +
actaccatccaatgctgcctat

SEQ ID NO: 75576 - DNA, 22 bp, Artificial Sequence
  Synthetic oligonucleotide; TTA chr11 5179091 5179112 5179108 5179113 +
ctaccatccaatgctgcctatc

SEQ ID NO: 75577 - DNA, 22 bp, Artificial Sequence
  Synthetic oligonucleotide; CTA chr11 5179094 5179115 5179111 5179116 +
ccatccaatgctgcctatcaag

SEQ ID NO: 75578 - DNA, 22 bp, Artificial Sequence
  Synthetic oligonucleotide; CTG chr11 5179107 5179128 5179124 5179129 +
cctatcaaggtaaaactagata

SEQ ID NO: 75579 - DNA, 22 bp, Artificial Sequence
  Synthetic oligonucleotide; CTA chr11 5179111 5179132 5179128 5179133 +
tcaaggtaaaactagatataaa

SEQ ID NO: 75580 - DNA, 22 bp, Artificial Sequence
  Synthetic oligonucleotide; CTA chr11 5179125 5179146 5179142 5179147 +
gatataaaacgcagcatcaaat

SEQ ID NO: 75581 - DNA, 22 bp, Artificial Sequence
  Synthetic oligonucleotide; TTT chr11 5179149 5179170 5179166 5179171 +
tttactgatcatatccctaagg

SEQ ID NO: 75582 - DNA, 22 bp, Artificial Sequence
  Synthetic oligonucleotide; TTT chr11 5179150 5179171 5179167 5179172 +
ttactgatcatatccctaagga

SEQ ID NO: 75583 - DNA, 22 bp, Artificial Sequence
  Synthetic oligonucleotide; TTT chr11 5179151 5179172 5179168 5179173 +
tactgatcatatccctaaggaa

SEQ ID NO: 75584 - DNA, 22 bp, Artificial Sequence
  Synthetic oligonucleotide; TTT chr11 5179152 5179173 5179169 5179174 +
actgatcatatccctaaggaaa

SEQ ID NO: 75585 - DNA, 22 bp, Artificial Sequence
  Synthetic oligonucleotide; TTA chr11 5179153 5179174 5179170 5179175 +
ctgatcatatccctaaggaaaa

SEQ ID NO: 75586 - DNA, 22 bp, Artificial Sequence
  Synthetic oligonucleotide; CTG chr11 5179156 5179177 5179173 5179178 +
atcatatccctaaggaaaatag

SEQ ID NO: 75587 - DNA, 22 bp, Artificial Sequence
  Synthetic oligonucleotide; CTA chr11 5179168 5179189 5179185 5179190 +
aggaaaatagagagttatgaaa

SEQ ID NO: 75588 - DNA, 22 bp, Artificial Sequence
  Synthetic oligonucleotide; TTA chr11 5179185 5179206 5179202 5179207 +
tgaaatttagttgtgctgctta

SEQ ID NO: 75589 - DNA, 22 bp, Artificial Sequence
  Synthetic oligonucleotide; TTT chr11 5179193 5179214 5179210 5179215 +
agttgtgctgcttacagaaatg

SEQ ID NO: 75590 - DNA, 22 bp, Artificial Sequence
  Synthetic oligonucleotide; TTA chr11 5179194 5179215 5179211 5179216 +
gttgtgctgcttacagaaatgg

SEQ ID NO: 75591 - DNA, 22 bp, Artificial Sequence
  Synthetic oligonucleotide; TTG chr11 5179198 5179219 5179215 5179220 +
tgctgcttacagaaatgggagg

SEQ ID NO: 75592 - DNA, 22 bp, Artificial Sequence
  Synthetic oligonucleotide; CTG chr11 5179203 5179224 5179220 5179225 +
cttacagaaatgggagggaatt

SEQ ID NO: 75593 - DNA, 22 bp, Artificial Sequence
  Synthetic oligonucleotide; CTT chr11 5179206 5179227 5179223 5179228 +
acagaaatgggagggaattaag

SEQ ID NO: 75594 - DNA, 22 bp, Artificial Sequence
  Synthetic oligonucleotide; TTA chr11 5179207 5179228 5179224 5179229 +
cagaaatgggagggaattaagt

SEQ ID NO: 75595 - DNA, 22 bp, Artificial Sequence
  Synthetic oligonucleotide; TTA chr11 5179226 5179247 5179243 5179248 +
agtctgacaaaatagatttcaa

SEQ ID NO: 75596 - DNA, 22 bp, Artificial Sequence
  Synthetic oligonucleotide; CTG chr11 5179232 5179253 5179249 5179254 +
acaaaatagatttcaagcaata

SEQ ID NO: 75597 - DNA, 22 bp, Artificial Sequence
  Synthetic oligonucleotide; TTT chr11 5179245 5179266 5179262 5179267 +
caagcaatatagcatgtatgcc

SEQ ID NO: 75598 - DNA, 22 bp, Artificial Sequence
  Synthetic oligonucleotide; TTC chr11 5179246 5179267 5179263 5179268 +
aagcaatatagcatgtatgcct

SEQ ID NO: 75599 - DNA, 22 bp, Artificial Sequence
  Synthetic oligonucleotide; CTT chr11 5179269 5179290 5179286 5179291 +
cttccacattgattggccttaa

SEQ ID NO: 75600 - DNA, 22 bp, Artificial Sequence
  Synthetic oligonucleotide; TTC chr11 5179270 5179291 5179287 5179292 +
ttccacattgattggccttaac

SEQ ID NO: 75601 - DNA, 22 bp, Artificial Sequence
  Synthetic oligonucleotide; CTT chr11 5179272 5179293 5179289 5179294 +
ccacattgattggccttaactt

SEQ ID NO: 75602 - DNA, 22 bp, Artificial Sequence
  Synthetic oligonucleotide; TTC chr11 5179273 5179294 5179290 5179295 +
cacattgattggccttaactta

SEQ ID NO: 75603 - DNA, 22 bp, Artificial Sequence
  Synthetic oligonucleotide; TTG chr11 5179280 5179301 5179297 5179302 +
attggccttaacttattgttaa

SEQ ID NO: 75604 - DNA, 22 bp, Artificial Sequence
  Synthetic oligonucleotide; TTG chr11 5179284 5179305 5179301 5179306 +
gccttaacttattgttaagcca

SEQ ID NO: 75605 - DNA, 22 bp, Artificial Sequence
  Synthetic oligonucleotide; CTT chr11 5179289 5179310 5179306 5179311 +
aacttattgttaagccatatgc

SEQ ID NO: 75606 - DNA, 22 bp, Artificial Sequence
  Synthetic oligonucleotide; TTA chr11 5179290 5179311 5179307 5179312 +
acttattgttaagccatatgct

SEQ ID NO: 75607 - DNA, 22 bp, Artificial Sequence
  Synthetic oligonucleotide; CTT chr11 5179294 5179315 5179311 5179316 +
attgttaagccatatgctagcc

SEQ ID NO: 75608 - DNA, 22 bp, Artificial Sequence
  Synthetic oligonucleotide; TTA chr11 5179295 5179316 5179312 5179317 +
ttgttaagccatatgctagcca

SEQ ID NO: 75609 - DNA, 22 bp, Artificial Sequence
  Synthetic oligonucleotide; TTG chr11 5179298 5179319 5179315 5179320 +
ttaagccatatgctagccattg

SEQ ID NO: 75610 - DNA, 22 bp, Artificial Sequence
  Synthetic oligonucleotide; TTA chr11 5179301 5179322 5179318 5179323 +
agccatatgctagccattgaag

SEQ ID NO: 75611 - DNA, 22 bp, Artificial Sequence
  Synthetic oligonucleotide; CTA chr11 5179313 5179334 5179330 5179335 +
gccattgaagacatacagcaaa

SEQ ID NO: 75612 - DNA, 22 bp, Artificial Sequence
  Synthetic oligonucleotide; TTG chr11 5179320 5179341 5179337 5179342 +
aagacatacagcaaattaaatt

SEQ ID NO: 75613 - DNA, 22 bp, Artificial Sequence
  Synthetic oligonucleotide; TTA chr11 5179338 5179359 5179355 5179360 +
aattgttctgccaattaatcta

SEQ ID NO: 75614 - DNA, 22 bp, Artificial Sequence
  Synthetic oligonucleotide; TTG chr11 5179343 5179364 5179360 5179365 +
ttctgccaattaatctatttct

SEQ ID NO: 75615 - DNA, 22 bp, Artificial Sequence
  Synthetic oligonucleotide; TTC chr11 5179346 5179367 5179363 5179368 +
tgccaattaatctatttctcaa

SEQ ID NO: 75616 - DNA, 22 bp, Artificial Sequence
  Synthetic oligonucleotide; CTG chr11 5179348 5179369 5179365 5179370 +
ccaattaatctatttctcaaaa

SEQ ID NO: 75617 - DNA, 22 bp, Artificial Sequence
  Synthetic oligonucleotide; TTA chr11 5179355 5179376 5179372 5179377 +
atctatttctcaaaaatatagg

SEQ ID NO: 75618 - DNA, 22 bp, Artificial Sequence
  Synthetic oligonucleotide; CTA chr11 5179360 5179381 5179377 5179382 +
tttctcaaaaatataggataaa

SEQ ID NO: 75619 - DNA, 22 bp, Artificial Sequence
  Synthetic oligonucleotide; TTT chr11 5179363 5179384 5179380 5179385 +
ctcaaaaatataggataaaaca

SEQ ID NO: 75620 - DNA, 22 bp, Artificial Sequence
  Synthetic oligonucleotide; TTC chr11 5179364 5179385 5179381 5179386 +
tcaaaaatataggataaaacat

SEQ ID NO: 75621 - DNA, 22 bp, Artificial Sequence
  Synthetic oligonucleotide; CTC chr11 5179366 5179387 5179383 5179388 +
aaaaatataggataaaacatta

SEQ ID NO: 75622 - DNA, 22 bp, Artificial Sequence
  Synthetic oligonucleotide; TTA chr11 5179388 5179409 5179405 5179410 +
taaactttagatatttgcaatg

SEQ ID NO: 75623 - DNA, 22 bp, Artificial Sequence
  Synthetic oligonucleotide; CTT chr11 5179395 5179416 5179412 5179417 +
tagatatttgcaatggcagacg

SEQ ID NO: 75624 - DNA, 22 bp, Artificial Sequence
  Synthetic oligonucleotide; TTT chr11 5179396 5179417 5179413 5179418 +
agatatttgcaatggcagacgg

SEQ ID NO: 75625 - DNA, 22 bp, Artificial Sequence
  Synthetic oligonucleotide; TTA chr11 5179397 5179418 5179414 5179419 +
gatatttgcaatggcagacgga

SEQ ID NO: 75626 - DNA, 22 bp, Artificial Sequence
  Synthetic oligonucleotide; TTT chr11 5179404 5179425 5179421 5179426 +
gcaatggcagacggagctgggt

SEQ ID NO: 75627 - DNA, 22 bp, Artificial Sequence
  Synthetic oligonucleotide; TTG chr11 5179405 5179426 5179422 5179427 +
caatggcagacggagctgggtt

SEQ ID NO: 75628 - DNA, 22 bp, Artificial Sequence
  Synthetic oligonucleotide; CTG chr11 5179423 5179444 5179440 5179445 +
ggtttttaaatctatatgccag

SEQ ID NO: 75629 - DNA, 22 bp, Artificial Sequence
  Synthetic oligonucleotide; TTT chr11 5179428 5179449 5179445 5179450 +
ttaaatctatatgccagcctgg

SEQ ID NO: 75630 - DNA, 22 bp, Artificial Sequence
  Synthetic oligonucleotide; TTT chr11 5179429 5179450 5179446 5179451 +
taaatctatatgccagcctggc

SEQ ID NO: 75631 - DNA, 22 bp, Artificial Sequence
  Synthetic oligonucleotide; TTT chr11 5179430 5179451 5179447 5179452 +
aaatctatatgccagcctggca

SEQ ID NO: 75632 - DNA, 22 bp, Artificial Sequence
  Synthetic oligonucleotide; TTA chr11 5179431 5179452 5179448 5179453 +
aatctatatgccagcctggcac

SEQ ID NO: 75633 - DNA, 22 bp, Artificial Sequence
  Synthetic oligonucleotide; CTA chr11 5179437 5179458 5179454 5179459 +
tatgccagcctggcacggtggc

SEQ ID NO: 75634 - DNA, 22 bp, Artificial Sequence
  Synthetic oligonucleotide; CTG chr11 5179449 5179470 5179466 5179471 +
gcacggtggctcacacctgtaa

SEQ ID NO: 75635 - DNA, 22 bp, Artificial Sequence
  Synthetic oligonucleotide; CTC chr11 5179461 5179482 5179478 5179483 +
acacctgtaatcccagcacttt

SEQ ID NO: 75636 - DNA, 22 bp, Artificial Sequence
  Synthetic oligonucleotide; CTG chr11 5179468 5179489 5179485 5179490 +
taatcccagcactttgagaggc

SEQ ID NO: 75637 - DNA, 22 bp, Artificial Sequence
  Synthetic oligonucleotide; CTT chr11 5179482 5179503 5179499 5179504 +
tgagaggctgaggcgggtagat

SEQ ID NO: 75638 - DNA, 22 bp, Artificial Sequence
  Synthetic oligonucleotide; TTT chr11 5179483 5179504 5179500 5179505 +
gagaggctgaggcgggtagatc

SEQ ID NO: 75639 - DNA, 22 bp, Artificial Sequence
  Synthetic oligonucleotide; TTG chr11 5179484 5179505 5179501 5179506 +
agaggctgaggcgggtagatca

SEQ ID NO: 75640 - DNA, 22 bp, Artificial Sequence
  Synthetic oligonucleotide; CTG chr11 5179492 5179513 5179509 5179514 +
aggcgggtagatcacaaggtca

SEQ ID NO: 75641 - DNA, 22 bp, Artificial Sequence
  Synthetic oligonucleotide; TTC chr11 5179521 5179542 5179538 5179543 +
cagaccagcttgaccaaaacaa

SEQ ID NO: 75642 - DNA, 22 bp, Artificial Sequence
  Synthetic oligonucleotide; CTT chr11 5179532 5179553 5179549 5179554 +
gaccaaaacaatgaaaccccgt

SEQ ID NO: 75643 - DNA, 22 bp, Artificial Sequence
  Synthetic oligonucleotide; TTG chr11 5179533 5179554 5179550 5179555 +
accaaaacaatgaaaccccgtc

SEQ ID NO: 75644 - DNA, 22 bp, Artificial Sequence
  Synthetic oligonucleotide; CTC chr11 5179557 5179578 5179574 5179579 +
tactaaaaatacaaaaattagc

SEQ ID NO: 75645 - DNA, 22 bp, Artificial Sequence
  Synthetic oligonucleotide; CTA chr11 5179559 5179580 5179576 5179581 +
ctaaaaatacaaaaattagctg

SEQ ID NO: 75646 - DNA, 22 bp, Artificial Sequence
  Synthetic oligonucleotide; CTA chr11 5179562 5179583 5179579 5179584 +
aaaatacaaaaattagctgggc

SEQ ID NO: 75647 - DNA, 22 bp, Artificial Sequence
  Synthetic oligonucleotide; TTA chr11 5179577 5179598 5179594 5179599 +
gctgggcatagtggtgtgcacc

SEQ ID NO: 75648 - DNA, 22 bp, Artificial Sequence
  Synthetic oligonucleotide; CTG chr11 5179581 5179602 5179598 5179603 +
ggcatagtggtgtgcaccttta

SEQ ID NO: 75649 - DNA, 22 bp, Artificial Sequence
  Synthetic oligonucleotide; CTT chr11 5179601 5179622 5179618 5179623 +
taatcccagctactcaagaggc

SEQ ID NO: 75650 - DNA, 22 bp, Artificial Sequence
  Synthetic oligonucleotide; TTT chr11 5179602 5179623 5179619 5179624 +
aatcccagctactcaagaggct

SEQ ID NO: 75651 - DNA, 22 bp, Artificial Sequence
  Synthetic oligonucleotide; TTA chr11 5179603 5179624 5179620 5179625 +
atcccagctactcaagaggctg

SEQ ID NO: 75652 - DNA, 22 bp, Artificial Sequence
  Synthetic oligonucleotide; CTA chr11 5179613 5179634 5179630 5179635 +
ctcaagaggctgaggcaggaga

SEQ ID NO: 75653 - DNA, 22 bp, Artificial Sequence
  Synthetic oligonucleotide; CTC chr11 5179616 5179637 5179633 5179638 +
aagaggctgaggcaggagaatc

SEQ ID NO: 75654 - DNA, 22 bp, Artificial Sequence
  Synthetic oligonucleotide; CTG chr11 5179625 5179646 5179642 5179647 +
aggcaggagaatcgcttgaacc

SEQ ID NO: 75655 - DNA, 22 bp, Artificial Sequence
  Synthetic oligonucleotide; CTT chr11 5179642 5179663 5179659 5179664 +
gaacctgggaggcagaagtttc

SEQ ID NO: 75656 - DNA, 22 bp, Artificial Sequence
  Synthetic oligonucleotide; TTG chr11 5179643 5179664 5179660 5179665 +
aacctgggaggcagaagtttca

SEQ ID NO: 75657 - DNA, 22 bp, Artificial Sequence
  Synthetic oligonucleotide; CTG chr11 5179649 5179670 5179666 5179671 +
ggaggcagaagtttcagtgagc

SEQ ID NO: 75658 - DNA, 22 bp, Artificial Sequence
  Synthetic oligonucleotide; TTT chr11 5179663 5179684 5179680 5179685 +
cagtgagcagagatcgcgcaac

SEQ ID NO: 75659 - DNA, 22 bp, Artificial Sequence
  Synthetic oligonucleotide; TTC chr11 5179664 5179685 5179681 5179686 +
agtgagcagagatcgcgcaact

SEQ ID NO: 75660 - DNA, 22 bp, Artificial Sequence
  Synthetic oligonucleotide; CTG chr11 5179687 5179708 5179704 5179709 +
cactccagcctaggtgacagag

SEQ ID NO: 75661 - DNA, 22 bp, Artificial Sequence
  Synthetic oligonucleotide; CTC chr11 5179692 5179713 5179709 5179714 +
cagcctaggtgacagagcgaga

SEQ ID NO: 75662 - DNA, 22 bp, Artificial Sequence
  Synthetic oligonucleotide; CTA chr11 5179699 5179720 5179716 5179721 +
ggtgacagagcgagactccctc

SEQ ID NO: 75663 - DNA, 22 bp, Artificial Sequence
  Synthetic oligonucleotide; CTC chr11 5179717 5179738 5179734 5179739 +
cctctcaaaaaaaaaagtatat

SEQ ID NO: 75664 - DNA, 22 bp, Artificial Sequence
  Synthetic oligonucleotide; CTC chr11 5179721 5179742 5179738 5179743 +
tcaaaaaaaaaagtatatgcct

SEQ ID NO: 75665 - DNA, 22 bp, Artificial Sequence
  Synthetic oligonucleotide; CTC chr11 5179723 5179744 5179740 5179745 +
aaaaaaaaaagtatatgcctca

SEQ ID NO: 75666 - DNA, 22 bp, Artificial Sequence
  Synthetic oligonucleotide; CTC chr11 5179744 5179765 5179761 5179766 +
ataggtggtaaagaataaaata

SEQ ID NO: 75667 - DNA, 22 bp, Artificial Sequence
  Synthetic oligonucleotide; TTT chr11 5179769 5179790 5179786 5179791 +
tgtttctttccacttcagtcac

SEQ ID NO: 75668 - DNA, 22 bp, Artificial Sequence
  Synthetic oligonucleotide; TTT chr11 5179770 5179791 5179787 5179792 +
gtttctttccacttcagtcact

SEQ ID NO: 75669 - DNA, 22 bp, Artificial Sequence
  Synthetic oligonucleotide; TTG chr11 5179771 5179792 5179788 5179793 +
tttctttccacttcagtcactg

SEQ ID NO: 75670 - DNA, 22 bp, Artificial Sequence
  Synthetic oligonucleotide; TTT chr11 5179774 5179795 5179791 5179796 +
ctttccacttcagtcactgatt

SEQ ID NO: 75671 - DNA, 22 bp, Artificial Sequence
  Synthetic oligonucleotide; TTC chr11 5179775 5179796 5179792 5179797 +
tttccacttcagtcactgattg

SEQ ID NO: 75672 - DNA, 22 bp, Artificial Sequence
  Synthetic oligonucleotide; CTT chr11 5179777 5179798 5179794 5179799 +
tccacttcagtcactgattgaa

SEQ ID NO: 75673 - DNA, 22 bp, Artificial Sequence
  Synthetic oligonucleotide; TTT chr11 5179778 5179799 5179795 5179800 +
ccacttcagtcactgattgaaa

SEQ ID NO: 75674 - DNA, 22 bp, Artificial Sequence
  Synthetic oligonucleotide; TTC chr11 5179779 5179800 5179796 5179801 +
cacttcagtcactgattgaaaa

SEQ ID NO: 75675 - DNA, 22 bp, Artificial Sequence
  Synthetic oligonucleotide; CTT chr11 5179784 5179805 5179801 5179806 +
cagtcactgattgaaaatgaga

SEQ ID NO: 75676 - DNA, 22 bp, Artificial Sequence
  Synthetic oligonucleotide; TTC chr11 5179785 5179806 5179802 5179807 +
agtcactgattgaaaatgagac

SEQ ID NO: 75677 - DNA, 22 bp, Artificial Sequence
  Synthetic oligonucleotide; CTG chr11 5179793 5179814 5179810 5179815 +
attgaaaatgagacaatacaca

SEQ ID NO: 75678 - DNA, 22 bp, Artificial Sequence
  Synthetic oligonucleotide; TTG chr11 5179797 5179818 5179814 5179819 +
aaaatgagacaatacacattgt

SEQ ID NO: 75679 - DNA, 22 bp, Artificial Sequence
  Synthetic oligonucleotide; TTG chr11 5179818 5179839 5179835 5179840 +
tatatatatatatatgtttatt

SEQ ID NO: 75680 - DNA, 22 bp, Artificial Sequence
  Synthetic oligonucleotide; TTT chr11 5179837 5179858 5179854 5179859 +
attatactttaagttctagggt

SEQ ID NO: 75681 - DNA, 22 bp, Artificial Sequence
  Synthetic oligonucleotide; TTA chr11 5179838 5179859 5179855 5179860 +
ttatactttaagttctagggta

SEQ ID NO: 75682 - DNA, 22 bp, Artificial Sequence
  Synthetic oligonucleotide; TTA chr11 5179841 5179862 5179858 5179863 +
tactttaagttctagggtacat

SEQ ID NO: 75683 - DNA, 22 bp, Artificial Sequence
  Synthetic oligonucleotide; CTT chr11 5179846 5179867 5179863 5179868 +
taagttctagggtacatgtgca

SEQ ID NO: 75684 - DNA, 22 bp, Artificial Sequence
  Synthetic oligonucleotide; TTT chr11 5179847 5179868 5179864 5179869 +
aagttctagggtacatgtgcac

SEQ ID NO: 75685 - DNA, 22 bp, Artificial Sequence
  Synthetic oligonucleotide; TTA chr11 5179848 5179869 5179865 5179870 +
agttctagggtacatgtgcaca

SEQ ID NO: 75686 - DNA, 22 bp, Artificial Sequence
  Synthetic oligonucleotide; TTC chr11 5179853 5179874 5179870 5179875 +
tagggtacatgtgcacaacatg

SEQ ID NO: 75687 - DNA, 22 bp, Artificial Sequence
  Synthetic oligonucleotide; CTA chr11 5179855 5179876 5179872 5179877 +
gggtacatgtgcacaacatgca

SEQ ID NO: 75688 - DNA, 22 bp, Artificial Sequence
  Synthetic oligonucleotide; TTT chr11 5179882 5179903 5179899 5179904 +
gttacatatgtatacatgtgcc

SEQ ID NO: 75689 - DNA, 22 bp, Artificial Sequence
  Synthetic oligonucleotide; TTG chr11 5179883 5179904 5179900 5179905 +
ttacatatgtatacatgtgcca

SEQ ID NO: 75690 - DNA, 22 bp, Artificial Sequence
  Synthetic oligonucleotide; TTA chr11 5179886 5179907 5179903 5179908 +
catatgtatacatgtgccatgt

SEQ ID NO: 75691 - DNA, 22 bp, Artificial Sequence
  Synthetic oligonucleotide; TTG chr11 5179910 5179931 5179927 5179932 +
gtgtgctgcacccattaactcg

SEQ ID NO: 75692 - DNA, 22 bp, Artificial Sequence
  Synthetic oligonucleotide; CTG chr11 5179918 5179939 5179935 5179940 +
cacccattaactcgtcatttac

SEQ ID NO: 75693 - DNA, 22 bp, Artificial Sequence
  Synthetic oligonucleotide; TTA chr11 5179927 5179948 5179944 5179949 +
actcgtcatttacattaggtat

SEQ ID NO: 75694 - DNA, 22 bp, Artificial Sequence
  Synthetic oligonucleotide; CTC chr11 5179931 5179952 5179948 5179953 +
gtcatttacattaggtatatct

SEQ ID NO: 75695 - DNA, 22 bp, Artificial Sequence
  Synthetic oligonucleotide; TTT chr11 5179938 5179959 5179955 5179960 +
acattaggtatatctcctaatg

SEQ ID NO: 75696 - DNA, 22 bp, Artificial Sequence
  Synthetic oligonucleotide; TTA chr11 5179939 5179960 5179956 5179961 +
cattaggtatatctcctaatgc

SEQ ID NO: 75697 - DNA, 22 bp, Artificial Sequence
  Synthetic oligonucleotide; TTA chr11 5179944 5179965 5179961 5179966 +
ggtatatctcctaatgctatcc

SEQ ID NO: 75698 - DNA, 22 bp, Artificial Sequence
  Synthetic oligonucleotide; CTC chr11 5179954 5179975 5179971 5179976 +
ctaatgctatccctccccccgg

SEQ ID NO: 75699 - DNA, 22 bp, Artificial Sequence
  Synthetic oligonucleotide; CTA chr11 5179957 5179978 5179974 5179979 +
atgctatccctccccccggccc

SEQ ID NO: 75700 - DNA, 22 bp, Artificial Sequence
  Synthetic oligonucleotide; CTA chr11 5179963 5179984 5179980 5179985 +
tccctccccccggcccccaccc

SEQ ID NO: 75701 - DNA, 22 bp, Artificial Sequence
  Synthetic oligonucleotide; CTC chr11 5179969 5179990 5179986 5179991 +
cccccggcccccaccccacaac

SEQ ID NO: 75702 - DNA, 22 bp, Artificial Sequence
  Synthetic oligonucleotide; TTC chr11 5180012 5180033 5180029 5180034 +
ccctcactgtgtccaaatgttc

SEQ ID NO: 75703 - DNA, 22 bp, Artificial Sequence
  Synthetic oligonucleotide; CTC chr11 5180017 5180038 5180034 5180039 +
actgtgtccaaatgttctcatt

SEQ ID NO: 75704 - DNA, 22 bp, Artificial Sequence
  Synthetic oligonucleotide; CTG chr11 5180021 5180042 5180038 5180043 +
tgtccaaatgttctcattgttc

SEQ ID NO: 75705 - DNA, 22 bp, Artificial Sequence
  Synthetic oligonucleotide; TTC chr11 5180034 5180055 5180051 5180056 +
tcattgttcaactcccacctat

SEQ ID NO: 75706 - DNA, 22 bp, Artificial Sequence
  Synthetic oligonucleotide; CTC chr11 5180036 5180057 5180053 5180058 +
attgttcaactcccacctatga

SEQ ID NO: 75707 - DNA, 22 bp, Artificial Sequence
  Synthetic oligonucleotide; TTG chr11 5180040 5180061 5180057 5180062 +
ttcaactcccacctatgagtga

SEQ ID NO: 75708 - DNA, 22 bp, Artificial Sequence
  Synthetic oligonucleotide; TTC chr11 5180043 5180064 5180060 5180065 +
aactcccacctatgagtgagaa

SEQ ID NO: 75709 - DNA, 22 bp, Artificial Sequence
  Synthetic oligonucleotide; CTC chr11 5180048 5180069 5180065 5180070 +
ccacctatgagtgagaatatgt

SEQ ID NO: 75710 - DNA, 22 bp, Artificial Sequence
  Synthetic oligonucleotide; CTA chr11 5180055 5180076 5180072 5180077 +
tgagtgagaatatgtggtgttt

SEQ ID NO: 75711 - DNA, 22 bp, Artificial Sequence
  Synthetic oligonucleotide; TTT chr11 5180077 5180098 5180094 5180099 +
ggtttttcgtccttgcgatact

SEQ ID NO: 75712 - DNA, 22 bp, Artificial Sequence
  Synthetic oligonucleotide; TTG chr11 5180078 5180099 5180095 5180100 +
gtttttcgtccttgcgatactt

SEQ ID NO: 75713 - DNA, 22 bp, Artificial Sequence
  Synthetic oligonucleotide; TTT chr11 5180082 5180103 5180099 5180104 +
ttcgtccttgcgatactttgct

SEQ ID NO: 75714 - DNA, 22 bp, Artificial Sequence
  Synthetic oligonucleotide; TTT chr11 5180083 5180104 5180100 5180105 +
tcgtccttgcgatactttgctc

SEQ ID NO: 75715 - DNA, 22 bp, Artificial Sequence
  Synthetic oligonucleotide; TTT chr11 5180084 5180105 5180101 5180106 +
cgtccttgcgatactttgctca

SEQ ID NO: 75716 - DNA, 22 bp, Artificial Sequence
  Synthetic oligonucleotide; TTC chr11 5180085 5180106 5180102 5180107 +
gtccttgcgatactttgctcag

SEQ ID NO: 75717 - DNA, 22 bp, Artificial Sequence
  Synthetic oligonucleotide; CTT chr11 5180091 5180112 5180108 5180113 +
gcgatactttgctcagaatgat

SEQ ID NO: 75718 - DNA, 22 bp, Artificial Sequence
  Synthetic oligonucleotide; TTG chr11 5180092 5180113 5180109 5180114 +
cgatactttgctcagaatgatg

SEQ ID NO: 75719 - DNA, 22 bp, Artificial Sequence
  Synthetic oligonucleotide; CTT chr11 5180100 5180121 5180117 5180122 +
tgctcagaatgatggtttccag

SEQ ID NO: 75720 - DNA, 22 bp, Artificial Sequence
  Synthetic oligonucleotide; TTT chr11 5180101 5180122 5180118 5180123 +
gctcagaatgatggtttccagt

SEQ ID NO: 75721 - DNA, 22 bp, Artificial Sequence
  Synthetic oligonucleotide; TTG chr11 5180102 5180123 5180119 5180124 +
ctcagaatgatggtttccagtt

SEQ ID NO: 75722 - DNA, 22 bp, Artificial Sequence
  Synthetic oligonucleotide; CTC chr11 5180105 5180126 5180122 5180127 +
agaatgatggtttccagtttca

SEQ ID NO: 75723 - DNA, 22 bp, Artificial Sequence
  Synthetic oligonucleotide; TTT chr11 5180118 5180139 5180135 5180140 +
ccagtttcatccatgtccctac

SEQ ID NO: 75724 - DNA, 22 bp, Artificial Sequence
  Synthetic oligonucleotide; TTC chr11 5180119 5180140 5180136 5180141 +
cagtttcatccatgtccctaca

SEQ ID NO: 75725 - DNA, 22 bp, Artificial Sequence
  Synthetic oligonucleotide; TTT chr11 5180125 5180146 5180142 5180147 +
catccatgtccctacaaaggac

SEQ ID NO: 75726 - DNA, 22 bp, Artificial Sequence
  Synthetic oligonucleotide; TTC chr11 5180126 5180147 5180143 5180148 +
atccatgtccctacaaaggaca

SEQ ID NO: 75727 - DNA, 22 bp, Artificial Sequence
  Synthetic oligonucleotide; CTA chr11 5180139 5180160 5180156 5180161 +
caaaggacatgaactcatcatt

SEQ ID NO: 75728 - DNA, 22 bp, Artificial Sequence
  Synthetic oligonucleotide; CTC chr11 5180155 5180176 5180172 5180177 +
atcattttttatggctgcatag

SEQ ID NO: 75729 - DNA, 22 bp, Artificial Sequence
  Synthetic oligonucleotide; TTT chr11 5180162 5180183 5180179 5180184 +
tttatggctgcatagtattcca

SEQ ID NO: 75730 - DNA, 22 bp, Artificial Sequence
  Synthetic oligonucleotide; TTT chr11 5180163 5180184 5180180 5180185 +
ttatggctgcatagtattccat

SEQ ID NO: 75731 - DNA, 22 bp, Artificial Sequence
  Synthetic oligonucleotide; TTT chr11 5180164 5180185 5180181 5180186 +
tatggctgcatagtattccatg

SEQ ID NO: 75732 - DNA, 22 bp, Artificial Sequence
  Synthetic oligonucleotide; TTT chr11 5180165 5180186 5180182 5180187 +
atggctgcatagtattccatga

SEQ ID NO: 75733 - DNA, 22 bp, Artificial Sequence
  Synthetic oligonucleotide; TTA chr11 5180166 5180187 5180183 5180188 +
tggctgcatagtattccatgat

SEQ ID NO: 75734 - DNA, 22 bp, Artificial Sequence
  Synthetic oligonucleotide; CTG chr11 5180172 5180193 5180189 5180194 +
catagtattccatgatgtatat

SEQ ID NO: 75735 - DNA, 22 bp, Artificial Sequence
  Synthetic oligonucleotide; TTC chr11 5180182 5180203 5180199 5180204 +
catgatgtatatgtgccacatt

SEQ ID NO: 75736 - DNA, 22 bp, Artificial Sequence
  Synthetic oligonucleotide; TTT chr11 5180205 5180226 5180222 5180227 +
tcttaatccagtctatcattgt

SEQ ID NO: 75737 - DNA, 22 bp, Artificial Sequence
  Synthetic oligonucleotide; TTT chr11 5180206 5180227 5180223 5180228 +
cttaatccagtctatcattgtt

SEQ ID NO: 75738 - DNA, 22 bp, Artificial Sequence
  Synthetic oligonucleotide; TTC chr11 5180207 5180228 5180224 5180229 +
ttaatccagtctatcattgttg

SEQ ID NO: 75739 - DNA, 22 bp, Artificial Sequence
  Synthetic oligonucleotide; CTT chr11 5180209 5180230 5180226 5180231 +
aatccagtctatcattgttgga

SEQ ID NO: 75740 - DNA, 22 bp, Artificial Sequence
  Synthetic oligonucleotide; TTA chr11 5180210 5180231 5180227 5180232 +
atccagtctatcattgttggac

SEQ ID NO: 75741 - DNA, 22 bp, Artificial Sequence
  Synthetic oligonucleotide; CTA chr11 5180220 5180241 5180237 5180242 +
tcattgttggacatttgggttg

SEQ ID NO: 75742 - DNA, 22 bp, Artificial Sequence
  Synthetic oligonucleotide; TTG chr11 5180226 5180247 5180243 5180248 +
ttggacatttgggttggttcca

SEQ ID NO: 75743 - DNA, 22 bp, Artificial Sequence
  Synthetic oligonucleotide; TTG chr11 5180229 5180250 5180246 5180251 +
gacatttgggttggttccaagt

SEQ ID NO: 75744 - DNA, 22 bp, Artificial Sequence
  Synthetic oligonucleotide; TTT chr11 5180236 5180257 5180253 5180258 +
gggttggttccaagtctttgct

SEQ ID NO: 75745 - DNA, 22 bp, Artificial Sequence
  Synthetic oligonucleotide; TTG chr11 5180237 5180258 5180254 5180259 +
ggttggttccaagtctttgcta

SEQ ID NO: 75746 - DNA, 22 bp, Artificial Sequence
  Synthetic oligonucleotide; TTG chr11 5180242 5180263 5180259 5180264 +
gttccaagtctttgctattgtg

SEQ ID NO: 75747 - DNA, 22 bp, Artificial Sequence
  Synthetic oligonucleotide; TTC chr11 5180246 5180267 5180263 5180268 +
caagtctttgctattgtgaata

SEQ ID NO: 75748 - DNA, 22 bp, Artificial Sequence
  Synthetic oligonucleotide; CTT chr11 5180254 5180275 5180271 5180276 +
tgctattgtgaatagtgccaca

SEQ ID NO: 75749 - DNA, 22 bp, Artificial Sequence
  Synthetic oligonucleotide; TTT chr11 5180255 5180276 5180272 5180277 +
gctattgtgaatagtgccacaa

SEQ ID NO: 75750 - DNA, 22 bp, Artificial Sequence
  Synthetic oligonucleotide; TTG chr11 5180256 5180277 5180273 5180278 +
ctattgtgaatagtgccacaat

SEQ ID NO: 75751 - DNA, 22 bp, Artificial Sequence
  Synthetic oligonucleotide; CTA chr11 5180259 5180280 5180276 5180281 +
ttgtgaatagtgccacaataaa

SEQ ID NO: 75752 - DNA, 22 bp, Artificial Sequence
  Synthetic oligonucleotide; TTG chr11 5180262 5180283 5180279 5180284 +
tgaatagtgccacaataaacat

SEQ ID NO: 75753 - DNA, 22 bp, Artificial Sequence
  Synthetic oligonucleotide; CTT chr11 5180301 5180322 5180318 5180323 +
tatagcagcatgatttacattc

SEQ ID NO: 75754 - DNA, 22 bp, Artificial Sequence
  Synthetic oligonucleotide; TTT chr11 5180302 5180323 5180319 5180324 +
atagcagcatgatttacattcc

SEQ ID NO: 75755 - DNA, 22 bp, Artificial Sequence
  Synthetic oligonucleotide; TTA chr11 5180303 5180324 5180320 5180325 +
tagcagcatgatttacattcct

SEQ ID NO: 75756 - DNA, 22 bp, Artificial Sequence
  Synthetic oligonucleotide; TTT chr11 5180317 5180338 5180334 5180339 +
acattcctttgggtatataccc

SEQ ID NO: 75757 - DNA, 22 bp, Artificial Sequence
  Synthetic oligonucleotide; TTA chr11 5180318 5180339 5180335 5180340 +
cattcctttgggtatataccca

SEQ ID NO: 75758 - DNA, 22 bp, Artificial Sequence
  Synthetic oligonucleotide; TTC chr11 5180323 5180344 5180340 5180345 +
ctttgggtatatacccagtaat

SEQ ID NO: 75759 - DNA, 22 bp, Artificial Sequence
  Synthetic oligonucleotide; CTT chr11 5180326 5180347 5180343 5180348 +
tgggtatatacccagtaatagg

SEQ ID NO: 75760 - DNA, 22 bp, Artificial Sequence
  Synthetic oligonucleotide; TTT chr11 5180327 5180348 5180344 5180349 +
gggtatatacccagtaatagga

SEQ ID NO: 75761 - DNA, 22 bp, Artificial Sequence
  Synthetic oligonucleotide; TTG chr11 5180328 5180349 5180345 5180350 +
ggtatatacccagtaataggat

SEQ ID NO: 75762 - DNA, 22 bp, Artificial Sequence
  Synthetic oligonucleotide; CTG chr11 5180355 5180376 5180372 5180377 +
ggtcaaatggtatttctagttc

SEQ ID NO: 75763 - DNA, 22 bp, Artificial Sequence
  Synthetic oligonucleotide; TTT chr11 5180370 5180391 5180387 5180392 +
ctagttctagatccctgaggaa

SEQ ID NO: 75764 - DNA, 22 bp, Artificial Sequence
  Synthetic oligonucleotide; TTC chr11 5180371 5180392 5180388 5180393 +
tagttctagatccctgaggaat

SEQ ID NO: 75765 - DNA, 22 bp, Artificial Sequence
  Synthetic oligonucleotide; CTA chr11 5180373 5180394 5180390 5180395 +
gttctagatccctgaggaattg

SEQ ID NO: 75766 - DNA, 22 bp, Artificial Sequence
  Synthetic oligonucleotide; TTC chr11 5180377 5180398 5180394 5180399 +
tagatccctgaggaattgccac

SEQ ID NO: 75767 - DNA, 22 bp, Artificial Sequence
  Synthetic oligonucleotide; CTA chr11 5180379 5180400 5180396 5180401 +
gatccctgaggaattgccacac

SEQ ID NO: 75768 - DNA, 22 bp, Artificial Sequence
  Synthetic oligonucleotide; CTG chr11 5180387 5180408 5180404 5180409 +
aggaattgccacactgacttcc

SEQ ID NO: 75769 - DNA, 22 bp, Artificial Sequence
  Synthetic oligonucleotide; TTG chr11 5180395 5180416 5180412 5180417 +
ccacactgacttccacaatggt

SEQ ID NO: 75770 - DNA, 22 bp, Artificial Sequence
  Synthetic oligonucleotide; CTG chr11 5180403 5180424 5180420 5180425 +
acttccacaatggttgaactag

SEQ ID NO: 75771 - DNA, 22 bp, Artificial Sequence
  Synthetic oligonucleotide; CTT chr11 5180407 5180428 5180424 5180429 +
ccacaatggttgaactagttta

SEQ ID NO: 75772 - DNA, 22 bp, Artificial Sequence
  Synthetic oligonucleotide; TTC chr11 5180408 5180429 5180425 5180430 +
cacaatggttgaactagtttat

SEQ ID NO: 75773 - DNA, 22 bp, Artificial Sequence
  Synthetic oligonucleotide; TTG chr11 5180419 5180440 5180436 5180441 +
aactagtttatagtcccaccaa

SEQ ID NO: 75774 - DNA, 22 bp, Artificial Sequence
  Synthetic oligonucleotide; CTA chr11 5180424 5180445 5180441 5180446 +
gtttatagtcccaccaacagtg

SEQ ID NO: 75775 - DNA, 22 bp, Artificial Sequence
  Synthetic oligonucleotide; TTT chr11 5180428 5180449 5180445 5180450 +
atagtcccaccaacagtgtaaa

SEQ ID NO: 75776 - DNA, 22 bp, Artificial Sequence
  Synthetic oligonucleotide; TTA chr11 5180429 5180450 5180446 5180451 +
tagtcccaccaacagtgtaaaa

SEQ ID NO: 75777 - DNA, 22 bp, Artificial Sequence
  Synthetic oligonucleotide; TTC chr11 5180457 5180478 5180474 5180479 +
ctatttctccacatcctctcca

SEQ ID NO: 75778 - DNA, 22 bp, Artificial Sequence
  Synthetic oligonucleotide; CTA chr11 5180460 5180481 5180477 5180482 +
tttctccacatcctctccagca

SEQ ID NO: 75779 - DNA, 22 bp, Artificial Sequence
  Synthetic oligonucleotide; TTT chr11 5180463 5180484 5180480 5180485 +
ctccacatcctctccagcacct

SEQ ID NO: 75780 - DNA, 22 bp, Artificial Sequence
  Synthetic oligonucleotide; TTC chr11 5180464 5180485 5180481 5180486 +
tccacatcctctccagcacctg

SEQ ID NO: 75781 - DNA, 22 bp, Artificial Sequence
  Synthetic oligonucleotide; CTC chr11 5180466 5180487 5180483 5180488 +
cacatcctctccagcacctgtg

SEQ ID NO: 75782 - DNA, 22 bp, Artificial Sequence
  Synthetic oligonucleotide; CTC chr11 5180475 5180496 5180492 5180497 +
tccagcacctgtggtttcctga

SEQ ID NO: 75783 - DNA, 22 bp, Artificial Sequence
  Synthetic oligonucleotide; CTC chr11 5180477 5180498 5180494 5180499 +
cagcacctgtggtttcctgact

SEQ ID NO: 75784 - DNA, 22 bp, Artificial Sequence
  Synthetic oligonucleotide; CTG chr11 5180486 5180507 5180503 5180508 +
tggtttcctgactttttaatga

SEQ ID NO: 75785 - DNA, 22 bp, Artificial Sequence
  Synthetic oligonucleotide; TTT chr11 5180492 5180513 5180509 5180514 +
cctgactttttaatgatcacca

SEQ ID NO: 75786 - DNA, 22 bp, Artificial Sequence
  Synthetic oligonucleotide; TTC chr11 5180493 5180514 5180510 5180515 +
ctgactttttaatgatcaccat

SEQ ID NO: 75787 - DNA, 22 bp, Artificial Sequence
  Synthetic oligonucleotide; CTG chr11 5180496 5180517 5180513 5180518 +
actttttaatgatcaccattct

SEQ ID NO: 75788 - DNA, 22 bp, Artificial Sequence
  Synthetic oligonucleotide; CTT chr11 5180500 5180521 5180517 5180522 +
tttaatgatcaccattctaact

SEQ ID NO: 75789 - DNA, 22 bp, Artificial Sequence
  Synthetic oligonucleotide; TTT chr11 5180501 5180522 5180518 5180523 +
ttaatgatcaccattctaactg

SEQ ID NO: 75790 - DNA, 22 bp, Artificial Sequence
  Synthetic oligonucleotide; TTT chr11 5180502 5180523 5180519 5180524 +
taatgatcaccattctaactgg

SEQ ID NO: 75791 - DNA, 22 bp, Artificial Sequence
  Synthetic oligonucleotide; TTT chr11 5180503 5180524 5180520 5180525 +
aatgatcaccattctaactggt

SEQ ID NO: 75792 - DNA, 22 bp, Artificial Sequence
  Synthetic oligonucleotide; TTA chr11 5180504 5180525 5180521 5180526 +
atgatcaccattctaactggtg

SEQ ID NO: 75793 - DNA, 22 bp, Artificial Sequence
  Synthetic oligonucleotide; TTC chr11 5180517 5180538 5180534 5180539 +
taactggtgtgagatgatatct

SEQ ID NO: 75794 - DNA, 22 bp, Artificial Sequence
  Synthetic oligonucleotide; CTA chr11 5180519 5180540 5180536 5180541 +
actggtgtgagatgatatctca

SEQ ID NO: 75795 - DNA, 22 bp, Artificial Sequence
  Synthetic oligonucleotide; CTG chr11 5180523 5180544 5180540 5180545 +
gtgtgagatgatatctcattgt

SEQ ID NO: 75796 - DNA, 22 bp, Artificial Sequence
  Synthetic oligonucleotide; CTC chr11 5180540 5180561 5180557 5180562 +
attgtggttttgatttgcattt

SEQ ID NO: 75797 - DNA, 22 bp, Artificial Sequence
  Synthetic oligonucleotide; TTG chr11 5180544 5180565 5180561 5180566 +
tggttttgatttgcatttctct

SEQ ID NO: 75798 - DNA, 22 bp, Artificial Sequence
  Synthetic oligonucleotide; TTT chr11 5180550 5180571 5180567 5180572 +
tgatttgcatttctctgatggc

SEQ ID NO: 75799 - DNA, 22 bp, Artificial Sequence
  Synthetic oligonucleotide; TTT chr11 5180551 5180572 5180568 5180573 +
gatttgcatttctctgatggcc

SEQ ID NO: 75800 - DNA, 22 bp, Artificial Sequence
  Synthetic oligonucleotide; TTG chr11 5180552 5180573 5180569 5180574 +
atttgcatttctctgatggcca

SEQ ID NO: 75801 - DNA, 22 bp, Artificial Sequence
  Synthetic oligonucleotide; TTT chr11 5180556 5180577 5180573 5180578 +
gcatttctctgatggccagtga

SEQ ID NO: 75802 - DNA, 22 bp, Artificial Sequence
  Synthetic oligonucleotide; TTG chr11 5180557 5180578 5180574 5180579 +
catttctctgatggccagtgat

SEQ ID NO: 75803 - DNA, 22 bp, Artificial Sequence
  Synthetic oligonucleotide; TTT chr11 5180562 5180583 5180579 5180584 +
ctctgatggccagtgatgatga

SEQ ID NO: 75804 - DNA, 22 bp, Artificial Sequence
  Synthetic oligonucleotide; TTC chr11 5180563 5180584 5180580 5180585 +
tctgatggccagtgatgatgag

SEQ ID NO: 75805 - DNA, 22 bp, Artificial Sequence
  Synthetic oligonucleotide; CTC chr11 5180565 5180586 5180582 5180587 +
tgatggccagtgatgatgagca

SEQ ID NO: 75806 - DNA, 22 bp, Artificial Sequence
  Synthetic oligonucleotide; CTG chr11 5180567 5180588 5180584 5180589 +
atggccagtgatgatgagcatt

SEQ ID NO: 75807 - DNA, 22 bp, Artificial Sequence
  Synthetic oligonucleotide; TTT chr11 5180590 5180611 5180607 5180612 +
tttcatgtgttttttggctgca

SEQ ID NO: 75808 - DNA, 22 bp, Artificial Sequence
  Synthetic oligonucleotide; TTT chr11 5180591 5180612 5180608 5180613 +
ttcatgtgttttttggctgcat

SEQ ID NO: 75809 - DNA, 22 bp, Artificial Sequence
  Synthetic oligonucleotide; TTT chr11 5180592 5180613 5180609 5180614 +
tcatgtgttttttggctgcata

SEQ ID NO: 75810 - DNA, 22 bp, Artificial Sequence
  Synthetic oligonucleotide; TTT chr11 5180593 5180614 5180610 5180615 +
catgtgttttttggctgcataa

SEQ ID NO: 75811 - DNA, 22 bp, Artificial Sequence
  Synthetic oligonucleotide; TTC chr11 5180594 5180615 5180611 5180616 +
atgtgttttttggctgcataaa

SEQ ID NO: 75812 - DNA, 22 bp, Artificial Sequence
  Synthetic oligonucleotide; TTT chr11 5180602 5180623 5180619 5180624 +
tttggctgcataaatgtcttct

SEQ ID NO: 75813 - DNA, 22 bp, Artificial Sequence
  Synthetic oligonucleotide; TTT chr11 5180603 5180624 5180620 5180625 +
ttggctgcataaatgtcttctt

SEQ ID NO: 75814 - DNA, 22 bp, Artificial Sequence
  Synthetic oligonucleotide; TTT chr11 5180604 5180625 5180621 5180626 +
tggctgcataaatgtcttcttt

SEQ ID NO: 75815 - DNA, 22 bp, Artificial Sequence
  Synthetic oligonucleotide; TTT chr11 5180605 5180626 5180622 5180627 +
ggctgcataaatgtcttctttt

SEQ ID NO: 75816 - DNA, 22 bp, Artificial Sequence
  Synthetic oligonucleotide; TTG chr11 5180606 5180627 5180623 5180628 +
gctgcataaatgtcttcttttg

SEQ ID NO: 75817 - DNA, 22 bp, Artificial Sequence
  Synthetic oligonucleotide; CTG chr11 5180610 5180631 5180627 5180632 +
cataaatgtcttcttttgagaa

SEQ ID NO: 75818 - DNA, 22 bp, Artificial Sequence
  Synthetic oligonucleotide; CTT chr11 5180622 5180643 5180639 5180644 +
cttttgagaagtgtctgttcat

SEQ ID NO: 75819 - DNA, 22 bp, Artificial Sequence
  Synthetic oligonucleotide; TTC chr11 5180623 5180644 5180640 5180645 +
ttttgagaagtgtctgttcata

SEQ ID NO: 75820 - DNA, 22 bp, Artificial Sequence
  Synthetic oligonucleotide; CTT chr11 5180625 5180646 5180642 5180647 +
ttgagaagtgtctgttcatatc

SEQ ID NO: 75821 - DNA, 22 bp, Artificial Sequence
  Synthetic oligonucleotide; TTT chr11 5180626 5180647 5180643 5180648 +
tgagaagtgtctgttcatatcc

SEQ ID NO: 75822 - DNA, 22 bp, Artificial Sequence
  Synthetic oligonucleotide; TTT chr11 5180627 5180648 5180644 5180649 +
gagaagtgtctgttcatatcct

SEQ ID NO: 75823 - DNA, 22 bp, Artificial Sequence
  Synthetic oligonucleotide; TTG chr11 5180628 5180649 5180645 5180650 +
agaagtgtctgttcatatcctt

SEQ ID NO: 75824 - DNA, 22 bp, Artificial Sequence
  Synthetic oligonucleotide; CTG chr11 5180639 5180660 5180656 5180661 +
ttcatatccttcacccccttgt

SEQ ID NO: 75825 - DNA, 22 bp, Artificial Sequence
  Synthetic oligonucleotide; TTC chr11 5180642 5180663 5180659 5180664 +
atatccttcacccccttgttga

SEQ ID NO: 75826 - DNA, 22 bp, Artificial Sequence
  Synthetic oligonucleotide; CTT chr11 5180650 5180671 5180667 5180672 +
cacccccttgttgatgcagttg

SEQ ID NO: 75827 - DNA, 22 bp, Artificial Sequence
  Synthetic oligonucleotide; TTC chr11 5180651 5180672 5180668 5180673 +
acccccttgttgatgcagttgt

SEQ ID NO: 75828 - DNA, 22 bp, Artificial Sequence
  Synthetic oligonucleotide; CTT chr11 5180659 5180680 5180676 5180681 +
gttgatgcagttgtttgttttt

SEQ ID NO: 75829 - DNA, 22 bp, Artificial Sequence
  Synthetic oligonucleotide; TTG chr11 5180660 5180681 5180677 5180682 +
ttgatgcagttgtttgtttttt

SEQ ID NO: 75830 - DNA, 22 bp, Artificial Sequence
  Synthetic oligonucleotide; TTG chr11 5180663 5180684 5180680 5180685 +
atgcagttgtttgtttttttct

SEQ ID NO: 75831 - DNA, 22 bp, Artificial Sequence
  Synthetic oligonucleotide; TTG chr11 5180672 5180693 5180689 5180694 +
tttgtttttttcttgtaaattt

SEQ ID NO: 75832 - DNA, 22 bp, Artificial Sequence
  Synthetic oligonucleotide; TTT chr11 5180675 5180696 5180692 5180697 +
gtttttttcttgtaaatttgtt

SEQ ID NO: 75833 - DNA, 22 bp, Artificial Sequence
  Synthetic oligonucleotide; TTG chr11 5180676 5180697 5180693 5180698 +
tttttttcttgtaaatttgttt

SEQ ID NO: 75834 - DNA, 22 bp, Artificial Sequence
  Synthetic oligonucleotide; TTT chr11 5180679 5180700 5180696 5180701 +
ttttcttgtaaatttgtttgag

SEQ ID NO: 75835 - DNA, 22 bp, Artificial Sequence
  Synthetic oligonucleotide; TTT chr11 5180680 5180701 5180697 5180702 +
tttcttgtaaatttgtttgagt

SEQ ID NO: 75836 - DNA, 22 bp, Artificial Sequence
  Synthetic oligonucleotide; TTT chr11 5180681 5180702 5180698 5180703 +
ttcttgtaaatttgtttgagtt

SEQ ID NO: 75837 - DNA, 22 bp, Artificial Sequence
  Synthetic oligonucleotide; TTT chr11 5180682 5180703 5180699 5180704 +
tcttgtaaatttgtttgagttc

SEQ ID NO: 75838 - DNA, 22 bp, Artificial Sequence
  Synthetic oligonucleotide; TTT chr11 5180683 5180704 5180700 5180705 +
cttgtaaatttgtttgagttca

SEQ ID NO: 75839 - DNA, 22 bp, Artificial Sequence
  Synthetic oligonucleotide; TTC chr11 5180684 5180705 5180701 5180706 +
ttgtaaatttgtttgagttcat

SEQ ID NO: 75840 - DNA, 22 bp, Artificial Sequence
  Synthetic oligonucleotide; CTT chr11 5180686 5180707 5180703 5180708 +
gtaaatttgtttgagttcattg

SEQ ID NO: 75841 - DNA, 22 bp, Artificial Sequence
  Synthetic oligonucleotide; TTG chr11 5180687 5180708 5180704 5180709 +
taaatttgtttgagttcattgt

SEQ ID NO: 75842 - DNA, 22 bp, Artificial Sequence
  Synthetic oligonucleotide; TTT chr11 5180694 5180715 5180711 5180716 +
gtttgagttcattgtagattct

SEQ ID NO: 75843 - DNA, 22 bp, Artificial Sequence
  Synthetic oligonucleotide; TTG chr11 5180695 5180716 5180712 5180717 +
tttgagttcattgtagattctg

SEQ ID NO: 75844 - DNA, 22 bp, Artificial Sequence
  Synthetic oligonucleotide; TTT chr11 5180698 5180719 5180715 5180720 +
gagttcattgtagattctggat

SEQ ID NO: 75845 - DNA, 22 bp, Artificial Sequence
  Synthetic oligonucleotide; TTG chr11 5180699 5180720 5180716 5180721 +
agttcattgtagattctggata

SEQ ID NO: 75846 - DNA, 22 bp, Artificial Sequence
  Synthetic oligonucleotide; TTC chr11 5180704 5180725 5180721 5180726 +
attgtagattctggatattagc

SEQ ID NO: 75847 - DNA, 22 bp, Artificial Sequence
  Synthetic oligonucleotide; TTG chr11 5180708 5180729 5180725 5180730 +
tagattctggatattagccctt

SEQ ID NO: 75848 - DNA, 22 bp, Artificial Sequence
  Synthetic oligonucleotide; TTC chr11 5180715 5180736 5180732 5180737 +
tggatattagccctttgtcaga

SEQ ID NO: 75849 - DNA, 22 bp, Artificial Sequence
  Synthetic oligonucleotide; CTG chr11 5180717 5180738 5180734 5180739 +
gatattagccctttgtcagatg

SEQ ID NO: 75850 - DNA, 22 bp, Artificial Sequence
  Synthetic oligonucleotide; TTA chr11 5180724 5180745 5180741 5180746 +
gccctttgtcagatgagtagat

SEQ ID NO: 75851 - DNA, 22 bp, Artificial Sequence
  Synthetic oligonucleotide; CTT chr11 5180730 5180751 5180747 5180752 +
tgtcagatgagtagattgcaaa

SEQ ID NO: 75852 - DNA, 22 bp, Artificial Sequence
  Synthetic oligonucleotide; TTT chr11 5180731 5180752 5180748 5180753 +
gtcagatgagtagattgcaaaa

SEQ ID NO: 75853 - DNA, 22 bp, Artificial Sequence
  Synthetic oligonucleotide; TTG chr11 5180732 5180753 5180749 5180754 +
tcagatgagtagattgcaaaaa

SEQ ID NO: 75854 - DNA, 22 bp, Artificial Sequence
  Synthetic oligonucleotide; TTG chr11 5180748 5180769 5180765 5180770 +
caaaaattttctcccattgtgt

SEQ ID NO: 75855 - DNA, 22 bp, Artificial Sequence
  Synthetic oligonucleotide; TTT chr11 5180757 5180778 5180774 5180779 +
tctcccattgtgtaggttgcct

SEQ ID NO: 75856 - DNA, 22 bp, Artificial Sequence
  Synthetic oligonucleotide; TTT chr11 5180758 5180779 5180775 5180780 +
ctcccattgtgtaggttgcctg

SEQ ID NO: 75857 - DNA, 22 bp, Artificial Sequence
  Synthetic oligonucleotide; TTC chr11 5180759 5180780 5180776 5180781 +
tcccattgtgtaggttgcctgt

SEQ ID NO: 75858 - DNA, 22 bp, Artificial Sequence
  Synthetic oligonucleotide; CTC chr11 5180761 5180782 5180778 5180783 +
ccattgtgtaggttgcctgttc

SEQ ID NO: 75859 - DNA, 22 bp, Artificial Sequence
  Synthetic oligonucleotide; TTG chr11 5180767 5180788 5180784 5180789 +
tgtaggttgcctgttcactctg

SEQ ID NO: 75860 - DNA, 22 bp, Artificial Sequence
  Synthetic oligonucleotide; TTG chr11 5180776 5180797 5180793 5180798 +
cctgttcactctgatggtagtt

SEQ ID NO: 75861 - DNA, 22 bp, Artificial Sequence
  Synthetic oligonucleotide; CTG chr11 5180780 5180801 5180797 5180802 +
ttcactctgatggtagtttctt

SEQ ID NO: 75862 - DNA, 22 bp, Artificial Sequence
  Synthetic oligonucleotide; TTC chr11 5180783 5180804 5180800 5180805 +
actctgatggtagtttcttttg

SEQ ID NO: 75863 - DNA, 22 bp, Artificial Sequence
  Synthetic oligonucleotide; CTC chr11 5180787 5180808 5180804 5180809 +
tgatggtagtttcttttgctgt

SEQ ID NO: 75864 - DNA, 22 bp, Artificial Sequence
  Synthetic oligonucleotide; CTG chr11 5180789 5180810 5180806 5180811 +
atggtagtttcttttgctgtgc

SEQ ID NO: 75865 - DNA, 22 bp, Artificial Sequence
  Synthetic oligonucleotide; TTT chr11 5180799 5180820 5180816 5180821 +
cttttgctgtgcagaagctctt

SEQ ID NO: 75866 - DNA, 22 bp, Artificial Sequence
  Synthetic oligonucleotide; TTC chr11 5180800 5180821 5180817 5180822 +
ttttgctgtgcagaagctcttt

SEQ ID NO: 75867 - DNA, 22 bp, Artificial Sequence
  Synthetic oligonucleotide; CTT chr11 5180802 5180823 5180819 5180824 +
ttgctgtgcagaagctctttag

SEQ ID NO: 75868 - DNA, 22 bp, Artificial Sequence
  Synthetic oligonucleotide; TTT chr11 5180803 5180824 5180820 5180825 +
tgctgtgcagaagctctttagt

SEQ ID NO: 75869 - DNA, 22 bp, Artificial Sequence
  Synthetic oligonucleotide; TTT chr11 5180804 5180825 5180821 5180826 +
gctgtgcagaagctctttagtt

SEQ ID NO: 75870 - DNA, 22 bp, Artificial Sequence
  Synthetic oligonucleotide; TTG chr11 5180805 5180826 5180822 5180827 +
ctgtgcagaagctctttagttt

SEQ ID NO: 75871 - DNA, 22 bp, Artificial Sequence
  Synthetic oligonucleotide; CTG chr11 5180808 5180829 5180825 5180830 +
tgcagaagctctttagtttaat

SEQ ID NO: 75872 - DNA, 22 bp, Artificial Sequence
  Synthetic oligonucleotide; CTC chr11 5180819 5180840 5180836 5180841 +
tttagtttaattagatcccatt

SEQ ID NO: 75873 - DNA, 22 bp, Artificial Sequence
  Synthetic oligonucleotide; CTT chr11 5180821 5180842 5180838 5180843 +
tagtttaattagatcccatttg

SEQ ID NO: 75874 - DNA, 22 bp, Artificial Sequence
  Synthetic oligonucleotide; TTT chr11 5180822 5180843 5180839 5180844 +
agtttaattagatcccatttgt

SEQ ID NO: 75875 - DNA, 22 bp, Artificial Sequence
  Synthetic oligonucleotide; TTA chr11 5180823 5180844 5180840 5180845 +
gtttaattagatcccatttgtc

SEQ ID NO: 75876 - DNA, 22 bp, Artificial Sequence
  Synthetic oligonucleotide; TTT chr11 5180827 5180848 5180844 5180849 +
aattagatcccatttgtccatt

SEQ ID NO: 75877 - DNA, 22 bp, Artificial Sequence
  Synthetic oligonucleotide; TTA chr11 5180828 5180849 5180845 5180850 +
attagatcccatttgtccattt

SEQ ID NO: 75878 - DNA, 22 bp, Artificial Sequence
  Synthetic oligonucleotide; TTA chr11 5180832 5180853 5180849 5180854 +
gatcccatttgtccattttgtc

SEQ ID NO: 75879 - DNA, 22 bp, Artificial Sequence
  Synthetic oligonucleotide; TTT chr11 5180842 5180863 5180859 5180864 +
gtccattttgtcttttgttgcc

SEQ ID NO: 75880 - DNA, 22 bp, Artificial Sequence
  Synthetic oligonucleotide; TTG chr11 5180843 5180864 5180860 5180865 +
tccattttgtcttttgttgcca

SEQ ID NO: 75881 - DNA, 22 bp, Artificial Sequence
  Synthetic oligonucleotide; TTT chr11 5180850 5180871 5180867 5180872 +
tgtcttttgttgccattgcttt

SEQ ID NO: 75882 - DNA, 22 bp, Artificial Sequence
  Synthetic oligonucleotide; TTT chr11 5180851 5180872 5180868 5180873 +
gtcttttgttgccattgctttt

SEQ ID NO: 75883 - DNA, 22 bp, Artificial Sequence
  Synthetic oligonucleotide; TTG chr11 5180852 5180873 5180869 5180874 +
tcttttgttgccattgcttttg

SEQ ID NO: 75884 - DNA, 22 bp, Artificial Sequence
  Synthetic oligonucleotide; CTT chr11 5180856 5180877 5180873 5180878 +
ttgttgccattgcttttggtgt

SEQ ID NO: 75885 - DNA, 22 bp, Artificial Sequence
  Synthetic oligonucleotide; TTT chr11 5180857 5180878 5180874 5180879 +
tgttgccattgcttttggtgtt

SEQ ID NO: 75886 - DNA, 22 bp, Artificial Sequence
  Synthetic oligonucleotide; TTT chr11 5180858 5180879 5180875 5180880 +
gttgccattgcttttggtgttt

SEQ ID NO: 75887 - DNA, 22 bp, Artificial Sequence
  Synthetic oligonucleotide; TTG chr11 5180859 5180880 5180876 5180881 +
ttgccattgcttttggtgtttt

SEQ ID NO: 75888 - DNA, 22 bp, Artificial Sequence
  Synthetic oligonucleotide; TTG chr11 5180862 5180883 5180879 5180884 +
ccattgcttttggtgttttaga

SEQ ID NO: 75889 - DNA, 22 bp, Artificial Sequence
  Synthetic oligonucleotide; TTG chr11 5180868 5180889 5180885 5180890 +
cttttggtgttttagacatgaa

SEQ ID NO: 75890 - DNA, 22 bp, Artificial Sequence
  Synthetic oligonucleotide; CTT chr11 5180871 5180892 5180888 5180893 +
ttggtgttttagacatgaagtc

SEQ ID NO: 75891 - DNA, 22 bp, Artificial Sequence
  Synthetic oligonucleotide; TTT chr11 5180872 5180893 5180889 5180894 +
tggtgttttagacatgaagtcc

SEQ ID NO: 75892 - DNA, 22 bp, Artificial Sequence
  Synthetic oligonucleotide; TTT chr11 5180873 5180894 5180890 5180895 +
ggtgttttagacatgaagtcct

SEQ ID NO: 75893 - DNA, 22 bp, Artificial Sequence
  Synthetic oligonucleotide; TTG chr11 5180874 5180895 5180891 5180896 +
gtgttttagacatgaagtcctt

SEQ ID NO: 75894 - DNA, 22 bp, Artificial Sequence
  Synthetic oligonucleotide; TTT chr11 5180880 5180901 5180897 5180902 +
tagacatgaagtccttgcccat

SEQ ID NO: 75895 - DNA, 22 bp, Artificial Sequence
  Synthetic oligonucleotide; TTT chr11 5180881 5180902 5180898 5180903 +
agacatgaagtccttgcccatg

SEQ ID NO: 75896 - DNA, 22 bp, Artificial Sequence
  Synthetic oligonucleotide; TTA chr11 5180882 5180903 5180899 5180904 +
gacatgaagtccttgcccatgc

SEQ ID NO: 75897 - DNA, 22 bp, Artificial Sequence
  Synthetic oligonucleotide; CTT chr11 5180896 5180917 5180913 5180918 +
gcccatgcctatgtcctgaatg

SEQ ID NO: 75898 - DNA, 22 bp, Artificial Sequence
  Synthetic oligonucleotide; TTG chr11 5180897 5180918 5180914 5180919 +
cccatgcctatgtcctgaatgg

SEQ ID NO: 75899 - DNA, 22 bp, Artificial Sequence
  Synthetic oligonucleotide; CTA chr11 5180907 5180928 5180924 5180929 +
tgtcctgaatggtattgcttag

SEQ ID NO: 75900 - DNA, 22 bp, Artificial Sequence
  Synthetic oligonucleotide; CTG chr11 5180914 5180935 5180931 5180936 +
aatggtattgcttaggttttct

SEQ ID NO: 75901 - DNA, 22 bp, Artificial Sequence
  Synthetic oligonucleotide; TTG chr11 5180924 5180945 5180941 5180946 +
cttaggttttcttctaaggttt

SEQ ID NO: 75902 - DNA, 22 bp, Artificial Sequence
  Synthetic oligonucleotide; CTT chr11 5180927 5180948 5180944 5180949 +
aggttttcttctaaggttttta

SEQ ID NO: 75903 - DNA, 22 bp, Artificial Sequence
  Synthetic oligonucleotide; TTA chr11 5180928 5180949 5180945 5180950 +
ggttttcttctaaggtttttat

SEQ ID NO: 75904 - DNA, 22 bp, Artificial Sequence
  Synthetic oligonucleotide; TTT chr11 5180933 5180954 5180950 5180955 +
tcttctaaggtttttatggttt

SEQ ID NO: 75905 - DNA, 22 bp, Artificial Sequence
  Synthetic oligonucleotide; TTT chr11 5180934 5180955 5180951 5180956 +
cttctaaggtttttatggtttt

SEQ ID NO: 75906 - DNA, 22 bp, Artificial Sequence
  Synthetic oligonucleotide; TTC chr11 5180935 5180956 5180952 5180957 +
ttctaaggtttttatggtttta

SEQ ID NO: 75907 - DNA, 22 bp, Artificial Sequence
  Synthetic oligonucleotide; CTT chr11 5180937 5180958 5180954 5180959 +
ctaaggtttttatggttttagg

SEQ ID NO: 75908 - DNA, 22 bp, Artificial Sequence
  Synthetic oligonucleotide; TTC chr11 5180938 5180959 5180955 5180960 +
taaggtttttatggttttaggt

SEQ ID NO: 75909 - DNA, 22 bp, Artificial Sequence
  Synthetic oligonucleotide; CTA chr11 5180940 5180961 5180957 5180962 +
aggtttttatggttttaggtct

SEQ ID NO: 75910 - DNA, 22 bp, Artificial Sequence
  Synthetic oligonucleotide; TTT chr11 5180946 5180967 5180963 5180968 +
ttatggttttaggtctaacatg

SEQ ID NO: 75911 - DNA, 22 bp, Artificial Sequence
  Synthetic oligonucleotide; TTT chr11 5180947 5180968 5180964 5180969 +
tatggttttaggtctaacatgt

SEQ ID NO: 75912 - DNA, 22 bp, Artificial Sequence
  Synthetic oligonucleotide; TTT chr11 5180948 5180969 5180965 5180970 +
atggttttaggtctaacatgta

SEQ ID NO: 75913 - DNA, 22 bp, Artificial Sequence
  Synthetic oligonucleotide; TTA chr11 5180949 5180970 5180966 5180971 +
tggttttaggtctaacatgtaa

SEQ ID NO: 75914 - DNA, 22 bp, Artificial Sequence
  Synthetic oligonucleotide; TTT chr11 5180955 5180976 5180972 5180977 +
taggtctaacatgtaagtcttt

SEQ ID NO: 75915 - DNA, 22 bp, Artificial Sequence
  Synthetic oligonucleotide; TTT chr11 5180956 5180977 5180973 5180978 +
aggtctaacatgtaagtcttta

SEQ ID NO: 75916 - DNA, 22 bp, Artificial Sequence
  Synthetic oligonucleotide; TTA chr11 5180957 5180978 5180974 5180979 +
ggtctaacatgtaagtctttaa

SEQ ID NO: 75917 - DNA, 22 bp, Artificial Sequence
  Synthetic oligonucleotide; CTA chr11 5180963 5180984 5180980 5180985 +
acatgtaagtctttaatccatc

SEQ ID NO: 75918 - DNA, 22 bp, Artificial Sequence
  Synthetic oligonucleotide; CTT chr11 5180976 5180997 5180993 5180998 +
taatccatcttgaaataatttt

SEQ ID NO: 75919 - DNA, 22 bp, Artificial Sequence
  Synthetic oligonucleotide; TTT chr11 5180977 5180998 5180994 5180999 +
aatccatcttgaaataattttt

SEQ ID NO: 75920 - DNA, 22 bp, Artificial Sequence
  Synthetic oligonucleotide; TTA chr11 5180978 5180999 5180995 5181000 +
atccatcttgaaataatttttg

SEQ ID NO: 75921 - DNA, 22 bp, Artificial Sequence
  Synthetic oligonucleotide; CTT chr11 5180987 5181008 5181004 5181009 +
gaaataatttttgtataaggtg

SEQ ID NO: 75922 - DNA, 22 bp, Artificial Sequence
  Synthetic oligonucleotide; TTG chr11 5180988 5181009 5181005 5181010 +
aaataatttttgtataaggtgt

SEQ ID NO: 75923 - DNA, 22 bp, Artificial Sequence
  Synthetic oligonucleotide; TTT chr11 5180997 5181018 5181014 5181019 +
ttgtataaggtgtaaggaaggg

SEQ ID NO: 75924 - DNA, 22 bp, Artificial Sequence
  Synthetic oligonucleotide; TTT chr11 5180998 5181019 5181015 5181020 +
tgtataaggtgtaaggaaggga

SEQ ID NO: 75925 - DNA, 22 bp, Artificial Sequence
  Synthetic oligonucleotide; TTT chr11 5180999 5181020 5181016 5181021 +
gtataaggtgtaaggaagggat

SEQ ID NO: 75926 - DNA, 22 bp, Artificial Sequence
  Synthetic oligonucleotide; TTG chr11 5181000 5181021 5181017 5181022 +
tataaggtgtaaggaagggatc

SEQ ID NO: 75927 - DNA, 22 bp, Artificial Sequence
  Synthetic oligonucleotide; TTT chr11 5181028 5181049 5181045 5181050 +
cagctttctacatatggctagc

SEQ ID NO: 75928 - DNA, 22 bp, Artificial Sequence
  Synthetic oligonucleotide; TTC chr11 5181029 5181050 5181046 5181051 +
agctttctacatatggctagcc

SEQ ID NO: 75929 - DNA, 22 bp, Artificial Sequence
  Synthetic oligonucleotide; CTT chr11 5181034 5181055 5181051 5181056 +
tctacatatggctagccagttt

SEQ ID NO: 75930 - DNA, 22 bp, Artificial Sequence
  Synthetic oligonucleotide; TTT chr11 5181035 5181056 5181052 5181057 +
ctacatatggctagccagtttt

SEQ ID NO: 75931 - DNA, 22 bp, Artificial Sequence
  Synthetic oligonucleotide; TTC chr11 5181036 5181057 5181053 5181058 +
tacatatggctagccagttttc

SEQ ID NO: 75932 - DNA, 22 bp, Artificial Sequence
  Synthetic oligonucleotide; CTA chr11 5181038 5181059 5181055 5181060 +
catatggctagccagttttccc

SEQ ID NO: 75933 - DNA, 22 bp, Artificial Sequence
  Synthetic oligonucleotide; CTA chr11 5181048 5181069 5181065 5181070 +
gccagttttcccagcatcattt

SEQ ID NO: 75934 - DNA, 22 bp, Artificial Sequence
  Synthetic oligonucleotide; TTT chr11 5181056 5181077 5181073 5181078 +
tcccagcatcatttattaaata

SEQ ID NO: 75935 - DNA, 22 bp, Artificial Sequence
  Synthetic oligonucleotide; TTT chr11 5181057 5181078 5181074 5181079 +
cccagcatcatttattaaatag

SEQ ID NO: 75936 - DNA, 22 bp, Artificial Sequence
  Synthetic oligonucleotide; TTC chr11 5181058 5181079 5181075 5181080 +
ccagcatcatttattaaatagg

SEQ ID NO: 75937 - DNA, 22 bp, Artificial Sequence
  Synthetic oligonucleotide; TTT chr11 5181070 5181091 5181087 5181092 +
attaaatagggaatcctttccc

SEQ ID NO: 75938 - DNA, 22 bp, Artificial Sequence
  Synthetic oligonucleotide; TTA chr11 5181071 5181092 5181088 5181093 +
ttaaatagggaatcctttcccc

SEQ ID NO: 75939 - DNA, 22 bp, Artificial Sequence
  Synthetic oligonucleotide; TTA chr11 5181074 5181095 5181091 5181096 +
aatagggaatcctttccccatt

SEQ ID NO: 75940 - DNA, 22 bp, Artificial Sequence
  Synthetic oligonucleotide; CTT chr11 5181088 5181109 5181105 5181110 +
tccccattgcttgtttttgtca

SEQ ID NO: 75941 - DNA, 22 bp, Artificial Sequence
  Synthetic oligonucleotide; TTT chr11 5181089 5181110 5181106 5181111 +
ccccattgcttgtttttgtcag

SEQ ID NO: 75942 - DNA, 22 bp, Artificial Sequence
  Synthetic oligonucleotide; TTC chr11 5181090 5181111 5181107 5181112 +
cccattgcttgtttttgtcagg

SEQ ID NO: 75943 - DNA, 22 bp, Artificial Sequence
  Synthetic oligonucleotide; TTG chr11 5181097 5181118 5181114 5181119 +
cttgtttttgtcaggtttgtca

SEQ ID NO: 75944 - DNA, 22 bp, Artificial Sequence
  Synthetic oligonucleotide; CTT chr11 5181100 5181121 5181117 5181122 +
gtttttgtcaggtttgtcaaag

SEQ ID NO: 75945 - DNA, 22 bp, Artificial Sequence
  Synthetic oligonucleotide; TTG chr11 5181101 5181122 5181118 5181123 +
tttttgtcaggtttgtcaaaga

SEQ ID NO: 75946 - DNA, 22 bp, Artificial Sequence
  Synthetic oligonucleotide; TTT chr11 5181104 5181125 5181121 5181126 +
ttgtcaggtttgtcaaagatca

SEQ ID NO: 75947 - DNA, 22 bp, Artificial Sequence
  Synthetic oligonucleotide; TTT chr11 5181105 5181126 5181122 5181127 +
tgtcaggtttgtcaaagatcag

SEQ ID NO: 75948 - DNA, 22 bp, Artificial Sequence
  Synthetic oligonucleotide; TTT chr11 5181106 5181127 5181123 5181128 +
gtcaggtttgtcaaagatcaga

SEQ ID NO: 75949 - DNA, 22 bp, Artificial Sequence
  Synthetic oligonucleotide; TTG chr11 5181107 5181128 5181124 5181129 +
tcaggtttgtcaaagatcagat

SEQ ID NO: 75950 - DNA, 22 bp, Artificial Sequence
  Synthetic oligonucleotide; TTT chr11 5181115 5181136 5181132 5181137 +
gtcaaagatcagatagttgtgg

SEQ ID NO: 75951 - DNA, 22 bp, Artificial Sequence
  Synthetic oligonucleotide; TTG chr11 5181116 5181137 5181133 5181138 +
tcaaagatcagatagttgtgga

SEQ ID NO: 75952 - DNA, 22 bp, Artificial Sequence
  Synthetic oligonucleotide; TTG chr11 5181134 5181155 5181151 5181156 +
tggatgtgtggtattatttctg

SEQ ID NO: 75953 - DNA, 22 bp, Artificial Sequence
  Synthetic oligonucleotide; TTA chr11 5181150 5181171 5181167 5181172 +
tttctgagagctctgttctgct

SEQ ID NO: 75954 - DNA, 22 bp, Artificial Sequence
  Synthetic oligonucleotide; TTT chr11 5181153 5181174 5181170 5181175 +
ctgagagctctgttctgctcca

SEQ ID NO: 75955 - DNA, 22 bp, Artificial Sequence
  Synthetic oligonucleotide; TTC chr11 5181154 5181175 5181171 5181176 +
tgagagctctgttctgctccat

SEQ ID NO: 75956 - DNA, 22 bp, Artificial Sequence
  Synthetic oligonucleotide; CTG chr11 5181156 5181177 5181173 5181178 +
agagctctgttctgctccattg

SEQ ID NO: 75957 - DNA, 22 bp, Artificial Sequence
  Synthetic oligonucleotide; CTC chr11 5181163 5181184 5181180 5181185 +
tgttctgctccattggtctaca

SEQ ID NO: 75958 - DNA, 22 bp, Artificial Sequence
  Synthetic oligonucleotide; CTG chr11 5181165 5181186 5181182 5181187 +
ttctgctccattggtctacatc

SEQ ID NO: 75959 - DNA, 22 bp, Artificial Sequence
  Synthetic oligonucleotide; TTC chr11 5181168 5181189 5181185 5181190 +
tgctccattggtctacatctct

SEQ ID NO: 75960 - DNA, 22 bp, Artificial Sequence
  Synthetic oligonucleotide; CTG chr11 5181170 5181191 5181187 5181192 +
ctccattggtctacatctctgt

SEQ ID NO: 75961 - DNA, 22 bp, Artificial Sequence
  Synthetic oligonucleotide; CTC chr11 5181173 5181194 5181190 5181195 +
cattggtctacatctctgtttt

SEQ ID NO: 75962 - DNA, 22 bp, Artificial Sequence
  Synthetic oligonucleotide; TTG chr11 5181178 5181199 5181195 5181200 +
gtctacatctctgttttggtac

SEQ ID NO: 75963 - DNA, 22 bp, Artificial Sequence
  Synthetic oligonucleotide; CTA chr11 5181183 5181204 5181200 5181205 +
catctctgttttggtaccagta

SEQ ID NO: 75964 - DNA, 22 bp, Artificial Sequence
  Synthetic oligonucleotide; CTC chr11 5181189 5181210 5181206 5181211 +
tgttttggtaccagtaccatgt

SEQ ID NO: 75965 - DNA, 22 bp, Artificial Sequence
  Synthetic oligonucleotide; CTG chr11 5181191 5181212 5181208 5181213 +
ttttggtaccagtaccatgttg

SEQ ID NO: 75966 - DNA, 22 bp, Artificial Sequence
  Synthetic oligonucleotide; TTT chr11 5181194 5181215 5181211 5181216 +
tggtaccagtaccatgttgttt

SEQ ID NO: 75967 - DNA, 22 bp, Artificial Sequence
  Synthetic oligonucleotide; TTT chr11 5181195 5181216 5181212 5181217 +
ggtaccagtaccatgttgtttt

SEQ ID NO: 75968 - DNA, 22 bp, Artificial Sequence
  Synthetic oligonucleotide; TTG chr11 5181196 5181217 5181213 5181218 +
gtaccagtaccatgttgttttg

SEQ ID NO: 75969 - DNA, 22 bp, Artificial Sequence
  Synthetic oligonucleotide; TTG chr11 5181213 5181234 5181230 5181235 +
ttttggttactgtaccttgtag

SEQ ID NO: 75970 - DNA, 22 bp, Artificial Sequence
  Synthetic oligonucleotide; TTT chr11 5181216 5181237 5181233 5181238 +
tggttactgtaccttgtagtat

SEQ ID NO: 75971 - DNA, 22 bp, Artificial Sequence
  Synthetic oligonucleotide; TTT chr11 5181217 5181238 5181234 5181239 +
ggttactgtaccttgtagtata

SEQ ID NO: 75972 - DNA, 22 bp, Artificial Sequence
  Synthetic oligonucleotide; TTG chr11 5181218 5181239 5181235 5181240 +
gttactgtaccttgtagtatag

SEQ ID NO: 75973 - DNA, 22 bp, Artificial Sequence
  Synthetic oligonucleotide; TTA chr11 5181222 5181243 5181239 5181244 +
ctgtaccttgtagtatagtttg

SEQ ID NO: 75974 - DNA, 22 bp, Artificial Sequence
  Synthetic oligonucleotide; CTG chr11 5181225 5181246 5181242 5181247 +
taccttgtagtatagtttgaag

SEQ ID NO: 75975 - DNA, 22 bp, Artificial Sequence
  Synthetic oligonucleotide; CTT chr11 5181231 5181252 5181248 5181253 +
gtagtatagtttgaagtcaggt

SEQ ID NO: 75976 - DNA, 22 bp, Artificial Sequence
  Synthetic oligonucleotide; TTG chr11 5181232 5181253 5181249 5181254 +
tagtatagtttgaagtcaggta

SEQ ID NO: 75977 - DNA, 22 bp, Artificial Sequence
  Synthetic oligonucleotide; TTT chr11 5181243 5181264 5181260 5181265 +
gaagtcaggtagcatgatgcct

SEQ ID NO: 75978 - DNA, 22 bp, Artificial Sequence
  Synthetic oligonucleotide; TTG chr11 5181244 5181265 5181261 5181266 +
aagtcaggtagcatgatgcctc

SEQ ID NO: 75979 - DNA, 22 bp, Artificial Sequence
  Synthetic oligonucleotide; CTC chr11 5181266 5181287 5181283 5181288 +
tagctttgttcttttggcttag

SEQ ID NO: 75980 - DNA, 22 bp, Artificial Sequence
  Synthetic oligonucleotide; CTA chr11 5181268 5181289 5181285 5181290 +
gctttgttcttttggcttagga

SEQ ID NO: 75981 - DNA, 22 bp, Artificial Sequence
  Synthetic oligonucleotide; CTT chr11 5181272 5181293 5181289 5181294 +
tgttcttttggcttaggattga

SEQ ID NO: 75982 - DNA, 22 bp, Artificial Sequence
  Synthetic oligonucleotide; TTT chr11 5181273 5181294 5181290 5181295 +
gttcttttggcttaggattgac

SEQ ID NO: 75983 - DNA, 22 bp, Artificial Sequence
  Synthetic oligonucleotide; TTG chr11 5181274 5181295 5181291 5181296 +
ttcttttggcttaggattgact

SEQ ID NO: 75984 - DNA, 22 bp, Artificial Sequence
  Synthetic oligonucleotide; TTC chr11 5181277 5181298 5181294 5181299 +
ttttggcttaggattgacttgt

SEQ ID NO: 75985 - DNA, 22 bp, Artificial Sequence
  Synthetic oligonucleotide; CTT chr11 5181279 5181300 5181296 5181301 +
ttggcttaggattgacttgtca

SEQ ID NO: 75986 - DNA, 22 bp, Artificial Sequence
  Synthetic oligonucleotide; TTT chr11 5181280 5181301 5181297 5181302 +
tggcttaggattgacttgtcaa

SEQ ID NO: 75987 - DNA, 22 bp, Artificial Sequence
  Synthetic oligonucleotide; TTT chr11 5181281 5181302 5181298 5181303 +
ggcttaggattgacttgtcaat

SEQ ID NO: 75988 - DNA, 22 bp, Artificial Sequence
  Synthetic oligonucleotide; TTG chr11 5181282 5181303 5181299 5181304 +
gcttaggattgacttgtcaatg

SEQ ID NO: 75989 - DNA, 22 bp, Artificial Sequence
  Synthetic oligonucleotide; CTT chr11 5181286 5181307 5181303 5181308 +
aggattgacttgtcaatgcggg

SEQ ID NO: 75990 - DNA, 22 bp, Artificial Sequence
  Synthetic oligonucleotide; TTA chr11 5181287 5181308 5181304 5181309 +
ggattgacttgtcaatgcgggc

SEQ ID NO: 75991 - DNA, 22 bp, Artificial Sequence
  Synthetic oligonucleotide; TTG chr11 5181293 5181314 5181310 5181315 +
acttgtcaatgcgggctctttt

SEQ ID NO: 75992 - DNA, 22 bp, Artificial Sequence
  Synthetic oligonucleotide; CTT chr11 5181297 5181318 5181314 5181319 +
gtcaatgcgggctcttttttgg

SEQ ID NO: 75993 - DNA, 22 bp, Artificial Sequence
  Synthetic oligonucleotide; TTG chr11 5181298 5181319 5181315 5181320 +
tcaatgcgggctcttttttggt

SEQ ID NO: 75994 - DNA, 22 bp, Artificial Sequence
  Synthetic oligonucleotide; CTC chr11 5181311 5181332 5181328 5181333 +
ttttttggttccatatgaactt

SEQ ID NO: 75995 - DNA, 22 bp, Artificial Sequence
  Synthetic oligonucleotide; CTT chr11 5181313 5181334 5181330 5181335 +
ttttggttccatatgaacttta

SEQ ID NO: 75996 - DNA, 22 bp, Artificial Sequence
  Synthetic oligonucleotide; TTT chr11 5181314 5181335 5181331 5181336 +
tttggttccatatgaactttaa

SEQ ID NO: 75997 - DNA, 22 bp, Artificial Sequence
  Synthetic oligonucleotide; TTT chr11 5181315 5181336 5181332 5181337 +
ttggttccatatgaactttaaa

SEQ ID NO: 75998 - DNA, 22 bp, Artificial Sequence
  Synthetic oligonucleotide; TTT chr11 5181316 5181337 5181333 5181338 +
tggttccatatgaactttaaag

SEQ ID NO: 75999 - DNA, 22 bp, Artificial Sequence
  Synthetic oligonucleotide; TTT chr11 5181317 5181338 5181334 5181339 +
ggttccatatgaactttaaagt

SEQ ID NO: 76000 - DNA, 22 bp, Artificial Sequence
  Synthetic oligonucleotide; TTG chr11 5181318 5181339 5181335 5181340 +
gttccatatgaactttaaagta

SEQ ID NO: 76001 - DNA, 22 bp, Artificial Sequence
  Synthetic oligonucleotide; TTC chr11 5181322 5181343 5181339 5181344 +
catatgaactttaaagtagttt

SEQ ID NO: 76002 - DNA, 22 bp, Artificial Sequence
  Synthetic oligonucleotide; CTT chr11 5181333 5181354 5181350 5181355 +
taaagtagttttttccaattct

SEQ ID NO: 76003 - DNA, 22 bp, Artificial Sequence
  Synthetic oligonucleotide; TTT chr11 5181334 5181355 5181351 5181356 +
aaagtagttttttccaattctg

SEQ ID NO: 76004 - DNA, 22 bp, Artificial Sequence
  Synthetic oligonucleotide; TTA chr11 5181335 5181356 5181352 5181357 +
aagtagttttttccaattctgt

SEQ ID NO: 76005 - DNA, 22 bp, Artificial Sequence
  Synthetic oligonucleotide; TTT chr11 5181344 5181365 5181361 5181366 +
tttccaattctgtgaagaaagt

SEQ ID NO: 76006 - DNA, 22 bp, Artificial Sequence
  Synthetic oligonucleotide; TTT chr11 5181345 5181366 5181362 5181367 +
ttccaattctgtgaagaaagtc

SEQ ID NO: 76007 - DNA, 22 bp, Artificial Sequence
  Synthetic oligonucleotide; TTT chr11 5181346 5181367 5181363 5181368 +
tccaattctgtgaagaaagtca

SEQ ID NO: 76008 - DNA, 22 bp, Artificial Sequence
  Synthetic oligonucleotide; TTT chr11 5181347 5181368 5181364 5181369 +
ccaattctgtgaagaaagtcat

SEQ ID NO: 76009 - DNA, 22 bp, Artificial Sequence
  Synthetic oligonucleotide; TTC chr11 5181348 5181369 5181365 5181370 +
caattctgtgaagaaagtcatt

SEQ ID NO: 76010 - DNA, 22 bp, Artificial Sequence
  Synthetic oligonucleotide; TTC chr11 5181354 5181375 5181371 5181376 +
tgtgaagaaagtcattggtagc

SEQ ID NO: 76011 - DNA, 22 bp, Artificial Sequence
  Synthetic oligonucleotide; CTG chr11 5181356 5181377 5181373 5181378 +
tgaagaaagtcattggtagctt

SEQ ID NO: 76012 - DNA, 22 bp, Artificial Sequence
  Synthetic oligonucleotide; TTG chr11 5181371 5181392 5181388 5181393 +
gtagcttgatggggatggcatt

SEQ ID NO: 76013 - DNA, 22 bp, Artificial Sequence
  Synthetic oligonucleotide; CTT chr11 5181378 5181399 5181395 5181400 +
gatggggatggcattgaatcta

SEQ ID NO: 76014 - DNA, 22 bp, Artificial Sequence
  Synthetic oligonucleotide; TTG chr11 5181379 5181400 5181396 5181401 +
atggggatggcattgaatctat

SEQ ID NO: 76015 - DNA, 22 bp, Artificial Sequence
  Synthetic oligonucleotide; TTG chr11 5181394 5181415 5181411 5181416 +
aatctataaattaccttgggca

SEQ ID NO: 76016 - DNA, 22 bp, Artificial Sequence
  Synthetic oligonucleotide; CTA chr11 5181400 5181421 5181417 5181422 +
taaattaccttgggcagtaagg

SEQ ID NO: 76017 - DNA, 22 bp, Artificial Sequence
  Synthetic oligonucleotide; TTA chr11 5181407 5181428 5181424 5181429 +
ccttgggcagtaaggccatttt

SEQ ID NO: 76018 - DNA, 22 bp, Artificial Sequence
  Synthetic oligonucleotide; CTT chr11 5181411 5181432 5181428 5181433 +
gggcagtaaggccattttcacg

SEQ ID NO: 76019 - DNA, 22 bp, Artificial Sequence
  Synthetic oligonucleotide; TTG chr11 5181412 5181433 5181429 5181434 +
ggcagtaaggccattttcacga

SEQ ID NO: 76020 - DNA, 22 bp, Artificial Sequence
  Synthetic oligonucleotide; TTT chr11 5181428 5181449 5181445 5181450 +
tcacgatattgattcttcctat

SEQ ID NO: 76021 - DNA, 22 bp, Artificial Sequence
  Synthetic oligonucleotide; TTT chr11 5181429 5181450 5181446 5181451 +
cacgatattgattcttcctatc

SEQ ID NO: 76022 - DNA, 22 bp, Artificial Sequence
  Synthetic oligonucleotide; TTC chr11 5181430 5181451 5181447 5181452 +
acgatattgattcttcctatcc

SEQ ID NO: 76023 - DNA, 22 bp, Artificial Sequence
  Synthetic oligonucleotide; TTG chr11 5181439 5181460 5181456 5181461 +
attcttcctatccatgagcatg

SEQ ID NO: 76024 - DNA, 22 bp, Artificial Sequence
  Synthetic oligonucleotide; TTC chr11 5181443 5181464 5181460 5181465 +
ttcctatccatgagcatggaat

SEQ ID NO: 76025 - DNA, 22 bp, Artificial Sequence
  Synthetic oligonucleotide; CTT chr11 5181445 5181466 5181462 5181467 +
cctatccatgagcatggaatgt

SEQ ID NO: 76026 - DNA, 22 bp, Artificial Sequence
  Synthetic oligonucleotide; TTC chr11 5181446 5181467 5181463 5181468 +
ctatccatgagcatggaatgtt

SEQ ID NO: 76027 - DNA, 22 bp, Artificial Sequence
  Synthetic oligonucleotide; CTA chr11 5181449 5181470 5181466 5181471 +
tccatgagcatggaatgttctt

SEQ ID NO: 76028 - DNA, 22 bp, Artificial Sequence
  Synthetic oligonucleotide; TTC chr11 5181469 5181490 5181486 5181491 +
ttccatttgtttgtatcctctt

SEQ ID NO: 76029 - DNA, 22 bp, Artificial Sequence
  Synthetic oligonucleotide; CTT chr11 5181471 5181492 5181488 5181493 +
ccatttgtttgtatcctctttt

SEQ ID NO: 76030 - DNA, 22 bp, Artificial Sequence
  Synthetic oligonucleotide; TTC chr11 5181472 5181493 5181489 5181494 +
catttgtttgtatcctctttta

SEQ ID NO: 76031 - DNA, 22 bp, Artificial Sequence
  Synthetic oligonucleotide; TTT chr11 5181477 5181498 5181494 5181499 +
gtttgtatcctcttttatttcg

SEQ ID NO: 76032 - DNA, 22 bp, Artificial Sequence
  Synthetic oligonucleotide; TTG chr11 5181478 5181499 5181495 5181500 +
tttgtatcctcttttatttcgt

SEQ ID NO: 76033 - DNA, 22 bp, Artificial Sequence
  Synthetic oligonucleotide; TTT chr11 5181481 5181502 5181498 5181503 +
gtatcctcttttatttcgttga

SEQ ID NO: 76034 - DNA, 22 bp, Artificial Sequence
  Synthetic oligonucleotide; TTG chr11 5181482 5181503 5181499 5181504 +
tatcctcttttatttcgttgag

SEQ ID NO: 76035 - DNA, 22 bp, Artificial Sequence
  Synthetic oligonucleotide; CTC chr11 5181489 5181510 5181506 5181511 +
ttttatttcgttgagcagtgtt

SEQ ID NO: 76036 - DNA, 22 bp, Artificial Sequence
  Synthetic oligonucleotide; CTT chr11 5181491 5181512 5181508 5181513 +
ttatttcgttgagcagtgtttt

SEQ ID NO: 76037 - DNA, 22 bp, Artificial Sequence
  Synthetic oligonucleotide; TTT chr11 5181492 5181513 5181509 5181514 +
tatttcgttgagcagtgttttg

SEQ ID NO: 76038 - DNA, 22 bp, Artificial Sequence
  Synthetic oligonucleotide; TTT chr11 5181493 5181514 5181510 5181515 +
atttcgttgagcagtgttttgt

SEQ ID NO: 76039 - DNA, 22 bp, Artificial Sequence
  Synthetic oligonucleotide; TTA chr11 5181494 5181515 5181511 5181516 +
tttcgttgagcagtgttttgtt

SEQ ID NO: 76040 - DNA, 22 bp, Artificial Sequence
  Synthetic oligonucleotide; TTT chr11 5181497 5181518 5181514 5181519 +
cgttgagcagtgttttgttgtt

SEQ ID NO: 76041 - DNA, 22 bp, Artificial Sequence
  Synthetic oligonucleotide; TTC chr11 5181498 5181519 5181515 5181520 +
gttgagcagtgttttgttgttc

SEQ ID NO: 76042 - DNA, 22 bp, Artificial Sequence
  Synthetic oligonucleotide; TTG chr11 5181502 5181523 5181519 5181524 +
agcagtgttttgttgttctcct

SEQ ID NO: 76043 - DNA, 22 bp, Artificial Sequence
  Synthetic oligonucleotide; TTT chr11 5181512 5181533 5181529 5181534 +
tgttgttctccttgaagaggtc

SEQ ID NO: 76044 - DNA, 22 bp, Artificial Sequence
  Synthetic oligonucleotide; TTT chr11 5181513 5181534 5181530 5181535 +
gttgttctccttgaagaggtcc

SEQ ID NO: 76045 - DNA, 22 bp, Artificial Sequence
  Synthetic oligonucleotide; TTG chr11 5181514 5181535 5181531 5181536 +
ttgttctccttgaagaggtcct

SEQ ID NO: 76046 - DNA, 22 bp, Artificial Sequence
  Synthetic oligonucleotide; TTG chr11 5181517 5181538 5181534 5181539 +
ttctccttgaagaggtccttca

SEQ ID NO: 76047 - DNA, 22 bp, Artificial Sequence
  Synthetic oligonucleotide; TTC chr11 5181520 5181541 5181537 5181542 +
tccttgaagaggtccttcacat

SEQ ID NO: 76048 - DNA, 22 bp, Artificial Sequence
  Synthetic oligonucleotide; CTC chr11 5181522 5181543 5181539 5181544 +
cttgaagaggtccttcacatcc

SEQ ID NO: 76049 - DNA, 22 bp, Artificial Sequence
  Synthetic oligonucleotide; CTT chr11 5181525 5181546 5181542 5181547 +
gaagaggtccttcacatccctt

SEQ ID NO: 76050 - DNA, 22 bp, Artificial Sequence
  Synthetic oligonucleotide; TTG chr11 5181526 5181547 5181543 5181548 +
aagaggtccttcacatcccttg

SEQ ID NO: 76051 - DNA, 22 bp, Artificial Sequence
  Synthetic oligonucleotide; CTT chr11 5181537 5181558 5181554 5181559 +
cacatcccttgtaagttggatt

SEQ ID NO: 76052 - DNA, 22 bp, Artificial Sequence
  Synthetic oligonucleotide; TTC chr11 5181538 5181559 5181555 5181560 +
acatcccttgtaagttggattc

SEQ ID NO: 76053 - DNA, 22 bp, Artificial Sequence
  Synthetic oligonucleotide; CTT chr11 5181547 5181568 5181564 5181569 +
gtaagttggattcctaggtatt

SEQ ID NO: 76054 - DNA, 22 bp, Artificial Sequence
  Synthetic oligonucleotide; TTG chr11 5181548 5181569 5181565 5181570 +
taagttggattcctaggtattt

SEQ ID NO: 76055 - DNA, 22 bp, Artificial Sequence
  Synthetic oligonucleotide; TTG chr11 5181555 5181576 5181572 5181577 +
gattcctaggtattttattctc

SEQ ID NO: 76056 - DNA, 22 bp, Artificial Sequence
  Synthetic oligonucleotide; TTC chr11 5181560 5181581 5181577 5181582 +
ctaggtattttattctctttga

SEQ ID NO: 76057 - DNA, 22 bp, Artificial Sequence
  Synthetic oligonucleotide; CTA chr11 5181563 5181584 5181580 5181585 +
ggtattttattctctttgaggc

SEQ ID NO: 76058 - DNA, 22 bp, Artificial Sequence
  Synthetic oligonucleotide; TTT chr11 5181570 5181591 5181587 5181592 +
tattctctttgaggcaattgtg

SEQ ID NO: 76059 - DNA, 22 bp, Artificial Sequence
  Synthetic oligonucleotide; TTT chr11 5181571 5181592 5181588 5181593 +
attctctttgaggcaattgtga

SEQ ID NO: 76060 - DNA, 22 bp, Artificial Sequence
  Synthetic oligonucleotide; TTA chr11 5181572 5181593 5181589 5181594 +
ttctctttgaggcaattgtgaa

SEQ ID NO: 76061 - DNA, 22 bp, Artificial Sequence
  Synthetic oligonucleotide; TTC chr11 5181575 5181596 5181592 5181597 +
tctttgaggcaattgtgaatgg

SEQ ID NO: 76062 - DNA, 22 bp, Artificial Sequence
  Synthetic oligonucleotide; CTC chr11 5181577 5181598 5181594 5181599 +
tttgaggcaattgtgaatggga

SEQ ID NO: 76063 - DNA, 22 bp, Artificial Sequence
  Synthetic oligonucleotide; CTT chr11 5181579 5181600 5181596 5181601 +
tgaggcaattgtgaatgggagt

SEQ ID NO: 76064 - DNA, 22 bp, Artificial Sequence
  Synthetic oligonucleotide; TTT chr11 5181580 5181601 5181597 5181602 +
gaggcaattgtgaatgggagtt

SEQ ID NO: 76065 - DNA, 22 bp, Artificial Sequence
  Synthetic oligonucleotide; TTG chr11 5181581 5181602 5181598 5181603 +
aggcaattgtgaatgggagttc

SEQ ID NO: 76066 - DNA, 22 bp, Artificial Sequence
  Synthetic oligonucleotide; TTG chr11 5181590 5181611 5181607 5181612 +
tgaatgggagttcactcatgat

SEQ ID NO: 76067 - DNA, 22 bp, Artificial Sequence
  Synthetic oligonucleotide; TTC chr11 5181603 5181624 5181620 5181625 +
actcatgatttggctctctgtt

SEQ ID NO: 76068 - DNA, 22 bp, Artificial Sequence
  Synthetic oligonucleotide; CTC chr11 5181607 5181628 5181624 5181629 +
atgatttggctctctgtttgtc

SEQ ID NO: 76069 - DNA, 22 bp, Artificial Sequence
  Synthetic oligonucleotide; TTT chr11 5181614 5181635 5181631 5181636 +
ggctctctgtttgtctgttatt

SEQ ID NO: 76070 - DNA, 22 bp, Artificial Sequence
  Synthetic oligonucleotide; TTG chr11 5181615 5181636 5181632 5181637 +
gctctctgtttgtctgttattg

SEQ ID NO: 76071 - DNA, 22 bp, Artificial Sequence
  Synthetic oligonucleotide; CTC chr11 5181619 5181640 5181636 5181641 +
tctgtttgtctgttattggtgt

SEQ ID NO: 76072 - DNA, 22 bp, Artificial Sequence
  Synthetic oligonucleotide; CTC chr11 5181621 5181642 5181638 5181643 +
tgtttgtctgttattggtgtat

SEQ ID NO: 76073 - DNA, 22 bp, Artificial Sequence
  Synthetic oligonucleotide; CTG chr11 5181623 5181644 5181640 5181645 +
tttgtctgttattggtgtatag

SEQ ID NO: 76074 - DNA, 22 bp, Artificial Sequence
  Synthetic oligonucleotide; TTT chr11 5181626 5181647 5181643 5181648 +
gtctgttattggtgtataggaa

SEQ ID NO: 76075 - DNA, 22 bp, Artificial Sequence
  Synthetic oligonucleotide; TTG chr11 5181627 5181648 5181644 5181649 +
tctgttattggtgtataggaat

SEQ ID NO: 76076 - DNA, 22 bp, Artificial Sequence
  Synthetic oligonucleotide; CTG chr11 5181631 5181652 5181648 5181653 +
ttattggtgtataggaatgctt

SEQ ID NO: 76077 - DNA, 22 bp, Artificial Sequence
  Synthetic oligonucleotide; TTA chr11 5181634 5181655 5181651 5181656 +
ttggtgtataggaatgcttgtg

SEQ ID NO: 76078 - DNA, 22 bp, Artificial Sequence
  Synthetic oligonucleotide; TTG chr11 5181637 5181658 5181654 5181659 +
gtgtataggaatgcttgtgatt

SEQ ID NO: 76079 - DNA, 22 bp, Artificial Sequence
  Synthetic oligonucleotide; CTT chr11 5181653 5181674 5181670 5181675 +
gtgatttttgcacattgatttt

SEQ ID NO: 76080 - DNA, 22 bp, Artificial Sequence
  Synthetic oligonucleotide; TTG chr11 5181654 5181675 5181671 5181676 +
tgatttttgcacattgattttg

SEQ ID NO: 76081 - DNA, 22 bp, Artificial Sequence
  Synthetic oligonucleotide; TTT chr11 5181660 5181681 5181677 5181682 +
ttgcacattgattttgtatgct

SEQ ID NO: 76082 - DNA, 22 bp, Artificial Sequence
  Synthetic oligonucleotide; TTT chr11 5181661 5181682 5181678 5181683 +
tgcacattgattttgtatgctg

SEQ ID NO: 76083 - DNA, 22 bp, Artificial Sequence
  Synthetic oligonucleotide; TTT chr11 5181662 5181683 5181679 5181684 +
gcacattgattttgtatgctga

SEQ ID NO: 76084 - DNA, 22 bp, Artificial Sequence
  Synthetic oligonucleotide; TTG chr11 5181663 5181684 5181680 5181685 +
cacattgattttgtatgctgag

SEQ ID NO: 76085 - DNA, 22 bp, Artificial Sequence
  Synthetic oligonucleotide; TTG chr11 5181670 5181691 5181687 5181692 +
attttgtatgctgagacttttc

SEQ ID NO: 76086 - DNA, 22 bp, Artificial Sequence
  Synthetic oligonucleotide; TTT chr11 5181674 5181695 5181691 5181696 +
tgtatgctgagacttttctgaa

SEQ ID NO: 76087 - DNA, 22 bp, Artificial Sequence
  Synthetic oligonucleotide; TTT chr11 5181675 5181696 5181692 5181697 +
gtatgctgagacttttctgaag

SEQ ID NO: 76088 - DNA, 22 bp, Artificial Sequence
  Synthetic oligonucleotide; TTG chr11 5181676 5181697 5181693 5181698 +
tatgctgagacttttctgaagt

SEQ ID NO: 76089 - DNA, 22 bp, Artificial Sequence
  Synthetic oligonucleotide; CTG chr11 5181683 5181704 5181700 5181705 +
agacttttctgaagttgcttat

SEQ ID NO: 76090 - DNA, 22 bp, Artificial Sequence
  Synthetic oligonucleotide; CTT chr11 5181689 5181710 5181706 5181711 +
ttctgaagttgcttatcagctt

SEQ ID NO: 76091 - DNA, 22 bp, Artificial Sequence
  Synthetic oligonucleotide; TTT chr11 5181690 5181711 5181707 5181712 +
tctgaagttgcttatcagctta

SEQ ID NO: 76092 - DNA, 22 bp, Artificial Sequence
  Synthetic oligonucleotide; TTT chr11 5181691 5181712 5181708 5181713 +
ctgaagttgcttatcagcttaa

SEQ ID NO: 76093 - DNA, 22 bp, Artificial Sequence
  Synthetic oligonucleotide; TTC chr11 5181692 5181713 5181709 5181714 +
tgaagttgcttatcagcttaag

SEQ ID NO: 76094 - DNA, 22 bp, Artificial Sequence
  Synthetic oligonucleotide; CTG chr11 5181694 5181715 5181711 5181716 +
aagttgcttatcagcttaagga

SEQ ID NO: 76095 - DNA, 22 bp, Artificial Sequence
  Synthetic oligonucleotide; TTG chr11 5181700 5181721 5181717 5181722 +
cttatcagcttaaggagatttt

SEQ ID NO: 76096 - DNA, 22 bp, Artificial Sequence
  Synthetic oligonucleotide; CTT chr11 5181703 5181724 5181720 5181725 +
atcagcttaaggagattttggg

SEQ ID NO: 76097 - DNA, 22 bp, Artificial Sequence
  Synthetic oligonucleotide; TTA chr11 5181704 5181725 5181721 5181726 +
tcagcttaaggagattttgggc

SEQ ID NO: 76098 - DNA, 22 bp, Artificial Sequence
  Synthetic oligonucleotide; CTT chr11 5181711 5181732 5181728 5181733 +
aaggagattttgggctgagacg

SEQ ID NO: 76099 - DNA, 22 bp, Artificial Sequence
  Synthetic oligonucleotide; TTA chr11 5181712 5181733 5181729 5181734 +
aggagattttgggctgagacga

SEQ ID NO: 76100 - DNA, 22 bp, Artificial Sequence
  Synthetic oligonucleotide; TTT chr11 5181721 5181742 5181738 5181743 +
tgggctgagacgatggggtttt

SEQ ID NO: 76101 - DNA, 22 bp, Artificial Sequence
  Synthetic oligonucleotide; TTT chr11 5181722 5181743 5181739 5181744 +
gggctgagacgatggggttttc

SEQ ID NO: 76102 - DNA, 22 bp, Artificial Sequence
  Synthetic oligonucleotide; TTG chr11 5181723 5181744 5181740 5181745 +
ggctgagacgatggggttttct

SEQ ID NO: 76103 - DNA, 22 bp, Artificial Sequence
  Synthetic oligonucleotide; CTG chr11 5181728 5181749 5181745 5181750 +
agacgatggggttttctagata

SEQ ID NO: 76104 - DNA, 22 bp, Artificial Sequence
  Synthetic oligonucleotide; TTT chr11 5181742 5181763 5181759 5181764 +
tctagatatacaatcacgtcat

SEQ ID NO: 76105 - DNA, 22 bp, Artificial Sequence
  Synthetic oligonucleotide; TTT chr11 5181743 5181764 5181760 5181765 +
ctagatatacaatcacgtcatc

SEQ ID NO: 76106 - DNA, 22 bp, Artificial Sequence
  Synthetic oligonucleotide; TTC chr11 5181744 5181765 5181761 5181766 +
tagatatacaatcacgtcatct

SEQ ID NO: 76107 - DNA, 22 bp, Artificial Sequence
  Synthetic oligonucleotide; CTA chr11 5181746 5181767 5181763 5181768 +
gatatacaatcacgtcatctgc

SEQ ID NO: 76108 - DNA, 22 bp, Artificial Sequence
  Synthetic oligonucleotide; CTG chr11 5181767 5181788 5181784 5181789 +
caaacagggacaatttcacttc

SEQ ID NO: 76109 - DNA, 22 bp, Artificial Sequence
  Synthetic oligonucleotide; TTT chr11 5181783 5181804 5181800 5181805 +
cacttcctcttttcctaattga

SEQ ID NO: 76110 - DNA, 22 bp, Artificial Sequence
  Synthetic oligonucleotide; TTC chr11 5181784 5181805 5181801 5181806 +
acttcctcttttcctaattgaa

SEQ ID NO: 76111 - DNA, 22 bp, Artificial Sequence
  Synthetic oligonucleotide; CTT chr11 5181788 5181809 5181805 5181810 +
cctcttttcctaattgaatgcc

SEQ ID NO: 76112 - DNA, 22 bp, Artificial Sequence
  Synthetic oligonucleotide; TTC chr11 5181789 5181810 5181806 5181811 +
ctcttttcctaattgaatgccc

SEQ ID NO: 76113 - DNA, 22 bp, Artificial Sequence
  Synthetic oligonucleotide; CTC chr11 5181792 5181813 5181809 5181814 +
ttttcctaattgaatgcccttt

SEQ ID NO: 76114 - DNA, 22 bp, Artificial Sequence
  Synthetic oligonucleotide; CTT chr11 5181794 5181815 5181811 5181816 +
ttcctaattgaatgccctttat

SEQ ID NO: 76115 - DNA, 22 bp, Artificial Sequence
  Synthetic oligonucleotide; TTT chr11 5181795 5181816 5181812 5181817 +
tcctaattgaatgccctttatt

SEQ ID NO: 76116 - DNA, 22 bp, Artificial Sequence
  Synthetic oligonucleotide; TTT chr11 5181796 5181817 5181813 5181818 +
cctaattgaatgccctttattt

SEQ ID NO: 76117 - DNA, 22 bp, Artificial Sequence
  Synthetic oligonucleotide; TTC chr11 5181797 5181818 5181814 5181819 +
ctaattgaatgccctttatttc

SEQ ID NO: 76118 - DNA, 22 bp, Artificial Sequence
  Synthetic oligonucleotide; CTA chr11 5181800 5181821 5181817 5181822 +
attgaatgccctttatttcttt

SEQ ID NO: 76119 - DNA, 22 bp, Artificial Sequence
  Synthetic oligonucleotide; TTG chr11 5181804 5181825 5181821 5181826 +
aatgccctttatttctttctct

SEQ ID NO: 76120 - DNA, 22 bp, Artificial Sequence
  Synthetic oligonucleotide; CTT chr11 5181813 5181834 5181830 5181835 +
tatttctttctcttgcctgatt

SEQ ID NO: 76121 - DNA, 22 bp, Artificial Sequence
  Synthetic oligonucleotide; TTT chr11 5181814 5181835 5181831 5181836 +
atttctttctcttgcctgattg

SEQ ID NO: 76122 - DNA, 22 bp, Artificial Sequence
  Synthetic oligonucleotide; TTA chr11 5181815 5181836 5181832 5181837 +
tttctttctcttgcctgattgc

SEQ ID NO: 76123 - DNA, 22 bp, Artificial Sequence
  Synthetic oligonucleotide; TTT chr11 5181818 5181839 5181835 5181840 +
ctttctcttgcctgattgccct

SEQ ID NO: 76124 - DNA, 22 bp, Artificial Sequence
  Synthetic oligonucleotide; TTC chr11 5181819 5181840 5181836 5181841 +
tttctcttgcctgattgccctg

SEQ ID NO: 76125 - DNA, 22 bp, Artificial Sequence
  Synthetic oligonucleotide; CTT chr11 5181821 5181842 5181838 5181843 +
tctcttgcctgattgccctggc

SEQ ID NO: 76126 - DNA, 22 bp, Artificial Sequence
  Synthetic oligonucleotide; TTT chr11 5181822 5181843 5181839 5181844 +
ctcttgcctgattgccctggcc

SEQ ID NO: 76127 - DNA, 22 bp, Artificial Sequence
  Synthetic oligonucleotide; TTC chr11 5181823 5181844 5181840 5181845 +
tcttgcctgattgccctggcca

SEQ ID NO: 76128 - DNA, 22 bp, Artificial Sequence
  Synthetic oligonucleotide; CTC chr11 5181825 5181846 5181842 5181847 +
ttgcctgattgccctggccaga

SEQ ID NO: 76129 - DNA, 22 bp, Artificial Sequence
  Synthetic oligonucleotide; CTT chr11 5181827 5181848 5181844 5181849 +
gcctgattgccctggccagaac

SEQ ID NO: 76130 - DNA, 22 bp, Artificial Sequence
  Synthetic oligonucleotide; TTG chr11 5181828 5181849 5181845 5181850 +
cctgattgccctggccagaact

SEQ ID NO: 76131 - DNA, 22 bp, Artificial Sequence
  Synthetic oligonucleotide; CTG chr11 5181832 5181853 5181849 5181854 +
attgccctggccagaacttcca

SEQ ID NO: 76132 - DNA, 22 bp, Artificial Sequence
  Synthetic oligonucleotide; TTG chr11 5181836 5181857 5181853 5181858 +
ccctggccagaacttccaacac

SEQ ID NO: 76133 - DNA, 22 bp, Artificial Sequence
  Synthetic oligonucleotide; CTG chr11 5181841 5181862 5181858 5181863 +
gccagaacttccaacactatgt

SEQ ID NO: 76134 - DNA, 22 bp, Artificial Sequence
  Synthetic oligonucleotide; CTT chr11 5181851 5181872 5181868 5181873 +
ccaacactatgttgaataggag

SEQ ID NO: 76135 - DNA, 22 bp, Artificial Sequence
  Synthetic oligonucleotide; TTC chr11 5181852 5181873 5181869 5181874 +
caacactatgttgaataggagt

SEQ ID NO: 76136 - DNA, 22 bp, Artificial Sequence
  Synthetic oligonucleotide; CTA chr11 5181860 5181881 5181877 5181882 +
tgttgaataggagtggtgagag

SEQ ID NO: 76137 - DNA, 22 bp, Artificial Sequence
  Synthetic oligonucleotide; TTG chr11 5181865 5181886 5181882 5181887 +
aataggagtggtgagagagggc

SEQ ID NO: 76138 - DNA, 22 bp, Artificial Sequence
  Synthetic oligonucleotide; CTG chr11 5181894 5181915 5181911 5181916 +
tcttgtgccagttttcaaaggg

SEQ ID NO: 76139 - DNA, 22 bp, Artificial Sequence
  Synthetic oligonucleotide; CTT chr11 5181898 5181919 5181915 5181920 +
gtgccagttttcaaagggaatg

SEQ ID NO: 76140 - DNA, 22 bp, Artificial Sequence
  Synthetic oligonucleotide; TTG chr11 5181899 5181920 5181916 5181921 +
tgccagttttcaaagggaatgc

SEQ ID NO: 76141 - DNA, 22 bp, Artificial Sequence
  Synthetic oligonucleotide; TTT chr11 5181908 5181929 5181925 5181930 +
tcaaagggaatgcttccagttt

SEQ ID NO: 76142 - DNA, 22 bp, Artificial Sequence
  Synthetic oligonucleotide; TTT chr11 5181909 5181930 5181926 5181931 +
caaagggaatgcttccagtttt

SEQ ID NO: 76143 - DNA, 22 bp, Artificial Sequence
  Synthetic oligonucleotide; TTC chr11 5181910 5181931 5181927 5181932 +
aaagggaatgcttccagttttt

SEQ ID NO: 76144 - DNA, 22 bp, Artificial Sequence
  Synthetic oligonucleotide; CTT chr11 5181923 5181944 5181940 5181945 +
ccagtttttgtccattcagtat

SEQ ID NO: 76145 - DNA, 22 bp, Artificial Sequence
  Synthetic oligonucleotide; TTC chr11 5181924 5181945 5181941 5181946 +
cagtttttgtccattcagtatg

SEQ ID NO: 76146 - DNA, 22 bp, Artificial Sequence
  Synthetic oligonucleotide; TTT chr11 5181930 5181951 5181947 5181952 +
ttgtccattcagtatgatattg

SEQ ID NO: 76147 - DNA, 22 bp, Artificial Sequence
  Synthetic oligonucleotide; TTT chr11 5181931 5181952 5181948 5181953 +
tgtccattcagtatgatattgg

SEQ ID NO: 76148 - DNA, 22 bp, Artificial Sequence
  Synthetic oligonucleotide; TTT chr11 5181932 5181953 5181949 5181954 +
gtccattcagtatgatattggc

SEQ ID NO: 76149 - DNA, 22 bp, Artificial Sequence
  Synthetic oligonucleotide; TTG chr11 5181933 5181954 5181950 5181955 +
tccattcagtatgatattggct

SEQ ID NO: 76150 - DNA, 22 bp, Artificial Sequence
  Synthetic oligonucleotide; TTC chr11 5181940 5181961 5181957 5181962 +
agtatgatattggctgtgggtt

SEQ ID NO: 76151 - DNA, 22 bp, Artificial Sequence
  Synthetic oligonucleotide; TTG chr11 5181952 5181973 5181969 5181974 +
gctgtgggtttgtcatagatag

SEQ ID NO: 76152 - DNA, 22 bp, Artificial Sequence
  Synthetic oligonucleotide; CTG chr11 5181956 5181977 5181973 5181978 +
tgggtttgtcatagatagctct

SEQ ID NO: 76153 - DNA, 22 bp, Artificial Sequence
  Synthetic oligonucleotide; TTT chr11 5181963 5181984 5181980 5181985 +
gtcatagatagctcttattatt

SEQ ID NO: 76154 - DNA, 22 bp, Artificial Sequence
  Synthetic oligonucleotide; TTG chr11 5181964 5181985 5181981 5181986 +
tcatagatagctcttattattt

SEQ ID NO: 76155 - DNA, 22 bp, Artificial Sequence
  Synthetic oligonucleotide; CTC chr11 5181977 5181998 5181994 5181999 +
ttattattttgagatatgtccc

SEQ ID NO: 76156 - DNA, 22 bp, Artificial Sequence
  Synthetic oligonucleotide; CTT chr11 5181979 5182000 5181996 5182001 +
attattttgagatatgtcccat

SEQ ID NO: 76157 - DNA, 22 bp, Artificial Sequence
  Synthetic oligonucleotide; TTA chr11 5181980 5182001 5181997 5182002 +
ttattttgagatatgtcccatc

SEQ ID NO: 76158 - DNA, 22 bp, Artificial Sequence
  Synthetic oligonucleotide; TTA chr11 5181983 5182004 5182000 5182005 +
ttttgagatatgtcccatcgat

SEQ ID NO: 76159 - DNA, 22 bp, Artificial Sequence
  Synthetic oligonucleotide; TTT chr11 5181986 5182007 5182003 5182008 +
tgagatatgtcccatcgatacc

SEQ ID NO: 76160 - DNA, 22 bp, Artificial Sequence
  Synthetic oligonucleotide; TTT chr11 5181987 5182008 5182004 5182009 +
gagatatgtcccatcgatacct

SEQ ID NO: 76161 - DNA, 22 bp, Artificial Sequence
  Synthetic oligonucleotide; TTG chr11 5181988 5182009 5182005 5182010 +
agatatgtcccatcgataccta

SEQ ID NO: 76162 - DNA, 22 bp, Artificial Sequence
  Synthetic oligonucleotide; CTA chr11 5182010 5182031 5182027 5182032 +
atttattgagagtttttagtat

SEQ ID NO: 76163 - DNA, 22 bp, Artificial Sequence
  Synthetic oligonucleotide; TTT chr11 5182014 5182035 5182031 5182036 +
attgagagtttttagtatgaag

SEQ ID NO: 76164 - DNA, 22 bp, Artificial Sequence
  Synthetic oligonucleotide; TTA chr11 5182015 5182036 5182032 5182037 +
ttgagagtttttagtatgaagc

SEQ ID NO: 76165 - DNA, 22 bp, Artificial Sequence
  Synthetic oligonucleotide; TTG chr11 5182018 5182039 5182035 5182040 +
agagtttttagtatgaagcatt

SEQ ID NO: 76166 - DNA, 22 bp, Artificial Sequence
  Synthetic oligonucleotide; TTT chr11 5182025 5182046 5182042 5182047 +
ttagtatgaagcattgttgaat

SEQ ID NO: 76167 - DNA, 22 bp, Artificial Sequence
  Synthetic oligonucleotide; TTT chr11 5182026 5182047 5182043 5182048 +
tagtatgaagcattgttgaatt

SEQ ID NO: 76168 - DNA, 22 bp, Artificial Sequence
  Synthetic oligonucleotide; TTT chr11 5182027 5182048 5182044 5182049 +
agtatgaagcattgttgaattt

SEQ ID NO: 76169 - DNA, 22 bp, Artificial Sequence
  Synthetic oligonucleotide; TTA chr11 5182028 5182049 5182045 5182050 +
gtatgaagcattgttgaatttt

SEQ ID NO: 76170 - DNA, 22 bp, Artificial Sequence
  Synthetic oligonucleotide; TTG chr11 5182041 5182062 5182058 5182063 +
ttgaattttgtcaaaggccttt

SEQ ID NO: 76171 - DNA, 22 bp, Artificial Sequence
  Synthetic oligonucleotide; TTG chr11 5182044 5182065 5182061 5182066 +
aattttgtcaaaggccttttct

SEQ ID NO: 76172 - DNA, 22 bp, Artificial Sequence
  Synthetic oligonucleotide; TTT chr11 5182049 5182070 5182066 5182071 +
tgtcaaaggccttttctgcatc

SEQ ID NO: 76173 - DNA, 22 bp, Artificial Sequence
  Synthetic oligonucleotide; TTT chr11 5182050 5182071 5182067 5182072 +
gtcaaaggccttttctgcatct

SEQ ID NO: 76174 - DNA, 22 bp, Artificial Sequence
  Synthetic oligonucleotide; TTG chr11 5182051 5182072 5182068 5182073 +
tcaaaggccttttctgcatcta

SEQ ID NO: 76175 - DNA, 22 bp, Artificial Sequence
  Synthetic oligonucleotide; CTT chr11 5182062 5182083 5182079 5182084 +
ttctgcatctattgagataatc

SEQ ID NO: 76176 - DNA, 22 bp, Artificial Sequence
  Synthetic oligonucleotide; TTT chr11 5182063 5182084 5182080 5182085 +
tctgcatctattgagataatca

SEQ ID NO: 76177 - DNA, 22 bp, Artificial Sequence
  Synthetic oligonucleotide; TTT chr11 5182064 5182085 5182081 5182086 +
ctgcatctattgagataatcat

SEQ ID NO: 76178 - DNA, 22 bp, Artificial Sequence
  Synthetic oligonucleotide; TTC chr11 5182065 5182086 5182082 5182087 +
tgcatctattgagataatcatg

SEQ ID NO: 76179 - DNA, 22 bp, Artificial Sequence
  Synthetic oligonucleotide; CTG chr11 5182067 5182088 5182084 5182089 +
catctattgagataatcatgtg

SEQ ID NO: 76180 - DNA, 22 bp, Artificial Sequence
  Synthetic oligonucleotide; CTA chr11 5182073 5182094 5182090 5182095 +
ttgagataatcatgtggtttgt

SEQ ID NO: 76181 - DNA, 22 bp, Artificial Sequence
  Synthetic oligonucleotide; TTG chr11 5182076 5182097 5182093 5182098 +
agataatcatgtggtttgtgtc

SEQ ID NO: 76182 - DNA, 22 bp, Artificial Sequence
  Synthetic oligonucleotide; TTT chr11 5182093 5182114 5182110 5182115 +
gtgtctttggttctgtttatat

SEQ ID NO: 76183 - DNA, 22 bp, Artificial Sequence
  Synthetic oligonucleotide; TTG chr11 5182094 5182115 5182111 5182116 +
tgtctttggttctgtttatatg

SEQ ID NO: 76184 - DNA, 22 bp, Artificial Sequence
  Synthetic oligonucleotide; CTT chr11 5182100 5182121 5182117 5182122 +
tggttctgtttatatgctggat

SEQ ID NO: 76185 - DNA, 22 bp, Artificial Sequence
  Synthetic oligonucleotide; TTT chr11 5182101 5182122 5182118 5182123 +
ggttctgtttatatgctggatt

SEQ ID NO: 76186 - DNA, 22 bp, Artificial Sequence
  Synthetic oligonucleotide; TTG chr11 5182102 5182123 5182119 5182124 +
gttctgtttatatgctggatta

SEQ ID NO: 76187 - DNA, 22 bp, Artificial Sequence
  Synthetic oligonucleotide; TTC chr11 5182106 5182127 5182123 5182128 +
tgtttatatgctggattatgtt

SEQ ID NO: 76188 - DNA, 22 bp, Artificial Sequence
  Synthetic oligonucleotide; CTG chr11 5182108 5182129 5182125 5182130 +
tttatatgctggattatgttta

SEQ ID NO: 76189 - DNA, 22 bp, Artificial Sequence
  Synthetic oligonucleotide; TTT chr11 5182111 5182132 5182128 5182133 +
atatgctggattatgtttattg

SEQ ID NO: 76190 - DNA, 22 bp, Artificial Sequence
  Synthetic oligonucleotide; TTA chr11 5182112 5182133 5182129 5182134 +
tatgctggattatgtttattga

SEQ ID NO: 76191 - DNA, 22 bp, Artificial Sequence
  Synthetic oligonucleotide; CTG chr11 5182119 5182140 5182136 5182141 +
gattatgtttattgatttgcat

SEQ ID NO: 76192 - DNA, 22 bp, Artificial Sequence
  Synthetic oligonucleotide; TTA chr11 5182124 5182145 5182141 5182146 +
tgtttattgatttgcatatgtt

SEQ ID NO: 76193 - DNA, 22 bp, Artificial Sequence
  Synthetic oligonucleotide; TTT chr11 5182129 5182150 5182146 5182151 +
attgatttgcatatgttgaacc

SEQ ID NO: 76194 - DNA, 22 bp, Artificial Sequence
  Synthetic oligonucleotide; TTA chr11 5182130 5182151 5182147 5182152 +
ttgatttgcatatgttgaacca

SEQ ID NO: 76195 - DNA, 22 bp, Artificial Sequence
  Synthetic oligonucleotide; TTG chr11 5182133 5182154 5182150 5182155 +
atttgcatatgttgaaccagcc

SEQ ID NO: 76196 - DNA, 22 bp, Artificial Sequence
  Synthetic oligonucleotide; TTT chr11 5182137 5182158 5182154 5182159 +
gcatatgttgaaccagccctgc

SEQ ID NO: 76197 - DNA, 22 bp, Artificial Sequence
  Synthetic oligonucleotide; TTG chr11 5182138 5182159 5182155 5182160 +
catatgttgaaccagccctgca

SEQ ID NO: 76198 - DNA, 22 bp, Artificial Sequence
  Synthetic oligonucleotide; TTG chr11 5182147 5182168 5182164 5182169 +
aaccagccctgcatcccaggga

SEQ ID NO: 76199 - DNA, 22 bp, Artificial Sequence
  Synthetic oligonucleotide; CTG chr11 5182158 5182179 5182175 5182180 +
catcccagggatgaagcccact

SEQ ID NO: 76200 - DNA, 22 bp, Artificial Sequence
  Synthetic oligonucleotide; CTT chr11 5182181 5182202 5182198 5182203 +
gatcatggtggataagcttttt

SEQ ID NO: 76201 - DNA, 22 bp, Artificial Sequence
  Synthetic oligonucleotide; TTG chr11 5182182 5182203 5182199 5182204 +
atcatggtggataagctttttg

SEQ ID NO: 76202 - DNA, 22 bp, Artificial Sequence
  Synthetic oligonucleotide; CTT chr11 5182200 5182221 5182217 5182222 +
tttgatgtgctcctggatttgg

SEQ ID NO: 76203 - DNA, 22 bp, Artificial Sequence
  Synthetic oligonucleotide; TTT chr11 5182201 5182222 5182218 5182223 +
ttgatgtgctcctggatttggt

SEQ ID NO: 76204 - DNA, 22 bp, Artificial Sequence
  Synthetic oligonucleotide; TTT chr11 5182202 5182223 5182219 5182224 +
tgatgtgctcctggatttggtt

SEQ ID NO: 76205 - DNA, 22 bp, Artificial Sequence
  Synthetic oligonucleotide; TTT chr11 5182203 5182224 5182220 5182225 +
gatgtgctcctggatttggttt

SEQ ID NO: 76206 - DNA, 22 bp, Artificial Sequence
  Synthetic oligonucleotide; TTG chr11 5182204 5182225 5182221 5182226 +
atgtgctcctggatttggtttg

SEQ ID NO: 76207 - DNA, 22 bp, Artificial Sequence
  Synthetic oligonucleotide; CTC chr11 5182212 5182233 5182229 5182234 +
ctggatttggtttgccagtatt

SEQ ID NO: 76208 - DNA, 22 bp, Artificial Sequence
  Synthetic oligonucleotide; CTG chr11 5182215 5182236 5182232 5182237 +
gatttggtttgccagtatttta

SEQ ID NO: 76209 - DNA, 22 bp, Artificial Sequence
  Synthetic oligonucleotide; TTT chr11 5182220 5182241 5182237 5182242 +
ggtttgccagtattttactgag

SEQ ID NO: 76210 - DNA, 22 bp, Artificial Sequence
  Synthetic oligonucleotide; TTG chr11 5182221 5182242 5182238 5182243 +
gtttgccagtattttactgagg

SEQ ID NO: 76211 - DNA, 22 bp, Artificial Sequence
  Synthetic oligonucleotide; TTT chr11 5182225 5182246 5182242 5182247 +
gccagtattttactgaggattt

SEQ ID NO: 76212 - DNA, 22 bp, Artificial Sequence
  Synthetic oligonucleotide; TTG chr11 5182226 5182247 5182243 5182248 +
ccagtattttactgaggatttt

SEQ ID NO: 76213 - DNA, 22 bp, Artificial Sequence
  Synthetic oligonucleotide; TTT chr11 5182235 5182256 5182252 5182257 +
tactgaggatttttgcatcgat

SEQ ID NO: 76214 - DNA, 22 bp, Artificial Sequence
  Synthetic oligonucleotide; TTT chr11 5182236 5182257 5182253 5182258 +
actgaggatttttgcatcgatg

SEQ ID NO: 76215 - DNA, 22 bp, Artificial Sequence
  Synthetic oligonucleotide; TTA chr11 5182237 5182258 5182254 5182259 +
ctgaggatttttgcatcgatgt

SEQ ID NO: 76216 - DNA, 22 bp, Artificial Sequence
  Synthetic oligonucleotide; CTG chr11 5182240 5182261 5182257 5182262 +
aggatttttgcatcgatgttca

SEQ ID NO: 76217 - DNA, 22 bp, Artificial Sequence
  Synthetic oligonucleotide; TTT chr11 5182247 5182268 5182264 5182269 +
ttgcatcgatgttcatcaggga

SEQ ID NO: 76218 - DNA, 22 bp, Artificial Sequence
  Synthetic oligonucleotide; TTT chr11 5182248 5182269 5182265 5182270 +
tgcatcgatgttcatcagggat

SEQ ID NO: 76219 - DNA, 22 bp, Artificial Sequence
  Synthetic oligonucleotide; TTT chr11 5182249 5182270 5182266 5182271 +
gcatcgatgttcatcagggata

SEQ ID NO: 76220 - DNA, 22 bp, Artificial Sequence
  Synthetic oligonucleotide; TTG chr11 5182250 5182271 5182267 5182272 +
catcgatgttcatcagggatat

SEQ ID NO: 76221 - DNA, 22 bp, Artificial Sequence
  Synthetic oligonucleotide; TTC chr11 5182261 5182282 5182278 5182283 +
atcagggatattggtgtaaaat

SEQ ID NO: 76222 - DNA, 22 bp, Artificial Sequence
  Synthetic oligonucleotide; TTG chr11 5182274 5182295 5182291 5182296 +
gtgtaaaattctctttttttgt

SEQ ID NO: 76223 - DNA, 22 bp, Artificial Sequence
  Synthetic oligonucleotide; TTC chr11 5182285 5182306 5182302 5182307 +
tctttttttgttgtgtgtctgc

SEQ ID NO: 76224 - DNA, 22 bp, Artificial Sequence
  Synthetic oligonucleotide; CTC chr11 5182287 5182308 5182304 5182309 +
tttttttgttgtgtgtctgcta

SEQ ID NO: 76225 - DNA, 22 bp, Artificial Sequence
  Synthetic oligonucleotide; CTT chr11 5182289 5182310 5182306 5182311 +
tttttgttgtgtgtctgctagg

SEQ ID NO: 76226 - DNA, 22 bp, Artificial Sequence
  Synthetic oligonucleotide; TTT chr11 5182290 5182311 5182307 5182312 +
ttttgttgtgtgtctgctaggc

SEQ ID NO: 76227 - DNA, 22 bp, Artificial Sequence
  Synthetic oligonucleotide; TTT chr11 5182291 5182312 5182308 5182313 +
tttgttgtgtgtctgctaggct

SEQ ID NO: 76228 - DNA, 22 bp, Artificial Sequence
  Synthetic oligonucleotide; TTT chr11 5182292 5182313 5182309 5182314 +
ttgttgtgtgtctgctaggctt

SEQ ID NO: 76229 - DNA, 22 bp, Artificial Sequence
  Synthetic oligonucleotide; TTT chr11 5182293 5182314 5182310 5182315 +
tgttgtgtgtctgctaggcttt

SEQ ID NO: 76230 - DNA, 22 bp, Artificial Sequence
  Synthetic oligonucleotide; TTT chr11 5182294 5182315 5182311 5182316 +
gttgtgtgtctgctaggctttg

SEQ ID NO: 76231 - DNA, 22 bp, Artificial Sequence
  Synthetic oligonucleotide; TTG chr11 5182295 5182316 5182312 5182317 +
ttgtgtgtctgctaggctttgg

SEQ ID NO: 76232 - DNA, 22 bp, Artificial Sequence
  Synthetic oligonucleotide; TTG chr11 5182298 5182319 5182315 5182320 +
tgtgtctgctaggctttggtat

SEQ ID NO: 76233 - DNA, 22 bp, Artificial Sequence
  Synthetic oligonucleotide; CTG chr11 5182306 5182327 5182323 5182328 +
ctaggctttggtatcaagatga

SEQ ID NO: 76234 - DNA, 22 bp, Artificial Sequence
  Synthetic oligonucleotide; CTA chr11 5182309 5182330 5182326 5182331 +
ggctttggtatcaagatgatgc

SEQ ID NO: 76235 - DNA, 22 bp, Artificial Sequence
  Synthetic oligonucleotide; CTT chr11 5182314 5182335 5182331 5182336 +
tggtatcaagatgatgctggcc

SEQ ID NO: 76236 - DNA, 22 bp, Artificial Sequence
  Synthetic oligonucleotide; TTT chr11 5182315 5182336 5182332 5182337 +
ggtatcaagatgatgctggcct

SEQ ID NO: 76237 - DNA, 22 bp, Artificial Sequence
  Synthetic oligonucleotide; TTG chr11 5182316 5182337 5182333 5182338 +
gtatcaagatgatgctggcctc

SEQ ID NO: 76238 - DNA, 22 bp, Artificial Sequence
  Synthetic oligonucleotide; CTG chr11 5182333 5182354 5182350 5182355 +
gcctcataaaatgagttaggga

SEQ ID NO: 76239 - DNA, 22 bp, Artificial Sequence
  Synthetic oligonucleotide; CTC chr11 5182338 5182359 5182355 5182360 +
ataaaatgagttagggaggatt

SEQ ID NO: 76240 - DNA, 22 bp, Artificial Sequence
  Synthetic oligonucleotide; TTA chr11 5182351 5182372 5182368 5182373 +
gggaggattccctctttttcta

SEQ ID NO: 76241 - DNA, 22 bp, Artificial Sequence
  Synthetic oligonucleotide; TTC chr11 5182361 5182382 5182378 5182383 +
cctctttttctattgattggaa

SEQ ID NO: 76242 - DNA, 22 bp, Artificial Sequence
  Synthetic oligonucleotide; CTC chr11 5182365 5182386 5182382 5182387 +
tttttctattgattggaatagt

SEQ ID NO: 76243 - DNA, 22 bp, Artificial Sequence
  Synthetic oligonucleotide; CTT chr11 5182367 5182388 5182384 5182389 +
tttctattgattggaatagttt

SEQ ID NO: 76244 - DNA, 22 bp, Artificial Sequence
  Synthetic oligonucleotide; TTT chr11 5182368 5182389 5182385 5182390 +
ttctattgattggaatagtttc

SEQ ID NO: 76245 - DNA, 22 bp, Artificial Sequence
  Synthetic oligonucleotide; TTT chr11 5182369 5182390 5182386 5182391 +
tctattgattggaatagtttca

SEQ ID NO: 76246 - DNA, 22 bp, Artificial Sequence
  Synthetic oligonucleotide; TTT chr11 5182370 5182391 5182387 5182392 +
ctattgattggaatagtttcag

SEQ ID NO: 76247 - DNA, 22 bp, Artificial Sequence
  Synthetic oligonucleotide; TTC chr11 5182371 5182392 5182388 5182393 +
tattgattggaatagtttcaga

SEQ ID NO: 76248 - DNA, 22 bp, Artificial Sequence
  Synthetic oligonucleotide; CTA chr11 5182373 5182394 5182390 5182395 +
ttgattggaatagtttcagaag

SEQ ID NO: 76249 - DNA, 22 bp, Artificial Sequence
  Synthetic oligonucleotide; TTG chr11 5182376 5182397 5182393 5182398 +
attggaatagtttcagaaggaa

SEQ ID NO: 76250 - DNA, 22 bp, Artificial Sequence
  Synthetic oligonucleotide; TTG chr11 5182380 5182401 5182397 5182402 +
gaatagtttcagaaggaatggt

SEQ ID NO: 76251 - DNA, 22 bp, Artificial Sequence
  Synthetic oligonucleotide; TTT chr11 5182389 5182410 5182406 5182411 +
cagaaggaatggtaccagctcc

SEQ ID NO: 76252 - DNA, 22 bp, Artificial Sequence
  Synthetic oligonucleotide; TTC chr11 5182390 5182411 5182407 5182412 +
agaaggaatggtaccagctcct

SEQ ID NO: 76253 - DNA, 22 bp, Artificial Sequence
  Synthetic oligonucleotide; CTC chr11 5182410 5182431 5182427 5182432 +
ctccttgtacctctggtagaat

SEQ ID NO: 76254 - DNA, 22 bp, Artificial Sequence
  Synthetic oligonucleotide; CTC chr11 5182413 5182434 5182430 5182435 +
cttgtacctctggtagaattcg

SEQ ID NO: 76255 - DNA, 22 bp, Artificial Sequence
  Synthetic oligonucleotide; CTT chr11 5182416 5182437 5182433 5182438 +
gtacctctggtagaattcggct

SEQ ID NO: 76256 - DNA, 22 bp, Artificial Sequence
  Synthetic oligonucleotide; TTG chr11 5182417 5182438 5182434 5182439 +
tacctctggtagaattcggctg

SEQ ID NO: 76257 - DNA, 22 bp, Artificial Sequence
  Synthetic oligonucleotide; CTC chr11 5182423 5182444 5182440 5182445 +
tggtagaattcggctgtgaatc

SEQ ID NO: 76258 - DNA, 22 bp, Artificial Sequence
  Synthetic oligonucleotide; CTG chr11 5182425 5182446 5182442 5182447 +
gtagaattcggctgtgaatcca

SEQ ID NO: 76259 - DNA, 22 bp, Artificial Sequence
  Synthetic oligonucleotide; TTC chr11 5182434 5182455 5182451 5182456 +
ggctgtgaatccatctggtcct

SEQ ID NO: 76260 - DNA, 22 bp, Artificial Sequence
  Synthetic oligonucleotide; CTG chr11 5182439 5182460 5182456 5182461 +
tgaatccatctggtcctggact

SEQ ID NO: 76261 - DNA, 22 bp, Artificial Sequence
  Synthetic oligonucleotide; CTG chr11 5182451 5182472 5182468 5182473 +
gtcctggactttttttggttgg

SEQ ID NO: 76262 - DNA, 22 bp, Artificial Sequence
  Synthetic oligonucleotide; CTG chr11 5182457 5182478 5182474 5182479 +
gactttttttggttggtaagct

SEQ ID NO: 76263 - DNA, 22 bp, Artificial Sequence
  Synthetic oligonucleotide; CTT chr11 5182462 5182483 5182479 5182484 +
tttttggttggtaagcttcata

SEQ ID NO: 76264 - DNA, 22 bp, Artificial Sequence
  Synthetic oligonucleotide; TTT chr11 5182463 5182484 5182480 5182485 +
ttttggttggtaagcttcataa

SEQ ID NO: 76265 - DNA, 22 bp, Artificial Sequence
  Synthetic oligonucleotide; TTT chr11 5182464 5182485 5182481 5182486 +
tttggttggtaagcttcataag

SEQ ID NO: 76266 - DNA, 22 bp, Artificial Sequence
  Synthetic oligonucleotide; TTT chr11 5182465 5182486 5182482 5182487 +
ttggttggtaagcttcataagt

SEQ ID NO: 76267 - DNA, 22 bp, Artificial Sequence
  Synthetic oligonucleotide; TTT chr11 5182466 5182487 5182483 5182488 +
tggttggtaagcttcataagtg

SEQ ID NO: 76268 - DNA, 22 bp, Artificial Sequence
  Synthetic oligonucleotide; TTT chr11 5182467 5182488 5182484 5182489 +
ggttggtaagcttcataagtga

SEQ ID NO: 76269 - DNA, 22 bp, Artificial Sequence
  Synthetic oligonucleotide; TTG chr11 5182468 5182489 5182485 5182490 +
gttggtaagcttcataagtgaa

SEQ ID NO: 76270 - DNA, 22 bp, Artificial Sequence
  Synthetic oligonucleotide; TTG chr11 5182472 5182493 5182489 5182494 +
gtaagcttcataagtgaaggag

SEQ ID NO: 76271 - DNA, 22 bp, Artificial Sequence
  Synthetic oligonucleotide; CTT chr11 5182480 5182501 5182497 5182502 +
cataagtgaaggagaaataaaa

SEQ ID NO: 76272 - DNA, 22 bp, Artificial Sequence
  Synthetic oligonucleotide; TTC chr11 5182481 5182502 5182498 5182503 +
ataagtgaaggagaaataaaat

SEQ ID NO: 76273 - DNA, 22 bp, Artificial Sequence
  Synthetic oligonucleotide; CTT chr11 5182507 5182528 5182524 5182529 +
tacagacaagcaattgctgatt

SEQ ID NO: 76274 - DNA, 22 bp, Artificial Sequence
  Synthetic oligonucleotide; TTT chr11 5182508 5182529 5182525 5182530 +
acagacaagcaattgctgattt

SEQ ID NO: 76275 - DNA, 22 bp, Artificial Sequence
  Synthetic oligonucleotide; TTA chr11 5182509 5182530 5182526 5182531 +
cagacaagcaattgctgatttt

SEQ ID NO: 76276 - DNA, 22 bp, Artificial Sequence
  Synthetic oligonucleotide; TTG chr11 5182523 5182544 5182540 5182545 +
ctgattttgtcaccaccaggcc

SEQ ID NO: 76277 - DNA, 22 bp, Artificial Sequence
  Synthetic oligonucleotide; CTG chr11 5182526 5182547 5182543 5182548 +
attttgtcaccaccaggcctgc

SEQ ID NO: 76278 - DNA, 22 bp, Artificial Sequence
  Synthetic oligonucleotide; TTT chr11 5182530 5182551 5182547 5182552 +
tgtcaccaccaggcctgcccta

SEQ ID NO: 76279 - DNA, 22 bp, Artificial Sequence
  Synthetic oligonucleotide; TTT chr11 5182531 5182552 5182548 5182553 +
gtcaccaccaggcctgccctaa

SEQ ID NO: 76280 - DNA, 22 bp, Artificial Sequence
  Synthetic oligonucleotide; TTG chr11 5182532 5182553 5182549 5182554 +
tcaccaccaggcctgccctaaa

SEQ ID NO: 76281 - DNA, 22 bp, Artificial Sequence
  Synthetic oligonucleotide; CTG chr11 5182547 5182568 5182564 5182569 +
ccctaaaagagctcctgaagga

SEQ ID NO: 76282 - DNA, 22 bp, Artificial Sequence
  Synthetic oligonucleotide; CTA chr11 5182552 5182573 5182569 5182574 +
aaagagctcctgaaggaagcag

SEQ ID NO: 76283 - DNA, 22 bp, Artificial Sequence
  Synthetic oligonucleotide; CTC chr11 5182561 5182582 5182578 5182583 +
ctgaaggaagcagtaaacatgg

SEQ ID NO: 76284 - DNA, 22 bp, Artificial Sequence
  Synthetic oligonucleotide; CTG chr11 5182564 5182585 5182581 5182586 +
aaggaagcagtaaacatggaaa

SEQ ID NO: 76285 - DNA, 22 bp, Artificial Sequence
  Synthetic oligonucleotide; CTG chr11 5182609 5182630 5182626 5182631 +
caaaaacatgccaaattgtaaa

SEQ ID NO: 76286 - DNA, 22 bp, Artificial Sequence
  Synthetic oligonucleotide; TTG chr11 5182627 5182648 5182644 5182649 +
taaagaccatcaaggctaggga

SEQ ID NO: 76287 - DNA, 22 bp, Artificial Sequence
  Synthetic oligonucleotide; CTA chr11 5182645 5182666 5182662 5182667 +
gggagaaactgcatcaactagc

SEQ ID NO: 76288 - DNA, 22 bp, Artificial Sequence
  Synthetic oligonucleotide; CTG chr11 5182656 5182677 5182673 5182678 +
catcaactagcaagcaaaataa

SEQ ID NO: 76289 - DNA, 22 bp, Artificial Sequence
  Synthetic oligonucleotide; CTA chr11 5182665 5182686 5182682 5182687 +
gcaagcaaaataaccagctaac

SEQ ID NO: 76290 - DNA, 22 bp, Artificial Sequence
  Synthetic oligonucleotide; CTA chr11 5182685 5182706 5182702 5182707 +
acatcataatgacaggatcaaa

SEQ ID NO: 76291 - DNA, 22 bp, Artificial Sequence
  Synthetic oligonucleotide; TTC chr11 5182710 5182731 5182727 5182732 +
tcacataacaatattaacctta

SEQ ID NO: 76292 - DNA, 22 bp, Artificial Sequence
  Synthetic oligonucleotide; CTC chr11 5182712 5182733 5182729 5182734 +
acataacaatattaaccttaaa

SEQ ID NO: 76293 - DNA, 22 bp, Artificial Sequence
  Synthetic oligonucleotide; TTA chr11 5182726 5182747 5182743 5182748 +
accttaaatgtaaatgagctaa

SEQ ID NO: 76294 - DNA, 22 bp, Artificial Sequence
  Synthetic oligonucleotide; CTT chr11 5182731 5182752 5182748 5182753 +
aaatgtaaatgagctaaatgct

SEQ ID NO: 76295 - DNA, 22 bp, Artificial Sequence
  Synthetic oligonucleotide; TTA chr11 5182732 5182753 5182749 5182754 +
aatgtaaatgagctaaatgctc

SEQ ID NO: 76296 - DNA, 22 bp, Artificial Sequence
  Synthetic oligonucleotide; CTA chr11 5182747 5182768 5182764 5182769 +
aatgctccaattaaaagacaca

SEQ ID NO: 76297 - DNA, 22 bp, Artificial Sequence
  Synthetic oligonucleotide; CTC chr11 5182754 5182775 5182771 5182776 +
caattaaaagacacagactggc

SEQ ID NO: 76298 - DNA, 22 bp, Artificial Sequence
  Synthetic oligonucleotide; TTA chr11 5182760 5182781 5182777 5182782 +
aaagacacagactggcaaattg

SEQ ID NO: 76299 - DNA, 22 bp, Artificial Sequence
  Synthetic oligonucleotide; CTG chr11 5182774 5182795 5182791 5182796 +
gcaaattggataaagagtcaag

SEQ ID NO: 76300 - DNA, 22 bp, Artificial Sequence
  Synthetic oligonucleotide; TTG chr11 5182782 5182803 5182799 5182804 +
gataaagagtcaagacctatca

SEQ ID NO: 76301 - DNA, 22 bp, Artificial Sequence
  Synthetic oligonucleotide; CTA chr11 5182801 5182822 5182818 5182823 +
tcagtgtgctgtattcaggaaa

SEQ ID NO: 76302 - DNA, 22 bp, Artificial Sequence
  Synthetic oligonucleotide; CTG chr11 5182812 5182833 5182829 5182834 +
tattcaggaaaccaatctcatg

SEQ ID NO: 76303 - DNA, 22 bp, Artificial Sequence
  Synthetic oligonucleotide; TTC chr11 5182817 5182838 5182834 5182839 +
aggaaaccaatctcatgtggag

SEQ ID NO: 76304 - DNA, 22 bp, Artificial Sequence
  Synthetic oligonucleotide; CTC chr11 5182831 5182852 5182848 5182853 +
atgtggagagacacacataggc

SEQ ID NO: 76305 - DNA, 22 bp, Artificial Sequence
  Synthetic oligonucleotide; CTC chr11 5182855 5182876 5182872 5182877 +
aaaataaagggatggaggaaga

SEQ ID NO: 76306 - DNA, 22 bp, Artificial Sequence
  Synthetic oligonucleotide; CTA chr11 5182881 5182902 5182898 5182903 +
ccaagcaaatggaaaacaaaaa

SEQ ID NO: 76307 - DNA, 22 bp, Artificial Sequence
  Synthetic oligonucleotide; TTT chr11 5182916 5182937 5182933 5182938 +
gcaatcttagtctctgataaaa

SEQ ID NO: 76308 - DNA, 22 bp, Artificial Sequence
  Synthetic oligonucleotide; TTG chr11 5182917 5182938 5182934 5182939 +
caatcttagtctctgataaaac

SEQ ID NO: 76309 - DNA, 22 bp, Artificial Sequence
  Synthetic oligonucleotide; CTT chr11 5182924 5182945 5182941 5182946 +
agtctctgataaaacagacttt

SEQ ID NO: 76310 - DNA, 22 bp, Artificial Sequence
  Synthetic oligonucleotide; TTA chr11 5182925 5182946 5182942 5182947 +
gtctctgataaaacagacttta

SEQ ID NO: 76311 - DNA, 22 bp, Artificial Sequence
  Synthetic oligonucleotide; CTC chr11 5182930 5182951 5182947 5182952 +
tgataaaacagactttaaacca

SEQ ID NO: 76312 - DNA, 22 bp, Artificial Sequence
  Synthetic oligonucleotide; CTG chr11 5182932 5182953 5182949 5182954 +
ataaaacagactttaaaccaac

SEQ ID NO: 76313 - DNA, 22 bp, Artificial Sequence
  Synthetic oligonucleotide; CTT chr11 5182945 5182966 5182962 5182967 +
taaaccaacaaagatcaaaaga

SEQ ID NO: 76314 - DNA, 22 bp, Artificial Sequence
  Synthetic oligonucleotide; TTT chr11 5182946 5182967 5182963 5182968 +
aaaccaacaaagatcaaaagag

SEQ ID NO: 76315 - DNA, 22 bp, Artificial Sequence
  Synthetic oligonucleotide; TTA chr11 5182947 5182968 5182964 5182969 +
aaccaacaaagatcaaaagaga

SEQ ID NO: 76316 - DNA, 22 bp, Artificial Sequence
  Synthetic oligonucleotide; TTA chr11 5182984 5183005 5183001 5183006 +
catactggtaaagggatcaatt

SEQ ID NO: 76317 - DNA, 22 bp, Artificial Sequence
  Synthetic oligonucleotide; CTG chr11 5182991 5183012 5183008 5183013 +
gtaaagggatcaattcaacaag

SEQ ID NO: 76318 - DNA, 22 bp, Artificial Sequence
  Synthetic oligonucleotide; TTC chr11 5183007 5183028 5183024 5183029 +
aacaagaagagctaactatcct

SEQ ID NO: 76319 - DNA, 22 bp, Artificial Sequence
  Synthetic oligonucleotide; CTA chr11 5183021 5183042 5183038 5183043 +
actatcctaaatatatatgcac

SEQ ID NO: 76320 - DNA, 22 bp, Artificial Sequence
  Synthetic oligonucleotide; CTA chr11 5183025 5183046 5183042 5183047 +
tcctaaatatatatgcacccaa

SEQ ID NO: 76321 - DNA, 22 bp, Artificial Sequence
  Synthetic oligonucleotide; CTA chr11 5183030 5183051 5183047 5183052 +
aatatatatgcacccaatacag

SEQ ID NO: 76322 - DNA, 22 bp, Artificial Sequence
  Synthetic oligonucleotide; TTC chr11 5183066 5183087 5183083 5183088 +
ataaagcaagtccttagagacc

SEQ ID NO: 76323 - DNA, 22 bp, Artificial Sequence
  Synthetic oligonucleotide; CTT chr11 5183081 5183102 5183098 5183103 +
agagacctacaaagagacttag

SEQ ID NO: 76324 - DNA, 22 bp, Artificial Sequence
  Synthetic oligonucleotide; TTA chr11 5183082 5183103 5183099 5183104 +
gagacctacaaagagacttaga

SEQ ID NO: 76325 - DNA, 22 bp, Artificial Sequence
  Synthetic oligonucleotide; CTA chr11 5183090 5183111 5183107 5183112 +
caaagagacttagactcccaca

SEQ ID NO: 76326 - DNA, 22 bp, Artificial Sequence
  Synthetic oligonucleotide; CTT chr11 5183101 5183122 5183118 5183123 +
agactcccacacaataataatg

SEQ ID NO: 76327 - DNA, 22 bp, Artificial Sequence
  Synthetic oligonucleotide; TTA chr11 5183102 5183123 5183119 5183124 +
gactcccacacaataataatgg

SEQ ID NO: 76328 - DNA, 22 bp, Artificial Sequence
  Synthetic oligonucleotide; CTC chr11 5183107 5183128 5183124 5183129 +
ccacacaataataatgggagac

SEQ ID NO: 76329 - DNA, 22 bp, Artificial Sequence
  Synthetic oligonucleotide; CTT chr11 5183131 5183152 5183148 5183153 +
taacaccccactgtcaacatta

SEQ ID NO: 76330 - DNA, 22 bp, Artificial Sequence
  Synthetic oligonucleotide; TTT chr11 5183132 5183153 5183149 5183154 +
aacaccccactgtcaacattag

SEQ ID NO: 76331 - DNA, 22 bp, Artificial Sequence
  Synthetic oligonucleotide; TTA chr11 5183133 5183154 5183150 5183155 +
acaccccactgtcaacattaga

SEQ ID NO: 76332 - DNA, 22 bp, Artificial Sequence
  Synthetic oligonucleotide; CTG chr11 5183144 5183165 5183161 5183166 +
tcaacattagacagatcaacga

SEQ ID NO: 76333 - DNA, 22 bp, Artificial Sequence
  Synthetic oligonucleotide; TTA chr11 5183153 5183174 5183170 5183175 +
gacagatcaacgagacagaaag

SEQ ID NO: 76334 - DNA, 22 bp, Artificial Sequence
  Synthetic oligonucleotide; TTA chr11 5183178 5183199 5183195 5183200 +
acaaggatatccaggaattgaa

SEQ ID NO: 76335 - DNA, 22 bp, Artificial Sequence
  Synthetic oligonucleotide; TTG chr11 5183198 5183219 5183215 5183220 +
aattcagctctgcaccaagcag

SEQ ID NO: 76336 - DNA, 22 bp, Artificial Sequence
  Synthetic oligonucleotide; TTC chr11 5183203 5183224 5183220 5183225 +
agctctgcaccaagcagaccta

SEQ ID NO: 76337 - DNA, 22 bp, Artificial Sequence
  Synthetic oligonucleotide; CTC chr11 5183208 5183229 5183225 5183230 +
tgcaccaagcagacctaataga

SEQ ID NO: 76338 - DNA, 22 bp, Artificial Sequence
  Synthetic oligonucleotide; CTG chr11 5183210 5183231 5183227 5183232 +
caccaagcagacctaatagaca

SEQ ID NO: 76339 - DNA, 22 bp, Artificial Sequence
  Synthetic oligonucleotide; CTA chr11 5183225 5183246 5183242 5183247 +
atagacatctacagaactctcc

SEQ ID NO: 76340 - DNA, 22 bp, Artificial Sequence
  Synthetic oligonucleotide; CTA chr11 5183236 5183257 5183253 5183258 +
cagaactctccatcccaaatca

SEQ ID NO: 76341 - DNA, 22 bp, Artificial Sequence
  Synthetic oligonucleotide; CTC chr11 5183244 5183265 5183261 5183266 +
tccatcccaaatcaatagaata

SEQ ID NO: 76342 - DNA, 22 bp, Artificial Sequence
  Synthetic oligonucleotide; CTC chr11 5183246 5183267 5183263 5183268 +
catcccaaatcaatagaatata

SEQ ID NO: 76343 - DNA, 22 bp, Artificial Sequence
  Synthetic oligonucleotide; TTC chr11 5183273 5183294 5183290 5183295 +
ttctcagcaccacaccacacct

SEQ ID NO: 76344 - DNA, 22 bp, Artificial Sequence
  Synthetic oligonucleotide; CTT chr11 5183275 5183296 5183292 5183297 +
ctcagcaccacaccacacctat

SEQ ID NO: 76345 - DNA, 22 bp, Artificial Sequence
  Synthetic oligonucleotide; TTC chr11 5183276 5183297 5183293 5183298 +
tcagcaccacaccacacctatt

SEQ ID NO: 76346 - DNA, 22 bp, Artificial Sequence
  Synthetic oligonucleotide; CTC chr11 5183278 5183299 5183295 5183300 +
agcaccacaccacacctattcc

SEQ ID NO: 76347 - DNA, 22 bp, Artificial Sequence
  Synthetic oligonucleotide; CTA chr11 5183296 5183317 5183313 5183318 +
ttccagttgaccacatagttgg

SEQ ID NO: 76348 - DNA, 22 bp, Artificial Sequence
  Synthetic oligonucleotide; TTC chr11 5183299 5183320 5183316 5183321 +
cagttgaccacatagttggaag

SEQ ID NO: 76349 - DNA, 22 bp, Artificial Sequence
  Synthetic oligonucleotide; TTG chr11 5183305 5183326 5183322 5183327 +
accacatagttggaagtgaagc

SEQ ID NO: 76350 - DNA, 22 bp, Artificial Sequence
  Synthetic oligonucleotide; TTG chr11 5183317 5183338 5183334 5183339 +
gaagtgaagcactcctcagcaa

SEQ ID NO: 76351 - DNA, 22 bp, Artificial Sequence
  Synthetic oligonucleotide; CTC chr11 5183331 5183352 5183348 5183353 +
ctcagcaaacgtaaaagaacag

SEQ ID NO: 76352 - DNA, 22 bp, Artificial Sequence
  Synthetic oligonucleotide; CTC chr11 5183334 5183355 5183351 5183356 +
agcaaacgtaaaagaacagaaa

SEQ ID NO: 76353 - DNA, 22 bp, Artificial Sequence
  Synthetic oligonucleotide; CTG chr11 5183369 5183390 5183386 5183391 +
tctctcagaccacagtgcaatc

SEQ ID NO: 76354 - DNA, 22 bp, Artificial Sequence
  Synthetic oligonucleotide; CTC chr11 5183373 5183394 5183390 5183395 +
tcagaccacagtgcaatcaaac

SEQ ID NO: 76355 - DNA, 22 bp, Artificial Sequence
  Synthetic oligonucleotide; CTC chr11 5183375 5183396 5183392 5183397 +
agaccacagtgcaatcaaacta

SEQ ID NO: 76356 - DNA, 22 bp, Artificial Sequence
  Synthetic oligonucleotide; CTA chr11 5183397 5183418 5183414 5183419 +
gaactcaggattaagaaactca

SEQ ID NO: 76357 - DNA, 22 bp, Artificial Sequence
  Synthetic oligonucleotide; CTC chr11 5183403 5183424 5183420 5183425 +
aggattaagaaactcactcaaa

SEQ ID NO: 76358 - DNA, 22 bp, Artificial Sequence
  Synthetic oligonucleotide; TTA chr11 5183410 5183431 5183427 5183432 +
agaaactcactcaaaaccactc

SEQ ID NO: 76359 - DNA, 22 bp, Artificial Sequence
  Synthetic oligonucleotide; CTC chr11 5183418 5183439 5183435 5183440 +
actcaaaaccactcaactacat

SEQ ID NO: 76360 - DNA, 22 bp, Artificial Sequence
  Synthetic oligonucleotide; CTC chr11 5183422 5183443 5183439 5183444 +
aaaaccactcaactacatggaa

SEQ ID NO: 76361 - DNA, 22 bp, Artificial Sequence
  Synthetic oligonucleotide; CTC chr11 5183432 5183453 5183449 5183454 +
aactacatggaaactgaacagc

SEQ ID NO: 76362 - DNA, 22 bp, Artificial Sequence
  Synthetic oligonucleotide; CTA chr11 5183437 5183458 5183454 5183459 +
catggaaactgaacagcctgct

SEQ ID NO: 76363 - DNA, 22 bp, Artificial Sequence
  Synthetic oligonucleotide; CTG chr11 5183448 5183469 5183465 5183470 +
aacagcctgctcctgaatgact

SEQ ID NO: 76364 - DNA, 22 bp, Artificial Sequence
  Synthetic oligonucleotide; CTG chr11 5183457 5183478 5183474 5183479 +
ctcctgaatgactactgggtac

SEQ ID NO: 76365 - DNA, 22 bp, Artificial Sequence
  Synthetic oligonucleotide; CTC chr11 5183460 5183481 5183477 5183482 +
ctgaatgactactgggtacata

SEQ ID NO: 76366 - DNA, 22 bp, Artificial Sequence
  Synthetic oligonucleotide; CTG chr11 5183463 5183484 5183480 5183485 +
aatgactactgggtacataaca

SEQ ID NO: 76367 - DNA, 22 bp, Artificial Sequence
  Synthetic oligonucleotide; CTA chr11 5183471 5183492 5183488 5183493 +
ctgggtacataacaaaatgaag

SEQ ID NO: 76368 - DNA, 22 bp, Artificial Sequence
  Synthetic oligonucleotide; CTG chr11 5183474 5183495 5183491 5183496 +
ggtacataacaaaatgaaggca

SEQ ID NO: 76369 - DNA, 22 bp, Artificial Sequence
  Synthetic oligonucleotide; TTC chr11 5183511 5183532 5183528 5183533 +
tttgaaaccaacgagaataaag

SEQ ID NO: 76370 - DNA, 22 bp, Artificial Sequence
  Synthetic oligonucleotide; CTT chr11 5183513 5183534 5183530 5183535 +
tgaaaccaacgagaataaagat

SEQ ID NO: 76371 - DNA, 22 bp, Artificial Sequence
  Synthetic oligonucleotide; TTT chr11 5183514 5183535 5183531 5183536 +
gaaaccaacgagaataaagata

SEQ ID NO: 76372 - DNA, 22 bp, Artificial Sequence
  Synthetic oligonucleotide; TTG chr11 5183515 5183536 5183532 5183537 +
aaaccaacgagaataaagatac

SEQ ID NO: 76373 - DNA, 22 bp, Artificial Sequence
  Synthetic oligonucleotide; CTC chr11 5183553 5183574 5183570 5183575 +
tgggacacatttaaagcagtgt

SEQ ID NO: 76374 - DNA, 22 bp, Artificial Sequence
  Synthetic oligonucleotide; CTG chr11 5183555 5183576 5183572 5183577 +
ggacacatttaaagcagtgtgt

SEQ ID NO: 76375 - DNA, 22 bp, Artificial Sequence
  Synthetic oligonucleotide; TTT chr11 5183565 5183586 5183582 5183587 +
aaagcagtgtgtagagggaaat

SEQ ID NO: 76376 - DNA, 22 bp, Artificial Sequence
  Synthetic oligonucleotide; TTA chr11 5183566 5183587 5183583 5183588 +
aagcagtgtgtagagggaaatt

SEQ ID NO: 76377 - DNA, 22 bp, Artificial Sequence
  Synthetic oligonucleotide; TTT chr11 5183589 5183610 5183606 5183611 +
atagcactaaatgcccacaaaa

SEQ ID NO: 76378 - DNA, 22 bp, Artificial Sequence
  Synthetic oligonucleotide; TTA chr11 5183590 5183611 5183607 5183612 +
tagcactaaatgcccacaaaag

SEQ ID NO: 76379 - DNA, 22 bp, Artificial Sequence
  Synthetic oligonucleotide; CTA chr11 5183598 5183619 5183615 5183620 +
aatgcccacaaaagaaagcagg

SEQ ID NO: 76380 - DNA, 22 bp, Artificial Sequence
  Synthetic oligonucleotide; CTA chr11 5183629 5183650 5183646 5183651 +
aaattgacaccctaacatcaca

SEQ ID NO: 76381 - DNA, 22 bp, Artificial Sequence
  Synthetic oligonucleotide; TTG chr11 5183635 5183656 5183652 5183657 +
acaccctaacatcacaattaaa

SEQ ID NO: 76382 - DNA, 22 bp, Artificial Sequence
  Synthetic oligonucleotide; CTA chr11 5183643 5183664 5183660 5183665 +
acatcacaattaaaagaactag

SEQ ID NO: 76383 - DNA, 22 bp, Artificial Sequence
  Synthetic oligonucleotide; TTA chr11 5183655 5183676 5183672 5183677 +
aaagaactagagaagcaagagc

SEQ ID NO: 76384 - DNA, 22 bp, Artificial Sequence
  Synthetic oligonucleotide; CTA chr11 5183664 5183685 5183681 5183686 +
gagaagcaagagcaaacacttt

SEQ ID NO: 76385 - DNA, 22 bp, Artificial Sequence
  Synthetic oligonucleotide; CTT chr11 5183685 5183706 5183702 5183707 +
tcaaaagctagcggaaggcaag

SEQ ID NO: 76386 - DNA, 22 bp, Artificial Sequence
  Synthetic oligonucleotide; TTT chr11 5183686 5183707 5183703 5183708 +
caaaagctagcggaaggcaaga

SEQ ID NO: 76387 - DNA, 22 bp, Artificial Sequence
  Synthetic oligonucleotide; TTC chr11 5183687 5183708 5183704 5183709 +
aaaagctagcggaaggcaagaa

SEQ ID NO: 76388 - DNA, 22 bp, Artificial Sequence
  Synthetic oligonucleotide; CTA chr11 5183695 5183716 5183712 5183717 +
gcggaaggcaagaaataagtaa

SEQ ID NO: 76389 - DNA, 22 bp, Artificial Sequence
  Synthetic oligonucleotide; TTG chr11 5183743 5183764 5183760 5183765 +
agacacaaaaaacccttaaaaa

SEQ ID NO: 76390 - DNA, 22 bp, Artificial Sequence
  Synthetic oligonucleotide; CTT chr11 5183760 5183781 5183777 5183782 +
aaaaaaatcaatgaatccagga

SEQ ID NO: 76391 - DNA, 22 bp, Artificial Sequence
  Synthetic oligonucleotide; TTA chr11 5183761 5183782 5183778 5183783 +
aaaaaatcaatgaatccaggag

SEQ ID NO: 76392 - DNA, 22 bp, Artificial Sequence
  Synthetic oligonucleotide; CTG chr11 5183786 5183807 5183803 5183808 +
gttttttgaaaagatcaacaaa

SEQ ID NO: 76393 - DNA, 22 bp, Artificial Sequence
  Synthetic oligonucleotide; TTT chr11 5183790 5183811 5183807 5183812 +
tttgaaaagatcaacaaaattg

SEQ ID NO: 76394 - DNA, 22 bp, Artificial Sequence
  Synthetic oligonucleotide; TTT chr11 5183791 5183812 5183808 5183813 +
ttgaaaagatcaacaaaattga

SEQ ID NO: 76395 - DNA, 22 bp, Artificial Sequence
  Synthetic oligonucleotide; TTT chr11 5183792 5183813 5183809 5183814 +
tgaaaagatcaacaaaattgat

SEQ ID NO: 76396 - DNA, 22 bp, Artificial Sequence
  Synthetic oligonucleotide; TTT chr11 5183793 5183814 5183810 5183815 +
gaaaagatcaacaaaattgata

SEQ ID NO: 76397 - DNA, 22 bp, Artificial Sequence
  Synthetic oligonucleotide; TTG chr11 5183794 5183815 5183811 5183816 +
aaaagatcaacaaaattgatag

SEQ ID NO: 76398 - DNA, 22 bp, Artificial Sequence
  Synthetic oligonucleotide; TTG chr11 5183812 5183833 5183829 5183834 +
atagactgctagcaagactaat

SEQ ID NO: 76399 - DNA, 22 bp, Artificial Sequence
  Synthetic oligonucleotide; CTG chr11 5183820 5183841 5183837 5183842 +
ctagcaagactaataaagaaga

SEQ ID NO: 76400 - DNA, 22 bp, Artificial Sequence
  Synthetic oligonucleotide; CTA chr11 5183823 5183844 5183840 5183845 +
gcaagactaataaagaagaaaa

SEQ ID NO: 76401 - DNA, 22 bp, Artificial Sequence
  Synthetic oligonucleotide; CTA chr11 5183832 5183853 5183849 5183854 +
ataaagaagaaaagagagaaga

SEQ ID NO: 76402 - DNA, 22 bp, Artificial Sequence
  Synthetic oligonucleotide; CTC chr11 5183857 5183878 5183874 5183879 +
aaatagatgcaataagaaatga

SEQ ID NO: 76403 - DNA, 22 bp, Artificial Sequence
  Synthetic oligonucleotide; CTA chr11 5183920 5183941 5183937 5183942 +
ccatcagagaatactataaaca

SEQ ID NO: 76404 - DNA, 22 bp, Artificial Sequence
  Synthetic oligonucleotide; CTA chr11 5183936 5183957 5183953 5183958 +
taaacacctctacgcaaataaa

SEQ ID NO: 76405 - DNA, 22 bp, Artificial Sequence
  Synthetic oligonucleotide; CTC chr11 5183946 5183967 5183963 5183968 +
tacgcaaataaactagaaaatc

SEQ ID NO: 76406 - DNA, 22 bp, Artificial Sequence
  Synthetic oligonucleotide; CTA chr11 5183948 5183969 5183965 5183970 +
cgcaaataaactagaaaatcta

SEQ ID NO: 76407 - DNA, 22 bp, Artificial Sequence
  Synthetic oligonucleotide; CTA chr11 5183961 5183982 5183978 5183983 +
gaaaatctagtagaaatggata

SEQ ID NO: 76408 - DNA, 22 bp, Artificial Sequence
  Synthetic oligonucleotide; CTA chr11 5183970 5183991 5183987 5183992 +
gtagaaatggataaattcctcg

SEQ ID NO: 76409 - DNA, 22 bp, Artificial Sequence
  Synthetic oligonucleotide; TTC chr11 5183988 5184009 5184005 5184010 +
ctcgacacatacaccctcccaa

SEQ ID NO: 76410 - DNA, 22 bp, Artificial Sequence
  Synthetic oligonucleotide; CTC chr11 5183991 5184012 5184008 5184013 +
gacacatacaccctcccaagac

SEQ ID NO: 76411 - DNA, 22 bp, Artificial Sequence
  Synthetic oligonucleotide; CTC chr11 5184006 5184027 5184023 5184028 +
ccaagactaaaccagggagaaa

SEQ ID NO: 76412 - DNA, 22 bp, Artificial Sequence
  Synthetic oligonucleotide; CTA chr11 5184015 5184036 5184032 5184037 +
aaccagggagaaattgaatctc

SEQ ID NO: 76413 - DNA, 22 bp, Artificial Sequence
  Synthetic oligonucleotide; TTG chr11 5184031 5184052 5184048 5184053 +
aatctcttaatagacaaataat

SEQ ID NO: 76414 - DNA, 22 bp, Artificial Sequence
  Synthetic oligonucleotide; CTC chr11 5184037 5184058 5184054 5184059 +
ttaatagacaaataataggctc

SEQ ID NO: 76415 - DNA, 22 bp, Artificial Sequence
  Synthetic oligonucleotide; CTT chr11 5184039 5184060 5184056 5184061 +
aatagacaaataataggctctg

SEQ ID NO: 76416 - DNA, 22 bp, Artificial Sequence
  Synthetic oligonucleotide; TTA chr11 5184040 5184061 5184057 5184062 +
atagacaaataataggctctga

SEQ ID NO: 76417 - DNA, 22 bp, Artificial Sequence
  Synthetic oligonucleotide; CTC chr11 5184059 5184080 5184076 5184081 +
tgaaattgagacaataattaat

SEQ ID NO: 76418 - DNA, 22 bp, Artificial Sequence
  Synthetic oligonucleotide; CTG chr11 5184061 5184082 5184078 5184083 +
aaattgagacaataattaatag

SEQ ID NO: 76419 - DNA, 22 bp, Artificial Sequence
  Synthetic oligonucleotide; TTG chr11 5184067 5184088 5184084 5184089 +
agacaataattaatagtttaca

SEQ ID NO: 76420 - DNA, 22 bp, Artificial Sequence
  Synthetic oligonucleotide; TTA chr11 5184079 5184100 5184096 5184101 +
atagtttacacattgtatatct

SEQ ID NO: 76421 - DNA, 22 bp, Artificial Sequence
  Synthetic oligonucleotide; TTT chr11 5184086 5184107 5184103 5184108 +
acacattgtatatctaagtacc

SEQ ID NO: 76422 - DNA, 22 bp, Artificial Sequence
  Synthetic oligonucleotide; TTA chr11 5184087 5184108 5184104 5184109 +
cacattgtatatctaagtacca

SEQ ID NO: 76423 - DNA, 22 bp, Artificial Sequence
  Synthetic oligonucleotide; TTG chr11 5184094 5184115 5184111 5184116 +
tatatctaagtaccaccacagc

SEQ ID NO: 76424 - DNA, 22 bp, Artificial Sequence
  Synthetic oligonucleotide; CTA chr11 5184102 5184123 5184119 5184124 +
agtaccaccacagcagcaagta

SEQ ID NO: 76425 - DNA, 22 bp, Artificial Sequence
  Synthetic oligonucleotide; TTT chr11 5184128 5184149 5184145 5184150 +
aatgttttcacattataaaaca

SEQ ID NO: 76426 - DNA, 22 bp, Artificial Sequence
  Synthetic oligonucleotide; TTA chr11 5184129 5184150 5184146 5184151 +
atgttttcacattataaaacag

SEQ ID NO: 76427 - DNA, 22 bp, Artificial Sequence
  Synthetic oligonucleotide; TTT chr11 5184135 5184156 5184152 5184157 +
tcacattataaaacaggagtct

SEQ ID NO: 76428 - DNA, 22 bp, Artificial Sequence
  Synthetic oligonucleotide; TTT chr11 5184136 5184157 5184153 5184158 +
cacattataaaacaggagtcta

SEQ ID NO: 76429 - DNA, 22 bp, Artificial Sequence
  Synthetic oligonucleotide; TTC chr11 5184137 5184158 5184154 5184159 +
acattataaaacaggagtctat

SEQ ID NO: 76430 - DNA, 22 bp, Artificial Sequence
  Synthetic oligonucleotide; TTA chr11 5184143 5184164 5184160 5184165 +
taaaacaggagtctatattact

SEQ ID NO: 76431 - DNA, 22 bp, Artificial Sequence
  Synthetic oligonucleotide; CTA chr11 5184158 5184179 5184175 5184180 +
tattacttcaatatattacttg

SEQ ID NO: 76432 - DNA, 22 bp, Artificial Sequence
  Synthetic oligonucleotide; TTA chr11 5184163 5184184 5184180 5184185 +
cttcaatatattacttgttatt

SEQ ID NO: 76433 - DNA, 22 bp, Artificial Sequence
  Synthetic oligonucleotide; CTT chr11 5184166 5184187 5184183 5184188 +
caatatattacttgttattact

SEQ ID NO: 76434 - DNA, 22 bp, Artificial Sequence
  Synthetic oligonucleotide; TTC chr11 5184167 5184188 5184184 5184189 +
aatatattacttgttattacta

SEQ ID NO: 76435 - DNA, 22 bp, Artificial Sequence
  Synthetic oligonucleotide; TTA chr11 5184176 5184197 5184193 5184198 +
cttgttattactaattactagt

SEQ ID NO: 76436 - DNA, 22 bp, Artificial Sequence
  Synthetic oligonucleotide; CTT chr11 5184179 5184200 5184196 5184201 +
gttattactaattactagttct

SEQ ID NO: 76437 - DNA, 22 bp, Artificial Sequence
  Synthetic oligonucleotide; TTG chr11 5184180 5184201 5184197 5184202 +
ttattactaattactagttcta

SEQ ID NO: 76438 - DNA, 22 bp, Artificial Sequence
  Synthetic oligonucleotide; TTA chr11 5184183 5184204 5184200 5184205 +
ttactaattactagttctaaaa

SEQ ID NO: 76439 - DNA, 22 bp, Artificial Sequence
  Synthetic oligonucleotide; TTA chr11 5184186 5184207 5184203 5184208 +
ctaattactagttctaaaaaat

SEQ ID NO: 76440 - DNA, 22 bp, Artificial Sequence
  Synthetic oligonucleotide; CTA chr11 5184189 5184210 5184206 5184211 +
attactagttctaaaaaatgtg

SEQ ID NO: 76441 - DNA, 22 bp, Artificial Sequence
  Synthetic oligonucleotide; TTA chr11 5184193 5184214 5184210 5184215 +
ctagttctaaaaaatgtggata

SEQ ID NO: 76442 - DNA, 22 bp, Artificial Sequence
  Synthetic oligonucleotide; CTA chr11 5184196 5184217 5184213 5184218 +
gttctaaaaaatgtggatagaa

SEQ ID NO: 76443 - DNA, 22 bp, Artificial Sequence
  Synthetic oligonucleotide; TTC chr11 5184200 5184221 5184217 5184222 +
taaaaaatgtggatagaagcaa

SEQ ID NO: 76444 - DNA, 22 bp, Artificial Sequence
  Synthetic oligonucleotide; CTA chr11 5184202 5184223 5184219 5184224 +
aaaaatgtggatagaagcaagt

SEQ ID NO: 76445 - DNA, 22 bp, Artificial Sequence
  Synthetic oligonucleotide; TTT chr11 5184226 5184247 5184243 5184248 +
aatattgagtggaaaataagat

SEQ ID NO: 76446 - DNA, 22 bp, Artificial Sequence
  Synthetic oligonucleotide; TTA chr11 5184227 5184248 5184244 5184249 +
atattgagtggaaaataagatt

SEQ ID NO: 76447 - DNA, 22 bp, Artificial Sequence
  Synthetic oligonucleotide; TTG chr11 5184233 5184254 5184250 5184255 +
agtggaaaataagattaggaga

SEQ ID NO: 76448 - DNA, 22 bp, Artificial Sequence
  Synthetic oligonucleotide; TTA chr11 5184250 5184271 5184267 5184272 +
ggagatgcaacaccagggtagg

SEQ ID NO: 76449 - DNA, 22 bp, Artificial Sequence
  Synthetic oligonucleotide; TTA chr11 5184294 5184315 5184311 5184316 +
gataggtagatagctagctagc

SEQ ID NO: 76450 - DNA, 22 bp, Artificial Sequence
  Synthetic oligonucleotide; CTA chr11 5184310 5184331 5184327 5184332 +
gctagctagctagctagctagc

SEQ ID NO: 76451 - DNA, 22 bp, Artificial Sequence
  Synthetic oligonucleotide; CTA chr11 5184314 5184335 5184331 5184336 +
gctagctagctagctagctaga

SEQ ID NO: 76452 - DNA, 22 bp, Artificial Sequence
  Synthetic oligonucleotide; CTA chr11 5184318 5184339 5184335 5184340 +
gctagctagctagctagaaaga

SEQ ID NO: 76453 - DNA, 22 bp, Artificial Sequence
  Synthetic oligonucleotide; CTA chr11 5184322 5184343 5184339 5184344 +
gctagctagctagaaagataga

SEQ ID NO: 76454 - DNA, 22 bp, Artificial Sequence
  Synthetic oligonucleotide; CTA chr11 5184326 5184347 5184343 5184348 +
gctagctagaaagatagataga

SEQ ID NO: 76455 - DNA, 22 bp, Artificial Sequence
  Synthetic oligonucleotide; CTA chr11 5184330 5184351 5184347 5184352 +
gctagaaagatagatagataga

SEQ ID NO: 76456 - DNA, 22 bp, Artificial Sequence
  Synthetic oligonucleotide; CTA chr11 5184334 5184355 5184351 5184356 +
gaaagatagatagatagataga

SEQ ID NO: 76457 - DNA, 22 bp, Artificial Sequence
  Synthetic oligonucleotide; CTT chr11 5184435 5184456 5184452 5184457 +
ctatactctctaagttcccttt

SEQ ID NO: 76458 - DNA, 22 bp, Artificial Sequence
  Synthetic oligonucleotide; TTC chr11 5184436 5184457 5184453 5184458 +
tatactctctaagttccctttc

SEQ ID NO: 76459 - DNA, 22 bp, Artificial Sequence
  Synthetic oligonucleotide; CTA chr11 5184438 5184459 5184455 5184460 +
tactctctaagttccctttctc

SEQ ID NO: 76460 - DNA, 22 bp, Artificial Sequence
  Synthetic oligonucleotide; CTC chr11 5184443 5184464 5184460 5184465 +
tctaagttccctttctcaagta

SEQ ID NO: 76461 - DNA, 22 bp, Artificial Sequence
  Synthetic oligonucleotide; CTC chr11 5184445 5184466 5184462 5184467 +
taagttccctttctcaagtaaa

SEQ ID NO: 76462 - DNA, 22 bp, Artificial Sequence
  Synthetic oligonucleotide; CTA chr11 5184447 5184468 5184464 5184469 +
agttccctttctcaagtaaaag

SEQ ID NO: 76463 - DNA, 22 bp, Artificial Sequence
  Synthetic oligonucleotide; TTC chr11 5184452 5184473 5184469 5184474 +
cctttctcaagtaaaagctggc

SEQ ID NO: 76464 - DNA, 22 bp, Artificial Sequence
  Synthetic oligonucleotide; CTT chr11 5184456 5184477 5184473 5184478 +
tctcaagtaaaagctggctaaa

SEQ ID NO: 76465 - DNA, 22 bp, Artificial Sequence
  Synthetic oligonucleotide; TTT chr11 5184457 5184478 5184474 5184479 +
ctcaagtaaaagctggctaaag

SEQ ID NO: 76466 - DNA, 22 bp, Artificial Sequence
  Synthetic oligonucleotide; TTC chr11 5184458 5184479 5184475 5184480 +
tcaagtaaaagctggctaaagt

SEQ ID NO: 76467 - DNA, 22 bp, Artificial Sequence
  Synthetic oligonucleotide; CTC chr11 5184460 5184481 5184477 5184482 +
aagtaaaagctggctaaagttc

SEQ ID NO: 76468 - DNA, 22 bp, Artificial Sequence
  Synthetic oligonucleotide; CTG chr11 5184472 5184493 5184489 5184494 +
gctaaagttcttgttttttgag

SEQ ID NO: 76469 - DNA, 22 bp, Artificial Sequence
  Synthetic oligonucleotide; CTA chr11 5184476 5184497 5184493 5184498 +
aagttcttgttttttgaggtgg

SEQ ID NO: 76470 - DNA, 22 bp, Artificial Sequence
  Synthetic oligonucleotide; TTC chr11 5184482 5184503 5184499 5184504 +
ttgttttttgaggtggcacagg

SEQ ID NO: 76471 - DNA, 22 bp, Artificial Sequence
  Synthetic oligonucleotide; CTT chr11 5184484 5184505 5184501 5184506 +
gttttttgaggtggcacagggg

SEQ ID NO: 76472 - DNA, 22 bp, Artificial Sequence
  Synthetic oligonucleotide; TTG chr11 5184485 5184506 5184502 5184507 +
ttttttgaggtggcacaggggc

SEQ ID NO: 76473 - DNA, 22 bp, Artificial Sequence
  Synthetic oligonucleotide; TTT chr11 5184488 5184509 5184505 5184510 +
tttgaggtggcacaggggctta

SEQ ID NO: 76474 - DNA, 22 bp, Artificial Sequence
  Synthetic oligonucleotide; TTT chr11 5184489 5184510 5184506 5184511 +
ttgaggtggcacaggggcttaa

SEQ ID NO: 76475 - DNA, 22 bp, Artificial Sequence
  Synthetic oligonucleotide; TTT chr11 5184490 5184511 5184507 5184512 +
tgaggtggcacaggggcttaag

SEQ ID NO: 76476 - DNA, 22 bp, Artificial Sequence
  Synthetic oligonucleotide; TTT chr11 5184491 5184512 5184508 5184513 +
gaggtggcacaggggcttaaga

SEQ ID NO: 76477 - DNA, 22 bp, Artificial Sequence
  Synthetic oligonucleotide; TTG chr11 5184492 5184513 5184509 5184514 +
aggtggcacaggggcttaagaa

SEQ ID NO: 76478 - DNA, 22 bp, Artificial Sequence
  Synthetic oligonucleotide; CTT chr11 5184509 5184530 5184526 5184531 +
aagaaatgactgctcccccatc

SEQ ID NO: 76479 - DNA, 22 bp, Artificial Sequence
  Synthetic oligonucleotide; TTA chr11 5184510 5184531 5184527 5184532 +
agaaatgactgctcccccatct

SEQ ID NO: 76480 - DNA, 22 bp, Artificial Sequence
  Synthetic oligonucleotide; CTG chr11 5184521 5184542 5184538 5184543 +
ctcccccatctcttgattccat

SEQ ID NO: 76481 - DNA, 22 bp, Artificial Sequence
  Synthetic oligonucleotide; CTC chr11 5184524 5184545 5184541 5184546 +
ccccatctcttgattccattac

SEQ ID NO: 76482 - DNA, 22 bp, Artificial Sequence
  Synthetic oligonucleotide; CTC chr11 5184533 5184554 5184550 5184555 +
ttgattccattacagttcaata

SEQ ID NO: 76483 - DNA, 22 bp, Artificial Sequence
  Synthetic oligonucleotide; CTT chr11 5184535 5184556 5184552 5184557 +
gattccattacagttcaatata

SEQ ID NO: 76484 - DNA, 22 bp, Artificial Sequence
  Synthetic oligonucleotide; TTG chr11 5184536 5184557 5184553 5184558 +
attccattacagttcaatatac

SEQ ID NO: 76485 - DNA, 22 bp, Artificial Sequence
  Synthetic oligonucleotide; TTC chr11 5184540 5184561 5184557 5184562 +
cattacagttcaatatactgat

SEQ ID NO: 76486 - DNA, 22 bp, Artificial Sequence
  Synthetic oligonucleotide; TTA chr11 5184545 5184566 5184562 5184567 +
cagttcaatatactgatcattg

SEQ ID NO: 76487 - DNA, 22 bp, Artificial Sequence
  Synthetic oligonucleotide; TTC chr11 5184551 5184572 5184568 5184573 +
aatatactgatcattgtatagc

SEQ ID NO: 76488 - DNA, 22 bp, Artificial Sequence
  Synthetic oligonucleotide; CTG chr11 5184560 5184581 5184577 5184582 +
atcattgtatagcatagtctgc

SEQ ID NO: 76489 - DNA, 22 bp, Artificial Sequence
  Synthetic oligonucleotide; TTG chr11 5184567 5184588 5184584 5184589 +
tatagcatagtctgctaccttt

SEQ ID NO: 76490 - DNA, 22 bp, Artificial Sequence
  Synthetic oligonucleotide; CTG chr11 5184581 5184602 5184598 5184603 +
ctacctttacttttgtttttgc

SEQ ID NO: 76491 - DNA, 22 bp, Artificial Sequence
  Synthetic oligonucleotide; CTA chr11 5184584 5184605 5184601 5184606 +
cctttacttttgtttttgctaa

SEQ ID NO: 76492 - DNA, 22 bp, Artificial Sequence
  Synthetic oligonucleotide; CTT chr11 5184588 5184609 5184605 5184610 +
tacttttgtttttgctaagtgc

SEQ ID NO: 76493 - DNA, 22 bp, Artificial Sequence
  Synthetic oligonucleotide; TTT chr11 5184589 5184610 5184606 5184611 +
acttttgtttttgctaagtgct

SEQ ID NO: 76494 - DNA, 22 bp, Artificial Sequence
  Synthetic oligonucleotide; TTA chr11 5184590 5184611 5184607 5184612 +
cttttgtttttgctaagtgcta

SEQ ID NO: 76495 - DNA, 22 bp, Artificial Sequence
  Synthetic oligonucleotide; CTT chr11 5184593 5184614 5184610 5184615 +
ttgtttttgctaagtgctaaat

SEQ ID NO: 76496 - DNA, 22 bp, Artificial Sequence
  Synthetic oligonucleotide; TTT chr11 5184594 5184615 5184611 5184616 +
tgtttttgctaagtgctaaata

SEQ ID NO: 76497 - DNA, 22 bp, Artificial Sequence
  Synthetic oligonucleotide; TTT chr11 5184595 5184616 5184612 5184617 +
gtttttgctaagtgctaaatat

SEQ ID NO: 76498 - DNA, 22 bp, Artificial Sequence
  Synthetic oligonucleotide; TTG chr11 5184596 5184617 5184613 5184618 +
tttttgctaagtgctaaatatt

SEQ ID NO: 76499 - DNA, 22 bp, Artificial Sequence
  Synthetic oligonucleotide; TTT chr11 5184599 5184620 5184616 5184621 +
ttgctaagtgctaaatattctg

SEQ ID NO: 76500 - DNA, 22 bp, Artificial Sequence
  Synthetic oligonucleotide; TTT chr11 5184600 5184621 5184617 5184622 +
tgctaagtgctaaatattctgg

SEQ ID NO: 76501 - DNA, 22 bp, Artificial Sequence
  Synthetic oligonucleotide; TTT chr11 5184601 5184622 5184618 5184623 +
gctaagtgctaaatattctggt

SEQ ID NO: 76502 - DNA, 22 bp, Artificial Sequence
  Synthetic oligonucleotide; TTG chr11 5184602 5184623 5184619 5184624 +
ctaagtgctaaatattctggtc

SEQ ID NO: 76503 - DNA, 22 bp, Artificial Sequence
  Synthetic oligonucleotide; CTA chr11 5184605 5184626 5184622 5184627 +
agtgctaaatattctggtctca

SEQ ID NO: 76504 - DNA, 22 bp, Artificial Sequence
  Synthetic oligonucleotide; CTA chr11 5184612 5184633 5184629 5184634 +
aatattctggtctcaaatttta

SEQ ID NO: 76505 - DNA, 22 bp, Artificial Sequence
  Synthetic oligonucleotide; TTC chr11 5184619 5184640 5184636 5184641 +
tggtctcaaattttatatgatg

SEQ ID NO: 76506 - DNA, 22 bp, Artificial Sequence
  Synthetic oligonucleotide; CTG chr11 5184621 5184642 5184638 5184643 +
gtctcaaattttatatgatgga

SEQ ID NO: 76507 - DNA, 22 bp, Artificial Sequence
  Synthetic oligonucleotide; CTC chr11 5184626 5184647 5184643 5184648 +
aaattttatatgatggaaatgt

SEQ ID NO: 76508 - DNA, 22 bp, Artificial Sequence
  Synthetic oligonucleotide; TTT chr11 5184632 5184653 5184649 5184654 +
tatatgatggaaatgtttgggt

SEQ ID NO: 76509 - DNA, 22 bp, Artificial Sequence
  Synthetic oligonucleotide; TTT chr11 5184633 5184654 5184650 5184655 +
atatgatggaaatgtttgggtc

SEQ ID NO: 76510 - DNA, 22 bp, Artificial Sequence
  Synthetic oligonucleotide; TTA chr11 5184634 5184655 5184651 5184656 +
tatgatggaaatgtttgggtcc

SEQ ID NO: 76511 - DNA, 22 bp, Artificial Sequence
  Synthetic oligonucleotide; TTT chr11 5184650 5184671 5184667 5184672 +
gggtcccattttttgagttaca

SEQ ID NO: 76512 - DNA, 22 bp, Artificial Sequence
  Synthetic oligonucleotide; TTG chr11 5184651 5184672 5184668 5184673 +
ggtcccattttttgagttacag

SEQ ID NO: 76513 - DNA, 22 bp, Artificial Sequence
  Synthetic oligonucleotide; TTT chr11 5184661 5184682 5184678 5184683 +
tttgagttacagtttagaattt

SEQ ID NO: 76514 - DNA, 22 bp, Artificial Sequence
  Synthetic oligonucleotide; TTT chr11 5184662 5184683 5184679 5184684 +
ttgagttacagtttagaattta

SEQ ID NO: 76515 - DNA, 22 bp, Artificial Sequence
  Synthetic oligonucleotide; TTT chr11 5184663 5184684 5184680 5184685 +
tgagttacagtttagaatttaa

SEQ ID NO: 76516 - DNA, 22 bp, Artificial Sequence
  Synthetic oligonucleotide; TTT chr11 5184664 5184685 5184681 5184686 +
gagttacagtttagaatttaaa

SEQ ID NO: 76517 - DNA, 22 bp, Artificial Sequence
  Synthetic oligonucleotide; TTG chr11 5184665 5184686 5184682 5184687 +
agttacagtttagaatttaaaa

SEQ ID NO: 76518 - DNA, 22 bp, Artificial Sequence
  Synthetic oligonucleotide; TTA chr11 5184670 5184691 5184687 5184692 +
cagtttagaatttaaaataccc

SEQ ID NO: 76519 - DNA, 22 bp, Artificial Sequence
  Synthetic oligonucleotide; TTT chr11 5184676 5184697 5184693 5184698 +
agaatttaaaatacccacacag

SEQ ID NO: 76520 - DNA, 22 bp, Artificial Sequence
  Synthetic oligonucleotide; TTA chr11 5184677 5184698 5184694 5184699 +
gaatttaaaatacccacacagc

SEQ ID NO: 76521 - DNA, 22 bp, Artificial Sequence
  Synthetic oligonucleotide; TTT chr11 5184683 5184704 5184700 5184705 +
aaaatacccacacagctgagca

SEQ ID NO: 76522 - DNA, 22 bp, Artificial Sequence
  Synthetic oligonucleotide; TTA chr11 5184684 5184705 5184701 5184706 +
aaatacccacacagctgagcaa

SEQ ID NO: 76523 - DNA, 22 bp, Artificial Sequence
  Synthetic oligonucleotide; CTG chr11 5184701 5184722 5184718 5184723 +
agcaatttacccttgctttaag

SEQ ID NO: 76524 - DNA, 22 bp, Artificial Sequence
  Synthetic oligonucleotide; TTT chr11 5184709 5184730 5184726 5184731 +
acccttgctttaagttggaatg

SEQ ID NO: 76525 - DNA, 22 bp, Artificial Sequence
  Synthetic oligonucleotide; TTA chr11 5184710 5184731 5184727 5184732 +
cccttgctttaagttggaatga

SEQ ID NO: 76526 - DNA, 22 bp, Artificial Sequence
  Synthetic oligonucleotide; CTT chr11 5184715 5184736 5184732 5184737 +
gctttaagttggaatgaggttc

SEQ ID NO: 76527 - DNA, 22 bp, Artificial Sequence
  Synthetic oligonucleotide; TTG chr11 5184716 5184737 5184733 5184738 +
ctttaagttggaatgaggttct

SEQ ID NO: 76528 - DNA, 22 bp, Artificial Sequence
  Synthetic oligonucleotide; CTT chr11 5184719 5184740 5184736 5184741 +
taagttggaatgaggttcttta

SEQ ID NO: 76529 - DNA, 22 bp, Artificial Sequence
  Synthetic oligonucleotide; TTT chr11 5184720 5184741 5184737 5184742 +
aagttggaatgaggttctttaa

SEQ ID NO: 76530 - DNA, 22 bp, Artificial Sequence
  Synthetic oligonucleotide; TTA chr11 5184721 5184742 5184738 5184743 +
agttggaatgaggttctttaaa

SEQ ID NO: 76531 - DNA, 22 bp, Artificial Sequence
  Synthetic oligonucleotide; TTG chr11 5184726 5184747 5184743 5184748 +
gaatgaggttctttaaaaatat

SEQ ID NO: 76532 - DNA, 22 bp, Artificial Sequence
  Synthetic oligonucleotide; TTC chr11 5184737 5184758 5184754 5184759 +
tttaaaaatattaagataaaat

SEQ ID NO: 76533 - DNA, 22 bp, Artificial Sequence
  Synthetic oligonucleotide; CTT chr11 5184739 5184760 5184756 5184761 +
taaaaatattaagataaaattt

SEQ ID NO: 76534 - DNA, 22 bp, Artificial Sequence
  Synthetic oligonucleotide; TTT chr11 5184740 5184761 5184757 5184762 +
aaaaatattaagataaaatttg

SEQ ID NO: 76535 - DNA, 22 bp, Artificial Sequence
  Synthetic oligonucleotide; TTA chr11 5184741 5184762 5184758 5184763 +
aaaatattaagataaaatttga

SEQ ID NO: 76536 - DNA, 22 bp, Artificial Sequence
  Synthetic oligonucleotide; TTA chr11 5184750 5184771 5184767 5184772 +
agataaaatttgaagttattta

SEQ ID NO: 76537 - DNA, 22 bp, Artificial Sequence
  Synthetic oligonucleotide; TTT chr11 5184761 5184782 5184778 5184783 +
gaagttatttaactctgtggat

SEQ ID NO: 76538 - DNA, 22 bp, Artificial Sequence
  Synthetic oligonucleotide; TTG chr11 5184762 5184783 5184779 5184784 +
aagttatttaactctgtggatc

SEQ ID NO: 76539 - DNA, 22 bp, Artificial Sequence
  Synthetic oligonucleotide; TTA chr11 5184768 5184789 5184785 5184790 +
tttaactctgtggatctacttt

SEQ ID NO: 76540 - DNA, 22 bp, Artificial Sequence
  Synthetic oligonucleotide; TTT chr11 5184771 5184792 5184788 5184793 +
aactctgtggatctactttatt

SEQ ID NO: 76541 - DNA, 22 bp, Artificial Sequence
  Synthetic oligonucleotide; TTA chr11 5184772 5184793 5184789 5184794 +
actctgtggatctactttattt

SEQ ID NO: 76542 - DNA, 22 bp, Artificial Sequence
  Synthetic oligonucleotide; CTC chr11 5184776 5184797 5184793 5184798 +
tgtggatctactttatttacat

SEQ ID NO: 76543 - DNA, 22 bp, Artificial Sequence
  Synthetic oligonucleotide; CTG chr11 5184778 5184799 5184795 5184800 +
tggatctactttatttacataa

SEQ ID NO: 76544 - DNA, 22 bp, Artificial Sequence
  Synthetic oligonucleotide; CTA chr11 5184786 5184807 5184803 5184808 +
ctttatttacataaactaattg

SEQ ID NO: 76545 - DNA, 22 bp, Artificial Sequence
  Synthetic oligonucleotide; CTT chr11 5184789 5184810 5184806 5184811 +
tatttacataaactaattgttt

SEQ ID NO: 76546 - DNA, 22 bp, Artificial Sequence
  Synthetic oligonucleotide; TTT chr11 5184790 5184811 5184807 5184812 +
atttacataaactaattgtttt

SEQ ID NO: 76547 - DNA, 22 bp, Artificial Sequence
  Synthetic oligonucleotide; TTA chr11 5184791 5184812 5184808 5184813 +
tttacataaactaattgtttta

SEQ ID NO: 76548 - DNA, 22 bp, Artificial Sequence
  Synthetic oligonucleotide; TTT chr11 5184794 5184815 5184811 5184816 +
acataaactaattgttttacta

SEQ ID NO: 76549 - DNA, 22 bp, Artificial Sequence
  Synthetic oligonucleotide; TTA chr11 5184795 5184816 5184812 5184817 +
cataaactaattgttttactat

SEQ ID NO: 76550 - DNA, 22 bp, Artificial Sequence
  Synthetic oligonucleotide; CTA chr11 5184804 5184825 5184821 5184826 +
attgttttactatttaatatat

SEQ ID NO: 76551 - DNA, 22 bp, Artificial Sequence
  Synthetic oligonucleotide; TTG chr11 5184808 5184829 5184825 5184830 +
ttttactatttaatatatatct

SEQ ID NO: 76552 - DNA, 22 bp, Artificial Sequence
  Synthetic oligonucleotide; TTT chr11 5184811 5184832 5184828 5184833 +
tactatttaatatatatctcac

SEQ ID NO: 76553 - DNA, 22 bp, Artificial Sequence
  Synthetic oligonucleotide; TTT chr11 5184812 5184833 5184829 5184834 +
actatttaatatatatctcaca

SEQ ID NO: 76554 - DNA, 22 bp, Artificial Sequence
  Synthetic oligonucleotide; TTA chr11 5184813 5184834 5184830 5184835 +
ctatttaatatatatctcacat

SEQ ID NO: 76555 - DNA, 22 bp, Artificial Sequence
  Synthetic oligonucleotide; CTA chr11 5184816 5184837 5184833 5184838 +
tttaatatatatctcacattgt

SEQ ID NO: 76556 - DNA, 22 bp, Artificial Sequence
  Synthetic oligonucleotide; TTT chr11 5184819 5184840 5184836 5184841 +
aatatatatctcacattgttag

SEQ ID NO: 76557 - DNA, 22 bp, Artificial Sequence
  Synthetic oligonucleotide; TTA chr11 5184820 5184841 5184837 5184842 +
atatatatctcacattgttaga

SEQ ID NO: 76558 - DNA, 22 bp, Artificial Sequence
  Synthetic oligonucleotide; CTC chr11 5184831 5184852 5184848 5184853 +
acattgttagaatattttaagt

SEQ ID NO: 76559 - DNA, 22 bp, Artificial Sequence
  Synthetic oligonucleotide; TTG chr11 5184837 5184858 5184854 5184859 +
ttagaatattttaagtaaactg

SEQ ID NO: 76560 - DNA, 22 bp, Artificial Sequence
  Synthetic oligonucleotide; TTA chr11 5184840 5184861 5184857 5184862 +
gaatattttaagtaaactgttg

SEQ ID NO: 76561 - DNA, 22 bp, Artificial Sequence
  Synthetic oligonucleotide; TTT chr11 5184848 5184869 5184865 5184870 +
taagtaaactgttgatgtttca

SEQ ID NO: 76562 - DNA, 22 bp, Artificial Sequence
  Synthetic oligonucleotide; TTT chr11 5184849 5184870 5184866 5184871 +
aagtaaactgttgatgtttcag

SEQ ID NO: 76563 - DNA, 22 bp, Artificial Sequence
  Synthetic oligonucleotide; TTA chr11 5184850 5184871 5184867 5184872 +
agtaaactgttgatgtttcaga

SEQ ID NO: 76564 - DNA, 22 bp, Artificial Sequence
  Synthetic oligonucleotide; CTG chr11 5184859 5184880 5184876 5184881 +
ttgatgtttcagagaaaggaaa

SEQ ID NO: 76565 - DNA, 22 bp, Artificial Sequence
  Synthetic oligonucleotide; TTG chr11 5184862 5184883 5184879 5184884 +
atgtttcagagaaaggaaagaa

SEQ ID NO: 76566 - DNA, 22 bp, Artificial Sequence
  Synthetic oligonucleotide; TTT chr11 5184868 5184889 5184885 5184890 +
cagagaaaggaaagaataattt

SEQ ID NO: 76567 - DNA, 22 bp, Artificial Sequence
  Synthetic oligonucleotide; TTC chr11 5184869 5184890 5184886 5184891 +
agagaaaggaaagaataatttt

SEQ ID NO: 76568 - DNA, 22 bp, Artificial Sequence
  Synthetic oligonucleotide; TTT chr11 5184890 5184911 5184907 5184912 +
tgaagcattcctgacacagttc

SEQ ID NO: 76569 - DNA, 22 bp, Artificial Sequence
  Synthetic oligonucleotide; TTT chr11 5184891 5184912 5184908 5184913 +
gaagcattcctgacacagttct

SEQ ID NO: 76570 - DNA, 22 bp, Artificial Sequence
  Synthetic oligonucleotide; TTG chr11 5184892 5184913 5184909 5184914 +
aagcattcctgacacagttcta

SEQ ID NO: 76571 - DNA, 22 bp, Artificial Sequence
  Synthetic oligonucleotide; TTC chr11 5184900 5184921 5184917 5184922 +
ctgacacagttctaggccagag

SEQ ID NO: 76572 - DNA, 22 bp, Artificial Sequence
  Synthetic oligonucleotide; CTG chr11 5184903 5184924 5184920 5184925 +
acacagttctaggccagagcca

SEQ ID NO: 76573 - DNA, 22 bp, Artificial Sequence
  Synthetic oligonucleotide; TTC chr11 5184912 5184933 5184929 5184934 +
taggccagagccatgcatgtga

SEQ ID NO: 76574 - DNA, 22 bp, Artificial Sequence
  Synthetic oligonucleotide; CTA chr11 5184914 5184935 5184931 5184936 +
ggccagagccatgcatgtgagt

SEQ ID NO: 76575 - DNA, 22 bp, Artificial Sequence
  Synthetic oligonucleotide; TTA chr11 5184948 5184969 5184965 5184970 +
tagaagtgagggttacagtgac

SEQ ID NO: 76576 - DNA, 22 bp, Artificial Sequence
  Synthetic oligonucleotide; TTA chr11 5184963 5184984 5184980 5184985 +
cagtgactggggcttcatcagg

SEQ ID NO: 76577 - DNA, 22 bp, Artificial Sequence
  Synthetic oligonucleotide; CTG chr11 5184972 5184993 5184989 5184994 +
gggcttcatcaggacattaggg

SEQ ID NO: 76578 - DNA, 22 bp, Artificial Sequence
  Synthetic oligonucleotide; CTT chr11 5184978 5184999 5184995 5185000 +
catcaggacattagggatggga

SEQ ID NO: 76579 - DNA, 22 bp, Artificial Sequence
  Synthetic oligonucleotide; TTC chr11 5184979 5185000 5184996 5185001 +
atcaggacattagggatgggag

SEQ ID NO: 76580 - DNA, 22 bp, Artificial Sequence
  Synthetic oligonucleotide; TTA chr11 5184991 5185012 5185008 5185013 +
gggatgggagagaagaatctaa

SEQ ID NO: 76581 - DNA, 22 bp, Artificial Sequence
  Synthetic oligonucleotide; CTA chr11 5185012 5185033 5185029 5185034 +
agtgaaaaaaaaatacaggaat

SEQ ID NO: 76582 - DNA, 22 bp, Artificial Sequence
  Synthetic oligonucleotide; TTT chr11 5185062 5185083 5185079 5185084 +
tctggcctttaaattttttctg

SEQ ID NO: 76583 - DNA, 22 bp, Artificial Sequence
  Synthetic oligonucleotide; TTT chr11 5185063 5185084 5185080 5185085 +
ctggcctttaaattttttctgg

SEQ ID NO: 76584 - DNA, 22 bp, Artificial Sequence
  Synthetic oligonucleotide; TTC chr11 5185064 5185085 5185081 5185086 +
tggcctttaaattttttctggt

SEQ ID NO: 76585 - DNA, 22 bp, Artificial Sequence
  Synthetic oligonucleotide; CTG chr11 5185066 5185087 5185083 5185088 +
gcctttaaattttttctggtga

SEQ ID NO: 76586 - DNA, 22 bp, Artificial Sequence
  Synthetic oligonucleotide; CTT chr11 5185071 5185092 5185088 5185093 +
taaattttttctggtgatcttt

SEQ ID NO: 76587 - DNA, 22 bp, Artificial Sequence
  Synthetic oligonucleotide; TTT chr11 5185072 5185093 5185089 5185094 +
aaattttttctggtgatctttt

SEQ ID NO: 76588 - DNA, 22 bp, Artificial Sequence
  Synthetic oligonucleotide; TTA chr11 5185073 5185094 5185090 5185095 +
aattttttctggtgatcttttg

SEQ ID NO: 76589 - DNA, 22 bp, Artificial Sequence
  Synthetic oligonucleotide; TTT chr11 5185078 5185099 5185095 5185100 +
tttctggtgatcttttgtgata

SEQ ID NO: 76590 - DNA, 22 bp, Artificial Sequence
  Synthetic oligonucleotide; TTT chr11 5185079 5185100 5185096 5185101 +
ttctggtgatcttttgtgatac

SEQ ID NO: 76591 - DNA, 22 bp, Artificial Sequence
  Synthetic oligonucleotide; TTT chr11 5185080 5185101 5185097 5185102 +
tctggtgatcttttgtgatacc

SEQ ID NO: 76592 - DNA, 22 bp, Artificial Sequence
  Synthetic oligonucleotide; TTT chr11 5185081 5185102 5185098 5185103 +
ctggtgatcttttgtgatacct

SEQ ID NO: 76593 - DNA, 22 bp, Artificial Sequence
  Synthetic oligonucleotide; TTC chr11 5185082 5185103 5185099 5185104 +
tggtgatcttttgtgataccta

SEQ ID NO: 76594 - DNA, 22 bp, Artificial Sequence
  Synthetic oligonucleotide; CTG chr11 5185084 5185105 5185101 5185106 +
gtgatcttttgtgatacctatg

SEQ ID NO: 76595 - DNA, 22 bp, Artificial Sequence
  Synthetic oligonucleotide; CTT chr11 5185092 5185113 5185109 5185114 +
ttgtgatacctatggtttttaa

SEQ ID NO: 76596 - DNA, 22 bp, Artificial Sequence
  Synthetic oligonucleotide; TTT chr11 5185093 5185114 5185110 5185115 +
tgtgatacctatggtttttaaa

SEQ ID NO: 76597 - DNA, 22 bp, Artificial Sequence
  Synthetic oligonucleotide; TTT chr11 5185094 5185115 5185111 5185116 +
gtgatacctatggtttttaaat

SEQ ID NO: 76598 - DNA, 22 bp, Artificial Sequence
  Synthetic oligonucleotide; TTG chr11 5185095 5185116 5185112 5185117 +
tgatacctatggtttttaaata

SEQ ID NO: 76599 - DNA, 22 bp, Artificial Sequence
  Synthetic oligonucleotide; CTA chr11 5185104 5185125 5185121 5185126 +
tggtttttaaatatttgtttgt

SEQ ID NO: 76600 - DNA, 22 bp, Artificial Sequence
  Synthetic oligonucleotide; TTT chr11 5185110 5185131 5185127 5185132 +
ttaaatatttgtttgttttttt

SEQ ID NO: 76601 - DNA, 22 bp, Artificial Sequence
  Synthetic oligonucleotide; TTT chr11 5185111 5185132 5185128 5185133 +
taaatatttgtttgtttttttg

SEQ ID NO: 76602 - DNA, 22 bp, Artificial Sequence
  Synthetic oligonucleotide; TTT chr11 5185112 5185133 5185129 5185134 +
aaatatttgtttgtttttttgt

SEQ ID NO: 76603 - DNA, 22 bp, Artificial Sequence
  Synthetic oligonucleotide; TTA chr11 5185113 5185134 5185130 5185135 +
aatatttgtttgtttttttgtt

SEQ ID NO: 76604 - DNA, 22 bp, Artificial Sequence
  Synthetic oligonucleotide; TTT chr11 5185120 5185141 5185137 5185142 +
gtttgtttttttgtttttccta

SEQ ID NO: 76605 - DNA, 22 bp, Artificial Sequence
  Synthetic oligonucleotide; TTG chr11 5185121 5185142 5185138 5185143 +
tttgtttttttgtttttcctaa

SEQ ID NO: 76606 - DNA, 22 bp, Artificial Sequence
  Synthetic oligonucleotide; TTT chr11 5185124 5185145 5185141 5185146 +
gtttttttgtttttcctaaaac

SEQ ID NO: 76607 - DNA, 22 bp, Artificial Sequence
  Synthetic oligonucleotide; TTG chr11 5185125 5185146 5185142 5185147 +
tttttttgtttttcctaaaaca

SEQ ID NO: 76608 - DNA, 22 bp, Artificial Sequence
  Synthetic oligonucleotide; TTT chr11 5185128 5185149 5185145 5185150 +
ttttgtttttcctaaaacattg

SEQ ID NO: 76609 - DNA, 22 bp, Artificial Sequence
  Synthetic oligonucleotide; TTT chr11 5185129 5185150 5185146 5185151 +
tttgtttttcctaaaacattgt

SEQ ID NO: 76610 - DNA, 22 bp, Artificial Sequence
  Synthetic oligonucleotide; TTT chr11 5185130 5185151 5185147 5185152 +
ttgtttttcctaaaacattgtc

SEQ ID NO: 76611 - DNA, 22 bp, Artificial Sequence
  Synthetic oligonucleotide; TTT chr11 5185131 5185152 5185148 5185153 +
tgtttttcctaaaacattgtca

SEQ ID NO: 76612 - DNA, 22 bp, Artificial Sequence
  Synthetic oligonucleotide; TTT chr11 5185132 5185153 5185149 5185154 +
gtttttcctaaaacattgtcat

SEQ ID NO: 76613 - DNA, 22 bp, Artificial Sequence
  Synthetic oligonucleotide; TTG chr11 5185133 5185154 5185150 5185155 +
tttttcctaaaacattgtcata

SEQ ID NO: 76614 - DNA, 22 bp, Artificial Sequence
  Synthetic oligonucleotide; TTT chr11 5185136 5185157 5185153 5185158 +
ttcctaaaacattgtcatatgt

SEQ ID NO: 76615 - DNA, 22 bp, Artificial Sequence
  Synthetic oligonucleotide; TTT chr11 5185137 5185158 5185154 5185159 +
tcctaaaacattgtcatatgtg

SEQ ID NO: 76616 - DNA, 22 bp, Artificial Sequence
  Synthetic oligonucleotide; TTT chr11 5185138 5185159 5185155 5185160 +
cctaaaacattgtcatatgtga

SEQ ID NO: 76617 - DNA, 22 bp, Artificial Sequence
  Synthetic oligonucleotide; TTC chr11 5185139 5185160 5185156 5185161 +
ctaaaacattgtcatatgtgat

SEQ ID NO: 76618 - DNA, 22 bp, Artificial Sequence
  Synthetic oligonucleotide; CTA chr11 5185142 5185163 5185159 5185164 +
aaacattgtcatatgtgatgac

SEQ ID NO: 76619 - DNA, 22 bp, Artificial Sequence
  Synthetic oligonucleotide; TTG chr11 5185150 5185171 5185167 5185172 +
tcatatgtgatgacccaaatta

SEQ ID NO: 76620 - DNA, 22 bp, Artificial Sequence
  Synthetic oligonucleotide; TTA chr11 5185172 5185193 5185189 5185194 +
taggcctgggttccttgtagca

SEQ ID NO: 76621 - DNA, 22 bp, Artificial Sequence
  Synthetic oligonucleotide; CTG chr11 5185180 5185201 5185197 5185202 +
ggttccttgtagcattattcta

SEQ ID NO: 76622 - DNA, 22 bp, Artificial Sequence
  Synthetic oligonucleotide; TTC chr11 5185185 5185206 5185202 5185207 +
cttgtagcattattctaggata

SEQ ID NO: 76623 - DNA, 22 bp, Artificial Sequence
  Synthetic oligonucleotide; CTT chr11 5185188 5185209 5185205 5185210 +
gtagcattattctaggatattt

SEQ ID NO: 76624 - DNA, 22 bp, Artificial Sequence
  Synthetic oligonucleotide; TTG chr11 5185189 5185210 5185206 5185211 +
tagcattattctaggatatttc

SEQ ID NO: 76625 - DNA, 22 bp, Artificial Sequence
  Synthetic oligonucleotide; TTA chr11 5185197 5185218 5185214 5185219 +
ttctaggatatttctgacagca

SEQ ID NO: 76626 - DNA, 22 bp, Artificial Sequence
  Synthetic oligonucleotide; TTC chr11 5185200 5185221 5185217 5185222 +
taggatatttctgacagcatat

SEQ ID NO: 76627 - DNA, 22 bp, Artificial Sequence
  Synthetic oligonucleotide; CTA chr11 5185202 5185223 5185219 5185224 +
ggatatttctgacagcatattc

SEQ ID NO: 76628 - DNA, 22 bp, Artificial Sequence
  Synthetic oligonucleotide; TTT chr11 5185210 5185231 5185227 5185232 +
ctgacagcatattctgactgaa

SEQ ID NO: 76629 - DNA, 22 bp, Artificial Sequence
  Synthetic oligonucleotide; TTC chr11 5185211 5185232 5185228 5185233 +
tgacagcatattctgactgaat

SEQ ID NO: 76630 - DNA, 22 bp, Artificial Sequence
  Synthetic oligonucleotide; CTG chr11 5185213 5185234 5185230 5185235 +
acagcatattctgactgaatca

SEQ ID NO: 76631 - DNA, 22 bp, Artificial Sequence
  Synthetic oligonucleotide; TTC chr11 5185224 5185245 5185241 5185246 +
tgactgaatcatgaatgtatcc

SEQ ID NO: 76632 - DNA, 22 bp, Artificial Sequence
  Synthetic oligonucleotide; CTG chr11 5185226 5185247 5185243 5185248 +
actgaatcatgaatgtatccac

SEQ ID NO: 76633 - DNA, 22 bp, Artificial Sequence
  Synthetic oligonucleotide; CTG chr11 5185230 5185251 5185247 5185252 +
aatcatgaatgtatccacggag

SEQ ID NO: 76634 - DNA, 22 bp, Artificial Sequence
  Synthetic oligonucleotide; CTC chr11 5185288 5185309 5185305 5185310 +
taaggacatatatagttgtatt

SEQ ID NO: 76635 - DNA, 22 bp, Artificial Sequence
  Synthetic oligonucleotide; CTA chr11 5185290 5185311 5185307 5185312 +
aggacatatatagttgtattta

SEQ ID NO: 76636 - DNA, 22 bp, Artificial Sequence
  Synthetic oligonucleotide; TTG chr11 5185306 5185327 5185323 5185328 +
tatttaaatactggctaaatct

SEQ ID NO: 76637 - DNA, 22 bp, Artificial Sequence
  Synthetic oligonucleotide; TTT chr11 5185311 5185332 5185328 5185333 +
aaatactggctaaatcttattc

SEQ ID NO: 76638 - DNA, 22 bp, Artificial Sequence
  Synthetic oligonucleotide; TTA chr11 5185312 5185333 5185329 5185334 +
aatactggctaaatcttattct

SEQ ID NO: 76639 - DNA, 22 bp, Artificial Sequence
  Synthetic oligonucleotide; CTG chr11 5185319 5185340 5185336 5185341 +
gctaaatcttattctgactcta

SEQ ID NO: 76640 - DNA, 22 bp, Artificial Sequence
  Synthetic oligonucleotide; CTA chr11 5185323 5185344 5185340 5185345 +
aatcttattctgactctatgac

SEQ ID NO: 76641 - DNA, 22 bp, Artificial Sequence
  Synthetic oligonucleotide; CTT chr11 5185329 5185350 5185346 5185351 +
attctgactctatgaccctgga

SEQ ID NO: 76642 - DNA, 22 bp, Artificial Sequence
  Synthetic oligonucleotide; TTA chr11 5185330 5185351 5185347 5185352 +
ttctgactctatgaccctggac

SEQ ID NO: 76643 - DNA, 22 bp, Artificial Sequence
  Synthetic oligonucleotide; TTC chr11 5185333 5185354 5185350 5185355 +
tgactctatgaccctggacacg

SEQ ID NO: 76644 - DNA, 22 bp, Artificial Sequence
  Synthetic oligonucleotide; CTG chr11 5185335 5185356 5185352 5185357 +
actctatgaccctggacacgtc

SEQ ID NO: 76645 - DNA, 22 bp, Artificial Sequence
  Synthetic oligonucleotide; CTC chr11 5185339 5185360 5185356 5185361 +
tatgaccctggacacgtcattt

SEQ ID NO: 76646 - DNA, 22 bp, Artificial Sequence
  Synthetic oligonucleotide; CTA chr11 5185341 5185362 5185358 5185363 +
tgaccctggacacgtcatttaa

SEQ ID NO: 76647 - DNA, 22 bp, Artificial Sequence
  Synthetic oligonucleotide; CTG chr11 5185349 5185370 5185366 5185371 +
gacacgtcatttaatttaaact

SEQ ID NO: 76648 - DNA, 22 bp, Artificial Sequence
  Synthetic oligonucleotide; TTT chr11 5185361 5185382 5185378 5185383 +
aatttaaactttagttctcttg

SEQ ID NO: 76649 - DNA, 22 bp, Artificial Sequence
  Synthetic oligonucleotide; TTA chr11 5185362 5185383 5185379 5185384 +
atttaaactttagttctcttgc

SEQ ID NO: 76650 - DNA, 22 bp, Artificial Sequence
  Synthetic oligonucleotide; TTT chr11 5185366 5185387 5185383 5185388 +
aaactttagttctcttgcttgt

SEQ ID NO: 76651 - DNA, 22 bp, Artificial Sequence
  Synthetic oligonucleotide; TTA chr11 5185367 5185388 5185384 5185389 +
aactttagttctcttgcttgta

SEQ ID NO: 76652 - DNA, 22 bp, Artificial Sequence
  Synthetic oligonucleotide; CTT chr11 5185372 5185393 5185389 5185394 +
tagttctcttgcttgtaaaata

SEQ ID NO: 76653 - DNA, 22 bp, Artificial Sequence
  Synthetic oligonucleotide; TTT chr11 5185373 5185394 5185390 5185395 +
agttctcttgcttgtaaaatac

SEQ ID NO: 76654 - DNA, 22 bp, Artificial Sequence
  Synthetic oligonucleotide; TTA chr11 5185374 5185395 5185391 5185396 +
gttctcttgcttgtaaaatacc

SEQ ID NO: 76655 - DNA, 22 bp, Artificial Sequence
  Synthetic oligonucleotide; TTC chr11 5185378 5185399 5185395 5185400 +
tcttgcttgtaaaatacctaac

SEQ ID NO: 76656 - DNA, 22 bp, Artificial Sequence
  Synthetic oligonucleotide; CTC chr11 5185380 5185401 5185397 5185402 +
ttgcttgtaaaatacctaacaa

SEQ ID NO: 76657 - DNA, 22 bp, Artificial Sequence
  Synthetic oligonucleotide; CTT chr11 5185382 5185403 5185399 5185404 +
gcttgtaaaatacctaacaata

SEQ ID NO: 76658 - DNA, 22 bp, Artificial Sequence
  Synthetic oligonucleotide; TTG chr11 5185383 5185404 5185400 5185405 +
cttgtaaaatacctaacaataa

SEQ ID NO: 76659 - DNA, 22 bp, Artificial Sequence
  Synthetic oligonucleotide; CTT chr11 5185386 5185407 5185403 5185408 +
gtaaaatacctaacaataagca

SEQ ID NO: 76660 - DNA, 22 bp, Artificial Sequence
  Synthetic oligonucleotide; TTG chr11 5185387 5185408 5185404 5185409 +
taaaatacctaacaataagcat

SEQ ID NO: 76661 - DNA, 22 bp, Artificial Sequence
  Synthetic oligonucleotide; CTA chr11 5185398 5185419 5185415 5185420 +
acaataagcataaatttaaaat

SEQ ID NO: 76662 - DNA, 22 bp, Artificial Sequence
  Synthetic oligonucleotide; TTT chr11 5185415 5185436 5185432 5185437 +
aaaatgtgagtcttttctgaag

SEQ ID NO: 76663 - DNA, 22 bp, Artificial Sequence
  Synthetic oligonucleotide; TTA chr11 5185416 5185437 5185433 5185438 +
aaatgtgagtcttttctgaagt

SEQ ID NO: 76664 - DNA, 22 bp, Artificial Sequence
  Synthetic oligonucleotide; CTT chr11 5185429 5185450 5185446 5185451 +
ttctgaagtcagtgtcttagga

SEQ ID NO: 76665 - DNA, 22 bp, Artificial Sequence
  Synthetic oligonucleotide; TTT chr11 5185430 5185451 5185447 5185452 +
tctgaagtcagtgtcttaggaa

SEQ ID NO: 76666 - DNA, 22 bp, Artificial Sequence
  Synthetic oligonucleotide; TTT chr11 5185431 5185452 5185448 5185453 +
ctgaagtcagtgtcttaggaag

SEQ ID NO: 76667 - DNA, 22 bp, Artificial Sequence
  Synthetic oligonucleotide; TTC chr11 5185432 5185453 5185449 5185454 +
tgaagtcagtgtcttaggaagg

SEQ ID NO: 76668 - DNA, 22 bp, Artificial Sequence
  Synthetic oligonucleotide; CTG chr11 5185434 5185455 5185451 5185456 +
aagtcagtgtcttaggaaggta

SEQ ID NO: 76669 - DNA, 22 bp, Artificial Sequence
  Synthetic oligonucleotide; CTT chr11 5185447 5185468 5185464 5185469 +
aggaaggtagctacataagtca

SEQ ID NO: 76670 - DNA, 22 bp, Artificial Sequence
  Synthetic oligonucleotide; TTA chr11 5185448 5185469 5185465 5185470 +
ggaaggtagctacataagtcat

SEQ ID NO: 76671 - DNA, 22 bp, Artificial Sequence
  Synthetic oligonucleotide; CTA chr11 5185460 5185481 5185477 5185482 +
cataagtcatttatatctctat

SEQ ID NO: 76672 - DNA, 22 bp, Artificial Sequence
  Synthetic oligonucleotide; TTT chr11 5185472 5185493 5185489 5185494 +
atatctctatcccaacaataga

SEQ ID NO: 76673 - DNA, 22 bp, Artificial Sequence
  Synthetic oligonucleotide; TTA chr11 5185473 5185494 5185490 5185495 +
tatctctatcccaacaatagat

SEQ ID NO: 76674 - DNA, 22 bp, Artificial Sequence
  Synthetic oligonucleotide; CTC chr11 5185479 5185500 5185496 5185501 +
tatcccaacaatagatgacatc

SEQ ID NO: 76675 - DNA, 22 bp, Artificial Sequence
  Synthetic oligonucleotide; CTA chr11 5185481 5185502 5185498 5185503 +
tcccaacaatagatgacatcag

SEQ ID NO: 76676 - DNA, 22 bp, Artificial Sequence
  Synthetic oligonucleotide; CTA chr11 5185510 5185531 5185527 5185532 +
acaaaattgtagcaattaagac

SEQ ID NO: 76677 - DNA, 22 bp, Artificial Sequence
  Synthetic oligonucleotide; TTG chr11 5185519 5185540 5185536 5185541 +
tagcaattaagaccaaaattat

SEQ ID NO: 76678 - DNA, 22 bp, Artificial Sequence
  Synthetic oligonucleotide; TTA chr11 5185528 5185549 5185545 5185550 +
agaccaaaattattgtcaactg

SEQ ID NO: 76679 - DNA, 22 bp, Artificial Sequence
  Synthetic oligonucleotide; TTA chr11 5185540 5185561 5185557 5185562 +
ttgtcaactggaataagtttaa

SEQ ID NO: 76680 - DNA, 22 bp, Artificial Sequence
  Synthetic oligonucleotide; TTG chr11 5185543 5185564 5185560 5185565 +
tcaactggaataagtttaactt

SEQ ID NO: 76681 - DNA, 22 bp, Artificial Sequence
  Synthetic oligonucleotide; CTG chr11 5185550 5185571 5185567 5185572 +
gaataagtttaactttcaggac

SEQ ID NO: 76682 - DNA, 22 bp, Artificial Sequence
  Synthetic oligonucleotide; TTT chr11 5185560 5185581 5185577 5185582 +
aactttcaggacttcaggctta

SEQ ID NO: 76683 - DNA, 22 bp, Artificial Sequence
  Synthetic oligonucleotide; TTA chr11 5185561 5185582 5185578 5185583 +
actttcaggacttcaggcttat

SEQ ID NO: 76684 - DNA, 22 bp, Artificial Sequence
  Synthetic oligonucleotide; CTT chr11 5185565 5185586 5185582 5185587 +
tcaggacttcaggcttattatc

SEQ ID NO: 76685 - DNA, 22 bp, Artificial Sequence
  Synthetic oligonucleotide; TTT chr11 5185566 5185587 5185583 5185588 +
caggacttcaggcttattatcc

SEQ ID NO: 76686 - DNA, 22 bp, Artificial Sequence
  Synthetic oligonucleotide; TTC chr11 5185567 5185588 5185584 5185589 +
aggacttcaggcttattatcca

SEQ ID NO: 76687 - DNA, 22 bp, Artificial Sequence
  Synthetic oligonucleotide; CTT chr11 5185574 5185595 5185591 5185596 +
caggcttattatccatcaaact

SEQ ID NO: 76688 - DNA, 22 bp, Artificial Sequence
  Synthetic oligonucleotide; TTC chr11 5185575 5185596 5185592 5185597 +
aggcttattatccatcaaactg

SEQ ID NO: 76689 - DNA, 22 bp, Artificial Sequence
  Synthetic oligonucleotide; CTT chr11 5185581 5185602 5185598 5185603 +
attatccatcaaactgagattg

SEQ ID NO: 76690 - DNA, 22 bp, Artificial Sequence
  Synthetic oligonucleotide; TTA chr11 5185582 5185603 5185599 5185604 +
ttatccatcaaactgagattga

SEQ ID NO: 76691 - DNA, 22 bp, Artificial Sequence
  Synthetic oligonucleotide; TTA chr11 5185585 5185606 5185602 5185607 +
tccatcaaactgagattgaatt

SEQ ID NO: 76692 - DNA, 22 bp, Artificial Sequence
  Synthetic oligonucleotide; CTG chr11 5185597 5185618 5185614 5185619 +
agattgaattgatttagagtat

SEQ ID NO: 76693 - DNA, 22 bp, Artificial Sequence
  Synthetic oligonucleotide; TTG chr11 5185603 5185624 5185620 5185625 +
aattgatttagagtatccataa

SEQ ID NO: 76694 - DNA, 22 bp, Artificial Sequence
  Synthetic oligonucleotide; TTG chr11 5185608 5185629 5185625 5185630 +
atttagagtatccataaatact

SEQ ID NO: 76695 - DNA, 22 bp, Artificial Sequence
  Synthetic oligonucleotide; TTT chr11 5185612 5185633 5185629 5185634 +
agagtatccataaatactagga

SEQ ID NO: 76696 - DNA, 22 bp, Artificial Sequence
  Synthetic oligonucleotide; TTA chr11 5185613 5185634 5185630 5185635 +
gagtatccataaatactaggaa

SEQ ID NO: 76697 - DNA, 22 bp, Artificial Sequence
  Synthetic oligonucleotide; CTA chr11 5185631 5185652 5185648 5185653 +
ggaataaatttttttttaataa

SEQ ID NO: 76698 - DNA, 22 bp, Artificial Sequence
  Synthetic oligonucleotide; TTT chr11 5185642 5185663 5185659 5185664 +
ttttttaataaatttcttatac

SEQ ID NO: 76699 - DNA, 22 bp, Artificial Sequence
  Synthetic oligonucleotide; TTT chr11 5185643 5185664 5185660 5185665 +
tttttaataaatttcttatact

SEQ ID NO: 76700 - DNA, 22 bp, Artificial Sequence
  Synthetic oligonucleotide; TTT chr11 5185644 5185665 5185661 5185666 +
ttttaataaatttcttatactg

SEQ ID NO: 76701 - DNA, 22 bp, Artificial Sequence
  Synthetic oligonucleotide; TTT chr11 5185645 5185666 5185662 5185667 +
tttaataaatttcttatactgg

SEQ ID NO: 76702 - DNA, 22 bp, Artificial Sequence
  Synthetic oligonucleotide; TTT chr11 5185646 5185667 5185663 5185668 +
ttaataaatttcttatactggg

SEQ ID NO: 76703 - DNA, 22 bp, Artificial Sequence
  Synthetic oligonucleotide; TTT chr11 5185647 5185668 5185664 5185669 +
taataaatttcttatactgggc

SEQ ID NO: 76704 - DNA, 22 bp, Artificial Sequence
  Synthetic oligonucleotide; TTT chr11 5185648 5185669 5185665 5185670 +
aataaatttcttatactgggca

SEQ ID NO: 76705 - DNA, 22 bp, Artificial Sequence
  Synthetic oligonucleotide; TTA chr11 5185649 5185670 5185666 5185671 +
ataaatttcttatactgggcac

SEQ ID NO: 76706 - DNA, 22 bp, Artificial Sequence
  Synthetic oligonucleotide; TTT chr11 5185657 5185678 5185674 5185679 +
cttatactgggcacatggtatc

SEQ ID NO: 76707 - DNA, 22 bp, Artificial Sequence
  Synthetic oligonucleotide; TTC chr11 5185658 5185679 5185675 5185680 +
ttatactgggcacatggtatca

SEQ ID NO: 76708 - DNA, 22 bp, Artificial Sequence
  Synthetic oligonucleotide; CTT chr11 5185660 5185681 5185677 5185682 +
atactgggcacatggtatcaat

SEQ ID NO: 76709 - DNA, 22 bp, Artificial Sequence
  Synthetic oligonucleotide; TTA chr11 5185661 5185682 5185678 5185683 +
tactgggcacatggtatcaatt

SEQ ID NO: 76710 - DNA, 22 bp, Artificial Sequence
  Synthetic oligonucleotide; CTG chr11 5185666 5185687 5185683 5185688 +
ggcacatggtatcaattggtaa

SEQ ID NO: 76711 - DNA, 22 bp, Artificial Sequence
  Synthetic oligonucleotide; TTG chr11 5185684 5185705 5185701 5185706 +
gtaatcttcaccctgtatctgt

SEQ ID NO: 76712 - DNA, 22 bp, Artificial Sequence
  Synthetic oligonucleotide; CTT chr11 5185692 5185713 5185709 5185714 +
caccctgtatctgtcatttact

SEQ ID NO: 76713 - DNA, 22 bp, Artificial Sequence
  Synthetic oligonucleotide; TTC chr11 5185693 5185714 5185710 5185715 +
accctgtatctgtcatttactt

SEQ ID NO: 76714 - DNA, 22 bp, Artificial Sequence
  Synthetic oligonucleotide; CTG chr11 5185699 5185720 5185716 5185721 +
tatctgtcatttacttttataa

SEQ ID NO: 76715 - DNA, 22 bp, Artificial Sequence
  Synthetic oligonucleotide; CTG chr11 5185705 5185726 5185722 5185727 +
tcatttacttttataaggtgca

SEQ ID NO: 76716 - DNA, 22 bp, Artificial Sequence
  Synthetic oligonucleotide; TTT chr11 5185711 5185732 5185728 5185733 +
acttttataaggtgcaaatagt

SEQ ID NO: 76717 - DNA, 22 bp, Artificial Sequence
  Synthetic oligonucleotide; TTA chr11 5185712 5185733 5185729 5185734 +
cttttataaggtgcaaatagtt

SEQ ID NO: 76718 - DNA, 22 bp, Artificial Sequence
  Synthetic oligonucleotide; CTT chr11 5185715 5185736 5185732 5185737 +
ttataaggtgcaaatagttcag

SEQ ID NO: 76719 - DNA, 22 bp, Artificial Sequence
  Synthetic oligonucleotide; TTT chr11 5185716 5185737 5185733 5185738 +
tataaggtgcaaatagttcagc

SEQ ID NO: 76720 - DNA, 22 bp, Artificial Sequence
  Synthetic oligonucleotide; TTT chr11 5185717 5185738 5185734 5185739 +
ataaggtgcaaatagttcagca

SEQ ID NO: 76721 - DNA, 22 bp, Artificial Sequence
  Synthetic oligonucleotide; TTA chr11 5185718 5185739 5185735 5185740 +
taaggtgcaaatagttcagcat

SEQ ID NO: 76722 - DNA, 22 bp, Artificial Sequence
  Synthetic oligonucleotide; TTC chr11 5185735 5185756 5185752 5185757 +
agcatggtgacagacacatgaa

SEQ ID NO: 76723 - DNA, 22 bp, Artificial Sequence
  Synthetic oligonucleotide; TTT chr11 5185760 5185781 5185777 5185782 +
tgaaatggagttttatttttgc

SEQ ID NO: 76724 - DNA, 22 bp, Artificial Sequence
  Synthetic oligonucleotide; TTT chr11 5185761 5185782 5185778 5185783 +
gaaatggagttttatttttgcc

SEQ ID NO: 76725 - DNA, 22 bp, Artificial Sequence
  Synthetic oligonucleotide; TTG chr11 5185762 5185783 5185779 5185784 +
aaatggagttttatttttgccc

SEQ ID NO: 76726 - DNA, 22 bp, Artificial Sequence
  Synthetic oligonucleotide; TTT chr11 5185773 5185794 5185790 5185795 +
tatttttgccccatcaccagta

SEQ ID NO: 76727 - DNA, 22 bp, Artificial Sequence
  Synthetic oligonucleotide; TTT chr11 5185774 5185795 5185791 5185796 +
atttttgccccatcaccagtat

SEQ ID NO: 76728 - DNA, 22 bp, Artificial Sequence
  Synthetic oligonucleotide; TTA chr11 5185775 5185796 5185792 5185797 +
tttttgccccatcaccagtata

SEQ ID NO: 76729 - DNA, 22 bp, Artificial Sequence
  Synthetic oligonucleotide; TTT chr11 5185778 5185799 5185795 5185800 +
ttgccccatcaccagtataata

SEQ ID NO: 76730 - DNA, 22 bp, Artificial Sequence
  Synthetic oligonucleotide; TTT chr11 5185779 5185800 5185796 5185801 +
tgccccatcaccagtataatat

SEQ ID NO: 76731 - DNA, 22 bp, Artificial Sequence
  Synthetic oligonucleotide; TTT chr11 5185780 5185801 5185797 5185802 +
gccccatcaccagtataatatc

SEQ ID NO: 76732 - DNA, 22 bp, Artificial Sequence
  Synthetic oligonucleotide; TTG chr11 5185781 5185802 5185798 5185803 +
ccccatcaccagtataatatct

SEQ ID NO: 76733 - DNA, 22 bp, Artificial Sequence
  Synthetic oligonucleotide; CTT chr11 5185804 5185825 5185821 5185826 +
tgttacatagggaagagagtta

SEQ ID NO: 76734 - DNA, 22 bp, Artificial Sequence
  Synthetic oligonucleotide; TTT chr11 5185805 5185826 5185822 5185827 +
gttacatagggaagagagttaa

SEQ ID NO: 76735 - DNA, 22 bp, Artificial Sequence
  Synthetic oligonucleotide; TTG chr11 5185806 5185827 5185823 5185828 +
ttacatagggaagagagttaaa

SEQ ID NO: 76736 - DNA, 22 bp, Artificial Sequence
  Synthetic oligonucleotide; TTA chr11 5185809 5185830 5185826 5185831 +
catagggaagagagttaaaaat

SEQ ID NO: 76737 - DNA, 22 bp, Artificial Sequence
  Synthetic oligonucleotide; TTA chr11 5185826 5185847 5185843 5185848 +
aaaattttggagtgccagcttc

SEQ ID NO: 76738 - DNA, 22 bp, Artificial Sequence
  Synthetic oligonucleotide; TTT chr11 5185833 5185854 5185850 5185855 +
tggagtgccagcttcttaatct

SEQ ID NO: 76739 - DNA, 22 bp, Artificial Sequence
  Synthetic oligonucleotide; TTT chr11 5185834 5185855 5185851 5185856 +
ggagtgccagcttcttaatctg

SEQ ID NO: 76740 - DNA, 22 bp, Artificial Sequence
  Synthetic oligonucleotide; TTG chr11 5185835 5185856 5185852 5185857 +
gagtgccagcttcttaatctgt

SEQ ID NO: 76741 - DNA, 22 bp, Artificial Sequence
  Synthetic oligonucleotide; CTT chr11 5185847 5185868 5185864 5185869 +
cttaatctgtgcctagactatt

SEQ ID NO: 76742 - DNA, 22 bp, Artificial Sequence
  Synthetic oligonucleotide; TTC chr11 5185848 5185869 5185865 5185870 +
ttaatctgtgcctagactatta

SEQ ID NO: 76743 - DNA, 22 bp, Artificial Sequence
  Synthetic oligonucleotide; CTT chr11 5185850 5185871 5185867 5185872 +
aatctgtgcctagactattacc

SEQ ID NO: 76744 - DNA, 22 bp, Artificial Sequence
  Synthetic oligonucleotide; TTA chr11 5185851 5185872 5185868 5185873 +
atctgtgcctagactattacct

SEQ ID NO: 76745 - DNA, 22 bp, Artificial Sequence
  Synthetic oligonucleotide; CTG chr11 5185856 5185877 5185873 5185878 +
tgcctagactattacctgatga

SEQ ID NO: 76746 - DNA, 22 bp, Artificial Sequence
  Synthetic oligonucleotide; CTA chr11 5185862 5185883 5185879 5185884 +
gactattacctgatgagtaata

SEQ ID NO: 76747 - DNA, 22 bp, Artificial Sequence
  Synthetic oligonucleotide; CTA chr11 5185867 5185888 5185884 5185889 +
ttacctgatgagtaatagtcaa

SEQ ID NO: 76748 - DNA, 22 bp, Artificial Sequence
  Synthetic oligonucleotide; TTA chr11 5185870 5185891 5185887 5185892 +
cctgatgagtaatagtcaataa

SEQ ID NO: 76749 - DNA, 22 bp, Artificial Sequence
  Synthetic oligonucleotide; CTG chr11 5185874 5185895 5185891 5185896 +
atgagtaatagtcaataaacta

SEQ ID NO: 76750 - DNA, 22 bp, Artificial Sequence
  Synthetic oligonucleotide; CTA chr11 5185896 5185917 5185913 5185918 +
cagaacgatgcacacacacaca

SEQ ID NO: 76751 - DNA, 22 bp, Artificial Sequence
  Synthetic oligonucleotide; TTA chr11 5185925 5185946 5185942 5185947 +
aactactaaaattttttattac

SEQ ID NO: 76752 - DNA, 22 bp, Artificial Sequence
  Synthetic oligonucleotide; CTA chr11 5185930 5185951 5185947 5185952 +
ctaaaattttttattactgagc

SEQ ID NO: 76753 - DNA, 22 bp, Artificial Sequence
  Synthetic oligonucleotide; CTA chr11 5185933 5185954 5185950 5185955 +
aaattttttattactgagcctt

SEQ ID NO: 76754 - DNA, 22 bp, Artificial Sequence
  Synthetic oligonucleotide; TTT chr11 5185939 5185960 5185956 5185961 +
tttattactgagccttgtttta

SEQ ID NO: 76755 - DNA, 22 bp, Artificial Sequence
  Synthetic oligonucleotide; TTT chr11 5185940 5185961 5185957 5185962 +
ttattactgagccttgttttaa

SEQ ID NO: 76756 - DNA, 22 bp, Artificial Sequence
  Synthetic oligonucleotide; TTT chr11 5185941 5185962 5185958 5185963 +
tattactgagccttgttttaac

SEQ ID NO: 76757 - DNA, 22 bp, Artificial Sequence
  Synthetic oligonucleotide; TTT chr11 5185942 5185963 5185959 5185964 +
attactgagccttgttttaact

SEQ ID NO: 76758 - DNA, 22 bp, Artificial Sequence
  Synthetic oligonucleotide; TTA chr11 5185943 5185964 5185960 5185965 +
ttactgagccttgttttaacta

SEQ ID NO: 76759 - DNA, 22 bp, Artificial Sequence
  Synthetic oligonucleotide; TTA chr11 5185946 5185967 5185963 5185968 +
ctgagccttgttttaactacta

SEQ ID NO: 76760 - DNA, 22 bp, Artificial Sequence
  Synthetic oligonucleotide; CTG chr11 5185949 5185970 5185966 5185971 +
agccttgttttaactactagaa

SEQ ID NO: 76761 - DNA, 22 bp, Artificial Sequence
  Synthetic oligonucleotide; CTT chr11 5185955 5185976 5185972 5185977 +
gttttaactactagaatataaa

SEQ ID NO: 76762 - DNA, 22 bp, Artificial Sequence
  Synthetic oligonucleotide; TTG chr11 5185956 5185977 5185973 5185978 +
ttttaactactagaatataaat

SEQ ID NO: 76763 - DNA, 22 bp, Artificial Sequence
  Synthetic oligonucleotide; TTT chr11 5185959 5185980 5185976 5185981 +
taactactagaatataaattca

SEQ ID NO: 76764 - DNA, 22 bp, Artificial Sequence
  Synthetic oligonucleotide; TTT chr11 5185960 5185981 5185977 5185982 +
aactactagaatataaattcat

SEQ ID NO: 76765 - DNA, 22 bp, Artificial Sequence
  Synthetic oligonucleotide; TTA chr11 5185961 5185982 5185978 5185983 +
actactagaatataaattcatt

SEQ ID NO: 76766 - DNA, 22 bp, Artificial Sequence
  Synthetic oligonucleotide; CTA chr11 5185965 5185986 5185982 5185987 +
ctagaatataaattcattgaat

SEQ ID NO: 76767 - DNA, 22 bp, Artificial Sequence
  Synthetic oligonucleotide; CTA chr11 5185968 5185989 5185985 5185990 +
gaatataaattcattgaatctt

SEQ ID NO: 76768 - DNA, 22 bp, Artificial Sequence
  Synthetic oligonucleotide; TTC chr11 5185980 5186001 5185997 5186002 +
attgaatctttgtacaacattc

SEQ ID NO: 76769 - DNA, 22 bp, Artificial Sequence
  Synthetic oligonucleotide; TTG chr11 5185984 5186005 5186001 5186006 +
aatctttgtacaacattcaaat

SEQ ID NO: 76770 - DNA, 22 bp, Artificial Sequence
  Synthetic oligonucleotide; CTT chr11 5185990 5186011 5186007 5186012 +
tgtacaacattcaaatctgcat

SEQ ID NO: 76771 - DNA, 22 bp, Artificial Sequence
  Synthetic oligonucleotide; TTT chr11 5185991 5186012 5186008 5186013 +
gtacaacattcaaatctgcata

SEQ ID NO: 76772 - DNA, 22 bp, Artificial Sequence
  Synthetic oligonucleotide; TTG chr11 5185992 5186013 5186009 5186014 +
tacaacattcaaatctgcatat

SEQ ID NO: 76773 - DNA, 22 bp, Artificial Sequence
  Synthetic oligonucleotide; TTC chr11 5186002 5186023 5186019 5186024 +
aaatctgcatatcaaagaaaat

SEQ ID NO: 76774 - DNA, 22 bp, Artificial Sequence
  Synthetic oligonucleotide; CTG chr11 5186009 5186030 5186026 5186031 +
catatcaaagaaaatgagcatt

SEQ ID NO: 76775 - DNA, 22 bp, Artificial Sequence
  Synthetic oligonucleotide; TTA chr11 5186032 5186053 5186049 5186054 +
tttaaacatattctaagagaaa

SEQ ID NO: 76776 - DNA, 22 bp, Artificial Sequence
  Synthetic oligonucleotide; TTT chr11 5186035 5186056 5186052 5186057 +
aaacatattctaagagaaaact

SEQ ID NO: 76777 - DNA, 22 bp, Artificial Sequence
  Synthetic oligonucleotide; TTA chr11 5186036 5186057 5186053 5186058 +
aacatattctaagagaaaacta

SEQ ID NO: 76778 - DNA, 22 bp, Artificial Sequence
  Synthetic oligonucleotide; TTC chr11 5186045 5186066 5186062 5186067 +
taagagaaaactaaaatattct

SEQ ID NO: 76779 - DNA, 22 bp, Artificial Sequence
  Synthetic oligonucleotide; CTA chr11 5186047 5186068 5186064 5186069 +
agagaaaactaaaatattcttt

SEQ ID NO: 76780 - DNA, 22 bp, Artificial Sequence
  Synthetic oligonucleotide; CTA chr11 5186058 5186079 5186075 5186080 +
aaatattctttttgaaaatgac

SEQ ID NO: 76781 - DNA, 22 bp, Artificial Sequence
  Synthetic oligonucleotide; TTC chr11 5186066 5186087 5186083 5186088 +
tttttgaaaatgacttacttaa

SEQ ID NO: 76782 - DNA, 22 bp, Artificial Sequence
  Synthetic oligonucleotide; CTT chr11 5186068 5186089 5186085 5186090 +
tttgaaaatgacttacttaata

SEQ ID NO: 76783 - DNA, 22 bp, Artificial Sequence
  Synthetic oligonucleotide; TTT chr11 5186069 5186090 5186086 5186091 +
ttgaaaatgacttacttaatac

SEQ ID NO: 76784 - DNA, 22 bp, Artificial Sequence
  Synthetic oligonucleotide; TTT chr11 5186070 5186091 5186087 5186092 +
tgaaaatgacttacttaataca

SEQ ID NO: 76785 - DNA, 22 bp, Artificial Sequence
  Synthetic oligonucleotide; TTT chr11 5186071 5186092 5186088 5186093 +
gaaaatgacttacttaatacaa

SEQ ID NO: 76786 - DNA, 22 bp, Artificial Sequence
  Synthetic oligonucleotide; TTG chr11 5186072 5186093 5186089 5186094 +
aaaatgacttacttaatacaag

SEQ ID NO: 76787 - DNA, 22 bp, Artificial Sequence
  Synthetic oligonucleotide; CTT chr11 5186082 5186103 5186099 5186104 +
acttaatacaagaacacaaaaa

SEQ ID NO: 76788 - DNA, 22 bp, Artificial Sequence
  Synthetic oligonucleotide; TTA chr11 5186083 5186104 5186100 5186105 +
cttaatacaagaacacaaaaaa

SEQ ID NO: 76789 - DNA, 22 bp, Artificial Sequence
  Synthetic oligonucleotide; CTT chr11 5186086 5186107 5186103 5186108 +
aatacaagaacacaaaaaatac

SEQ ID NO: 76790 - DNA, 22 bp, Artificial Sequence
  Synthetic oligonucleotide; TTA chr11 5186087 5186108 5186104 5186109 +
atacaagaacacaaaaaatact

SEQ ID NO: 76791 - DNA, 22 bp, Artificial Sequence
  Synthetic oligonucleotide; CTA chr11 5186110 5186131 5186127 5186132 +
caattgcaaatcaactccagct

SEQ ID NO: 76792 - DNA, 22 bp, Artificial Sequence
  Synthetic oligonucleotide; TTG chr11 5186116 5186137 5186133 5186138 +
caaatcaactccagctaaagcc

SEQ ID NO: 76793 - DNA, 22 bp, Artificial Sequence
  Synthetic oligonucleotide; CTC chr11 5186127 5186148 5186144 5186149 +
cagctaaagccaagtctagtat

SEQ ID NO: 76794 - DNA, 22 bp, Artificial Sequence
  Synthetic oligonucleotide; CTA chr11 5186133 5186154 5186150 5186155 +
aagccaagtctagtattccatg

SEQ ID NO: 76795 - DNA, 22 bp, Artificial Sequence
  Synthetic oligonucleotide; CTA chr11 5186145 5186166 5186162 5186167 +
gtattccatgggtcaaaaatca

SEQ ID NO: 76796 - DNA, 22 bp, Artificial Sequence
  Synthetic oligonucleotide; TTC chr11 5186151 5186172 5186168 5186173 +
catgggtcaaaaatcaaggaaa

SEQ ID NO: 76797 - DNA, 22 bp, Artificial Sequence
  Synthetic oligonucleotide; TTA chr11 5186179 5186200 5186196 5186201 +
gatgattaagttatcggaagaa

SEQ ID NO: 76798 - DNA, 22 bp, Artificial Sequence
  Synthetic oligonucleotide; TTA chr11 5186187 5186208 5186204 5186209 +
agttatcggaagaatgagctgc

SEQ ID NO: 76799 - DNA, 22 bp, Artificial Sequence
  Synthetic oligonucleotide; TTA chr11 5186192 5186213 5186209 5186214 +
tcggaagaatgagctgcttctg

SEQ ID NO: 76800 - DNA, 22 bp, Artificial Sequence
  Synthetic oligonucleotide; CTG chr11 5186208 5186229 5186225 5186230 +
cttctgcagtttcttgcctttt

SEQ ID NO: 76801 - DNA, 22 bp, Artificial Sequence
  Synthetic oligonucleotide; CTT chr11 5186211 5186232 5186228 5186233 +
ctgcagtttcttgccttttttt

SEQ ID NO: 76802 - DNA, 22 bp, Artificial Sequence
  Synthetic oligonucleotide; TTC chr11 5186212 5186233 5186229 5186234 +
tgcagtttcttgcctttttttt

SEQ ID NO: 76803 - DNA, 22 bp, Artificial Sequence
  Synthetic oligonucleotide; CTG chr11 5186214 5186235 5186231 5186236 +
cagtttcttgcctttttttttt

SEQ ID NO: 76804 - DNA, 22 bp, Artificial Sequence
  Synthetic oligonucleotide; TTT chr11 5186220 5186241 5186237 5186242 +
cttgccttttttttttctggtg

SEQ ID NO: 76805 - DNA, 22 bp, Artificial Sequence
  Synthetic oligonucleotide; TTC chr11 5186221 5186242 5186238 5186243 +
ttgccttttttttttctggtgt

SEQ ID NO: 76806 - DNA, 22 bp, Artificial Sequence
  Synthetic oligonucleotide; CTT chr11 5186223 5186244 5186240 5186245 +
gccttttttttttctggtgtta

SEQ ID NO: 76807 - DNA, 22 bp, Artificial Sequence
  Synthetic oligonucleotide; TTG chr11 5186224 5186245 5186241 5186246 +
ccttttttttttctggtgttat

SEQ ID NO: 76808 - DNA, 22 bp, Artificial Sequence
  Synthetic oligonucleotide; CTT chr11 5186228 5186249 5186245 5186250 +
ttttttttctggtgttattttc

SEQ ID NO: 76809 - DNA, 22 bp, Artificial Sequence
  Synthetic oligonucleotide; TTT chr11 5186229 5186250 5186246 5186251 +
tttttttctggtgttattttct

SEQ ID NO: 76810 - DNA, 22 bp, Artificial Sequence
  Synthetic oligonucleotide; TTT chr11 5186230 5186251 5186247 5186252 +
ttttttctggtgttattttcta

SEQ ID NO: 76811 - DNA, 22 bp, Artificial Sequence
  Synthetic oligonucleotide; TTT chr11 5186231 5186252 5186248 5186253 +
tttttctggtgttattttctac

SEQ ID NO: 76812 - DNA, 22 bp, Artificial Sequence
  Synthetic oligonucleotide; TTT chr11 5186232 5186253 5186249 5186254 +
ttttctggtgttattttctaca

SEQ ID NO: 76813 - DNA, 22 bp, Artificial Sequence
  Synthetic oligonucleotide; TTT chr11 5186233 5186254 5186250 5186255 +
tttctggtgttattttctacaa

SEQ ID NO: 76814 - DNA, 22 bp, Artificial Sequence
  Synthetic oligonucleotide; TTT chr11 5186234 5186255 5186251 5186256 +
ttctggtgttattttctacaag

SEQ ID NO: 76815 - DNA, 22 bp, Artificial Sequence
  Synthetic oligonucleotide; TTT chr11 5186235 5186256 5186252 5186257 +
tctggtgttattttctacaagt

SEQ ID NO: 76816 - DNA, 22 bp, Artificial Sequence
  Synthetic oligonucleotide; TTT chr11 5186236 5186257 5186253 5186258 +
ctggtgttattttctacaagtt

SEQ ID NO: 76817 - DNA, 22 bp, Artificial Sequence
  Synthetic oligonucleotide; TTC chr11 5186237 5186258 5186254 5186259 +
tggtgttattttctacaagttt

SEQ ID NO: 76818 - DNA, 22 bp, Artificial Sequence
  Synthetic oligonucleotide; CTG chr11 5186239 5186260 5186256 5186261 +
gtgttattttctacaagttttc

SEQ ID NO: 76819 - DNA, 22 bp, Artificial Sequence
  Synthetic oligonucleotide; TTA chr11 5186245 5186266 5186262 5186267 +
ttttctacaagttttcattgag

SEQ ID NO: 76820 - DNA, 22 bp, Artificial Sequence
  Synthetic oligonucleotide; TTT chr11 5186248 5186269 5186265 5186270 +
tctacaagttttcattgagcat

SEQ ID NO: 76821 - DNA, 22 bp, Artificial Sequence
  Synthetic oligonucleotide; TTT chr11 5186249 5186270 5186266 5186271 +
ctacaagttttcattgagcata

SEQ ID NO: 76822 - DNA, 22 bp, Artificial Sequence
  Synthetic oligonucleotide; TTC chr11 5186250 5186271 5186267 5186272 +
tacaagttttcattgagcataa

SEQ ID NO: 76823 - DNA, 22 bp, Artificial Sequence
  Synthetic oligonucleotide; CTA chr11 5186252 5186273 5186269 5186274 +
caagttttcattgagcataact

SEQ ID NO: 76824 - DNA, 22 bp, Artificial Sequence
  Synthetic oligonucleotide; TTT chr11 5186259 5186280 5186276 5186281 +
tcattgagcataactcagttta

SEQ ID NO: 76825 - DNA, 22 bp, Artificial Sequence
  Synthetic oligonucleotide; TTT chr11 5186260 5186281 5186277 5186282 +
cattgagcataactcagtttac

SEQ ID NO: 76826 - DNA, 22 bp, Artificial Sequence
  Synthetic oligonucleotide; TTC chr11 5186261 5186282 5186278 5186283 +
attgagcataactcagtttact

SEQ ID NO: 76827 - DNA, 22 bp, Artificial Sequence
  Synthetic oligonucleotide; TTG chr11 5186265 5186286 5186282 5186287 +
agcataactcagtttacttact

SEQ ID NO: 76828 - DNA, 22 bp, Artificial Sequence
  Synthetic oligonucleotide; CTC chr11 5186275 5186296 5186292 5186297 +
agtttacttacttgcattttct

SEQ ID NO: 76829 - DNA, 22 bp, Artificial Sequence
  Synthetic oligonucleotide; TTT chr11 5186280 5186301 5186297 5186302 +
acttacttgcattttctagaat

SEQ ID NO: 76830 - DNA, 22 bp, Artificial Sequence
  Synthetic oligonucleotide; TTA chr11 5186281 5186302 5186298 5186303 +
cttacttgcattttctagaatc

SEQ ID NO: 76831 - DNA, 22 bp, Artificial Sequence
  Synthetic oligonucleotide; CTT chr11 5186284 5186305 5186301 5186306 +
acttgcattttctagaatcctg

SEQ ID NO: 76832 - DNA, 22 bp, Artificial Sequence
  Synthetic oligonucleotide; TTA chr11 5186285 5186306 5186302 5186307 +
cttgcattttctagaatcctga

SEQ ID NO: 76833 - DNA, 22 bp, Artificial Sequence
  Synthetic oligonucleotide; CTT chr11 5186288 5186309 5186305 5186310 +
gcattttctagaatcctgaaga

SEQ ID NO: 76834 - DNA, 22 bp, Artificial Sequence
  Synthetic oligonucleotide; TTG chr11 5186289 5186310 5186306 5186311 +
cattttctagaatcctgaagat

SEQ ID NO: 76835 - DNA, 22 bp, Artificial Sequence
  Synthetic oligonucleotide; TTT chr11 5186294 5186315 5186311 5186316 +
tctagaatcctgaagatattta

SEQ ID NO: 76836 - DNA, 22 bp, Artificial Sequence
  Synthetic oligonucleotide; TTT chr11 5186295 5186316 5186312 5186317 +
ctagaatcctgaagatatttag

SEQ ID NO: 76837 - DNA, 22 bp, Artificial Sequence
  Synthetic oligonucleotide; TTC chr11 5186296 5186317 5186313 5186318 +
tagaatcctgaagatatttagc

SEQ ID NO: 76838 - DNA, 22 bp, Artificial Sequence
  Synthetic oligonucleotide; CTA chr11 5186298 5186319 5186315 5186320 +
gaatcctgaagatatttagcag

SEQ ID NO: 76839 - DNA, 22 bp, Artificial Sequence
  Synthetic oligonucleotide; CTG chr11 5186306 5186327 5186323 5186328 +
aagatatttagcaggttgagag

SEQ ID NO: 76840 - DNA, 22 bp, Artificial Sequence
  Synthetic oligonucleotide; TTT chr11 5186315 5186336 5186332 5186337 +
agcaggttgagaggagacaaaa

SEQ ID NO: 76841 - DNA, 22 bp, Artificial Sequence
  Synthetic oligonucleotide; TTA chr11 5186316 5186337 5186333 5186338 +
gcaggttgagaggagacaaaat

SEQ ID NO: 76842 - DNA, 22 bp, Artificial Sequence
  Synthetic oligonucleotide; TTG chr11 5186324 5186345 5186341 5186346 +
agaggagacaaaataaatgcaa

SEQ ID NO: 76843 - DNA, 22 bp, Artificial Sequence
  Synthetic oligonucleotide; TTA chr11 5186354 5186375 5186371 5186376 +
ggaaatctggaactatttatac

SEQ ID NO: 76844 - DNA, 22 bp, Artificial Sequence
  Synthetic oligonucleotide; CTG chr11 5186363 5186384 5186380 5186385 +
gaactatttatacttcttttaa

SEQ ID NO: 76845 - DNA, 22 bp, Artificial Sequence
  Synthetic oligonucleotide; CTA chr11 5186369 5186390 5186386 5186391 +
tttatacttcttttaaagcatg

SEQ ID NO: 76846 - DNA, 22 bp, Artificial Sequence
  Synthetic oligonucleotide; TTT chr11 5186372 5186393 5186389 5186394 +
atacttcttttaaagcatgtct

SEQ ID NO: 76847 - DNA, 22 bp, Artificial Sequence
  Synthetic oligonucleotide; TTA chr11 5186373 5186394 5186390 5186395 +
tacttcttttaaagcatgtctt

SEQ ID NO: 76848 - DNA, 22 bp, Artificial Sequence
  Synthetic oligonucleotide; CTT chr11 5186378 5186399 5186395 5186400 +
cttttaaagcatgtcttgggcc

SEQ ID NO: 76849 - DNA, 22 bp, Artificial Sequence
  Synthetic oligonucleotide; TTC chr11 5186379 5186400 5186396 5186401 +
ttttaaagcatgtcttgggccc

SEQ ID NO: 76850 - DNA, 22 bp, Artificial Sequence
  Synthetic oligonucleotide; CTT chr11 5186381 5186402 5186398 5186403 +
ttaaagcatgtcttgggcccaa

SEQ ID NO: 76851 - DNA, 22 bp, Artificial Sequence
  Synthetic oligonucleotide; TTT chr11 5186382 5186403 5186399 5186404 +
taaagcatgtcttgggcccaag

SEQ ID NO: 76852 - DNA, 22 bp, Artificial Sequence
  Synthetic oligonucleotide; TTT chr11 5186383 5186404 5186400 5186405 +
aaagcatgtcttgggcccaagg

SEQ ID NO: 76853 - DNA, 22 bp, Artificial Sequence
  Synthetic oligonucleotide; TTA chr11 5186384 5186405 5186401 5186406 +
aagcatgtcttgggcccaaggt

SEQ ID NO: 76854 - DNA, 22 bp, Artificial Sequence
  Synthetic oligonucleotide; CTT chr11 5186395 5186416 5186412 5186417 +
gggcccaaggttttcagcttaa

SEQ ID NO: 76855 - DNA, 22 bp, Artificial Sequence
  Synthetic oligonucleotide; TTG chr11 5186396 5186417 5186413 5186418 +
ggcccaaggttttcagcttaag

SEQ ID NO: 76856 - DNA, 22 bp, Artificial Sequence
  Synthetic oligonucleotide; TTT chr11 5186408 5186429 5186425 5186430 +
tcagcttaagaggacgaatttt

SEQ ID NO: 76857 - DNA, 22 bp, Artificial Sequence
  Synthetic oligonucleotide; TTT chr11 5186409 5186430 5186426 5186431 +
cagcttaagaggacgaatttta

SEQ ID NO: 76858 - DNA, 22 bp, Artificial Sequence
  Synthetic oligonucleotide; TTC chr11 5186410 5186431 5186427 5186432 +
agcttaagaggacgaattttac

SEQ ID NO: 76859 - DNA, 22 bp, Artificial Sequence
  Synthetic oligonucleotide; CTT chr11 5186415 5186436 5186432 5186437 +
aagaggacgaattttactcctc

SEQ ID NO: 76860 - DNA, 22 bp, Artificial Sequence
  Synthetic oligonucleotide; TTA chr11 5186416 5186437 5186433 5186438 +
agaggacgaattttactcctcc

SEQ ID NO: 76861 - DNA, 22 bp, Artificial Sequence
  Synthetic oligonucleotide; TTT chr11 5186429 5186450 5186446 5186451 +
tactcctcccatggaaggagat

SEQ ID NO: 76862 - DNA, 22 bp, Artificial Sequence
  Synthetic oligonucleotide; TTT chr11 5186430 5186451 5186447 5186452 +
actcctcccatggaaggagatg

SEQ ID NO: 76863 - DNA, 22 bp, Artificial Sequence
  Synthetic oligonucleotide; TTA chr11 5186431 5186452 5186448 5186453 +
ctcctcccatggaaggagatga

SEQ ID NO: 76864 - DNA, 22 bp, Artificial Sequence
  Synthetic oligonucleotide; CTC chr11 5186434 5186455 5186451 5186456 +
ctcccatggaaggagatgacac

SEQ ID NO: 76865 - DNA, 22 bp, Artificial Sequence
  Synthetic oligonucleotide; CTC chr11 5186437 5186458 5186454 5186459 +
ccatggaaggagatgacacaga

SEQ ID NO: 76866 - DNA, 22 bp, Artificial Sequence
  Synthetic oligonucleotide; CTG chr11 5186463 5186484 5186480 5186485 +
cttctggtacatagtccacagg

SEQ ID NO: 76867 - DNA, 22 bp, Artificial Sequence
  Synthetic oligonucleotide; CTT chr11 5186466 5186487 5186483 5186488 +
ctggtacatagtccacagggag

SEQ ID NO: 76868 - DNA, 22 bp, Artificial Sequence
  Synthetic oligonucleotide; TTC chr11 5186467 5186488 5186484 5186489 +
tggtacatagtccacagggaga

SEQ ID NO: 76869 - DNA, 22 bp, Artificial Sequence
  Synthetic oligonucleotide; CTG chr11 5186469 5186490 5186486 5186491 +
gtacatagtccacagggagaaa

SEQ ID NO: 76870 - DNA, 22 bp, Artificial Sequence
  Synthetic oligonucleotide; CTG chr11 5186498 5186519 5186515 5186520 +
cattctctttcattataatttg

SEQ ID NO: 76871 - DNA, 22 bp, Artificial Sequence
  Synthetic oligonucleotide; TTC chr11 5186503 5186524 5186520 5186525 +
tctttcattataatttgtgcat

SEQ ID NO: 76872 - DNA, 22 bp, Artificial Sequence
  Synthetic oligonucleotide; CTC chr11 5186505 5186526 5186522 5186527 +
tttcattataatttgtgcattt

SEQ ID NO: 76873 - DNA, 22 bp, Artificial Sequence
  Synthetic oligonucleotide; CTT chr11 5186507 5186528 5186524 5186529 +
tcattataatttgtgcattttt

SEQ ID NO: 76874 - DNA, 22 bp, Artificial Sequence
  Synthetic oligonucleotide; TTT chr11 5186508 5186529 5186525 5186530 +
cattataatttgtgcatttttt

SEQ ID NO: 76875 - DNA, 22 bp, Artificial Sequence
  Synthetic oligonucleotide; TTC chr11 5186509 5186530 5186526 5186531 +
attataatttgtgcattttttt

SEQ ID NO: 76876 - DNA, 22 bp, Artificial Sequence
  Synthetic oligonucleotide; TTA chr11 5186513 5186534 5186530 5186535 +
taatttgtgcattttttttctt

SEQ ID NO: 76877 - DNA, 22 bp, Artificial Sequence
  Synthetic oligonucleotide; TTT chr11 5186519 5186540 5186536 5186541 +
gtgcattttttttcttcagcca

SEQ ID NO: 76878 - DNA, 22 bp, Artificial Sequence
  Synthetic oligonucleotide; TTG chr11 5186520 5186541 5186537 5186542 +
tgcattttttttcttcagccac

SEQ ID NO: 76879 - DNA, 22 bp, Artificial Sequence
  Synthetic oligonucleotide; TTT chr11 5186527 5186548 5186544 5186549 +
tttttcttcagccaccactctc

SEQ ID NO: 76880 - DNA, 22 bp, Artificial Sequence
  Synthetic oligonucleotide; TTT chr11 5186528 5186549 5186545 5186550 +
ttttcttcagccaccactctct

SEQ ID NO: 76881 - DNA, 22 bp, Artificial Sequence
  Synthetic oligonucleotide; TTT chr11 5186529 5186550 5186546 5186551 +
tttcttcagccaccactctctg

SEQ ID NO: 76882 - DNA, 22 bp, Artificial Sequence
  Synthetic oligonucleotide; TTT chr11 5186530 5186551 5186547 5186552 +
ttcttcagccaccactctctga

SEQ ID NO: 76883 - DNA, 22 bp, Artificial Sequence
  Synthetic oligonucleotide; TTT chr11 5186531 5186552 5186548 5186553 +
tcttcagccaccactctctgac

SEQ ID NO: 76884 - DNA, 22 bp, Artificial Sequence
  Synthetic oligonucleotide; TTT chr11 5186532 5186553 5186549 5186554 +
cttcagccaccactctctgaca

SEQ ID NO: 76885 - DNA, 22 bp, Artificial Sequence
  Synthetic oligonucleotide; TTC chr11 5186533 5186554 5186550 5186555 +
ttcagccaccactctctgacac

SEQ ID NO: 76886 - DNA, 22 bp, Artificial Sequence
  Synthetic oligonucleotide; CTT chr11 5186535 5186556 5186552 5186557 +
cagccaccactctctgacacct

SEQ ID NO: 76887 - DNA, 22 bp, Artificial Sequence
  Synthetic oligonucleotide; TTC chr11 5186536 5186557 5186553 5186558 +
agccaccactctctgacaccta

SEQ ID NO: 76888 - DNA, 22 bp, Artificial Sequence
  Synthetic oligonucleotide; CTC chr11 5186547 5186568 5186564 5186569 +
tctgacacctaagttaatacat

SEQ ID NO: 76889 - DNA, 22 bp, Artificial Sequence
  Synthetic oligonucleotide; CTC chr11 5186549 5186570 5186566 5186571 +
tgacacctaagttaatacatac

SEQ ID NO: 76890 - DNA, 22 bp, Artificial Sequence
  Synthetic oligonucleotide; CTG chr11 5186551 5186572 5186568 5186573 +
acacctaagttaatacatacat

SEQ ID NO: 76891 - DNA, 22 bp, Artificial Sequence
  Synthetic oligonucleotide; CTA chr11 5186558 5186579 5186575 5186580 +
agttaatacatacatctacatg

SEQ ID NO: 76892 - DNA, 22 bp, Artificial Sequence
  Synthetic oligonucleotide; TTA chr11 5186563 5186584 5186580 5186585 +
atacatacatctacatgtccag

SEQ ID NO: 76893 - DNA, 22 bp, Artificial Sequence
  Synthetic oligonucleotide; CTA chr11 5186576 5186597 5186593 5186598 +
catgtccaggtcttttgtccct

SEQ ID NO: 76894 - DNA, 22 bp, Artificial Sequence
  Synthetic oligonucleotide; CTT chr11 5186590 5186611 5186607 5186612 +
ttgtccctgtcatatattgttt

SEQ ID NO: 76895 - DNA, 22 bp, Artificial Sequence
  Synthetic oligonucleotide; TTT chr11 5186591 5186612 5186608 5186613 +
tgtccctgtcatatattgtttc

SEQ ID NO: 76896 - DNA, 22 bp, Artificial Sequence
  Synthetic oligonucleotide; TTT chr11 5186592 5186613 5186609 5186614 +
gtccctgtcatatattgtttcc

SEQ ID NO: 76897 - DNA, 22 bp, Artificial Sequence
  Synthetic oligonucleotide; TTG chr11 5186593 5186614 5186610 5186615 +
tccctgtcatatattgtttcca

SEQ ID NO: 76898 - DNA, 22 bp, Artificial Sequence
  Synthetic oligonucleotide; CTG chr11 5186599 5186620 5186616 5186621 +
tcatatattgtttccaatgagc

SEQ ID NO: 76899 - DNA, 22 bp, Artificial Sequence
  Synthetic oligonucleotide; TTG chr11 5186609 5186630 5186626 5186631 +
tttccaatgagccattggcaaa

SEQ ID NO: 76900 - DNA, 22 bp, Artificial Sequence
  Synthetic oligonucleotide; TTT chr11 5186612 5186633 5186629 5186634 +
ccaatgagccattggcaaatat

SEQ ID NO: 76901 - DNA, 22 bp, Artificial Sequence
  Synthetic oligonucleotide; TTC chr11 5186613 5186634 5186630 5186635 +
caatgagccattggcaaatata

SEQ ID NO: 76902 - DNA, 22 bp, Artificial Sequence
  Synthetic oligonucleotide; TTG chr11 5186626 5186647 5186643 5186648 +
gcaaatataggttgcaaaggag

SEQ ID NO: 76903 - DNA, 22 bp, Artificial Sequence
  Synthetic oligonucleotide; TTG chr11 5186640 5186661 5186657 5186662 +
caaaggagacatgtgggagaag

SEQ ID NO: 76904 - DNA, 22 bp, Artificial Sequence
  Synthetic oligonucleotide; CTT chr11 5186667 5186688 5186684 5186689 +
tacacatcttagatggcaccta

SEQ ID NO: 76905 - DNA, 22 bp, Artificial Sequence
  Synthetic oligonucleotide; TTT chr11 5186668 5186689 5186685 5186690 +
acacatcttagatggcacctaa

SEQ ID NO: 76906 - DNA, 22 bp, Artificial Sequence
  Synthetic oligonucleotide; TTA chr11 5186669 5186690 5186686 5186691 +
cacatcttagatggcacctaaa

SEQ ID NO: 76907 - DNA, 22 bp, Artificial Sequence
  Synthetic oligonucleotide; CTT chr11 5186677 5186698 5186694 5186699 +
agatggcacctaaaagttaatt

SEQ ID NO: 76908 - DNA, 22 bp, Artificial Sequence
  Synthetic oligonucleotide; TTA chr11 5186678 5186699 5186695 5186700 +
gatggcacctaaaagttaattc

SEQ ID NO: 76909 - DNA, 22 bp, Artificial Sequence
  Synthetic oligonucleotide; CTA chr11 5186689 5186710 5186706 5186711 +
aaagttaattctctcattttat

SEQ ID NO: 76910 - DNA, 22 bp, Artificial Sequence
  Synthetic oligonucleotide; TTA chr11 5186696 5186717 5186713 5186718 +
attctctcattttatttccctt

SEQ ID NO: 76911 - DNA, 22 bp, Artificial Sequence
  Synthetic oligonucleotide; TTC chr11 5186700 5186721 5186717 5186722 +
tctcattttatttccctttaat

SEQ ID NO: 76912 - DNA, 22 bp, Artificial Sequence
  Synthetic oligonucleotide; CTC chr11 5186702 5186723 5186719 5186724 +
tcattttatttccctttaattt

SEQ ID NO: 76913 - DNA, 22 bp, Artificial Sequence
  Synthetic oligonucleotide; CTC chr11 5186704 5186725 5186721 5186726 +
attttatttccctttaattttt

SEQ ID NO: 76914 - DNA, 22 bp, Artificial Sequence
  Synthetic oligonucleotide; TTT chr11 5186708 5186729 5186725 5186730 +
tatttccctttaatttttaagg

SEQ ID NO: 76915 - DNA, 22 bp, Artificial Sequence
  Synthetic oligonucleotide; TTT chr11 5186709 5186730 5186726 5186731 +
atttccctttaatttttaaggt

SEQ ID NO: 76916 - DNA, 22 bp, Artificial Sequence
  Synthetic oligonucleotide; TTA chr11 5186710 5186731 5186727 5186732 +
tttccctttaatttttaaggtt

SEQ ID NO: 76917 - DNA, 22 bp, Artificial Sequence
  Synthetic oligonucleotide; TTT chr11 5186713 5186734 5186730 5186735 +
ccctttaatttttaaggttcta

SEQ ID NO: 76918 - DNA, 22 bp, Artificial Sequence
  Synthetic oligonucleotide; TTC chr11 5186714 5186735 5186731 5186736 +
cctttaatttttaaggttctat

SEQ ID NO: 76919 - DNA, 22 bp, Artificial Sequence
  Synthetic oligonucleotide; CTT chr11 5186718 5186739 5186735 5186740 +
taatttttaaggttctattgct

SEQ ID NO: 76920 - DNA, 22 bp, Artificial Sequence
  Synthetic oligonucleotide; TTT chr11 5186719 5186740 5186736 5186741 +
aatttttaaggttctattgctt

SEQ ID NO: 76921 - DNA, 22 bp, Artificial Sequence
  Synthetic oligonucleotide; TTA chr11 5186720 5186741 5186737 5186742 +
atttttaaggttctattgcttt

SEQ ID NO: 76922 - DNA, 22 bp, Artificial Sequence
  Synthetic oligonucleotide; TTT chr11 5186724 5186745 5186741 5186746 +
ttaaggttctattgctttccct

SEQ ID NO: 76923 - DNA, 22 bp, Artificial Sequence
  Synthetic oligonucleotide; TTT chr11 5186725 5186746 5186742 5186747 +
taaggttctattgctttccctg

SEQ ID NO: 76924 - DNA, 22 bp, Artificial Sequence
  Synthetic oligonucleotide; TTT chr11 5186726 5186747 5186743 5186748 +
aaggttctattgctttccctgc

SEQ ID NO: 76925 - DNA, 22 bp, Artificial Sequence
  Synthetic oligonucleotide; TTA chr11 5186727 5186748 5186744 5186749 +
aggttctattgctttccctgct

SEQ ID NO: 76926 - DNA, 22 bp, Artificial Sequence
  Synthetic oligonucleotide; TTC chr11 5186733 5186754 5186750 5186755 +
tattgctttccctgctttttct

SEQ ID NO: 76927 - DNA, 22 bp, Artificial Sequence
  Synthetic oligonucleotide; CTA chr11 5186735 5186756 5186752 5186757 +
ttgctttccctgctttttcttg

SEQ ID NO: 76928 - DNA, 22 bp, Artificial Sequence
  Synthetic oligonucleotide; TTG chr11 5186738 5186759 5186755 5186760 +
ctttccctgctttttcttggtc

SEQ ID NO: 76929 - DNA, 22 bp, Artificial Sequence
  Synthetic oligonucleotide; CTT chr11 5186741 5186762 5186758 5186763 +
tccctgctttttcttggtcaca

SEQ ID NO: 76930 - DNA, 22 bp, Artificial Sequence
  Synthetic oligonucleotide; TTT chr11 5186742 5186763 5186759 5186764 +
ccctgctttttcttggtcacat

SEQ ID NO: 76931 - DNA, 22 bp, Artificial Sequence
  Synthetic oligonucleotide; TTC chr11 5186743 5186764 5186760 5186765 +
cctgctttttcttggtcacatg

SEQ ID NO: 76932 - DNA, 22 bp, Artificial Sequence
  Synthetic oligonucleotide; CTG chr11 5186747 5186768 5186764 5186769 +
ctttttcttggtcacatggtaa

SEQ ID NO: 76933 - DNA, 22 bp, Artificial Sequence
  Synthetic oligonucleotide; CTT chr11 5186750 5186771 5186767 5186772 +
tttcttggtcacatggtaaatg

SEQ ID NO: 76934 - DNA, 22 bp, Artificial Sequence
  Synthetic oligonucleotide; TTT chr11 5186751 5186772 5186768 5186773 +
ttcttggtcacatggtaaatgg

SEQ ID NO: 76935 - DNA, 22 bp, Artificial Sequence
  Synthetic oligonucleotide; TTT chr11 5186752 5186773 5186769 5186774 +
tcttggtcacatggtaaatggg

SEQ ID NO: 76936 - DNA, 22 bp, Artificial Sequence
  Synthetic oligonucleotide; TTT chr11 5186753 5186774 5186770 5186775 +
cttggtcacatggtaaatgggt

SEQ ID NO: 76937 - DNA, 22 bp, Artificial Sequence
  Synthetic oligonucleotide; TTC chr11 5186754 5186775 5186771 5186776 +
ttggtcacatggtaaatgggtc

SEQ ID NO: 76938 - DNA, 22 bp, Artificial Sequence
  Synthetic oligonucleotide; CTT chr11 5186756 5186777 5186773 5186778 +
ggtcacatggtaaatgggtcag

SEQ ID NO: 76939 - DNA, 22 bp, Artificial Sequence
  Synthetic oligonucleotide; TTG chr11 5186757 5186778 5186774 5186779 +
gtcacatggtaaatgggtcaga

SEQ ID NO: 76940 - DNA, 22 bp, Artificial Sequence
  Synthetic oligonucleotide; CTG chr11 5186784 5186805 5186801 5186806 +
aagggccaagaaattatattag

SEQ ID NO: 76941 - DNA, 22 bp, Artificial Sequence
  Synthetic oligonucleotide; TTA chr11 5186800 5186821 5186817 5186822 +
tattagctactgtagatatccc

SEQ ID NO: 76942 - DNA, 22 bp, Artificial Sequence
  Synthetic oligonucleotide; TTA chr11 5186805 5186826 5186822 5186827 +
gctactgtagatatcccattct

SEQ ID NO: 76943 - DNA, 22 bp, Artificial Sequence
  Synthetic oligonucleotide; CTA chr11 5186809 5186830 5186826 5186831 +
ctgtagatatcccattctcttg

SEQ ID NO: 76944 - DNA, 22 bp, Artificial Sequence
  Synthetic oligonucleotide; CTG chr11 5186812 5186833 5186829 5186834 +
tagatatcccattctcttgaag

SEQ ID NO: 76945 - DNA, 22 bp, Artificial Sequence
  Synthetic oligonucleotide; TTC chr11 5186826 5186847 5186843 5186848 +
tcttgaaggatactttaatgag

SEQ ID NO: 76946 - DNA, 22 bp, Artificial Sequence
  Synthetic oligonucleotide; CTC chr11 5186828 5186849 5186845 5186850 +
ttgaaggatactttaatgagga

SEQ ID NO: 76947 - DNA, 22 bp, Artificial Sequence
  Synthetic oligonucleotide; CTT chr11 5186830 5186851 5186847 5186852 +
gaaggatactttaatgaggaat

SEQ ID NO: 76948 - DNA, 22 bp, Artificial Sequence
  Synthetic oligonucleotide; TTG chr11 5186831 5186852 5186848 5186853 +
aaggatactttaatgaggaata

SEQ ID NO: 76949 - DNA, 22 bp, Artificial Sequence
  Synthetic oligonucleotide; CTT chr11 5186841 5186862 5186858 5186863 +
taatgaggaatacagatgaaga

SEQ ID NO: 76950 - DNA, 22 bp, Artificial Sequence
  Synthetic oligonucleotide; TTT chr11 5186842 5186863 5186859 5186864 +
aatgaggaatacagatgaagat

SEQ ID NO: 76951 - DNA, 22 bp, Artificial Sequence
  Synthetic oligonucleotide; TTA chr11 5186843 5186864 5186860 5186865 +
atgaggaatacagatgaagata

SEQ ID NO: 76952 - DNA, 22 bp, Artificial Sequence
  Synthetic oligonucleotide; TTC chr11 5186894 5186915 5186911 5186916 +
atggaattaaaaactggcttca

SEQ ID NO: 76953 - DNA, 22 bp, Artificial Sequence
  Synthetic oligonucleotide; TTA chr11 5186903 5186924 5186920 5186925 +
aaaactggcttcacactgataa

SEQ ID NO: 76954 - DNA, 22 bp, Artificial Sequence
  Synthetic oligonucleotide; CTG chr11 5186910 5186931 5186927 5186932 +
gcttcacactgataagccagat

SEQ ID NO: 76955 - DNA, 22 bp, Artificial Sequence
  Synthetic oligonucleotide; CTT chr11 5186914 5186935 5186931 5186936 +
cacactgataagccagatttat

SEQ ID NO: 76956 - DNA, 22 bp, Artificial Sequence
  Synthetic oligonucleotide; TTC chr11 5186915 5186936 5186932 5186937 +
acactgataagccagatttatg

SEQ ID NO: 76957 - DNA, 22 bp, Artificial Sequence
  Synthetic oligonucleotide; CTG chr11 5186921 5186942 5186938 5186943 +
ataagccagatttatggagaga

SEQ ID NO: 76958 - DNA, 22 bp, Artificial Sequence
  Synthetic oligonucleotide; TTT chr11 5186934 5186955 5186951 5186956 +
atggagagagatgtttccttat

SEQ ID NO: 76959 - DNA, 22 bp, Artificial Sequence
  Synthetic oligonucleotide; TTA chr11 5186935 5186956 5186952 5186957 +
tggagagagatgtttccttatt

SEQ ID NO: 76960 - DNA, 22 bp, Artificial Sequence
  Synthetic oligonucleotide; TTT chr11 5186950 5186971 5186967 5186972 +
ccttattctctcaagtggagcc

SEQ ID NO: 76961 - DNA, 22 bp, Artificial Sequence
  Synthetic oligonucleotide; TTC chr11 5186951 5186972 5186968 5186973 +
cttattctctcaagtggagcct

SEQ ID NO: 76962 - DNA, 22 bp, Artificial Sequence
  Synthetic oligonucleotide; CTT chr11 5186954 5186975 5186971 5186976 +
attctctcaagtggagccttcc

SEQ ID NO: 76963 - DNA, 22 bp, Artificial Sequence
  Synthetic oligonucleotide; TTA chr11 5186955 5186976 5186972 5186977 +
ttctctcaagtggagccttcca

SEQ ID NO: 76964 - DNA, 22 bp, Artificial Sequence
  Synthetic oligonucleotide; TTC chr11 5186958 5186979 5186975 5186980 +
tctcaagtggagccttccatat

SEQ ID NO: 76965 - DNA, 22 bp, Artificial Sequence
  Synthetic oligonucleotide; CTC chr11 5186960 5186981 5186977 5186982 +
tcaagtggagccttccatatat

SEQ ID NO: 76966 - DNA, 22 bp, Artificial Sequence
  Synthetic oligonucleotide; CTC chr11 5186962 5186983 5186979 5186984 +
aagtggagccttccatatatct

SEQ ID NO: 76967 - DNA, 22 bp, Artificial Sequence
  Synthetic oligonucleotide; CTT chr11 5186974 5186995 5186991 5186996 +
ccatatatctgtgattttctga

SEQ ID NO: 76968 - DNA, 22 bp, Artificial Sequence
  Synthetic oligonucleotide; TTC chr11 5186975 5186996 5186992 5186997 +
catatatctgtgattttctgat

SEQ ID NO: 76969 - DNA, 22 bp, Artificial Sequence
  Synthetic oligonucleotide; CTG chr11 5186985 5187006 5187002 5187007 +
tgattttctgatatttttcaaa

SEQ ID NO: 76970 - DNA, 22 bp, Artificial Sequence
  Synthetic oligonucleotide; TTT chr11 5186991 5187012 5187008 5187013 +
tctgatatttttcaaagaatcc

SEQ ID NO: 76971 - DNA, 22 bp, Artificial Sequence
  Synthetic oligonucleotide; TTT chr11 5186992 5187013 5187009 5187014 +
ctgatatttttcaaagaatccc

SEQ ID NO: 76972 - DNA, 22 bp, Artificial Sequence
  Synthetic oligonucleotide; TTC chr11 5186993 5187014 5187010 5187015 +
tgatatttttcaaagaatccct

SEQ ID NO: 76973 - DNA, 22 bp, Artificial Sequence
  Synthetic oligonucleotide; CTG chr11 5186995 5187016 5187012 5187017 +
atatttttcaaagaatccctag

SEQ ID NO: 76974 - DNA, 22 bp, Artificial Sequence
  Synthetic oligonucleotide; TTT chr11 5187001 5187022 5187018 5187023 +
ttcaaagaatccctagaagctt

SEQ ID NO: 76975 - DNA, 22 bp, Artificial Sequence
  Synthetic oligonucleotide; TTT chr11 5187002 5187023 5187019 5187024 +
tcaaagaatccctagaagcttt

SEQ ID NO: 76976 - DNA, 22 bp, Artificial Sequence
  Synthetic oligonucleotide; TTT chr11 5187003 5187024 5187020 5187025 +
caaagaatccctagaagctttt

SEQ ID NO: 76977 - DNA, 22 bp, Artificial Sequence
  Synthetic oligonucleotide; TTC chr11 5187004 5187025 5187021 5187026 +
aaagaatccctagaagcttttt

SEQ ID NO: 76978 - DNA, 22 bp, Artificial Sequence
  Synthetic oligonucleotide; CTA chr11 5187016 5187037 5187033 5187038 +
gaagcttttttcacctatagta

SEQ ID NO: 76979 - DNA, 22 bp, Artificial Sequence
  Synthetic oligonucleotide; CTT chr11 5187023 5187044 5187040 5187045 +
ttttcacctatagtagtaaaac

SEQ ID NO: 76980 - DNA, 22 bp, Artificial Sequence
  Synthetic oligonucleotide; TTT chr11 5187024 5187045 5187041 5187046 +
tttcacctatagtagtaaaact

SEQ ID NO: 76981 - DNA, 22 bp, Artificial Sequence
  Synthetic oligonucleotide; TTT chr11 5187025 5187046 5187042 5187047 +
ttcacctatagtagtaaaactt

SEQ ID NO: 76982 - DNA, 22 bp, Artificial Sequence
  Synthetic oligonucleotide; TTT chr11 5187026 5187047 5187043 5187048 +
tcacctatagtagtaaaactta

SEQ ID NO: 76983 - DNA, 22 bp, Artificial Sequence
  Synthetic oligonucleotide; TTT chr11 5187027 5187048 5187044 5187049 +
cacctatagtagtaaaacttag

SEQ ID NO: 76984 - DNA, 22 bp, Artificial Sequence
  Synthetic oligonucleotide; TTC chr11 5187028 5187049 5187045 5187050 +
acctatagtagtaaaacttagt

SEQ ID NO: 76985 - DNA, 22 bp, Artificial Sequence
  Synthetic oligonucleotide; CTA chr11 5187033 5187054 5187050 5187055 +
tagtagtaaaacttagtaaaaa

SEQ ID NO: 76986 - DNA, 22 bp, Artificial Sequence
  Synthetic oligonucleotide; CTT chr11 5187047 5187068 5187064 5187069 +
agtaaaaaaaaatagtaaaact

SEQ ID NO: 76987 - DNA, 22 bp, Artificial Sequence
  Synthetic oligonucleotide; TTA chr11 5187048 5187069 5187065 5187070 +
gtaaaaaaaaatagtaaaactt

SEQ ID NO: 76988 - DNA, 22 bp, Artificial Sequence
  Synthetic oligonucleotide; CTT chr11 5187070 5187091 5187087 5187092 +
ccctataaatatgatgtttgac

SEQ ID NO: 76989 - DNA, 22 bp, Artificial Sequence
  Synthetic oligonucleotide; TTC chr11 5187071 5187092 5187088 5187093 +
cctataaatatgatgtttgaca

SEQ ID NO: 76990 - DNA, 22 bp, Artificial Sequence
  Synthetic oligonucleotide; CTA chr11 5187075 5187096 5187092 5187097 +
taaatatgatgtttgacatcag

SEQ ID NO: 76991 - DNA, 22 bp, Artificial Sequence
  Synthetic oligonucleotide; TTT chr11 5187089 5187110 5187106 5187111 +
gacatcagctgaccctgactgg

SEQ ID NO: 76992 - DNA, 22 bp, Artificial Sequence
  Synthetic oligonucleotide; TTG chr11 5187090 5187111 5187107 5187112 +
acatcagctgaccctgactgga

SEQ ID NO: 76993 - DNA, 22 bp, Artificial Sequence
  Synthetic oligonucleotide; CTG chr11 5187100 5187121 5187117 5187122 +
accctgactggatgatcttgat

SEQ ID NO: 76994 - DNA, 22 bp, Artificial Sequence
  Synthetic oligonucleotide; CTG chr11 5187106 5187127 5187123 5187128 +
actggatgatcttgattggatg

SEQ ID NO: 76995 - DNA, 22 bp, Artificial Sequence
  Synthetic oligonucleotide; CTG chr11 5187110 5187131 5187127 5187132 +
gatgatcttgattggatgctag

SEQ ID NO: 76996 - DNA, 22 bp, Artificial Sequence
  Synthetic oligonucleotide; CTT chr11 5187119 5187140 5187136 5187141 +
gattggatgctaggcaagtgcc

SEQ ID NO: 76997 - DNA, 22 bp, Artificial Sequence
  Synthetic oligonucleotide; TTG chr11 5187120 5187141 5187137 5187142 +
attggatgctaggcaagtgccc

SEQ ID NO: 76998 - DNA, 22 bp, Artificial Sequence
  Synthetic oligonucleotide; TTG chr11 5187124 5187145 5187141 5187146 +
gatgctaggcaagtgcccaggt

SEQ ID NO: 76999 - DNA, 22 bp, Artificial Sequence
  Synthetic oligonucleotide; CTA chr11 5187131 5187152 5187148 5187153 +
ggcaagtgcccaggtcctccaa

SEQ ID NO: 77000 - DNA, 22 bp, Artificial Sequence
  Synthetic oligonucleotide; CTC chr11 5187150 5187171 5187167 5187172 +
caatcagtcatctaggcatctt

SEQ ID NO: 77001 - DNA, 22 bp, Artificial Sequence
  Synthetic oligonucleotide; CTA chr11 5187164 5187185 5187181 5187186 +
ggcatcttagttctcactggct

SEQ ID NO: 77002 - DNA, 22 bp, Artificial Sequence
  Synthetic oligonucleotide; CTT chr11 5187172 5187193 5187189 5187194 +
agttctcactggctaagagagg

SEQ ID NO: 77003 - DNA, 22 bp, Artificial Sequence
  Synthetic oligonucleotide; TTA chr11 5187173 5187194 5187190 5187195 +
gttctcactggctaagagaggt

SEQ ID NO: 77004 - DNA, 22 bp, Artificial Sequence
  Synthetic oligonucleotide; TTC chr11 5187177 5187198 5187194 5187199 +
tcactggctaagagaggtcata

SEQ ID NO: 77005 - DNA, 22 bp, Artificial Sequence
  Synthetic oligonucleotide; CTC chr11 5187179 5187200 5187196 5187201 +
actggctaagagaggtcatatt

SEQ ID NO: 77006 - DNA, 22 bp, Artificial Sequence
  Synthetic oligonucleotide; CTG chr11 5187183 5187204 5187200 5187205 +
gctaagagaggtcatattttat

SEQ ID NO: 77007 - DNA, 22 bp, Artificial Sequence
  Synthetic oligonucleotide; CTA chr11 5187187 5187208 5187204 5187209 +
agagaggtcatattttattacg

SEQ ID NO: 77008 - DNA, 22 bp, Artificial Sequence
  Synthetic oligonucleotide; TTT chr11 5187202 5187223 5187219 5187224 +
tattacgtaagtgtgagtgcta

SEQ ID NO: 77009 - DNA, 22 bp, Artificial Sequence
  Synthetic oligonucleotide; TTT chr11 5187203 5187224 5187220 5187225 +
attacgtaagtgtgagtgctat

SEQ ID NO: 77010 - DNA, 22 bp, Artificial Sequence
  Synthetic oligonucleotide; TTA chr11 5187204 5187225 5187221 5187226 +
ttacgtaagtgtgagtgctata

SEQ ID NO: 77011 - DNA, 22 bp, Artificial Sequence
  Synthetic oligonucleotide; TTA chr11 5187207 5187228 5187224 5187229 +
cgtaagtgtgagtgctatatgg

SEQ ID NO: 77012 - DNA, 22 bp, Artificial Sequence
  Synthetic oligonucleotide; CTA chr11 5187224 5187245 5187241 5187246 +
tatggtgggagatataagaatt

SEQ ID NO: 77013 - DNA, 22 bp, Artificial Sequence
  Synthetic oligonucleotide; TTA chr11 5187247 5187268 5187264 5187269 +
tcacatgcatttcaagtgcttt

SEQ ID NO: 77014 - DNA, 22 bp, Artificial Sequence
  Synthetic oligonucleotide; TTT chr11 5187259 5187280 5187276 5187281 +
caagtgctttccattcaaaggt

SEQ ID NO: 77015 - DNA, 22 bp, Artificial Sequence
  Synthetic oligonucleotide; TTC chr11 5187260 5187281 5187277 5187282 +
aagtgctttccattcaaaggtc

SEQ ID NO: 77016 - DNA, 22 bp, Artificial Sequence
  Synthetic oligonucleotide; CTT chr11 5187268 5187289 5187285 5187290 +
tccattcaaaggtcttgaaacc

SEQ ID NO: 77017 - DNA, 22 bp, Artificial Sequence
  Synthetic oligonucleotide; TTT chr11 5187269 5187290 5187286 5187291 +
ccattcaaaggtcttgaaacca

SEQ ID NO: 77018 - DNA, 22 bp, Artificial Sequence
  Synthetic oligonucleotide; TTC chr11 5187270 5187291 5187287 5187292 +
cattcaaaggtcttgaaaccat

SEQ ID NO: 77019 - DNA, 22 bp, Artificial Sequence
  Synthetic oligonucleotide; TTC chr11 5187275 5187296 5187292 5187297 +
aaaggtcttgaaaccatagtga

SEQ ID NO: 77020 - DNA, 22 bp, Artificial Sequence
  Synthetic oligonucleotide; CTT chr11 5187284 5187305 5187301 5187306 +
gaaaccatagtgagggtaaatt

SEQ ID NO: 77021 - DNA, 22 bp, Artificial Sequence
  Synthetic oligonucleotide; TTG chr11 5187285 5187306 5187302 5187307 +
aaaccatagtgagggtaaattg

SEQ ID NO: 77022 - DNA, 22 bp, Artificial Sequence
  Synthetic oligonucleotide; TTG chr11 5187307 5187328 5187324 5187329 +
gatggcttcaccttgctttttt

SEQ ID NO: 77023 - DNA, 22 bp, Artificial Sequence
  Synthetic oligonucleotide; CTT chr11 5187315 5187336 5187332 5187337 +
caccttgcttttttagacatta

SEQ ID NO: 77024 - DNA, 22 bp, Artificial Sequence
  Synthetic oligonucleotide; TTC chr11 5187316 5187337 5187333 5187338 +
accttgcttttttagacattaa

SEQ ID NO: 77025 - DNA, 22 bp, Artificial Sequence
  Synthetic oligonucleotide; CTT chr11 5187321 5187342 5187338 5187343 +
gcttttttagacattaaagaaa

SEQ ID NO: 77026 - DNA, 22 bp, Artificial Sequence
  Synthetic oligonucleotide; TTG chr11 5187322 5187343 5187339 5187344 +
cttttttagacattaaagaaag

SEQ ID NO: 77027 - DNA, 22 bp, Artificial Sequence
  Synthetic oligonucleotide; CTT chr11 5187325 5187346 5187342 5187347 +
ttttagacattaaagaaaggac

SEQ ID NO: 77028 - DNA, 22 bp, Artificial Sequence
  Synthetic oligonucleotide; TTT chr11 5187326 5187347 5187343 5187348 +
tttagacattaaagaaaggaca

SEQ ID NO: 77029 - DNA, 22 bp, Artificial Sequence
  Synthetic oligonucleotide; TTT chr11 5187327 5187348 5187344 5187349 +
ttagacattaaagaaaggacag

SEQ ID NO: 77030 - DNA, 22 bp, Artificial Sequence
  Synthetic oligonucleotide; TTT chr11 5187328 5187349 5187345 5187350 +
tagacattaaagaaaggacagt

SEQ ID NO: 77031 - DNA, 22 bp, Artificial Sequence
  Synthetic oligonucleotide; TTT chr11 5187329 5187350 5187346 5187351 +
agacattaaagaaaggacagta

SEQ ID NO: 77032 - DNA, 22 bp, Artificial Sequence
  Synthetic oligonucleotide; TTA chr11 5187330 5187351 5187347 5187352 +
gacattaaagaaaggacagtac

SEQ ID NO: 77033 - DNA, 22 bp, Artificial Sequence
  Synthetic oligonucleotide; TTA chr11 5187337 5187358 5187354 5187359 +
aagaaaggacagtacttatctt

SEQ ID NO: 77034 - DNA, 22 bp, Artificial Sequence
  Synthetic oligonucleotide; CTT chr11 5187354 5187375 5187371 5187376 +
atcttcccacctatccttggaa

SEQ ID NO: 77035 - DNA, 22 bp, Artificial Sequence
  Synthetic oligonucleotide; TTA chr11 5187355 5187376 5187372 5187377 +
tcttcccacctatccttggaaa

SEQ ID NO: 77036 - DNA, 22 bp, Artificial Sequence
  Synthetic oligonucleotide; CTT chr11 5187359 5187380 5187376 5187381 +
cccacctatccttggaaaagaa

SEQ ID NO: 77037 - DNA, 22 bp, Artificial Sequence
  Synthetic oligonucleotide; TTC chr11 5187360 5187381 5187377 5187382 +
ccacctatccttggaaaagaaa

SEQ ID NO: 77038 - DNA, 22 bp, Artificial Sequence
  Synthetic oligonucleotide; CTA chr11 5187367 5187388 5187384 5187389 +
tccttggaaaagaaattaaagg

SEQ ID NO: 77039 - DNA, 22 bp, Artificial Sequence
  Synthetic oligonucleotide; CTT chr11 5187372 5187393 5187389 5187394 +
ggaaaagaaattaaaggaatca

SEQ ID NO: 77040 - DNA, 22 bp, Artificial Sequence
  Synthetic oligonucleotide; TTG chr11 5187373 5187394 5187390 5187395 +
gaaaagaaattaaaggaatcaa

SEQ ID NO: 77041 - DNA, 22 bp, Artificial Sequence
  Synthetic oligonucleotide; TTA chr11 5187385 5187406 5187402 5187407 +
aaggaatcaaaggatattatag

SEQ ID NO: 77042 - DNA, 22 bp, Artificial Sequence
  Synthetic oligonucleotide; TTA chr11 5187404 5187425 5187421 5187426 +
tagaaaaagagatggagaaagg

SEQ ID NO: 77043 - DNA, 22 bp, Artificial Sequence
  Synthetic oligonucleotide; TTT chr11 5187439 5187460 5187456 5187461 +
aggggacaacagaaattgatgt

SEQ ID NO: 77044 - DNA, 22 bp, Artificial Sequence
  Synthetic oligonucleotide; TTA chr11 5187440 5187461 5187457 5187462 +
ggggacaacagaaattgatgtc

SEQ ID NO: 77045 - DNA, 22 bp, Artificial Sequence
  Synthetic oligonucleotide; TTG chr11 5187457 5187478 5187474 5187479 +
atgtctgcatctgactacctga

SEQ ID NO: 77046 - DNA, 22 bp, Artificial Sequence
  Synthetic oligonucleotide; CTG chr11 5187464 5187485 5187481 5187486 +
catctgactacctgatagtgac

SEQ ID NO: 77047 - DNA, 22 bp, Artificial Sequence
  Synthetic oligonucleotide; CTG chr11 5187470 5187491 5187487 5187492 +
actacctgatagtgacaggaag

SEQ ID NO: 77048 - DNA, 22 bp, Artificial Sequence
  Synthetic oligonucleotide; CTA chr11 5187474 5187495 5187491 5187496 +
cctgatagtgacaggaagaaca

SEQ ID NO: 77049 - DNA, 22 bp, Artificial Sequence
  Synthetic oligonucleotide; CTG chr11 5187478 5187499 5187495 5187500 +
atagtgacaggaagaacaaaga

SEQ ID NO: 77050 - DNA, 22 bp, Artificial Sequence
  Synthetic oligonucleotide; CTC chr11 5187522 5187543 5187539 5187544 +
tgctgataacttattataatgt

SEQ ID NO: 77051 - DNA, 22 bp, Artificial Sequence
  Synthetic oligonucleotide; CTG chr11 5187524 5187545 5187541 5187546 +
ctgataacttattataatgttt

SEQ ID NO: 77052 - DNA, 22 bp, Artificial Sequence
  Synthetic oligonucleotide; CTG chr11 5187527 5187548 5187544 5187549 +
ataacttattataatgttttta

SEQ ID NO: 77053 - DNA, 22 bp, Artificial Sequence
  Synthetic oligonucleotide; CTT chr11 5187534 5187555 5187551 5187556 +
attataatgtttttaaatctgg

SEQ ID NO: 77054 - DNA, 22 bp, Artificial Sequence
  Synthetic oligonucleotide; TTA chr11 5187535 5187556 5187552 5187557 +
ttataatgtttttaaatctggg

SEQ ID NO: 77055 - DNA, 22 bp, Artificial Sequence
  Synthetic oligonucleotide; TTA chr11 5187538 5187559 5187555 5187560 +
taatgtttttaaatctggggac

SEQ ID NO: 77056 - DNA, 22 bp, Artificial Sequence
  Synthetic oligonucleotide; TTT chr11 5187546 5187567 5187563 5187568 +
ttaaatctggggactctaaaac

SEQ ID NO: 77057 - DNA, 22 bp, Artificial Sequence
  Synthetic oligonucleotide; TTT chr11 5187547 5187568 5187564 5187569 +
taaatctggggactctaaaact

SEQ ID NO: 77058 - DNA, 22 bp, Artificial Sequence
  Synthetic oligonucleotide; TTT chr11 5187548 5187569 5187565 5187570 +
aaatctggggactctaaaactt

SEQ ID NO: 77059 - DNA, 22 bp, Artificial Sequence
  Synthetic oligonucleotide; TTA chr11 5187549 5187570 5187566 5187571 +
aatctggggactctaaaacttg

SEQ ID NO: 77060 - DNA, 22 bp, Artificial Sequence
  Synthetic oligonucleotide; CTG chr11 5187555 5187576 5187572 5187577 +
gggactctaaaacttgaagaat

SEQ ID NO: 77061 - DNA, 22 bp, Artificial Sequence
  Synthetic oligonucleotide; CTC chr11 5187562 5187583 5187579 5187584 +
taaaacttgaagaatttttttt

SEQ ID NO: 77062 - DNA, 22 bp, Artificial Sequence
  Synthetic oligonucleotide; CTA chr11 5187564 5187585 5187581 5187586 +
aaacttgaagaatttttttttg

SEQ ID NO: 77063 - DNA, 22 bp, Artificial Sequence
  Synthetic oligonucleotide; CTT chr11 5187570 5187591 5187587 5187592 +
gaagaatttttttttgagcaaa

SEQ ID NO: 77064 - DNA, 22 bp, Artificial Sequence
  Synthetic oligonucleotide; TTG chr11 5187571 5187592 5187588 5187593 +
aagaatttttttttgagcaaat

SEQ ID NO: 77065 - DNA, 22 bp, Artificial Sequence
  Synthetic oligonucleotide; TTT chr11 5187579 5187600 5187596 5187601 +
ttttttgagcaaatgttttcag

SEQ ID NO: 77066 - DNA, 22 bp, Artificial Sequence
  Synthetic oligonucleotide; TTT chr11 5187580 5187601 5187597 5187602 +
tttttgagcaaatgttttcagt

SEQ ID NO: 77067 - DNA, 22 bp, Artificial Sequence
  Synthetic oligonucleotide; TTT chr11 5187581 5187602 5187598 5187603 +
ttttgagcaaatgttttcagta

SEQ ID NO: 77068 - DNA, 22 bp, Artificial Sequence
  Synthetic oligonucleotide; TTT chr11 5187582 5187603 5187599 5187604 +
tttgagcaaatgttttcagtaa

SEQ ID NO: 77069 - DNA, 22 bp, Artificial Sequence
  Synthetic oligonucleotide; TTT chr11 5187583 5187604 5187600 5187605 +
ttgagcaaatgttttcagtaaa

SEQ ID NO: 77070 - DNA, 22 bp, Artificial Sequence
  Synthetic oligonucleotide; TTT chr11 5187584 5187605 5187601 5187606 +
tgagcaaatgttttcagtaaat

SEQ ID NO: 77071 - DNA, 22 bp, Artificial Sequence
  Synthetic oligonucleotide; TTT chr11 5187585 5187606 5187602 5187607 +
gagcaaatgttttcagtaaata

SEQ ID NO: 77072 - DNA, 22 bp, Artificial Sequence
  Synthetic oligonucleotide; TTG chr11 5187586 5187607 5187603 5187608 +
agcaaatgttttcagtaaataa

SEQ ID NO: 77073 - DNA, 22 bp, Artificial Sequence
  Synthetic oligonucleotide; TTT chr11 5187597 5187618 5187614 5187619 +
tcagtaaataatgatttctgat

SEQ ID NO: 77074 - DNA, 22 bp, Artificial Sequence
  Synthetic oligonucleotide; TTT chr11 5187598 5187619 5187615 5187620 +
cagtaaataatgatttctgata

SEQ ID NO: 77075 - DNA, 22 bp, Artificial Sequence
  Synthetic oligonucleotide; TTC chr11 5187599 5187620 5187616 5187621 +
agtaaataatgatttctgataa

SEQ ID NO: 77076 - DNA, 22 bp, Artificial Sequence
  Synthetic oligonucleotide; TTT chr11 5187614 5187635 5187631 5187636 +
ctgataaatataatatgcaaga

SEQ ID NO: 77077 - DNA, 22 bp, Artificial Sequence
  Synthetic oligonucleotide; TTC chr11 5187615 5187636 5187632 5187637 +
tgataaatataatatgcaagag

SEQ ID NO: 77078 - DNA, 22 bp, Artificial Sequence
  Synthetic oligonucleotide; CTG chr11 5187617 5187638 5187634 5187639 +
ataaatataatatgcaagaggg

SEQ ID NO: 77079 - DNA, 22 bp, Artificial Sequence
  Synthetic oligonucleotide; CTA chr11 5187654 5187675 5187671 5187676 +
cggctgctgtgatacaagtacc

SEQ ID NO: 77080 - DNA, 22 bp, Artificial Sequence
  Synthetic oligonucleotide; CTG chr11 5187660 5187681 5187677 5187682 +
ctgtgatacaagtaccatgtta

SEQ ID NO: 77081 - DNA, 22 bp, Artificial Sequence
  Synthetic oligonucleotide; CTG chr11 5187663 5187684 5187680 5187685 +
tgatacaagtaccatgttacta

SEQ ID NO: 77082 - DNA, 22 bp, Artificial Sequence
  Synthetic oligonucleotide; TTA chr11 5187682 5187703 5187699 5187704 +
ctactttaaaacacaccttcag

SEQ ID NO: 77083 - DNA, 22 bp, Artificial Sequence
  Synthetic oligonucleotide; CTA chr11 5187685 5187706 5187702 5187707 +
ctttaaaacacaccttcagcaa

SEQ ID NO: 77084 - DNA, 22 bp, Artificial Sequence
  Synthetic oligonucleotide; CTT chr11 5187688 5187709 5187705 5187710 +
taaaacacaccttcagcaatat

SEQ ID NO: 77085 - DNA, 22 bp, Artificial Sequence
  Synthetic oligonucleotide; TTT chr11 5187689 5187710 5187706 5187711 +
aaaacacaccttcagcaatatt

SEQ ID NO: 77086 - DNA, 22 bp, Artificial Sequence
  Synthetic oligonucleotide; TTA chr11 5187690 5187711 5187707 5187712 +
aaacacaccttcagcaatattc

SEQ ID NO: 77087 - DNA, 22 bp, Artificial Sequence
  Synthetic oligonucleotide; CTT chr11 5187701 5187722 5187718 5187723 +
cagcaatattctatgcagatga

SEQ ID NO: 77088 - DNA, 22 bp, Artificial Sequence
  Synthetic oligonucleotide; TTC chr11 5187702 5187723 5187719 5187724 +
agcaatattctatgcagatgaa

SEQ ID NO: 77089 - DNA, 22 bp, Artificial Sequence
  Synthetic oligonucleotide; TTC chr11 5187712 5187733 5187729 5187734 +
tatgcagatgaaataatagtta

SEQ ID NO: 77090 - DNA, 22 bp, Artificial Sequence
  Synthetic oligonucleotide; CTA chr11 5187714 5187735 5187731 5187736 +
tgcagatgaaataatagttatt

SEQ ID NO: 77091 - DNA, 22 bp, Artificial Sequence
  Synthetic oligonucleotide; TTA chr11 5187734 5187755 5187751 5187756 +
ttgatatgtttaatttaatatg

SEQ ID NO: 77092 - DNA, 22 bp, Artificial Sequence
  Synthetic oligonucleotide; TTG chr11 5187737 5187758 5187754 5187759 +
atatgtttaatttaatatgttt

SEQ ID NO: 77093 - DNA, 22 bp, Artificial Sequence
  Synthetic oligonucleotide; TTT chr11 5187745 5187766 5187762 5187767 +
aatttaatatgtttagttttct

SEQ ID NO: 77094 - DNA, 22 bp, Artificial Sequence
  Synthetic oligonucleotide; TTA chr11 5187746 5187767 5187763 5187768 +
atttaatatgtttagttttctt

SEQ ID NO: 77095 - DNA, 22 bp, Artificial Sequence
  Synthetic oligonucleotide; TTT chr11 5187750 5187771 5187767 5187772 +
aatatgtttagttttcttatag

SEQ ID NO: 77096 - DNA, 22 bp, Artificial Sequence
  Synthetic oligonucleotide; TTA chr11 5187751 5187772 5187768 5187773 +
atatgtttagttttcttataga

SEQ ID NO: 77097 - DNA, 22 bp, Artificial Sequence
  Synthetic oligonucleotide; TTT chr11 5187759 5187780 5187776 5187781 +
agttttcttatagaagtctaca

SEQ ID NO: 77098 - DNA, 22 bp, Artificial Sequence
  Synthetic oligonucleotide; TTA chr11 5187760 5187781 5187777 5187782 +
gttttcttatagaagtctacag

SEQ ID NO: 77099 - DNA, 22 bp, Artificial Sequence
  Synthetic oligonucleotide; TTT chr11 5187764 5187785 5187781 5187786 +
tcttatagaagtctacagtctt

SEQ ID NO: 77100 - DNA, 22 bp, Artificial Sequence
  Synthetic oligonucleotide; TTT chr11 5187765 5187786 5187782 5187787 +
cttatagaagtctacagtcttt

SEQ ID NO: 77101 - DNA, 22 bp, Artificial Sequence
  Synthetic oligonucleotide; TTC chr11 5187766 5187787 5187783 5187788 +
ttatagaagtctacagtctttg

SEQ ID NO: 77102 - DNA, 22 bp, Artificial Sequence
  Synthetic oligonucleotide; CTT chr11 5187768 5187789 5187785 5187790 +
atagaagtctacagtctttgag

SEQ ID NO: 77103 - DNA, 22 bp, Artificial Sequence
  Synthetic oligonucleotide; TTA chr11 5187769 5187790 5187786 5187791 +
tagaagtctacagtctttgagc

SEQ ID NO: 77104 - DNA, 22 bp, Artificial Sequence
  Synthetic oligonucleotide; CTA chr11 5187779 5187800 5187796 5187801 +
cagtctttgagccacatgcttt

SEQ ID NO: 77105 - DNA, 22 bp, Artificial Sequence
  Synthetic oligonucleotide; CTT chr11 5187786 5187807 5187803 5187808 +
tgagccacatgctttagaaaaa

SEQ ID NO: 77106 - DNA, 22 bp, Artificial Sequence
  Synthetic oligonucleotide; TTT chr11 5187787 5187808 5187804 5187809 +
gagccacatgctttagaaaaat

SEQ ID NO: 77107 - DNA, 22 bp, Artificial Sequence
  Synthetic oligonucleotide; TTG chr11 5187788 5187809 5187805 5187810 +
agccacatgctttagaaaaata

SEQ ID NO: 77108 - DNA, 22 bp, Artificial Sequence
  Synthetic oligonucleotide; CTT chr11 5187800 5187821 5187817 5187822 +
tagaaaaataattttccaattt

SEQ ID NO: 77109 - DNA, 22 bp, Artificial Sequence
  Synthetic oligonucleotide; TTT chr11 5187801 5187822 5187818 5187823 +
agaaaaataattttccaatttt

SEQ ID NO: 77110 - DNA, 22 bp, Artificial Sequence
  Synthetic oligonucleotide; TTA chr11 5187802 5187823 5187819 5187824 +
gaaaaataattttccaattttt

SEQ ID NO: 77111 - DNA, 22 bp, Artificial Sequence
  Synthetic oligonucleotide; TTT chr11 5187814 5187835 5187831 5187836 +
tccaatttttatgaatgttata

SEQ ID NO: 77112 - DNA, 22 bp, Artificial Sequence
  Synthetic oligonucleotide; TTT chr11 5187815 5187836 5187832 5187837 +
ccaatttttatgaatgttatat

SEQ ID NO: 77113 - DNA, 22 bp, Artificial Sequence
  Synthetic oligonucleotide; TTC chr11 5187816 5187837 5187833 5187838 +
caatttttatgaatgttatata

SEQ ID NO: 77114 - DNA, 22 bp, Artificial Sequence
  Synthetic oligonucleotide; TTT chr11 5187822 5187843 5187839 5187844 +
ttatgaatgttatataatatta

SEQ ID NO: 77115 - DNA, 22 bp, Artificial Sequence
  Synthetic oligonucleotide; TTT chr11 5187823 5187844 5187840 5187845 +
tatgaatgttatataatattat

SEQ ID NO: 77116 - DNA, 22 bp, Artificial Sequence
  Synthetic oligonucleotide; TTT chr11 5187824 5187845 5187841 5187846 +
atgaatgttatataatattatt

SEQ ID NO: 77117 - DNA, 22 bp, Artificial Sequence
  Synthetic oligonucleotide; TTA chr11 5187825 5187846 5187842 5187847 +
tgaatgttatataatattattg

SEQ ID NO: 77118 - DNA, 22 bp, Artificial Sequence
  Synthetic oligonucleotide; TTA chr11 5187834 5187855 5187851 5187856 +
tataatattattgacatcaagt

SEQ ID NO: 77119 - DNA, 22 bp, Artificial Sequence
  Synthetic oligonucleotide; TTA chr11 5187844 5187865 5187861 5187866 +
ttgacatcaagtaacaatatca

SEQ ID NO: 77120 - DNA, 22 bp, Artificial Sequence
  Synthetic oligonucleotide; TTG chr11 5187847 5187868 5187864 5187869 +
acatcaagtaacaatatcattg

SEQ ID NO: 77121 - DNA, 22 bp, Artificial Sequence
  Synthetic oligonucleotide; TTG chr11 5187869 5187890 5187886 5187891 +
gaatctcggtatgcccttaata

SEQ ID NO: 77122 - DNA, 22 bp, Artificial Sequence
  Synthetic oligonucleotide; CTC chr11 5187876 5187897 5187893 5187898 +
ggtatgcccttaataatcatat

SEQ ID NO: 77123 - DNA, 22 bp, Artificial Sequence
  Synthetic oligonucleotide; CTT chr11 5187887 5187908 5187904 5187909 +
aataatcatatatctatatgat

SEQ ID NO: 77124 - DNA, 22 bp, Artificial Sequence
  Synthetic oligonucleotide; TTA chr11 5187888 5187909 5187905 5187910 +
ataatcatatatctatatgatt

SEQ ID NO: 77125 - DNA, 22 bp, Artificial Sequence
  Synthetic oligonucleotide; CTA chr11 5187903 5187924 5187920 5187925 +
tatgattatctaatatacctag

SEQ ID NO: 77126 - DNA, 22 bp, Artificial Sequence
  Synthetic oligonucleotide; TTA chr11 5187911 5187932 5187928 5187933 +
tctaatatacctagatattttt

SEQ ID NO: 77127 - DNA, 22 bp, Artificial Sequence
  Synthetic oligonucleotide; CTA chr11 5187915 5187936 5187932 5187937 +
atatacctagatatttttgcag

SEQ ID NO: 77128 - DNA, 22 bp, Artificial Sequence
  Synthetic oligonucleotide; CTA chr11 5187924 5187945 5187941 5187946 +
gatatttttgcagggaacatgt

SEQ ID NO: 77129 - DNA, 22 bp, Artificial Sequence
  Synthetic oligonucleotide; TTT chr11 5187931 5187952 5187948 5187953 +
ttgcagggaacatgtaagtatt

SEQ ID NO: 77130 - DNA, 22 bp, Artificial Sequence
  Synthetic oligonucleotide; TTT chr11 5187932 5187953 5187949 5187954 +
tgcagggaacatgtaagtatta

SEQ ID NO: 77131 - DNA, 22 bp, Artificial Sequence
  Synthetic oligonucleotide; TTT chr11 5187933 5187954 5187950 5187955 +
gcagggaacatgtaagtattat

SEQ ID NO: 77132 - DNA, 22 bp, Artificial Sequence
  Synthetic oligonucleotide; TTG chr11 5187934 5187955 5187951 5187956 +
cagggaacatgtaagtattatg

SEQ ID NO: 77133 - DNA, 22 bp, Artificial Sequence
  Synthetic oligonucleotide; TTA chr11 5187954 5187975 5187971 5187976 +
tgtagaataaataaagattata

SEQ ID NO: 77134 - DNA, 22 bp, Artificial Sequence
  Synthetic oligonucleotide; TTA chr11 5187974 5187995 5187991 5187996 +
taaaaattctcacataagttca

SEQ ID NO: 77135 - DNA, 22 bp, Artificial Sequence
  Synthetic oligonucleotide; TTC chr11 5187983 5188004 5188000 5188005 +
tcacataagttcatgtcagaaa

SEQ ID NO: 77136 - DNA, 22 bp, Artificial Sequence
  Synthetic oligonucleotide; CTC chr11 5187985 5188006 5188002 5188007 +
acataagttcatgtcagaaatt

SEQ ID NO: 77137 - DNA, 22 bp, Artificial Sequence
  Synthetic oligonucleotide; TTC chr11 5187995 5188016 5188012 5188017 +
atgtcagaaattgccatcactt

SEQ ID NO: 77138 - DNA, 22 bp, Artificial Sequence
  Synthetic oligonucleotide; TTG chr11 5188008 5188029 5188025 5188030 +
ccatcactttagagcagattgt

SEQ ID NO: 77139 - DNA, 22 bp, Artificial Sequence
  Synthetic oligonucleotide; CTT chr11 5188017 5188038 5188034 5188039 +
tagagcagattgtgctgttaaa

SEQ ID NO: 77140 - DNA, 22 bp, Artificial Sequence
  Synthetic oligonucleotide; TTT chr11 5188018 5188039 5188035 5188040 +
agagcagattgtgctgttaaaa

SEQ ID NO: 77141 - DNA, 22 bp, Artificial Sequence
  Synthetic oligonucleotide; TTA chr11 5188019 5188040 5188036 5188041 +
gagcagattgtgctgttaaaag

SEQ ID NO: 77142 - DNA, 22 bp, Artificial Sequence
  Synthetic oligonucleotide; TTG chr11 5188029 5188050 5188046 5188051 +
tgctgttaaaagactcagtttt

SEQ ID NO: 77143 - DNA, 22 bp, Artificial Sequence
  Synthetic oligonucleotide; CTG chr11 5188034 5188055 5188051 5188056 +
ttaaaagactcagtttttaaat

SEQ ID NO: 77144 - DNA, 22 bp, Artificial Sequence
  Synthetic oligonucleotide; TTA chr11 5188037 5188058 5188054 5188059 +
aaagactcagtttttaaatttc

SEQ ID NO: 77145 - DNA, 22 bp, Artificial Sequence
  Synthetic oligonucleotide; CTC chr11 5188045 5188066 5188062 5188067 +
agtttttaaatttctatggatt

SEQ ID NO: 77146 - DNA, 22 bp, Artificial Sequence
  Synthetic oligonucleotide; TTT chr11 5188050 5188071 5188067 5188072 +
ttaaatttctatggatttcaag

SEQ ID NO: 77147 - DNA, 22 bp, Artificial Sequence
  Synthetic oligonucleotide; TTT chr11 5188051 5188072 5188068 5188073 +
taaatttctatggatttcaagg

SEQ ID NO: 77148 - DNA, 22 bp, Artificial Sequence
  Synthetic oligonucleotide; TTT chr11 5188052 5188073 5188069 5188074 +
aaatttctatggatttcaagga

SEQ ID NO: 77149 - DNA, 22 bp, Artificial Sequence
  Synthetic oligonucleotide; TTA chr11 5188053 5188074 5188070 5188075 +
aatttctatggatttcaaggaa

SEQ ID NO: 77150 - DNA, 22 bp, Artificial Sequence
  Synthetic oligonucleotide; TTT chr11 5188058 5188079 5188075 5188080 +
ctatggatttcaaggaaatgga

SEQ ID NO: 77151 - DNA, 22 bp, Artificial Sequence
  Synthetic oligonucleotide; TTC chr11 5188059 5188080 5188076 5188081 +
tatggatttcaaggaaatggat

SEQ ID NO: 77152 - DNA, 22 bp, Artificial Sequence
  Synthetic oligonucleotide; CTA chr11 5188061 5188082 5188078 5188083 +
tggatttcaaggaaatggataa

SEQ ID NO: 77153 - DNA, 22 bp, Artificial Sequence
  Synthetic oligonucleotide; TTT chr11 5188068 5188089 5188085 5188090 +
caaggaaatggataaatgattg

SEQ ID NO: 77154 - DNA, 22 bp, Artificial Sequence
  Synthetic oligonucleotide; TTC chr11 5188069 5188090 5188086 5188091 +
aaggaaatggataaatgattgt

SEQ ID NO: 77155 - DNA, 22 bp, Artificial Sequence
  Synthetic oligonucleotide; TTG chr11 5188090 5188111 5188107 5188112 +
tggccctgttaaccaaaatagc

SEQ ID NO: 77156 - DNA, 22 bp, Artificial Sequence
  Synthetic oligonucleotide; CTG chr11 5188098 5188119 5188115 5188120 +
ttaaccaaaatagcagtaaaaa

SEQ ID NO: 77157 - DNA, 22 bp, Artificial Sequence
  Synthetic oligonucleotide; TTA chr11 5188101 5188122 5188118 5188123 +
accaaaatagcagtaaaaatgg

SEQ ID NO: 77158 - DNA, 22 bp, Artificial Sequence
  Synthetic oligonucleotide; CTT chr11 5188126 5188147 5188143 5188148 +
tggctactgatttagtatctgt

SEQ ID NO: 77159 - DNA, 22 bp, Artificial Sequence
  Synthetic oligonucleotide; TTT chr11 5188127 5188148 5188144 5188149 +
ggctactgatttagtatctgta

SEQ ID NO: 77160 - DNA, 22 bp, Artificial Sequence
  Synthetic oligonucleotide; TTG chr11 5188128 5188149 5188145 5188150 +
gctactgatttagtatctgtaa

SEQ ID NO: 77161 - DNA, 22 bp, Artificial Sequence
  Synthetic oligonucleotide; CTA chr11 5188132 5188153 5188149 5188154 +
ctgatttagtatctgtaaatta

SEQ ID NO: 77162 - DNA, 22 bp, Artificial Sequence
  Synthetic oligonucleotide; CTG chr11 5188135 5188156 5188152 5188157 +
atttagtatctgtaaattaagg

SEQ ID NO: 77163 - DNA, 22 bp, Artificial Sequence
  Synthetic oligonucleotide; TTT chr11 5188139 5188160 5188156 5188161 +
agtatctgtaaattaaggatgt

SEQ ID NO: 77164 - DNA, 22 bp, Artificial Sequence
  Synthetic oligonucleotide; TTA chr11 5188140 5188161 5188157 5188162 +
gtatctgtaaattaaggatgtt

SEQ ID NO: 77165 - DNA, 22 bp, Artificial Sequence
  Synthetic oligonucleotide; CTG chr11 5188147 5188168 5188164 5188169 +
taaattaaggatgttggattgc

SEQ ID NO: 77166 - DNA, 22 bp, Artificial Sequence
  Synthetic oligonucleotide; TTA chr11 5188154 5188175 5188171 5188176 +
aggatgttggattgcttgagat

SEQ ID NO: 77167 - DNA, 22 bp, Artificial Sequence
  Synthetic oligonucleotide; TTG chr11 5188163 5188184 5188180 5188185 +
gattgcttgagattttagctct

SEQ ID NO: 77168 - DNA, 22 bp, Artificial Sequence
  Synthetic oligonucleotide; TTG chr11 5188168 5188189 5188185 5188190 +
cttgagattttagctctaactc

SEQ ID NO: 77169 - DNA, 22 bp, Artificial Sequence
  Synthetic oligonucleotide; CTT chr11 5188171 5188192 5188188 5188193 +
gagattttagctctaactctgc

SEQ ID NO: 77170 - DNA, 22 bp, Artificial Sequence
  Synthetic oligonucleotide; TTG chr11 5188172 5188193 5188189 5188194 +
agattttagctctaactctgct

SEQ ID NO: 77171 - DNA, 22 bp, Artificial Sequence
  Synthetic oligonucleotide; TTT chr11 5188178 5188199 5188195 5188200 +
tagctctaactctgcttcaata

SEQ ID NO: 77172 - DNA, 22 bp, Artificial Sequence
  Synthetic oligonucleotide; TTT chr11 5188179 5188200 5188196 5188201 +
agctctaactctgcttcaatat

SEQ ID NO: 77173 - DNA, 22 bp, Artificial Sequence
  Synthetic oligonucleotide; TTA chr11 5188180 5188201 5188197 5188202 +
gctctaactctgcttcaatatg

SEQ ID NO: 77174 - DNA, 22 bp, Artificial Sequence
  Synthetic oligonucleotide; CTC chr11 5188184 5188205 5188201 5188206 +
taactctgcttcaatatgtaag

SEQ ID NO: 77175 - DNA, 22 bp, Artificial Sequence
  Synthetic oligonucleotide; CTA chr11 5188186 5188207 5188203 5188208 +
actctgcttcaatatgtaagat

SEQ ID NO: 77176 - DNA, 22 bp, Artificial Sequence
  Synthetic oligonucleotide; CTC chr11 5188190 5188211 5188207 5188212 +
tgcttcaatatgtaagatactt

SEQ ID NO: 77177 - DNA, 22 bp, Artificial Sequence
  Synthetic oligonucleotide; CTG chr11 5188192 5188213 5188209 5188214 +
cttcaatatgtaagatacttct

SEQ ID NO: 77178 - DNA, 22 bp, Artificial Sequence
  Synthetic oligonucleotide; CTT chr11 5188195 5188216 5188212 5188217 +
caatatgtaagatacttctaat

SEQ ID NO: 77179 - DNA, 22 bp, Artificial Sequence
  Synthetic oligonucleotide; TTC chr11 5188196 5188217 5188213 5188218 +
aatatgtaagatacttctaatt

SEQ ID NO: 77180 - DNA, 22 bp, Artificial Sequence
  Synthetic oligonucleotide; CTT chr11 5188212 5188233 5188229 5188234 +
ctaattgagtctagataattgt

SEQ ID NO: 77181 - DNA, 22 bp, Artificial Sequence
  Synthetic oligonucleotide; TTC chr11 5188213 5188234 5188230 5188235 +
taattgagtctagataattgtt

SEQ ID NO: 77182 - DNA, 22 bp, Artificial Sequence
  Synthetic oligonucleotide; CTA chr11 5188215 5188236 5188232 5188237 +
attgagtctagataattgttct

SEQ ID NO: 77183 - DNA, 22 bp, Artificial Sequence
  Synthetic oligonucleotide; TTG chr11 5188219 5188240 5188236 5188241 +
agtctagataattgttctatag

SEQ ID NO: 77184 - DNA, 22 bp, Artificial Sequence
  Synthetic oligonucleotide; CTA chr11 5188225 5188246 5188242 5188247 +
gataattgttctataggtaaat

SEQ ID NO: 77185 - DNA, 22 bp, Artificial Sequence
  Synthetic oligonucleotide; TTG chr11 5188233 5188254 5188250 5188255 +
ttctataggtaaattagtgtcc

SEQ ID NO: 77186 - DNA, 22 bp, Artificial Sequence
  Synthetic oligonucleotide; TTC chr11 5188236 5188257 5188253 5188258 +
tataggtaaattagtgtcctgg

SEQ ID NO: 77187 - DNA, 22 bp, Artificial Sequence
  Synthetic oligonucleotide; CTA chr11 5188238 5188259 5188255 5188260 +
taggtaaattagtgtcctggat

SEQ ID NO: 77188 - DNA, 22 bp, Artificial Sequence
  Synthetic oligonucleotide; TTA chr11 5188249 5188270 5188266 5188271 +
gtgtcctggatgctagtgcttc

SEQ ID NO: 77189 - DNA, 22 bp, Artificial Sequence
  Synthetic oligonucleotide; CTG chr11 5188257 5188278 5188274 5188279 +
gatgctagtgcttcagccaaaa

SEQ ID NO: 77190 - DNA, 22 bp, Artificial Sequence
  Synthetic oligonucleotide; CTA chr11 5188264 5188285 5188281 5188286 +
gtgcttcagccaaaaaatgaaa

SEQ ID NO: 77191 - DNA, 22 bp, Artificial Sequence
  Synthetic oligonucleotide; CTT chr11 5188270 5188291 5188287 5188292 +
cagccaaaaaatgaaaaagata

SEQ ID NO: 77192 - DNA, 22 bp, Artificial Sequence
  Synthetic oligonucleotide; TTC chr11 5188271 5188292 5188288 5188293 +
agccaaaaaatgaaaaagatac

SEQ ID NO: 77193 - DNA, 22 bp, Artificial Sequence
  Synthetic oligonucleotide; TTA chr11 5188298 5188319 5188315 5188320 +
aatgaaagcctttatcttacta

SEQ ID NO: 77194 - DNA, 22 bp, Artificial Sequence
  Synthetic oligonucleotide; CTT chr11 5188310 5188331 5188327 5188332 +
tatcttactatgggacttgagt

SEQ ID NO: 77195 - DNA, 22 bp, Artificial Sequence
  Synthetic oligonucleotide; TTT chr11 5188311 5188332 5188328 5188333 +
atcttactatgggacttgagtg

SEQ ID NO: 77196 - DNA, 22 bp, Artificial Sequence
  Synthetic oligonucleotide; TTA chr11 5188312 5188333 5188329 5188334 +
tcttactatgggacttgagtgg

SEQ ID NO: 77197 - DNA, 22 bp, Artificial Sequence
  Synthetic oligonucleotide; CTT chr11 5188316 5188337 5188333 5188338 +
actatgggacttgagtggagga

SEQ ID NO: 77198 - DNA, 22 bp, Artificial Sequence
  Synthetic oligonucleotide; TTA chr11 5188317 5188338 5188334 5188339 +
ctatgggacttgagtggaggaa

SEQ ID NO: 77199 - DNA, 22 bp, Artificial Sequence
  Synthetic oligonucleotide; CTA chr11 5188320 5188341 5188337 5188342 +
tgggacttgagtggaggaaatc

SEQ ID NO: 77200 - DNA, 22 bp, Artificial Sequence
  Synthetic oligonucleotide; CTT chr11 5188328 5188349 5188345 5188350 +
gagtggaggaaatccaagaaaa

SEQ ID NO: 77201 - DNA, 22 bp, Artificial Sequence
  Synthetic oligonucleotide; TTG chr11 5188329 5188350 5188346 5188351 +
agtggaggaaatccaagaaaag

SEQ ID NO: 77202 - DNA, 22 bp, Artificial Sequence
  Synthetic oligonucleotide; TTC chr11 5188356 5188377 5188373 5188378 +
cagatgatcctttcttcgaaca

SEQ ID NO: 77203 - DNA, 22 bp, Artificial Sequence
  Synthetic oligonucleotide; CTT chr11 5188368 5188389 5188385 5188390 +
tcttcgaacaagtaatttggca

SEQ ID NO: 77204 - DNA, 22 bp, Artificial Sequence
  Synthetic oligonucleotide; TTT chr11 5188369 5188390 5188386 5188391 +
cttcgaacaagtaatttggcat

SEQ ID NO: 77205 - DNA, 22 bp, Artificial Sequence
  Synthetic oligonucleotide; TTC chr11 5188370 5188391 5188387 5188392 +
ttcgaacaagtaatttggcata

SEQ ID NO: 77206 - DNA, 22 bp, Artificial Sequence
  Synthetic oligonucleotide; CTT chr11 5188372 5188393 5188389 5188394 +
cgaacaagtaatttggcataat

SEQ ID NO: 77207 - DNA, 22 bp, Artificial Sequence
  Synthetic oligonucleotide; TTC chr11 5188373 5188394 5188390 5188395 +
gaacaagtaatttggcataatt

SEQ ID NO: 77208 - DNA, 22 bp, Artificial Sequence
  Synthetic oligonucleotide; TTT chr11 5188386 5188407 5188403 5188408 +
ggcataattggacacctggttt

SEQ ID NO: 77209 - DNA, 22 bp, Artificial Sequence
  Synthetic oligonucleotide; TTG chr11 5188387 5188408 5188404 5188409 +
gcataattggacacctggtttc

SEQ ID NO: 77210 - DNA, 22 bp, Artificial Sequence
  Synthetic oligonucleotide; TTG chr11 5188396 5188417 5188413 5188418 +
gacacctggtttcttctcattt

SEQ ID NO: 77211 - DNA, 22 bp, Artificial Sequence
  Synthetic oligonucleotide; CTG chr11 5188404 5188425 5188421 5188426 +
gtttcttctcatttgtaagtta

SEQ ID NO: 77212 - DNA, 22 bp, Artificial Sequence
  Synthetic oligonucleotide; TTT chr11 5188408 5188429 5188425 5188430 +
cttctcatttgtaagttagtaa

SEQ ID NO: 77213 - DNA, 22 bp, Artificial Sequence
  Synthetic oligonucleotide; TTC chr11 5188409 5188430 5188426 5188431 +
ttctcatttgtaagttagtaaa

SEQ ID NO: 77214 - DNA, 22 bp, Artificial Sequence
  Synthetic oligonucleotide; CTT chr11 5188411 5188432 5188428 5188433 +
ctcatttgtaagttagtaaagc

SEQ ID NO: 77215 - DNA, 22 bp, Artificial Sequence
  Synthetic oligonucleotide; TTC chr11 5188412 5188433 5188429 5188434 +
tcatttgtaagttagtaaagct

SEQ ID NO: 77216 - DNA, 22 bp, Artificial Sequence
  Synthetic oligonucleotide; CTC chr11 5188414 5188435 5188431 5188436 +
atttgtaagttagtaaagctgg

SEQ ID NO: 77217 - DNA, 22 bp, Artificial Sequence
  Synthetic oligonucleotide; TTT chr11 5188418 5188439 5188435 5188440 +
gtaagttagtaaagctgggagt

SEQ ID NO: 77218 - DNA, 22 bp, Artificial Sequence
  Synthetic oligonucleotide; TTG chr11 5188419 5188440 5188436 5188441 +
taagttagtaaagctgggagtt

SEQ ID NO: 77219 - DNA, 22 bp, Artificial Sequence
  Synthetic oligonucleotide; TTA chr11 5188426 5188447 5188443 5188448 +
gtaaagctgggagttggtgcta

SEQ ID NO: 77220 - DNA, 22 bp, Artificial Sequence
  Synthetic oligonucleotide; CTG chr11 5188435 5188456 5188452 5188457 +
ggagttggtgctagtaaagctg

SEQ ID NO: 77221 - DNA, 22 bp, Artificial Sequence
  Synthetic oligonucleotide; TTG chr11 5188442 5188463 5188459 5188464 +
gtgctagtaaagctgggagttg

SEQ ID NO: 77222 - DNA, 22 bp, Artificial Sequence
  Synthetic oligonucleotide; CTA chr11 5188448 5188469 5188465 5188470 +
gtaaagctgggagttggtgcca

SEQ ID NO: 77223 - DNA, 22 bp, Artificial Sequence
  Synthetic oligonucleotide; CTG chr11 5188457 5188478 5188474 5188479 +
ggagttggtgccagaaaagaga

SEQ ID NO: 77224 - DNA, 22 bp, Artificial Sequence
  Synthetic oligonucleotide; TTG chr11 5188464 5188485 5188481 5188486 +
gtgccagaaaagagaacagaaa

SEQ ID NO: 77225 - DNA, 22 bp, Artificial Sequence
  Synthetic oligonucleotide; TTA chr11 5188491 5188512 5188508 5188513 +
atttatttcttccttgtttgta

SEQ ID NO: 77226 - DNA, 22 bp, Artificial Sequence
  Synthetic oligonucleotide; TTT chr11 5188495 5188516 5188512 5188517 +
atttcttccttgtttgtaggct

SEQ ID NO: 77227 - DNA, 22 bp, Artificial Sequence
  Synthetic oligonucleotide; TTA chr11 5188496 5188517 5188513 5188518 +
tttcttccttgtttgtaggctg

SEQ ID NO: 77228 - DNA, 22 bp, Artificial Sequence
  Synthetic oligonucleotide; TTT chr11 5188499 5188520 5188516 5188521 +
cttccttgtttgtaggctgtag

SEQ ID NO: 77229 - DNA, 22 bp, Artificial Sequence
  Synthetic oligonucleotide; TTC chr11 5188500 5188521 5188517 5188522 +
ttccttgtttgtaggctgtaga

SEQ ID NO: 77230 - DNA, 22 bp, Artificial Sequence
  Synthetic oligonucleotide; CTT chr11 5188502 5188523 5188519 5188524 +
ccttgtttgtaggctgtagagc

SEQ ID NO: 77231 - DNA, 22 bp, Artificial Sequence
  Synthetic oligonucleotide; TTC chr11 5188503 5188524 5188520 5188525 +
cttgtttgtaggctgtagagca

SEQ ID NO: 77232 - DNA, 22 bp, Artificial Sequence
  Synthetic oligonucleotide; CTT chr11 5188506 5188527 5188523 5188528 +
gtttgtaggctgtagagcaagc

SEQ ID NO: 77233 - DNA, 22 bp, Artificial Sequence
  Synthetic oligonucleotide; TTG chr11 5188507 5188528 5188524 5188529 +
tttgtaggctgtagagcaagct

SEQ ID NO: 77234 - DNA, 22 bp, Artificial Sequence
  Synthetic oligonucleotide; TTT chr11 5188510 5188531 5188527 5188532 +
gtaggctgtagagcaagcttgt

SEQ ID NO: 77235 - DNA, 22 bp, Artificial Sequence
  Synthetic oligonucleotide; TTG chr11 5188511 5188532 5188528 5188533 +
taggctgtagagcaagcttgtc

SEQ ID NO: 77236 - DNA, 22 bp, Artificial Sequence
  Synthetic oligonucleotide; CTG chr11 5188518 5188539 5188535 5188540 +
tagagcaagcttgtccaacctg

SEQ ID NO: 77237 - DNA, 22 bp, Artificial Sequence
  Synthetic oligonucleotide; CTT chr11 5188530 5188551 5188547 5188552 +
gtccaacctgtggcccgtgggc

SEQ ID NO: 77238 - DNA, 22 bp, Artificial Sequence
  Synthetic oligonucleotide; TTG chr11 5188531 5188552 5188548 5188553 +
tccaacctgtggcccgtgggct

SEQ ID NO: 77239 - DNA, 22 bp, Artificial Sequence
  Synthetic oligonucleotide; CTG chr11 5188540 5188561 5188557 5188562 +
tggcccgtgggctgcatgcatc

SEQ ID NO: 77240 - DNA, 22 bp, Artificial Sequence
  Synthetic oligonucleotide; CTG chr11 5188554 5188575 5188571 5188576 +
catgcatcccaagatggctttg

SEQ ID NO: 77241 - DNA, 22 bp, Artificial Sequence
  Synthetic oligonucleotide; CTT chr11 5188574 5188595 5188591 5188596 +
tgaatgctatccaacacaactt

SEQ ID NO: 77242 - DNA, 22 bp, Artificial Sequence
  Synthetic oligonucleotide; TTT chr11 5188575 5188596 5188592 5188597 +
gaatgctatccaacacaacttt

SEQ ID NO: 77243 - DNA, 22 bp, Artificial Sequence
  Synthetic oligonucleotide; TTG chr11 5188576 5188597 5188593 5188598 +
aatgctatccaacacaactttc

SEQ ID NO: 77244 - DNA, 22 bp, Artificial Sequence
  Synthetic oligonucleotide; CTA chr11 5188583 5188604 5188600 5188605 +
tccaacacaactttcttaaaac

SEQ ID NO: 77245 - DNA, 22 bp, Artificial Sequence
  Synthetic oligonucleotide; CTT chr11 5188596 5188617 5188613 5188618 +
tcttaaaacattatgagatttt

SEQ ID NO: 77246 - DNA, 22 bp, Artificial Sequence
  Synthetic oligonucleotide; TTT chr11 5188597 5188618 5188614 5188619 +
cttaaaacattatgagatttta

SEQ ID NO: 77247 - DNA, 22 bp, Artificial Sequence
  Synthetic oligonucleotide; TTC chr11 5188598 5188619 5188615 5188620 +
ttaaaacattatgagattttat

SEQ ID NO: 77248 - DNA, 22 bp, Artificial Sequence
  Synthetic oligonucleotide; CTT chr11 5188600 5188621 5188617 5188622 +
aaaacattatgagattttatgg

SEQ ID NO: 77249 - DNA, 22 bp, Artificial Sequence
  Synthetic oligonucleotide; TTA chr11 5188601 5188622 5188618 5188623 +
aaacattatgagattttatggg

SEQ ID NO: 77250 - DNA, 22 bp, Artificial Sequence
  Synthetic oligonucleotide; TTA chr11 5188609 5188630 5188626 5188631 +
tgagattttatgggacattttg

SEQ ID NO: 77251 - DNA, 22 bp, Artificial Sequence
  Synthetic oligonucleotide; TTT chr11 5188617 5188638 5188634 5188639 +
tatgggacattttgtgattttt

SEQ ID NO: 77252 - DNA, 22 bp, Artificial Sequence
  Synthetic oligonucleotide; TTT chr11 5188618 5188639 5188635 5188640 +
atgggacattttgtgatttttt

SEQ ID NO: 77253 - DNA, 22 bp, Artificial Sequence
  Synthetic oligonucleotide; TTA chr11 5188619 5188640 5188636 5188641 +
tgggacattttgtgattttttt

SEQ ID NO: 77254 - DNA, 22 bp, Artificial Sequence
  Synthetic oligonucleotide; TTT chr11 5188629 5188650 5188646 5188651 +
tgtgatttttttttttttttgg

SEQ ID NO: 77255 - DNA, 22 bp, Artificial Sequence
  Synthetic oligonucleotide; TTT chr11 5188630 5188651 5188647 5188652 +
gtgatttttttttttttttggc

SEQ ID NO: 77256 - DNA, 22 bp, Artificial Sequence
  Synthetic oligonucleotide; TTG chr11 5188631 5188652 5188648 5188653 +
tgatttttttttttttttggct

SEQ ID NO: 77257 - DNA, 22 bp, Artificial Sequence
  Synthetic oligonucleotide; TTT chr11 5188637 5188658 5188654 5188659 +
ttttttttttttggctcatgag

SEQ ID NO: 77258 - DNA, 22 bp, Artificial Sequence
  Synthetic oligonucleotide; TTT chr11 5188638 5188659 5188655 5188660 +
tttttttttttggctcatgagc

SEQ ID NO: 77259 - DNA, 22 bp, Artificial Sequence
  Synthetic oligonucleotide; TTT chr11 5188639 5188660 5188656 5188661 +
ttttttttttggctcatgagct

SEQ ID NO: 77260 - DNA, 22 bp, Artificial Sequence
  Synthetic oligonucleotide; TTT chr11 5188640 5188661 5188657 5188662 +
tttttttttggctcatgagctg

SEQ ID NO: 77261 - DNA, 22 bp, Artificial Sequence
  Synthetic oligonucleotide; TTT chr11 5188641 5188662 5188658 5188663 +
ttttttttggctcatgagctgt

SEQ ID NO: 77262 - DNA, 22 bp, Artificial Sequence
  Synthetic oligonucleotide; TTT chr11 5188642 5188663 5188659 5188664 +
tttttttggctcatgagctgtc

SEQ ID NO: 77263 - DNA, 22 bp, Artificial Sequence
  Synthetic oligonucleotide; TTT chr11 5188643 5188664 5188660 5188665 +
ttttttggctcatgagctgtca

SEQ ID NO: 77264 - DNA, 22 bp, Artificial Sequence
  Synthetic oligonucleotide; TTT chr11 5188644 5188665 5188661 5188666 +
tttttggctcatgagctgtcat

SEQ ID NO: 77265 - DNA, 22 bp, Artificial Sequence
  Synthetic oligonucleotide; TTT chr11 5188645 5188666 5188662 5188667 +
ttttggctcatgagctgtcatt

SEQ ID NO: 77266 - DNA, 22 bp, Artificial Sequence
  Synthetic oligonucleotide; TTT chr11 5188646 5188667 5188663 5188668 +
tttggctcatgagctgtcatta

SEQ ID NO: 77267 - DNA, 22 bp, Artificial Sequence
  Synthetic oligonucleotide; TTT chr11 5188647 5188668 5188664 5188669 +
ttggctcatgagctgtcattag

SEQ ID NO: 77268 - DNA, 22 bp, Artificial Sequence
  Synthetic oligonucleotide; TTT chr11 5188648 5188669 5188665 5188670 +
tggctcatgagctgtcattagt

SEQ ID NO: 77269 - DNA, 22 bp, Artificial Sequence
  Synthetic oligonucleotide; TTT chr11 5188649 5188670 5188666 5188671 +
ggctcatgagctgtcattagtg

SEQ ID NO: 77270 - DNA, 22 bp, Artificial Sequence
  Synthetic oligonucleotide; TTG chr11 5188650 5188671 5188667 5188672 +
gctcatgagctgtcattagtgt

SEQ ID NO: 77271 - DNA, 22 bp, Artificial Sequence
  Synthetic oligonucleotide; CTC chr11 5188654 5188675 5188671 5188676 +
atgagctgtcattagtgttagt

SEQ ID NO: 77272 - DNA, 22 bp, Artificial Sequence
  Synthetic oligonucleotide; CTG chr11 5188662 5188683 5188679 5188684 +
tcattagtgttagtatatttta

SEQ ID NO: 77273 - DNA, 22 bp, Artificial Sequence
  Synthetic oligonucleotide; TTA chr11 5188668 5188689 5188685 5188690 +
gtgttagtatattttatgtgtg

SEQ ID NO: 77274 - DNA, 22 bp, Artificial Sequence
  Synthetic oligonucleotide; TTA chr11 5188674 5188695 5188691 5188696 +
gtatattttatgtgtggcccag

SEQ ID NO: 77275 - DNA, 22 bp, Artificial Sequence
  Synthetic oligonucleotide; TTT chr11 5188682 5188703 5188699 5188704 +
tatgtgtggcccagggaagcca

SEQ ID NO: 77276 - DNA, 22 bp, Artificial Sequence
  Synthetic oligonucleotide; TTT chr11 5188683 5188704 5188700 5188705 +
atgtgtggcccagggaagccaa

SEQ ID NO: 77277 - DNA, 22 bp, Artificial Sequence
  Synthetic oligonucleotide; TTA chr11 5188684 5188705 5188701 5188706 +
tgtgtggcccagggaagccaaa

SEQ ID NO: 77278 - DNA, 22 bp, Artificial Sequence
  Synthetic oligonucleotide; TTG chr11 5188712 5188733 5188729 5188734 +
gacatccctgctgtagagtttc

SEQ ID NO: 77279 - DNA, 22 bp, Artificial Sequence
  Synthetic oligonucleotide; CTG chr11 5188722 5188743 5188739 5188744 +
ctgtagagtttctcagtggttg

SEQ ID NO: 77280 - DNA, 22 bp, Artificial Sequence
  Synthetic oligonucleotide; CTG chr11 5188725 5188746 5188742 5188747 +
tagagtttctcagtggttggaa

SEQ ID NO: 77281 - DNA, 22 bp, Artificial Sequence
  Synthetic oligonucleotide; TTT chr11 5188733 5188754 5188750 5188755 +
ctcagtggttggaatcaatatt

SEQ ID NO: 77282 - DNA, 22 bp, Artificial Sequence
  Synthetic oligonucleotide; TTC chr11 5188734 5188755 5188751 5188756 +
tcagtggttggaatcaatattt

SEQ ID NO: 77283 - DNA, 22 bp, Artificial Sequence
  Synthetic oligonucleotide; CTC chr11 5188736 5188757 5188753 5188758 +
agtggttggaatcaatatttgc

SEQ ID NO: 77284 - DNA, 22 bp, Artificial Sequence
  Synthetic oligonucleotide; TTG chr11 5188744 5188765 5188761 5188766 +
gaatcaatatttgcagagtctt

SEQ ID NO: 77285 - DNA, 22 bp, Artificial Sequence
  Synthetic oligonucleotide; TTT chr11 5188756 5188777 5188773 5188778 +
gcagagtcttgtagctttttca

SEQ ID NO: 77286 - DNA, 22 bp, Artificial Sequence
  Synthetic oligonucleotide; TTG chr11 5188757 5188778 5188774 5188779 +
cagagtcttgtagctttttcaa

SEQ ID NO: 77287 - DNA, 22 bp, Artificial Sequence
  Synthetic oligonucleotide; CTT chr11 5188766 5188787 5188783 5188788 +
gtagctttttcaaagatttttc

SEQ ID NO: 77288 - DNA, 22 bp, Artificial Sequence
  Synthetic oligonucleotide; TTG chr11 5188767 5188788 5188784 5188789 +
tagctttttcaaagatttttcc

SEQ ID NO: 77289 - DNA, 22 bp, Artificial Sequence
  Synthetic oligonucleotide; CTT chr11 5188773 5188794 5188790 5188795 +
tttcaaagatttttcccctgcc

SEQ ID NO: 77290 - DNA, 22 bp, Artificial Sequence
  Synthetic oligonucleotide; TTT chr11 5188774 5188795 5188791 5188796 +
ttcaaagatttttcccctgcca

SEQ ID NO: 77291 - DNA, 22 bp, Artificial Sequence
  Synthetic oligonucleotide; TTT chr11 5188775 5188796 5188792 5188797 +
tcaaagatttttcccctgccac

SEQ ID NO: 77292 - DNA, 22 bp, Artificial Sequence
  Synthetic oligonucleotide; TTT chr11 5188776 5188797 5188793 5188798 +
caaagatttttcccctgccaca

SEQ ID NO: 77293 - DNA, 22 bp, Artificial Sequence
  Synthetic oligonucleotide; TTC chr11 5188777 5188798 5188794 5188799 +
aaagatttttcccctgccacat

SEQ ID NO: 77294 - DNA, 22 bp, Artificial Sequence
  Synthetic oligonucleotide; TTT chr11 5188785 5188806 5188802 5188807 +
ttcccctgccacattgaagaat

SEQ ID NO: 77295 - DNA, 22 bp, Artificial Sequence
  Synthetic oligonucleotide; TTT chr11 5188786 5188807 5188803 5188808 +
tcccctgccacattgaagaata

SEQ ID NO: 77296 - DNA, 22 bp, Artificial Sequence
  Synthetic oligonucleotide; TTT chr11 5188787 5188808 5188804 5188809 +
cccctgccacattgaagaatag

SEQ ID NO: 77297 - DNA, 22 bp, Artificial Sequence
  Synthetic oligonucleotide; TTC chr11 5188788 5188809 5188805 5188810 +
ccctgccacattgaagaatagc

SEQ ID NO: 77298 - DNA, 22 bp, Artificial Sequence
  Synthetic oligonucleotide; CTG chr11 5188793 5188814 5188810 5188815 +
ccacattgaagaatagcttgag

SEQ ID NO: 77299 - DNA, 22 bp, Artificial Sequence
  Synthetic oligonucleotide; TTG chr11 5188801 5188822 5188818 5188823 +
aagaatagcttgagcaatagcc

SEQ ID NO: 77300 - DNA, 22 bp, Artificial Sequence
  Synthetic oligonucleotide; CTT chr11 5188812 5188833 5188829 5188834 +
gagcaatagccactcttctttc

SEQ ID NO: 77301 - DNA, 22 bp, Artificial Sequence
  Synthetic oligonucleotide; TTG chr11 5188813 5188834 5188830 5188835 +
agcaatagccactcttctttcc

SEQ ID NO: 77302 - DNA, 22 bp, Artificial Sequence
  Synthetic oligonucleotide; CTC chr11 5188827 5188848 5188844 5188849 +
ttctttccaggtggagtttgtg

SEQ ID NO: 77303 - DNA, 22 bp, Artificial Sequence
  Synthetic oligonucleotide; CTT chr11 5188829 5188850 5188846 5188851 +
ctttccaggtggagtttgtgaa

SEQ ID NO: 77304 - DNA, 22 bp, Artificial Sequence
  Synthetic oligonucleotide; TTC chr11 5188830 5188851 5188847 5188852 +
tttccaggtggagtttgtgaat

SEQ ID NO: 77305 - DNA, 22 bp, Artificial Sequence
  Synthetic oligonucleotide; CTT chr11 5188832 5188853 5188849 5188854 +
tccaggtggagtttgtgaatta

SEQ ID NO: 77306 - DNA, 22 bp, Artificial Sequence
  Synthetic oligonucleotide; TTT chr11 5188833 5188854 5188850 5188855 +
ccaggtggagtttgtgaattac

SEQ ID NO: 77307 - DNA, 22 bp, Artificial Sequence
  Synthetic oligonucleotide; TTC chr11 5188834 5188855 5188851 5188856 +
caggtggagtttgtgaattact

SEQ ID NO: 77308 - DNA, 22 bp, Artificial Sequence
  Synthetic oligonucleotide; TTT chr11 5188846 5188867 5188863 5188868 +
gtgaattactttagagatgatc

SEQ ID NO: 77309 - DNA, 22 bp, Artificial Sequence
  Synthetic oligonucleotide; TTG chr11 5188847 5188868 5188864 5188869 +
tgaattactttagagatgatct

SEQ ID NO: 77310 - DNA, 22 bp, Artificial Sequence
  Synthetic oligonucleotide; TTA chr11 5188854 5188875 5188871 5188876 +
ctttagagatgatctttatctg

SEQ ID NO: 77311 - DNA, 22 bp, Artificial Sequence
  Synthetic oligonucleotide; CTT chr11 5188857 5188878 5188874 5188879 +
tagagatgatctttatctggga

SEQ ID NO: 77312 - DNA, 22 bp, Artificial Sequence
  Synthetic oligonucleotide; TTT chr11 5188858 5188879 5188875 5188880 +
agagatgatctttatctgggaa

SEQ ID NO: 77313 - DNA, 22 bp, Artificial Sequence
  Synthetic oligonucleotide; TTA chr11 5188859 5188880 5188876 5188881 +
gagatgatctttatctgggaag

SEQ ID NO: 77314 - DNA, 22 bp, Artificial Sequence
  Synthetic oligonucleotide; CTT chr11 5188870 5188891 5188887 5188892 +
tatctgggaagaattactaata

SEQ ID NO: 77315 - DNA, 22 bp, Artificial Sequence
  Synthetic oligonucleotide; TTT chr11 5188871 5188892 5188888 5188893 +
atctgggaagaattactaatat

SEQ ID NO: 77316 - DNA, 22 bp, Artificial Sequence
  Synthetic oligonucleotide; TTA chr11 5188872 5188893 5188889 5188894 +
tctgggaagaattactaatata

SEQ ID NO: 77317 - DNA, 22 bp, Artificial Sequence
  Synthetic oligonucleotide; CTG chr11 5188876 5188897 5188893 5188898 +
ggaagaattactaatatattat

SEQ ID NO: 77318 - DNA, 22 bp, Artificial Sequence
  Synthetic oligonucleotide; TTA chr11 5188886 5188907 5188903 5188908 +
ctaatatattatctcttcgttt

SEQ ID NO: 77319 - DNA, 22 bp, Artificial Sequence
  Synthetic oligonucleotide; CTA chr11 5188889 5188910 5188906 5188911 +
atatattatctcttcgtttagc

SEQ ID NO: 77320 - DNA, 22 bp, Artificial Sequence
  Synthetic oligonucleotide; TTA chr11 5188897 5188918 5188914 5188919 +
tctcttcgtttagctaacgtaa

SEQ ID NO: 77321 - DNA, 22 bp, Artificial Sequence
  Synthetic oligonucleotide; CTC chr11 5188901 5188922 5188918 5188923 +
ttcgtttagctaacgtaaggtt

SEQ ID NO: 77322 - DNA, 22 bp, Artificial Sequence
  Synthetic oligonucleotide; CTT chr11 5188903 5188924 5188920 5188925 +
cgtttagctaacgtaaggttat

SEQ ID NO: 77323 - DNA, 22 bp, Artificial Sequence
  Synthetic oligonucleotide; TTC chr11 5188904 5188925 5188921 5188926 +
gtttagctaacgtaaggttatt

SEQ ID NO: 77324 - DNA, 22 bp, Artificial Sequence
  Synthetic oligonucleotide; TTT chr11 5188908 5188929 5188925 5188930 +
agctaacgtaaggttattagat

SEQ ID NO: 77325 - DNA, 22 bp, Artificial Sequence
  Synthetic oligonucleotide; TTA chr11 5188909 5188930 5188926 5188931 +
gctaacgtaaggttattagata

SEQ ID NO: 77326 - DNA, 22 bp, Artificial Sequence
  Synthetic oligonucleotide; CTA chr11 5188913 5188934 5188930 5188935 +
acgtaaggttattagatacttt

SEQ ID NO: 77327 - DNA, 22 bp, Artificial Sequence
  Synthetic oligonucleotide; TTA chr11 5188924 5188945 5188941 5188946 +
ttagatacttttctttaaggaa

SEQ ID NO: 77328 - DNA, 22 bp, Artificial Sequence
  Synthetic oligonucleotide; TTA chr11 5188927 5188948 5188944 5188949 +
gatacttttctttaaggaagga

SEQ ID NO: 77329 - DNA, 22 bp, Artificial Sequence
  Synthetic oligonucleotide; CTT chr11 5188934 5188955 5188951 5188956 +
ttctttaaggaaggatacacca

SEQ ID NO: 77330 - DNA, 22 bp, Artificial Sequence
  Synthetic oligonucleotide; TTT chr11 5188935 5188956 5188952 5188957 +
tctttaaggaaggatacaccag

SEQ ID NO: 77331 - DNA, 22 bp, Artificial Sequence
  Synthetic oligonucleotide; TTT chr11 5188936 5188957 5188953 5188958 +
ctttaaggaaggatacaccagg

SEQ ID NO: 77332 - DNA, 22 bp, Artificial Sequence
  Synthetic oligonucleotide; TTC chr11 5188937 5188958 5188954 5188959 +
tttaaggaaggatacaccagga

SEQ ID NO: 77333 - DNA, 22 bp, Artificial Sequence
  Synthetic oligonucleotide; CTT chr11 5188939 5188960 5188956 5188961 +
taaggaaggatacaccaggacc

SEQ ID NO: 77334 - DNA, 22 bp, Artificial Sequence
  Synthetic oligonucleotide; TTT chr11 5188940 5188961 5188957 5188962 +
aaggaaggatacaccaggacct

SEQ ID NO: 77335 - DNA, 22 bp, Artificial Sequence
  Synthetic oligonucleotide; TTA chr11 5188941 5188962 5188958 5188963 +
aggaaggatacaccaggacctg

SEQ ID NO: 77336 - DNA, 22 bp, Artificial Sequence
  Synthetic oligonucleotide; CTG chr11 5188963 5188984 5188980 5188985 +
ccttaataaggcttgatgacat

SEQ ID NO: 77337 - DNA, 22 bp, Artificial Sequence
  Synthetic oligonucleotide; CTT chr11 5188967 5188988 5188984 5188989 +
aataaggcttgatgacatttat

SEQ ID NO: 77338 - DNA, 22 bp, Artificial Sequence
  Synthetic oligonucleotide; TTA chr11 5188968 5188989 5188985 5188990 +
ataaggcttgatgacatttatc

SEQ ID NO: 77339 - DNA, 22 bp, Artificial Sequence
  Synthetic oligonucleotide; CTT chr11 5188977 5188998 5188994 5188999 +
gatgacatttatcttccttcta

SEQ ID NO: 77340 - DNA, 22 bp, Artificial Sequence
  Synthetic oligonucleotide; TTG chr11 5188978 5188999 5188995 5189000 +
atgacatttatcttccttctaa

SEQ ID NO: 77341 - DNA, 22 bp, Artificial Sequence
  Synthetic oligonucleotide; TTT chr11 5188987 5189008 5189004 5189009 +
atcttccttctaatacatcata

SEQ ID NO: 77342 - DNA, 22 bp, Artificial Sequence
  Synthetic oligonucleotide; TTA chr11 5188988 5189009 5189005 5189010 +
tcttccttctaatacatcataa

SEQ ID NO: 77343 - DNA, 22 bp, Artificial Sequence
  Synthetic oligonucleotide; CTT chr11 5188992 5189013 5189009 5189014 +
ccttctaatacatcataatatg

SEQ ID NO: 77344 - DNA, 22 bp, Artificial Sequence
  Synthetic oligonucleotide; TTC chr11 5188993 5189014 5189010 5189015 +
cttctaatacatcataatatgt

SEQ ID NO: 77345 - DNA, 22 bp, Artificial Sequence
  Synthetic oligonucleotide; CTT chr11 5188996 5189017 5189013 5189018 +
ctaatacatcataatatgtgtg

SEQ ID NO: 77346 - DNA, 22 bp, Artificial Sequence
  Synthetic oligonucleotide; TTC chr11 5188997 5189018 5189014 5189019 +
taatacatcataatatgtgtgt

SEQ ID NO: 77347 - DNA, 22 bp, Artificial Sequence
  Synthetic oligonucleotide; CTA chr11 5188999 5189020 5189016 5189021 +
atacatcataatatgtgtgtcg

SEQ ID NO: 77348 - DNA, 22 bp, Artificial Sequence
  Synthetic oligonucleotide; CTT chr11 5189036 5189057 5189053 5189058 +
gtatagaagccaatacgactgc

SEQ ID NO: 77349 - DNA, 22 bp, Artificial Sequence
  Synthetic oligonucleotide; TTG chr11 5189037 5189058 5189054 5189059 +
tatagaagccaatacgactgct

SEQ ID NO: 77350 - DNA, 22 bp, Artificial Sequence
  Synthetic oligonucleotide; CTG chr11 5189057 5189078 5189074 5189079 +
cttgtattaaagaaacaaagtt

SEQ ID NO: 77351 - DNA, 22 bp, Artificial Sequence
  Synthetic oligonucleotide; CTT chr11 5189060 5189081 5189077 5189082 +
gtattaaagaaacaaagtttaa

SEQ ID NO: 77352 - DNA, 22 bp, Artificial Sequence
  Synthetic oligonucleotide; TTG chr11 5189061 5189082 5189078 5189083 +
tattaaagaaacaaagtttaat

SEQ ID NO: 77353 - DNA, 22 bp, Artificial Sequence
  Synthetic oligonucleotide; TTA chr11 5189066 5189087 5189083 5189088 +
aagaaacaaagtttaattcatc

SEQ ID NO: 77354 - DNA, 22 bp, Artificial Sequence
  Synthetic oligonucleotide; TTT chr11 5189080 5189101 5189097 5189102 +
aattcatcgttttgttgttgtg

SEQ ID NO: 77355 - DNA, 22 bp, Artificial Sequence
  Synthetic oligonucleotide; TTA chr11 5189081 5189102 5189098 5189103 +
attcatcgttttgttgttgtgt

SEQ ID NO: 77356 - DNA, 22 bp, Artificial Sequence
  Synthetic oligonucleotide; TTC chr11 5189085 5189106 5189102 5189107 +
atcgttttgttgttgtgttttg

SEQ ID NO: 77357 - DNA, 22 bp, Artificial Sequence
  Synthetic oligonucleotide; TTT chr11 5189092 5189113 5189109 5189114 +
tgttgttgtgttttgcttacat

SEQ ID NO: 77358 - DNA, 22 bp, Artificial Sequence
  Synthetic oligonucleotide; TTT chr11 5189093 5189114 5189110 5189115 +
gttgttgtgttttgcttacatt

SEQ ID NO: 77359 - DNA, 22 bp, Artificial Sequence
  Synthetic oligonucleotide; TTG chr11 5189094 5189115 5189111 5189116 +
ttgttgtgttttgcttacattt

SEQ ID NO: 77360 - DNA, 22 bp, Artificial Sequence
  Synthetic oligonucleotide; TTG chr11 5189097 5189118 5189114 5189119 +
ttgtgttttgcttacattttat

SEQ ID NO: 77361 - DNA, 22 bp, Artificial Sequence
  Synthetic oligonucleotide; TTG chr11 5189100 5189121 5189117 5189122 +
tgttttgcttacattttatgta

SEQ ID NO: 77362 - DNA, 22 bp, Artificial Sequence
  Synthetic oligonucleotide; TTT chr11 5189105 5189126 5189122 5189127 +
tgcttacattttatgtattttg

SEQ ID NO: 77363 - DNA, 22 bp, Artificial Sequence
  Synthetic oligonucleotide; TTT chr11 5189106 5189127 5189123 5189128 +
gcttacattttatgtattttgt

SEQ ID NO: 77364 - DNA, 22 bp, Artificial Sequence
  Synthetic oligonucleotide; TTG chr11 5189107 5189128 5189124 5189129 +
cttacattttatgtattttgtt

SEQ ID NO: 77365 - DNA, 22 bp, Artificial Sequence
  Synthetic oligonucleotide; CTT chr11 5189110 5189131 5189127 5189132 +
acattttatgtattttgttgaa

SEQ ID NO: 77366 - DNA, 22 bp, Artificial Sequence
  Synthetic oligonucleotide; TTA chr11 5189111 5189132 5189128 5189133 +
cattttatgtattttgttgaat

SEQ ID NO: 77367 - DNA, 22 bp, Artificial Sequence
  Synthetic oligonucleotide; TTT chr11 5189116 5189137 5189133 5189138 +
tatgtattttgttgaattgtgt

SEQ ID NO: 77368 - DNA, 22 bp, Artificial Sequence
  Synthetic oligonucleotide; TTT chr11 5189117 5189138 5189134 5189139 +
atgtattttgttgaattgtgtt

SEQ ID NO: 77369 - DNA, 22 bp, Artificial Sequence
  Synthetic oligonucleotide; TTA chr11 5189118 5189139 5189135 5189140 +
tgtattttgttgaattgtgttt

SEQ ID NO: 77370 - DNA, 22 bp, Artificial Sequence
  Synthetic oligonucleotide; TTT chr11 5189125 5189146 5189142 5189147 +
tgttgaattgtgtttaatcaca

SEQ ID NO: 77371 - DNA, 22 bp, Artificial Sequence
  Synthetic oligonucleotide; TTT chr11 5189126 5189147 5189143 5189148 +
gttgaattgtgtttaatcacaa

SEQ ID NO: 77372 - DNA, 22 bp, Artificial Sequence
  Synthetic oligonucleotide; TTG chr11 5189127 5189148 5189144 5189149 +
ttgaattgtgtttaatcacaag

SEQ ID NO: 77373 - DNA, 22 bp, Artificial Sequence
  Synthetic oligonucleotide; TTG chr11 5189130 5189151 5189147 5189152 +
aattgtgtttaatcacaagagt

SEQ ID NO: 77374 - DNA, 22 bp, Artificial Sequence
  Synthetic oligonucleotide; TTG chr11 5189135 5189156 5189152 5189157 +
tgtttaatcacaagagtaatgc

SEQ ID NO: 77375 - DNA, 22 bp, Artificial Sequence
  Synthetic oligonucleotide; TTT chr11 5189140 5189161 5189157 5189162 +
aatcacaagagtaatgcatgcc

SEQ ID NO: 77376 - DNA, 22 bp, Artificial Sequence
  Synthetic oligonucleotide; TTA chr11 5189141 5189162 5189158 5189163 +
atcacaagagtaatgcatgcct

SEQ ID NO: 77377 - DNA, 22 bp, Artificial Sequence
  Synthetic oligonucleotide; CTG chr11 5189164 5189185 5189181 5189186 +
atatggtttggatctgtgtctc

SEQ ID NO: 77378 - DNA, 22 bp, Artificial Sequence
  Synthetic oligonucleotide; TTT chr11 5189173 5189194 5189190 5189195 +
ggatctgtgtctccaccctaat

SEQ ID NO: 77379 - DNA, 22 bp, Artificial Sequence
  Synthetic oligonucleotide; TTG chr11 5189174 5189195 5189191 5189196 +
gatctgtgtctccaccctaatc

SEQ ID NO: 77380 - DNA, 22 bp, Artificial Sequence
  Synthetic oligonucleotide; CTG chr11 5189180 5189201 5189197 5189202 +
tgtctccaccctaatctcatgt

SEQ ID NO: 77381 - DNA, 22 bp, Artificial Sequence
  Synthetic oligonucleotide; CTC chr11 5189186 5189207 5189203 5189208 +
caccctaatctcatgttcagct

SEQ ID NO: 77382 - DNA, 22 bp, Artificial Sequence
  Synthetic oligonucleotide; CTA chr11 5189193 5189214 5189210 5189215 +
atctcatgttcagctgtaatcc

SEQ ID NO: 77383 - DNA, 22 bp, Artificial Sequence
  Synthetic oligonucleotide; CTC chr11 5189198 5189219 5189215 5189220 +
atgttcagctgtaatccccagt

SEQ ID NO: 77384 - DNA, 22 bp, Artificial Sequence
  Synthetic oligonucleotide; TTC chr11 5189204 5189225 5189221 5189226 +
agctgtaatccccagtgttgaa

SEQ ID NO: 77385 - DNA, 22 bp, Artificial Sequence
  Synthetic oligonucleotide; CTG chr11 5189209 5189230 5189226 5189231 +
taatccccagtgttgaagatgg

SEQ ID NO: 77386 - DNA, 22 bp, Artificial Sequence
  Synthetic oligonucleotide; TTG chr11 5189224 5189245 5189241 5189246 +
aagatggggcctggtgggaagt

SEQ ID NO: 77387 - DNA, 22 bp, Artificial Sequence
  Synthetic oligonucleotide; CTG chr11 5189237 5189258 5189254 5189259 +
gtgggaagtgattggatcatag

SEQ ID NO: 77388 - DNA, 22 bp, Artificial Sequence
  Synthetic oligonucleotide; TTG chr11 5189251 5189272 5189268 5189273 +
gatcataggagcagagttatca

SEQ ID NO: 77389 - DNA, 22 bp, Artificial Sequence
  Synthetic oligonucleotide; TTA chr11 5189270 5189291 5189287 5189292 +
tcataaatagcttaatatcagt

SEQ ID NO: 77390 - DNA, 22 bp, Artificial Sequence
  Synthetic oligonucleotide; CTT chr11 5189283 5189304 5189300 5189305 +
aatatcagtcccttttggtacg

SEQ ID NO: 77391 - DNA, 22 bp, Artificial Sequence
  Synthetic oligonucleotide; TTA chr11 5189284 5189305 5189301 5189306 +
atatcagtcccttttggtacgt

SEQ ID NO: 77392 - DNA, 22 bp, Artificial Sequence
  Synthetic oligonucleotide; CTT chr11 5189297 5189318 5189314 5189319 +
ttggtacgtatagtgggtgagt

SEQ ID NO: 77393 - DNA, 22 bp, Artificial Sequence
  Synthetic oligonucleotide; TTT chr11 5189298 5189319 5189315 5189320 +
tggtacgtatagtgggtgagtt

SEQ ID NO: 77394 - DNA, 22 bp, Artificial Sequence
  Synthetic oligonucleotide; TTT chr11 5189299 5189320 5189316 5189321 +
ggtacgtatagtgggtgagttc

SEQ ID NO: 77395 - DNA, 22 bp, Artificial Sequence
  Synthetic oligonucleotide; TTG chr11 5189300 5189321 5189317 5189322 +
gtacgtatagtgggtgagttct

SEQ ID NO: 77396 - DNA, 22 bp, Artificial Sequence
  Synthetic oligonucleotide; TTC chr11 5189321 5189342 5189338 5189343 +
tcatgagatatggttgtttact

SEQ ID NO: 77397 - DNA, 22 bp, Artificial Sequence
  Synthetic oligonucleotide; CTC chr11 5189323 5189344 5189340 5189345 +
atgagatatggttgtttactac

SEQ ID NO: 77398 - DNA, 22 bp, Artificial Sequence
  Synthetic oligonucleotide; TTG chr11 5189337 5189358 5189354 5189359 +
tttactacctccctgcctcttc

SEQ ID NO: 77399 - DNA, 22 bp, Artificial Sequence
  Synthetic oligonucleotide; TTT chr11 5189340 5189361 5189357 5189362 +
actacctccctgcctcttcttc

SEQ ID NO: 77400 - DNA, 22 bp, Artificial Sequence
  Synthetic oligonucleotide; TTA chr11 5189341 5189362 5189358 5189363 +
ctacctccctgcctcttcttcc

SEQ ID NO: 77401 - DNA, 22 bp, Artificial Sequence
  Synthetic oligonucleotide; CTA chr11 5189344 5189365 5189361 5189366 +
cctccctgcctcttcttcctgc

SEQ ID NO: 77402 - DNA, 22 bp, Artificial Sequence
  Synthetic oligonucleotide; CTC chr11 5189348 5189369 5189365 5189370 +
cctgcctcttcttcctgctcca

SEQ ID NO: 77403 - DNA, 22 bp, Artificial Sequence
  Synthetic oligonucleotide; CTG chr11 5189352 5189373 5189369 5189374 +
cctcttcttcctgctccagcca

SEQ ID NO: 77404 - DNA, 22 bp, Artificial Sequence
  Synthetic oligonucleotide; CTC chr11 5189356 5189377 5189373 5189378 +
ttcttcctgctccagccatgtg

SEQ ID NO: 77405 - DNA, 22 bp, Artificial Sequence
  Synthetic oligonucleotide; CTT chr11 5189358 5189379 5189375 5189380 +
cttcctgctccagccatgtgaa

SEQ ID NO: 77406 - DNA, 22 bp, Artificial Sequence
  Synthetic oligonucleotide; TTC chr11 5189359 5189380 5189376 5189381 +
ttcctgctccagccatgtgaag

SEQ ID NO: 77407 - DNA, 22 bp, Artificial Sequence
  Synthetic oligonucleotide; CTT chr11 5189361 5189382 5189378 5189383 +
cctgctccagccatgtgaagac

SEQ ID NO: 77408 - DNA, 22 bp, Artificial Sequence
  Synthetic oligonucleotide; TTC chr11 5189362 5189383 5189379 5189384 +
ctgctccagccatgtgaagaca

SEQ ID NO: 77409 - DNA, 22 bp, Artificial Sequence
  Synthetic oligonucleotide; CTG chr11 5189365 5189386 5189382 5189387 +
ctccagccatgtgaagacacat

SEQ ID NO: 77410 - DNA, 22 bp, Artificial Sequence
  Synthetic oligonucleotide; CTC chr11 5189368 5189389 5189385 5189390 +
cagccatgtgaagacacatgct

SEQ ID NO: 77411 - DNA, 22 bp, Artificial Sequence
  Synthetic oligonucleotide; CTC chr11 5189391 5189412 5189408 5189413 +
ctgtttttctctctgccatgat

SEQ ID NO: 77412 - DNA, 22 bp, Artificial Sequence
  Synthetic oligonucleotide; CTG chr11 5189394 5189415 5189411 5189416 +
tttttctctctgccatgattat

SEQ ID NO: 77413 - DNA, 22 bp, Artificial Sequence
  Synthetic oligonucleotide; TTT chr11 5189397 5189418 5189414 5189419 +
ttctctctgccatgattataag

SEQ ID NO: 77414 - DNA, 22 bp, Artificial Sequence
  Synthetic oligonucleotide; TTT chr11 5189398 5189419 5189415 5189420 +
tctctctgccatgattataagt

SEQ ID NO: 77415 - DNA, 22 bp, Artificial Sequence
  Synthetic oligonucleotide; TTT chr11 5189399 5189420 5189416 5189421 +
ctctctgccatgattataagtt

SEQ ID NO: 77416 - DNA, 22 bp, Artificial Sequence
  Synthetic oligonucleotide; TTC chr11 5189400 5189421 5189417 5189422 +
tctctgccatgattataagttt

SEQ ID NO: 77417 - DNA, 22 bp, Artificial Sequence
  Synthetic oligonucleotide; CTC chr11 5189402 5189423 5189419 5189424 +
tctgccatgattataagtttcc

SEQ ID NO: 77418 - DNA, 22 bp, Artificial Sequence
  Synthetic oligonucleotide; CTC chr11 5189404 5189425 5189421 5189426 +
tgccatgattataagtttcctg

SEQ ID NO: 77419 - DNA, 22 bp, Artificial Sequence
  Synthetic oligonucleotide; CTG chr11 5189406 5189427 5189423 5189428 +
ccatgattataagtttcctgaa

SEQ ID NO: 77420 - DNA, 22 bp, Artificial Sequence
  Synthetic oligonucleotide; TTA chr11 5189415 5189436 5189432 5189437 +
taagtttcctgaaacctcccta

SEQ ID NO: 77421 - DNA, 22 bp, Artificial Sequence
  Synthetic oligonucleotide; TTT chr11 5189422 5189443 5189439 5189444 +
cctgaaacctccctagaagctg

SEQ ID NO: 77422 - DNA, 22 bp, Artificial Sequence
  Synthetic oligonucleotide; TTC chr11 5189423 5189444 5189440 5189445 +
ctgaaacctccctagaagctga

SEQ ID NO: 77423 - DNA, 22 bp, Artificial Sequence
  Synthetic oligonucleotide; CTG chr11 5189426 5189447 5189443 5189448 +
aaacctccctagaagctgagca

SEQ ID NO: 77424 - DNA, 22 bp, Artificial Sequence
  Synthetic oligonucleotide; CTC chr11 5189433 5189454 5189450 5189455 +
cctagaagctgagcagacgttg

SEQ ID NO: 77425 - DNA, 22 bp, Artificial Sequence
  Synthetic oligonucleotide; CTA chr11 5189437 5189458 5189454 5189459 +
gaagctgagcagacgttgccat

SEQ ID NO: 77426 - DNA, 22 bp, Artificial Sequence
  Synthetic oligonucleotide; CTG chr11 5189444 5189465 5189461 5189466 +
agcagacgttgccatgcttcct

SEQ ID NO: 77427 - DNA, 22 bp, Artificial Sequence
  Synthetic oligonucleotide; TTG chr11 5189455 5189476 5189472 5189477 +
ccatgcttcctgtacagccttt

SEQ ID NO: 77428 - DNA, 22 bp, Artificial Sequence
  Synthetic oligonucleotide; CTT chr11 5189463 5189484 5189480 5189485 +
cctgtacagcctttagaactgt

SEQ ID NO: 77429 - DNA, 22 bp, Artificial Sequence
  Synthetic oligonucleotide; TTC chr11 5189464 5189485 5189481 5189486 +
ctgtacagcctttagaactgtg

SEQ ID NO: 77430 - DNA, 22 bp, Artificial Sequence
  Synthetic oligonucleotide; CTG chr11 5189467 5189488 5189484 5189489 +
tacagcctttagaactgtgagc

SEQ ID NO: 77431 - DNA, 22 bp, Artificial Sequence
  Synthetic oligonucleotide; CTT chr11 5189476 5189497 5189493 5189498 +
tagaactgtgagccaattaaat

SEQ ID NO: 77432 - DNA, 22 bp, Artificial Sequence
  Synthetic oligonucleotide; TTT chr11 5189477 5189498 5189494 5189499 +
agaactgtgagccaattaaatc

SEQ ID NO: 77433 - DNA, 22 bp, Artificial Sequence
  Synthetic oligonucleotide; TTA chr11 5189478 5189499 5189495 5189500 +
gaactgtgagccaattaaatct

SEQ ID NO: 77434 - DNA, 22 bp, Artificial Sequence
  Synthetic oligonucleotide; CTG chr11 5189484 5189505 5189501 5189506 +
tgagccaattaaatctctgttc

SEQ ID NO: 77435 - DNA, 22 bp, Artificial Sequence
  Synthetic oligonucleotide; TTA chr11 5189495 5189516 5189512 5189517 +
aatctctgttcttcaccattta

SEQ ID NO: 77436 - DNA, 22 bp, Artificial Sequence
  Synthetic oligonucleotide; CTC chr11 5189501 5189522 5189518 5189523 +
tgttcttcaccatttacccagt

SEQ ID NO: 77437 - DNA, 22 bp, Artificial Sequence
  Synthetic oligonucleotide; CTG chr11 5189503 5189524 5189520 5189525 +
ttcttcaccatttacccagtct

SEQ ID NO: 77438 - DNA, 22 bp, Artificial Sequence
  Synthetic oligonucleotide; TTC chr11 5189506 5189527 5189523 5189528 +
ttcaccatttacccagtctcag

SEQ ID NO: 77439 - DNA, 22 bp, Artificial Sequence
  Synthetic oligonucleotide; CTT chr11 5189508 5189529 5189525 5189530 +
caccatttacccagtctcaggt

SEQ ID NO: 77440 - DNA, 22 bp, Artificial Sequence
  Synthetic oligonucleotide; TTC chr11 5189509 5189530 5189526 5189531 +
accatttacccagtctcaggta

SEQ ID NO: 77441 - DNA, 22 bp, Artificial Sequence
  Synthetic oligonucleotide; TTT chr11 5189516 5189537 5189533 5189538 +
acccagtctcaggtatttcctt

SEQ ID NO: 77442 - DNA, 22 bp, Artificial Sequence
  Synthetic oligonucleotide; TTA chr11 5189517 5189538 5189534 5189539 +
cccagtctcaggtatttcctta

SEQ ID NO: 77443 - DNA, 22 bp, Artificial Sequence
  Synthetic oligonucleotide; CTC chr11 5189526 5189547 5189543 5189548 +
aggtatttccttatagcaagat

SEQ ID NO: 77444 - DNA, 22 bp, Artificial Sequence
  Synthetic oligonucleotide; TTT chr11 5189534 5189555 5189551 5189556 +
ccttatagcaagatgagaatgg

SEQ ID NO: 77445 - DNA, 22 bp, Artificial Sequence
  Synthetic oligonucleotide; TTC chr11 5189535 5189556 5189552 5189557 +
cttatagcaagatgagaatgga

SEQ ID NO: 77446 - DNA, 22 bp, Artificial Sequence
  Synthetic oligonucleotide; CTT chr11 5189538 5189559 5189555 5189560 +
atagcaagatgagaatggacca

SEQ ID NO: 77447 - DNA, 22 bp, Artificial Sequence
  Synthetic oligonucleotide; TTA chr11 5189539 5189560 5189556 5189561 +
tagcaagatgagaatggaccag

SEQ ID NO: 77448 - DNA, 22 bp, Artificial Sequence
  Synthetic oligonucleotide; TTG chr11 5189573 5189594 5189590 5189595 +
gtaccaaaagtggggtactgct

SEQ ID NO: 77449 - DNA, 22 bp, Artificial Sequence
  Synthetic oligonucleotide; CTG chr11 5189593 5189614 5189610 5189615 +
ctataaagatacatgaaaatgt

SEQ ID NO: 77450 - DNA, 22 bp, Artificial Sequence
  Synthetic oligonucleotide; CTA chr11 5189596 5189617 5189613 5189618 +
taaagatacatgaaaatgtgga

SEQ ID NO: 77451 - DNA, 22 bp, Artificial Sequence
  Synthetic oligonucleotide; CTT chr11 5189626 5189647 5189643 5189648 +
tggcattggataacaggcagaa

SEQ ID NO: 77452 - DNA, 22 bp, Artificial Sequence
  Synthetic oligonucleotide; TTT chr11 5189627 5189648 5189644 5189649 +
ggcattggataacaggcagaag

SEQ ID NO: 77453 - DNA, 22 bp, Artificial Sequence
  Synthetic oligonucleotide; TTG chr11 5189628 5189649 5189645 5189650 +
gcattggataacaggcagaagt

SEQ ID NO: 77454 - DNA, 22 bp, Artificial Sequence
  Synthetic oligonucleotide; TTG chr11 5189634 5189655 5189651 5189656 +
gataacaggcagaagttggaag

SEQ ID NO: 77455 - DNA, 22 bp, Artificial Sequence
  Synthetic oligonucleotide; TTG chr11 5189652 5189673 5189669 5189674 +
gaagagtgtggacggctcagaa

SEQ ID NO: 77456 - DNA, 22 bp, Artificial Sequence
  Synthetic oligonucleotide; CTC chr11 5189670 5189691 5189687 5189692 +
agaagaagacagggagatgagg

SEQ ID NO: 77457 - DNA, 22 bp, Artificial Sequence
  Synthetic oligonucleotide; TTT chr11 5189700 5189721 5189717 5189722 +
ggaactttctagagacttgtgg

SEQ ID NO: 77458 - DNA, 22 bp, Artificial Sequence
  Synthetic oligonucleotide; TTG chr11 5189701 5189722 5189718 5189723 +
gaactttctagagacttgtgga

SEQ ID NO: 77459 - DNA, 22 bp, Artificial Sequence
  Synthetic oligonucleotide; CTT chr11 5189707 5189728 5189724 5189729 +
tctagagacttgtggaatggtt

SEQ ID NO: 77460 - DNA, 22 bp, Artificial Sequence
  Synthetic oligonucleotide; TTT chr11 5189708 5189729 5189725 5189730 +
ctagagacttgtggaatggttg

SEQ ID NO: 77461 - DNA, 22 bp, Artificial Sequence
  Synthetic oligonucleotide; TTC chr11 5189709 5189730 5189726 5189731 +
tagagacttgtggaatggttgt

SEQ ID NO: 77462 - DNA, 22 bp, Artificial Sequence
  Synthetic oligonucleotide; CTA chr11 5189711 5189732 5189728 5189733 +
gagacttgtggaatggttgtga

SEQ ID NO: 77463 - DNA, 22 bp, Artificial Sequence
  Synthetic oligonucleotide; CTT chr11 5189718 5189739 5189735 5189740 +
gtggaatggttgtgaccaaaat

SEQ ID NO: 77464 - DNA, 22 bp, Artificial Sequence
  Synthetic oligonucleotide; TTG chr11 5189719 5189740 5189736 5189741 +
tggaatggttgtgaccaaaatt

SEQ ID NO: 77465 - DNA, 22 bp, Artificial Sequence
  Synthetic oligonucleotide; TTG chr11 5189730 5189751 5189747 5189752 +
tgaccaaaattctgatagtgat

SEQ ID NO: 77466 - DNA, 22 bp, Artificial Sequence
  Synthetic oligonucleotide; TTC chr11 5189742 5189763 5189759 5189764 +
tgatagtgatatggacaatgaa

SEQ ID NO: 77467 - DNA, 22 bp, Artificial Sequence
  Synthetic oligonucleotide; CTG chr11 5189744 5189765 5189761 5189766 +
atagtgatatggacaatgaagt

SEQ ID NO: 77468 - DNA, 22 bp, Artificial Sequence
  Synthetic oligonucleotide; CTG chr11 5189774 5189795 5189791 5189796 +
aggtggtctcagatggaaatga

SEQ ID NO: 77469 - DNA, 22 bp, Artificial Sequence
  Synthetic oligonucleotide; CTC chr11 5189784 5189805 5189801 5189806 +
agatggaaatgaatttattgga

SEQ ID NO: 77470 - DNA, 22 bp, Artificial Sequence
  Synthetic oligonucleotide; TTT chr11 5189800 5189821 5189817 5189822 +
attggaaactggagcaaaggtc

SEQ ID NO: 77471 - DNA, 22 bp, Artificial Sequence
  Synthetic oligonucleotide; TTA chr11 5189801 5189822 5189818 5189823 +
ttggaaactggagcaaaggtca

SEQ ID NO: 77472 - DNA, 22 bp, Artificial Sequence
  Synthetic oligonucleotide; TTG chr11 5189804 5189825 5189821 5189826 +
gaaactggagcaaaggtcactt

SEQ ID NO: 77473 - DNA, 22 bp, Artificial Sequence
  Synthetic oligonucleotide; CTG chr11 5189811 5189832 5189828 5189833 +
gagcaaaggtcacttttgttat

SEQ ID NO: 77474 - DNA, 22 bp, Artificial Sequence
  Synthetic oligonucleotide; CTT chr11 5189826 5189847 5189843 5189848 +
ttgttatacattagcaaagagg

SEQ ID NO: 77475 - DNA, 22 bp, Artificial Sequence
  Synthetic oligonucleotide; TTT chr11 5189827 5189848 5189844 5189849 +
tgttatacattagcaaagaggt

SEQ ID NO: 77476 - DNA, 22 bp, Artificial Sequence
  Synthetic oligonucleotide; TTT chr11 5189828 5189849 5189845 5189850 +
gttatacattagcaaagaggtt

SEQ ID NO: 77477 - DNA, 22 bp, Artificial Sequence
  Synthetic oligonucleotide; TTG chr11 5189829 5189850 5189846 5189851 +
ttatacattagcaaagaggttg

SEQ ID NO: 77478 - DNA, 22 bp, Artificial Sequence
  Synthetic oligonucleotide; TTA chr11 5189832 5189853 5189849 5189854 +
tacattagcaaagaggttgact

SEQ ID NO: 77479 - DNA, 22 bp, Artificial Sequence
  Synthetic oligonucleotide; TTA chr11 5189839 5189860 5189856 5189861 +
gcaaagaggttgactgcactgt

SEQ ID NO: 77480 - DNA, 22 bp, Artificial Sequence
  Synthetic oligonucleotide; TTG chr11 5189851 5189872 5189868 5189873 +
actgcactgtgcctctacctta

SEQ ID NO: 77481 - DNA, 22 bp, Artificial Sequence
  Synthetic oligonucleotide; CTG chr11 5189855 5189876 5189872 5189877 +
cactgtgcctctaccttagaga

SEQ ID NO: 77482 - DNA, 22 bp, Artificial Sequence
  Synthetic oligonucleotide; CTG chr11 5189860 5189881 5189877 5189882 +
tgcctctaccttagagaatctg

SEQ ID NO: 77483 - DNA, 22 bp, Artificial Sequence
  Synthetic oligonucleotide; CTC chr11 5189866 5189887 5189883 5189888 +
taccttagagaatctgtggaaa

SEQ ID NO: 77484 - DNA, 22 bp, Artificial Sequence
  Synthetic oligonucleotide; CTA chr11 5189868 5189889 5189885 5189890 +
ccttagagaatctgtggaaatt

SEQ ID NO: 77485 - DNA, 22 bp, Artificial Sequence
  Synthetic oligonucleotide; CTT chr11 5189872 5189893 5189889 5189894 +
agagaatctgtggaaattcgaa

SEQ ID NO: 77486 - DNA, 22 bp, Artificial Sequence
  Synthetic oligonucleotide; TTA chr11 5189873 5189894 5189890 5189895 +
gagaatctgtggaaattcgaag

SEQ ID NO: 77487 - DNA, 22 bp, Artificial Sequence
  Synthetic oligonucleotide; CTG chr11 5189882 5189903 5189899 5189904 +
tggaaattcgaagttgataata

SEQ ID NO: 77488 - DNA, 22 bp, Artificial Sequence
  Synthetic oligonucleotide; TTC chr11 5189891 5189912 5189908 5189913 +
gaagttgataatattatttaag

SEQ ID NO: 77489 - DNA, 22 bp, Artificial Sequence
  Synthetic oligonucleotide; TTG chr11 5189898 5189919 5189915 5189920 +
ataatattatttaagttatgtg

SEQ ID NO: 77490 - DNA, 22 bp, Artificial Sequence
  Synthetic oligonucleotide; TTA chr11 5189907 5189928 5189924 5189929 +
tttaagttatgtgacagaagtt

SEQ ID NO: 77491 - DNA, 22 bp, Artificial Sequence
  Synthetic oligonucleotide; TTT chr11 5189910 5189931 5189927 5189932 +
aagttatgtgacagaagtttct

SEQ ID NO: 77492 - DNA, 22 bp, Artificial Sequence
  Synthetic oligonucleotide; TTA chr11 5189911 5189932 5189928 5189933 +
agttatgtgacagaagtttcta

SEQ ID NO: 77493 - DNA, 22 bp, Artificial Sequence
  Synthetic oligonucleotide; TTA chr11 5189916 5189937 5189933 5189938 +
tgtgacagaagtttctaagcag

SEQ ID NO: 77494 - DNA, 22 bp, Artificial Sequence
  Synthetic oligonucleotide; TTT chr11 5189930 5189951 5189947 5189952 +
ctaagcagcaaggtgttcaaga

SEQ ID NO: 77495 - DNA, 22 bp, Artificial Sequence
  Synthetic oligonucleotide; TTC chr11 5189931 5189952 5189948 5189953 +
taagcagcaaggtgttcaagat

SEQ ID NO: 77496 - DNA, 22 bp, Artificial Sequence
  Synthetic oligonucleotide; CTA chr11 5189933 5189954 5189950 5189955 +
agcagcaaggtgttcaagatgt

SEQ ID NO: 77497 - DNA, 22 bp, Artificial Sequence
  Synthetic oligonucleotide; TTC chr11 5189948 5189969 5189965 5189970 +
aagatgtgtcctggctgcttct

SEQ ID NO: 77498 - DNA, 22 bp, Artificial Sequence
  Synthetic oligonucleotide; CTG chr11 5189961 5189982 5189978 5189983 +
gctgcttctaacaacctatgct

SEQ ID NO: 77499 - DNA, 22 bp, Artificial Sequence
  Synthetic oligonucleotide; CTG chr11 5189965 5189986 5189982 5189987 +
cttctaacaacctatgctcata

SEQ ID NO: 77500 - DNA, 22 bp, Artificial Sequence
  Synthetic oligonucleotide; CTT chr11 5189968 5189989 5189985 5189990 +
ctaacaacctatgctcatatgt

SEQ ID NO: 77501 - DNA, 22 bp, Artificial Sequence
  Synthetic oligonucleotide; TTC chr11 5189969 5189990 5189986 5189991 +
taacaacctatgctcatatgtg

SEQ ID NO: 77502 - DNA, 22 bp, Artificial Sequence
  Synthetic oligonucleotide; CTA chr11 5189971 5189992 5189988 5189993 +
acaacctatgctcatatgtgtg

SEQ ID NO: 77503 - DNA, 22 bp, Artificial Sequence
  Synthetic oligonucleotide; CTA chr11 5189979 5190000 5189996 5190001 +
tgctcatatgtgtgagcaaaga

SEQ ID NO: 77504 - DNA, 22 bp, Artificial Sequence
  Synthetic oligonucleotide; CTC chr11 5189984 5190005 5190001 5190006 +
atatgtgtgagcaaagaaataa

SEQ ID NO: 77505 - DNA, 22 bp, Artificial Sequence
  Synthetic oligonucleotide; CTT chr11 5190022 5190043 5190039 5190044 +
atatttaaaagggaagcagagc

SEQ ID NO: 77506 - DNA, 22 bp, Artificial Sequence
  Synthetic oligonucleotide; TTA chr11 5190023 5190044 5190040 5190045 +
tatttaaaagggaagcagagca

SEQ ID NO: 77507 - DNA, 22 bp, Artificial Sequence
  Synthetic oligonucleotide; TTT chr11 5190028 5190049 5190045 5190050 +
aaaagggaagcagagcataaaa

SEQ ID NO: 77508 - DNA, 22 bp, Artificial Sequence
  Synthetic oligonucleotide; TTA chr11 5190029 5190050 5190046 5190051 +
aaagggaagcagagcataaaag

SEQ ID NO: 77509 - DNA, 22 bp, Artificial Sequence
  Synthetic oligonucleotide; TTT chr11 5190054 5190075 5190071 5190076 +
ggaaaattatctgctcggccat

SEQ ID NO: 77510 - DNA, 22 bp, Artificial Sequence
  Synthetic oligonucleotide; TTG chr11 5190055 5190076 5190072 5190077 +
gaaaattatctgctcggccatg

SEQ ID NO: 77511 - DNA, 22 bp, Artificial Sequence
  Synthetic oligonucleotide; TTA chr11 5190063 5190084 5190080 5190085 +
tctgctcggccatgtggtagaa

SEQ ID NO: 77512 - DNA, 22 bp, Artificial Sequence
  Synthetic oligonucleotide; CTG chr11 5190067 5190088 5190084 5190089 +
ctcggccatgtggtagaaaaca

SEQ ID NO: 77513 - DNA, 22 bp, Artificial Sequence
  Synthetic oligonucleotide; CTC chr11 5190070 5190091 5190087 5190092 +
ggccatgtggtagaaaacagaa

SEQ ID NO: 77514 - DNA, 22 bp, Artificial Sequence
  Synthetic oligonucleotide; CTC chr11 5190096 5190117 5190113 5190118 +
attttcaaaggagcaattcaag

SEQ ID NO: 77515 - DNA, 22 bp, Artificial Sequence
  Synthetic oligonucleotide; TTT chr11 5190100 5190121 5190117 5190122 +
tcaaaggagcaattcaagcagg

SEQ ID NO: 77516 - DNA, 22 bp, Artificial Sequence
  Synthetic oligonucleotide; TTT chr11 5190101 5190122 5190118 5190123 +
caaaggagcaattcaagcaggc

SEQ ID NO: 77517 - DNA, 22 bp, Artificial Sequence
  Synthetic oligonucleotide; TTC chr11 5190102 5190123 5190119 5190124 +
aaaggagcaattcaagcaggct

SEQ ID NO: 77518 - DNA, 22 bp, Artificial Sequence
  Synthetic oligonucleotide; TTC chr11 5190115 5190136 5190132 5190137 +
aagcaggctgtagaaatttgca

SEQ ID NO: 77519 - DNA, 22 bp, Artificial Sequence
  Synthetic oligonucleotide; CTG chr11 5190125 5190146 5190142 5190147 +
tagaaatttgcataaatgaaga

SEQ ID NO: 77520 - DNA, 22 bp, Artificial Sequence
  Synthetic oligonucleotide; TTT chr11 5190134 5190155 5190151 5190156 +
gcataaatgaagaggagccgag

SEQ ID NO: 77521 - DNA, 22 bp, Artificial Sequence
  Synthetic oligonucleotide; TTG chr11 5190135 5190156 5190152 5190157 +
cataaatgaagaggagccgagt

SEQ ID NO: 77522 - DNA, 22 bp, Artificial Sequence
  Synthetic oligonucleotide; TTC chr11 5190159 5190180 5190176 5190181 +
taatagccaaaataaaggggag

SEQ ID NO: 77523 - DNA, 22 bp, Artificial Sequence
  Synthetic oligonucleotide; CTA chr11 5190161 5190182 5190178 5190183 +
atagccaaaataaaggggagaa

SEQ ID NO: 77524 - DNA, 22 bp, Artificial Sequence
  Synthetic oligonucleotide; CTC chr11 5190189 5190210 5190206 5190211 +
aaagacatttcagagacccttg

SEQ ID NO: 77525 - DNA, 22 bp, Artificial Sequence
  Synthetic oligonucleotide; TTT chr11 5190199 5190220 5190216 5190221 +
cagagacccttgtagcagcccc

SEQ ID NO: 77526 - DNA, 22 bp, Artificial Sequence
  Synthetic oligonucleotide; TTC chr11 5190200 5190221 5190217 5190222 +
agagacccttgtagcagcccct

SEQ ID NO: 77527 - DNA, 22 bp, Artificial Sequence
  Synthetic oligonucleotide; CTT chr11 5190210 5190231 5190227 5190232 +
gtagcagcccctcacatcacag

SEQ ID NO: 77528 - DNA, 22 bp, Artificial Sequence
  Synthetic oligonucleotide; TTG chr11 5190211 5190232 5190228 5190233 +
tagcagcccctcacatcacagg

SEQ ID NO: 77529 - DNA, 22 bp, Artificial Sequence
  Synthetic oligonucleotide; CTC chr11 5190223 5190244 5190240 5190245 +
acatcacaggcctggtggccta

SEQ ID NO: 77530 - DNA, 22 bp, Artificial Sequence
  Synthetic oligonucleotide; CTG chr11 5190237 5190258 5190254 5190259 +
gtggcctaggagtactgaatga

SEQ ID NO: 77531 - DNA, 22 bp, Artificial Sequence
  Synthetic oligonucleotide; CTA chr11 5190245 5190266 5190262 5190267 +
ggagtactgaatgattttgtgg

SEQ ID NO: 77532 - DNA, 22 bp, Artificial Sequence
  Synthetic oligonucleotide; CTG chr11 5190254 5190275 5190271 5190276 +
aatgattttgtgggtgagattc

SEQ ID NO: 77533 - DNA, 22 bp, Artificial Sequence
  Synthetic oligonucleotide; TTT chr11 5190262 5190283 5190279 5190284 +
tgtgggtgagattcaggaccct

SEQ ID NO: 77534 - DNA, 22 bp, Artificial Sequence
  Synthetic oligonucleotide; TTT chr11 5190263 5190284 5190280 5190285 +
gtgggtgagattcaggaccctg

SEQ ID NO: 77535 - DNA, 22 bp, Artificial Sequence
  Synthetic oligonucleotide; TTG chr11 5190264 5190285 5190281 5190286 +
tgggtgagattcaggaccctgc

SEQ ID NO: 77536 - DNA, 22 bp, Artificial Sequence
  Synthetic oligonucleotide; TTC chr11 5190276 5190297 5190293 5190298 +
aggaccctgctgccttgagcag

SEQ ID NO: 77537 - DNA, 22 bp, Artificial Sequence
  Synthetic oligonucleotide; CTG chr11 5190285 5190306 5190302 5190307 +
ctgccttgagcagcttcaggac

SEQ ID NO: 77538 - DNA, 22 bp, Artificial Sequence
  Synthetic oligonucleotide; CTG chr11 5190288 5190309 5190305 5190310 +
ccttgagcagcttcaggacact

SEQ ID NO: 77539 - DNA, 22 bp, Artificial Sequence
  Synthetic oligonucleotide; CTT chr11 5190292 5190313 5190309 5190314 +
gagcagcttcaggacactgttc

SEQ ID NO: 77540 - DNA, 22 bp, Artificial Sequence
  Synthetic oligonucleotide; TTG chr11 5190293 5190314 5190310 5190315 +
agcagcttcaggacactgttcc

SEQ ID NO: 77541 - DNA, 22 bp, Artificial Sequence
  Synthetic oligonucleotide; CTT chr11 5190301 5190322 5190318 5190323 +
caggacactgttccttgcatcc

SEQ ID NO: 77542 - DNA, 22 bp, Artificial Sequence
  Synthetic oligonucleotide; TTC chr11 5190302 5190323 5190319 5190324 +
aggacactgttccttgcatcct

SEQ ID NO: 77543 - DNA, 22 bp, Artificial Sequence
  Synthetic oligonucleotide; CTG chr11 5190311 5190332 5190328 5190333 +
ttccttgcatcctggctgctcc

SEQ ID NO: 77544 - DNA, 22 bp, Artificial Sequence
  Synthetic oligonucleotide; TTC chr11 5190314 5190335 5190331 5190336 +
cttgcatcctggctgctccagc

SEQ ID NO: 77545 - DNA, 22 bp, Artificial Sequence
  Synthetic oligonucleotide; CTT chr11 5190317 5190338 5190334 5190339 +
gcatcctggctgctccagcacc

SEQ ID NO: 77546 - DNA, 22 bp, Artificial Sequence
  Synthetic oligonucleotide; TTG chr11 5190318 5190339 5190335 5190340 +
catcctggctgctccagcacca

SEQ ID NO: 77547 - DNA, 22 bp, Artificial Sequence
  Synthetic oligonucleotide; CTG chr11 5190325 5190346 5190342 5190347 +
gctgctccagcaccagctgtgg

SEQ ID NO: 77548 - DNA, 22 bp, Artificial Sequence
  Synthetic oligonucleotide; CTG chr11 5190329 5190350 5190346 5190351 +
ctccagcaccagctgtggctca

SEQ ID NO: 77549 - DNA, 22 bp, Artificial Sequence
  Synthetic oligonucleotide; CTC chr11 5190332 5190353 5190349 5190354 +
cagcaccagctgtggctcaaag

SEQ ID NO: 77550 - DNA, 22 bp, Artificial Sequence
  Synthetic oligonucleotide; CTG chr11 5190344 5190365 5190361 5190366 +
tggctcaaaggggcccaagaac

SEQ ID NO: 77551 - DNA, 22 bp, Artificial Sequence
  Synthetic oligonucleotide; CTC chr11 5190350 5190371 5190367 5190372 +
aaaggggcccaagaacagctaa

SEQ ID NO: 77552 - DNA, 22 bp, Artificial Sequence
  Synthetic oligonucleotide; CTA chr11 5190371 5190392 5190388 5190393 +
aggccactgcttcagagggtgc

SEQ ID NO: 77553 - DNA, 22 bp, Artificial Sequence
  Synthetic oligonucleotide; CTG chr11 5190380 5190401 5190397 5190402 +
cttcagagggtgcaagacataa

SEQ ID NO: 77554 - DNA, 22 bp, Artificial Sequence
  Synthetic oligonucleotide; CTT chr11 5190383 5190404 5190400 5190405 +
cagagggtgcaagacataagcc

SEQ ID NO: 77555 - DNA, 22 bp, Artificial Sequence
  Synthetic oligonucleotide; TTC chr11 5190384 5190405 5190401 5190406 +
agagggtgcaagacataagcct

SEQ ID NO: 77556 - DNA, 22 bp, Artificial Sequence
  Synthetic oligonucleotide; CTT chr11 5190407 5190428 5190424 5190429 +
ggaggcttccacatggtgataa

SEQ ID NO: 77557 - DNA, 22 bp, Artificial Sequence
  Synthetic oligonucleotide; TTG chr11 5190408 5190429 5190425 5190430 +
gaggcttccacatggtgataaa

SEQ ID NO: 77558 - DNA, 22 bp, Artificial Sequence
  Synthetic oligonucleotide; CTT chr11 5190415 5190436 5190432 5190437 +
ccacatggtgataaatctggga

SEQ ID NO: 77559 - DNA, 22 bp, Artificial Sequence
  Synthetic oligonucleotide; TTC chr11 5190416 5190437 5190433 5190438 +
cacatggtgataaatctgggag

SEQ ID NO: 77560 - DNA, 22 bp, Artificial Sequence
  Synthetic oligonucleotide; CTG chr11 5190434 5190455 5190451 5190456 +
ggagtgtgcaaaggtcaaaaag

SEQ ID NO: 77561 - DNA, 22 bp, Artificial Sequence
  Synthetic oligonucleotide; TTG chr11 5190459 5190480 5190476 5190481 +
aggcttgtaagcctccacctag

SEQ ID NO: 77562 - DNA, 22 bp, Artificial Sequence
  Synthetic oligonucleotide; CTT chr11 5190465 5190486 5190482 5190487 +
gtaagcctccacctagatttca

SEQ ID NO: 77563 - DNA, 22 bp, Artificial Sequence
  Synthetic oligonucleotide; TTG chr11 5190466 5190487 5190483 5190488 +
taagcctccacctagatttcag

SEQ ID NO: 77564 - DNA, 22 bp, Artificial Sequence
  Synthetic oligonucleotide; CTC chr11 5190474 5190495 5190491 5190496 +
cacctagatttcagaggatgtg

SEQ ID NO: 77565 - DNA, 22 bp, Artificial Sequence
  Synthetic oligonucleotide; CTA chr11 5190480 5190501 5190497 5190502 +
gatttcagaggatgtgtagaaa

SEQ ID NO: 77566 - DNA, 22 bp, Artificial Sequence
  Synthetic oligonucleotide; TTT chr11 5190485 5190506 5190502 5190507 +
cagaggatgtgtagaaaagcct

SEQ ID NO: 77567 - DNA, 22 bp, Artificial Sequence
  Synthetic oligonucleotide; TTC chr11 5190486 5190507 5190503 5190508 +
agaggatgtgtagaaaagcctg

SEQ ID NO: 77568 - DNA, 22 bp, Artificial Sequence
  Synthetic oligonucleotide; CTG chr11 5190508 5190529 5190525 5190530 +
agtgttcaggcagaagcctcct

SEQ ID NO: 77569 - DNA, 22 bp, Artificial Sequence
  Synthetic oligonucleotide; TTC chr11 5190515 5190536 5190532 5190537 +
aggcagaagcctcctgcagggg

SEQ ID NO: 77570 - DNA, 22 bp, Artificial Sequence
  Synthetic oligonucleotide; CTC chr11 5190528 5190549 5190545 5190550 +
ctgcaggggcagaaccctcatg

SEQ ID NO: 77571 - DNA, 22 bp, Artificial Sequence
  Synthetic oligonucleotide; CTG chr11 5190531 5190552 5190548 5190553 +
caggggcagaaccctcatgaag

SEQ ID NO: 77572 - DNA, 22 bp, Artificial Sequence
  Synthetic oligonucleotide; CTC chr11 5190547 5190568 5190564 5190569 +
atgaagaacctctaatagggca

SEQ ID NO: 77573 - DNA, 22 bp, Artificial Sequence
  Synthetic oligonucleotide; CTC chr11 5190559 5190580 5190576 5190581 +
taatagggcaatgtggaggaaa

SEQ ID NO: 77574 - DNA, 22 bp, Artificial Sequence
  Synthetic oligonucleotide; CTA chr11 5190561 5190582 5190578 5190583 +
atagggcaatgtggaggaaaaa

SEQ ID NO: 77575 - DNA, 22 bp, Artificial Sequence
  Synthetic oligonucleotide; TTG chr11 5190593 5190614 5190610 5190615 +
gaaccccctcacagagtctcca

SEQ ID NO: 77576 - DNA, 22 bp, Artificial Sequence
  Synthetic oligonucleotide; CTC chr11 5190603 5190624 5190620 5190625 +
acagagtctccactggggcact

SEQ ID NO: 77577 - DNA, 22 bp, Artificial Sequence
  Synthetic oligonucleotide; CTC chr11 5190613 5190634 5190630 5190635 +
cactggggcactgcctagcaga

SEQ ID NO: 77578 - DNA, 22 bp, Artificial Sequence
  Synthetic oligonucleotide; CTG chr11 5190618 5190639 5190635 5190640 +
gggcactgcctagcagagctat

SEQ ID NO: 77579 - DNA, 22 bp, Artificial Sequence
  Synthetic oligonucleotide; CTG chr11 5190626 5190647 5190643 5190648 +
cctagcagagctatgagaaaag

SEQ ID NO: 77580 - DNA, 22 bp, Artificial Sequence
  Synthetic oligonucleotide; CTA chr11 5190630 5190651 5190647 5190652 +
gcagagctatgagaaaagggcc

SEQ ID NO: 77581 - DNA, 22 bp, Artificial Sequence
  Synthetic oligonucleotide; CTA chr11 5190639 5190660 5190656 5190661 +
tgagaaaagggccaccgtcctc

SEQ ID NO: 77582 - DNA, 22 bp, Artificial Sequence
  Synthetic oligonucleotide; CTC chr11 5190661 5190682 5190678 5190683 +
cagaccccagaatggtagatcc

SEQ ID NO: 77583 - DNA, 22 bp, Artificial Sequence
  Synthetic oligonucleotide; CTG chr11 5190687 5190708 5190704 5190709 +
acagtttgcaccgtgcacctag

SEQ ID NO: 77584 - DNA, 22 bp, Artificial Sequence
  Synthetic oligonucleotide; TTT chr11 5190694 5190715 5190711 5190716 +
gcaccgtgcacctagaaaagct

SEQ ID NO: 77585 - DNA, 22 bp, Artificial Sequence
  Synthetic oligonucleotide; TTG chr11 5190695 5190716 5190712 5190717 +
caccgtgcacctagaaaagctg

SEQ ID NO: 77586 - DNA, 22 bp, Artificial Sequence
  Synthetic oligonucleotide; CTA chr11 5190708 5190729 5190725 5190730 +
gaaaagctgcaaacactcaata

SEQ ID NO: 77587 - DNA, 22 bp, Artificial Sequence
  Synthetic oligonucleotide; CTG chr11 5190717 5190738 5190734 5190739 +
caaacactcaatacaatctctt

SEQ ID NO: 77588 - DNA, 22 bp, Artificial Sequence
  Synthetic oligonucleotide; CTC chr11 5190726 5190747 5190743 5190748 +
aatacaatctcttaagagcagc

SEQ ID NO: 77589 - DNA, 22 bp, Artificial Sequence
  Synthetic oligonucleotide; CTC chr11 5190737 5190758 5190754 5190759 +
ttaagagcagcagcaggggcta

SEQ ID NO: 77590 - DNA, 22 bp, Artificial Sequence
  Synthetic oligonucleotide; CTT chr11 5190739 5190760 5190756 5190761 +
aagagcagcagcaggggctaaa

SEQ ID NO: 77591 - DNA, 22 bp, Artificial Sequence
  Synthetic oligonucleotide; TTA chr11 5190740 5190761 5190757 5190762 +
agagcagcagcaggggctaaac

SEQ ID NO: 77592 - DNA, 22 bp, Artificial Sequence
  Synthetic oligonucleotide; CTA chr11 5190759 5190780 5190776 5190781 +
aactgtgcaaagcaataggggt

SEQ ID NO: 77593 - DNA, 22 bp, Artificial Sequence
  Synthetic oligonucleotide; CTG chr11 5190764 5190785 5190781 5190786 +
tgcaaagcaataggggtggaac

SEQ ID NO: 77594 - DNA, 22 bp, Artificial Sequence
  Synthetic oligonucleotide; CTG chr11 5190788 5190809 5190805 5190810 +
cccaaggccttgggagcccacc

SEQ ID NO: 77595 - DNA, 22 bp, Artificial Sequence
  Synthetic oligonucleotide; CTT chr11 5190799 5190820 5190816 5190821 +
gggagcccacctcttgcatcag

SEQ ID NO: 77596 - DNA, 22 bp, Artificial Sequence
  Synthetic oligonucleotide; TTG chr11 5190800 5190821 5190817 5190822 +
ggagcccacctcttgcatcagt

SEQ ID NO: 77597 - DNA, 22 bp, Artificial Sequence
  Synthetic oligonucleotide; CTC chr11 5190812 5190833 5190829 5190834 +
ttgcatcagtgtgtccctgata

SEQ ID NO: 77598 - DNA, 22 bp, Artificial Sequence
  Synthetic oligonucleotide; CTT chr11 5190814 5190835 5190831 5190836 +
gcatcagtgtgtccctgatatg

SEQ ID NO: 77599 - DNA, 22 bp, Artificial Sequence
  Synthetic oligonucleotide; TTG chr11 5190815 5190836 5190832 5190837 +
catcagtgtgtccctgatatga

SEQ ID NO: 77600 - DNA, 22 bp, Artificial Sequence
  Synthetic oligonucleotide; CTG chr11 5190831 5190852 5190848 5190853 +
atatgagacatggggtcaaagg

SEQ ID NO: 77601 - DNA, 22 bp, Artificial Sequence
  Synthetic oligonucleotide; TTA chr11 5190859 5190880 5190876 5190881 +
ttttggagtgttaaggtgtgta

SEQ ID NO: 77602 - DNA, 22 bp, Artificial Sequence
  Synthetic oligonucleotide; TTT chr11 5190862 5190883 5190879 5190884 +
tggagtgttaaggtgtgtattt

SEQ ID NO: 77603 - DNA, 22 bp, Artificial Sequence
  Synthetic oligonucleotide; TTT chr11 5190863 5190884 5190880 5190885 +
ggagtgttaaggtgtgtatttg

SEQ ID NO: 77604 - DNA, 22 bp, Artificial Sequence
  Synthetic oligonucleotide; TTG chr11 5190864 5190885 5190881 5190886 +
gagtgttaaggtgtgtatttgt

SEQ ID NO: 77605 - DNA, 22 bp, Artificial Sequence
  Synthetic oligonucleotide; TTA chr11 5190872 5190893 5190889 5190894 +
aggtgtgtatttgtccgtttta

SEQ ID NO: 77606 - DNA, 22 bp, Artificial Sequence
  Synthetic oligonucleotide; TTT chr11 5190884 5190905 5190901 5190906 +
gtccgttttaaactgctatgaa

SEQ ID NO: 77607 - DNA, 22 bp, Artificial Sequence
  Synthetic oligonucleotide; TTG chr11 5190885 5190906 5190902 5190907 +
tccgttttaaactgctatgaag

SEQ ID NO: 77608 - DNA, 22 bp, Artificial Sequence
  Synthetic oligonucleotide; TTT chr11 5190892 5190913 5190909 5190914 +
taaactgctatgaagaaatacc

SEQ ID NO: 77609 - DNA, 22 bp, Artificial Sequence
  Synthetic oligonucleotide; TTT chr11 5190893 5190914 5190910 5190915 +
aaactgctatgaagaaataccc

SEQ ID NO: 77610 - DNA, 22 bp, Artificial Sequence
  Synthetic oligonucleotide; TTA chr11 5190894 5190915 5190911 5190916 +
aactgctatgaagaaatacccg

SEQ ID NO: 77611 - DNA, 22 bp, Artificial Sequence
  Synthetic oligonucleotide; CTG chr11 5190899 5190920 5190916 5190921 +
ctatgaagaaatacccgagact

SEQ ID NO: 77612 - DNA, 22 bp, Artificial Sequence
  Synthetic oligonucleotide; CTA chr11 5190902 5190923 5190919 5190924 +
tgaagaaatacccgagactggg

SEQ ID NO: 77613 - DNA, 22 bp, Artificial Sequence
  Synthetic oligonucleotide; CTG chr11 5190922 5190943 5190939 5190944 +
ggtaatttataaagaaaaagag

SEQ ID NO: 77614 - DNA, 22 bp, Artificial Sequence
  Synthetic oligonucleotide; TTT chr11 5190930 5190951 5190947 5190952 +
ataaagaaaaagagatttaatg

SEQ ID NO: 77615 - DNA, 22 bp, Artificial Sequence
  Synthetic oligonucleotide; TTA chr11 5190931 5190952 5190948 5190953 +
taaagaaaaagagatttaatgg

SEQ ID NO: 77616 - DNA, 22 bp, Artificial Sequence
  Synthetic oligonucleotide; TTT chr11 5190948 5190969 5190965 5190970 +
aatggactcatagatccacatt

SEQ ID NO: 77617 - DNA, 22 bp, Artificial Sequence
  Synthetic oligonucleotide; TTA chr11 5190949 5190970 5190966 5190971 +
atggactcatagatccacattg

SEQ ID NO: 77618 - DNA, 22 bp, Artificial Sequence
  Synthetic oligonucleotide; CTC chr11 5190957 5190978 5190974 5190979 +
atagatccacattgctggggag

SEQ ID NO: 77619 - DNA, 22 bp, Artificial Sequence
  Synthetic oligonucleotide; TTG chr11 5190971 5190992 5190988 5190993 +
ctggggaggccttacaatcatg

SEQ ID NO: 77620 - DNA, 22 bp, Artificial Sequence
  Synthetic oligonucleotide; CTG chr11 5190974 5190995 5190991 5190996 +
gggaggccttacaatcatggtg

SEQ ID NO: 77621 - DNA, 22 bp, Artificial Sequence
  Synthetic oligonucleotide; CTT chr11 5190984 5191005 5191001 5191006 +
acaatcatggtggaaggtgaag

SEQ ID NO: 77622 - DNA, 22 bp, Artificial Sequence
  Synthetic oligonucleotide; TTA chr11 5190985 5191006 5191002 5191007 +
caatcatggtggaaggtgaagg

SEQ ID NO: 77623 - DNA, 22 bp, Artificial Sequence
  Synthetic oligonucleotide; CTG chr11 5191026 5191047 5191043 5191048 +
acatggtggcaggcaagagagc

SEQ ID NO: 77624 - DNA, 22 bp, Artificial Sequence
  Synthetic oligonucleotide; CTT chr11 5191069 5191090 5191086 5191091 +
tataaaaccatcagatcttgtg

SEQ ID NO: 77625 - DNA, 22 bp, Artificial Sequence
  Synthetic oligonucleotide; TTT chr11 5191070 5191091 5191087 5191092 +
ataaaaccatcagatcttgtga

SEQ ID NO: 77626 - DNA, 22 bp, Artificial Sequence
  Synthetic oligonucleotide; TTA chr11 5191071 5191092 5191088 5191093 +
taaaaccatcagatcttgtgag

SEQ ID NO: 77627 - DNA, 22 bp, Artificial Sequence
  Synthetic oligonucleotide; CTT chr11 5191088 5191109 5191105 5191110 +
gtgagacttactcactatcatg

SEQ ID NO: 77628 - DNA, 22 bp, Artificial Sequence
  Synthetic oligonucleotide; TTG chr11 5191089 5191110 5191106 5191111 +
tgagacttactcactatcatga

SEQ ID NO: 77629 - DNA, 22 bp, Artificial Sequence
  Synthetic oligonucleotide; CTT chr11 5191097 5191118 5191114 5191119 +
actcactatcatgagaacagca

SEQ ID NO: 77630 - DNA, 22 bp, Artificial Sequence
  Synthetic oligonucleotide; TTA chr11 5191098 5191119 5191115 5191120 +
ctcactatcatgagaacagcat

SEQ ID NO: 77631 - DNA, 22 bp, Artificial Sequence
  Synthetic oligonucleotide; CTC chr11 5191101 5191122 5191118 5191123 +
actatcatgagaacagcatgtg

SEQ ID NO: 77632 - DNA, 22 bp, Artificial Sequence
  Synthetic oligonucleotide; CTA chr11 5191105 5191126 5191122 5191127 +
tcatgagaacagcatgtgaaaa

SEQ ID NO: 77633 - DNA, 22 bp, Artificial Sequence
  Synthetic oligonucleotide; CTA chr11 5191132 5191153 5191149 5191154 +
cccccatgattcaattacatcc

SEQ ID NO: 77634 - DNA, 22 bp, Artificial Sequence
  Synthetic oligonucleotide; TTC chr11 5191144 5191165 5191161 5191166 +
aattacatcccagtgtgttcct

SEQ ID NO: 77635 - DNA, 22 bp, Artificial Sequence
  Synthetic oligonucleotide; TTA chr11 5191149 5191170 5191166 5191171 +
catcccagtgtgttccttccat

SEQ ID NO: 77636 - DNA, 22 bp, Artificial Sequence
  Synthetic oligonucleotide; TTC chr11 5191164 5191185 5191181 5191186 +
cttccatgacaggcagggatta

SEQ ID NO: 77637 - DNA, 22 bp, Artificial Sequence
  Synthetic oligonucleotide; CTT chr11 5191167 5191188 5191184 5191189 +
ccatgacaggcagggattatgg

SEQ ID NO: 77638 - DNA, 22 bp, Artificial Sequence
  Synthetic oligonucleotide; TTC chr11 5191168 5191189 5191185 5191190 +
catgacaggcagggattatggg

SEQ ID NO: 77639 - DNA, 22 bp, Artificial Sequence
  Synthetic oligonucleotide; TTA chr11 5191186 5191207 5191203 5191208 +
tgggacctactattcaagaaga

SEQ ID NO: 77640 - DNA, 22 bp, Artificial Sequence
  Synthetic oligonucleotide; CTA chr11 5191195 5191216 5191212 5191217 +
ctattcaagaagaaatttgggt

SEQ ID NO: 77641 - DNA, 22 bp, Artificial Sequence
  Synthetic oligonucleotide; CTA chr11 5191198 5191219 5191215 5191220 +
ttcaagaagaaatttgggtggg

SEQ ID NO: 77642 - DNA, 22 bp, Artificial Sequence
  Synthetic oligonucleotide; TTC chr11 5191201 5191222 5191218 5191223 +
aagaagaaatttgggtgggaaa

SEQ ID NO: 77643 - DNA, 22 bp, Artificial Sequence
  Synthetic oligonucleotide; TTT chr11 5191213 5191234 5191230 5191235 +
gggtgggaaaactgccaaacca

SEQ ID NO: 77644 - DNA, 22 bp, Artificial Sequence
  Synthetic oligonucleotide; TTG chr11 5191214 5191235 5191231 5191236 +
ggtgggaaaactgccaaaccat

SEQ ID NO: 77645 - DNA, 22 bp, Artificial Sequence
  Synthetic oligonucleotide; CTG chr11 5191227 5191248 5191244 5191249 +
ccaaaccatatcaaggtgtaat

SEQ ID NO: 77646 - DNA, 22 bp, Artificial Sequence
  Synthetic oligonucleotide; CTG chr11 5191254 5191275 5191271 5191276 +
ccctgctgggttttctactcgt

SEQ ID NO: 77647 - DNA, 22 bp, Artificial Sequence
  Synthetic oligonucleotide; CTG chr11 5191259 5191280 5191276 5191281 +
ctgggttttctactcgtgtggg

SEQ ID NO: 77648 - DNA, 22 bp, Artificial Sequence
  Synthetic oligonucleotide; CTG chr11 5191262 5191283 5191279 5191284 +
ggttttctactcgtgtgggatc

SEQ ID NO: 77649 - DNA, 22 bp, Artificial Sequence
  Synthetic oligonucleotide; TTT chr11 5191267 5191288 5191284 5191289 +
tctactcgtgtgggatctttag

SEQ ID NO: 77650 - DNA, 22 bp, Artificial Sequence
  Synthetic oligonucleotide; TTT chr11 5191268 5191289 5191285 5191290 +
ctactcgtgtgggatctttagc

SEQ ID NO: 77651 - DNA, 22 bp, Artificial Sequence
  Synthetic oligonucleotide; TTC chr11 5191269 5191290 5191286 5191291 +
tactcgtgtgggatctttagcc

SEQ ID NO: 77652 - DNA, 22 bp, Artificial Sequence
  Synthetic oligonucleotide; CTA chr11 5191271 5191292 5191288 5191293 +
ctcgtgtgggatctttagcccc

SEQ ID NO: 77653 - DNA, 22 bp, Artificial Sequence
  Synthetic oligonucleotide; CTC chr11 5191274 5191295 5191291 5191296 +
gtgtgggatctttagccccttt

SEQ ID NO: 77654 - DNA, 22 bp, Artificial Sequence
  Synthetic oligonucleotide; CTT chr11 5191286 5191307 5191303 5191308 +
tagcccctttcttttggtgcat

SEQ ID NO: 77655 - DNA, 22 bp, Artificial Sequence
  Synthetic oligonucleotide; TTT chr11 5191287 5191308 5191304 5191309 +
agcccctttcttttggtgcatt

SEQ ID NO: 77656 - DNA, 22 bp, Artificial Sequence
  Synthetic oligonucleotide; TTA chr11 5191288 5191309 5191305 5191310 +
gcccctttcttttggtgcattt

SEQ ID NO: 77657 - DNA, 22 bp, Artificial Sequence
  Synthetic oligonucleotide; CTT chr11 5191295 5191316 5191312 5191317 +
tcttttggtgcatttctctctt

SEQ ID NO: 77658 - DNA, 22 bp, Artificial Sequence
  Synthetic oligonucleotide; TTT chr11 5191296 5191317 5191313 5191318 +
cttttggtgcatttctctcttt

SEQ ID NO: 77659 - DNA, 22 bp, Artificial Sequence
  Synthetic oligonucleotide; TTC chr11 5191297 5191318 5191314 5191319 +
ttttggtgcatttctctctttt

SEQ ID NO: 77660 - DNA, 22 bp, Artificial Sequence
  Synthetic oligonucleotide; CTT chr11 5191299 5191320 5191316 5191321 +
ttggtgcatttctctcttttgg

SEQ ID NO: 77661 - DNA, 22 bp, Artificial Sequence
  Synthetic oligonucleotide; TTT chr11 5191300 5191321 5191317 5191322 +
tggtgcatttctctcttttgga

SEQ ID NO: 77662 - DNA, 22 bp, Artificial Sequence
  Synthetic oligonucleotide; TTT chr11 5191301 5191322 5191318 5191323 +
ggtgcatttctctcttttggaa

SEQ ID NO: 77663 - DNA, 22 bp, Artificial Sequence
  Synthetic oligonucleotide; TTG chr11 5191302 5191323 5191319 5191324 +
gtgcatttctctcttttggaat

SEQ ID NO: 77664 - DNA, 22 bp, Artificial Sequence
  Synthetic oligonucleotide; TTT chr11 5191310 5191331 5191327 5191332 +
ctctcttttggaatgggaattt

SEQ ID NO: 77665 - DNA, 22 bp, Artificial Sequence
  Synthetic oligonucleotide; TTC chr11 5191311 5191332 5191328 5191333 +
tctcttttggaatgggaatttg

SEQ ID NO: 77666 - DNA, 22 bp, Artificial Sequence
  Synthetic oligonucleotide; CTC chr11 5191313 5191334 5191330 5191335 +
tcttttggaatgggaatttgta

SEQ ID NO: 77667 - DNA, 22 bp, Artificial Sequence
  Synthetic oligonucleotide; CTC chr11 5191315 5191336 5191332 5191337 +
ttttggaatgggaatttgtacc

SEQ ID NO: 77668 - DNA, 22 bp, Artificial Sequence
  Synthetic oligonucleotide; CTT chr11 5191317 5191338 5191334 5191339 +
ttggaatgggaatttgtaccca

SEQ ID NO: 77669 - DNA, 22 bp, Artificial Sequence
  Synthetic oligonucleotide; TTT chr11 5191318 5191339 5191335 5191340 +
tggaatgggaatttgtacccaa

SEQ ID NO: 77670 - DNA, 22 bp, Artificial Sequence
  Synthetic oligonucleotide; TTT chr11 5191319 5191340 5191336 5191341 +
ggaatgggaatttgtacccaat

SEQ ID NO: 77671 - DNA, 22 bp, Artificial Sequence
  Synthetic oligonucleotide; TTG chr11 5191320 5191341 5191337 5191342 +
gaatgggaatttgtacccaatg

SEQ ID NO: 77672 - DNA, 22 bp, Artificial Sequence
  Synthetic oligonucleotide; TTT chr11 5191332 5191353 5191349 5191354 +
gtacccaatgccagtacctcca

SEQ ID NO: 77673 - DNA, 22 bp, Artificial Sequence
  Synthetic oligonucleotide; TTG chr11 5191333 5191354 5191350 5191355 +
tacccaatgccagtacctccat

SEQ ID NO: 77674 - DNA, 22 bp, Artificial Sequence
  Synthetic oligonucleotide; CTC chr11 5191352 5191373 5191369 5191374 +
cattatgtcttggaagtaacta

SEQ ID NO: 77675 - DNA, 22 bp, Artificial Sequence
  Synthetic oligonucleotide; TTA chr11 5191357 5191378 5191374 5191379 +
tgtcttggaagtaactaacttg

SEQ ID NO: 77676 - DNA, 22 bp, Artificial Sequence
  Synthetic oligonucleotide; CTT chr11 5191363 5191384 5191380 5191385 +
ggaagtaactaacttgtttttg

SEQ ID NO: 77677 - DNA, 22 bp, Artificial Sequence
  Synthetic oligonucleotide; TTG chr11 5191364 5191385 5191381 5191386 +
gaagtaactaacttgtttttga

SEQ ID NO: 77678 - DNA, 22 bp, Artificial Sequence
  Synthetic oligonucleotide; CTA chr11 5191374 5191395 5191391 5191396 +
acttgtttttgattttacaggc

SEQ ID NO: 77679 - DNA, 22 bp, Artificial Sequence
  Synthetic oligonucleotide; CTT chr11 5191378 5191399 5191395 5191400 +
gtttttgattttacaggctcat

SEQ ID NO: 77680 - DNA, 22 bp, Artificial Sequence
  Synthetic oligonucleotide; TTG chr11 5191379 5191400 5191396 5191401 +
tttttgattttacaggctcata

SEQ ID NO: 77681 - DNA, 22 bp, Artificial Sequence
  Synthetic oligonucleotide; TTT chr11 5191382 5191403 5191399 5191404 +
ttgattttacaggctcataggt

SEQ ID NO: 77682 - DNA, 22 bp, Artificial Sequence
  Synthetic oligonucleotide; TTT chr11 5191383 5191404 5191400 5191405 +
tgattttacaggctcataggtt

SEQ ID NO: 77683 - DNA, 22 bp, Artificial Sequence
  Synthetic oligonucleotide; TTT chr11 5191384 5191405 5191401 5191406 +
gattttacaggctcataggttg

SEQ ID NO: 77684 - DNA, 22 bp, Artificial Sequence
  Synthetic oligonucleotide; TTG chr11 5191385 5191406 5191402 5191407 +
attttacaggctcataggttga

SEQ ID NO: 77685 - DNA, 22 bp, Artificial Sequence
  Synthetic oligonucleotide; TTT chr11 5191389 5191410 5191406 5191411 +
tacaggctcataggttgaaggg

SEQ ID NO: 77686 - DNA, 22 bp, Artificial Sequence
  Synthetic oligonucleotide; TTT chr11 5191390 5191411 5191407 5191412 +
acaggctcataggttgaaggga

SEQ ID NO: 77687 - DNA, 22 bp, Artificial Sequence
  Synthetic oligonucleotide; TTA chr11 5191391 5191412 5191408 5191413 +
caggctcataggttgaagggac

SEQ ID NO: 77688 - DNA, 22 bp, Artificial Sequence
  Synthetic oligonucleotide; CTC chr11 5191398 5191419 5191415 5191420 +
ataggttgaagggacttgcctt

SEQ ID NO: 77689 - DNA, 22 bp, Artificial Sequence
  Synthetic oligonucleotide; TTG chr11 5191406 5191427 5191423 5191428 +
aagggacttgccttgtcttgga

SEQ ID NO: 77690 - DNA, 22 bp, Artificial Sequence
  Synthetic oligonucleotide; CTT chr11 5191415 5191436 5191432 5191437 +
gccttgtcttggataagacttt

SEQ ID NO: 77691 - DNA, 22 bp, Artificial Sequence
  Synthetic oligonucleotide; TTG chr11 5191416 5191437 5191433 5191438 +
ccttgtcttggataagactttg

SEQ ID NO: 77692 - DNA, 22 bp, Artificial Sequence
  Synthetic oligonucleotide; CTT chr11 5191420 5191441 5191437 5191442 +
gtcttggataagactttggact

SEQ ID NO: 77693 - DNA, 22 bp, Artificial Sequence
  Synthetic oligonucleotide; TTG chr11 5191421 5191442 5191438 5191443 +
tcttggataagactttggactt

SEQ ID NO: 77694 - DNA, 22 bp, Artificial Sequence
  Synthetic oligonucleotide; CTT chr11 5191425 5191446 5191442 5191447 +
ggataagactttggactttgga

SEQ ID NO: 77695 - DNA, 22 bp, Artificial Sequence
  Synthetic oligonucleotide; TTG chr11 5191426 5191447 5191443 5191448 +
gataagactttggactttggac

SEQ ID NO: 77696 - DNA, 22 bp, Artificial Sequence
  Synthetic oligonucleotide; CTT chr11 5191436 5191457 5191453 5191458 +
tggactttggacttttgagtta

SEQ ID NO: 77697 - DNA, 22 bp, Artificial Sequence
  Synthetic oligonucleotide; TTT chr11 5191437 5191458 5191454 5191459 +
ggactttggacttttgagttaa

SEQ ID NO: 77698 - DNA, 22 bp, Artificial Sequence
  Synthetic oligonucleotide; TTG chr11 5191438 5191459 5191455 5191460 +
gactttggacttttgagttaat

SEQ ID NO: 77699 - DNA, 22 bp, Artificial Sequence
  Synthetic oligonucleotide; CTT chr11 5191443 5191464 5191460 5191465 +
tggacttttgagttaatgctgg

SEQ ID NO: 77700 - DNA, 22 bp, Artificial Sequence
  Synthetic oligonucleotide; TTT chr11 5191444 5191465 5191461 5191466 +
ggacttttgagttaatgctgga

SEQ ID NO: 77701 - DNA, 22 bp, Artificial Sequence
  Synthetic oligonucleotide; TTG chr11 5191445 5191466 5191462 5191467 +
gacttttgagttaatgctggaa

SEQ ID NO: 77702 - DNA, 22 bp, Artificial Sequence
  Synthetic oligonucleotide; CTT chr11 5191450 5191471 5191467 5191472 +
ttgagttaatgctggaatgagt

SEQ ID NO: 77703 - DNA, 22 bp, Artificial Sequence
  Synthetic oligonucleotide; TTT chr11 5191451 5191472 5191468 5191473 +
tgagttaatgctggaatgagtt

SEQ ID NO: 77704 - DNA, 22 bp, Artificial Sequence
  Synthetic oligonucleotide; TTT chr11 5191452 5191473 5191469 5191474 +
gagttaatgctggaatgagtta

SEQ ID NO: 77705 - DNA, 22 bp, Artificial Sequence
  Synthetic oligonucleotide; TTG chr11 5191453 5191474 5191470 5191475 +
agttaatgctggaatgagttaa

SEQ ID NO: 77706 - DNA, 22 bp, Artificial Sequence
  Synthetic oligonucleotide; TTA chr11 5191458 5191479 5191475 5191480 +
atgctggaatgagttaagactt

SEQ ID NO: 77707 - DNA, 22 bp, Artificial Sequence
  Synthetic oligonucleotide; CTG chr11 5191464 5191485 5191481 5191486 +
gaatgagttaagactttgtagg

SEQ ID NO: 77708 - DNA, 22 bp, Artificial Sequence
  Synthetic oligonucleotide; TTA chr11 5191474 5191495 5191491 5191496 +
agactttgtaggactgttggga

SEQ ID NO: 77709 - DNA, 22 bp, Artificial Sequence
  Synthetic oligonucleotide; CTT chr11 5191480 5191501 5191497 5191502 +
tgtaggactgttgggaagtaat

SEQ ID NO: 77710 - DNA, 22 bp, Artificial Sequence
  Synthetic oligonucleotide; TTT chr11 5191481 5191502 5191498 5191503 +
gtaggactgttgggaagtaatg

SEQ ID NO: 77711 - DNA, 22 bp, Artificial Sequence
  Synthetic oligonucleotide; TTG chr11 5191482 5191503 5191499 5191504 +
taggactgttgggaagtaatga

SEQ ID NO: 77712 - DNA, 22 bp, Artificial Sequence
  Synthetic oligonucleotide; CTG chr11 5191490 5191511 5191507 5191512 +
ttgggaagtaatgattgtattt

SEQ ID NO: 77713 - DNA, 22 bp, Artificial Sequence
  Synthetic oligonucleotide; TTG chr11 5191493 5191514 5191510 5191515 +
ggaagtaatgattgtattttgt

SEQ ID NO: 77714 - DNA, 22 bp, Artificial Sequence
  Synthetic oligonucleotide; TTG chr11 5191507 5191528 5191524 5191529 +
tattttgtgatgtgagaagaac

SEQ ID NO: 77715 - DNA, 22 bp, Artificial Sequence
  Synthetic oligonucleotide; TTT chr11 5191512 5191533 5191529 5191534 +
tgtgatgtgagaagaacatgag

SEQ ID NO: 77716 - DNA, 22 bp, Artificial Sequence
  Synthetic oligonucleotide; TTT chr11 5191513 5191534 5191530 5191535 +
gtgatgtgagaagaacatgaga

SEQ ID NO: 77717 - DNA, 22 bp, Artificial Sequence
  Synthetic oligonucleotide; TTG chr11 5191514 5191535 5191531 5191536 +
tgatgtgagaagaacatgagat

SEQ ID NO: 77718 - DNA, 22 bp, Artificial Sequence
  Synthetic oligonucleotide; TTT chr11 5191538 5191559 5191555 5191560 +
ggaaggggccagaggtggaagg

SEQ ID NO: 77719 - DNA, 22 bp, Artificial Sequence
  Synthetic oligonucleotide; TTG chr11 5191539 5191560 5191556 5191561 +
gaaggggccagaggtggaagga

SEQ ID NO: 77720 - DNA, 22 bp, Artificial Sequence
  Synthetic oligonucleotide; TTT chr11 5191569 5191590 5191586 5191591 +
ggatctgtgtcaccacccaaat

SEQ ID NO: 77721 - DNA, 22 bp, Artificial Sequence
  Synthetic oligonucleotide; TTG chr11 5191570 5191591 5191587 5191592 +
gatctgtgtcaccacccaaata

SEQ ID NO: 77722 - DNA, 22 bp, Artificial Sequence
  Synthetic oligonucleotide; CTG chr11 5191576 5191597 5191593 5191598 +
tgtcaccacccaaatatcatgt

SEQ ID NO: 77723 - DNA, 22 bp, Artificial Sequence
  Synthetic oligonucleotide; TTA chr11 5191600 5191621 5191617 5191622 +
aattataatcaccagcgttgga

SEQ ID NO: 77724 - DNA, 22 bp, Artificial Sequence
  Synthetic oligonucleotide; TTA chr11 5191605 5191626 5191622 5191627 +
taatcaccagcgttggaggtgg

SEQ ID NO: 77725 - DNA, 22 bp, Artificial Sequence
  Synthetic oligonucleotide; TTG chr11 5191620 5191641 5191637 5191642 +
gaggtggggccttgtgggaggt

SEQ ID NO: 77726 - DNA, 22 bp, Artificial Sequence
  Synthetic oligonucleotide; CTT chr11 5191633 5191654 5191650 5191655 +
gtgggaggtaattcaatcatgg

SEQ ID NO: 77727 - DNA, 22 bp, Artificial Sequence
  Synthetic oligonucleotide; TTG chr11 5191634 5191655 5191651 5191656 +
tgggaggtaattcaatcatggt

SEQ ID NO: 77728 - DNA, 22 bp, Artificial Sequence
  Synthetic oligonucleotide; TTC chr11 5191647 5191668 5191664 5191669 +
aatcatggtggcagagttctca

SEQ ID NO: 77729 - DNA, 22 bp, Artificial Sequence
  Synthetic oligonucleotide; TTC chr11 5191666 5191687 5191683 5191688 +
tcatcagcgatttagtaccatc

SEQ ID NO: 77730 - DNA, 22 bp, Artificial Sequence
  Synthetic oligonucleotide; CTC chr11 5191668 5191689 5191685 5191690 +
atcagcgatttagtaccatccc

SEQ ID NO: 77731 - DNA, 22 bp, Artificial Sequence
  Synthetic oligonucleotide; TTT chr11 5191679 5191700 5191696 5191701 +
agtaccatcccccttggtactg

SEQ ID NO: 77732 - DNA, 22 bp, Artificial Sequence
  Synthetic oligonucleotide; TTA chr11 5191680 5191701 5191697 5191702 +
gtaccatcccccttggtactgt

SEQ ID NO: 77733 - DNA, 22 bp, Artificial Sequence
  Synthetic oligonucleotide; CTT chr11 5191694 5191715 5191711 5191716 +
ggtactgtatagtgagttctca

SEQ ID NO: 77734 - DNA, 22 bp, Artificial Sequence
  Synthetic oligonucleotide; TTG chr11 5191695 5191716 5191712 5191717 +
gtactgtatagtgagttctcaa

SEQ ID NO: 77735 - DNA, 22 bp, Artificial Sequence
  Synthetic oligonucleotide; CTG chr11 5191701 5191722 5191718 5191723 +
tatagtgagttctcaagaggct

SEQ ID NO: 77736 - DNA, 22 bp, Artificial Sequence
  Synthetic oligonucleotide; TTC chr11 5191713 5191734 5191730 5191735 +
tcaagaggctggttgtttgaaa

SEQ ID NO: 77737 - DNA, 22 bp, Artificial Sequence
  Synthetic oligonucleotide; CTC chr11 5191715 5191736 5191732 5191737 +
aagaggctggttgtttgaaagt

SEQ ID NO: 77738 - DNA, 22 bp, Artificial Sequence
  Synthetic oligonucleotide; CTG chr11 5191724 5191745 5191741 5191746 +
gttgtttgaaagtgtgtagcac

SEQ ID NO: 77739 - DNA, 22 bp, Artificial Sequence
  Synthetic oligonucleotide; TTG chr11 5191728 5191749 5191745 5191750 +
tttgaaagtgtgtagcacctcc

SEQ ID NO: 77740 - DNA, 22 bp, Artificial Sequence
  Synthetic oligonucleotide; TTT chr11 5191731 5191752 5191748 5191753 +
gaaagtgtgtagcacctcctac

SEQ ID NO: 77741 - DNA, 22 bp, Artificial Sequence
  Synthetic oligonucleotide; TTG chr11 5191732 5191753 5191749 5191754 +
aaagtgtgtagcacctcctacc

SEQ ID NO: 77742 - DNA, 22 bp, Artificial Sequence
  Synthetic oligonucleotide; CTC chr11 5191749 5191770 5191766 5191771 +
ctaccctgcttctccctgtcct

SEQ ID NO: 77743 - DNA, 22 bp, Artificial Sequence
  Synthetic oligonucleotide; CTA chr11 5191752 5191773 5191769 5191774 +
ccctgcttctccctgtcctggc

SEQ ID NO: 77744 - DNA, 22 bp, Artificial Sequence
  Synthetic oligonucleotide; CTG chr11 5191757 5191778 5191774 5191779 +
cttctccctgtcctggccatgt

SEQ ID NO: 77745 - DNA, 22 bp, Artificial Sequence
  Synthetic oligonucleotide; CTT chr11 5191760 5191781 5191777 5191782 +
ctccctgtcctggccatgtgaa

SEQ ID NO: 77746 - DNA, 22 bp, Artificial Sequence
  Synthetic oligonucleotide; TTC chr11 5191761 5191782 5191778 5191783 +
tccctgtcctggccatgtgaag

SEQ ID NO: 77747 - DNA, 22 bp, Artificial Sequence
  Synthetic oligonucleotide; CTC chr11 5191763 5191784 5191780 5191785 +
cctgtcctggccatgtgaagat

SEQ ID NO: 77748 - DNA, 22 bp, Artificial Sequence
  Synthetic oligonucleotide; CTG chr11 5191767 5191788 5191784 5191789 +
tcctggccatgtgaagatactt

SEQ ID NO: 77749 - DNA, 22 bp, Artificial Sequence
  Synthetic oligonucleotide; CTG chr11 5191772 5191793 5191789 5191794 +
gccatgtgaagatacttgctcc

SEQ ID NO: 77750 - DNA, 22 bp, Artificial Sequence
  Synthetic oligonucleotide; CTT chr11 5191789 5191810 5191806 5191811 +
gctcctgctttgtcttctgcca

SEQ ID NO: 77751 - DNA, 22 bp, Artificial Sequence
  Synthetic oligonucleotide; TTG chr11 5191790 5191811 5191807 5191812 +
ctcctgctttgtcttctgccat

SEQ ID NO: 77752 - DNA, 22 bp, Artificial Sequence
  Synthetic oligonucleotide; CTC chr11 5191793 5191814 5191810 5191815 +
ctgctttgtcttctgccatgat

SEQ ID NO: 77753 - DNA, 22 bp, Artificial Sequence
  Synthetic oligonucleotide; CTG chr11 5191796 5191817 5191813 5191818 +
ctttgtcttctgccatgattgt

SEQ ID NO: 77754 - DNA, 22 bp, Artificial Sequence
  Synthetic oligonucleotide; CTT chr11 5191799 5191820 5191816 5191821 +
tgtcttctgccatgattgtaag

SEQ ID NO: 77755 - DNA, 22 bp, Artificial Sequence
  Synthetic oligonucleotide; TTT chr11 5191800 5191821 5191817 5191822 +
gtcttctgccatgattgtaagt

SEQ ID NO: 77756 - DNA, 22 bp, Artificial Sequence
  Synthetic oligonucleotide; TTG chr11 5191801 5191822 5191818 5191823 +
tcttctgccatgattgtaagtt

SEQ ID NO: 77757 - DNA, 22 bp, Artificial Sequence
  Synthetic oligonucleotide; CTT chr11 5191805 5191826 5191822 5191827 +
ctgccatgattgtaagtttctt

SEQ ID NO: 77758 - DNA, 22 bp, Artificial Sequence
  Synthetic oligonucleotide; TTC chr11 5191806 5191827 5191823 5191828 +
tgccatgattgtaagtttcttg

SEQ ID NO: 77759 - DNA, 22 bp, Artificial Sequence
  Synthetic oligonucleotide; CTG chr11 5191808 5191829 5191825 5191830 +
ccatgattgtaagtttcttgag

SEQ ID NO: 77760 - DNA, 22 bp, Artificial Sequence
  Synthetic oligonucleotide; TTG chr11 5191817 5191838 5191834 5191839 +
taagtttcttgaggtctcccta

SEQ ID NO: 77761 - DNA, 22 bp, Artificial Sequence
  Synthetic oligonucleotide; TTT chr11 5191824 5191845 5191841 5191846 +
cttgaggtctccctagaagctg

SEQ ID NO: 77762 - DNA, 22 bp, Artificial Sequence
  Synthetic oligonucleotide; TTC chr11 5191825 5191846 5191842 5191847 +
ttgaggtctccctagaagctga

SEQ ID NO: 77763 - DNA, 22 bp, Artificial Sequence
  Synthetic oligonucleotide; CTT chr11 5191827 5191848 5191844 5191849 +
gaggtctccctagaagctgagc

SEQ ID NO: 77764 - DNA, 22 bp, Artificial Sequence
  Synthetic oligonucleotide; TTG chr11 5191828 5191849 5191845 5191850 +
aggtctccctagaagctgagca

SEQ ID NO: 77765 - DNA, 22 bp, Artificial Sequence
  Synthetic oligonucleotide; CTC chr11 5191835 5191856 5191852 5191857 +
cctagaagctgagcagatgctg

SEQ ID NO: 77766 - DNA, 22 bp, Artificial Sequence
  Synthetic oligonucleotide; CTA chr11 5191839 5191860 5191856 5191861 +
gaagctgagcagatgctgccat

SEQ ID NO: 77767 - DNA, 22 bp, Artificial Sequence
  Synthetic oligonucleotide; CTG chr11 5191846 5191867 5191863 5191868 +
agcagatgctgccatgcttctt

SEQ ID NO: 77768 - DNA, 22 bp, Artificial Sequence
  Synthetic oligonucleotide; CTG chr11 5191857 5191878 5191874 5191879 +
ccatgcttcttgtacagcctga

SEQ ID NO: 77769 - DNA, 22 bp, Artificial Sequence
  Synthetic oligonucleotide; CTT chr11 5191865 5191886 5191882 5191887 +
cttgtacagcctgaagaacttt

SEQ ID NO: 77770 - DNA, 22 bp, Artificial Sequence
  Synthetic oligonucleotide; TTC chr11 5191866 5191887 5191883 5191888 +
ttgtacagcctgaagaactttg

SEQ ID NO: 77771 - DNA, 22 bp, Artificial Sequence
  Synthetic oligonucleotide; CTT chr11 5191868 5191889 5191885 5191890 +
gtacagcctgaagaactttgag

SEQ ID NO: 77772 - DNA, 22 bp, Artificial Sequence
  Synthetic oligonucleotide; TTG chr11 5191869 5191890 5191886 5191891 +
tacagcctgaagaactttgagc

SEQ ID NO: 77773 - DNA, 22 bp, Artificial Sequence
  Synthetic oligonucleotide; CTG chr11 5191878 5191899 5191895 5191900 +
aagaactttgagccaattaaac

SEQ ID NO: 77774 - DNA, 22 bp, Artificial Sequence
  Synthetic oligonucleotide; CTT chr11 5191886 5191907 5191903 5191908 +
tgagccaattaaacctctgttc

SEQ ID NO: 77775 - DNA, 22 bp, Artificial Sequence
  Synthetic oligonucleotide; TTT chr11 5191887 5191908 5191904 5191909 +
gagccaattaaacctctgttct

SEQ ID NO: 77776 - DNA, 22 bp, Artificial Sequence
  Synthetic oligonucleotide; TTG chr11 5191888 5191909 5191905 5191910 +
agccaattaaacctctgttctt

SEQ ID NO: 77777 - DNA, 22 bp, Artificial Sequence
  Synthetic oligonucleotide; TTA chr11 5191897 5191918 5191914 5191919 +
aacctctgttctttataaatta

SEQ ID NO: 77778 - DNA, 22 bp, Artificial Sequence
  Synthetic oligonucleotide; CTC chr11 5191903 5191924 5191920 5191925 +
tgttctttataaattacccagt

SEQ ID NO: 77779 - DNA, 22 bp, Artificial Sequence
  Synthetic oligonucleotide; CTG chr11 5191905 5191926 5191922 5191927 +
ttctttataaattacccagtct

SEQ ID NO: 77780 - DNA, 22 bp, Artificial Sequence
  Synthetic oligonucleotide; TTC chr11 5191908 5191929 5191925 5191930 +
tttataaattacccagtctcag

SEQ ID NO: 77781 - DNA, 22 bp, Artificial Sequence
  Synthetic oligonucleotide; CTT chr11 5191910 5191931 5191927 5191932 +
tataaattacccagtctcaggt

SEQ ID NO: 77782 - DNA, 22 bp, Artificial Sequence
  Synthetic oligonucleotide; TTT chr11 5191911 5191932 5191928 5191933 +
ataaattacccagtctcaggta

SEQ ID NO: 77783 - DNA, 22 bp, Artificial Sequence
  Synthetic oligonucleotide; TTA chr11 5191912 5191933 5191929 5191934 +
taaattacccagtctcaggtat

SEQ ID NO: 77784 - DNA, 22 bp, Artificial Sequence
  Synthetic oligonucleotide; TTA chr11 5191919 5191940 5191936 5191941 +
cccagtctcaggtattttttta

SEQ ID NO: 77785 - DNA, 22 bp, Artificial Sequence
  Synthetic oligonucleotide; CTC chr11 5191928 5191949 5191945 5191950 +
aggtatttttttacagcagtgt

SEQ ID NO: 77786 - DNA, 22 bp, Artificial Sequence
  Synthetic oligonucleotide; TTT chr11 5191936 5191957 5191953 5191958 +
ttttacagcagtgtgaaaacat

SEQ ID NO: 77787 - DNA, 22 bp, Artificial Sequence
  Synthetic oligonucleotide; TTT chr11 5191937 5191958 5191954 5191959 +
tttacagcagtgtgaaaacatg

SEQ ID NO: 77788 - DNA, 22 bp, Artificial Sequence
  Synthetic oligonucleotide; TTT chr11 5191938 5191959 5191955 5191960 +
ttacagcagtgtgaaaacatgc

SEQ ID NO: 77789 - DNA, 22 bp, Artificial Sequence
  Synthetic oligonucleotide; TTT chr11 5191939 5191960 5191956 5191961 +
tacagcagtgtgaaaacatgcc

SEQ ID NO: 77790 - DNA, 22 bp, Artificial Sequence
  Synthetic oligonucleotide; TTT chr11 5191940 5191961 5191957 5191962 +
acagcagtgtgaaaacatgcca

SEQ ID NO: 77791 - DNA, 22 bp, Artificial Sequence
  Synthetic oligonucleotide; TTA chr11 5191941 5191962 5191958 5191963 +
cagcagtgtgaaaacatgccaa

SEQ ID NO: 77792 - DNA, 22 bp, Artificial Sequence
  Synthetic oligonucleotide; TTT chr11 5192001 5192022 5192018 5192023 +
aatgccaccattaataattttt

SEQ ID NO: 77793 - DNA, 22 bp, Artificial Sequence
  Synthetic oligonucleotide; TTA chr11 5192002 5192023 5192019 5192024 +
atgccaccattaataatttttt

SEQ ID NO: 77794 - DNA, 22 bp, Artificial Sequence
  Synthetic oligonucleotide; TTA chr11 5192014 5192035 5192031 5192036 +
ataattttttcttcttccttcc

SEQ ID NO: 77795 - DNA, 22 bp, Artificial Sequence
  Synthetic oligonucleotide; TTT chr11 5192021 5192042 5192038 5192043 +
tttcttcttccttcctttgata

SEQ ID NO: 77796 - DNA, 22 bp, Artificial Sequence
  Synthetic oligonucleotide; TTT chr11 5192022 5192043 5192039 5192044 +
ttcttcttccttcctttgatac

SEQ ID NO: 77797 - DNA, 22 bp, Artificial Sequence
  Synthetic oligonucleotide; TTT chr11 5192023 5192044 5192040 5192045 +
tcttcttccttcctttgatact

SEQ ID NO: 77798 - DNA, 22 bp, Artificial Sequence
  Synthetic oligonucleotide; TTT chr11 5192024 5192045 5192041 5192046 +
cttcttccttcctttgatactc

SEQ ID NO: 77799 - DNA, 22 bp, Artificial Sequence
  Synthetic oligonucleotide; TTC chr11 5192025 5192046 5192042 5192047 +
ttcttccttcctttgatactca

SEQ ID NO: 77800 - DNA, 22 bp, Artificial Sequence
  Synthetic oligonucleotide; CTT chr11 5192027 5192048 5192044 5192049 +
cttccttcctttgatactcaat

SEQ ID NO: 77801 - DNA, 22 bp, Artificial Sequence
  Synthetic oligonucleotide; TTC chr11 5192028 5192049 5192045 5192050 +
ttccttcctttgatactcaatg

SEQ ID NO: 77802 - DNA, 22 bp, Artificial Sequence
  Synthetic oligonucleotide; CTT chr11 5192030 5192051 5192047 5192052 +
ccttcctttgatactcaatgtg

SEQ ID NO: 77803 - DNA, 22 bp, Artificial Sequence
  Synthetic oligonucleotide; TTC chr11 5192031 5192052 5192048 5192053 +
cttcctttgatactcaatgtga

SEQ ID NO: 77804 - DNA, 22 bp, Artificial Sequence
  Synthetic oligonucleotide; CTT chr11 5192034 5192055 5192051 5192056 +
cctttgatactcaatgtgatca

SEQ ID NO: 77805 - DNA, 22 bp, Artificial Sequence
  Synthetic oligonucleotide; TTC chr11 5192035 5192056 5192052 5192057 +
ctttgatactcaatgtgatcaa

SEQ ID NO: 77806 - DNA, 22 bp, Artificial Sequence
  Synthetic oligonucleotide; CTT chr11 5192038 5192059 5192055 5192060 +
tgatactcaatgtgatcaagat

SEQ ID NO: 77807 - DNA, 22 bp, Artificial Sequence
  Synthetic oligonucleotide; TTT chr11 5192039 5192060 5192056 5192061 +
gatactcaatgtgatcaagatt

SEQ ID NO: 77808 - DNA, 22 bp, Artificial Sequence
  Synthetic oligonucleotide; TTG chr11 5192040 5192061 5192057 5192062 +
atactcaatgtgatcaagattt

SEQ ID NO: 77809 - DNA, 22 bp, Artificial Sequence
  Synthetic oligonucleotide; CTC chr11 5192046 5192067 5192063 5192068 +
aatgtgatcaagatttgggagt

SEQ ID NO: 77810 - DNA, 22 bp, Artificial Sequence
  Synthetic oligonucleotide; TTT chr11 5192062 5192083 5192079 5192084 +
gggagttaatcattttactcct

SEQ ID NO: 77811 - DNA, 22 bp, Artificial Sequence
  Synthetic oligonucleotide; TTG chr11 5192063 5192084 5192080 5192085 +
ggagttaatcattttactcctc

SEQ ID NO: 77812 - DNA, 22 bp, Artificial Sequence
  Synthetic oligonucleotide; TTA chr11 5192070 5192091 5192087 5192092 +
atcattttactcctctttactc

SEQ ID NO: 77813 - DNA, 22 bp, Artificial Sequence
  Synthetic oligonucleotide; TTT chr11 5192077 5192098 5192094 5192099 +
tactcctctttactcatgtcca

SEQ ID NO: 77814 - DNA, 22 bp, Artificial Sequence
  Synthetic oligonucleotide; TTT chr11 5192078 5192099 5192095 5192100 +
actcctctttactcatgtccaa

SEQ ID NO: 77815 - DNA, 22 bp, Artificial Sequence
  Synthetic oligonucleotide; TTA chr11 5192079 5192100 5192096 5192101 +
ctcctctttactcatgtccaaa

SEQ ID NO: 77816 - DNA, 22 bp, Artificial Sequence
  Synthetic oligonucleotide; CTC chr11 5192082 5192103 5192099 5192104 +
ctctttactcatgtccaaagtg

SEQ ID NO: 77817 - DNA, 22 bp, Artificial Sequence
  Synthetic oligonucleotide; CTC chr11 5192085 5192106 5192102 5192107 +
tttactcatgtccaaagtgaca

SEQ ID NO: 77818 - DNA, 22 bp, Artificial Sequence
  Synthetic oligonucleotide; CTT chr11 5192087 5192108 5192104 5192109 +
tactcatgtccaaagtgacatg

SEQ ID NO: 77819 - DNA, 22 bp, Artificial Sequence
  Synthetic oligonucleotide; TTT chr11 5192088 5192109 5192105 5192110 +
actcatgtccaaagtgacatga

SEQ ID NO: 77820 - DNA, 22 bp, Artificial Sequence
  Synthetic oligonucleotide; TTA chr11 5192089 5192110 5192106 5192111 +
ctcatgtccaaagtgacatgaa

SEQ ID NO: 77821 - DNA, 22 bp, Artificial Sequence
  Synthetic oligonucleotide; CTC chr11 5192092 5192113 5192109 5192114 +
atgtccaaagtgacatgaaacc

SEQ ID NO: 77822 - DNA, 22 bp, Artificial Sequence
  Synthetic oligonucleotide; CTG chr11 5192116 5192137 5192133 5192138 +
tatctaagtgtgttatctccat

SEQ ID NO: 77823 - DNA, 22 bp, Artificial Sequence
  Synthetic oligonucleotide; CTA chr11 5192122 5192143 5192139 5192144 +
agtgtgttatctccatgggaag

SEQ ID NO: 77824 - DNA, 22 bp, Artificial Sequence
  Synthetic oligonucleotide; TTA chr11 5192131 5192152 5192148 5192153 +
tctccatgggaagatactaaat

SEQ ID NO: 77825 - DNA, 22 bp, Artificial Sequence
  Synthetic oligonucleotide; CTC chr11 5192135 5192156 5192152 5192157 +
catgggaagatactaaatcttt

SEQ ID NO: 77826 - DNA, 22 bp, Artificial Sequence
  Synthetic oligonucleotide; CTA chr11 5192150 5192171 5192167 5192172 +
aatcttttatttatcatcttat

SEQ ID NO: 77827 - DNA, 22 bp, Artificial Sequence
  Synthetic oligonucleotide; CTT chr11 5192156 5192177 5192173 5192178 +
ttatttatcatcttatttttaa

SEQ ID NO: 77828 - DNA, 22 bp, Artificial Sequence
  Synthetic oligonucleotide; TTT chr11 5192157 5192178 5192174 5192179 +
tatttatcatcttatttttaat

SEQ ID NO: 77829 - DNA, 22 bp, Artificial Sequence
  Synthetic oligonucleotide; TTT chr11 5192158 5192179 5192175 5192180 +
atttatcatcttatttttaata

SEQ ID NO: 77830 - DNA, 22 bp, Artificial Sequence
  Synthetic oligonucleotide; TTA chr11 5192159 5192180 5192176 5192181 +
tttatcatcttatttttaataa

SEQ ID NO: 77831 - DNA, 22 bp, Artificial Sequence
  Synthetic oligonucleotide; TTT chr11 5192162 5192183 5192179 5192184 +
atcatcttatttttaataaatc

SEQ ID NO: 77832 - DNA, 22 bp, Artificial Sequence
  Synthetic oligonucleotide; TTA chr11 5192163 5192184 5192180 5192185 +
tcatcttatttttaataaatca

SEQ ID NO: 77833 - DNA, 22 bp, Artificial Sequence
  Synthetic oligonucleotide; CTT chr11 5192170 5192191 5192187 5192192 +
atttttaataaatcataacatt

SEQ ID NO: 77834 - DNA, 22 bp, Artificial Sequence
  Synthetic oligonucleotide; TTA chr11 5192171 5192192 5192188 5192193 +
tttttaataaatcataacatta

SEQ ID NO: 77835 - DNA, 22 bp, Artificial Sequence
  Synthetic oligonucleotide; TTT chr11 5192174 5192195 5192191 5192196 +
ttaataaatcataacattacct

SEQ ID NO: 77836 - DNA, 22 bp, Artificial Sequence
  Synthetic oligonucleotide; TTT chr11 5192175 5192196 5192192 5192197 +
taataaatcataacattacctg

SEQ ID NO: 77837 - DNA, 22 bp, Artificial Sequence
  Synthetic oligonucleotide; TTT chr11 5192176 5192197 5192193 5192198 +
aataaatcataacattacctgt

SEQ ID NO: 77838 - DNA, 22 bp, Artificial Sequence
  Synthetic oligonucleotide; TTA chr11 5192177 5192198 5192194 5192199 +
ataaatcataacattacctgtt

SEQ ID NO: 77839 - DNA, 22 bp, Artificial Sequence
  Synthetic oligonucleotide; TTA chr11 5192193 5192214 5192210 5192215 +
cctgttattaaatattaatcta

SEQ ID NO: 77840 - DNA, 22 bp, Artificial Sequence
  Synthetic oligonucleotide; CTG chr11 5192197 5192218 5192214 5192219 +
ttattaaatattaatctatttc

SEQ ID NO: 77841 - DNA, 22 bp, Artificial Sequence
  Synthetic oligonucleotide; TTA chr11 5192200 5192221 5192217 5192222 +
ttaaatattaatctatttcatt

SEQ ID NO: 77842 - DNA, 22 bp, Artificial Sequence
  Synthetic oligonucleotide; TTA chr11 5192203 5192224 5192220 5192225 +
aatattaatctatttcattcta

SEQ ID NO: 77843 - DNA, 22 bp, Artificial Sequence
  Synthetic oligonucleotide; TTA chr11 5192210 5192231 5192227 5192232 +
atctatttcattctatgcaata

SEQ ID NO: 77844 - DNA, 22 bp, Artificial Sequence
  Synthetic oligonucleotide; CTA chr11 5192215 5192236 5192232 5192237 +
tttcattctatgcaatagctgt

SEQ ID NO: 77845 - DNA, 22 bp, Artificial Sequence
  Synthetic oligonucleotide; TTT chr11 5192218 5192239 5192235 5192240 +
cattctatgcaatagctgtctg

SEQ ID NO: 77846 - DNA, 22 bp, Artificial Sequence
  Synthetic oligonucleotide; TTC chr11 5192219 5192240 5192236 5192241 +
attctatgcaatagctgtctga

SEQ ID NO: 77847 - DNA, 22 bp, Artificial Sequence
  Synthetic oligonucleotide; TTC chr11 5192223 5192244 5192240 5192245 +
tatgcaatagctgtctgaaact

SEQ ID NO: 77848 - DNA, 22 bp, Artificial Sequence
  Synthetic oligonucleotide; CTA chr11 5192225 5192246 5192242 5192247 +
tgcaatagctgtctgaaactaa

SEQ ID NO: 77849 - DNA, 22 bp, Artificial Sequence
  Synthetic oligonucleotide; CTG chr11 5192236 5192257 5192253 5192258 +
tctgaaactaagtcaaagaatg

SEQ ID NO: 77850 - DNA, 22 bp, Artificial Sequence
  Synthetic oligonucleotide; CTG chr11 5192240 5192261 5192257 5192262 +
aaactaagtcaaagaatgtacc

SEQ ID NO: 77851 - DNA, 22 bp, Artificial Sequence
  Synthetic oligonucleotide; CTA chr11 5192246 5192267 5192263 5192268 +
agtcaaagaatgtaccatactt

SEQ ID NO: 77852 - DNA, 22 bp, Artificial Sequence
  Synthetic oligonucleotide; CTT chr11 5192268 5192289 5192285 5192290 +
tattcactatttgtctattatt

SEQ ID NO: 77853 - DNA, 22 bp, Artificial Sequence
  Synthetic oligonucleotide; TTT chr11 5192269 5192290 5192286 5192291 +
attcactatttgtctattattg

SEQ ID NO: 77854 - DNA, 22 bp, Artificial Sequence
  Synthetic oligonucleotide; TTA chr11 5192270 5192291 5192287 5192292 +
ttcactatttgtctattattga

SEQ ID NO: 77855 - DNA, 22 bp, Artificial Sequence
  Synthetic oligonucleotide; TTC chr11 5192273 5192294 5192290 5192295 +
actatttgtctattattgaata

SEQ ID NO: 77856 - DNA, 22 bp, Artificial Sequence
  Synthetic oligonucleotide; CTA chr11 5192277 5192298 5192294 5192299 +
tttgtctattattgaatatcta

SEQ ID NO: 77857 - DNA, 22 bp, Artificial Sequence
  Synthetic oligonucleotide; TTT chr11 5192280 5192301 5192297 5192302 +
gtctattattgaatatctatat

SEQ ID NO: 77858 - DNA, 22 bp, Artificial Sequence
  Synthetic oligonucleotide; TTG chr11 5192281 5192302 5192298 5192303 +
tctattattgaatatctatatt

SEQ ID NO: 77859 - DNA, 22 bp, Artificial Sequence
  Synthetic oligonucleotide; CTA chr11 5192285 5192306 5192302 5192307 +
ttattgaatatctatatttgtt

SEQ ID NO: 77860 - DNA, 22 bp, Artificial Sequence
  Synthetic oligonucleotide; TTA chr11 5192288 5192309 5192305 5192310 +
ttgaatatctatatttgtttga

SEQ ID NO: 77861 - DNA, 22 bp, Artificial Sequence
  Synthetic oligonucleotide; TTG chr11 5192291 5192312 5192308 5192313 +
aatatctatatttgtttgagga

SEQ ID NO: 77862 - DNA, 22 bp, Artificial Sequence
  Synthetic oligonucleotide; CTA chr11 5192299 5192320 5192316 5192321 +
tatttgtttgaggaataataat

SEQ ID NO: 77863 - DNA, 22 bp, Artificial Sequence
  Synthetic oligonucleotide; TTT chr11 5192304 5192325 5192321 5192326 +
gtttgaggaataataatcagaa

SEQ ID NO: 77864 - DNA, 22 bp, Artificial Sequence
  Synthetic oligonucleotide; TTG chr11 5192305 5192326 5192322 5192327 +
tttgaggaataataatcagaac

SEQ ID NO: 77865 - DNA, 22 bp, Artificial Sequence
  Synthetic oligonucleotide; TTT chr11 5192308 5192329 5192325 5192330 +
gaggaataataatcagaacaga

SEQ ID NO: 77866 - DNA, 22 bp, Artificial Sequence
  Synthetic oligonucleotide; TTG chr11 5192309 5192330 5192326 5192331 +
aggaataataatcagaacagaa

SEQ ID NO: 77867 - DNA, 22 bp, Artificial Sequence
  Synthetic oligonucleotide; CTA chr11 5192346 5192367 5192363 5192368 +
taggaatggaagtttctcaaca

SEQ ID NO: 77868 - DNA, 22 bp, Artificial Sequence
  Synthetic oligonucleotide; TTT chr11 5192361 5192382 5192378 5192383 +
ctcaacagcaagataaaatagg

SEQ ID NO: 77869 - DNA, 22 bp, Artificial Sequence
  Synthetic oligonucleotide; TTC chr11 5192362 5192383 5192379 5192384 +
tcaacagcaagataaaataggt

SEQ ID NO: 77870 - DNA, 22 bp, Artificial Sequence
  Synthetic oligonucleotide; CTC chr11 5192364 5192385 5192381 5192386 +
aacagcaagataaaataggtta

SEQ ID NO: 77871 - DNA, 22 bp, Artificial Sequence
  Synthetic oligonucleotide; TTA chr11 5192386 5192407 5192403 5192408 +
atggagtaatatgtagagaatg

SEQ ID NO: 77872 - DNA, 22 bp, Artificial Sequence
  Synthetic oligonucleotide; CTA chr11 5192415 5192436 5192432 5192437 +
taattaaagaaaatgaattaag

SEQ ID NO: 77873 - DNA, 22 bp, Artificial Sequence
  Synthetic oligonucleotide; TTA chr11 5192421 5192442 5192438 5192443 +
aagaaaatgaattaagcaatat

SEQ ID NO: 77874 - DNA, 22 bp, Artificial Sequence
  Synthetic oligonucleotide; TTA chr11 5192435 5192456 5192452 5192457 +
agcaatatacaattaaagctct

SEQ ID NO: 77875 - DNA, 22 bp, Artificial Sequence
  Synthetic oligonucleotide; TTA chr11 5192450 5192471 5192467 5192472 +
aagctctttatgtcttttcaca

SEQ ID NO: 77876 - DNA, 22 bp, Artificial Sequence
  Synthetic oligonucleotide; CTC chr11 5192456 5192477 5192473 5192478 +
tttatgtcttttcacagcttga

SEQ ID NO: 77877 - DNA, 22 bp, Artificial Sequence
  Synthetic oligonucleotide; CTT chr11 5192458 5192479 5192475 5192480 +
tatgtcttttcacagcttgata

SEQ ID NO: 77878 - DNA, 22 bp, Artificial Sequence
  Synthetic oligonucleotide; TTT chr11 5192459 5192480 5192476 5192481 +
atgtcttttcacagcttgatag

SEQ ID NO: 77879 - DNA, 22 bp, Artificial Sequence
  Synthetic oligonucleotide; TTA chr11 5192460 5192481 5192477 5192482 +
tgtcttttcacagcttgataga

SEQ ID NO: 77880 - DNA, 22 bp, Artificial Sequence
  Synthetic oligonucleotide; CTT chr11 5192466 5192487 5192483 5192488 +
ttcacagcttgatagaccttta

SEQ ID NO: 77881 - DNA, 22 bp, Artificial Sequence
  Synthetic oligonucleotide; TTT chr11 5192467 5192488 5192484 5192489 +
tcacagcttgatagacctttat

SEQ ID NO: 77882 - DNA, 22 bp, Artificial Sequence
  Synthetic oligonucleotide; TTT chr11 5192468 5192489 5192485 5192490 +
cacagcttgatagacctttatt

SEQ ID NO: 77883 - DNA, 22 bp, Artificial Sequence
  Synthetic oligonucleotide; TTC chr11 5192469 5192490 5192486 5192491 +
acagcttgatagacctttattt

SEQ ID NO: 77884 - DNA, 22 bp, Artificial Sequence
  Synthetic oligonucleotide; CTT chr11 5192476 5192497 5192493 5192498 +
gatagacctttatttatatcac

SEQ ID NO: 77885 - DNA, 22 bp, Artificial Sequence
  Synthetic oligonucleotide; TTG chr11 5192477 5192498 5192494 5192499 +
atagacctttatttatatcact

SEQ ID NO: 77886 - DNA, 22 bp, Artificial Sequence
  Synthetic oligonucleotide; CTT chr11 5192486 5192507 5192503 5192508 +
tatttatatcactgaataatat

SEQ ID NO: 77887 - DNA, 22 bp, Artificial Sequence
  Synthetic oligonucleotide; TTT chr11 5192487 5192508 5192504 5192509 +
atttatatcactgaataatatt

SEQ ID NO: 77888 - DNA, 22 bp, Artificial Sequence
  Synthetic oligonucleotide; TTA chr11 5192488 5192509 5192505 5192510 +
tttatatcactgaataatattc

SEQ ID NO: 77889 - DNA, 22 bp, Artificial Sequence
  Synthetic oligonucleotide; TTT chr11 5192491 5192512 5192508 5192513 +
atatcactgaataatattctat

SEQ ID NO: 77890 - DNA, 22 bp, Artificial Sequence
  Synthetic oligonucleotide; TTA chr11 5192492 5192513 5192509 5192514 +
tatcactgaataatattctatc

SEQ ID NO: 77891 - DNA, 22 bp, Artificial Sequence
  Synthetic oligonucleotide; CTG chr11 5192500 5192521 5192517 5192522 +
aataatattctatcctatggat

SEQ ID NO: 77892 - DNA, 22 bp, Artificial Sequence
  Synthetic oligonucleotide; TTC chr11 5192510 5192531 5192527 5192532 +
tatcctatggatgttccacagt

SEQ ID NO: 77893 - DNA, 22 bp, Artificial Sequence
  Synthetic oligonucleotide; CTA chr11 5192512 5192533 5192529 5192534 +
tcctatggatgttccacagttt

SEQ ID NO: 77894 - DNA, 22 bp, Artificial Sequence
  Synthetic oligonucleotide; CTA chr11 5192517 5192538 5192534 5192539 +
tggatgttccacagtttatcca

SEQ ID NO: 77895 - DNA, 22 bp, Artificial Sequence
  Synthetic oligonucleotide; TTC chr11 5192526 5192547 5192543 5192548 +
cacagtttatccattcatcttg

SEQ ID NO: 77896 - DNA, 22 bp, Artificial Sequence
  Synthetic oligonucleotide; TTT chr11 5192534 5192555 5192551 5192556 +
atccattcatcttggttacttt

SEQ ID NO: 77897 - DNA, 22 bp, Artificial Sequence
  Synthetic oligonucleotide; TTA chr11 5192535 5192556 5192552 5192557 +
tccattcatcttggttactttc

SEQ ID NO: 77898 - DNA, 22 bp, Artificial Sequence
  Synthetic oligonucleotide; TTC chr11 5192542 5192563 5192559 5192564 +
atcttggttactttcaactttt

SEQ ID NO: 77899 - DNA, 22 bp, Artificial Sequence
  Synthetic oligonucleotide; CTT chr11 5192547 5192568 5192564 5192569 +
ggttactttcaacttttggcaa

SEQ ID NO: 77900 - DNA, 22 bp, Artificial Sequence
  Synthetic oligonucleotide; TTG chr11 5192548 5192569 5192565 5192570 +
gttactttcaacttttggcaat

SEQ ID NO: 77901 - DNA, 22 bp, Artificial Sequence
  Synthetic oligonucleotide; TTA chr11 5192552 5192573 5192569 5192574 +
ctttcaacttttggcaattatg

SEQ ID NO: 77902 - DNA, 22 bp, Artificial Sequence
  Synthetic oligonucleotide; CTT chr11 5192555 5192576 5192572 5192577 +
tcaacttttggcaattatgagt

SEQ ID NO: 77903 - DNA, 22 bp, Artificial Sequence
  Synthetic oligonucleotide; TTT chr11 5192556 5192577 5192573 5192578 +
caacttttggcaattatgagta

SEQ ID NO: 77904 - DNA, 22 bp, Artificial Sequence
  Synthetic oligonucleotide; TTC chr11 5192557 5192578 5192574 5192579 +
aacttttggcaattatgagtaa

SEQ ID NO: 77905 - DNA, 22 bp, Artificial Sequence
  Synthetic oligonucleotide; CTT chr11 5192562 5192583 5192579 5192584 +
ttggcaattatgagtaaagttc

SEQ ID NO: 77906 - DNA, 22 bp, Artificial Sequence
  Synthetic oligonucleotide; TTT chr11 5192563 5192584 5192580 5192585 +
tggcaattatgagtaaagttcc

SEQ ID NO: 77907 - DNA, 22 bp, Artificial Sequence
  Synthetic oligonucleotide; TTT chr11 5192564 5192585 5192581 5192586 +
ggcaattatgagtaaagttcct

SEQ ID NO: 77908 - DNA, 22 bp, Artificial Sequence
  Synthetic oligonucleotide; TTG chr11 5192565 5192586 5192582 5192587 +
gcaattatgagtaaagttccta

SEQ ID NO: 77909 - DNA, 22 bp, Artificial Sequence
  Synthetic oligonucleotide; TTA chr11 5192572 5192593 5192589 5192594 +
tgagtaaagttcctataaacct

SEQ ID NO: 77910 - DNA, 22 bp, Artificial Sequence
  Synthetic oligonucleotide; TTC chr11 5192584 5192605 5192601 5192606 +
ctataaaccttggttagttcat

SEQ ID NO: 77911 - DNA, 22 bp, Artificial Sequence
  Synthetic oligonucleotide; CTA chr11 5192587 5192608 5192604 5192609 +
taaaccttggttagttcatgtc

SEQ ID NO: 77912 - DNA, 22 bp, Artificial Sequence
  Synthetic oligonucleotide; CTT chr11 5192595 5192616 5192612 5192617 +
ggttagttcatgtctgtgtgtg

SEQ ID NO: 77913 - DNA, 22 bp, Artificial Sequence
  Synthetic oligonucleotide; TTG chr11 5192596 5192617 5192613 5192618 +
gttagttcatgtctgtgtgtgg

SEQ ID NO: 77914 - DNA, 22 bp, Artificial Sequence
  Synthetic oligonucleotide; TTA chr11 5192600 5192621 5192617 5192622 +
gttcatgtctgtgtgtggacat

SEQ ID NO: 77915 - DNA, 22 bp, Artificial Sequence
  Synthetic oligonucleotide; TTC chr11 5192604 5192625 5192621 5192626 +
atgtctgtgtgtggacataaat

SEQ ID NO: 77916 - DNA, 22 bp, Artificial Sequence
  Synthetic oligonucleotide; CTG chr11 5192611 5192632 5192628 5192633 +
tgtgtggacataaatttttgac

SEQ ID NO: 77917 - DNA, 22 bp, Artificial Sequence
  Synthetic oligonucleotide; TTT chr11 5192628 5192649 5192645 5192650 +
ttgactcatttgggtaaataca

SEQ ID NO: 77918 - DNA, 22 bp, Artificial Sequence
  Synthetic oligonucleotide; TTT chr11 5192629 5192650 5192646 5192651 +
tgactcatttgggtaaatacat

SEQ ID NO: 77919 - DNA, 22 bp, Artificial Sequence
  Synthetic oligonucleotide; TTT chr11 5192630 5192651 5192647 5192652 +
gactcatttgggtaaatacata

SEQ ID NO: 77920 - DNA, 22 bp, Artificial Sequence
  Synthetic oligonucleotide; TTG chr11 5192631 5192652 5192648 5192653 +
actcatttgggtaaatacatag

SEQ ID NO: 77921 - DNA, 22 bp, Artificial Sequence
  Synthetic oligonucleotide; CTC chr11 5192635 5192656 5192652 5192657 +
atttgggtaaatacataggagt

SEQ ID NO: 77922 - DNA, 22 bp, Artificial Sequence
  Synthetic oligonucleotide; TTT chr11 5192639 5192660 5192656 5192661 +
gggtaaatacataggagtgtga

SEQ ID NO: 77923 - DNA, 22 bp, Artificial Sequence
  Synthetic oligonucleotide; TTG chr11 5192640 5192661 5192657 5192662 +
ggtaaatacataggagtgtgat

SEQ ID NO: 77924 - DNA, 22 bp, Artificial Sequence
  Synthetic oligonucleotide; TTG chr11 5192664 5192685 5192681 5192686 +
ttgggtcacatgaaaagactag

SEQ ID NO: 77925 - DNA, 22 bp, Artificial Sequence
  Synthetic oligonucleotide; TTG chr11 5192667 5192688 5192684 5192689 +
ggtcacatgaaaagactagttt

SEQ ID NO: 77926 - DNA, 22 bp, Artificial Sequence
  Synthetic oligonucleotide; CTA chr11 5192685 5192706 5192702 5192707 +
gttttgtaagaaactgtaaact

SEQ ID NO: 77927 - DNA, 22 bp, Artificial Sequence
  Synthetic oligonucleotide; TTT chr11 5192689 5192710 5192706 5192711 +
tgtaagaaactgtaaactgtct

SEQ ID NO: 77928 - DNA, 22 bp, Artificial Sequence
  Synthetic oligonucleotide; TTT chr11 5192690 5192711 5192707 5192712 +
gtaagaaactgtaaactgtctt

SEQ ID NO: 77929 - DNA, 22 bp, Artificial Sequence
  Synthetic oligonucleotide; TTG chr11 5192691 5192712 5192708 5192713 +
taagaaactgtaaactgtcttc

SEQ ID NO: 77930 - DNA, 22 bp, Artificial Sequence
  Synthetic oligonucleotide; CTG chr11 5192701 5192722 5192718 5192723 +
taaactgtcttccaatttggct

SEQ ID NO: 77931 - DNA, 22 bp, Artificial Sequence
  Synthetic oligonucleotide; CTG chr11 5192708 5192729 5192725 5192730 +
tcttccaatttggctgcactat

SEQ ID NO: 77932 - DNA, 22 bp, Artificial Sequence
  Synthetic oligonucleotide; CTT chr11 5192712 5192733 5192729 5192734 +
ccaatttggctgcactatttct

SEQ ID NO: 77933 - DNA, 22 bp, Artificial Sequence
  Synthetic oligonucleotide; TTC chr11 5192713 5192734 5192730 5192735 +
caatttggctgcactatttctc

SEQ ID NO: 77934 - DNA, 22 bp, Artificial Sequence
  Synthetic oligonucleotide; TTT chr11 5192719 5192740 5192736 5192741 +
ggctgcactatttctcatccct

SEQ ID NO: 77935 - DNA, 22 bp, Artificial Sequence
  Synthetic oligonucleotide; TTG chr11 5192720 5192741 5192737 5192742 +
gctgcactatttctcatcccta

SEQ ID NO: 77936 - DNA, 22 bp, Artificial Sequence
  Synthetic oligonucleotide; CTG chr11 5192724 5192745 5192741 5192746 +
cactatttctcatccctacaag

SEQ ID NO: 77937 - DNA, 22 bp, Artificial Sequence
  Synthetic oligonucleotide; CTA chr11 5192729 5192750 5192746 5192751 +
tttctcatccctacaagcaata

SEQ ID NO: 77938 - DNA, 22 bp, Artificial Sequence
  Synthetic oligonucleotide; TTT chr11 5192732 5192753 5192749 5192754 +
ctcatccctacaagcaataagt

SEQ ID NO: 77939 - DNA, 22 bp, Artificial Sequence
  Synthetic oligonucleotide; TTC chr11 5192733 5192754 5192750 5192755 +
tcatccctacaagcaataagtg

SEQ ID NO: 77940 - DNA, 22 bp, Artificial Sequence
  Synthetic oligonucleotide; CTC chr11 5192735 5192756 5192752 5192757 +
atccctacaagcaataagtgag

SEQ ID NO: 77941 - DNA, 22 bp, Artificial Sequence
  Synthetic oligonucleotide; CTA chr11 5192742 5192763 5192759 5192764 +
caagcaataagtgagagttact

SEQ ID NO: 77942 - DNA, 22 bp, Artificial Sequence
  Synthetic oligonucleotide; TTA chr11 5192762 5192783 5192779 5192784 +
ctgttgctccacttcgttgcca

SEQ ID NO: 77943 - DNA, 22 bp, Artificial Sequence
  Synthetic oligonucleotide; CTG chr11 5192765 5192786 5192782 5192787 +
ttgctccacttcgttgccagtg

SEQ ID NO: 77944 - DNA, 22 bp, Artificial Sequence
  Synthetic oligonucleotide; TTG chr11 5192768 5192789 5192785 5192790 +
ctccacttcgttgccagtgttt

SEQ ID NO: 77945 - DNA, 22 bp, Artificial Sequence
  Synthetic oligonucleotide; CTC chr11 5192771 5192792 5192788 5192793 +
cacttcgttgccagtgtttggt

SEQ ID NO: 77946 - DNA, 22 bp, Artificial Sequence
  Synthetic oligonucleotide; CTT chr11 5192776 5192797 5192793 5192798 +
cgttgccagtgtttggtggatg

SEQ ID NO: 77947 - DNA, 22 bp, Artificial Sequence
  Synthetic oligonucleotide; TTC chr11 5192777 5192798 5192794 5192799 +
gttgccagtgtttggtggatgt

SEQ ID NO: 77948 - DNA, 22 bp, Artificial Sequence
  Synthetic oligonucleotide; TTG chr11 5192781 5192802 5192798 5192803 +
ccagtgtttggtggatgtcagt

SEQ ID NO: 77949 - DNA, 22 bp, Artificial Sequence
  Synthetic oligonucleotide; TTT chr11 5192790 5192811 5192807 5192812 +
ggtggatgtcagtattttggaa

SEQ ID NO: 77950 - DNA, 22 bp, Artificial Sequence
  Synthetic oligonucleotide; TTG chr11 5192791 5192812 5192808 5192813 +
gtggatgtcagtattttggaat

SEQ ID NO: 77951 - DNA, 22 bp, Artificial Sequence
  Synthetic oligonucleotide; TTT chr11 5192807 5192828 5192824 5192829 +
tggaatttggccttctaatatg

SEQ ID NO: 77952 - DNA, 22 bp, Artificial Sequence
  Synthetic oligonucleotide; TTT chr11 5192808 5192829 5192825 5192830 +
ggaatttggccttctaatatgt

SEQ ID NO: 77953 - DNA, 22 bp, Artificial Sequence
  Synthetic oligonucleotide; TTG chr11 5192809 5192830 5192826 5192831 +
gaatttggccttctaatatgtg

SEQ ID NO: 77954 - DNA, 22 bp, Artificial Sequence
  Synthetic oligonucleotide; TTT chr11 5192815 5192836 5192832 5192837 +
ggccttctaatatgtgtgtagt

SEQ ID NO: 77955 - DNA, 22 bp, Artificial Sequence
  Synthetic oligonucleotide; TTG chr11 5192816 5192837 5192833 5192838 +
gccttctaatatgtgtgtagtg

SEQ ID NO: 77956 - DNA, 22 bp, Artificial Sequence
  Synthetic oligonucleotide; CTT chr11 5192821 5192842 5192838 5192843 +
ctaatatgtgtgtagtggttgg

SEQ ID NO: 77957 - DNA, 22 bp, Artificial Sequence
  Synthetic oligonucleotide; TTC chr11 5192822 5192843 5192839 5192844 +
taatatgtgtgtagtggttggt

SEQ ID NO: 77958 - DNA, 22 bp, Artificial Sequence
  Synthetic oligonucleotide; CTA chr11 5192824 5192845 5192841 5192846 +
atatgtgtgtagtggttggtat

SEQ ID NO: 77959 - DNA, 22 bp, Artificial Sequence
  Synthetic oligonucleotide; TTG chr11 5192842 5192863 5192859 5192864 +
gtatcttcttgttttaatgtgc

SEQ ID NO: 77960 - DNA, 22 bp, Artificial Sequence
  Synthetic oligonucleotide; CTT chr11 5192849 5192870 5192866 5192871 +
cttgttttaatgtgcagtttct

SEQ ID NO: 77961 - DNA, 22 bp, Artificial Sequence
  Synthetic oligonucleotide; TTC chr11 5192850 5192871 5192867 5192872 +
ttgttttaatgtgcagtttctt

SEQ ID NO: 77962 - DNA, 22 bp, Artificial Sequence
  Synthetic oligonucleotide; CTT chr11 5192852 5192873 5192869 5192874 +
gttttaatgtgcagtttcttaa

SEQ ID NO: 77963 - DNA, 22 bp, Artificial Sequence
  Synthetic oligonucleotide; TTG chr11 5192853 5192874 5192870 5192875 +
ttttaatgtgcagtttcttaat

SEQ ID NO: 77964 - DNA, 22 bp, Artificial Sequence
  Synthetic oligonucleotide; TTT chr11 5192856 5192877 5192873 5192878 +
taatgtgcagtttcttaatgac

SEQ ID NO: 77965 - DNA, 22 bp, Artificial Sequence
  Synthetic oligonucleotide; TTT chr11 5192857 5192878 5192874 5192879 +
aatgtgcagtttcttaatgaca

SEQ ID NO: 77966 - DNA, 22 bp, Artificial Sequence
  Synthetic oligonucleotide; TTA chr11 5192858 5192879 5192875 5192880 +
atgtgcagtttcttaatgacat

SEQ ID NO: 77967 - DNA, 22 bp, Artificial Sequence
  Synthetic oligonucleotide; TTT chr11 5192869 5192890 5192886 5192891 +
cttaatgacatgtgttactgag

SEQ ID NO: 77968 - DNA, 22 bp, Artificial Sequence
  Synthetic oligonucleotide; TTC chr11 5192870 5192891 5192887 5192892 +
ttaatgacatgtgttactgagt

SEQ ID NO: 77969 - DNA, 22 bp, Artificial Sequence
  Synthetic oligonucleotide; CTT chr11 5192872 5192893 5192889 5192894 +
aatgacatgtgttactgagtat

SEQ ID NO: 77970 - DNA, 22 bp, Artificial Sequence
  Synthetic oligonucleotide; TTA chr11 5192873 5192894 5192890 5192895 +
atgacatgtgttactgagtata

SEQ ID NO: 77971 - DNA, 22 bp, Artificial Sequence
  Synthetic oligonucleotide; TTA chr11 5192886 5192907 5192903 5192908 +
ctgagtatattttcatgtgctt

SEQ ID NO: 77972 - DNA, 22 bp, Artificial Sequence
  Synthetic oligonucleotide; CTG chr11 5192889 5192910 5192906 5192911 +
agtatattttcatgtgcttatt

SEQ ID NO: 77973 - DNA, 22 bp, Artificial Sequence
  Synthetic oligonucleotide; TTT chr11 5192898 5192919 5192915 5192920 +
tcatgtgcttattgcaatctat

SEQ ID NO: 77974 - DNA, 22 bp, Artificial Sequence
  Synthetic oligonucleotide; TTT chr11 5192899 5192920 5192916 5192921 +
catgtgcttattgcaatctata

SEQ ID NO: 77975 - DNA, 22 bp, Artificial Sequence
  Synthetic oligonucleotide; TTC chr11 5192900 5192921 5192917 5192922 +
atgtgcttattgcaatctatat

SEQ ID NO: 77976 - DNA, 22 bp, Artificial Sequence
  Synthetic oligonucleotide; CTT chr11 5192908 5192929 5192925 5192930 +
attgcaatctatatatcttctt

SEQ ID NO: 77977 - DNA, 22 bp, Artificial Sequence
  Synthetic oligonucleotide; TTA chr11 5192909 5192930 5192926 5192931 +
ttgcaatctatatatcttcttt

SEQ ID NO: 77978 - DNA, 22 bp, Artificial Sequence
  Synthetic oligonucleotide; TTG chr11 5192912 5192933 5192929 5192934 +
caatctatatatcttctttggt

SEQ ID NO: 77979 - DNA, 22 bp, Artificial Sequence
  Synthetic oligonucleotide; CTA chr11 5192919 5192940 5192936 5192941 +
tatatcttctttggtaaagtgt

SEQ ID NO: 77980 - DNA, 22 bp, Artificial Sequence
  Synthetic oligonucleotide; CTT chr11 5192927 5192948 5192944 5192949 +
ctttggtaaagtgtctgttcag

SEQ ID NO: 77981 - DNA, 22 bp, Artificial Sequence
  Synthetic oligonucleotide; TTC chr11 5192928 5192949 5192945 5192950 +
tttggtaaagtgtctgttcaga

SEQ ID NO: 77982 - DNA, 22 bp, Artificial Sequence
  Synthetic oligonucleotide; CTT chr11 5192930 5192951 5192947 5192952 +
tggtaaagtgtctgttcagatc

SEQ ID NO: 77983 - DNA, 22 bp, Artificial Sequence
  Synthetic oligonucleotide; TTT chr11 5192931 5192952 5192948 5192953 +
ggtaaagtgtctgttcagatct

SEQ ID NO: 77984 - DNA, 22 bp, Artificial Sequence
  Synthetic oligonucleotide; TTG chr11 5192932 5192953 5192949 5192954 +
gtaaagtgtctgttcagatctt

SEQ ID NO: 77985 - DNA, 22 bp, Artificial Sequence
  Synthetic oligonucleotide; CTG chr11 5192944 5192965 5192961 5192966 +
ttcagatcttttgcccactttg

SEQ ID NO: 77986 - DNA, 22 bp, Artificial Sequence
  Synthetic oligonucleotide; TTC chr11 5192947 5192968 5192964 5192969 +
agatcttttgcccactttgcaa

SEQ ID NO: 77987 - DNA, 22 bp, Artificial Sequence
  Synthetic oligonucleotide; CTT chr11 5192954 5192975 5192971 5192976 +
ttgcccactttgcaattggatt

SEQ ID NO: 77988 - DNA, 22 bp, Artificial Sequence
  Synthetic oligonucleotide; TTT chr11 5192955 5192976 5192972 5192977 +
tgcccactttgcaattggattg

SEQ ID NO: 77989 - DNA, 22 bp, Artificial Sequence
  Synthetic oligonucleotide; TTT chr11 5192956 5192977 5192973 5192978 +
gcccactttgcaattggattgt

SEQ ID NO: 77990 - DNA, 22 bp, Artificial Sequence
  Synthetic oligonucleotide; TTG chr11 5192957 5192978 5192974 5192979 +
cccactttgcaattggattgtt

SEQ ID NO: 77991 - DNA, 22 bp, Artificial Sequence
  Synthetic oligonucleotide; CTT chr11 5192964 5192985 5192981 5192986 +
tgcaattggattgtttgttttt

SEQ ID NO: 77992 - DNA, 22 bp, Artificial Sequence
  Synthetic oligonucleotide; TTT chr11 5192965 5192986 5192982 5192987 +
gcaattggattgtttgtttttt

SEQ ID NO: 77993 - DNA, 22 bp, Artificial Sequence
  Synthetic oligonucleotide; TTG chr11 5192966 5192987 5192983 5192988 +
caattggattgtttgtttttta

SEQ ID NO: 77994 - DNA, 22 bp, Artificial Sequence
  Synthetic oligonucleotide; TTG chr11 5192972 5192993 5192989 5192994 +
gattgtttgttttttattgtag

SEQ ID NO: 77995 - DNA, 22 bp, Artificial Sequence
  Synthetic oligonucleotide; TTG chr11 5192977 5192998 5192994 5192999 +
tttgttttttattgtagaattt

SEQ ID NO: 77996 - DNA, 22 bp, Artificial Sequence
  Synthetic oligonucleotide; TTT chr11 5192980 5193001 5192997 5193002 +
gttttttattgtagaattttaa

SEQ ID NO: 77997 - DNA, 22 bp, Artificial Sequence
  Synthetic oligonucleotide; TTG chr11 5192981 5193002 5192998 5193003 +
ttttttattgtagaattttaaa

SEQ ID NO: 77998 - DNA, 22 bp, Artificial Sequence
  Synthetic oligonucleotide; TTT chr11 5192984 5193005 5193001 5193006 +
tttattgtagaattttaaaagt

SEQ ID NO: 77999 - DNA, 22 bp, Artificial Sequence
  Synthetic oligonucleotide; TTT chr11 5192985 5193006 5193002 5193007 +
ttattgtagaattttaaaagtt

SEQ ID NO: 78000 - DNA, 22 bp, Artificial Sequence
  Synthetic oligonucleotide; TTT chr11 5192986 5193007 5193003 5193008 +
tattgtagaattttaaaagttc

SEQ ID NO: 78001 - DNA, 22 bp, Artificial Sequence
  Synthetic oligonucleotide; TTT chr11 5192987 5193008 5193004 5193009 +
attgtagaattttaaaagttct

SEQ ID NO: 78002 - DNA, 22 bp, Artificial Sequence
  Synthetic oligonucleotide; TTA chr11 5192988 5193009 5193005 5193010 +
ttgtagaattttaaaagttctt

SEQ ID NO: 78003 - DNA, 22 bp, Artificial Sequence
  Synthetic oligonucleotide; TTG chr11 5192991 5193012 5193008 5193013 +
tagaattttaaaagttctttgt

SEQ ID NO: 78004 - DNA, 22 bp, Artificial Sequence
  Synthetic oligonucleotide; TTT chr11 5192999 5193020 5193016 5193021 +
taaaagttctttgtataatatg

SEQ ID NO: 78005 - DNA, 22 bp, Artificial Sequence
  Synthetic oligonucleotide; TTT chr11 5193000 5193021 5193017 5193022 +
aaaagttctttgtataatatgt

SEQ ID NO: 78006 - DNA, 22 bp, Artificial Sequence
  Synthetic oligonucleotide; TTA chr11 5193001 5193022 5193018 5193023 +
aaagttctttgtataatatgta

SEQ ID NO: 78007 - DNA, 22 bp, Artificial Sequence
  Synthetic oligonucleotide; TTC chr11 5193008 5193029 5193025 5193030 +
tttgtataatatgtatacaagt

SEQ ID NO: 78008 - DNA, 22 bp, Artificial Sequence
  Synthetic oligonucleotide; CTT chr11 5193010 5193031 5193027 5193032 +
tgtataatatgtatacaagtcc

SEQ ID NO: 78009 - DNA, 22 bp, Artificial Sequence
  Synthetic oligonucleotide; TTT chr11 5193011 5193032 5193028 5193033 +
gtataatatgtatacaagtcct

SEQ ID NO: 78010 - DNA, 22 bp, Artificial Sequence
  Synthetic oligonucleotide; TTG chr11 5193012 5193033 5193029 5193034 +
tataatatgtatacaagtcctt

SEQ ID NO: 78011 - DNA, 22 bp, Artificial Sequence
  Synthetic oligonucleotide; CTT chr11 5193034 5193055 5193051 5193056 +
tatcagataatatgttttgcaa

SEQ ID NO: 78012 - DNA, 22 bp, Artificial Sequence
  Synthetic oligonucleotide; TTT chr11 5193035 5193056 5193052 5193057 +
atcagataatatgttttgcaaa

SEQ ID NO: 78013 - DNA, 22 bp, Artificial Sequence
  Synthetic oligonucleotide; TTA chr11 5193036 5193057 5193053 5193058 +
tcagataatatgttttgcaaat

SEQ ID NO: 78014 - DNA, 22 bp, Artificial Sequence
  Synthetic oligonucleotide; TTT chr11 5193051 5193072 5193068 5193073 +
tgcaaatatgttctctgtggct

SEQ ID NO: 78015 - DNA, 22 bp, Artificial Sequence
  Synthetic oligonucleotide; TTT chr11 5193052 5193073 5193069 5193074 +
gcaaatatgttctctgtggctt

SEQ ID NO: 78016 - DNA, 22 bp, Artificial Sequence
  Synthetic oligonucleotide; TTG chr11 5193053 5193074 5193070 5193075 +
caaatatgttctctgtggcttg

SEQ ID NO: 78017 - DNA, 22 bp, Artificial Sequence
  Synthetic oligonucleotide; TTC chr11 5193064 5193085 5193081 5193086 +
tctgtggcttgtttttttcatt

SEQ ID NO: 78018 - DNA, 22 bp, Artificial Sequence
  Synthetic oligonucleotide; CTC chr11 5193066 5193087 5193083 5193088 +
tgtggcttgtttttttcattct

SEQ ID NO: 78019 - DNA, 22 bp, Artificial Sequence
  Synthetic oligonucleotide; CTG chr11 5193068 5193089 5193085 5193090 +
tggcttgtttttttcattctct

SEQ ID NO: 78020 - DNA, 22 bp, Artificial Sequence
  Synthetic oligonucleotide; CTT chr11 5193074 5193095 5193091 5193096 +
gtttttttcattctcttaactt

SEQ ID NO: 78021 - DNA, 22 bp, Artificial Sequence
  Synthetic oligonucleotide; TTG chr11 5193075 5193096 5193092 5193097 +
tttttttcattctcttaactta

SEQ ID NO: 78022 - DNA, 22 bp, Artificial Sequence
  Synthetic oligonucleotide; TTT chr11 5193078 5193099 5193095 5193100 +
ttttcattctcttaacttacca

SEQ ID NO: 78023 - DNA, 22 bp, Artificial Sequence
  Synthetic oligonucleotide; TTT chr11 5193079 5193100 5193096 5193101 +
tttcattctcttaacttaccat

SEQ ID NO: 78024 - DNA, 22 bp, Artificial Sequence
  Synthetic oligonucleotide; TTT chr11 5193080 5193101 5193097 5193102 +
ttcattctcttaacttaccatg

SEQ ID NO: 78025 - DNA, 22 bp, Artificial Sequence
  Synthetic oligonucleotide; TTT chr11 5193081 5193102 5193098 5193103 +
tcattctcttaacttaccatga

SEQ ID NO: 78026 - DNA, 22 bp, Artificial Sequence
  Synthetic oligonucleotide; TTT chr11 5193082 5193103 5193099 5193104 +
cattctcttaacttaccatgaa

SEQ ID NO: 78027 - DNA, 22 bp, Artificial Sequence
  Synthetic oligonucleotide; TTC chr11 5193083 5193104 5193100 5193105 +
attctcttaacttaccatgaat

SEQ ID NO: 78028 - DNA, 22 bp, Artificial Sequence
  Synthetic oligonucleotide; TTC chr11 5193087 5193108 5193104 5193109 +
tcttaacttaccatgaattttt

SEQ ID NO: 78029 - DNA, 22 bp, Artificial Sequence
  Synthetic oligonucleotide; CTC chr11 5193089 5193110 5193106 5193111 +
ttaacttaccatgaatttttat

SEQ ID NO: 78030 - DNA, 22 bp, Artificial Sequence
  Synthetic oligonucleotide; CTT chr11 5193091 5193112 5193108 5193113 +
aacttaccatgaatttttattt

SEQ ID NO: 78031 - DNA, 22 bp, Artificial Sequence
  Synthetic oligonucleotide; TTA chr11 5193092 5193113 5193109 5193114 +
acttaccatgaatttttatttt

SEQ ID NO: 78032 - DNA, 22 bp, Artificial Sequence
  Synthetic oligonucleotide; CTT chr11 5193096 5193117 5193113 5193118 +
accatgaatttttattttattt

SEQ ID NO: 78033 - DNA, 22 bp, Artificial Sequence
  Synthetic oligonucleotide; TTA chr11 5193097 5193118 5193114 5193119 +
ccatgaatttttattttatttt

SEQ ID NO: 78034 - DNA, 22 bp, Artificial Sequence
  Synthetic oligonucleotide; TTT chr11 5193107 5193128 5193124 5193129 +
ttattttattttattttgttct

SEQ ID NO: 78035 - DNA, 22 bp, Artificial Sequence
  Synthetic oligonucleotide; TTT chr11 5193108 5193129 5193125 5193130 +
tattttattttattttgttctg

SEQ ID NO: 78036 - DNA, 22 bp, Artificial Sequence
  Synthetic oligonucleotide; TTT chr11 5193109 5193130 5193126 5193131 +
attttattttattttgttctgg

SEQ ID NO: 78037 - DNA, 22 bp, Artificial Sequence
  Synthetic oligonucleotide; TTA chr11 5193110 5193131 5193127 5193132 +
ttttattttattttgttctggg

SEQ ID NO: 78038 - DNA, 22 bp, Artificial Sequence
  Synthetic oligonucleotide; TTT chr11 5193113 5193134 5193130 5193135 +
tattttattttgttctgggtat

SEQ ID NO: 78039 - DNA, 22 bp, Artificial Sequence
  Synthetic oligonucleotide; TTT chr11 5193114 5193135 5193131 5193136 +
attttattttgttctgggtatt

SEQ ID NO: 78040 - DNA, 22 bp, Artificial Sequence
  Synthetic oligonucleotide; TTA chr11 5193115 5193136 5193132 5193137 +
ttttattttgttctgggtattt

SEQ ID NO: 78041 - DNA, 22 bp, Artificial Sequence
  Synthetic oligonucleotide; TTT chr11 5193118 5193139 5193135 5193140 +
tattttgttctgggtattttgt

SEQ ID NO: 78042 - DNA, 22 bp, Artificial Sequence
  Synthetic oligonucleotide; TTT chr11 5193119 5193140 5193136 5193141 +
attttgttctgggtattttgtg

SEQ ID NO: 78043 - DNA, 22 bp, Artificial Sequence
  Synthetic oligonucleotide; TTA chr11 5193120 5193141 5193137 5193142 +
ttttgttctgggtattttgtgg

SEQ ID NO: 78044 - DNA, 22 bp, Artificial Sequence
  Synthetic oligonucleotide; TTT chr11 5193123 5193144 5193140 5193145 +
tgttctgggtattttgtggata

SEQ ID NO: 78045 - DNA, 22 bp, Artificial Sequence
  Synthetic oligonucleotide; TTT chr11 5193124 5193145 5193141 5193146 +
gttctgggtattttgtggatac

SEQ ID NO: 78046 - DNA, 22 bp, Artificial Sequence
  Synthetic oligonucleotide; TTG chr11 5193125 5193146 5193142 5193147 +
ttctgggtattttgtggatact

SEQ ID NO: 78047 - DNA, 22 bp, Artificial Sequence
  Synthetic oligonucleotide; TTC chr11 5193128 5193149 5193145 5193150 +
tgggtattttgtggatactctc

SEQ ID NO: 78048 - DNA, 22 bp, Artificial Sequence
  Synthetic oligonucleotide; CTG chr11 5193130 5193151 5193147 5193152 +
ggtattttgtggatactctcaa

SEQ ID NO: 78049 - DNA, 22 bp, Artificial Sequence
  Synthetic oligonucleotide; TTT chr11 5193137 5193158 5193154 5193159 +
tgtggatactctcaatttcaac

SEQ ID NO: 78050 - DNA, 22 bp, Artificial Sequence
  Synthetic oligonucleotide; TTT chr11 5193138 5193159 5193155 5193160 +
gtggatactctcaatttcaact

SEQ ID NO: 78051 - DNA, 22 bp, Artificial Sequence
  Synthetic oligonucleotide; TTG chr11 5193139 5193160 5193156 5193161 +
tggatactctcaatttcaactg

SEQ ID NO: 78052 - DNA, 22 bp, Artificial Sequence
  Synthetic oligonucleotide; CTC chr11 5193148 5193169 5193165 5193170 +
tcaatttcaactgctgtgttct

SEQ ID NO: 78053 - DNA, 22 bp, Artificial Sequence
  Synthetic oligonucleotide; CTC chr11 5193150 5193171 5193167 5193172 +
aatttcaactgctgtgttcttt

SEQ ID NO: 78054 - DNA, 22 bp, Artificial Sequence
  Synthetic oligonucleotide; TTT chr11 5193155 5193176 5193172 5193177 +
caactgctgtgttcttttgttc

SEQ ID NO: 78055 - DNA, 22 bp, Artificial Sequence
  Synthetic oligonucleotide; TTC chr11 5193156 5193177 5193173 5193178 +
aactgctgtgttcttttgttca

SEQ ID NO: 78056 - DNA, 22 bp, Artificial Sequence
  Synthetic oligonucleotide; CTG chr11 5193161 5193182 5193178 5193183 +
ctgtgttcttttgttcagaaaa

SEQ ID NO: 78057 - DNA, 22 bp, Artificial Sequence
  Synthetic oligonucleotide; CTG chr11 5193164 5193185 5193181 5193186 +
tgttcttttgttcagaaaattg

SEQ ID NO: 78058 - DNA, 22 bp, Artificial Sequence
  Synthetic oligonucleotide; TTC chr11 5193169 5193190 5193186 5193191 +
ttttgttcagaaaattgtcttg

SEQ ID NO: 78059 - DNA, 22 bp, Artificial Sequence
  Synthetic oligonucleotide; CTT chr11 5193171 5193192 5193188 5193193 +
ttgttcagaaaattgtcttgta

SEQ ID NO: 78060 - DNA, 22 bp, Artificial Sequence
  Synthetic oligonucleotide; TTT chr11 5193172 5193193 5193189 5193194 +
tgttcagaaaattgtcttgtat

SEQ ID NO: 78061 - DNA, 22 bp, Artificial Sequence
  Synthetic oligonucleotide; TTT chr11 5193173 5193194 5193190 5193195 +
gttcagaaaattgtcttgtatt

SEQ ID NO: 78062 - DNA, 22 bp, Artificial Sequence
  Synthetic oligonucleotide; TTG chr11 5193174 5193195 5193191 5193196 +
ttcagaaaattgtcttgtattg

SEQ ID NO: 78063 - DNA, 22 bp, Artificial Sequence
  Synthetic oligonucleotide; TTC chr11 5193177 5193198 5193194 5193199 +
agaaaattgtcttgtattgatc

SEQ ID NO: 78064 - DNA, 22 bp, Artificial Sequence
  Synthetic oligonucleotide; TTG chr11 5193186 5193207 5193203 5193208 +
tcttgtattgatctctagtaag

SEQ ID NO: 78065 - DNA, 22 bp, Artificial Sequence
  Synthetic oligonucleotide; CTT chr11 5193190 5193211 5193207 5193212 +
gtattgatctctagtaagttcc

SEQ ID NO: 78066 - DNA, 22 bp, Artificial Sequence
  Synthetic oligonucleotide; TTG chr11 5193191 5193212 5193208 5193213 +
tattgatctctagtaagttcct

SEQ ID NO: 78067 - DNA, 22 bp, Artificial Sequence
  Synthetic oligonucleotide; TTG chr11 5193196 5193217 5193213 5193218 +
atctctagtaagttccttctac

SEQ ID NO: 78068 - DNA, 22 bp, Artificial Sequence
  Synthetic oligonucleotide; CTC chr11 5193201 5193222 5193218 5193223 +
tagtaagttccttctacatgtt

SEQ ID NO: 78069 - DNA, 22 bp, Artificial Sequence
  Synthetic oligonucleotide; CTA chr11 5193203 5193224 5193220 5193225 +
gtaagttccttctacatgttct

SEQ ID NO: 78070 - DNA, 22 bp, Artificial Sequence
  Synthetic oligonucleotide; TTC chr11 5193211 5193232 5193228 5193233 +
cttctacatgttctattttcac

SEQ ID NO: 78071 - DNA, 22 bp, Artificial Sequence
  Synthetic oligonucleotide; CTT chr11 5193214 5193235 5193231 5193236 +
ctacatgttctattttcactct

SEQ ID NO: 78072 - DNA, 22 bp, Artificial Sequence
  Synthetic oligonucleotide; TTC chr11 5193215 5193236 5193232 5193237 +
tacatgttctattttcactctc

SEQ ID NO: 78073 - DNA, 22 bp, Artificial Sequence
  Synthetic oligonucleotide; CTA chr11 5193217 5193238 5193234 5193239 +
catgttctattttcactctctc

SEQ ID NO: 78074 - DNA, 22 bp, Artificial Sequence
  Synthetic oligonucleotide; TTC chr11 5193224 5193245 5193241 5193246 +
tattttcactctctcctgaact

SEQ ID NO: 78075 - DNA, 22 bp, Artificial Sequence
  Synthetic oligonucleotide; CTA chr11 5193226 5193247 5193243 5193248 +
ttttcactctctcctgaactcc

SEQ ID NO: 78076 - DNA, 22 bp, Artificial Sequence
  Synthetic oligonucleotide; TTT chr11 5193229 5193250 5193246 5193251 +
tcactctctcctgaactccagt

SEQ ID NO: 78077 - DNA, 22 bp, Artificial Sequence
  Synthetic oligonucleotide; TTT chr11 5193230 5193251 5193247 5193252 +
cactctctcctgaactccagtt

SEQ ID NO: 78078 - DNA, 22 bp, Artificial Sequence
  Synthetic oligonucleotide; TTC chr11 5193231 5193252 5193248 5193253 +
actctctcctgaactccagtta

SEQ ID NO: 78079 - DNA, 22 bp, Artificial Sequence
  Synthetic oligonucleotide; CTC chr11 5193235 5193256 5193252 5193257 +
tctcctgaactccagttaagat

SEQ ID NO: 78080 - DNA, 22 bp, Artificial Sequence
  Synthetic oligonucleotide; CTC chr11 5193237 5193258 5193254 5193259 +
tcctgaactccagttaagattt

SEQ ID NO: 78081 - DNA, 22 bp, Artificial Sequence
  Synthetic oligonucleotide; CTC chr11 5193239 5193260 5193256 5193261 +
ctgaactccagttaagattttg

SEQ ID NO: 78082 - DNA, 22 bp, Artificial Sequence
  Synthetic oligonucleotide; CTG chr11 5193242 5193263 5193259 5193264 +
aactccagttaagattttggag

SEQ ID NO: 78083 - DNA, 22 bp, Artificial Sequence
  Synthetic oligonucleotide; CTC chr11 5193247 5193268 5193264 5193269 +
cagttaagattttggagttcct

SEQ ID NO: 78084 - DNA, 22 bp, Artificial Sequence
  Synthetic oligonucleotide; TTA chr11 5193253 5193274 5193270 5193275 +
agattttggagttcctgacttc

SEQ ID NO: 78085 - DNA, 22 bp, Artificial Sequence
  Synthetic oligonucleotide; TTT chr11 5193259 5193280 5193276 5193281 +
tggagttcctgacttcacccta

SEQ ID NO: 78086 - DNA, 22 bp, Artificial Sequence
  Synthetic oligonucleotide; TTT chr11 5193260 5193281 5193277 5193282 +
ggagttcctgacttcaccctat

SEQ ID NO: 78087 - DNA, 22 bp, Artificial Sequence
  Synthetic oligonucleotide; TTG chr11 5193261 5193282 5193278 5193283 +
gagttcctgacttcaccctatt

SEQ ID NO: 78088 - DNA, 22 bp, Artificial Sequence
  Synthetic oligonucleotide; TTC chr11 5193267 5193288 5193284 5193289 +
ctgacttcaccctattttttcc

SEQ ID NO: 78089 - DNA, 22 bp, Artificial Sequence
  Synthetic oligonucleotide; CTG chr11 5193270 5193291 5193287 5193292 +
acttcaccctattttttcctcc

SEQ ID NO: 78090 - DNA, 22 bp, Artificial Sequence
  Synthetic oligonucleotide; CTT chr11 5193274 5193295 5193291 5193296 +
caccctattttttcctccatgc

SEQ ID NO: 78091 - DNA, 22 bp, Artificial Sequence
  Synthetic oligonucleotide; TTC chr11 5193275 5193296 5193292 5193297 +
accctattttttcctccatgcc

SEQ ID NO: 78092 - DNA, 22 bp, Artificial Sequence
  Synthetic oligonucleotide; CTA chr11 5193281 5193302 5193298 5193303 +
ttttttcctccatgccccccat

SEQ ID NO: 78093 - DNA, 22 bp, Artificial Sequence
  Synthetic oligonucleotide; TTT chr11 5193284 5193305 5193301 5193306 +
tttcctccatgccccccatatt

SEQ ID NO: 78094 - DNA, 22 bp, Artificial Sequence
  Synthetic oligonucleotide; TTT chr11 5193285 5193306 5193302 5193307 +
ttcctccatgccccccatattt

SEQ ID NO: 78095 - DNA, 22 bp, Artificial Sequence
  Synthetic oligonucleotide; TTT chr11 5193286 5193307 5193303 5193308 +
tcctccatgccccccatattta

SEQ ID NO: 78096 - DNA, 22 bp, Artificial Sequence
  Synthetic oligonucleotide; TTT chr11 5193287 5193308 5193304 5193309 +
cctccatgccccccatatttat

SEQ ID NO: 78097 - DNA, 22 bp, Artificial Sequence
  Synthetic oligonucleotide; TTC chr11 5193288 5193309 5193305 5193310 +
ctccatgccccccatatttatt

SEQ ID NO: 78098 - DNA, 22 bp, Artificial Sequence
  Synthetic oligonucleotide; CTC chr11 5193291 5193312 5193308 5193313 +
catgccccccatatttattcct

SEQ ID NO: 78099 - DNA, 22 bp, Artificial Sequence
  Synthetic oligonucleotide; TTT chr11 5193307 5193328 5193324 5193329 +
attcctttgtcctttttttctg

SEQ ID NO: 78100 - DNA, 22 bp, Artificial Sequence
  Synthetic oligonucleotide; TTA chr11 5193308 5193329 5193325 5193330 +
ttcctttgtcctttttttctgc

SEQ ID NO: 78101 - DNA, 22 bp, Artificial Sequence
  Synthetic oligonucleotide; TTC chr11 5193311 5193332 5193328 5193333 +
ctttgtcctttttttctgcact

SEQ ID NO: 78102 - DNA, 22 bp, Artificial Sequence
  Synthetic oligonucleotide; CTT chr11 5193314 5193335 5193331 5193336 +
tgtcctttttttctgcactctt

SEQ ID NO: 78103 - DNA, 22 bp, Artificial Sequence
  Synthetic oligonucleotide; TTT chr11 5193315 5193336 5193332 5193337 +
gtcctttttttctgcactctta

SEQ ID NO: 78104 - DNA, 22 bp, Artificial Sequence
  Synthetic oligonucleotide; TTG chr11 5193316 5193337 5193333 5193338 +
tcctttttttctgcactcttaa

SEQ ID NO: 78105 - DNA, 22 bp, Artificial Sequence
  Synthetic oligonucleotide; CTT chr11 5193321 5193342 5193338 5193343 +
tttttctgcactcttaaatcta

SEQ ID NO: 78106 - DNA, 22 bp, Artificial Sequence
  Synthetic oligonucleotide; TTT chr11 5193322 5193343 5193339 5193344 +
ttttctgcactcttaaatctac

SEQ ID NO: 78107 - DNA, 22 bp, Artificial Sequence
  Synthetic oligonucleotide; TTT chr11 5193323 5193344 5193340 5193345 +
tttctgcactcttaaatctact

SEQ ID NO: 78108 - DNA, 22 bp, Artificial Sequence
  Synthetic oligonucleotide; TTT chr11 5193324 5193345 5193341 5193346 +
ttctgcactcttaaatctactt

SEQ ID NO: 78109 - DNA, 22 bp, Artificial Sequence
  Synthetic oligonucleotide; TTT chr11 5193325 5193346 5193342 5193347 +
tctgcactcttaaatctacttc

SEQ ID NO: 78110 - DNA, 22 bp, Artificial Sequence
  Synthetic oligonucleotide; TTT chr11 5193326 5193347 5193343 5193348 +
ctgcactcttaaatctacttcc

SEQ ID NO: 78111 - DNA, 22 bp, Artificial Sequence
  Synthetic oligonucleotide; TTC chr11 5193327 5193348 5193344 5193349 +
tgcactcttaaatctacttcct

SEQ ID NO: 78112 - DNA, 22 bp, Artificial Sequence
  Synthetic oligonucleotide; CTG chr11 5193329 5193350 5193346 5193351 +
cactcttaaatctacttcctgt

SEQ ID NO: 78113 - DNA, 22 bp, Artificial Sequence
  Synthetic oligonucleotide; CTC chr11 5193334 5193355 5193351 5193356 +
ttaaatctacttcctgtccccc

SEQ ID NO: 78114 - DNA, 22 bp, Artificial Sequence
  Synthetic oligonucleotide; CTT chr11 5193336 5193357 5193353 5193358 +
aaatctacttcctgtccccctt

SEQ ID NO: 78115 - DNA, 22 bp, Artificial Sequence
  Synthetic oligonucleotide; TTA chr11 5193337 5193358 5193354 5193359 +
aatctacttcctgtccccctta

SEQ ID NO: 78116 - DNA, 22 bp, Artificial Sequence
  Synthetic oligonucleotide; CTA chr11 5193343 5193364 5193360 5193365 +
cttcctgtcccccttattggct

SEQ ID NO: 78117 - DNA, 22 bp, Artificial Sequence
  Synthetic oligonucleotide; CTT chr11 5193346 5193367 5193363 5193368 +
cctgtcccccttattggctact

SEQ ID NO: 78118 - DNA, 22 bp, Artificial Sequence
  Synthetic oligonucleotide; TTC chr11 5193347 5193368 5193364 5193369 +
ctgtcccccttattggctactt

SEQ ID NO: 78119 - DNA, 22 bp, Artificial Sequence
  Synthetic oligonucleotide; CTG chr11 5193350 5193371 5193367 5193372 +
tcccccttattggctacttcat

SEQ ID NO: 78120 - DNA, 22 bp, Artificial Sequence
  Synthetic oligonucleotide; CTT chr11 5193358 5193379 5193375 5193380 +
attggctacttcatctcatctc

SEQ ID NO: 78121 - DNA, 22 bp, Artificial Sequence
  Synthetic oligonucleotide; TTA chr11 5193359 5193380 5193376 5193381 +
ttggctacttcatctcatctct

SEQ ID NO: 78122 - DNA, 22 bp, Artificial Sequence
  Synthetic oligonucleotide; TTG chr11 5193362 5193383 5193379 5193384 +
gctacttcatctcatctctcat

SEQ ID NO: 78123 - DNA, 22 bp, Artificial Sequence
  Synthetic oligonucleotide; CTA chr11 5193366 5193387 5193383 5193388 +
cttcatctcatctctcatattt

SEQ ID NO: 78124 - DNA, 22 bp, Artificial Sequence
  Synthetic oligonucleotide; CTT chr11 5193369 5193390 5193386 5193391 +
catctcatctctcatatttttg

SEQ ID NO: 78125 - DNA, 22 bp, Artificial Sequence
  Synthetic oligonucleotide; TTC chr11 5193370 5193391 5193387 5193392 +
atctcatctctcatatttttgc

SEQ ID NO: 78126 - DNA, 22 bp, Artificial Sequence
  Synthetic oligonucleotide; CTC chr11 5193375 5193396 5193392 5193397 +
atctctcatatttttgctttat

SEQ ID NO: 78127 - DNA, 22 bp, Artificial Sequence
  Synthetic oligonucleotide; CTC chr11 5193380 5193401 5193397 5193402 +
tcatatttttgctttatttact

SEQ ID NO: 78128 - DNA, 22 bp, Artificial Sequence
  Synthetic oligonucleotide; CTC chr11 5193382 5193403 5193399 5193404 +
atatttttgctttatttactat

SEQ ID NO: 78129 - DNA, 22 bp, Artificial Sequence
  Synthetic oligonucleotide; TTT chr11 5193388 5193409 5193405 5193410 +
ttgctttatttactatttatca

SEQ ID NO: 78130 - DNA, 22 bp, Artificial Sequence
  Synthetic oligonucleotide; TTT chr11 5193389 5193410 5193406 5193411 +
tgctttatttactatttatcat

SEQ ID NO: 78131 - DNA, 22 bp, Artificial Sequence
  Synthetic oligonucleotide; TTT chr11 5193390 5193411 5193407 5193412 +
gctttatttactatttatcatg

SEQ ID NO: 78132 - DNA, 22 bp, Artificial Sequence
  Synthetic oligonucleotide; TTG chr11 5193391 5193412 5193408 5193413 +
ctttatttactatttatcatgc

SEQ ID NO: 78133 - DNA, 22 bp, Artificial Sequence
  Synthetic oligonucleotide; CTT chr11 5193394 5193415 5193411 5193416 +
tatttactatttatcatgccct

SEQ ID NO: 78134 - DNA, 22 bp, Artificial Sequence
  Synthetic oligonucleotide; TTT chr11 5193395 5193416 5193412 5193417 +
atttactatttatcatgccctc

SEQ ID NO: 78135 - DNA, 22 bp, Artificial Sequence
  Synthetic oligonucleotide; TTA chr11 5193396 5193417 5193413 5193418 +
tttactatttatcatgccctct

SEQ ID NO: 78136 - DNA, 22 bp, Artificial Sequence
  Synthetic oligonucleotide; TTT chr11 5193399 5193420 5193416 5193421 +
actatttatcatgccctctatt

SEQ ID NO: 78137 - DNA, 22 bp, Artificial Sequence
  Synthetic oligonucleotide; TTA chr11 5193400 5193421 5193417 5193422 +
ctatttatcatgccctctattt

SEQ ID NO: 78138 - DNA, 22 bp, Artificial Sequence
  Synthetic oligonucleotide; CTA chr11 5193403 5193424 5193420 5193425 +
tttatcatgccctctatttttt

SEQ ID NO: 78139 - DNA, 22 bp, Artificial Sequence
  Synthetic oligonucleotide; TTT chr11 5193406 5193427 5193423 5193428 +
atcatgccctctattttttata

SEQ ID NO: 78140 - DNA, 22 bp, Artificial Sequence
  Synthetic oligonucleotide; TTA chr11 5193407 5193428 5193424 5193429 +
tcatgccctctattttttatac

SEQ ID NO: 78141 - DNA, 22 bp, Artificial Sequence
  Synthetic oligonucleotide; CTC chr11 5193417 5193438 5193434 5193439 +
tattttttatactattctgttc

SEQ ID NO: 78142 - DNA, 22 bp, Artificial Sequence
  Synthetic oligonucleotide; CTA chr11 5193419 5193440 5193436 5193441 +
ttttttatactattctgttcaa

SEQ ID NO: 78143 - DNA, 22 bp, Artificial Sequence
  Synthetic oligonucleotide; TTT chr11 5193422 5193443 5193439 5193444 +
tttatactattctgttcaaata

SEQ ID NO: 78144 - DNA, 22 bp, Artificial Sequence
  Synthetic oligonucleotide; TTT chr11 5193423 5193444 5193440 5193445 +
ttatactattctgttcaaatat

SEQ ID NO: 78145 - DNA, 22 bp, Artificial Sequence
  Synthetic oligonucleotide; TTT chr11 5193424 5193445 5193441 5193446 +
tatactattctgttcaaatatc

SEQ ID NO: 78146 - DNA, 22 bp, Artificial Sequence
  Synthetic oligonucleotide; TTT chr11 5193425 5193446 5193442 5193447 +
atactattctgttcaaatatca

SEQ ID NO: 78147 - DNA, 22 bp, Artificial Sequence
  Synthetic oligonucleotide; TTA chr11 5193426 5193447 5193443 5193448 +
tactattctgttcaaatatcaa

SEQ ID NO: 78148 - DNA, 22 bp, Artificial Sequence
  Synthetic oligonucleotide; CTA chr11 5193431 5193452 5193448 5193453 +
ttctgttcaaatatcaaggatc

SEQ ID NO: 78149 - DNA, 22 bp, Artificial Sequence
  Synthetic oligonucleotide; TTC chr11 5193434 5193455 5193451 5193456 +
tgttcaaatatcaaggatctaa

SEQ ID NO: 78150 - DNA, 22 bp, Artificial Sequence
  Synthetic oligonucleotide; CTG chr11 5193436 5193457 5193453 5193458 +
ttcaaatatcaaggatctaaaa

SEQ ID NO: 78151 - DNA, 22 bp, Artificial Sequence
  Synthetic oligonucleotide; TTC chr11 5193439 5193460 5193456 5193461 +
aaatatcaaggatctaaaatga

SEQ ID NO: 78152 - DNA, 22 bp, Artificial Sequence
  Synthetic oligonucleotide; CTA chr11 5193455 5193476 5193472 5193477 +
aaatgagtggttatttaattaa

SEQ ID NO: 78153 - DNA, 22 bp, Artificial Sequence
  Synthetic oligonucleotide; TTA chr11 5193468 5193489 5193485 5193490 +
tttaattaagaatatttattat

SEQ ID NO: 78154 - DNA, 22 bp, Artificial Sequence
  Synthetic oligonucleotide; TTT chr11 5193471 5193492 5193488 5193493 +
aattaagaatatttattatgca

SEQ ID NO: 78155 - DNA, 22 bp, Artificial Sequence
  Synthetic oligonucleotide; TTA chr11 5193472 5193493 5193489 5193494 +
attaagaatatttattatgcac

SEQ ID NO: 78156 - DNA, 22 bp, Artificial Sequence
  Synthetic oligonucleotide; TTA chr11 5193476 5193497 5193493 5193498 +
agaatatttattatgcacctct

SEQ ID NO: 78157 - DNA, 22 bp, Artificial Sequence
  Synthetic oligonucleotide; TTT chr11 5193485 5193506 5193502 5193507 +
attatgcacctcttttattatt

SEQ ID NO: 78158 - DNA, 22 bp, Artificial Sequence
  Synthetic oligonucleotide; TTA chr11 5193486 5193507 5193503 5193508 +
ttatgcacctcttttattatta

SEQ ID NO: 78159 - DNA, 22 bp, Artificial Sequence
  Synthetic oligonucleotide; TTA chr11 5193489 5193510 5193506 5193511 +
tgcacctcttttattattagct

SEQ ID NO: 78160 - DNA, 22 bp, Artificial Sequence
  Synthetic oligonucleotide; CTC chr11 5193497 5193518 5193514 5193519 +
ttttattattagcttttatttt

SEQ ID NO: 78161 - DNA, 22 bp, Artificial Sequence
  Synthetic oligonucleotide; CTT chr11 5193499 5193520 5193516 5193521 +
ttattattagcttttattttct

SEQ ID NO: 78162 - DNA, 22 bp, Artificial Sequence
  Synthetic oligonucleotide; TTT chr11 5193500 5193521 5193517 5193522 +
tattattagcttttattttctg

SEQ ID NO: 78163 - DNA, 22 bp, Artificial Sequence
  Synthetic oligonucleotide; TTT chr11 5193501 5193522 5193518 5193523 +
attattagcttttattttctgc

SEQ ID NO: 78164 - DNA, 22 bp, Artificial Sequence
  Synthetic oligonucleotide; TTA chr11 5193502 5193523 5193519 5193524 +
ttattagcttttattttctgcc

SEQ ID NO: 78165 - DNA, 22 bp, Artificial Sequence
  Synthetic oligonucleotide; TTA chr11 5193505 5193526 5193522 5193527 +
ttagcttttattttctgccctg

SEQ ID NO: 78166 - DNA, 22 bp, Artificial Sequence
  Synthetic oligonucleotide; TTA chr11 5193508 5193529 5193525 5193530 +
gcttttattttctgccctgaat

SEQ ID NO: 78167 - DNA, 22 bp, Artificial Sequence
  Synthetic oligonucleotide; CTT chr11 5193512 5193533 5193529 5193534 +
ttattttctgccctgaataagc

SEQ ID NO: 78168 - DNA, 22 bp, Artificial Sequence
  Synthetic oligonucleotide; TTT chr11 5193513 5193534 5193530 5193535 +
tattttctgccctgaataagct

SEQ ID NO: 78169 - DNA, 22 bp, Artificial Sequence
  Synthetic oligonucleotide; TTT chr11 5193514 5193535 5193531 5193536 +
attttctgccctgaataagctg

SEQ ID NO: 78170 - DNA, 22 bp, Artificial Sequence
  Synthetic oligonucleotide; TTA chr11 5193515 5193536 5193532 5193537 +
ttttctgccctgaataagctgt

SEQ ID NO: 78171 - DNA, 22 bp, Artificial Sequence
  Synthetic oligonucleotide; TTT chr11 5193518 5193539 5193535 5193540 +
tctgccctgaataagctgtgct

SEQ ID NO: 78172 - DNA, 22 bp, Artificial Sequence
  Synthetic oligonucleotide; TTT chr11 5193519 5193540 5193536 5193541 +
ctgccctgaataagctgtgctc

SEQ ID NO: 78173 - DNA, 22 bp, Artificial Sequence
  Synthetic oligonucleotide; TTC chr11 5193520 5193541 5193537 5193542 +
tgccctgaataagctgtgctcc

SEQ ID NO: 78174 - DNA, 22 bp, Artificial Sequence
  Synthetic oligonucleotide; CTG chr11 5193522 5193543 5193539 5193544 +
ccctgaataagctgtgctccaa

SEQ ID NO: 78175 - DNA, 22 bp, Artificial Sequence
  Synthetic oligonucleotide; CTG chr11 5193527 5193548 5193544 5193549 +
aataagctgtgctccaaataag

SEQ ID NO: 78176 - DNA, 22 bp, Artificial Sequence
  Synthetic oligonucleotide; CTG chr11 5193536 5193557 5193553 5193558 +
tgctccaaataagttttcttta

SEQ ID NO: 78177 - DNA, 22 bp, Artificial Sequence
  Synthetic oligonucleotide; CTC chr11 5193541 5193562 5193558 5193563 +
caaataagttttctttattaaa

SEQ ID NO: 78178 - DNA, 22 bp, Artificial Sequence
  Synthetic oligonucleotide; TTT chr11 5193552 5193573 5193569 5193574 +
tctttattaaaattgattctag

SEQ ID NO: 78179 - DNA, 22 bp, Artificial Sequence
  Synthetic oligonucleotide; TTT chr11 5193553 5193574 5193570 5193575 +
ctttattaaaattgattctagg

SEQ ID NO: 78180 - DNA, 22 bp, Artificial Sequence
  Synthetic oligonucleotide; TTC chr11 5193554 5193575 5193571 5193576 +
tttattaaaattgattctaggt

SEQ ID NO: 78181 - DNA, 22 bp, Artificial Sequence
  Synthetic oligonucleotide; CTT chr11 5193556 5193577 5193573 5193578 +
tattaaaattgattctaggtat

SEQ ID NO: 78182 - DNA, 22 bp, Artificial Sequence
  Synthetic oligonucleotide; TTT chr11 5193557 5193578 5193574 5193579 +
attaaaattgattctaggtatg

SEQ ID NO: 78183 - DNA, 22 bp, Artificial Sequence
  Synthetic oligonucleotide; TTA chr11 5193558 5193579 5193575 5193580 +
ttaaaattgattctaggtatgt

SEQ ID NO: 78184 - DNA, 22 bp, Artificial Sequence
  Synthetic oligonucleotide; TTA chr11 5193561 5193582 5193578 5193583 +
aaattgattctaggtatgtaat

SEQ ID NO: 78185 - DNA, 22 bp, Artificial Sequence
  Synthetic oligonucleotide; TTG chr11 5193567 5193588 5193584 5193589 +
attctaggtatgtaatttttgt

SEQ ID NO: 78186 - DNA, 22 bp, Artificial Sequence
  Synthetic oligonucleotide; TTC chr11 5193571 5193592 5193588 5193593 +
taggtatgtaatttttgtgttg

SEQ ID NO: 78187 - DNA, 22 bp, Artificial Sequence
  Synthetic oligonucleotide; CTA chr11 5193573 5193594 5193590 5193595 +
ggtatgtaatttttgtgttggt

SEQ ID NO: 78188 - DNA, 22 bp, Artificial Sequence
  Synthetic oligonucleotide; TTT chr11 5193585 5193606 5193602 5193607 +
ttgtgttggtggacttaattgc

SEQ ID NO: 78189 - DNA, 22 bp, Artificial Sequence
  Synthetic oligonucleotide; TTT chr11 5193586 5193607 5193603 5193608 +
tgtgttggtggacttaattgca

SEQ ID NO: 78190 - DNA, 22 bp, Artificial Sequence
  Synthetic oligonucleotide; TTT chr11 5193587 5193608 5193604 5193609 +
gtgttggtggacttaattgcat

SEQ ID NO: 78191 - DNA, 22 bp, Artificial Sequence
  Synthetic oligonucleotide; TTG chr11 5193588 5193609 5193605 5193610 +
tgttggtggacttaattgcatt

SEQ ID NO: 78192 - DNA, 22 bp, Artificial Sequence
  Synthetic oligonucleotide; TTG chr11 5193593 5193614 5193610 5193615 +
gtggacttaattgcattcctga

SEQ ID NO: 78193 - DNA, 22 bp, Artificial Sequence
  Synthetic oligonucleotide; CTT chr11 5193601 5193622 5193618 5193623 +
aattgcattcctgataatcttt

SEQ ID NO: 78194 - DNA, 22 bp, Artificial Sequence
  Synthetic oligonucleotide; TTA chr11 5193602 5193623 5193619 5193624 +
attgcattcctgataatctttg

SEQ ID NO: 78195 - DNA, 22 bp, Artificial Sequence
  Synthetic oligonucleotide; TTG chr11 5193606 5193627 5193623 5193628 +
cattcctgataatctttgtcca

SEQ ID NO: 78196 - DNA, 22 bp, Artificial Sequence
  Synthetic oligonucleotide; TTC chr11 5193611 5193632 5193628 5193633 +
ctgataatctttgtccatcctt

SEQ ID NO: 78197 - DNA, 22 bp, Artificial Sequence
  Synthetic oligonucleotide; CTG chr11 5193614 5193635 5193631 5193636 +
ataatctttgtccatccttctg

SEQ ID NO: 78198 - DNA, 22 bp, Artificial Sequence
  Synthetic oligonucleotide; CTT chr11 5193622 5193643 5193639 5193644 +
tgtccatccttctgtgtccgga

SEQ ID NO: 78199 - DNA, 22 bp, Artificial Sequence
  Synthetic oligonucleotide; TTT chr11 5193623 5193644 5193640 5193645 +
gtccatccttctgtgtccggaa

SEQ ID NO: 78200 - DNA, 22 bp, Artificial Sequence
  Synthetic oligonucleotide; TTG chr11 5193624 5193645 5193641 5193646 +
tccatccttctgtgtccggaat

SEQ ID NO: 78201 - DNA, 22 bp, Artificial Sequence
  Synthetic oligonucleotide; CTT chr11 5193633 5193654 5193650 5193655 +
ctgtgtccggaattggtgggtt

SEQ ID NO: 78202 - DNA, 22 bp, Artificial Sequence
  Synthetic oligonucleotide; TTC chr11 5193634 5193655 5193651 5193656 +
tgtgtccggaattggtgggttc

SEQ ID NO: 78203 - DNA, 22 bp, Artificial Sequence
  Synthetic oligonucleotide; CTG chr11 5193636 5193657 5193653 5193658 +
tgtccggaattggtgggttctt

SEQ ID NO: 78204 - DNA, 22 bp, Artificial Sequence
  Synthetic oligonucleotide; TTG chr11 5193648 5193669 5193665 5193670 +
gtgggttcttggtctcgctgac

SEQ ID NO: 78205 - DNA, 22 bp, Artificial Sequence
  Synthetic oligonucleotide; TTC chr11 5193656 5193677 5193673 5193678 +
ttggtctcgctgacttaaagaa

SEQ ID NO: 78206 - DNA, 22 bp, Artificial Sequence
  Synthetic oligonucleotide; CTT chr11 5193658 5193679 5193675 5193680 +
ggtctcgctgacttaaagaatg

SEQ ID NO: 78207 - DNA, 22 bp, Artificial Sequence
  Synthetic oligonucleotide; TTG chr11 5193659 5193680 5193676 5193681 +
gtctcgctgacttaaagaatga

SEQ ID NO: 78208 - DNA, 22 bp, Artificial Sequence
  Synthetic oligonucleotide; CTC chr11 5193664 5193685 5193681 5193686 +
gctgacttaaagaatgaagccg

SEQ ID NO: 78209 - DNA, 22 bp, Artificial Sequence
  Synthetic oligonucleotide; CTG chr11 5193668 5193689 5193685 5193690 +
acttaaagaatgaagccgcgaa

SEQ ID NO: 78210 - DNA, 22 bp, Artificial Sequence
  Synthetic oligonucleotide; CTT chr11 5193672 5193693 5193689 5193694 +
aaagaatgaagccgcgaaccct

SEQ ID NO: 78211 - DNA, 22 bp, Artificial Sequence
  Synthetic oligonucleotide; TTA chr11 5193673 5193694 5193690 5193695 +
aagaatgaagccgcgaaccctc

SEQ ID NO: 78212 - DNA, 22 bp, Artificial Sequence
  Synthetic oligonucleotide; CTC chr11 5193695 5193716 5193712 5193717 +
gtggtgagtgttacaattctta

SEQ ID NO: 78213 - DNA, 22 bp, Artificial Sequence
  Synthetic oligonucleotide; TTA chr11 5193708 5193729 5193725 5193730 +
caattcttaaagatggtgtgtt

SEQ ID NO: 78214 - DNA, 22 bp, Artificial Sequence
  Synthetic oligonucleotide; TTC chr11 5193714 5193735 5193731 5193736 +
ttaaagatggtgtgttcaaagg

SEQ ID NO: 78215 - DNA, 22 bp, Artificial Sequence
  Synthetic oligonucleotide; CTT chr11 5193716 5193737 5193733 5193738 +
aaagatggtgtgttcaaaggat

SEQ ID NO: 78216 - DNA, 22 bp, Artificial Sequence
  Synthetic oligonucleotide; TTA chr11 5193717 5193738 5193734 5193739 +
aagatggtgtgttcaaaggatg

SEQ ID NO: 78217 - DNA, 22 bp, Artificial Sequence
  Synthetic oligonucleotide; TTC chr11 5193731 5193752 5193748 5193753 +
aaaggatggtgtgtccaaagtt

SEQ ID NO: 78218 - DNA, 22 bp, Artificial Sequence
  Synthetic oligonucleotide; TTT chr11 5193754 5193775 5193771 5193776 +
gttacttcagatgtgtccagag

SEQ ID NO: 78219 - DNA, 22 bp, Artificial Sequence
  Synthetic oligonucleotide; TTG chr11 5193755 5193776 5193772 5193777 +
ttacttcagatgtgtccagagt

SEQ ID NO: 78220 - DNA, 22 bp, Artificial Sequence
  Synthetic oligonucleotide; TTA chr11 5193758 5193779 5193775 5193780 +
cttcagatgtgtccagagtttc

SEQ ID NO: 78221 - DNA, 22 bp, Artificial Sequence
  Synthetic oligonucleotide; CTT chr11 5193761 5193782 5193778 5193783 +
cagatgtgtccagagtttcttc

SEQ ID NO: 78222 - DNA, 22 bp, Artificial Sequence
  Synthetic oligonucleotide; TTC chr11 5193762 5193783 5193779 5193784 +
agatgtgtccagagtttcttcc

SEQ ID NO: 78223 - DNA, 22 bp, Artificial Sequence
  Synthetic oligonucleotide; TTT chr11 5193779 5193800 5193796 5193801 +
cttccttctggtgtgttcacgg

SEQ ID NO: 78224 - DNA, 22 bp, Artificial Sequence
  Synthetic oligonucleotide; TTC chr11 5193780 5193801 5193797 5193802 +
ttccttctggtgtgttcacggt

SEQ ID NO: 78225 - DNA, 22 bp, Artificial Sequence
  Synthetic oligonucleotide; CTT chr11 5193782 5193803 5193799 5193804 +
ccttctggtgtgttcacggtct

SEQ ID NO: 78226 - DNA, 22 bp, Artificial Sequence
  Synthetic oligonucleotide; TTC chr11 5193783 5193804 5193800 5193805 +
cttctggtgtgttcacggtctt

SEQ ID NO: 78227 - DNA, 22 bp, Artificial Sequence
  Synthetic oligonucleotide; CTT chr11 5193786 5193807 5193803 5193808 +
ctggtgtgttcacggtcttgct

SEQ ID NO: 78228 - DNA, 22 bp, Artificial Sequence
  Synthetic oligonucleotide; TTC chr11 5193787 5193808 5193804 5193809 +
tggtgtgttcacggtcttgctg

SEQ ID NO: 78229 - DNA, 22 bp, Artificial Sequence
  Synthetic oligonucleotide; CTG chr11 5193789 5193810 5193806 5193811 +
gtgtgttcacggtcttgctggc

SEQ ID NO: 78230 - DNA, 22 bp, Artificial Sequence
  Synthetic oligonucleotide; TTC chr11 5193797 5193818 5193814 5193819 +
acggtcttgctggctccaggag

SEQ ID NO: 78231 - DNA, 22 bp, Artificial Sequence
  Synthetic oligonucleotide; CTT chr11 5193805 5193826 5193822 5193827 +
gctggctccaggagtgaagctg

SEQ ID NO: 78232 - DNA, 22 bp, Artificial Sequence
  Synthetic oligonucleotide; TTG chr11 5193806 5193827 5193823 5193828 +
ctggctccaggagtgaagctgc

SEQ ID NO: 78233 - DNA, 22 bp, Artificial Sequence
  Synthetic oligonucleotide; CTG chr11 5193809 5193830 5193826 5193831 +
gctccaggagtgaagctgcaga

SEQ ID NO: 78234 - DNA, 22 bp, Artificial Sequence
  Synthetic oligonucleotide; CTC chr11 5193813 5193834 5193830 5193835 +
caggagtgaagctgcagacccc

SEQ ID NO: 78235 - DNA, 22 bp, Artificial Sequence
  Synthetic oligonucleotide; CTG chr11 5193827 5193848 5193844 5193849 +
cagacccccacggggagtgtta

SEQ ID NO: 78236 - DNA, 22 bp, Artificial Sequence
  Synthetic oligonucleotide; TTA chr11 5193849 5193870 5193866 5193871 +
cagctcttaaaggcggagcgta

SEQ ID NO: 78237 - DNA, 22 bp, Artificial Sequence
  Synthetic oligonucleotide; CTC chr11 5193855 5193876 5193872 5193877 +
ttaaaggcggagcgtatggagt

SEQ ID NO: 78238 - DNA, 22 bp, Artificial Sequence
  Synthetic oligonucleotide; CTT chr11 5193857 5193878 5193874 5193879 +
aaaggcggagcgtatggagttg

SEQ ID NO: 78239 - DNA, 22 bp, Artificial Sequence
  Synthetic oligonucleotide; TTA chr11 5193858 5193879 5193875 5193880 +
aaggcggagcgtatggagttgc

SEQ ID NO: 78240 - DNA, 22 bp, Artificial Sequence
  Synthetic oligonucleotide; TTG chr11 5193879 5193900 5193896 5193901 +
ctcattcctcctgtcttgggtt

SEQ ID NO: 78241 - DNA, 22 bp, Artificial Sequence
  Synthetic oligonucleotide; CTC chr11 5193882 5193903 5193899 5193904 +
attcctcctgtcttgggttgtt

SEQ ID NO: 78242 - DNA, 22 bp, Artificial Sequence
  Synthetic oligonucleotide; TTC chr11 5193886 5193907 5193903 5193908 +
ctcctgtcttgggttgttcatc

SEQ ID NO: 78243 - DNA, 22 bp, Artificial Sequence
  Synthetic oligonucleotide; CTC chr11 5193889 5193910 5193906 5193911 +
ctgtcttgggttgttcatcccc

SEQ ID NO: 78244 - DNA, 22 bp, Artificial Sequence
  Synthetic oligonucleotide; CTG chr11 5193892 5193913 5193909 5193914 +
tcttgggttgttcatcccccat

SEQ ID NO: 78245 - DNA, 22 bp, Artificial Sequence
  Synthetic oligonucleotide; CTT chr11 5193896 5193917 5193913 5193918 +
gggttgttcatcccccatgctg

SEQ ID NO: 78246 - DNA, 22 bp, Artificial Sequence
  Synthetic oligonucleotide; TTG chr11 5193897 5193918 5193914 5193919 +
ggttgttcatcccccatgctgg

SEQ ID NO: 78247 - DNA, 22 bp, Artificial Sequence
  Synthetic oligonucleotide; TTG chr11 5193902 5193923 5193919 5193924 +
ttcatcccccatgctgggttcg

SEQ ID NO: 78248 - DNA, 22 bp, Artificial Sequence
  Synthetic oligonucleotide; TTC chr11 5193905 5193926 5193922 5193927 +
atcccccatgctgggttcgtgg

SEQ ID NO: 78249 - DNA, 22 bp, Artificial Sequence
  Synthetic oligonucleotide; CTG chr11 5193918 5193939 5193935 5193940 +
ggttcgtggtcttgctggcttc

SEQ ID NO: 78250 - DNA, 22 bp, Artificial Sequence
  Synthetic oligonucleotide; TTC chr11 5193923 5193944 5193940 5193945 +
gtggtcttgctggcttcagaag

SEQ ID NO: 78251 - DNA, 22 bp, Artificial Sequence
  Synthetic oligonucleotide; CTT chr11 5193931 5193952 5193948 5193953 +
gctggcttcagaagtgaagccg

SEQ ID NO: 78252 - DNA, 22 bp, Artificial Sequence
  Synthetic oligonucleotide; TTG chr11 5193932 5193953 5193949 5193954 +
ctggcttcagaagtgaagccgc

SEQ ID NO: 78253 - DNA, 22 bp, Artificial Sequence
  Synthetic oligonucleotide; CTG chr11 5193935 5193956 5193952 5193957 +
gcttcagaagtgaagccgcaga

SEQ ID NO: 78254 - DNA, 22 bp, Artificial Sequence
  Synthetic oligonucleotide; CTT chr11 5193939 5193960 5193956 5193961 +
cagaagtgaagccgcagacctt

SEQ ID NO: 78255 - DNA, 22 bp, Artificial Sequence
  Synthetic oligonucleotide; TTC chr11 5193940 5193961 5193957 5193962 +
agaagtgaagccgcagaccttc

SEQ ID NO: 78256 - DNA, 22 bp, Artificial Sequence
  Synthetic oligonucleotide; CTT chr11 5193961 5193982 5193978 5193983 +
cgcagtgagtgttacagctcat

SEQ ID NO: 78257 - DNA, 22 bp, Artificial Sequence
  Synthetic oligonucleotide; TTC chr11 5193962 5193983 5193979 5193984 +
gcagtgagtgttacagctcata

SEQ ID NO: 78258 - DNA, 22 bp, Artificial Sequence
  Synthetic oligonucleotide; TTA chr11 5193975 5193996 5193992 5193997 +
cagctcataaaggcagcgcgga

SEQ ID NO: 78259 - DNA, 22 bp, Artificial Sequence
  Synthetic oligonucleotide; CTC chr11 5193981 5194002 5193998 5194003 +
ataaaggcagcgcggatccaaa

SEQ ID NO: 78260 - DNA, 22 bp, Artificial Sequence
  Synthetic oligonucleotide; TTT chr11 5194024 5194045 5194041 5194046 +
attgtgaagaataaaagaacaa

SEQ ID NO: 78261 - DNA, 22 bp, Artificial Sequence
  Synthetic oligonucleotide; TTA chr11 5194025 5194046 5194042 5194047 +
ttgtgaagaataaaagaacaaa

SEQ ID NO: 78262 - DNA, 22 bp, Artificial Sequence
  Synthetic oligonucleotide; TTG chr11 5194028 5194049 5194045 5194050 +
tgaagaataaaagaacaaagct

SEQ ID NO: 78263 - DNA, 22 bp, Artificial Sequence
  Synthetic oligonucleotide; CTT chr11 5194051 5194072 5194068 5194073 +
ccacagcatggtagggaaccca

SEQ ID NO: 78264 - DNA, 22 bp, Artificial Sequence
  Synthetic oligonucleotide; TTC chr11 5194052 5194073 5194069 5194074 +
cacagcatggtagggaacccaa

SEQ ID NO: 78265 - DNA, 22 bp, Artificial Sequence
  Synthetic oligonucleotide; TTG chr11 5194082 5194103 5194099 5194104 +
tcacagctggctccggcagcct

SEQ ID NO: 78266 - DNA, 22 bp, Artificial Sequence
  Synthetic oligonucleotide; CTG chr11 5194091 5194112 5194108 5194113 +
gctccggcagcctgcctttatt

SEQ ID NO: 78267 - DNA, 22 bp, Artificial Sequence
  Synthetic oligonucleotide; CTC chr11 5194095 5194116 5194112 5194117 +
cggcagcctgcctttatttcct

SEQ ID NO: 78268 - DNA, 22 bp, Artificial Sequence
  Synthetic oligonucleotide; CTG chr11 5194105 5194126 5194122 5194127 +
cctttatttccttatctgaccc

SEQ ID NO: 78269 - DNA, 22 bp, Artificial Sequence
  Synthetic oligonucleotide; CTT chr11 5194109 5194130 5194126 5194131 +
tatttccttatctgaccccacc

SEQ ID NO: 78270 - DNA, 22 bp, Artificial Sequence
  Synthetic oligonucleotide; TTT chr11 5194110 5194131 5194127 5194132 +
atttccttatctgaccccaccc

SEQ ID NO: 78271 - DNA, 22 bp, Artificial Sequence
  Synthetic oligonucleotide; TTA chr11 5194111 5194132 5194128 5194133 +
tttccttatctgaccccaccca

SEQ ID NO: 78272 - DNA, 22 bp, Artificial Sequence
  Synthetic oligonucleotide; TTT chr11 5194114 5194135 5194131 5194136 +
ccttatctgaccccacccacat

SEQ ID NO: 78273 - DNA, 22 bp, Artificial Sequence
  Synthetic oligonucleotide; TTC chr11 5194115 5194136 5194132 5194137 +
cttatctgaccccacccacatc

SEQ ID NO: 78274 - DNA, 22 bp, Artificial Sequence
  Synthetic oligonucleotide; CTT chr11 5194118 5194139 5194135 5194140 +
atctgaccccacccacatcctg

SEQ ID NO: 78275 - DNA, 22 bp, Artificial Sequence
  Synthetic oligonucleotide; TTA chr11 5194119 5194140 5194136 5194141 +
tctgaccccacccacatcctgc

SEQ ID NO: 78276 - DNA, 22 bp, Artificial Sequence
  Synthetic oligonucleotide; CTG chr11 5194123 5194144 5194140 5194145 +
accccacccacatcctgctgat

SEQ ID NO: 78277 - DNA, 22 bp, Artificial Sequence
  Synthetic oligonucleotide; CTG chr11 5194140 5194161 5194157 5194162 +
ctgattggtccattttacagag

SEQ ID NO: 78278 - DNA, 22 bp, Artificial Sequence
  Synthetic oligonucleotide; CTG chr11 5194143 5194164 5194160 5194165 +
attggtccattttacagagagc

SEQ ID NO: 78279 - DNA, 22 bp, Artificial Sequence
  Synthetic oligonucleotide; TTG chr11 5194147 5194168 5194164 5194169 +
gtccattttacagagagctgat

SEQ ID NO: 78280 - DNA, 22 bp, Artificial Sequence
  Synthetic oligonucleotide; TTT chr11 5194155 5194176 5194172 5194177 +
tacagagagctgattggcccat

SEQ ID NO: 78281 - DNA, 22 bp, Artificial Sequence
  Synthetic oligonucleotide; TTT chr11 5194156 5194177 5194173 5194178 +
acagagagctgattggcccatt

SEQ ID NO: 78282 - DNA, 22 bp, Artificial Sequence
  Synthetic oligonucleotide; TTA chr11 5194157 5194178 5194174 5194179 +
cagagagctgattggcccattt

SEQ ID NO: 78283 - DNA, 22 bp, Artificial Sequence
  Synthetic oligonucleotide; CTG chr11 5194167 5194188 5194184 5194189 +
attggcccattttacagagagc

SEQ ID NO: 78284 - DNA, 22 bp, Artificial Sequence
  Synthetic oligonucleotide; TTG chr11 5194171 5194192 5194188 5194193 +
gcccattttacagagagctggt

SEQ ID NO: 78285 - DNA, 22 bp, Artificial Sequence
  Synthetic oligonucleotide; TTT chr11 5194179 5194200 5194196 5194201 +
tacagagagctggttggtccgt

SEQ ID NO: 78286 - DNA, 22 bp, Artificial Sequence
  Synthetic oligonucleotide; TTT chr11 5194180 5194201 5194197 5194202 +
acagagagctggttggtccgtt

SEQ ID NO: 78287 - DNA, 22 bp, Artificial Sequence
  Synthetic oligonucleotide; TTA chr11 5194181 5194202 5194198 5194203 +
cagagagctggttggtccgttt

SEQ ID NO: 78288 - DNA, 22 bp, Artificial Sequence
  Synthetic oligonucleotide; CTG chr11 5194191 5194212 5194208 5194213 +
gttggtccgttttggcagagtg

SEQ ID NO: 78289 - DNA, 22 bp, Artificial Sequence
  Synthetic oligonucleotide; TTG chr11 5194195 5194216 5194212 5194217 +
gtccgttttggcagagtgctga

SEQ ID NO: 78290 - DNA, 22 bp, Artificial Sequence
  Synthetic oligonucleotide; TTT chr11 5194203 5194224 5194220 5194225 +
tggcagagtgctgattggtgca

SEQ ID NO: 78291 - DNA, 22 bp, Artificial Sequence
  Synthetic oligonucleotide; TTT chr11 5194204 5194225 5194221 5194226 +
ggcagagtgctgattggtgcat

SEQ ID NO: 78292 - DNA, 22 bp, Artificial Sequence
  Synthetic oligonucleotide; TTG chr11 5194205 5194226 5194222 5194227 +
gcagagtgctgattggtgcatt

SEQ ID NO: 78293 - DNA, 22 bp, Artificial Sequence
  Synthetic oligonucleotide; CTG chr11 5194216 5194237 5194233 5194238 +
attggtgcatttacaaaccttg

SEQ ID NO: 78294 - DNA, 22 bp, Artificial Sequence
  Synthetic oligonucleotide; TTG chr11 5194220 5194241 5194237 5194242 +
gtgcatttacaaaccttgagct

SEQ ID NO: 78295 - DNA, 22 bp, Artificial Sequence
  Synthetic oligonucleotide; TTT chr11 5194228 5194249 5194245 5194250 +
acaaaccttgagctagacacag

SEQ ID NO: 78296 - DNA, 22 bp, Artificial Sequence
  Synthetic oligonucleotide; TTA chr11 5194229 5194250 5194246 5194251 +
caaaccttgagctagacacaga

SEQ ID NO: 78297 - DNA, 22 bp, Artificial Sequence
  Synthetic oligonucleotide; CTT chr11 5194237 5194258 5194254 5194259 +
gagctagacacagagtgctgat

SEQ ID NO: 78298 - DNA, 22 bp, Artificial Sequence
  Synthetic oligonucleotide; TTG chr11 5194238 5194259 5194255 5194260 +
agctagacacagagtgctgatt

SEQ ID NO: 78299 - DNA, 22 bp, Artificial Sequence
  Synthetic oligonucleotide; CTA chr11 5194243 5194264 5194260 5194265 +
gacacagagtgctgattagtgc

SEQ ID NO: 78300 - DNA, 22 bp, Artificial Sequence
  Synthetic oligonucleotide; CTG chr11 5194257 5194278 5194274 5194279 +
attagtgcatttacaatccttt

SEQ ID NO: 78301 - DNA, 22 bp, Artificial Sequence
  Synthetic oligonucleotide; TTA chr11 5194261 5194282 5194278 5194283 +
gtgcatttacaatcctttagct

SEQ ID NO: 78302 - DNA, 22 bp, Artificial Sequence
  Synthetic oligonucleotide; TTT chr11 5194269 5194290 5194286 5194291 +
acaatcctttagctagacacaa

SEQ ID NO: 78303 - DNA, 22 bp, Artificial Sequence
  Synthetic oligonucleotide; TTA chr11 5194270 5194291 5194287 5194292 +
caatcctttagctagacacaaa

SEQ ID NO: 78304 - DNA, 22 bp, Artificial Sequence
  Synthetic oligonucleotide; CTT chr11 5194278 5194299 5194295 5194300 +
tagctagacacaaaagttctcc

SEQ ID NO: 78305 - DNA, 22 bp, Artificial Sequence
  Synthetic oligonucleotide; TTT chr11 5194279 5194300 5194296 5194301 +
agctagacacaaaagttctcca

SEQ ID NO: 78306 - DNA, 22 bp, Artificial Sequence
  Synthetic oligonucleotide; TTA chr11 5194280 5194301 5194297 5194302 +
gctagacacaaaagttctccaa

SEQ ID NO: 78307 - DNA, 22 bp, Artificial Sequence
  Synthetic oligonucleotide; CTA chr11 5194284 5194305 5194301 5194306 +
gacacaaaagttctccaagtcc

SEQ ID NO: 78308 - DNA, 22 bp, Artificial Sequence
  Synthetic oligonucleotide; TTC chr11 5194297 5194318 5194314 5194319 +
tccaagtccccactagattagc

SEQ ID NO: 78309 - DNA, 22 bp, Artificial Sequence
  Synthetic oligonucleotide; CTC chr11 5194299 5194320 5194316 5194321 +
caagtccccactagattagcta

SEQ ID NO: 78310 - DNA, 22 bp, Artificial Sequence
  Synthetic oligonucleotide; CTA chr11 5194312 5194333 5194329 5194334 +
gattagctagacacagagcact

SEQ ID NO: 78311 - DNA, 22 bp, Artificial Sequence
  Synthetic oligonucleotide; TTA chr11 5194317 5194338 5194334 5194339 +
gctagacacagagcactgattg

SEQ ID NO: 78312 - DNA, 22 bp, Artificial Sequence
  Synthetic oligonucleotide; CTA chr11 5194321 5194342 5194338 5194343 +
gacacagagcactgattggtgc

SEQ ID NO: 78313 - DNA, 22 bp, Artificial Sequence
  Synthetic oligonucleotide; CTG chr11 5194335 5194356 5194352 5194357 +
attggtgcatttacaaaccttg

SEQ ID NO: 78314 - DNA, 22 bp, Artificial Sequence
  Synthetic oligonucleotide; TTG chr11 5194339 5194360 5194356 5194361 +
gtgcatttacaaaccttgagtt

SEQ ID NO: 78315 - DNA, 22 bp, Artificial Sequence
  Synthetic oligonucleotide; TTT chr11 5194347 5194368 5194364 5194369 +
acaaaccttgagttagacacag

SEQ ID NO: 78316 - DNA, 22 bp, Artificial Sequence
  Synthetic oligonucleotide; TTA chr11 5194348 5194369 5194365 5194370 +
caaaccttgagttagacacaga

SEQ ID NO: 78317 - DNA, 22 bp, Artificial Sequence
  Synthetic oligonucleotide; CTT chr11 5194356 5194377 5194373 5194378 +
gagttagacacagattgctgat

SEQ ID NO: 78318 - DNA, 22 bp, Artificial Sequence
  Synthetic oligonucleotide; TTG chr11 5194357 5194378 5194374 5194379 +
agttagacacagattgctgatt

SEQ ID NO: 78319 - DNA, 22 bp, Artificial Sequence
  Synthetic oligonucleotide; TTA chr11 5194362 5194383 5194379 5194384 +
gacacagattgctgattggtgc

SEQ ID NO: 78320 - DNA, 22 bp, Artificial Sequence
  Synthetic oligonucleotide; TTG chr11 5194373 5194394 5194390 5194395 +
ctgattggtgcatttacaaacc

SEQ ID NO: 78321 - DNA, 22 bp, Artificial Sequence
  Synthetic oligonucleotide; CTG chr11 5194376 5194397 5194393 5194398 +
attggtgcatttacaaaccttt

SEQ ID NO: 78322 - DNA, 22 bp, Artificial Sequence
  Synthetic oligonucleotide; TTG chr11 5194380 5194401 5194397 5194402 +
gtgcatttacaaacctttagct

SEQ ID NO: 78323 - DNA, 22 bp, Artificial Sequence
  Synthetic oligonucleotide; TTT chr11 5194388 5194409 5194405 5194410 +
acaaacctttagctagacatga

SEQ ID NO: 78324 - DNA, 22 bp, Artificial Sequence
  Synthetic oligonucleotide; TTA chr11 5194389 5194410 5194406 5194411 +
caaacctttagctagacatgaa

SEQ ID NO: 78325 - DNA, 22 bp, Artificial Sequence
  Synthetic oligonucleotide; CTT chr11 5194397 5194418 5194414 5194419 +
tagctagacatgaaagttctcc

SEQ ID NO: 78326 - DNA, 22 bp, Artificial Sequence
  Synthetic oligonucleotide; TTT chr11 5194398 5194419 5194415 5194420 +
agctagacatgaaagttctcca

SEQ ID NO: 78327 - DNA, 22 bp, Artificial Sequence
  Synthetic oligonucleotide; TTA chr11 5194399 5194420 5194416 5194421 +
gctagacatgaaagttctccag

SEQ ID NO: 78328 - DNA, 22 bp, Artificial Sequence
  Synthetic oligonucleotide; CTA chr11 5194403 5194424 5194420 5194425 +
gacatgaaagttctccagttcc

SEQ ID NO: 78329 - DNA, 22 bp, Artificial Sequence
  Synthetic oligonucleotide; TTC chr11 5194416 5194437 5194433 5194438 +
tccagttccatatttcatggtg

SEQ ID NO: 78330 - DNA, 22 bp, Artificial Sequence
  Synthetic oligonucleotide; CTC chr11 5194418 5194439 5194435 5194440 +
cagttccatatttcatggtgag

SEQ ID NO: 78331 - DNA, 22 bp, Artificial Sequence
  Synthetic oligonucleotide; TTC chr11 5194424 5194445 5194441 5194446 +
catatttcatggtgaggaacaa

SEQ ID NO: 78332 - DNA, 22 bp, Artificial Sequence
  Synthetic oligonucleotide; TTT chr11 5194431 5194452 5194448 5194453 +
catggtgaggaacaaagaatat

SEQ ID NO: 78333 - DNA, 22 bp, Artificial Sequence
  Synthetic oligonucleotide; TTC chr11 5194432 5194453 5194449 5194454 +
atggtgaggaacaaagaatata

SEQ ID NO: 78334 - DNA, 22 bp, Artificial Sequence
  Synthetic oligonucleotide; TTC chr11 5194475 5194496 5194492 5194497 +
tttgttcctcaccatgaaatat

SEQ ID NO: 78335 - DNA, 22 bp, Artificial Sequence
  Synthetic oligonucleotide; CTT chr11 5194477 5194498 5194494 5194499 +
tgttcctcaccatgaaatatgg

SEQ ID NO: 78336 - DNA, 22 bp, Artificial Sequence
  Synthetic oligonucleotide; TTT chr11 5194478 5194499 5194495 5194500 +
gttcctcaccatgaaatatgga

SEQ ID NO: 78337 - DNA, 22 bp, Artificial Sequence
  Synthetic oligonucleotide; TTG chr11 5194479 5194500 5194496 5194501 +
ttcctcaccatgaaatatggaa

SEQ ID NO: 78338 - DNA, 22 bp, Artificial Sequence
  Synthetic oligonucleotide; TTC chr11 5194482 5194503 5194499 5194504 +
ctcaccatgaaatatggaactg

SEQ ID NO: 78339 - DNA, 22 bp, Artificial Sequence
  Synthetic oligonucleotide; CTC chr11 5194485 5194506 5194502 5194507 +
accatgaaatatggaactggag

SEQ ID NO: 78340 - DNA, 22 bp, Artificial Sequence
  Synthetic oligonucleotide; CTG chr11 5194504 5194525 5194521 5194526 +
gagaactttcatgtctagctaa

SEQ ID NO: 78341 - DNA, 22 bp, Artificial Sequence
  Synthetic oligonucleotide; CTT chr11 5194512 5194533 5194529 5194534 +
tcatgtctagctaaaggtttgt

SEQ ID NO: 78342 - DNA, 22 bp, Artificial Sequence
  Synthetic oligonucleotide; TTT chr11 5194513 5194534 5194530 5194535 +
catgtctagctaaaggtttgta

SEQ ID NO: 78343 - DNA, 22 bp, Artificial Sequence
  Synthetic oligonucleotide; TTC chr11 5194514 5194535 5194531 5194536 +
atgtctagctaaaggtttgtaa

SEQ ID NO: 78344 - DNA, 22 bp, Artificial Sequence
  Synthetic oligonucleotide; CTA chr11 5194521 5194542 5194538 5194543 +
gctaaaggtttgtaaatgcaat

SEQ ID NO: 78345 - DNA, 22 bp, Artificial Sequence
  Synthetic oligonucleotide; CTA chr11 5194525 5194546 5194542 5194547 +
aaggtttgtaaatgcaatttat

SEQ ID NO: 78346 - DNA, 22 bp, Artificial Sequence
  Synthetic oligonucleotide; TTT chr11 5194532 5194553 5194549 5194554 +
gtaaatgcaatttattgcggca

SEQ ID NO: 78347 - DNA, 22 bp, Artificial Sequence
  Synthetic oligonucleotide; TTG chr11 5194533 5194554 5194550 5194555 +
taaatgcaatttattgcggcac

SEQ ID NO: 78348 - DNA, 22 bp, Artificial Sequence
  Synthetic oligonucleotide; TTT chr11 5194545 5194566 5194562 5194567 +
attgcggcactattcacaatag

SEQ ID NO: 78349 - DNA, 22 bp, Artificial Sequence
  Synthetic oligonucleotide; TTA chr11 5194546 5194567 5194563 5194568 +
ttgcggcactattcacaatagc

SEQ ID NO: 78350 - DNA, 22 bp, Artificial Sequence
  Synthetic oligonucleotide; TTG chr11 5194549 5194570 5194566 5194571 +
cggcactattcacaatagcaaa

SEQ ID NO: 78351 - DNA, 22 bp, Artificial Sequence
  Synthetic oligonucleotide; CTA chr11 5194557 5194578 5194574 5194579 +
ttcacaatagcaaagacttgga

SEQ ID NO: 78352 - DNA, 22 bp, Artificial Sequence
  Synthetic oligonucleotide; TTC chr11 5194560 5194581 5194577 5194582 +
acaatagcaaagacttggaacc

SEQ ID NO: 78353 - DNA, 22 bp, Artificial Sequence
  Synthetic oligonucleotide; CTT chr11 5194576 5194597 5194593 5194598 +
ggaaccaacccaaatgtccaac

SEQ ID NO: 78354 - DNA, 22 bp, Artificial Sequence
  Synthetic oligonucleotide; TTG chr11 5194577 5194598 5194594 5194599 +
gaaccaacccaaatgtccaaca

SEQ ID NO: 78355 - DNA, 22 bp, Artificial Sequence
  Synthetic oligonucleotide; CTG chr11 5194610 5194631 5194627 5194632 +
gattaagaaaatgtggcacata

SEQ ID NO: 78356 - DNA, 22 bp, Artificial Sequence
  Synthetic oligonucleotide; TTA chr11 5194615 5194636 5194632 5194637 +
agaaaatgtggcacatacacac

SEQ ID NO: 78357 - DNA, 22 bp, Artificial Sequence
  Synthetic oligonucleotide; CTA chr11 5194649 5194670 5194666 5194671 +
tgcagccataaaaaaggatgag

SEQ ID NO: 78358 - DNA, 22 bp, Artificial Sequence
  Synthetic oligonucleotide; TTC chr11 5194674 5194695 5194691 5194696 +
atgtcctttgtagggacatgga

SEQ ID NO: 78359 - DNA, 22 bp, Artificial Sequence
  Synthetic oligonucleotide; CTT chr11 5194682 5194703 5194699 5194704 +
tgtagggacatggatgaaattg

SEQ ID NO: 78360 - DNA, 22 bp, Artificial Sequence
  Synthetic oligonucleotide; TTT chr11 5194683 5194704 5194700 5194705 +
gtagggacatggatgaaattgg

SEQ ID NO: 78361 - DNA, 22 bp, Artificial Sequence
  Synthetic oligonucleotide; TTG chr11 5194684 5194705 5194701 5194706 +
tagggacatggatgaaattgga

SEQ ID NO: 78362 - DNA, 22 bp, Artificial Sequence
  Synthetic oligonucleotide; TTG chr11 5194704 5194725 5194721 5194726 +
gaaatcatcattctcagtaaac

SEQ ID NO: 78363 - DNA, 22 bp, Artificial Sequence
  Synthetic oligonucleotide; TTC chr11 5194717 5194738 5194734 5194739 +
tcagtaaactatcgcaaggacg

SEQ ID NO: 78364 - DNA, 22 bp, Artificial Sequence
  Synthetic oligonucleotide; CTC chr11 5194719 5194740 5194736 5194741 +
agtaaactatcgcaaggacgaa

SEQ ID NO: 78365 - DNA, 22 bp, Artificial Sequence
  Synthetic oligonucleotide; CTA chr11 5194728 5194749 5194745 5194750 +
tcgcaaggacgaaaaaccaaac

SEQ ID NO: 78366 - DNA, 22 bp, Artificial Sequence
  Synthetic oligonucleotide; CTG chr11 5194754 5194775 5194771 5194776 +
catgttctcactcataggtggg

SEQ ID NO: 78367 - DNA, 22 bp, Artificial Sequence
  Synthetic oligonucleotide; TTC chr11 5194761 5194782 5194778 5194783 +
tcactcataggtgggaattgaa

SEQ ID NO: 78368 - DNA, 22 bp, Artificial Sequence
  Synthetic oligonucleotide; CTC chr11 5194763 5194784 5194780 5194785 +
actcataggtgggaattgaaca

SEQ ID NO: 78369 - DNA, 22 bp, Artificial Sequence
  Synthetic oligonucleotide; CTC chr11 5194767 5194788 5194784 5194789 +
ataggtgggaattgaacaatga

SEQ ID NO: 78370 - DNA, 22 bp, Artificial Sequence
  Synthetic oligonucleotide; TTG chr11 5194781 5194802 5194798 5194803 +
aacaatgagaacacatggacac

SEQ ID NO: 78371 - DNA, 22 bp, Artificial Sequence
  Synthetic oligonucleotide; CTC chr11 5194824 5194845 5194841 5194846 +
tggggactgttgtggggtgggg

SEQ ID NO: 78372 - DNA, 22 bp, Artificial Sequence
  Synthetic oligonucleotide; CTG chr11 5194826 5194847 5194843 5194848 +
gggactgttgtggggtgggggg

SEQ ID NO: 78373 - DNA, 22 bp, Artificial Sequence
  Synthetic oligonucleotide; CTG chr11 5194833 5194854 5194850 5194855 +
ttgtggggtggggggagggagg

SEQ ID NO: 78374 - DNA, 22 bp, Artificial Sequence
  Synthetic oligonucleotide; TTG chr11 5194836 5194857 5194853 5194858 +
tggggtggggggagggaggagg

SEQ ID NO: 78375 - DNA, 22 bp, Artificial Sequence
  Synthetic oligonucleotide; TTA chr11 5194868 5194889 5194885 5194890 +
ggagatatacctaatgctaaat

SEQ ID NO: 78376 - DNA, 22 bp, Artificial Sequence
  Synthetic oligonucleotide; CTA chr11 5194881 5194902 5194898 5194903 +
atgctaaatgatgagttaatgg

SEQ ID NO: 78377 - DNA, 22 bp, Artificial Sequence
  Synthetic oligonucleotide; CTA chr11 5194887 5194908 5194904 5194909 +
aatgatgagttaatgggtgaag

SEQ ID NO: 78378 - DNA, 22 bp, Artificial Sequence
  Synthetic oligonucleotide; TTA chr11 5194899 5194920 5194916 5194921 +
atgggtgaagcacaccagcatg

SEQ ID NO: 78379 - DNA, 22 bp, Artificial Sequence
  Synthetic oligonucleotide; CTA chr11 5194944 5194965 5194961 5194966 +
acctgcacattgtgcacatgta

SEQ ID NO: 78380 - DNA, 22 bp, Artificial Sequence
  Synthetic oligonucleotide; CTG chr11 5194949 5194970 5194966 5194971 +
cacattgtgcacatgtacccta

SEQ ID NO: 78381 - DNA, 22 bp, Artificial Sequence
  Synthetic oligonucleotide; TTG chr11 5194956 5194977 5194973 5194978 +
tgcacatgtaccctaaaactta

SEQ ID NO: 78382 - DNA, 22 bp, Artificial Sequence
  Synthetic oligonucleotide; CTA chr11 5194971 5194992 5194988 5194993 +
aaacttaaagtataataataat

SEQ ID NO: 78383 - DNA, 22 bp, Artificial Sequence
  Synthetic oligonucleotide; CTT chr11 5194977 5194998 5194994 5194999 +
aaagtataataataataaaata

SEQ ID NO: 78384 - DNA, 22 bp, Artificial Sequence
  Synthetic oligonucleotide; TTA chr11 5194978 5194999 5194995 5195000 +
aagtataataataataaaataa

SEQ ID NO: 78385 - DNA, 22 bp, Artificial Sequence
  Synthetic oligonucleotide; TTT chr11 5195008 5195029 5195025 5195030 +
taaaaagagtatagtggggatt

SEQ ID NO: 78386 - DNA, 22 bp, Artificial Sequence
  Synthetic oligonucleotide; TTT chr11 5195009 5195030 5195026 5195031 +
aaaaagagtatagtggggattt

SEQ ID NO: 78387 - DNA, 22 bp, Artificial Sequence
  Synthetic oligonucleotide; TTA chr11 5195010 5195031 5195027 5195032 +
aaaagagtatagtggggatttc

SEQ ID NO: 78388 - DNA, 22 bp, Artificial Sequence
  Synthetic oligonucleotide; TTT chr11 5195031 5195052 5195048 5195053 +
ctatgaacacggtacaattagt

SEQ ID NO: 78389 - DNA, 22 bp, Artificial Sequence
  Synthetic oligonucleotide; TTC chr11 5195032 5195053 5195049 5195054 +
tatgaacacggtacaattagtt

SEQ ID NO: 78390 - DNA, 22 bp, Artificial Sequence
  Synthetic oligonucleotide; CTA chr11 5195034 5195055 5195051 5195056 +
tgaacacggtacaattagttat

SEQ ID NO: 78391 - DNA, 22 bp, Artificial Sequence
  Synthetic oligonucleotide; TTA chr11 5195051 5195072 5195068 5195073 +
gttatctggccagttactttga

SEQ ID NO: 78392 - DNA, 22 bp, Artificial Sequence
  Synthetic oligonucleotide; TTA chr11 5195055 5195076 5195072 5195077 +
tctggccagttactttgaaggc

SEQ ID NO: 78393 - DNA, 22 bp, Artificial Sequence
  Synthetic oligonucleotide; CTG chr11 5195059 5195080 5195076 5195081 +
gccagttactttgaaggctgat

SEQ ID NO: 78394 - DNA, 22 bp, Artificial Sequence
  Synthetic oligonucleotide; TTA chr11 5195067 5195088 5195084 5195089 +
ctttgaaggctgatcagaaaga

SEQ ID NO: 78395 - DNA, 22 bp, Artificial Sequence
  Synthetic oligonucleotide; CTT chr11 5195070 5195091 5195087 5195092 +
tgaaggctgatcagaaagaagc

SEQ ID NO: 78396 - DNA, 22 bp, Artificial Sequence
  Synthetic oligonucleotide; TTT chr11 5195071 5195092 5195088 5195093 +
gaaggctgatcagaaagaagcc

SEQ ID NO: 78397 - DNA, 22 bp, Artificial Sequence
  Synthetic oligonucleotide; TTG chr11 5195072 5195093 5195089 5195094 +
aaggctgatcagaaagaagcct

SEQ ID NO: 78398 - DNA, 22 bp, Artificial Sequence
  Synthetic oligonucleotide; CTG chr11 5195079 5195100 5195096 5195101 +
atcagaaagaagcctagctaat

SEQ ID NO: 78399 - DNA, 22 bp, Artificial Sequence
  Synthetic oligonucleotide; CTA chr11 5195095 5195116 5195112 5195117 +
gctaatccagtaagcgaatact

SEQ ID NO: 78400 - DNA, 22 bp, Artificial Sequence
  Synthetic oligonucleotide; CTA chr11 5195099 5195120 5195116 5195121 +
atccagtaagcgaatactcaaa

SEQ ID NO: 78401 - DNA, 22 bp, Artificial Sequence
  Synthetic oligonucleotide; CTC chr11 5195118 5195139 5195135 5195140 +
aaatgccaatatctattagtcc

SEQ ID NO: 78402 - DNA, 22 bp, Artificial Sequence
  Synthetic oligonucleotide; CTA chr11 5195133 5195154 5195150 5195155 +
ttagtcctttctcttgagacag

SEQ ID NO: 78403 - DNA, 22 bp, Artificial Sequence
  Synthetic oligonucleotide; TTA chr11 5195136 5195157 5195153 5195158 +
gtcctttctcttgagacagttt

SEQ ID NO: 78404 - DNA, 22 bp, Artificial Sequence
  Synthetic oligonucleotide; CTT chr11 5195142 5195163 5195159 5195164 +
tctcttgagacagtttatcatc

SEQ ID NO: 78405 - DNA, 22 bp, Artificial Sequence
  Synthetic oligonucleotide; TTT chr11 5195143 5195164 5195160 5195165 +
ctcttgagacagtttatcatca

SEQ ID NO: 78406 - DNA, 22 bp, Artificial Sequence
  Synthetic oligonucleotide; TTC chr11 5195144 5195165 5195161 5195166 +
tcttgagacagtttatcatcat

SEQ ID NO: 78407 - DNA, 22 bp, Artificial Sequence
  Synthetic oligonucleotide; CTC chr11 5195146 5195167 5195163 5195168 +
ttgagacagtttatcatcattc

SEQ ID NO: 78408 - DNA, 22 bp, Artificial Sequence
  Synthetic oligonucleotide; CTT chr11 5195148 5195169 5195165 5195170 +
gagacagtttatcatcattcaa

SEQ ID NO: 78409 - DNA, 22 bp, Artificial Sequence
  Synthetic oligonucleotide; TTG chr11 5195149 5195170 5195166 5195171 +
agacagtttatcatcattcaat

SEQ ID NO: 78410 - DNA, 22 bp, Artificial Sequence
  Synthetic oligonucleotide; TTT chr11 5195158 5195179 5195175 5195180 +
atcatcattcaatatgtattct

SEQ ID NO: 78411 - DNA, 22 bp, Artificial Sequence
  Synthetic oligonucleotide; TTA chr11 5195159 5195180 5195176 5195181 +
tcatcattcaatatgtattctt

SEQ ID NO: 78412 - DNA, 22 bp, Artificial Sequence
  Synthetic oligonucleotide; TTC chr11 5195168 5195189 5195185 5195190 +
aatatgtattcttttgcataat

SEQ ID NO: 78413 - DNA, 22 bp, Artificial Sequence
  Synthetic oligonucleotide; TTC chr11 5195179 5195200 5195196 5195201 +
ttttgcataatctctctgtttc

SEQ ID NO: 78414 - DNA, 22 bp, Artificial Sequence
  Synthetic oligonucleotide; CTT chr11 5195181 5195202 5195198 5195203 +
ttgcataatctctctgtttcat

SEQ ID NO: 78415 - DNA, 22 bp, Artificial Sequence
  Synthetic oligonucleotide; TTT chr11 5195182 5195203 5195199 5195204 +
tgcataatctctctgtttcata

SEQ ID NO: 78416 - DNA, 22 bp, Artificial Sequence
  Synthetic oligonucleotide; TTT chr11 5195183 5195204 5195200 5195205 +
gcataatctctctgtttcatat

SEQ ID NO: 78417 - DNA, 22 bp, Artificial Sequence
  Synthetic oligonucleotide; TTG chr11 5195184 5195205 5195201 5195206 +
cataatctctctgtttcatata

SEQ ID NO: 78418 - DNA, 22 bp, Artificial Sequence
  Synthetic oligonucleotide; CTC chr11 5195193 5195214 5195210 5195215 +
tctgtttcatatattacacctt

SEQ ID NO: 78419 - DNA, 22 bp, Artificial Sequence
  Synthetic oligonucleotide; CTC chr11 5195195 5195216 5195212 5195217 +
tgtttcatatattacaccttag

SEQ ID NO: 78420 - DNA, 22 bp, Artificial Sequence
  Synthetic oligonucleotide; CTG chr11 5195197 5195218 5195214 5195219 +
tttcatatattacaccttagtc

SEQ ID NO: 78421 - DNA, 22 bp, Artificial Sequence
  Synthetic oligonucleotide; TTT chr11 5195200 5195221 5195217 5195222 +
catatattacaccttagtcctg

SEQ ID NO: 78422 - DNA, 22 bp, Artificial Sequence
  Synthetic oligonucleotide; TTC chr11 5195201 5195222 5195218 5195223 +
atatattacaccttagtcctgg

SEQ ID NO: 78423 - DNA, 22 bp, Artificial Sequence
  Synthetic oligonucleotide; TTA chr11 5195209 5195230 5195226 5195231 +
caccttagtcctggcatccttt

SEQ ID NO: 78424 - DNA, 22 bp, Artificial Sequence
  Synthetic oligonucleotide; CTT chr11 5195215 5195236 5195232 5195237 +
agtcctggcatcctttgcactg

SEQ ID NO: 78425 - DNA, 22 bp, Artificial Sequence
  Synthetic oligonucleotide; TTA chr11 5195216 5195237 5195233 5195238 +
gtcctggcatcctttgcactga

SEQ ID NO: 78426 - DNA, 22 bp, Artificial Sequence
  Synthetic oligonucleotide; CTG chr11 5195222 5195243 5195239 5195244 +
gcatcctttgcactgaatttcc

SEQ ID NO: 78427 - DNA, 22 bp, Artificial Sequence
  Synthetic oligonucleotide; CTT chr11 5195230 5195251 5195247 5195252 +
tgcactgaatttcccagtgtct

SEQ ID NO: 78428 - DNA, 22 bp, Artificial Sequence
  Synthetic oligonucleotide; TTT chr11 5195231 5195252 5195248 5195253 +
gcactgaatttcccagtgtctg

SEQ ID NO: 78429 - DNA, 22 bp, Artificial Sequence
  Synthetic oligonucleotide; TTG chr11 5195232 5195253 5195249 5195254 +
cactgaatttcccagtgtctgg

SEQ ID NO: 78430 - DNA, 22 bp, Artificial Sequence
  Synthetic oligonucleotide; CTG chr11 5195237 5195258 5195254 5195259 +
aatttcccagtgtctggatcat

SEQ ID NO: 78431 - DNA, 22 bp, Artificial Sequence
  Synthetic oligonucleotide; TTT chr11 5195242 5195263 5195259 5195264 +
cccagtgtctggatcatcattg

SEQ ID NO: 78432 - DNA, 22 bp, Artificial Sequence
  Synthetic oligonucleotide; TTC chr11 5195243 5195264 5195260 5195265 +
ccagtgtctggatcatcattga

SEQ ID NO: 78433 - DNA, 22 bp, Artificial Sequence
  Synthetic oligonucleotide; CTG chr11 5195253 5195274 5195270 5195275 +
gatcatcattgatttggttact

SEQ ID NO: 78434 - DNA, 22 bp, Artificial Sequence
  Synthetic oligonucleotide; TTG chr11 5195264 5195285 5195281 5195286 +
atttggttactacagacactaa

SEQ ID NO: 78435 - DNA, 22 bp, Artificial Sequence
  Synthetic oligonucleotide; TTT chr11 5195268 5195289 5195285 5195290 +
ggttactacagacactaatcat

SEQ ID NO: 78436 - DNA, 22 bp, Artificial Sequence
  Synthetic oligonucleotide; TTG chr11 5195269 5195290 5195286 5195291 +
gttactacagacactaatcatt

SEQ ID NO: 78437 - DNA, 22 bp, Artificial Sequence
  Synthetic oligonucleotide; TTA chr11 5195273 5195294 5195290 5195295 +
ctacagacactaatcattttgc

SEQ ID NO: 78438 - DNA, 22 bp, Artificial Sequence
  Synthetic oligonucleotide; CTA chr11 5195276 5195297 5195293 5195298 +
cagacactaatcattttgccag

SEQ ID NO: 78439 - DNA, 22 bp, Artificial Sequence
  Synthetic oligonucleotide; CTA chr11 5195285 5195306 5195302 5195307 +
atcattttgccagaactaaaga

SEQ ID NO: 78440 - DNA, 22 bp, Artificial Sequence
  Synthetic oligonucleotide; TTT chr11 5195292 5195313 5195309 5195314 +
tgccagaactaaagagaaatga

SEQ ID NO: 78441 - DNA, 22 bp, Artificial Sequence
  Synthetic oligonucleotide; TTT chr11 5195293 5195314 5195310 5195315 +
gccagaactaaagagaaatgag

SEQ ID NO: 78442 - DNA, 22 bp, Artificial Sequence
  Synthetic oligonucleotide; TTG chr11 5195294 5195315 5195311 5195316 +
ccagaactaaagagaaatgagt

SEQ ID NO: 78443 - DNA, 22 bp, Artificial Sequence
  Synthetic oligonucleotide; CTA chr11 5195303 5195324 5195320 5195325 +
aagagaaatgagtacctggcta

SEQ ID NO: 78444 - DNA, 22 bp, Artificial Sequence
  Synthetic oligonucleotide; CTG chr11 5195321 5195342 5195338 5195343 +
gctatcttttaggcaaccttaa

SEQ ID NO: 78445 - DNA, 22 bp, Artificial Sequence
  Synthetic oligonucleotide; CTA chr11 5195325 5195346 5195342 5195347 +
tcttttaggcaaccttaaacag

SEQ ID NO: 78446 - DNA, 22 bp, Artificial Sequence
  Synthetic oligonucleotide; CTT chr11 5195329 5195350 5195346 5195351 +
ttaggcaaccttaaacaggtat

SEQ ID NO: 78447 - DNA, 22 bp, Artificial Sequence
  Synthetic oligonucleotide; TTT chr11 5195330 5195351 5195347 5195352 +
taggcaaccttaaacaggtatt

SEQ ID NO: 78448 - DNA, 22 bp, Artificial Sequence
  Synthetic oligonucleotide; TTT chr11 5195331 5195352 5195348 5195353 +
aggcaaccttaaacaggtattc

SEQ ID NO: 78449 - DNA, 22 bp, Artificial Sequence
  Synthetic oligonucleotide; TTA chr11 5195332 5195353 5195349 5195354 +
ggcaaccttaaacaggtattca

SEQ ID NO: 78450 - DNA, 22 bp, Artificial Sequence
  Synthetic oligonucleotide; CTT chr11 5195341 5195362 5195358 5195363 +
aaacaggtattcaccttttcta

SEQ ID NO: 78451 - DNA, 22 bp, Artificial Sequence
  Synthetic oligonucleotide; TTA chr11 5195342 5195363 5195359 5195364 +
aacaggtattcaccttttctac

SEQ ID NO: 78452 - DNA, 22 bp, Artificial Sequence
  Synthetic oligonucleotide; TTC chr11 5195353 5195374 5195370 5195375 +
accttttctaccatttttagcc

SEQ ID NO: 78453 - DNA, 22 bp, Artificial Sequence
  Synthetic oligonucleotide; CTT chr11 5195358 5195379 5195375 5195380 +
ttctaccatttttagccctacc

SEQ ID NO: 78454 - DNA, 22 bp, Artificial Sequence
  Synthetic oligonucleotide; TTT chr11 5195359 5195380 5195376 5195381 +
tctaccatttttagccctaccc

SEQ ID NO: 78455 - DNA, 22 bp, Artificial Sequence
  Synthetic oligonucleotide; TTT chr11 5195360 5195381 5195377 5195382 +
ctaccatttttagccctacccc

SEQ ID NO: 78456 - DNA, 22 bp, Artificial Sequence
  Synthetic oligonucleotide; TTC chr11 5195361 5195382 5195378 5195383 +
taccatttttagccctacccct

SEQ ID NO: 78457 - DNA, 22 bp, Artificial Sequence
  Synthetic oligonucleotide; CTA chr11 5195363 5195384 5195380 5195385 +
ccatttttagccctacccctca

SEQ ID NO: 78458 - DNA, 22 bp, Artificial Sequence
  Synthetic oligonucleotide; TTT chr11 5195369 5195390 5195386 5195391 +
ttagccctacccctcacgaatg

SEQ ID NO: 78459 - DNA, 22 bp, Artificial Sequence
  Synthetic oligonucleotide; TTT chr11 5195370 5195391 5195387 5195392 +
tagccctacccctcacgaatgc

SEQ ID NO: 78460 - DNA, 22 bp, Artificial Sequence
  Synthetic oligonucleotide; TTT chr11 5195371 5195392 5195388 5195393 +
agccctacccctcacgaatgct

SEQ ID NO: 78461 - DNA, 22 bp, Artificial Sequence
  Synthetic oligonucleotide; TTA chr11 5195372 5195393 5195389 5195394 +
gccctacccctcacgaatgctt

SEQ ID NO: 78462 - DNA, 22 bp, Artificial Sequence
  Synthetic oligonucleotide; CTA chr11 5195378 5195399 5195395 5195400 +
cccctcacgaatgctttataag

SEQ ID NO: 78463 - DNA, 22 bp, Artificial Sequence
  Synthetic oligonucleotide; CTC chr11 5195384 5195405 5195401 5195406 +
acgaatgctttataagtaattt

SEQ ID NO: 78464 - DNA, 22 bp, Artificial Sequence
  Synthetic oligonucleotide; CTT chr11 5195394 5195415 5195411 5195416 +
tataagtaatttctgtgttttt

SEQ ID NO: 78465 - DNA, 22 bp, Artificial Sequence
  Synthetic oligonucleotide; TTT chr11 5195395 5195416 5195412 5195417 +
ataagtaatttctgtgtttttc

SEQ ID NO: 78466 - DNA, 22 bp, Artificial Sequence
  Synthetic oligonucleotide; TTA chr11 5195396 5195417 5195413 5195418 +
taagtaatttctgtgtttttcc

SEQ ID NO: 78467 - DNA, 22 bp, Artificial Sequence
  Synthetic oligonucleotide; TTT chr11 5195406 5195427 5195423 5195428 +
ctgtgtttttccagaaaatgct

SEQ ID NO: 78468 - DNA, 22 bp, Artificial Sequence
  Synthetic oligonucleotide; TTC chr11 5195407 5195428 5195424 5195429 +
tgtgtttttccagaaaatgctc

SEQ ID NO: 78469 - DNA, 22 bp, Artificial Sequence
  Synthetic oligonucleotide; CTG chr11 5195409 5195430 5195426 5195431 +
tgtttttccagaaaatgctctt

SEQ ID NO: 78470 - DNA, 22 bp, Artificial Sequence
  Synthetic oligonucleotide; TTT chr11 5195414 5195435 5195431 5195436 +
ttccagaaaatgctctttgcag

SEQ ID NO: 78471 - DNA, 22 bp, Artificial Sequence
  Synthetic oligonucleotide; TTT chr11 5195415 5195436 5195432 5195437 +
tccagaaaatgctctttgcaga

SEQ ID NO: 78472 - DNA, 22 bp, Artificial Sequence
  Synthetic oligonucleotide; TTT chr11 5195416 5195437 5195433 5195438 +
ccagaaaatgctctttgcagat

SEQ ID NO: 78473 - DNA, 22 bp, Artificial Sequence
  Synthetic oligonucleotide; TTC chr11 5195417 5195438 5195434 5195439 +
cagaaaatgctctttgcagata

SEQ ID NO: 78474 - DNA, 22 bp, Artificial Sequence
  Synthetic oligonucleotide; CTC chr11 5195429 5195450 5195446 5195451 +
tttgcagataacgttttttctc

SEQ ID NO: 78475 - DNA, 22 bp, Artificial Sequence
  Synthetic oligonucleotide; CTT chr11 5195431 5195452 5195448 5195453 +
tgcagataacgttttttctcat

SEQ ID NO: 78476 - DNA, 22 bp, Artificial Sequence
  Synthetic oligonucleotide; TTT chr11 5195432 5195453 5195449 5195454 +
gcagataacgttttttctcatt

SEQ ID NO: 78477 - DNA, 22 bp, Artificial Sequence
  Synthetic oligonucleotide; TTG chr11 5195433 5195454 5195450 5195455 +
cagataacgttttttctcattg

SEQ ID NO: 78478 - DNA, 22 bp, Artificial Sequence
  Synthetic oligonucleotide; TTT chr11 5195445 5195466 5195462 5195467 +
tttctcattggtatccttttct

SEQ ID NO: 78479 - DNA, 22 bp, Artificial Sequence
  Synthetic oligonucleotide; TTT chr11 5195446 5195467 5195463 5195468 +
ttctcattggtatccttttctg

SEQ ID NO: 78480 - DNA, 22 bp, Artificial Sequence
  Synthetic oligonucleotide; TTT chr11 5195447 5195468 5195464 5195469 +
tctcattggtatccttttctgt

SEQ ID NO: 78481 - DNA, 22 bp, Artificial Sequence
  Synthetic oligonucleotide; TTT chr11 5195448 5195469 5195465 5195470 +
ctcattggtatccttttctgta

SEQ ID NO: 78482 - DNA, 22 bp, Artificial Sequence
  Synthetic oligonucleotide; TTC chr11 5195449 5195470 5195466 5195471 +
tcattggtatccttttctgtag

SEQ ID NO: 78483 - DNA, 22 bp, Artificial Sequence
  Synthetic oligonucleotide; CTC chr11 5195451 5195472 5195468 5195473 +
attggtatccttttctgtagac

SEQ ID NO: 78484 - DNA, 22 bp, Artificial Sequence
  Synthetic oligonucleotide; TTG chr11 5195455 5195476 5195472 5195477 +
gtatccttttctgtagacatat

SEQ ID NO: 78485 - DNA, 22 bp, Artificial Sequence
  Synthetic oligonucleotide; CTT chr11 5195463 5195484 5195480 5195485 +
ttctgtagacatatagatttca

SEQ ID NO: 78486 - DNA, 22 bp, Artificial Sequence
  Synthetic oligonucleotide; TTT chr11 5195464 5195485 5195481 5195486 +
tctgtagacatatagatttcag

SEQ ID NO: 78487 - DNA, 22 bp, Artificial Sequence
  Synthetic oligonucleotide; TTT chr11 5195465 5195486 5195482 5195487 +
ctgtagacatatagatttcaga

SEQ ID NO: 78488 - DNA, 22 bp, Artificial Sequence
  Synthetic oligonucleotide; TTC chr11 5195466 5195487 5195483 5195488 +
tgtagacatatagatttcagat

SEQ ID NO: 78489 - DNA, 22 bp, Artificial Sequence
  Synthetic oligonucleotide; CTG chr11 5195468 5195489 5195485 5195490 +
tagacatatagatttcagatta

SEQ ID NO: 78490 - DNA, 22 bp, Artificial Sequence
  Synthetic oligonucleotide; TTT chr11 5195483 5195504 5195500 5195505 +
cagattatcctgttctgttttt

SEQ ID NO: 78491 - DNA, 22 bp, Artificial Sequence
  Synthetic oligonucleotide; TTC chr11 5195484 5195505 5195501 5195506 +
agattatcctgttctgtttttt

SEQ ID NO: 78492 - DNA, 22 bp, Artificial Sequence
  Synthetic oligonucleotide; TTA chr11 5195490 5195511 5195507 5195512 +
tcctgttctgttttttaaaaaa

SEQ ID NO: 78493 - DNA, 22 bp, Artificial Sequence
  Synthetic oligonucleotide; CTG chr11 5195495 5195516 5195512 5195517 +
ttctgttttttaaaaaatcata

SEQ ID NO: 78494 - DNA, 22 bp, Artificial Sequence
  Synthetic oligonucleotide; TTC chr11 5195498 5195519 5195515 5195520 +
tgttttttaaaaaatcatattt

SEQ ID NO: 78495 - DNA, 22 bp, Artificial Sequence
  Synthetic oligonucleotide; CTG chr11 5195500 5195521 5195517 5195522 +
ttttttaaaaaatcatatttaa

SEQ ID NO: 78496 - DNA, 22 bp, Artificial Sequence
  Synthetic oligonucleotide; TTT chr11 5195503 5195524 5195520 5195525 +
tttaaaaaatcatatttaaatg

SEQ ID NO: 78497 - DNA, 22 bp, Artificial Sequence
  Synthetic oligonucleotide; TTT chr11 5195504 5195525 5195521 5195526 +
ttaaaaaatcatatttaaatgt

SEQ ID NO: 78498 - DNA, 22 bp, Artificial Sequence
  Synthetic oligonucleotide; TTT chr11 5195505 5195526 5195522 5195527 +
taaaaaatcatatttaaatgta

SEQ ID NO: 78499 - DNA, 22 bp, Artificial Sequence
  Synthetic oligonucleotide; TTT chr11 5195506 5195527 5195523 5195528 +
aaaaaatcatatttaaatgtat

SEQ ID NO: 78500 - DNA, 22 bp, Artificial Sequence
  Synthetic oligonucleotide; TTA chr11 5195507 5195528 5195524 5195529 +
aaaaatcatatttaaatgtata

SEQ ID NO: 78501 - DNA, 22 bp, Artificial Sequence
  Synthetic oligonucleotide; TTT chr11 5195520 5195541 5195537 5195542 +
aaatgtatatacttatcaattt

SEQ ID NO: 78502 - DNA, 22 bp, Artificial Sequence
  Synthetic oligonucleotide; TTA chr11 5195521 5195542 5195538 5195543 +
aatgtatatacttatcaatttg

SEQ ID NO: 78503 - DNA, 22 bp, Artificial Sequence
  Synthetic oligonucleotide; CTT chr11 5195534 5195555 5195551 5195556 +
atcaatttgttcatacatattg

SEQ ID NO: 78504 - DNA, 22 bp, Artificial Sequence
  Synthetic oligonucleotide; TTA chr11 5195535 5195556 5195552 5195557 +
tcaatttgttcatacatattgt

SEQ ID NO: 78505 - DNA, 22 bp, Artificial Sequence
  Synthetic oligonucleotide; TTT chr11 5195542 5195563 5195559 5195564 +
gttcatacatattgtgctattt

SEQ ID NO: 78506 - DNA, 22 bp, Artificial Sequence
  Synthetic oligonucleotide; TTG chr11 5195543 5195564 5195560 5195565 +
ttcatacatattgtgctatttt

SEQ ID NO: 78507 - DNA, 22 bp, Artificial Sequence
  Synthetic oligonucleotide; TTC chr11 5195546 5195567 5195563 5195568 +
atacatattgtgctattttctt

SEQ ID NO: 78508 - DNA, 22 bp, Artificial Sequence
  Synthetic oligonucleotide; TTG chr11 5195556 5195577 5195573 5195578 +
tgctattttcttcacagtgtct

SEQ ID NO: 78509 - DNA, 22 bp, Artificial Sequence
  Synthetic oligonucleotide; CTA chr11 5195561 5195582 5195578 5195583 +
ttttcttcacagtgtctctgtg

SEQ ID NO: 78510 - DNA, 22 bp, Artificial Sequence
  Synthetic oligonucleotide; TTT chr11 5195564 5195585 5195581 5195586 +
tcttcacagtgtctctgtgtac

SEQ ID NO: 78511 - DNA, 22 bp, Artificial Sequence
  Synthetic oligonucleotide; TTT chr11 5195565 5195586 5195582 5195587 +
cttcacagtgtctctgtgtaca

SEQ ID NO: 78512 - DNA, 22 bp, Artificial Sequence
  Synthetic oligonucleotide; TTC chr11 5195566 5195587 5195583 5195588 +
ttcacagtgtctctgtgtacat

SEQ ID NO: 78513 - DNA, 22 bp, Artificial Sequence
  Synthetic oligonucleotide; CTT chr11 5195568 5195589 5195585 5195590 +
cacagtgtctctgtgtacatct

SEQ ID NO: 78514 - DNA, 22 bp, Artificial Sequence
  Synthetic oligonucleotide; TTC chr11 5195569 5195590 5195586 5195591 +
acagtgtctctgtgtacatcta

SEQ ID NO: 78515 - DNA, 22 bp, Artificial Sequence
  Synthetic oligonucleotide; CTC chr11 5195579 5195600 5195596 5195601 +
tgtgtacatctatagctttagt

SEQ ID NO: 78516 - DNA, 22 bp, Artificial Sequence
  Synthetic oligonucleotide; CTG chr11 5195581 5195602 5195598 5195603 +
tgtacatctatagctttagtgg

SEQ ID NO: 78517 - DNA, 22 bp, Artificial Sequence
  Synthetic oligonucleotide; CTA chr11 5195591 5195612 5195608 5195613 +
tagctttagtggattagagaaa

SEQ ID NO: 78518 - DNA, 22 bp, Artificial Sequence
  Synthetic oligonucleotide; CTT chr11 5195597 5195618 5195614 5195619 +
tagtggattagagaaagtagca

SEQ ID NO: 78519 - DNA, 22 bp, Artificial Sequence
  Synthetic oligonucleotide; TTT chr11 5195598 5195619 5195615 5195620 +
agtggattagagaaagtagcag

SEQ ID NO: 78520 - DNA, 22 bp, Artificial Sequence
  Synthetic oligonucleotide; TTA chr11 5195599 5195620 5195616 5195621 +
gtggattagagaaagtagcaga

SEQ ID NO: 78521 - DNA, 22 bp, Artificial Sequence
  Synthetic oligonucleotide; TTA chr11 5195607 5195628 5195624 5195629 +
gagaaagtagcagaaatgaaca

SEQ ID NO: 78522 - DNA, 22 bp, Artificial Sequence
  Synthetic oligonucleotide; TTC chr11 5195636 5195657 5195653 5195658 +
agtctgccaggtttatatgtaa

SEQ ID NO: 78523 - DNA, 22 bp, Artificial Sequence
  Synthetic oligonucleotide; CTG chr11 5195642 5195663 5195659 5195664 +
ccaggtttatatgtaaattgac

SEQ ID NO: 78524 - DNA, 22 bp, Artificial Sequence
  Synthetic oligonucleotide; TTT chr11 5195650 5195671 5195667 5195672 +
atatgtaaattgacactttcac

SEQ ID NO: 78525 - DNA, 22 bp, Artificial Sequence
  Synthetic oligonucleotide; TTA chr11 5195651 5195672 5195668 5195673 +
tatgtaaattgacactttcact

SEQ ID NO: 78526 - DNA, 22 bp, Artificial Sequence
  Synthetic oligonucleotide; TTG chr11 5195662 5195683 5195679 5195684 +
acactttcactcatatttctta

SEQ ID NO: 78527 - DNA, 22 bp, Artificial Sequence
  Synthetic oligonucleotide; CTT chr11 5195668 5195689 5195685 5195690 +
tcactcatatttcttaaattta

SEQ ID NO: 78528 - DNA, 22 bp, Artificial Sequence
  Synthetic oligonucleotide; TTT chr11 5195669 5195690 5195686 5195691 +
cactcatatttcttaaatttat

SEQ ID NO: 78529 - DNA, 22 bp, Artificial Sequence
  Synthetic oligonucleotide; TTC chr11 5195670 5195691 5195687 5195692 +
actcatatttcttaaatttata

SEQ ID NO: 78530 - DNA, 22 bp, Artificial Sequence
  Synthetic oligonucleotide; CTC chr11 5195674 5195695 5195691 5195696 +
atatttcttaaatttatatttt

SEQ ID NO: 78531 - DNA, 22 bp, Artificial Sequence
  Synthetic oligonucleotide; TTT chr11 5195680 5195701 5195697 5195702 +
cttaaatttatattttattatt

SEQ ID NO: 78532 - DNA, 22 bp, Artificial Sequence
  Synthetic oligonucleotide; TTC chr11 5195681 5195702 5195698 5195703 +
ttaaatttatattttattattc

SEQ ID NO: 78533 - DNA, 22 bp, Artificial Sequence
  Synthetic oligonucleotide; CTT chr11 5195683 5195704 5195700 5195705 +
aaatttatattttattattcag

SEQ ID NO: 78534 - DNA, 22 bp, Artificial Sequence
  Synthetic oligonucleotide; TTA chr11 5195684 5195705 5195701 5195706 +
aatttatattttattattcagt

SEQ ID NO: 78535 - DNA, 22 bp, Artificial Sequence
  Synthetic oligonucleotide; TTT chr11 5195689 5195710 5195706 5195711 +
atattttattattcagtacaga

SEQ ID NO: 78536 - DNA, 22 bp, Artificial Sequence
  Synthetic oligonucleotide; TTA chr11 5195690 5195711 5195707 5195712 +
tattttattattcagtacagaa

SEQ ID NO: 78537 - DNA, 22 bp, Artificial Sequence
  Synthetic oligonucleotide; TTT chr11 5195695 5195716 5195712 5195717 +
tattattcagtacagaaaaata

SEQ ID NO: 78538 - DNA, 22 bp, Artificial Sequence
  Synthetic oligonucleotide; TTT chr11 5195696 5195717 5195713 5195718 +
attattcagtacagaaaaatac

SEQ ID NO: 78539 - DNA, 22 bp, Artificial Sequence
  Synthetic oligonucleotide; TTA chr11 5195697 5195718 5195714 5195719 +
ttattcagtacagaaaaataca

SEQ ID NO: 78540 - DNA, 22 bp, Artificial Sequence
  Synthetic oligonucleotide; TTA chr11 5195700 5195721 5195717 5195722 +
ttcagtacagaaaaatacataa

SEQ ID NO: 78541 - DNA, 22 bp, Artificial Sequence
  Synthetic oligonucleotide; TTC chr11 5195703 5195724 5195720 5195725 +
agtacagaaaaatacataaata

SEQ ID NO: 78542 - DNA, 22 bp, Artificial Sequence
  Synthetic oligonucleotide; TTT chr11 5195737 5195758 5195754 5195759 +
gttaaattgacacaaaattagc

SEQ ID NO: 78543 - DNA, 22 bp, Artificial Sequence
  Synthetic oligonucleotide; TTG chr11 5195738 5195759 5195755 5195760 +
ttaaattgacacaaaattagca

SEQ ID NO: 78544 - DNA, 22 bp, Artificial Sequence
  Synthetic oligonucleotide; TTA chr11 5195741 5195762 5195758 5195763 +
aattgacacaaaattagcaaaa

SEQ ID NO: 78545 - DNA, 22 bp, Artificial Sequence
  Synthetic oligonucleotide; TTG chr11 5195746 5195767 5195763 5195768 +
acacaaaattagcaaaagcttt

SEQ ID NO: 78546 - DNA, 22 bp, Artificial Sequence
  Synthetic oligonucleotide; TTA chr11 5195757 5195778 5195774 5195779 +
gcaaaagcttttaacaaacact

SEQ ID NO: 78547 - DNA, 22 bp, Artificial Sequence
  Synthetic oligonucleotide; CTT chr11 5195767 5195788 5195784 5195789 +
ttaacaaacactcagaccaaga

SEQ ID NO: 78548 - DNA, 22 bp, Artificial Sequence
  Synthetic oligonucleotide; TTT chr11 5195768 5195789 5195785 5195790 +
taacaaacactcagaccaagaa

SEQ ID NO: 78549 - DNA, 22 bp, Artificial Sequence
  Synthetic oligonucleotide; TTT chr11 5195769 5195790 5195786 5195791 +
aacaaacactcagaccaagaaa

SEQ ID NO: 78550 - DNA, 22 bp, Artificial Sequence
  Synthetic oligonucleotide; TTA chr11 5195770 5195791 5195787 5195792 +
acaaacactcagaccaagaaag

SEQ ID NO: 78551 - DNA, 22 bp, Artificial Sequence
  Synthetic oligonucleotide; CTC chr11 5195780 5195801 5195797 5195802 +
agaccaagaaagagaacattac

SEQ ID NO: 78552 - DNA, 22 bp, Artificial Sequence
  Synthetic oligonucleotide; TTA chr11 5195801 5195822 5195818 5195823 +
ccagcatctcaaaagctaaaca

SEQ ID NO: 78553 - DNA, 22 bp, Artificial Sequence
  Synthetic oligonucleotide; CTC chr11 5195811 5195832 5195828 5195833 +
aaaagctaaacaccgattgatt

SEQ ID NO: 78554 - DNA, 22 bp, Artificial Sequence
  Synthetic oligonucleotide; CTA chr11 5195819 5195840 5195836 5195841 +
aacaccgattgattcctcagtt

SEQ ID NO: 78555 - DNA, 22 bp, Artificial Sequence
  Synthetic oligonucleotide; TTG chr11 5195830 5195851 5195847 5195852 +
attcctcagttctggctgcaac

SEQ ID NO: 78556 - DNA, 22 bp, Artificial Sequence
  Synthetic oligonucleotide; TTC chr11 5195834 5195855 5195851 5195856 +
ctcagttctggctgcaacctga

SEQ ID NO: 78557 - DNA, 22 bp, Artificial Sequence
  Synthetic oligonucleotide; CTC chr11 5195837 5195858 5195854 5195859 +
agttctggctgcaacctgaaag

SEQ ID NO: 78558 - DNA, 22 bp, Artificial Sequence
  Synthetic oligonucleotide; TTC chr11 5195842 5195863 5195859 5195864 +
tggctgcaacctgaaagcctgc

SEQ ID NO: 78559 - DNA, 22 bp, Artificial Sequence
  Synthetic oligonucleotide; CTG chr11 5195844 5195865 5195861 5195866 +
gctgcaacctgaaagcctgcat

SEQ ID NO: 78560 - DNA, 22 bp, Artificial Sequence
  Synthetic oligonucleotide; CTG chr11 5195848 5195869 5195865 5195870 +
caacctgaaagcctgcattttc

SEQ ID NO: 78561 - DNA, 22 bp, Artificial Sequence
  Synthetic oligonucleotide; CTG chr11 5195855 5195876 5195872 5195877 +
aaagcctgcattttctatgtgc

SEQ ID NO: 78562 - DNA, 22 bp, Artificial Sequence
  Synthetic oligonucleotide; CTG chr11 5195863 5195884 5195880 5195885 +
cattttctatgtgccattacat

SEQ ID NO: 78563 - DNA, 22 bp, Artificial Sequence
  Synthetic oligonucleotide; TTT chr11 5195868 5195889 5195885 5195890 +
tctatgtgccattacatggtgc

SEQ ID NO: 78564 - DNA, 22 bp, Artificial Sequence
  Synthetic oligonucleotide; TTT chr11 5195869 5195890 5195886 5195891 +
ctatgtgccattacatggtgcc

SEQ ID NO: 78565 - DNA, 22 bp, Artificial Sequence
  Synthetic oligonucleotide; TTC chr11 5195870 5195891 5195887 5195892 +
tatgtgccattacatggtgcca

SEQ ID NO: 78566 - DNA, 22 bp, Artificial Sequence
  Synthetic oligonucleotide; CTA chr11 5195872 5195893 5195889 5195894 +
tgtgccattacatggtgccaag

SEQ ID NO: 78567 - DNA, 22 bp, Artificial Sequence
  Synthetic oligonucleotide; TTA chr11 5195882 5195903 5195899 5195904 +
catggtgccaagactgcagggg

SEQ ID NO: 78568 - DNA, 22 bp, Artificial Sequence
  Synthetic oligonucleotide; CTG chr11 5195898 5195919 5195915 5195920 +
caggggcagaaaccacactttt

SEQ ID NO: 78569 - DNA, 22 bp, Artificial Sequence
  Synthetic oligonucleotide; CTT chr11 5195918 5195939 5195935 5195940 +
ttactggaaaagctttaggaca

SEQ ID NO: 78570 - DNA, 22 bp, Artificial Sequence
  Synthetic oligonucleotide; TTT chr11 5195919 5195940 5195936 5195941 +
tactggaaaagctttaggacat

SEQ ID NO: 78571 - DNA, 22 bp, Artificial Sequence
  Synthetic oligonucleotide; TTT chr11 5195920 5195941 5195937 5195942 +
actggaaaagctttaggacatc

SEQ ID NO: 78572 - DNA, 22 bp, Artificial Sequence
  Synthetic oligonucleotide; TTA chr11 5195921 5195942 5195938 5195943 +
ctggaaaagctttaggacatcg

SEQ ID NO: 78573 - DNA, 22 bp, Artificial Sequence
  Synthetic oligonucleotide; CTG chr11 5195924 5195945 5195941 5195946 +
gaaaagctttaggacatcgact

SEQ ID NO: 78574 - DNA, 22 bp, Artificial Sequence
  Synthetic oligonucleotide; CTT chr11 5195933 5195954 5195950 5195955 +
taggacatcgactcctactgca

SEQ ID NO: 78575 - DNA, 22 bp, Artificial Sequence
  Synthetic oligonucleotide; TTT chr11 5195934 5195955 5195951 5195956 +
aggacatcgactcctactgcag

SEQ ID NO: 78576 - DNA, 22 bp, Artificial Sequence
  Synthetic oligonucleotide; TTA chr11 5195935 5195956 5195952 5195957 +
ggacatcgactcctactgcagg

SEQ ID NO: 78577 - DNA, 22 bp, Artificial Sequence
  Synthetic oligonucleotide; CTC chr11 5195947 5195968 5195964 5195969 +
ctactgcaggggtgttcttggc

SEQ ID NO: 78578 - DNA, 22 bp, Artificial Sequence
  Synthetic oligonucleotide; CTA chr11 5195950 5195971 5195967 5195972 +
ctgcaggggtgttcttggctag

SEQ ID NO: 78579 - DNA, 22 bp, Artificial Sequence
  Synthetic oligonucleotide; CTG chr11 5195953 5195974 5195970 5195975 +
caggggtgttcttggctaggtt

SEQ ID NO: 78580 - DNA, 22 bp, Artificial Sequence
  Synthetic oligonucleotide; TTC chr11 5195964 5195985 5195981 5195986 +
ttggctaggttggcattaattt

SEQ ID NO: 78581 - DNA, 22 bp, Artificial Sequence
  Synthetic oligonucleotide; CTT chr11 5195966 5195987 5195983 5195988 +
ggctaggttggcattaattttt

SEQ ID NO: 78582 - DNA, 22 bp, Artificial Sequence
  Synthetic oligonucleotide; TTG chr11 5195967 5195988 5195984 5195989 +
gctaggttggcattaattttta

SEQ ID NO: 78583 - DNA, 22 bp, Artificial Sequence
  Synthetic oligonucleotide; CTA chr11 5195971 5195992 5195988 5195993 +
ggttggcattaatttttaagtt

SEQ ID NO: 78584 - DNA, 22 bp, Artificial Sequence
  Synthetic oligonucleotide; TTG chr11 5195976 5195997 5195993 5195998 +
gcattaatttttaagtttctgc

SEQ ID NO: 78585 - DNA, 22 bp, Artificial Sequence
  Synthetic oligonucleotide; TTA chr11 5195982 5196003 5195999 5196004 +
atttttaagtttctgcaagaga

SEQ ID NO: 78586 - DNA, 22 bp, Artificial Sequence
  Synthetic oligonucleotide; TTT chr11 5195986 5196007 5196003 5196008 +
ttaagtttctgcaagagacttc

SEQ ID NO: 78587 - DNA, 22 bp, Artificial Sequence
  Synthetic oligonucleotide; TTT chr11 5195987 5196008 5196004 5196009 +
taagtttctgcaagagacttct

SEQ ID NO: 78588 - DNA, 22 bp, Artificial Sequence
  Synthetic oligonucleotide; TTT chr11 5195988 5196009 5196005 5196010 +
aagtttctgcaagagacttctg

SEQ ID NO: 78589 - DNA, 22 bp, Artificial Sequence
  Synthetic oligonucleotide; TTA chr11 5195989 5196010 5196006 5196011 +
agtttctgcaagagacttctgg

SEQ ID NO: 78590 - DNA, 22 bp, Artificial Sequence
  Synthetic oligonucleotide; TTT chr11 5195994 5196015 5196011 5196016 +
ctgcaagagacttctgggaaaa

SEQ ID NO: 78591 - DNA, 22 bp, Artificial Sequence
  Synthetic oligonucleotide; TTC chr11 5195995 5196016 5196012 5196017 +
tgcaagagacttctgggaaaat

SEQ ID NO: 78592 - DNA, 22 bp, Artificial Sequence
  Synthetic oligonucleotide; CTG chr11 5195997 5196018 5196014 5196019 +
caagagacttctgggaaaatgg

SEQ ID NO: 78593 - DNA, 22 bp, Artificial Sequence
  Synthetic oligonucleotide; CTT chr11 5196007 5196028 5196024 5196029 +
ctgggaaaatggactattttta

SEQ ID NO: 78594 - DNA, 22 bp, Artificial Sequence
  Synthetic oligonucleotide; TTC chr11 5196008 5196029 5196025 5196030 +
tgggaaaatggactatttttat

SEQ ID NO: 78595 - DNA, 22 bp, Artificial Sequence
  Synthetic oligonucleotide; CTG chr11 5196010 5196031 5196027 5196032 +
ggaaaatggactatttttattt

SEQ ID NO: 78596 - DNA, 22 bp, Artificial Sequence
  Synthetic oligonucleotide; CTA chr11 5196023 5196044 5196040 5196045 +
tttttatttccttcatctggag

SEQ ID NO: 78597 - DNA, 22 bp, Artificial Sequence
  Synthetic oligonucleotide; TTT chr11 5196026 5196047 5196043 5196048 +
ttatttccttcatctggaggcc

SEQ ID NO: 78598 - DNA, 22 bp, Artificial Sequence
  Synthetic oligonucleotide; TTT chr11 5196027 5196048 5196044 5196049 +
tatttccttcatctggaggcct

SEQ ID NO: 78599 - DNA, 22 bp, Artificial Sequence
  Synthetic oligonucleotide; TTT chr11 5196028 5196049 5196045 5196050 +
atttccttcatctggaggcctc

SEQ ID NO: 78600 - DNA, 22 bp, Artificial Sequence
  Synthetic oligonucleotide; TTA chr11 5196029 5196050 5196046 5196051 +
tttccttcatctggaggcctct

SEQ ID NO: 78601 - DNA, 22 bp, Artificial Sequence
  Synthetic oligonucleotide; TTT chr11 5196032 5196053 5196049 5196054 +
ccttcatctggaggcctctatt

SEQ ID NO: 78602 - DNA, 22 bp, Artificial Sequence
  Synthetic oligonucleotide; TTC chr11 5196033 5196054 5196050 5196055 +
cttcatctggaggcctctattc

SEQ ID NO: 78603 - DNA, 22 bp, Artificial Sequence
  Synthetic oligonucleotide; CTT chr11 5196036 5196057 5196053 5196058 +
catctggaggcctctattcact

SEQ ID NO: 78604 - DNA, 22 bp, Artificial Sequence
  Synthetic oligonucleotide; TTC chr11 5196037 5196058 5196054 5196059 +
atctggaggcctctattcacta

SEQ ID NO: 78605 - DNA, 22 bp, Artificial Sequence
  Synthetic oligonucleotide; CTG chr11 5196042 5196063 5196059 5196064 +
gaggcctctattcactactcta

SEQ ID NO: 78606 - DNA, 22 bp, Artificial Sequence
  Synthetic oligonucleotide; CTC chr11 5196050 5196071 5196067 5196072 +
tattcactactctagcaattat

SEQ ID NO: 78607 - DNA, 22 bp, Artificial Sequence
  Synthetic oligonucleotide; CTA chr11 5196052 5196073 5196069 5196074 +
ttcactactctagcaattatct

SEQ ID NO: 78608 - DNA, 22 bp, Artificial Sequence
  Synthetic oligonucleotide; TTC chr11 5196055 5196076 5196072 5196077 +
actactctagcaattatcttct

SEQ ID NO: 78609 - DNA, 22 bp, Artificial Sequence
  Synthetic oligonucleotide; CTA chr11 5196059 5196080 5196076 5196081 +
ctctagcaattatcttctgcaa

SEQ ID NO: 78610 - DNA, 22 bp, Artificial Sequence
  Synthetic oligonucleotide; CTC chr11 5196062 5196083 5196079 5196084 +
tagcaattatcttctgcaagta

SEQ ID NO: 78611 - DNA, 22 bp, Artificial Sequence
  Synthetic oligonucleotide; CTA chr11 5196064 5196085 5196081 5196086 +
gcaattatcttctgcaagtaat

SEQ ID NO: 78612 - DNA, 22 bp, Artificial Sequence
  Synthetic oligonucleotide; TTA chr11 5196071 5196092 5196088 5196093 +
tcttctgcaagtaatggtaaca

SEQ ID NO: 78613 - DNA, 22 bp, Artificial Sequence
  Synthetic oligonucleotide; CTT chr11 5196075 5196096 5196092 5196097 +
ctgcaagtaatggtaacaaata

SEQ ID NO: 78614 - DNA, 22 bp, Artificial Sequence
  Synthetic oligonucleotide; TTC chr11 5196076 5196097 5196093 5196098 +
tgcaagtaatggtaacaaatat

SEQ ID NO: 78615 - DNA, 22 bp, Artificial Sequence
  Synthetic oligonucleotide; CTG chr11 5196078 5196099 5196095 5196100 +
caagtaatggtaacaaatatcc

SEQ ID NO: 78616 - DNA, 22 bp, Artificial Sequence
  Synthetic oligonucleotide; CTA chr11 5196102 5196123 5196119 5196124 +
gggaatggagacacaacctcaa

SEQ ID NO: 78617 - DNA, 22 bp, Artificial Sequence
  Synthetic oligonucleotide; CTC chr11 5196122 5196143 5196139 5196144 +
aagtagaacatctcttaagtct

SEQ ID NO: 78618 - DNA, 22 bp, Artificial Sequence
  Synthetic oligonucleotide; CTC chr11 5196136 5196157 5196153 5196158 +
ttaagtctgtttaacaatacga

SEQ ID NO: 78619 - DNA, 22 bp, Artificial Sequence
  Synthetic oligonucleotide; CTT chr11 5196138 5196159 5196155 5196160 +
aagtctgtttaacaatacgatt

SEQ ID NO: 78620 - DNA, 22 bp, Artificial Sequence
  Synthetic oligonucleotide; TTA chr11 5196139 5196160 5196156 5196161 +
agtctgtttaacaatacgattt

SEQ ID NO: 78621 - DNA, 22 bp, Artificial Sequence
  Synthetic oligonucleotide; CTG chr11 5196145 5196166 5196162 5196167 +
tttaacaatacgattttgataa

SEQ ID NO: 78622 - DNA, 22 bp, Artificial Sequence
  Synthetic oligonucleotide; TTT chr11 5196148 5196169 5196165 5196170 +
aacaatacgattttgataagcc

SEQ ID NO: 78623 - DNA, 22 bp, Artificial Sequence
  Synthetic oligonucleotide; TTA chr11 5196149 5196170 5196166 5196171 +
acaatacgattttgataagcct

SEQ ID NO: 78624 - DNA, 22 bp, Artificial Sequence
  Synthetic oligonucleotide; TTT chr11 5196161 5196182 5196178 5196183 +
tgataagcctaggaaaataggg

SEQ ID NO: 78625 - DNA, 22 bp, Artificial Sequence
  Synthetic oligonucleotide; TTT chr11 5196162 5196183 5196179 5196184 +
gataagcctaggaaaataggga

SEQ ID NO: 78626 - DNA, 22 bp, Artificial Sequence
  Synthetic oligonucleotide; TTG chr11 5196163 5196184 5196180 5196185 +
ataagcctaggaaaatagggag

SEQ ID NO: 78627 - DNA, 22 bp, Artificial Sequence
  Synthetic oligonucleotide; CTA chr11 5196172 5196193 5196189 5196194 +
ggaaaatagggaggtatagtgt

SEQ ID NO: 78628 - DNA, 22 bp, Artificial Sequence
  Synthetic oligonucleotide; CTG chr11 5196206 5196227 5196223 5196228 +
gccacttaccagtactggtccg

SEQ ID NO: 78629 - DNA, 22 bp, Artificial Sequence
  Synthetic oligonucleotide; CTT chr11 5196213 5196234 5196230 5196235 +
accagtactggtccgtggcctg

SEQ ID NO: 78630 - DNA, 22 bp, Artificial Sequence
  Synthetic oligonucleotide; TTA chr11 5196214 5196235 5196231 5196236 +
ccagtactggtccgtggcctgc

SEQ ID NO: 78631 - DNA, 22 bp, Artificial Sequence
  Synthetic oligonucleotide; CTG chr11 5196223 5196244 5196240 5196245 +
gtccgtggcctgctaggaacct

SEQ ID NO: 78632 - DNA, 22 bp, Artificial Sequence
  Synthetic oligonucleotide; CTG chr11 5196235 5196256 5196252 5196257 +
ctaggaacctggtctcacagca

SEQ ID NO: 78633 - DNA, 22 bp, Artificial Sequence
  Synthetic oligonucleotide; CTA chr11 5196238 5196259 5196255 5196260 +
ggaacctggtctcacagcaggg

SEQ ID NO: 78634 - DNA, 22 bp, Artificial Sequence
  Synthetic oligonucleotide; CTG chr11 5196246 5196267 5196263 5196268 +
gtctcacagcagggggatgagc

SEQ ID NO: 78635 - DNA, 22 bp, Artificial Sequence
  Synthetic oligonucleotide; CTC chr11 5196251 5196272 5196268 5196273 +
acagcagggggatgagcaagca

SEQ ID NO: 78636 - DNA, 22 bp, Artificial Sequence
  Synthetic oligonucleotide; TTA chr11 5196276 5196297 5196293 5196298 +
ctgcctgagctcctcctcctgt

SEQ ID NO: 78637 - DNA, 22 bp, Artificial Sequence
  Synthetic oligonucleotide; CTG chr11 5196279 5196300 5196296 5196301 +
cctgagctcctcctcctgtcac

SEQ ID NO: 78638 - DNA, 22 bp, Artificial Sequence
  Synthetic oligonucleotide; CTG chr11 5196283 5196304 5196300 5196305 +
agctcctcctcctgtcacatcg

SEQ ID NO: 78639 - DNA, 22 bp, Artificial Sequence
  Synthetic oligonucleotide; CTC chr11 5196288 5196309 5196305 5196310 +
ctcctcctgtcacatcggcagt

SEQ ID NO: 78640 - DNA, 22 bp, Artificial Sequence
  Synthetic oligonucleotide; CTC chr11 5196291 5196312 5196308 5196313 +
ctcctgtcacatcggcagtggc

SEQ ID NO: 78641 - DNA, 22 bp, Artificial Sequence
  Synthetic oligonucleotide; CTC chr11 5196294 5196315 5196311 5196316 +
ctgtcacatcggcagtggcggc

SEQ ID NO: 78642 - DNA, 22 bp, Artificial Sequence
  Synthetic oligonucleotide; CTG chr11 5196297 5196318 5196314 5196319 +
tcacatcggcagtggcggcatt

SEQ ID NO: 78643 - DNA, 22 bp, Artificial Sequence
  Synthetic oligonucleotide; TTA chr11 5196320 5196341 5196337 5196342 +
gattctcatagaggcatgcaag

SEQ ID NO: 78644 - DNA, 22 bp, Artificial Sequence
  Synthetic oligonucleotide; TTC chr11 5196325 5196346 5196342 5196347 +
tcatagaggcatgcaagggatc

SEQ ID NO: 78645 - DNA, 22 bp, Artificial Sequence
  Synthetic oligonucleotide; CTC chr11 5196327 5196348 5196344 5196349 +
atagaggcatgcaagggatcta

SEQ ID NO: 78646 - DNA, 22 bp, Artificial Sequence
  Synthetic oligonucleotide; CTA chr11 5196349 5196370 5196366 5196371 +
ggttgcggcttcttatgagaat

SEQ ID NO: 78647 - DNA, 22 bp, Artificial Sequence
  Synthetic oligonucleotide; TTG chr11 5196354 5196375 5196371 5196376 +
cggcttcttatgagaatctaat

SEQ ID NO: 78648 - DNA, 22 bp, Artificial Sequence
  Synthetic oligonucleotide; CTT chr11 5196360 5196381 5196377 5196382 +
cttatgagaatctaatgcctaa

SEQ ID NO: 78649 - DNA, 22 bp, Artificial Sequence
  Synthetic oligonucleotide; TTC chr11 5196361 5196382 5196378 5196383 +
ttatgagaatctaatgcctaat

SEQ ID NO: 78650 - DNA, 22 bp, Artificial Sequence
  Synthetic oligonucleotide; CTT chr11 5196363 5196384 5196380 5196385 +
atgagaatctaatgcctaatgc

SEQ ID NO: 78651 - DNA, 22 bp, Artificial Sequence
  Synthetic oligonucleotide; TTA chr11 5196364 5196385 5196381 5196386 +
tgagaatctaatgcctaatgct

SEQ ID NO: 78652 - DNA, 22 bp, Artificial Sequence
  Synthetic oligonucleotide; CTA chr11 5196374 5196395 5196391 5196396 +
atgcctaatgctctgaggtgga

SEQ ID NO: 78653 - DNA, 22 bp, Artificial Sequence
  Synthetic oligonucleotide; CTA chr11 5196381 5196402 5196398 5196403 +
atgctctgaggtggaacagttt

SEQ ID NO: 78654 - DNA, 22 bp, Artificial Sequence
  Synthetic oligonucleotide; CTC chr11 5196387 5196408 5196404 5196409 +
tgaggtggaacagtttcatcct

SEQ ID NO: 78655 - DNA, 22 bp, Artificial Sequence
  Synthetic oligonucleotide; CTG chr11 5196389 5196410 5196406 5196411 +
aggtggaacagtttcatcctga

SEQ ID NO: 78656 - DNA, 22 bp, Artificial Sequence
  Synthetic oligonucleotide; TTT chr11 5196403 5196424 5196420 5196425 +
catcctgaaaccatgccctcct

SEQ ID NO: 78657 - DNA, 22 bp, Artificial Sequence
  Synthetic oligonucleotide; TTC chr11 5196404 5196425 5196421 5196426 +
atcctgaaaccatgccctcctg

SEQ ID NO: 78658 - DNA, 22 bp, Artificial Sequence
  Synthetic oligonucleotide; CTG chr11 5196410 5196431 5196427 5196432 +
aaaccatgccctcctgcacctt

SEQ ID NO: 78659 - DNA, 22 bp, Artificial Sequence
  Synthetic oligonucleotide; CTC chr11 5196423 5196444 5196440 5196445 +
ctgcaccttgtcttccacaaaa

SEQ ID NO: 78660 - DNA, 22 bp, Artificial Sequence
  Synthetic oligonucleotide; CTG chr11 5196426 5196447 5196443 5196448 +
caccttgtcttccacaaaagca

SEQ ID NO: 78661 - DNA, 22 bp, Artificial Sequence
  Synthetic oligonucleotide; CTT chr11 5196432 5196453 5196449 5196454 +
gtcttccacaaaagcagtccct

SEQ ID NO: 78662 - DNA, 22 bp, Artificial Sequence
  Synthetic oligonucleotide; TTG chr11 5196433 5196454 5196450 5196455 +
tcttccacaaaagcagtccctg

SEQ ID NO: 78663 - DNA, 22 bp, Artificial Sequence
  Synthetic oligonucleotide; CTT chr11 5196437 5196458 5196454 5196459 +
ccacaaaagcagtccctggtac

SEQ ID NO: 78664 - DNA, 22 bp, Artificial Sequence
  Synthetic oligonucleotide; TTC chr11 5196438 5196459 5196455 5196460 +
cacaaaagcagtccctggtacc

SEQ ID NO: 78665 - DNA, 22 bp, Artificial Sequence
  Synthetic oligonucleotide; CTG chr11 5196455 5196476 5196472 5196477 +
gtaccaaaaacattgaagactg

SEQ ID NO: 78666 - DNA, 22 bp, Artificial Sequence
  Synthetic oligonucleotide; TTG chr11 5196470 5196491 5196487 5196492 +
aagactgctggtgtacagtgaa

SEQ ID NO: 78667 - DNA, 22 bp, Artificial Sequence
  Synthetic oligonucleotide; CTG chr11 5196477 5196498 5196494 5196499 +
ctggtgtacagtgaacatctgc

SEQ ID NO: 78668 - DNA, 22 bp, Artificial Sequence
  Synthetic oligonucleotide; CTG chr11 5196480 5196501 5196497 5196502 +
gtgtacagtgaacatctgcctg

SEQ ID NO: 78669 - DNA, 22 bp, Artificial Sequence
  Synthetic oligonucleotide; CTG chr11 5196498 5196519 5196515 5196520 +
cctgtggatttattattagcag

SEQ ID NO: 78670 - DNA, 22 bp, Artificial Sequence
  Synthetic oligonucleotide; CTG chr11 5196502 5196523 5196519 5196524 +
tggatttattattagcagatca

SEQ ID NO: 78671 - DNA, 22 bp, Artificial Sequence
  Synthetic oligonucleotide; TTT chr11 5196509 5196530 5196526 5196531 +
attattagcagatcatttttac

SEQ ID NO: 78672 - DNA, 22 bp, Artificial Sequence
  Synthetic oligonucleotide; TTA chr11 5196510 5196531 5196527 5196532 +
ttattagcagatcatttttact

SEQ ID NO: 78673 - DNA, 22 bp, Artificial Sequence
  Synthetic oligonucleotide; TTA chr11 5196513 5196534 5196530 5196535 +
ttagcagatcatttttactaaa

SEQ ID NO: 78674 - DNA, 22 bp, Artificial Sequence
  Synthetic oligonucleotide; TTA chr11 5196516 5196537 5196533 5196538 +
gcagatcatttttactaaaaac

SEQ ID NO: 78675 - DNA, 22 bp, Artificial Sequence
  Synthetic oligonucleotide; TTT chr11 5196527 5196548 5196544 5196549 +
ttactaaaaacacatttctaat

SEQ ID NO: 78676 - DNA, 22 bp, Artificial Sequence
  Synthetic oligonucleotide; TTT chr11 5196528 5196549 5196545 5196550 +
tactaaaaacacatttctaatc

SEQ ID NO: 78677 - DNA, 22 bp, Artificial Sequence
  Synthetic oligonucleotide; TTT chr11 5196529 5196550 5196546 5196551 +
actaaaaacacatttctaatcc

SEQ ID NO: 78678 - DNA, 22 bp, Artificial Sequence
  Synthetic oligonucleotide; TTA chr11 5196530 5196551 5196547 5196552 +
ctaaaaacacatttctaatcct

SEQ ID NO: 78679 - DNA, 22 bp, Artificial Sequence
  Synthetic oligonucleotide; CTA chr11 5196533 5196554 5196550 5196555 +
aaaacacatttctaatcctgaa

SEQ ID NO: 78680 - DNA, 22 bp, Artificial Sequence
  Synthetic oligonucleotide; TTT chr11 5196544 5196565 5196561 5196566 +
ctaatcctgaatcatgtcctct

SEQ ID NO: 78681 - DNA, 22 bp, Artificial Sequence
  Synthetic oligonucleotide; TTC chr11 5196545 5196566 5196562 5196567 +
taatcctgaatcatgtcctctc

SEQ ID NO: 78682 - DNA, 22 bp, Artificial Sequence
  Synthetic oligonucleotide; CTA chr11 5196547 5196568 5196564 5196569 +
atcctgaatcatgtcctctcac

SEQ ID NO: 78683 - DNA, 22 bp, Artificial Sequence
  Synthetic oligonucleotide; CTG chr11 5196553 5196574 5196570 5196575 +
aatcatgtcctctcacttctaa

SEQ ID NO: 78684 - DNA, 22 bp, Artificial Sequence
  Synthetic oligonucleotide; CTC chr11 5196565 5196586 5196582 5196587 +
tcacttctaagaatcactgatt

SEQ ID NO: 78685 - DNA, 22 bp, Artificial Sequence
  Synthetic oligonucleotide; CTC chr11 5196567 5196588 5196584 5196589 +
acttctaagaatcactgatttc

SEQ ID NO: 78686 - DNA, 22 bp, Artificial Sequence
  Synthetic oligonucleotide; CTT chr11 5196571 5196592 5196588 5196593 +
ctaagaatcactgatttctccc

SEQ ID NO: 78687 - DNA, 22 bp, Artificial Sequence
  Synthetic oligonucleotide; TTC chr11 5196572 5196593 5196589 5196594 +
taagaatcactgatttctccca

SEQ ID NO: 78688 - DNA, 22 bp, Artificial Sequence
  Synthetic oligonucleotide; CTA chr11 5196574 5196595 5196591 5196596 +
agaatcactgatttctcccact

SEQ ID NO: 78689 - DNA, 22 bp, Artificial Sequence
  Synthetic oligonucleotide; CTG chr11 5196584 5196605 5196601 5196606 +
atttctcccactggaccttagc

SEQ ID NO: 78690 - DNA, 22 bp, Artificial Sequence
  Synthetic oligonucleotide; TTT chr11 5196588 5196609 5196605 5196610 +
ctcccactggaccttagctttt

SEQ ID NO: 78691 - DNA, 22 bp, Artificial Sequence
  Synthetic oligonucleotide; TTC chr11 5196589 5196610 5196606 5196611 +
tcccactggaccttagcttttc

SEQ ID NO: 78692 - DNA, 22 bp, Artificial Sequence
  Synthetic oligonucleotide; CTC chr11 5196591 5196612 5196608 5196613 +
ccactggaccttagcttttcgg

SEQ ID NO: 78693 - DNA, 22 bp, Artificial Sequence
  Synthetic oligonucleotide; CTG chr11 5196597 5196618 5196614 5196619 +
gaccttagcttttcggtgtaag

SEQ ID NO: 78694 - DNA, 22 bp, Artificial Sequence
  Synthetic oligonucleotide; CTT chr11 5196603 5196624 5196620 5196625 +
agcttttcggtgtaagagttaa

SEQ ID NO: 78695 - DNA, 22 bp, Artificial Sequence
  Synthetic oligonucleotide; TTA chr11 5196604 5196625 5196621 5196626 +
gcttttcggtgtaagagttaaa

SEQ ID NO: 78696 - DNA, 22 bp, Artificial Sequence
  Synthetic oligonucleotide; CTT chr11 5196608 5196629 5196625 5196630 +
ttcggtgtaagagttaaatgaa

SEQ ID NO: 78697 - DNA, 22 bp, Artificial Sequence
  Synthetic oligonucleotide; TTT chr11 5196609 5196630 5196626 5196631 +
tcggtgtaagagttaaatgaat

SEQ ID NO: 78698 - DNA, 22 bp, Artificial Sequence
  Synthetic oligonucleotide; TTT chr11 5196610 5196631 5196627 5196632 +
cggtgtaagagttaaatgaata

SEQ ID NO: 78699 - DNA, 22 bp, Artificial Sequence
  Synthetic oligonucleotide; TTC chr11 5196611 5196632 5196628 5196633 +
ggtgtaagagttaaatgaatag

SEQ ID NO: 78700 - DNA, 22 bp, Artificial Sequence
  Synthetic oligonucleotide; TTA chr11 5196624 5196645 5196641 5196646 +
aatgaatagcaattgaatggac

SEQ ID NO: 78701 - DNA, 22 bp, Artificial Sequence
  Synthetic oligonucleotide; TTG chr11 5196639 5196660 5196656 5196661 +
aatggactagactttctgattt

SEQ ID NO: 78702 - DNA, 22 bp, Artificial Sequence
  Synthetic oligonucleotide; CTA chr11 5196648 5196669 5196665 5196670 +
gactttctgattttctgaatct

SEQ ID NO: 78703 - DNA, 22 bp, Artificial Sequence
  Synthetic oligonucleotide; CTT chr11 5196653 5196674 5196670 5196675 +
tctgattttctgaatcttactt

SEQ ID NO: 78704 - DNA, 22 bp, Artificial Sequence
  Synthetic oligonucleotide; TTT chr11 5196654 5196675 5196671 5196676 +
ctgattttctgaatcttacttt

SEQ ID NO: 78705 - DNA, 22 bp, Artificial Sequence
  Synthetic oligonucleotide; TTC chr11 5196655 5196676 5196672 5196677 +
tgattttctgaatcttactttt

SEQ ID NO: 78706 - DNA, 22 bp, Artificial Sequence
  Synthetic oligonucleotide; CTG chr11 5196657 5196678 5196674 5196679 +
attttctgaatcttacttttgt

SEQ ID NO: 78707 - DNA, 22 bp, Artificial Sequence
  Synthetic oligonucleotide; TTT chr11 5196661 5196682 5196678 5196683 +
tctgaatcttacttttgtcacc

SEQ ID NO: 78708 - DNA, 22 bp, Artificial Sequence
  Synthetic oligonucleotide; TTT chr11 5196662 5196683 5196679 5196684 +
ctgaatcttacttttgtcacct

SEQ ID NO: 78709 - DNA, 22 bp, Artificial Sequence
  Synthetic oligonucleotide; TTC chr11 5196663 5196684 5196680 5196685 +
tgaatcttacttttgtcacctt

SEQ ID NO: 78710 - DNA, 22 bp, Artificial Sequence
  Synthetic oligonucleotide; CTG chr11 5196665 5196686 5196682 5196687 +
aatcttacttttgtcaccttgt

SEQ ID NO: 78711 - DNA, 22 bp, Artificial Sequence
  Synthetic oligonucleotide; CTT chr11 5196671 5196692 5196688 5196693 +
acttttgtcaccttgttctcgg

SEQ ID NO: 78712 - DNA, 22 bp, Artificial Sequence
  Synthetic oligonucleotide; TTA chr11 5196672 5196693 5196689 5196694 +
cttttgtcaccttgttctcggc

SEQ ID NO: 78713 - DNA, 22 bp, Artificial Sequence
  Synthetic oligonucleotide; CTT chr11 5196675 5196696 5196692 5196697 +
ttgtcaccttgttctcggcaat

SEQ ID NO: 78714 - DNA, 22 bp, Artificial Sequence
  Synthetic oligonucleotide; TTT chr11 5196676 5196697 5196693 5196698 +
tgtcaccttgttctcggcaata

SEQ ID NO: 78715 - DNA, 22 bp, Artificial Sequence
  Synthetic oligonucleotide; TTT chr11 5196677 5196698 5196694 5196699 +
gtcaccttgttctcggcaatat

SEQ ID NO: 78716 - DNA, 22 bp, Artificial Sequence
  Synthetic oligonucleotide; TTG chr11 5196678 5196699 5196695 5196700 +
tcaccttgttctcggcaatatt

SEQ ID NO: 78717 - DNA, 22 bp, Artificial Sequence
  Synthetic oligonucleotide; CTT chr11 5196685 5196706 5196702 5196707 +
gttctcggcaatatttttgttt

SEQ ID NO: 78718 - DNA, 22 bp, Artificial Sequence
  Synthetic oligonucleotide; TTG chr11 5196686 5196707 5196703 5196708 +
ttctcggcaatatttttgtttt

SEQ ID NO: 78719 - DNA, 22 bp, Artificial Sequence
  Synthetic oligonucleotide; TTC chr11 5196689 5196710 5196706 5196711 +
tcggcaatatttttgttttctc

SEQ ID NO: 78720 - DNA, 22 bp, Artificial Sequence
  Synthetic oligonucleotide; CTC chr11 5196691 5196712 5196708 5196713 +
ggcaatatttttgttttctcct

SEQ ID NO: 78721 - DNA, 22 bp, Artificial Sequence
  Synthetic oligonucleotide; TTT chr11 5196701 5196722 5196718 5196723 +
ttgttttctccttattataata

SEQ ID NO: 78722 - DNA, 22 bp, Artificial Sequence
  Synthetic oligonucleotide; TTT chr11 5196702 5196723 5196719 5196724 +
tgttttctccttattataataa

SEQ ID NO: 78723 - DNA, 22 bp, Artificial Sequence
  Synthetic oligonucleotide; TTT chr11 5196703 5196724 5196720 5196725 +
gttttctccttattataataac

SEQ ID NO: 78724 - DNA, 22 bp, Artificial Sequence
  Synthetic oligonucleotide; TTG chr11 5196704 5196725 5196721 5196726 +
ttttctccttattataataacc

SEQ ID NO: 78725 - DNA, 22 bp, Artificial Sequence
  Synthetic oligonucleotide; TTT chr11 5196707 5196728 5196724 5196729 +
tctccttattataataaccgtg

SEQ ID NO: 78726 - DNA, 22 bp, Artificial Sequence
  Synthetic oligonucleotide; TTT chr11 5196708 5196729 5196725 5196730 +
ctccttattataataaccgtga

SEQ ID NO: 78727 - DNA, 22 bp, Artificial Sequence
  Synthetic oligonucleotide; TTC chr11 5196709 5196730 5196726 5196731 +
tccttattataataaccgtgac

SEQ ID NO: 78728 - DNA, 22 bp, Artificial Sequence
  Synthetic oligonucleotide; CTC chr11 5196711 5196732 5196728 5196733 +
cttattataataaccgtgactt

SEQ ID NO: 78729 - DNA, 22 bp, Artificial Sequence
  Synthetic oligonucleotide; CTT chr11 5196714 5196735 5196731 5196736 +
attataataaccgtgacttcat

SEQ ID NO: 78730 - DNA, 22 bp, Artificial Sequence
  Synthetic oligonucleotide; TTA chr11 5196715 5196736 5196732 5196737 +
ttataataaccgtgacttcatt

SEQ ID NO: 78731 - DNA, 22 bp, Artificial Sequence
  Synthetic oligonucleotide; TTA chr11 5196718 5196739 5196735 5196740 +
taataaccgtgacttcatttaa

SEQ ID NO: 78732 - DNA, 22 bp, Artificial Sequence
  Synthetic oligonucleotide; CTT chr11 5196733 5196754 5196750 5196755 +
catttaaggcagcagttacaat

SEQ ID NO: 78733 - DNA, 22 bp, Artificial Sequence
  Synthetic oligonucleotide; TTC chr11 5196734 5196755 5196751 5196756 +
atttaaggcagcagttacaatg

SEQ ID NO: 78734 - DNA, 22 bp, Artificial Sequence
  Synthetic oligonucleotide; TTT chr11 5196738 5196759 5196755 5196760 +
aaggcagcagttacaatgatat

SEQ ID NO: 78735 - DNA, 22 bp, Artificial Sequence
  Synthetic oligonucleotide; TTA chr11 5196739 5196760 5196756 5196761 +
aggcagcagttacaatgatatg

SEQ ID NO: 78736 - DNA, 22 bp, Artificial Sequence
  Synthetic oligonucleotide; TTA chr11 5196751 5196772 5196768 5196773 +
caatgatatgacagtctaccta

SEQ ID NO: 78737 - DNA, 22 bp, Artificial Sequence
  Synthetic oligonucleotide; CTA chr11 5196769 5196790 5196786 5196791 +
cctattaaaaaaaaaaaggcaa

SEQ ID NO: 78738 - DNA, 22 bp, Artificial Sequence
  Synthetic oligonucleotide; CTA chr11 5196773 5196794 5196790 5196795 +
ttaaaaaaaaaaaggcaaaaga

SEQ ID NO: 78739 - DNA, 22 bp, Artificial Sequence
  Synthetic oligonucleotide; TTA chr11 5196776 5196797 5196793 5196798 +
aaaaaaaaaaggcaaaagagaa

SEQ ID NO: 78740 - DNA, 22 bp, Artificial Sequence
  Synthetic oligonucleotide; CTG chr11 5196801 5196822 5196818 5196823 +
tgtttccctaacatcactgtgg

SEQ ID NO: 78741 - DNA, 22 bp, Artificial Sequence
  Synthetic oligonucleotide; TTT chr11 5196806 5196827 5196823 5196828 +
ccctaacatcactgtggctgtt

SEQ ID NO: 78742 - DNA, 22 bp, Artificial Sequence
  Synthetic oligonucleotide; TTC chr11 5196807 5196828 5196824 5196829 +
cctaacatcactgtggctgttt

SEQ ID NO: 78743 - DNA, 22 bp, Artificial Sequence
  Synthetic oligonucleotide; CTA chr11 5196811 5196832 5196828 5196833 +
acatcactgtggctgttttcgt

SEQ ID NO: 78744 - DNA, 22 bp, Artificial Sequence
  Synthetic oligonucleotide; CTG chr11 5196820 5196841 5196837 5196842 +
tggctgttttcgtaacgtttct

SEQ ID NO: 78745 - DNA, 22 bp, Artificial Sequence
  Synthetic oligonucleotide; CTG chr11 5196826 5196847 5196843 5196848 +
ttttcgtaacgtttctcagtga

SEQ ID NO: 78746 - DNA, 22 bp, Artificial Sequence
  Synthetic oligonucleotide; TTT chr11 5196829 5196850 5196846 5196851 +
tcgtaacgtttctcagtgacgc

SEQ ID NO: 78747 - DNA, 22 bp, Artificial Sequence
  Synthetic oligonucleotide; TTT chr11 5196830 5196851 5196847 5196852 +
cgtaacgtttctcagtgacgct

SEQ ID NO: 78748 - DNA, 22 bp, Artificial Sequence
  Synthetic oligonucleotide; TTC chr11 5196831 5196852 5196848 5196853 +
gtaacgtttctcagtgacgctg

SEQ ID NO: 78749 - DNA, 22 bp, Artificial Sequence
  Synthetic oligonucleotide; TTT chr11 5196840 5196861 5196857 5196862 +
ctcagtgacgctggatagtagc

SEQ ID NO: 78750 - DNA, 22 bp, Artificial Sequence
  Synthetic oligonucleotide; TTC chr11 5196841 5196862 5196858 5196863 +
tcagtgacgctggatagtagcc

SEQ ID NO: 78751 - DNA, 22 bp, Artificial Sequence
  Synthetic oligonucleotide; CTC chr11 5196843 5196864 5196860 5196865 +
agtgacgctggatagtagcctt

SEQ ID NO: 78752 - DNA, 22 bp, Artificial Sequence
  Synthetic oligonucleotide; CTG chr11 5196853 5196874 5196870 5196875 +
gatagtagccttgcaggcctta

SEQ ID NO: 78753 - DNA, 22 bp, Artificial Sequence
  Synthetic oligonucleotide; CTT chr11 5196865 5196886 5196882 5196887 +
gcaggccttacaaaggaatctg

SEQ ID NO: 78754 - DNA, 22 bp, Artificial Sequence
  Synthetic oligonucleotide; TTG chr11 5196866 5196887 5196883 5196888 +
caggccttacaaaggaatctga

SEQ ID NO: 78755 - DNA, 22 bp, Artificial Sequence
  Synthetic oligonucleotide; CTT chr11 5196874 5196895 5196891 5196896 +
acaaaggaatctgataactgct

SEQ ID NO: 78756 - DNA, 22 bp, Artificial Sequence
  Synthetic oligonucleotide; TTA chr11 5196875 5196896 5196892 5196897 +
caaaggaatctgataactgctt

SEQ ID NO: 78757 - DNA, 22 bp, Artificial Sequence
  Synthetic oligonucleotide; CTG chr11 5196887 5196908 5196904 5196909 +
ataactgcttctcactggctct

SEQ ID NO: 78758 - DNA, 22 bp, Artificial Sequence
  Synthetic oligonucleotide; CTG chr11 5196894 5196915 5196911 5196916 +
cttctcactggctctgcaggct

SEQ ID NO: 78759 - DNA, 22 bp, Artificial Sequence
  Synthetic oligonucleotide; CTT chr11 5196897 5196918 5196914 5196919 +
ctcactggctctgcaggctacc

SEQ ID NO: 78760 - DNA, 22 bp, Artificial Sequence
  Synthetic oligonucleotide; TTC chr11 5196898 5196919 5196915 5196920 +
tcactggctctgcaggctacca

SEQ ID NO: 78761 - DNA, 22 bp, Artificial Sequence
  Synthetic oligonucleotide; CTC chr11 5196900 5196921 5196917 5196922 +
actggctctgcaggctaccaca

SEQ ID NO: 78762 - DNA, 22 bp, Artificial Sequence
  Synthetic oligonucleotide; CTG chr11 5196904 5196925 5196921 5196926 +
gctctgcaggctaccacatcaa

SEQ ID NO: 78763 - DNA, 22 bp, Artificial Sequence
  Synthetic oligonucleotide; CTC chr11 5196908 5196929 5196925 5196930 +
tgcaggctaccacatcaacaac

SEQ ID NO: 78764 - DNA, 22 bp, Artificial Sequence
  Synthetic oligonucleotide; CTG chr11 5196910 5196931 5196927 5196932 +
caggctaccacatcaacaacag

SEQ ID NO: 78765 - DNA, 22 bp, Artificial Sequence
  Synthetic oligonucleotide; CTA chr11 5196917 5196938 5196934 5196939 +
ccacatcaacaacagtttcagc

SEQ ID NO: 78766 - DNA, 22 bp, Artificial Sequence
  Synthetic oligonucleotide; TTT chr11 5196935 5196956 5196952 5196957 +
cagctgttgttgcctaattcat

SEQ ID NO: 78767 - DNA, 22 bp, Artificial Sequence
  Synthetic oligonucleotide; TTC chr11 5196936 5196957 5196953 5196958 +
agctgttgttgcctaattcatg

SEQ ID NO: 78768 - DNA, 22 bp, Artificial Sequence
  Synthetic oligonucleotide; CTG chr11 5196941 5196962 5196958 5196963 +
ttgttgcctaattcatggaaaa

SEQ ID NO: 78769 - DNA, 22 bp, Artificial Sequence
  Synthetic oligonucleotide; TTG chr11 5196944 5196965 5196961 5196966 +
ttgcctaattcatggaaaacaa

SEQ ID NO: 78770 - DNA, 22 bp, Artificial Sequence
  Synthetic oligonucleotide; TTG chr11 5196947 5196968 5196964 5196969 +
cctaattcatggaaaacaagtt

SEQ ID NO: 78771 - DNA, 22 bp, Artificial Sequence
  Synthetic oligonucleotide; CTA chr11 5196951 5196972 5196968 5196973 +
attcatggaaaacaagtttcct

SEQ ID NO: 78772 - DNA, 22 bp, Artificial Sequence
  Synthetic oligonucleotide; TTC chr11 5196955 5196976 5196972 5196977 +
atggaaaacaagtttccttaga

SEQ ID NO: 78773 - DNA, 22 bp, Artificial Sequence
  Synthetic oligonucleotide; TTT chr11 5196970 5196991 5196987 5196992 +
ccttagaagctggctttttgag

SEQ ID NO: 78774 - DNA, 22 bp, Artificial Sequence
  Synthetic oligonucleotide; TTC chr11 5196971 5196992 5196988 5196993 +
cttagaagctggctttttgaga

SEQ ID NO: 78775 - DNA, 22 bp, Artificial Sequence
  Synthetic oligonucleotide; CTT chr11 5196974 5196995 5196991 5196996 +
agaagctggctttttgagatat

SEQ ID NO: 78776 - DNA, 22 bp, Artificial Sequence
  Synthetic oligonucleotide; TTA chr11 5196975 5196996 5196992 5196997 +
gaagctggctttttgagatata

SEQ ID NO: 78777 - DNA, 22 bp, Artificial Sequence
  Synthetic oligonucleotide; CTG chr11 5196982 5197003 5196999 5197004 +
gctttttgagatatatggaaaa

SEQ ID NO: 78778 - DNA, 22 bp, Artificial Sequence
  Synthetic oligonucleotide; CTT chr11 5196986 5197007 5197003 5197008 +
tttgagatatatggaaaaatgt

SEQ ID NO: 78779 - DNA, 22 bp, Artificial Sequence
  Synthetic oligonucleotide; TTT chr11 5196987 5197008 5197004 5197009 +
ttgagatatatggaaaaatgtc

SEQ ID NO: 78780 - DNA, 22 bp, Artificial Sequence
  Synthetic oligonucleotide; TTT chr11 5196988 5197009 5197005 5197010 +
tgagatatatggaaaaatgtct

SEQ ID NO: 78781 - DNA, 22 bp, Artificial Sequence
  Synthetic oligonucleotide; TTT chr11 5196989 5197010 5197006 5197011 +
gagatatatggaaaaatgtctc

SEQ ID NO: 78782 - DNA, 22 bp, Artificial Sequence
  Synthetic oligonucleotide; TTG chr11 5196990 5197011 5197007 5197012 +
agatatatggaaaaatgtctcc

SEQ ID NO: 78783 - DNA, 22 bp, Artificial Sequence
  Synthetic oligonucleotide; CTC chr11 5197011 5197032 5197028 5197033 +
cacctggctactatgtagcttt

SEQ ID NO: 78784 - DNA, 22 bp, Artificial Sequence
  Synthetic oligonucleotide; CTG chr11 5197017 5197038 5197034 5197039 +
gctactatgtagcttttcaaaa

SEQ ID NO: 78785 - DNA, 22 bp, Artificial Sequence
  Synthetic oligonucleotide; CTA chr11 5197021 5197042 5197038 5197043 +
ctatgtagcttttcaaaacaga

SEQ ID NO: 78786 - DNA, 22 bp, Artificial Sequence
  Synthetic oligonucleotide; CTA chr11 5197024 5197045 5197041 5197046 +
tgtagcttttcaaaacagacag

SEQ ID NO: 78787 - DNA, 22 bp, Artificial Sequence
  Synthetic oligonucleotide; CTT chr11 5197032 5197053 5197049 5197054 +
ttcaaaacagacagtgttttaa

SEQ ID NO: 78788 - DNA, 22 bp, Artificial Sequence
  Synthetic oligonucleotide; TTT chr11 5197033 5197054 5197050 5197055 +
tcaaaacagacagtgttttaaa

SEQ ID NO: 78789 - DNA, 22 bp, Artificial Sequence
  Synthetic oligonucleotide; TTT chr11 5197034 5197055 5197051 5197056 +
caaaacagacagtgttttaaac

SEQ ID NO: 78790 - DNA, 22 bp, Artificial Sequence
  Synthetic oligonucleotide; TTC chr11 5197035 5197056 5197052 5197057 +
aaaacagacagtgttttaaaca

SEQ ID NO: 78791 - DNA, 22 bp, Artificial Sequence
  Synthetic oligonucleotide; TTT chr11 5197051 5197072 5197068 5197073 +
taaacacctgtgatgtctccat

SEQ ID NO: 78792 - DNA, 22 bp, Artificial Sequence
  Synthetic oligonucleotide; TTT chr11 5197052 5197073 5197069 5197074 +
aaacacctgtgatgtctccatc

SEQ ID NO: 78793 - DNA, 22 bp, Artificial Sequence
  Synthetic oligonucleotide; TTA chr11 5197053 5197074 5197070 5197075 +
aacacctgtgatgtctccatct

SEQ ID NO: 78794 - DNA, 22 bp, Artificial Sequence
  Synthetic oligonucleotide; CTG chr11 5197061 5197082 5197078 5197083 +
tgatgtctccatctgctcttcc

SEQ ID NO: 78795 - DNA, 22 bp, Artificial Sequence
  Synthetic oligonucleotide; CTC chr11 5197070 5197091 5197087 5197092 +
catctgctcttcctttcaggac

SEQ ID NO: 78796 - DNA, 22 bp, Artificial Sequence
  Synthetic oligonucleotide; CTG chr11 5197076 5197097 5197093 5197098 +
ctcttcctttcaggacctgggc

SEQ ID NO: 78797 - DNA, 22 bp, Artificial Sequence
  Synthetic oligonucleotide; CTC chr11 5197079 5197100 5197096 5197101 +
ttcctttcaggacctgggctga

SEQ ID NO: 78798 - DNA, 22 bp, Artificial Sequence
  Synthetic oligonucleotide; CTT chr11 5197081 5197102 5197098 5197103 +
cctttcaggacctgggctgatg

SEQ ID NO: 78799 - DNA, 22 bp, Artificial Sequence
  Synthetic oligonucleotide; TTC chr11 5197082 5197103 5197099 5197104 +
ctttcaggacctgggctgatgt

SEQ ID NO: 78800 - DNA, 22 bp, Artificial Sequence
  Synthetic oligonucleotide; CTT chr11 5197085 5197106 5197102 5197107 +
tcaggacctgggctgatgtctc

SEQ ID NO: 78801 - DNA, 22 bp, Artificial Sequence
  Synthetic oligonucleotide; TTT chr11 5197086 5197107 5197103 5197108 +
caggacctgggctgatgtctct

SEQ ID NO: 78802 - DNA, 22 bp, Artificial Sequence
  Synthetic oligonucleotide; TTC chr11 5197087 5197108 5197104 5197109 +
aggacctgggctgatgtctctg

SEQ ID NO: 78803 - DNA, 22 bp, Artificial Sequence
  Synthetic oligonucleotide; CTG chr11 5197095 5197116 5197112 5197117 +
ggctgatgtctctgaaattgcc

SEQ ID NO: 78804 - DNA, 22 bp, Artificial Sequence
  Synthetic oligonucleotide; CTG chr11 5197100 5197121 5197117 5197122 +
atgtctctgaaattgccttttc

SEQ ID NO: 78805 - DNA, 22 bp, Artificial Sequence
  Synthetic oligonucleotide; CTC chr11 5197107 5197128 5197124 5197129 +
tgaaattgccttttcttcctca

SEQ ID NO: 78806 - DNA, 22 bp, Artificial Sequence
  Synthetic oligonucleotide; CTG chr11 5197109 5197130 5197126 5197131 +
aaattgccttttcttcctcagg

SEQ ID NO: 78807 - DNA, 22 bp, Artificial Sequence
  Synthetic oligonucleotide; TTG chr11 5197115 5197136 5197132 5197137 +
ccttttcttcctcaggagaggt

SEQ ID NO: 78808 - DNA, 22 bp, Artificial Sequence
  Synthetic oligonucleotide; CTT chr11 5197119 5197140 5197136 5197141 +
ttcttcctcaggagaggtttag

SEQ ID NO: 78809 - DNA, 22 bp, Artificial Sequence
  Synthetic oligonucleotide; TTT chr11 5197120 5197141 5197137 5197142 +
tcttcctcaggagaggtttagt

SEQ ID NO: 78810 - DNA, 22 bp, Artificial Sequence
  Synthetic oligonucleotide; TTT chr11 5197121 5197142 5197138 5197143 +
cttcctcaggagaggtttagtt

SEQ ID NO: 78811 - DNA, 22 bp, Artificial Sequence
  Synthetic oligonucleotide; TTC chr11 5197122 5197143 5197139 5197144 +
ttcctcaggagaggtttagtta

SEQ ID NO: 78812 - DNA, 22 bp, Artificial Sequence
  Synthetic oligonucleotide; CTT chr11 5197124 5197145 5197141 5197146 +
cctcaggagaggtttagttatt

SEQ ID NO: 78813 - DNA, 22 bp, Artificial Sequence
  Synthetic oligonucleotide; TTC chr11 5197125 5197146 5197142 5197147 +
ctcaggagaggtttagttattt

SEQ ID NO: 78814 - DNA, 22 bp, Artificial Sequence
  Synthetic oligonucleotide; CTC chr11 5197128 5197149 5197145 5197150 +
aggagaggtttagttatttttt

SEQ ID NO: 78815 - DNA, 22 bp, Artificial Sequence
  Synthetic oligonucleotide; TTT chr11 5197139 5197160 5197156 5197161 +
agttatttttttaagtaattgc

SEQ ID NO: 78816 - DNA, 22 bp, Artificial Sequence
  Synthetic oligonucleotide; TTA chr11 5197140 5197161 5197157 5197162 +
gttatttttttaagtaattgct

SEQ ID NO: 78817 - DNA, 22 bp, Artificial Sequence
  Synthetic oligonucleotide; TTA chr11 5197144 5197165 5197161 5197166 +
tttttttaagtaattgcttcca

SEQ ID NO: 78818 - DNA, 22 bp, Artificial Sequence
  Synthetic oligonucleotide; TTT chr11 5197147 5197168 5197164 5197169 +
ttttaagtaattgcttccagat

SEQ ID NO: 78819 - DNA, 22 bp, Artificial Sequence
  Synthetic oligonucleotide; TTT chr11 5197148 5197169 5197165 5197170 +
tttaagtaattgcttccagata

SEQ ID NO: 78820 - DNA, 22 bp, Artificial Sequence
  Synthetic oligonucleotide; TTT chr11 5197149 5197170 5197166 5197171 +
ttaagtaattgcttccagatag

SEQ ID NO: 78821 - DNA, 22 bp, Artificial Sequence
  Synthetic oligonucleotide; TTT chr11 5197150 5197171 5197167 5197172 +
taagtaattgcttccagataga

SEQ ID NO: 78822 - DNA, 22 bp, Artificial Sequence
  Synthetic oligonucleotide; TTT chr11 5197151 5197172 5197168 5197173 +
aagtaattgcttccagatagag

SEQ ID NO: 78823 - DNA, 22 bp, Artificial Sequence
  Synthetic oligonucleotide; TTA chr11 5197152 5197173 5197169 5197174 +
agtaattgcttccagatagagg

SEQ ID NO: 78824 - DNA, 22 bp, Artificial Sequence
  Synthetic oligonucleotide; TTG chr11 5197160 5197181 5197177 5197182 +
cttccagatagaggcctttgca

SEQ ID NO: 78825 - DNA, 22 bp, Artificial Sequence
  Synthetic oligonucleotide; CTT chr11 5197163 5197184 5197180 5197185 +
ccagatagaggcctttgcaaaa

SEQ ID NO: 78826 - DNA, 22 bp, Artificial Sequence
  Synthetic oligonucleotide; TTC chr11 5197164 5197185 5197181 5197186 +
cagatagaggcctttgcaaaac

SEQ ID NO: 78827 - DNA, 22 bp, Artificial Sequence
  Synthetic oligonucleotide; CTT chr11 5197178 5197199 5197195 5197200 +
tgcaaaacaaacaatctaaact

SEQ ID NO: 78828 - DNA, 22 bp, Artificial Sequence
  Synthetic oligonucleotide; TTT chr11 5197179 5197200 5197196 5197201 +
gcaaaacaaacaatctaaacta

SEQ ID NO: 78829 - DNA, 22 bp, Artificial Sequence
  Synthetic oligonucleotide; TTG chr11 5197180 5197201 5197197 5197202 +
caaaacaaacaatctaaactac

SEQ ID NO: 78830 - DNA, 22 bp, Artificial Sequence
  Synthetic oligonucleotide; CTA chr11 5197196 5197217 5197213 5197218 +
aactactaatgttctaaacctg

SEQ ID NO: 78831 - DNA, 22 bp, Artificial Sequence
  Synthetic oligonucleotide; CTA chr11 5197201 5197222 5197218 5197223 +
ctaatgttctaaacctgtttct

SEQ ID NO: 78832 - DNA, 22 bp, Artificial Sequence
  Synthetic oligonucleotide; CTA chr11 5197204 5197225 5197221 5197226 +
atgttctaaacctgtttctttc

SEQ ID NO: 78833 - DNA, 22 bp, Artificial Sequence
  Synthetic oligonucleotide; TTC chr11 5197210 5197231 5197227 5197232 +
taaacctgtttctttctgtata

SEQ ID NO: 78834 - DNA, 22 bp, Artificial Sequence
  Synthetic oligonucleotide; CTA chr11 5197212 5197233 5197229 5197234 +
aacctgtttctttctgtataaa

SEQ ID NO: 78835 - DNA, 22 bp, Artificial Sequence
  Synthetic oligonucleotide; CTG chr11 5197218 5197239 5197235 5197240 +
tttctttctgtataaagcccag

SEQ ID NO: 78836 - DNA, 22 bp, Artificial Sequence
  Synthetic oligonucleotide; TTT chr11 5197221 5197242 5197238 5197243 +
ctttctgtataaagcccagtaa

SEQ ID NO: 78837 - DNA, 22 bp, Artificial Sequence
  Synthetic oligonucleotide; TTC chr11 5197222 5197243 5197239 5197244 +
tttctgtataaagcccagtaat

SEQ ID NO: 78838 - DNA, 22 bp, Artificial Sequence
  Synthetic oligonucleotide; CTT chr11 5197224 5197245 5197241 5197246 +
tctgtataaagcccagtaatca

SEQ ID NO: 78839 - DNA, 22 bp, Artificial Sequence
  Synthetic oligonucleotide; TTT chr11 5197225 5197246 5197242 5197247 +
ctgtataaagcccagtaatcat

SEQ ID NO: 78840 - DNA, 22 bp, Artificial Sequence
  Synthetic oligonucleotide; TTC chr11 5197226 5197247 5197243 5197248 +
tgtataaagcccagtaatcata

SEQ ID NO: 78841 - DNA, 22 bp, Artificial Sequence
  Synthetic oligonucleotide; CTG chr11 5197228 5197249 5197245 5197250 +
tataaagcccagtaatcatata

SEQ ID NO: 78842 - DNA, 22 bp, Artificial Sequence
  Synthetic oligonucleotide; TTT chr11 5197256 5197277 5197273 5197278 +
actttcattggctttttttttt

SEQ ID NO: 78843 - DNA, 22 bp, Artificial Sequence
  Synthetic oligonucleotide; TTA chr11 5197257 5197278 5197274 5197279 +
ctttcattggcttttttttttt

SEQ ID NO: 78844 - DNA, 22 bp, Artificial Sequence
  Synthetic oligonucleotide; CTT chr11 5197260 5197281 5197277 5197282 +
tcattggctttttttttttttt

SEQ ID NO: 78845 - DNA, 22 bp, Artificial Sequence
  Synthetic oligonucleotide; TTT chr11 5197261 5197282 5197278 5197283 +
cattggcttttttttttttttt

SEQ ID NO: 78846 - DNA, 22 bp, Artificial Sequence
  Synthetic oligonucleotide; TTC chr11 5197262 5197283 5197279 5197284 +
attggctttttttttttttttt

SEQ ID NO: 78847 - DNA, 22 bp, Artificial Sequence
  Synthetic oligonucleotide; TTG chr11 5197266 5197287 5197283 5197288 +
gctttttttttttttttttact

SEQ ID NO: 78848 - DNA, 22 bp, Artificial Sequence
  Synthetic oligonucleotide; CTT chr11 5197270 5197291 5197287 5197292 +
tttttttttttttttactgatt

SEQ ID NO: 78849 - DNA, 22 bp, Artificial Sequence
  Synthetic oligonucleotide; TTT chr11 5197271 5197292 5197288 5197293 +
ttttttttttttttactgattt

SEQ ID NO: 78850 - DNA, 22 bp, Artificial Sequence
  Synthetic oligonucleotide; TTT chr11 5197272 5197293 5197289 5197294 +
tttttttttttttactgatttt

SEQ ID NO: 78851 - DNA, 22 bp, Artificial Sequence
  Synthetic oligonucleotide; TTT chr11 5197273 5197294 5197290 5197295 +
ttttttttttttactgattttc

SEQ ID NO: 78852 - DNA, 22 bp, Artificial Sequence
  Synthetic oligonucleotide; TTT chr11 5197274 5197295 5197291 5197296 +
tttttttttttactgattttcc

SEQ ID NO: 78853 - DNA, 22 bp, Artificial Sequence
  Synthetic oligonucleotide; TTT chr11 5197275 5197296 5197292 5197297 +
ttttttttttactgattttcct

SEQ ID NO: 78854 - DNA, 22 bp, Artificial Sequence
  Synthetic oligonucleotide; TTT chr11 5197276 5197297 5197293 5197298 +
tttttttttactgattttcctc

SEQ ID NO: 78855 - DNA, 22 bp, Artificial Sequence
  Synthetic oligonucleotide; TTT chr11 5197277 5197298 5197294 5197299 +
ttttttttactgattttcctcc

SEQ ID NO: 78856 - DNA, 22 bp, Artificial Sequence
  Synthetic oligonucleotide; TTT chr11 5197278 5197299 5197295 5197300 +
tttttttactgattttcctccc

SEQ ID NO: 78857 - DNA, 22 bp, Artificial Sequence
  Synthetic oligonucleotide; TTT chr11 5197279 5197300 5197296 5197301 +
ttttttactgattttcctccct

SEQ ID NO: 78858 - DNA, 22 bp, Artificial Sequence
  Synthetic oligonucleotide; TTT chr11 5197280 5197301 5197297 5197302 +
tttttactgattttcctccctt

SEQ ID NO: 78859 - DNA, 22 bp, Artificial Sequence
  Synthetic oligonucleotide; TTT chr11 5197281 5197302 5197298 5197303 +
ttttactgattttcctcccttt

SEQ ID NO: 78860 - DNA, 22 bp, Artificial Sequence
  Synthetic oligonucleotide; TTT chr11 5197282 5197303 5197299 5197304 +
tttactgattttcctccctttg

SEQ ID NO: 78861 - DNA, 22 bp, Artificial Sequence
  Synthetic oligonucleotide; TTT chr11 5197283 5197304 5197300 5197305 +
ttactgattttcctccctttgg

SEQ ID NO: 78862 - DNA, 22 bp, Artificial Sequence
  Synthetic oligonucleotide; TTT chr11 5197284 5197305 5197301 5197306 +
tactgattttcctccctttggc

SEQ ID NO: 78863 - DNA, 22 bp, Artificial Sequence
  Synthetic oligonucleotide; TTT chr11 5197285 5197306 5197302 5197307 +
actgattttcctccctttggct

SEQ ID NO: 78864 - DNA, 22 bp, Artificial Sequence
  Synthetic oligonucleotide; TTA chr11 5197286 5197307 5197303 5197308 +
ctgattttcctccctttggctg

SEQ ID NO: 78865 - DNA, 22 bp, Artificial Sequence
  Synthetic oligonucleotide; CTG chr11 5197289 5197310 5197306 5197311 +
attttcctccctttggctgaat

SEQ ID NO: 78866 - DNA, 22 bp, Artificial Sequence
  Synthetic oligonucleotide; TTT chr11 5197293 5197314 5197310 5197315 +
tcctccctttggctgaattgta

SEQ ID NO: 78867 - DNA, 22 bp, Artificial Sequence
  Synthetic oligonucleotide; TTT chr11 5197294 5197315 5197311 5197316 +
cctccctttggctgaattgtaa

SEQ ID NO: 78868 - DNA, 22 bp, Artificial Sequence
  Synthetic oligonucleotide; TTC chr11 5197295 5197316 5197312 5197317 +
ctccctttggctgaattgtaaa

SEQ ID NO: 78869 - DNA, 22 bp, Artificial Sequence
  Synthetic oligonucleotide; CTC chr11 5197298 5197319 5197315 5197320 +
cctttggctgaattgtaaagat

SEQ ID NO: 78870 - DNA, 22 bp, Artificial Sequence
  Synthetic oligonucleotide; CTT chr11 5197302 5197323 5197319 5197324 +
tggctgaattgtaaagattctg

SEQ ID NO: 78871 - DNA, 22 bp, Artificial Sequence
  Synthetic oligonucleotide; TTT chr11 5197303 5197324 5197320 5197325 +
ggctgaattgtaaagattctga

SEQ ID NO: 78872 - DNA, 22 bp, Artificial Sequence
  Synthetic oligonucleotide; TTG chr11 5197304 5197325 5197321 5197326 +
gctgaattgtaaagattctgaa

SEQ ID NO: 78873 - DNA, 22 bp, Artificial Sequence
  Synthetic oligonucleotide; CTG chr11 5197308 5197329 5197325 5197330 +
aattgtaaagattctgaagttc

SEQ ID NO: 78874 - DNA, 22 bp, Artificial Sequence
  Synthetic oligonucleotide; TTG chr11 5197313 5197334 5197330 5197335 +
taaagattctgaagttcttcat

SEQ ID NO: 78875 - DNA, 22 bp, Artificial Sequence
  Synthetic oligonucleotide; TTC chr11 5197322 5197343 5197339 5197344 +
tgaagttcttcataaatcttat

SEQ ID NO: 78876 - DNA, 22 bp, Artificial Sequence
  Synthetic oligonucleotide; CTG chr11 5197324 5197345 5197341 5197346 +
aagttcttcataaatcttatca

SEQ ID NO: 78877 - DNA, 22 bp, Artificial Sequence
  Synthetic oligonucleotide; TTC chr11 5197330 5197351 5197347 5197352 +
ttcataaatcttatcatcatag

SEQ ID NO: 78878 - DNA, 22 bp, Artificial Sequence
  Synthetic oligonucleotide; CTT chr11 5197332 5197353 5197349 5197354 +
cataaatcttatcatcatagta

SEQ ID NO: 78879 - DNA, 22 bp, Artificial Sequence
  Synthetic oligonucleotide; TTC chr11 5197333 5197354 5197350 5197355 +
ataaatcttatcatcatagtac

SEQ ID NO: 78880 - DNA, 22 bp, Artificial Sequence
  Synthetic oligonucleotide; CTT chr11 5197342 5197363 5197359 5197364 +
atcatcatagtacaattatata

SEQ ID NO: 78881 - DNA, 22 bp, Artificial Sequence
  Synthetic oligonucleotide; TTA chr11 5197343 5197364 5197360 5197365 +
tcatcatagtacaattatatag

SEQ ID NO: 78882 - DNA, 22 bp, Artificial Sequence
  Synthetic oligonucleotide; TTA chr11 5197360 5197381 5197377 5197382 +
tatagctctaaaataagcaatg

SEQ ID NO: 78883 - DNA, 22 bp, Artificial Sequence
  Synthetic oligonucleotide; CTC chr11 5197368 5197389 5197385 5197390 +
taaaataagcaatgatttctga

SEQ ID NO: 78884 - DNA, 22 bp, Artificial Sequence
  Synthetic oligonucleotide; CTA chr11 5197370 5197391 5197387 5197392 +
aaataagcaatgatttctgagg

SEQ ID NO: 78885 - DNA, 22 bp, Artificial Sequence
  Synthetic oligonucleotide; TTT chr11 5197386 5197407 5197403 5197408 +
ctgaggatactcttaggtattt

SEQ ID NO: 78886 - DNA, 22 bp, Artificial Sequence
  Synthetic oligonucleotide; TTC chr11 5197387 5197408 5197404 5197409 +
tgaggatactcttaggtatttt

SEQ ID NO: 78887 - DNA, 22 bp, Artificial Sequence
  Synthetic oligonucleotide; CTG chr11 5197389 5197410 5197406 5197411 +
aggatactcttaggtatttttt

SEQ ID NO: 78888 - DNA, 22 bp, Artificial Sequence
  Synthetic oligonucleotide; CTC chr11 5197398 5197419 5197415 5197420 +
ttaggtattttttattaactgt

SEQ ID NO: 78889 - DNA, 22 bp, Artificial Sequence
  Synthetic oligonucleotide; CTT chr11 5197400 5197421 5197417 5197422 +
aggtattttttattaactgttt

SEQ ID NO: 78890 - DNA, 22 bp, Artificial Sequence
  Synthetic oligonucleotide; TTA chr11 5197401 5197422 5197418 5197423 +
ggtattttttattaactgtttt

SEQ ID NO: 78891 - DNA, 22 bp, Artificial Sequence
  Synthetic oligonucleotide; TTT chr11 5197408 5197429 5197425 5197430 +
tttattaactgttttgtcacgg

SEQ ID NO: 78892 - DNA, 22 bp, Artificial Sequence
  Synthetic oligonucleotide; TTT chr11 5197409 5197430 5197426 5197431 +
ttattaactgttttgtcacggc

SEQ ID NO: 78893 - DNA, 22 bp, Artificial Sequence
  Synthetic oligonucleotide; TTT chr11 5197410 5197431 5197427 5197432 +
tattaactgttttgtcacggcc

SEQ ID NO: 78894 - DNA, 22 bp, Artificial Sequence
  Synthetic oligonucleotide; TTT chr11 5197411 5197432 5197428 5197433 +
attaactgttttgtcacggcca

SEQ ID NO: 78895 - DNA, 22 bp, Artificial Sequence
  Synthetic oligonucleotide; TTA chr11 5197412 5197433 5197429 5197434 +
ttaactgttttgtcacggccat

SEQ ID NO: 78896 - DNA, 22 bp, Artificial Sequence
  Synthetic oligonucleotide; TTA chr11 5197415 5197436 5197432 5197437 +
actgttttgtcacggccattat

SEQ ID NO: 78897 - DNA, 22 bp, Artificial Sequence
  Synthetic oligonucleotide; CTG chr11 5197419 5197440 5197436 5197441 +
ttttgtcacggccattatttca

SEQ ID NO: 78898 - DNA, 22 bp, Artificial Sequence
  Synthetic oligonucleotide; TTT chr11 5197422 5197443 5197439 5197444 +
tgtcacggccattatttcaaac

SEQ ID NO: 78899 - DNA, 22 bp, Artificial Sequence
  Synthetic oligonucleotide; TTT chr11 5197423 5197444 5197440 5197445 +
gtcacggccattatttcaaact

SEQ ID NO: 78900 - DNA, 22 bp, Artificial Sequence
  Synthetic oligonucleotide; TTG chr11 5197424 5197445 5197441 5197446 +
tcacggccattatttcaaacta

SEQ ID NO: 78901 - DNA, 22 bp, Artificial Sequence
  Synthetic oligonucleotide; TTA chr11 5197436 5197457 5197453 5197458 +
tttcaaactattttggttcaca

SEQ ID NO: 78902 - DNA, 22 bp, Artificial Sequence
  Synthetic oligonucleotide; TTT chr11 5197439 5197460 5197456 5197461 +
caaactattttggttcacattc

SEQ ID NO: 78903 - DNA, 22 bp, Artificial Sequence
  Synthetic oligonucleotide; TTC chr11 5197440 5197461 5197457 5197462 +
aaactattttggttcacattct

SEQ ID NO: 78904 - DNA, 22 bp, Artificial Sequence
  Synthetic oligonucleotide; CTA chr11 5197446 5197467 5197463 5197468 +
ttttggttcacattctataggt

SEQ ID NO: 78905 - DNA, 22 bp, Artificial Sequence
  Synthetic oligonucleotide; TTT chr11 5197449 5197470 5197466 5197471 +
tggttcacattctataggttgc

SEQ ID NO: 78906 - DNA, 22 bp, Artificial Sequence
  Synthetic oligonucleotide; TTT chr11 5197450 5197471 5197467 5197472 +
ggttcacattctataggttgcc

SEQ ID NO: 78907 - DNA, 22 bp, Artificial Sequence
  Synthetic oligonucleotide; TTG chr11 5197451 5197472 5197468 5197473 +
gttcacattctataggttgcct

SEQ ID NO: 78908 - DNA, 22 bp, Artificial Sequence
  Synthetic oligonucleotide; TTC chr11 5197455 5197476 5197472 5197477 +
acattctataggttgcctaatc

SEQ ID NO: 78909 - DNA, 22 bp, Artificial Sequence
  Synthetic oligonucleotide; TTC chr11 5197461 5197482 5197478 5197483 +
tataggttgcctaatctgaagc

SEQ ID NO: 78910 - DNA, 22 bp, Artificial Sequence
  Synthetic oligonucleotide; CTA chr11 5197463 5197484 5197480 5197485 +
taggttgcctaatctgaagcac

SEQ ID NO: 78911 - DNA, 22 bp, Artificial Sequence
  Synthetic oligonucleotide; TTG chr11 5197470 5197491 5197487 5197492 +
cctaatctgaagcacaaacact

SEQ ID NO: 78912 - DNA, 22 bp, Artificial Sequence
  Synthetic oligonucleotide; CTA chr11 5197474 5197495 5197491 5197496 +
atctgaagcacaaacactcata

SEQ ID NO: 78913 - DNA, 22 bp, Artificial Sequence
  Synthetic oligonucleotide; CTG chr11 5197479 5197500 5197496 5197501 +
aagcacaaacactcatagtatg

SEQ ID NO: 78914 - DNA, 22 bp, Artificial Sequence
  Synthetic oligonucleotide; CTC chr11 5197493 5197514 5197510 5197515 +
atagtatgaagtcttcagatga

SEQ ID NO: 78915 - DNA, 22 bp, Artificial Sequence
  Synthetic oligonucleotide; CTT chr11 5197508 5197529 5197525 5197530 +
cagatgagccttcctactctcc

SEQ ID NO: 78916 - DNA, 22 bp, Artificial Sequence
  Synthetic oligonucleotide; TTC chr11 5197509 5197530 5197526 5197531 +
agatgagccttcctactctccc

SEQ ID NO: 78917 - DNA, 22 bp, Artificial Sequence
  Synthetic oligonucleotide; CTT chr11 5197520 5197541 5197537 5197542 +
cctactctccctgttaaacata

SEQ ID NO: 78918 - DNA, 22 bp, Artificial Sequence
  Synthetic oligonucleotide; TTC chr11 5197521 5197542 5197538 5197543 +
ctactctccctgttaaacataa

SEQ ID NO: 78919 - DNA, 22 bp, Artificial Sequence
  Synthetic oligonucleotide; CTA chr11 5197524 5197545 5197541 5197546 +
ctctccctgttaaacataactc

SEQ ID NO: 78920 - DNA, 22 bp, Artificial Sequence
  Synthetic oligonucleotide; CTC chr11 5197527 5197548 5197544 5197549 +
tccctgttaaacataactctca

SEQ ID NO: 78921 - DNA, 22 bp, Artificial Sequence
  Synthetic oligonucleotide; CTC chr11 5197529 5197550 5197546 5197551 +
cctgttaaacataactctcaaa

SEQ ID NO: 78922 - DNA, 22 bp, Artificial Sequence
  Synthetic oligonucleotide; CTG chr11 5197533 5197554 5197550 5197555 +
ttaaacataactctcaaaccaa

SEQ ID NO: 78923 - DNA, 22 bp, Artificial Sequence
  Synthetic oligonucleotide; TTA chr11 5197536 5197557 5197553 5197558 +
aacataactctcaaaccaacaa

SEQ ID NO: 78924 - DNA, 22 bp, Artificial Sequence
  Synthetic oligonucleotide; CTC chr11 5197546 5197567 5197563 5197568 +
tcaaaccaacaactcagttgtg

SEQ ID NO: 78925 - DNA, 22 bp, Artificial Sequence
  Synthetic oligonucleotide; CTC chr11 5197548 5197569 5197565 5197570 +
aaaccaacaactcagttgtgtc

SEQ ID NO: 78926 - DNA, 22 bp, Artificial Sequence
  Synthetic oligonucleotide; CTC chr11 5197561 5197582 5197578 5197583 +
agttgtgtcagacatgtaatat

SEQ ID NO: 78927 - DNA, 22 bp, Artificial Sequence
  Synthetic oligonucleotide; TTG chr11 5197566 5197587 5197583 5197588 +
tgtcagacatgtaatattgttc

SEQ ID NO: 78928 - DNA, 22 bp, Artificial Sequence
  Synthetic oligonucleotide; TTG chr11 5197585 5197606 5197602 5197607 +
ttcaaataataaatataaattc

SEQ ID NO: 78929 - DNA, 22 bp, Artificial Sequence
  Synthetic oligonucleotide; TTC chr11 5197588 5197609 5197605 5197610 +
aaataataaatataaattcatt

SEQ ID NO: 78930 - DNA, 22 bp, Artificial Sequence
  Synthetic oligonucleotide; TTC chr11 5197607 5197628 5197624 5197629 +
attctgatgcttccctatgagt

SEQ ID NO: 78931 - DNA, 22 bp, Artificial Sequence
  Synthetic oligonucleotide; TTC chr11 5197611 5197632 5197628 5197633 +
tgatgcttccctatgagtggct

SEQ ID NO: 78932 - DNA, 22 bp, Artificial Sequence
  Synthetic oligonucleotide; CTG chr11 5197613 5197634 5197630 5197635 +
atgcttccctatgagtggctgg

SEQ ID NO: 78933 - DNA, 22 bp, Artificial Sequence
  Synthetic oligonucleotide; CTT chr11 5197619 5197640 5197636 5197641 +
ccctatgagtggctggtggaaa

SEQ ID NO: 78934 - DNA, 22 bp, Artificial Sequence
  Synthetic oligonucleotide; TTC chr11 5197620 5197641 5197637 5197642 +
cctatgagtggctggtggaaaa

SEQ ID NO: 78935 - DNA, 22 bp, Artificial Sequence
  Synthetic oligonucleotide; CTA chr11 5197624 5197645 5197641 5197646 +
tgagtggctggtggaaaacata

SEQ ID NO: 78936 - DNA, 22 bp, Artificial Sequence
  Synthetic oligonucleotide; CTG chr11 5197634 5197655 5197651 5197656 +
gtggaaaacatattgtcagttg

SEQ ID NO: 78937 - DNA, 22 bp, Artificial Sequence
  Synthetic oligonucleotide; TTG chr11 5197649 5197670 5197666 5197671 +
tcagttgttgaagaattctctg

SEQ ID NO: 78938 - DNA, 22 bp, Artificial Sequence
  Synthetic oligonucleotide; TTG chr11 5197656 5197677 5197673 5197678 +
ttgaagaattctctgcttcccc

SEQ ID NO: 78939 - DNA, 22 bp, Artificial Sequence
  Synthetic oligonucleotide; TTG chr11 5197659 5197680 5197676 5197681 +
aagaattctctgcttccccagt

SEQ ID NO: 78940 - DNA, 22 bp, Artificial Sequence
  Synthetic oligonucleotide; TTC chr11 5197667 5197688 5197684 5197689 +
tctgcttccccagtgttgtgtc

SEQ ID NO: 78941 - DNA, 22 bp, Artificial Sequence
  Synthetic oligonucleotide; CTC chr11 5197669 5197690 5197686 5197691 +
tgcttccccagtgttgtgtcag

SEQ ID NO: 78942 - DNA, 22 bp, Artificial Sequence
  Synthetic oligonucleotide; CTG chr11 5197671 5197692 5197688 5197693 +
cttccccagtgttgtgtcagct

SEQ ID NO: 78943 - DNA, 22 bp, Artificial Sequence
  Synthetic oligonucleotide; CTT chr11 5197674 5197695 5197691 5197696 +
ccccagtgttgtgtcagctctc

SEQ ID NO: 78944 - DNA, 22 bp, Artificial Sequence
  Synthetic oligonucleotide; TTC chr11 5197675 5197696 5197692 5197697 +
cccagtgttgtgtcagctctcc

SEQ ID NO: 78945 - DNA, 22 bp, Artificial Sequence
  Synthetic oligonucleotide; TTG chr11 5197685 5197706 5197702 5197707 +
tgtcagctctccggcgtatggg

SEQ ID NO: 78946 - DNA, 22 bp, Artificial Sequence
  Synthetic oligonucleotide; CTC chr11 5197694 5197715 5197711 5197716 +
tccggcgtatgggagggtggat

SEQ ID NO: 78947 - DNA, 22 bp, Artificial Sequence
  Synthetic oligonucleotide; CTC chr11 5197696 5197717 5197713 5197718 +
cggcgtatgggagggtggatgc

SEQ ID NO: 78948 - DNA, 22 bp, Artificial Sequence
  Synthetic oligonucleotide; CTT chr11 5197720 5197741 5197737 5197742 +
attcactttcaaagcattagaa

SEQ ID NO: 78949 - DNA, 22 bp, Artificial Sequence
  Synthetic oligonucleotide; TTA chr11 5197721 5197742 5197738 5197743 +
ttcactttcaaagcattagaag

SEQ ID NO: 78950 - DNA, 22 bp, Artificial Sequence
  Synthetic oligonucleotide; TTC chr11 5197724 5197745 5197741 5197746 +
actttcaaagcattagaaggaa

SEQ ID NO: 78951 - DNA, 22 bp, Artificial Sequence
  Synthetic oligonucleotide; CTT chr11 5197728 5197749 5197745 5197750 +
tcaaagcattagaaggaagctt

SEQ ID NO: 78952 - DNA, 22 bp, Artificial Sequence
  Synthetic oligonucleotide; TTT chr11 5197729 5197750 5197746 5197751 +
caaagcattagaaggaagcttc

SEQ ID NO: 78953 - DNA, 22 bp, Artificial Sequence
  Synthetic oligonucleotide; TTC chr11 5197730 5197751 5197747 5197752 +
aaagcattagaaggaagcttct

SEQ ID NO: 78954 - DNA, 22 bp, Artificial Sequence
  Synthetic oligonucleotide; TTA chr11 5197739 5197760 5197756 5197761 +
gaaggaagcttctttggccatt

SEQ ID NO: 78955 - DNA, 22 bp, Artificial Sequence
  Synthetic oligonucleotide; CTT chr11 5197750 5197771 5197767 5197772 +
ctttggccattgagaaatctat

SEQ ID NO: 78956 - DNA, 22 bp, Artificial Sequence
  Synthetic oligonucleotide; TTC chr11 5197751 5197772 5197768 5197773 +
tttggccattgagaaatctatg

SEQ ID NO: 78957 - DNA, 22 bp, Artificial Sequence
  Synthetic oligonucleotide; CTT chr11 5197753 5197774 5197770 5197775 +
tggccattgagaaatctatgag

SEQ ID NO: 78958 - DNA, 22 bp, Artificial Sequence
  Synthetic oligonucleotide; TTT chr11 5197754 5197775 5197771 5197776 +
ggccattgagaaatctatgaga

SEQ ID NO: 78959 - DNA, 22 bp, Artificial Sequence
  Synthetic oligonucleotide; TTG chr11 5197755 5197776 5197772 5197777 +
gccattgagaaatctatgagac

SEQ ID NO: 78960 - DNA, 22 bp, Artificial Sequence
  Synthetic oligonucleotide; TTG chr11 5197762 5197783 5197779 5197784 +
agaaatctatgagacattcaca

SEQ ID NO: 78961 - DNA, 22 bp, Artificial Sequence
  Synthetic oligonucleotide; CTA chr11 5197771 5197792 5197788 5197793 +
tgagacattcacatgacctcta

SEQ ID NO: 78962 - DNA, 22 bp, Artificial Sequence
  Synthetic oligonucleotide; TTC chr11 5197781 5197802 5197798 5197803 +
acatgacctctacagattcagc

SEQ ID NO: 78963 - DNA, 22 bp, Artificial Sequence
  Synthetic oligonucleotide; CTC chr11 5197791 5197812 5197808 5197813 +
tacagattcagcagctaacttc

SEQ ID NO: 78964 - DNA, 22 bp, Artificial Sequence
  Synthetic oligonucleotide; CTA chr11 5197793 5197814 5197810 5197815 +
cagattcagcagctaacttctc

SEQ ID NO: 78965 - DNA, 22 bp, Artificial Sequence
  Synthetic oligonucleotide; TTC chr11 5197800 5197821 5197817 5197822 +
agcagctaacttctcttttcat

SEQ ID NO: 78966 - DNA, 22 bp, Artificial Sequence
  Synthetic oligonucleotide; CTA chr11 5197808 5197829 5197825 5197830 +
acttctcttttcattataaaac

SEQ ID NO: 78967 - DNA, 22 bp, Artificial Sequence
  Synthetic oligonucleotide; CTT chr11 5197812 5197833 5197829 5197834 +
ctcttttcattataaaactggg

SEQ ID NO: 78968 - DNA, 22 bp, Artificial Sequence
  Synthetic oligonucleotide; TTC chr11 5197813 5197834 5197830 5197835 +
tcttttcattataaaactgggg

SEQ ID NO: 78969 - DNA, 22 bp, Artificial Sequence
  Synthetic oligonucleotide; CTC chr11 5197815 5197836 5197832 5197837 +
ttttcattataaaactggggca

SEQ ID NO: 78970 - DNA, 22 bp, Artificial Sequence
  Synthetic oligonucleotide; CTT chr11 5197817 5197838 5197834 5197839 +
ttcattataaaactggggcata

SEQ ID NO: 78971 - DNA, 22 bp, Artificial Sequence
  Synthetic oligonucleotide; TTT chr11 5197818 5197839 5197835 5197840 +
tcattataaaactggggcatag

SEQ ID NO: 78972 - DNA, 22 bp, Artificial Sequence
  Synthetic oligonucleotide; TTT chr11 5197819 5197840 5197836 5197841 +
cattataaaactggggcatagg

SEQ ID NO: 78973 - DNA, 22 bp, Artificial Sequence
  Synthetic oligonucleotide; TTC chr11 5197820 5197841 5197837 5197842 +
attataaaactggggcatagga

SEQ ID NO: 78974 - DNA, 22 bp, Artificial Sequence
  Synthetic oligonucleotide; TTA chr11 5197824 5197845 5197841 5197846 +
taaaactggggcataggaatct

SEQ ID NO: 78975 - DNA, 22 bp, Artificial Sequence
  Synthetic oligonucleotide; CTG chr11 5197832 5197853 5197849 5197854 +
gggcataggaatcttgtcagat

SEQ ID NO: 78976 - DNA, 22 bp, Artificial Sequence
  Synthetic oligonucleotide; CTT chr11 5197847 5197868 5197864 5197869 +
gtcagattggccacattccagt

SEQ ID NO: 78977 - DNA, 22 bp, Artificial Sequence
  Synthetic oligonucleotide; TTG chr11 5197848 5197869 5197865 5197870 +
tcagattggccacattccagtc

SEQ ID NO: 78978 - DNA, 22 bp, Artificial Sequence
  Synthetic oligonucleotide; TTG chr11 5197856 5197877 5197873 5197878 +
gccacattccagtcggccagga

SEQ ID NO: 78979 - DNA, 22 bp, Artificial Sequence
  Synthetic oligonucleotide; TTC chr11 5197865 5197886 5197882 5197887 +
cagtcggccaggagggaccatg

SEQ ID NO: 78980 - DNA, 22 bp, Artificial Sequence
  Synthetic oligonucleotide; TTT chr11 5197896 5197917 5197913 5197918 +
attatcattagggaacctggag

SEQ ID NO: 78981 - DNA, 22 bp, Artificial Sequence
  Synthetic oligonucleotide; TTA chr11 5197897 5197918 5197914 5197919 +
ttatcattagggaacctggagc

SEQ ID NO: 78982 - DNA, 22 bp, Artificial Sequence
  Synthetic oligonucleotide; TTA chr11 5197900 5197921 5197917 5197922 +
tcattagggaacctggagcagt

SEQ ID NO: 78983 - DNA, 22 bp, Artificial Sequence
  Synthetic oligonucleotide; TTA chr11 5197906 5197927 5197923 5197928 +
gggaacctggagcagtactacc

SEQ ID NO: 78984 - DNA, 22 bp, Artificial Sequence
  Synthetic oligonucleotide; CTG chr11 5197915 5197936 5197932 5197937 +
gagcagtactaccacctgacat

SEQ ID NO: 78985 - DNA, 22 bp, Artificial Sequence
  Synthetic oligonucleotide; CTA chr11 5197926 5197947 5197943 5197948 +
ccacctgacattcatatcaact

SEQ ID NO: 78986 - DNA, 22 bp, Artificial Sequence
  Synthetic oligonucleotide; CTG chr11 5197933 5197954 5197950 5197955 +
acattcatatcaacttttcttt

SEQ ID NO: 78987 - DNA, 22 bp, Artificial Sequence
  Synthetic oligonucleotide; TTC chr11 5197939 5197960 5197956 5197961 +
atatcaacttttcttttttttt

SEQ ID NO: 78988 - DNA, 22 bp, Artificial Sequence
  Synthetic oligonucleotide; CTT chr11 5197949 5197970 5197966 5197971 +
ttctttttttttctcttttttt

SEQ ID NO: 78989 - DNA, 22 bp, Artificial Sequence
  Synthetic oligonucleotide; TTT chr11 5197950 5197971 5197967 5197972 +
tctttttttttctctttttttt

SEQ ID NO: 78990 - DNA, 22 bp, Artificial Sequence
  Synthetic oligonucleotide; TTT chr11 5197951 5197972 5197968 5197973 +
ctttttttttctcttttttttt

SEQ ID NO: 78991 - DNA, 22 bp, Artificial Sequence
  Synthetic oligonucleotide; TTC chr11 5197952 5197973 5197969 5197974 +
tttttttttctctttttttttt

SEQ ID NO: 78992 - DNA, 22 bp, Artificial Sequence
  Synthetic oligonucleotide; CTT chr11 5197954 5197975 5197971 5197976 +
tttttttctctttttttttttt

SEQ ID NO: 78993 - DNA, 22 bp, Artificial Sequence
  Synthetic oligonucleotide; TTT chr11 5197955 5197976 5197972 5197977 +
ttttttctcttttttttttttt

SEQ ID NO: 78994 - DNA, 22 bp, Artificial Sequence
  Synthetic oligonucleotide; TTT chr11 5197956 5197977 5197973 5197978 +
tttttctctttttttttttttt

SEQ ID NO: 78995 - DNA, 22 bp, Artificial Sequence
  Synthetic oligonucleotide; TTT chr11 5197957 5197978 5197974 5197979 +
ttttctcttttttttttttttt

SEQ ID NO: 78996 - DNA, 22 bp, Artificial Sequence
  Synthetic oligonucleotide; TTT chr11 5197958 5197979 5197975 5197980 +
tttctctttttttttttttttt

SEQ ID NO: 78997 - DNA, 22 bp, Artificial Sequence
  Synthetic oligonucleotide; TTT chr11 5197959 5197980 5197976 5197981 +
ttctcttttttttttttttttt

SEQ ID NO: 78998 - DNA, 22 bp, Artificial Sequence
  Synthetic oligonucleotide; TTT chr11 5197960 5197981 5197977 5197982 +
tctctttttttttttttttttg

SEQ ID NO: 78999 - DNA, 22 bp, Artificial Sequence
  Synthetic oligonucleotide; TTT chr11 5197961 5197982 5197978 5197983 +
ctctttttttttttttttttga

SEQ ID NO: 79000 - DNA, 22 bp, Artificial Sequence
  Synthetic oligonucleotide; TTC chr11 5197962 5197983 5197979 5197984 +
tctttttttttttttttttgag

SEQ ID NO: 79001 - DNA, 22 bp, Artificial Sequence
  Synthetic oligonucleotide; CTC chr11 5197964 5197985 5197981 5197986 +
tttttttttttttttttgagac

SEQ ID NO: 79002 - DNA, 22 bp, Artificial Sequence
  Synthetic oligonucleotide; CTT chr11 5197966 5197987 5197983 5197988 +
tttttttttttttttgagacag

SEQ ID NO: 79003 - DNA, 22 bp, Artificial Sequence
  Synthetic oligonucleotide; TTT chr11 5197967 5197988 5197984 5197989 +
ttttttttttttttgagacaga

SEQ ID NO: 79004 - DNA, 22 bp, Artificial Sequence
  Synthetic oligonucleotide; TTT chr11 5197968 5197989 5197985 5197990 +
tttttttttttttgagacagag

SEQ ID NO: 79005 - DNA, 22 bp, Artificial Sequence
  Synthetic oligonucleotide; TTT chr11 5197969 5197990 5197986 5197991 +
ttttttttttttgagacagagt

SEQ ID NO: 79006 - DNA, 22 bp, Artificial Sequence
  Synthetic oligonucleotide; TTT chr11 5197970 5197991 5197987 5197992 +
tttttttttttgagacagagtc

SEQ ID NO: 79007 - DNA, 22 bp, Artificial Sequence
  Synthetic oligonucleotide; TTT chr11 5197971 5197992 5197988 5197993 +
ttttttttttgagacagagtct

SEQ ID NO: 79008 - DNA, 22 bp, Artificial Sequence
  Synthetic oligonucleotide; TTT chr11 5197972 5197993 5197989 5197994 +
tttttttttgagacagagtctc

SEQ ID NO: 79009 - DNA, 22 bp, Artificial Sequence
  Synthetic oligonucleotide; TTT chr11 5197973 5197994 5197990 5197995 +
ttttttttgagacagagtctct

SEQ ID NO: 79010 - DNA, 22 bp, Artificial Sequence
  Synthetic oligonucleotide; TTT chr11 5197974 5197995 5197991 5197996 +
tttttttgagacagagtctctc

SEQ ID NO: 79011 - DNA, 22 bp, Artificial Sequence
  Synthetic oligonucleotide; TTT chr11 5197975 5197996 5197992 5197997 +
ttttttgagacagagtctctct

SEQ ID NO: 79012 - DNA, 22 bp, Artificial Sequence
  Synthetic oligonucleotide; TTT chr11 5197976 5197997 5197993 5197998 +
tttttgagacagagtctctctc

SEQ ID NO: 79013 - DNA, 22 bp, Artificial Sequence
  Synthetic oligonucleotide; TTT chr11 5197977 5197998 5197994 5197999 +
ttttgagacagagtctctctct

SEQ ID NO: 79014 - DNA, 22 bp, Artificial Sequence
  Synthetic oligonucleotide; TTT chr11 5197978 5197999 5197995 5198000 +
tttgagacagagtctctctctg

SEQ ID NO: 79015 - DNA, 22 bp, Artificial Sequence
  Synthetic oligonucleotide; TTT chr11 5197979 5198000 5197996 5198001 +
ttgagacagagtctctctctgt

SEQ ID NO: 79016 - DNA, 22 bp, Artificial Sequence
  Synthetic oligonucleotide; TTT chr11 5197980 5198001 5197997 5198002 +
tgagacagagtctctctctgtc

SEQ ID NO: 79017 - DNA, 22 bp, Artificial Sequence
  Synthetic oligonucleotide; TTT chr11 5197981 5198002 5197998 5198003 +
gagacagagtctctctctgtcg

SEQ ID NO: 79018 - DNA, 22 bp, Artificial Sequence
  Synthetic oligonucleotide; TTG chr11 5197982 5198003 5197999 5198004 +
agacagagtctctctctgtcgc

SEQ ID NO: 79019 - DNA, 22 bp, Artificial Sequence
  Synthetic oligonucleotide; CTC chr11 5197994 5198015 5198011 5198016 +
tctctgtcgcccaggctggagt

SEQ ID NO: 79020 - DNA, 22 bp, Artificial Sequence
  Synthetic oligonucleotide; CTC chr11 5197996 5198017 5198013 5198018 +
tctgtcgcccaggctggagtgc

SEQ ID NO: 79021 - DNA, 22 bp, Artificial Sequence
  Synthetic oligonucleotide; CTC chr11 5197998 5198019 5198015 5198020 +
tgtcgcccaggctggagtgcag

SEQ ID NO: 79022 - DNA, 22 bp, Artificial Sequence
  Synthetic oligonucleotide; CTG chr11 5198000 5198021 5198017 5198022 +
tcgcccaggctggagtgcagtg

SEQ ID NO: 79023 - DNA, 22 bp, Artificial Sequence
  Synthetic oligonucleotide; CTG chr11 5198012 5198033 5198029 5198034 +
gagtgcagtggcgtgatctcga

SEQ ID NO: 79024 - DNA, 22 bp, Artificial Sequence
  Synthetic oligonucleotide; CTC chr11 5198032 5198053 5198049 5198054 +
gactcactgcaagctccacctc

SEQ ID NO: 79025 - DNA, 22 bp, Artificial Sequence
  Synthetic oligonucleotide; CTC chr11 5198037 5198058 5198054 5198059 +
actgcaagctccacctcccggg

SEQ ID NO: 79026 - DNA, 22 bp, Artificial Sequence
  Synthetic oligonucleotide; CTG chr11 5198041 5198062 5198058 5198063 +
caagctccacctcccgggttca

SEQ ID NO: 79027 - DNA, 22 bp, Artificial Sequence
  Synthetic oligonucleotide; CTC chr11 5198048 5198069 5198065 5198070 +
cacctcccgggttcacgccatt

SEQ ID NO: 79028 - DNA, 22 bp, Artificial Sequence
  Synthetic oligonucleotide; CTC chr11 5198054 5198075 5198071 5198076 +
ccgggttcacgccattctcctg

SEQ ID NO: 79029 - DNA, 22 bp, Artificial Sequence
  Synthetic oligonucleotide; TTC chr11 5198062 5198083 5198079 5198084 +
acgccattctcctgtctcagcc

SEQ ID NO: 79030 - DNA, 22 bp, Artificial Sequence
  Synthetic oligonucleotide; TTC chr11 5198071 5198092 5198088 5198093 +
tcctgtctcagcctcccgagta

SEQ ID NO: 79031 - DNA, 22 bp, Artificial Sequence
  Synthetic oligonucleotide; CTC chr11 5198073 5198094 5198090 5198095 +
ctgtctcagcctcccgagtacc

SEQ ID NO: 79032 - DNA, 22 bp, Artificial Sequence
  Synthetic oligonucleotide; CTG chr11 5198076 5198097 5198093 5198098 +
tctcagcctcccgagtacctgg

SEQ ID NO: 79033 - DNA, 22 bp, Artificial Sequence
  Synthetic oligonucleotide; CTC chr11 5198080 5198101 5198097 5198102 +
agcctcccgagtacctgggact

SEQ ID NO: 79034 - DNA, 22 bp, Artificial Sequence
  Synthetic oligonucleotide; CTC chr11 5198086 5198107 5198103 5198108 +
ccgagtacctgggactacaggt

SEQ ID NO: 79035 - DNA, 22 bp, Artificial Sequence
  Synthetic oligonucleotide; CTG chr11 5198097 5198118 5198114 5198119 +
ggactacaggtgcccgccacca

SEQ ID NO: 79036 - DNA, 22 bp, Artificial Sequence
  Synthetic oligonucleotide; CTA chr11 5198103 5198124 5198120 5198125 +
caggtgcccgccaccacgcctg

SEQ ID NO: 79037 - DNA, 22 bp, Artificial Sequence
  Synthetic oligonucleotide; CTG chr11 5198125 5198146 5198142 5198147 +
gatactttcttgtgttttttta

SEQ ID NO: 79038 - DNA, 22 bp, Artificial Sequence
  Synthetic oligonucleotide; CTT chr11 5198132 5198153 5198149 5198154 +
tcttgtgtttttttagtagaga

SEQ ID NO: 79039 - DNA, 22 bp, Artificial Sequence
  Synthetic oligonucleotide; TTT chr11 5198133 5198154 5198150 5198155 +
cttgtgtttttttagtagagac

SEQ ID NO: 79040 - DNA, 22 bp, Artificial Sequence
  Synthetic oligonucleotide; TTC chr11 5198134 5198155 5198151 5198156 +
ttgtgtttttttagtagagacg

SEQ ID NO: 79041 - DNA, 22 bp, Artificial Sequence
  Synthetic oligonucleotide; CTT chr11 5198136 5198157 5198153 5198158 +
gtgtttttttagtagagacggg

SEQ ID NO: 79042 - DNA, 22 bp, Artificial Sequence
  Synthetic oligonucleotide; TTG chr11 5198137 5198158 5198154 5198159 +
tgtttttttagtagagacgggg

SEQ ID NO: 79043 - DNA, 22 bp, Artificial Sequence
  Synthetic oligonucleotide; TTT chr11 5198142 5198163 5198159 5198164 +
ttttagtagagacggggtttca

SEQ ID NO: 79044 - DNA, 22 bp, Artificial Sequence
  Synthetic oligonucleotide; TTT chr11 5198143 5198164 5198160 5198165 +
tttagtagagacggggtttcac

SEQ ID NO: 79045 - DNA, 22 bp, Artificial Sequence
  Synthetic oligonucleotide; TTT chr11 5198144 5198165 5198161 5198166 +
ttagtagagacggggtttcacc

SEQ ID NO: 79046 - DNA, 22 bp, Artificial Sequence
  Synthetic oligonucleotide; TTT chr11 5198145 5198166 5198162 5198167 +
tagtagagacggggtttcacca

SEQ ID NO: 79047 - DNA, 22 bp, Artificial Sequence
  Synthetic oligonucleotide; TTT chr11 5198146 5198167 5198163 5198168 +
agtagagacggggtttcaccat

SEQ ID NO: 79048 - DNA, 22 bp, Artificial Sequence
  Synthetic oligonucleotide; TTA chr11 5198147 5198168 5198164 5198169 +
gtagagacggggtttcaccatt

SEQ ID NO: 79049 - DNA, 22 bp, Artificial Sequence
  Synthetic oligonucleotide; TTT chr11 5198162 5198183 5198179 5198184 +
caccattgctggccaggatggt

SEQ ID NO: 79050 - DNA, 22 bp, Artificial Sequence
  Synthetic oligonucleotide; TTC chr11 5198163 5198184 5198180 5198185 +
accattgctggccaggatggtc

SEQ ID NO: 79051 - DNA, 22 bp, Artificial Sequence
  Synthetic oligonucleotide; TTG chr11 5198170 5198191 5198187 5198192 +
ctggccaggatggtctcgatct

SEQ ID NO: 79052 - DNA, 22 bp, Artificial Sequence
  Synthetic oligonucleotide; CTG chr11 5198173 5198194 5198190 5198195 +
gccaggatggtctcgatctcct

SEQ ID NO: 79053 - DNA, 22 bp, Artificial Sequence
  Synthetic oligonucleotide; CTC chr11 5198187 5198208 5198204 5198209 +
gatctcctgacctcatgatccg

SEQ ID NO: 79054 - DNA, 22 bp, Artificial Sequence
  Synthetic oligonucleotide; CTC chr11 5198193 5198214 5198210 5198215 +
ctgacctcatgatccgcccgcc

SEQ ID NO: 79055 - DNA, 22 bp, Artificial Sequence
  Synthetic oligonucleotide; CTG chr11 5198196 5198217 5198213 5198218 +
acctcatgatccgcccgcctcg

SEQ ID NO: 79056 - DNA, 22 bp, Artificial Sequence
  Synthetic oligonucleotide; CTC chr11 5198201 5198222 5198218 5198223 +
atgatccgcccgcctcggcagc

SEQ ID NO: 79057 - DNA, 22 bp, Artificial Sequence
  Synthetic oligonucleotide; CTC chr11 5198217 5198238 5198234 5198239 +
ggcagctactatgattatatag

SEQ ID NO: 79058 - DNA, 22 bp, Artificial Sequence
  Synthetic oligonucleotide; CTA chr11 5198225 5198246 5198242 5198247 +
ctatgattatatagtaaaaaat

SEQ ID NO: 79059 - DNA, 22 bp, Artificial Sequence
  Synthetic oligonucleotide; CTA chr11 5198228 5198249 5198245 5198250 +
tgattatatagtaaaaaatata

SEQ ID NO: 79060 - DNA, 22 bp, Artificial Sequence
  Synthetic oligonucleotide; TTA chr11 5198234 5198255 5198251 5198256 +
tatagtaaaaaatatatatatt

SEQ ID NO: 79061 - DNA, 22 bp, Artificial Sequence
  Synthetic oligonucleotide; TTG chr11 5198257 5198278 5198274 5198279 +
acattttcccctctagaaccta

SEQ ID NO: 79062 - DNA, 22 bp, Artificial Sequence
  Synthetic oligonucleotide; TTT chr11 5198263 5198284 5198280 5198285 +
tcccctctagaacctacctcac

SEQ ID NO: 79063 - DNA, 22 bp, Artificial Sequence
  Synthetic oligonucleotide; TTT chr11 5198264 5198285 5198281 5198286 +
cccctctagaacctacctcaca

SEQ ID NO: 79064 - DNA, 22 bp, Artificial Sequence
  Synthetic oligonucleotide; TTC chr11 5198265 5198286 5198282 5198287 +
ccctctagaacctacctcacag

SEQ ID NO: 79065 - DNA, 22 bp, Artificial Sequence
  Synthetic oligonucleotide; CTC chr11 5198270 5198291 5198287 5198292 +
tagaacctacctcacagttttc

SEQ ID NO: 79066 - DNA, 22 bp, Artificial Sequence
  Synthetic oligonucleotide; CTA chr11 5198272 5198293 5198289 5198294 +
gaacctacctcacagttttcac

SEQ ID NO: 79067 - DNA, 22 bp, Artificial Sequence
  Synthetic oligonucleotide; CTA chr11 5198279 5198300 5198296 5198301 +
cctcacagttttcacttctgat

SEQ ID NO: 79068 - DNA, 22 bp, Artificial Sequence
  Synthetic oligonucleotide; CTC chr11 5198283 5198304 5198300 5198305 +
acagttttcacttctgatagct

SEQ ID NO: 79069 - DNA, 22 bp, Artificial Sequence
  Synthetic oligonucleotide; TTT chr11 5198290 5198311 5198307 5198312 +
tcacttctgatagctataccag

SEQ ID NO: 79070 - DNA, 22 bp, Artificial Sequence
  Synthetic oligonucleotide; TTT chr11 5198291 5198312 5198308 5198313 +
cacttctgatagctataccaga

SEQ ID NO: 79071 - DNA, 22 bp, Artificial Sequence
  Synthetic oligonucleotide; TTC chr11 5198292 5198313 5198309 5198314 +
acttctgatagctataccagaa

SEQ ID NO: 79072 - DNA, 22 bp, Artificial Sequence
  Synthetic oligonucleotide; CTT chr11 5198296 5198317 5198313 5198318 +
ctgatagctataccagaagatg

SEQ ID NO: 79073 - DNA, 22 bp, Artificial Sequence
  Synthetic oligonucleotide; TTC chr11 5198297 5198318 5198314 5198319 +
tgatagctataccagaagatgc

SEQ ID NO: 79074 - DNA, 22 bp, Artificial Sequence
  Synthetic oligonucleotide; CTG chr11 5198299 5198320 5198316 5198321 +
atagctataccagaagatgcac

SEQ ID NO: 79075 - DNA, 22 bp, Artificial Sequence
  Synthetic oligonucleotide; CTA chr11 5198306 5198327 5198323 5198328 +
taccagaagatgcactagatcc

SEQ ID NO: 79076 - DNA, 22 bp, Artificial Sequence
  Synthetic oligonucleotide; CTA chr11 5198323 5198344 5198340 5198345 +
gatcctctttgacatcaggaaa

SEQ ID NO: 79077 - DNA, 22 bp, Artificial Sequence
  Synthetic oligonucleotide; CTC chr11 5198330 5198351 5198347 5198352 +
tttgacatcaggaaattcactc

SEQ ID NO: 79078 - DNA, 22 bp, Artificial Sequence
  Synthetic oligonucleotide; CTT chr11 5198332 5198353 5198349 5198354 +
tgacatcaggaaattcactcct

SEQ ID NO: 79079 - DNA, 22 bp, Artificial Sequence
  Synthetic oligonucleotide; TTT chr11 5198333 5198354 5198350 5198355 +
gacatcaggaaattcactcctt

SEQ ID NO: 79080 - DNA, 22 bp, Artificial Sequence
  Synthetic oligonucleotide; TTG chr11 5198334 5198355 5198351 5198356 +
acatcaggaaattcactccttt

SEQ ID NO: 79081 - DNA, 22 bp, Artificial Sequence
  Synthetic oligonucleotide; TTC chr11 5198348 5198369 5198365 5198370 +
actcctttatccttcaaattaa

SEQ ID NO: 79082 - DNA, 22 bp, Artificial Sequence
  Synthetic oligonucleotide; CTC chr11 5198352 5198373 5198369 5198374 +
ctttatccttcaaattaacctt

SEQ ID NO: 79083 - DNA, 22 bp, Artificial Sequence
  Synthetic oligonucleotide; CTT chr11 5198355 5198376 5198372 5198377 +
tatccttcaaattaaccttata

SEQ ID NO: 79084 - DNA, 22 bp, Artificial Sequence
  Synthetic oligonucleotide; TTT chr11 5198356 5198377 5198373 5198378 +
atccttcaaattaaccttatac

SEQ ID NO: 79085 - DNA, 22 bp, Artificial Sequence
  Synthetic oligonucleotide; TTA chr11 5198357 5198378 5198374 5198379 +
tccttcaaattaaccttatact

SEQ ID NO: 79086 - DNA, 22 bp, Artificial Sequence
  Synthetic oligonucleotide; CTT chr11 5198362 5198383 5198379 5198384 +
caaattaaccttatactgtaac

SEQ ID NO: 79087 - DNA, 22 bp, Artificial Sequence
  Synthetic oligonucleotide; TTC chr11 5198363 5198384 5198380 5198385 +
aaattaaccttatactgtaacc

SEQ ID NO: 79088 - DNA, 22 bp, Artificial Sequence
  Synthetic oligonucleotide; TTA chr11 5198369 5198390 5198386 5198391 +
accttatactgtaacccagaag

SEQ ID NO: 79089 - DNA, 22 bp, Artificial Sequence
  Synthetic oligonucleotide; CTT chr11 5198374 5198395 5198391 5198396 +
atactgtaacccagaagaccta

SEQ ID NO: 79090 - DNA, 22 bp, Artificial Sequence
  Synthetic oligonucleotide; TTA chr11 5198375 5198396 5198392 5198397 +
tactgtaacccagaagacctaa

SEQ ID NO: 79091 - DNA, 22 bp, Artificial Sequence
  Synthetic oligonucleotide; CTG chr11 5198380 5198401 5198397 5198402 +
taacccagaagacctaatttat

SEQ ID NO: 79092 - DNA, 22 bp, Artificial Sequence
  Synthetic oligonucleotide; CTA chr11 5198396 5198417 5198413 5198418 +
atttattgttctaggaataatt

SEQ ID NO: 79093 - DNA, 22 bp, Artificial Sequence
  Synthetic oligonucleotide; TTT chr11 5198400 5198421 5198417 5198422 +
attgttctaggaataattttac

SEQ ID NO: 79094 - DNA, 22 bp, Artificial Sequence
  Synthetic oligonucleotide; TTA chr11 5198401 5198422 5198418 5198423 +
ttgttctaggaataattttaca

SEQ ID NO: 79095 - DNA, 22 bp, Artificial Sequence
  Synthetic oligonucleotide; TTG chr11 5198404 5198425 5198421 5198426 +
ttctaggaataattttacactt

SEQ ID NO: 79096 - DNA, 22 bp, Artificial Sequence
  Synthetic oligonucleotide; TTC chr11 5198407 5198428 5198424 5198429 +
taggaataattttacacttatc

SEQ ID NO: 79097 - DNA, 22 bp, Artificial Sequence
  Synthetic oligonucleotide; CTA chr11 5198409 5198430 5198426 5198431 +
ggaataattttacacttatctt

SEQ ID NO: 79098 - DNA, 22 bp, Artificial Sequence
  Synthetic oligonucleotide; TTT chr11 5198419 5198440 5198436 5198441 +
tacacttatctttctaaccaga

SEQ ID NO: 79099 - DNA, 22 bp, Artificial Sequence
  Synthetic oligonucleotide; TTT chr11 5198420 5198441 5198437 5198442 +
acacttatctttctaaccagat

SEQ ID NO: 79100 - DNA, 22 bp, Artificial Sequence
  Synthetic oligonucleotide; TTA chr11 5198421 5198442 5198438 5198443 +
cacttatctttctaaccagata

SEQ ID NO: 79101 - DNA, 22 bp, Artificial Sequence
  Synthetic oligonucleotide; CTT chr11 5198426 5198447 5198443 5198448 +
atctttctaaccagatacttta

SEQ ID NO: 79102 - DNA, 22 bp, Artificial Sequence
  Synthetic oligonucleotide; TTA chr11 5198427 5198448 5198444 5198449 +
tctttctaaccagatactttac

SEQ ID NO: 79103 - DNA, 22 bp, Artificial Sequence
  Synthetic oligonucleotide; CTT chr11 5198431 5198452 5198448 5198453 +
tctaaccagatactttactctg

SEQ ID NO: 79104 - DNA, 22 bp, Artificial Sequence
  Synthetic oligonucleotide; TTT chr11 5198432 5198453 5198449 5198454 +
ctaaccagatactttactctgt

SEQ ID NO: 79105 - DNA, 22 bp, Artificial Sequence
  Synthetic oligonucleotide; TTC chr11 5198433 5198454 5198450 5198455 +
taaccagatactttactctgtc

SEQ ID NO: 79106 - DNA, 22 bp, Artificial Sequence
  Synthetic oligonucleotide; CTA chr11 5198435 5198456 5198452 5198457 +
accagatactttactctgtcca

SEQ ID NO: 79107 - DNA, 22 bp, Artificial Sequence
  Synthetic oligonucleotide; CTT chr11 5198446 5198467 5198463 5198468 +
tactctgtccagaaacaatttc

SEQ ID NO: 79108 - DNA, 22 bp, Artificial Sequence
  Synthetic oligonucleotide; TTT chr11 5198447 5198468 5198464 5198469 +
actctgtccagaaacaatttcc

SEQ ID NO: 79109 - DNA, 22 bp, Artificial Sequence
  Synthetic oligonucleotide; TTA chr11 5198448 5198469 5198465 5198470 +
ctctgtccagaaacaatttcct

SEQ ID NO: 79110 - DNA, 22 bp, Artificial Sequence
  Synthetic oligonucleotide; CTC chr11 5198451 5198472 5198468 5198473 +
tgtccagaaacaatttcctcac

SEQ ID NO: 79111 - DNA, 22 bp, Artificial Sequence
  Synthetic oligonucleotide; CTG chr11 5198453 5198474 5198470 5198475 +
tccagaaacaatttcctcactt

SEQ ID NO: 79112 - DNA, 22 bp, Artificial Sequence
  Synthetic oligonucleotide; TTT chr11 5198467 5198488 5198484 5198489 +
cctcactttgaggcttaagcta

SEQ ID NO: 79113 - DNA, 22 bp, Artificial Sequence
  Synthetic oligonucleotide; TTC chr11 5198468 5198489 5198485 5198490 +
ctcactttgaggcttaagctat

SEQ ID NO: 79114 - DNA, 22 bp, Artificial Sequence
  Synthetic oligonucleotide; CTC chr11 5198471 5198492 5198488 5198493 +
actttgaggcttaagctattag

SEQ ID NO: 79115 - DNA, 22 bp, Artificial Sequence
  Synthetic oligonucleotide; CTT chr11 5198475 5198496 5198492 5198497 +
tgaggcttaagctattagaaac

SEQ ID NO: 79116 - DNA, 22 bp, Artificial Sequence
  Synthetic oligonucleotide; TTT chr11 5198476 5198497 5198493 5198498 +
gaggcttaagctattagaaacc

SEQ ID NO: 79117 - DNA, 22 bp, Artificial Sequence
  Synthetic oligonucleotide; TTG chr11 5198477 5198498 5198494 5198499 +
aggcttaagctattagaaacca

SEQ ID NO: 79118 - DNA, 22 bp, Artificial Sequence
  Synthetic oligonucleotide; CTT chr11 5198483 5198504 5198500 5198505 +
aagctattagaaaccaaagcct

SEQ ID NO: 79119 - DNA, 22 bp, Artificial Sequence
  Synthetic oligonucleotide; TTA chr11 5198484 5198505 5198501 5198506 +
agctattagaaaccaaagcctg

SEQ ID NO: 79120 - DNA, 22 bp, Artificial Sequence
  Synthetic oligonucleotide; CTA chr11 5198489 5198510 5198506 5198511 +
ttagaaaccaaagcctgtattt

SEQ ID NO: 79121 - DNA, 22 bp, Artificial Sequence
  Synthetic oligonucleotide; TTA chr11 5198492 5198513 5198509 5198514 +
gaaaccaaagcctgtatttttg

SEQ ID NO: 79122 - DNA, 22 bp, Artificial Sequence
  Synthetic oligonucleotide; CTG chr11 5198506 5198527 5198523 5198528 +
tatttttgtttccctctgagtc

SEQ ID NO: 79123 - DNA, 22 bp, Artificial Sequence
  Synthetic oligonucleotide; TTT chr11 5198511 5198532 5198528 5198533 +
ttgtttccctctgagtcaaata

SEQ ID NO: 79124 - DNA, 22 bp, Artificial Sequence
  Synthetic oligonucleotide; TTT chr11 5198512 5198533 5198529 5198534 +
tgtttccctctgagtcaaataa

SEQ ID NO: 79125 - DNA, 22 bp, Artificial Sequence
  Synthetic oligonucleotide; TTT chr11 5198513 5198534 5198530 5198535 +
gtttccctctgagtcaaataag

SEQ ID NO: 79126 - DNA, 22 bp, Artificial Sequence
  Synthetic oligonucleotide; TTG chr11 5198514 5198535 5198531 5198536 +
tttccctctgagtcaaataagt

SEQ ID NO: 79127 - DNA, 22 bp, Artificial Sequence
  Synthetic oligonucleotide; TTT chr11 5198517 5198538 5198534 5198539 +
ccctctgagtcaaataagtaga

SEQ ID NO: 79128 - DNA, 22 bp, Artificial Sequence
  Synthetic oligonucleotide; TTC chr11 5198518 5198539 5198535 5198540 +
cctctgagtcaaataagtagac

SEQ ID NO: 79129 - DNA, 22 bp, Artificial Sequence
  Synthetic oligonucleotide; CTC chr11 5198522 5198543 5198539 5198544 +
tgagtcaaataagtagacagag

SEQ ID NO: 79130 - DNA, 22 bp, Artificial Sequence
  Synthetic oligonucleotide; CTG chr11 5198524 5198545 5198541 5198546 +
agtcaaataagtagacagaggc

SEQ ID NO: 79131 - DNA, 22 bp, Artificial Sequence
  Synthetic oligonucleotide; CTA chr11 5198548 5198569 5198565 5198570 +
tgttattgaatgaagtccaaag

SEQ ID NO: 79132 - DNA, 22 bp, Artificial Sequence
  Synthetic oligonucleotide; TTA chr11 5198553 5198574 5198570 5198575 +
ttgaatgaagtccaaagtgaaa

SEQ ID NO: 79133 - DNA, 22 bp, Artificial Sequence
  Synthetic oligonucleotide; TTG chr11 5198556 5198577 5198573 5198578 +
aatgaagtccaaagtgaaagga

SEQ ID NO: 79134 - DNA, 22 bp, Artificial Sequence
  Synthetic oligonucleotide; TTA chr11 5198594 5198615 5198611 5198616 +
caggaagacaaatctggttgtt

SEQ ID NO: 79135 - DNA, 22 bp, Artificial Sequence
  Synthetic oligonucleotide; CTG chr11 5198610 5198631 5198627 5198632 +
gttgttttagttgatatctaaa

SEQ ID NO: 79136 - DNA, 22 bp, Artificial Sequence
  Synthetic oligonucleotide; TTG chr11 5198614 5198635 5198631 5198636 +
ttttagttgatatctaaaaata

SEQ ID NO: 79137 - DNA, 22 bp, Artificial Sequence
  Synthetic oligonucleotide; TTT chr11 5198617 5198638 5198634 5198639 +
tagttgatatctaaaaataaaa

SEQ ID NO: 79138 - DNA, 22 bp, Artificial Sequence
  Synthetic oligonucleotide; TTT chr11 5198618 5198639 5198635 5198640 +
agttgatatctaaaaataaaaa

SEQ ID NO: 79139 - DNA, 22 bp, Artificial Sequence
  Synthetic oligonucleotide; TTA chr11 5198619 5198640 5198636 5198641 +
gttgatatctaaaaataaaaat

SEQ ID NO: 79140 - DNA, 22 bp, Artificial Sequence
  Synthetic oligonucleotide; TTG chr11 5198623 5198644 5198640 5198645 +
atatctaaaaataaaaataaat

SEQ ID NO: 79141 - DNA, 22 bp, Artificial Sequence
  Synthetic oligonucleotide; CTA chr11 5198630 5198651 5198647 5198652 +
aaaataaaaataaatatttgct

SEQ ID NO: 79142 - DNA, 22 bp, Artificial Sequence
  Synthetic oligonucleotide; TTT chr11 5198649 5198670 5198666 5198671 +
gctttttggtgtaaaatgactc

SEQ ID NO: 79143 - DNA, 22 bp, Artificial Sequence
  Synthetic oligonucleotide; TTG chr11 5198650 5198671 5198667 5198672 +
ctttttggtgtaaaatgactct

SEQ ID NO: 79144 - DNA, 22 bp, Artificial Sequence
  Synthetic oligonucleotide; CTT chr11 5198653 5198674 5198670 5198675 +
tttggtgtaaaatgactcttat

SEQ ID NO: 79145 - DNA, 22 bp, Artificial Sequence
  Synthetic oligonucleotide; TTT chr11 5198654 5198675 5198671 5198676 +
ttggtgtaaaatgactcttatg

SEQ ID NO: 79146 - DNA, 22 bp, Artificial Sequence
  Synthetic oligonucleotide; TTT chr11 5198655 5198676 5198672 5198677 +
tggtgtaaaatgactcttatgc

SEQ ID NO: 79147 - DNA, 22 bp, Artificial Sequence
  Synthetic oligonucleotide; TTT chr11 5198656 5198677 5198673 5198678 +
ggtgtaaaatgactcttatgca

SEQ ID NO: 79148 - DNA, 22 bp, Artificial Sequence
  Synthetic oligonucleotide; TTG chr11 5198657 5198678 5198674 5198679 +
gtgtaaaatgactcttatgcat

SEQ ID NO: 79149 - DNA, 22 bp, Artificial Sequence
  Synthetic oligonucleotide; CTC chr11 5198671 5198692 5198688 5198693 +
ttatgcattaatttgtccaatt

SEQ ID NO: 79150 - DNA, 22 bp, Artificial Sequence
  Synthetic oligonucleotide; CTT chr11 5198673 5198694 5198690 5198695 +
atgcattaatttgtccaatttt

SEQ ID NO: 79151 - DNA, 22 bp, Artificial Sequence
  Synthetic oligonucleotide; TTA chr11 5198674 5198695 5198691 5198696 +
tgcattaatttgtccaatttta

SEQ ID NO: 79152 - DNA, 22 bp, Artificial Sequence
  Synthetic oligonucleotide; TTA chr11 5198681 5198702 5198698 5198703 +
atttgtccaattttaacactta

SEQ ID NO: 79153 - DNA, 22 bp, Artificial Sequence
  Synthetic oligonucleotide; TTT chr11 5198685 5198706 5198702 5198707 +
gtccaattttaacacttacctt

SEQ ID NO: 79154 - DNA, 22 bp, Artificial Sequence
  Synthetic oligonucleotide; TTG chr11 5198686 5198707 5198703 5198708 +
tccaattttaacacttaccttc

SEQ ID NO: 79155 - DNA, 22 bp, Artificial Sequence
  Synthetic oligonucleotide; TTT chr11 5198694 5198715 5198711 5198716 +
taacacttaccttcttagatac

SEQ ID NO: 79156 - DNA, 22 bp, Artificial Sequence
  Synthetic oligonucleotide; TTT chr11 5198695 5198716 5198712 5198717 +
aacacttaccttcttagatacc

SEQ ID NO: 79157 - DNA, 22 bp, Artificial Sequence
  Synthetic oligonucleotide; TTA chr11 5198696 5198717 5198713 5198718 +
acacttaccttcttagatacct

SEQ ID NO: 79158 - DNA, 22 bp, Artificial Sequence
  Synthetic oligonucleotide; CTT chr11 5198702 5198723 5198719 5198724 +
accttcttagatacctaataga

SEQ ID NO: 79159 - DNA, 22 bp, Artificial Sequence
  Synthetic oligonucleotide; TTA chr11 5198703 5198724 5198720 5198725 +
ccttcttagatacctaatagaa

SEQ ID NO: 79160 - DNA, 22 bp, Artificial Sequence
  Synthetic oligonucleotide; CTT chr11 5198707 5198728 5198724 5198729 +
cttagatacctaatagaatata

SEQ ID NO: 79161 - DNA, 22 bp, Artificial Sequence
  Synthetic oligonucleotide; TTC chr11 5198708 5198729 5198725 5198730 +
ttagatacctaatagaatatag

SEQ ID NO: 79162 - DNA, 22 bp, Artificial Sequence
  Synthetic oligonucleotide; CTT chr11 5198710 5198731 5198727 5198732 +
agatacctaatagaatatagga

SEQ ID NO: 79163 - DNA, 22 bp, Artificial Sequence
  Synthetic oligonucleotide; TTA chr11 5198711 5198732 5198728 5198733 +
gatacctaatagaatataggaa

SEQ ID NO: 79164 - DNA, 22 bp, Artificial Sequence
  Synthetic oligonucleotide; CTA chr11 5198719 5198740 5198736 5198741 +
atagaatataggaagattaaaa

SEQ ID NO: 79165 - DNA, 22 bp, Artificial Sequence
  Synthetic oligonucleotide; TTA chr11 5198738 5198759 5198755 5198760 +
aaacaattattttcttgttatc

SEQ ID NO: 79166 - DNA, 22 bp, Artificial Sequence
  Synthetic oligonucleotide; TTA chr11 5198747 5198768 5198764 5198769 +
ttttcttgttatccatgcatag

SEQ ID NO: 79167 - DNA, 22 bp, Artificial Sequence
  Synthetic oligonucleotide; TTT chr11 5198750 5198771 5198767 5198772 +
tcttgttatccatgcatagttt

SEQ ID NO: 79168 - DNA, 22 bp, Artificial Sequence
  Synthetic oligonucleotide; TTT chr11 5198751 5198772 5198768 5198773 +
cttgttatccatgcatagtttt

SEQ ID NO: 79169 - DNA, 22 bp, Artificial Sequence
  Synthetic oligonucleotide; TTC chr11 5198752 5198773 5198769 5198774 +
ttgttatccatgcatagttttg

SEQ ID NO: 79170 - DNA, 22 bp, Artificial Sequence
  Synthetic oligonucleotide; CTT chr11 5198754 5198775 5198771 5198776 +
gttatccatgcatagttttgta

SEQ ID NO: 79171 - DNA, 22 bp, Artificial Sequence
  Synthetic oligonucleotide; TTG chr11 5198755 5198776 5198772 5198777 +
ttatccatgcatagttttgtac

SEQ ID NO: 79172 - DNA, 22 bp, Artificial Sequence
  Synthetic oligonucleotide; TTA chr11 5198758 5198779 5198775 5198780 +
tccatgcatagttttgtacctg

SEQ ID NO: 79173 - DNA, 22 bp, Artificial Sequence
  Synthetic oligonucleotide; TTT chr11 5198772 5198793 5198789 5198794 +
tgtacctgatttccttcctttc

SEQ ID NO: 79174 - DNA, 22 bp, Artificial Sequence
  Synthetic oligonucleotide; TTT chr11 5198773 5198794 5198790 5198795 +
gtacctgatttccttcctttct

SEQ ID NO: 79175 - DNA, 22 bp, Artificial Sequence
  Synthetic oligonucleotide; TTG chr11 5198774 5198795 5198791 5198796 +
tacctgatttccttcctttctt

SEQ ID NO: 79176 - DNA, 22 bp, Artificial Sequence
  Synthetic oligonucleotide; CTG chr11 5198780 5198801 5198797 5198802 +
atttccttcctttctttccttc

SEQ ID NO: 79177 - DNA, 22 bp, Artificial Sequence
  Synthetic oligonucleotide; TTT chr11 5198784 5198805 5198801 5198806 +
ccttcctttctttccttctttg

SEQ ID NO: 79178 - DNA, 22 bp, Artificial Sequence
  Synthetic oligonucleotide; TTC chr11 5198785 5198806 5198802 5198807 +
cttcctttctttccttctttgg

SEQ ID NO: 79179 - DNA, 22 bp, Artificial Sequence
  Synthetic oligonucleotide; CTT chr11 5198788 5198809 5198805 5198810 +
cctttctttccttctttggaaa

SEQ ID NO: 79180 - DNA, 22 bp, Artificial Sequence
  Synthetic oligonucleotide; TTC chr11 5198789 5198810 5198806 5198811 +
ctttctttccttctttggaaag

SEQ ID NO: 79181 - DNA, 22 bp, Artificial Sequence
  Synthetic oligonucleotide; CTT chr11 5198792 5198813 5198809 5198814 +
tctttccttctttggaaagctg

SEQ ID NO: 79182 - DNA, 22 bp, Artificial Sequence
  Synthetic oligonucleotide; TTT chr11 5198793 5198814 5198810 5198815 +
ctttccttctttggaaagctgc

SEQ ID NO: 79183 - DNA, 22 bp, Artificial Sequence
  Synthetic oligonucleotide; TTC chr11 5198794 5198815 5198811 5198816 +
tttccttctttggaaagctgca

SEQ ID NO: 79184 - DNA, 22 bp, Artificial Sequence
  Synthetic oligonucleotide; CTT chr11 5198796 5198817 5198813 5198818 +
tccttctttggaaagctgcact

SEQ ID NO: 79185 - DNA, 22 bp, Artificial Sequence
  Synthetic oligonucleotide; TTT chr11 5198797 5198818 5198814 5198819 +
ccttctttggaaagctgcacta

SEQ ID NO: 79186 - DNA, 22 bp, Artificial Sequence
  Synthetic oligonucleotide; TTC chr11 5198798 5198819 5198815 5198820 +
cttctttggaaagctgcactag

SEQ ID NO: 79187 - DNA, 22 bp, Artificial Sequence
  Synthetic oligonucleotide; CTT chr11 5198801 5198822 5198818 5198823 +
ctttggaaagctgcactagctt

SEQ ID NO: 79188 - DNA, 22 bp, Artificial Sequence
  Synthetic oligonucleotide; TTC chr11 5198802 5198823 5198819 5198824 +
tttggaaagctgcactagctta

SEQ ID NO: 79189 - DNA, 22 bp, Artificial Sequence
  Synthetic oligonucleotide; CTT chr11 5198804 5198825 5198821 5198826 +
tggaaagctgcactagcttact

SEQ ID NO: 79190 - DNA, 22 bp, Artificial Sequence
  Synthetic oligonucleotide; TTT chr11 5198805 5198826 5198822 5198827 +
ggaaagctgcactagcttactt

SEQ ID NO: 79191 - DNA, 22 bp, Artificial Sequence
  Synthetic oligonucleotide; TTG chr11 5198806 5198827 5198823 5198828 +
gaaagctgcactagcttactta

SEQ ID NO: 79192 - DNA, 22 bp, Artificial Sequence
  Synthetic oligonucleotide; CTG chr11 5198814 5198835 5198831 5198836 +
cactagcttacttagaaaagaa

SEQ ID NO: 79193 - DNA, 22 bp, Artificial Sequence
  Synthetic oligonucleotide; CTA chr11 5198819 5198840 5198836 5198841 +
gcttacttagaaaagaaccgct

SEQ ID NO: 79194 - DNA, 22 bp, Artificial Sequence
  Synthetic oligonucleotide; CTT chr11 5198823 5198844 5198840 5198845 +
acttagaaaagaaccgctttat

SEQ ID NO: 79195 - DNA, 22 bp, Artificial Sequence
  Synthetic oligonucleotide; TTA chr11 5198824 5198845 5198841 5198846 +
cttagaaaagaaccgctttatg

SEQ ID NO: 79196 - DNA, 22 bp, Artificial Sequence
  Synthetic oligonucleotide; CTT chr11 5198827 5198848 5198844 5198849 +
agaaaagaaccgctttatgttc

SEQ ID NO: 79197 - DNA, 22 bp, Artificial Sequence
  Synthetic oligonucleotide; TTA chr11 5198828 5198849 5198845 5198850 +
gaaaagaaccgctttatgttct

SEQ ID NO: 79198 - DNA, 22 bp, Artificial Sequence
  Synthetic oligonucleotide; CTT chr11 5198842 5198863 5198859 5198864 +
tatgttcttttatcttttttct

SEQ ID NO: 79199 - DNA, 22 bp, Artificial Sequence
  Synthetic oligonucleotide; TTT chr11 5198843 5198864 5198860 5198865 +
atgttcttttatcttttttctt

SEQ ID NO: 79200 - DNA, 22 bp, Artificial Sequence
  Synthetic oligonucleotide; TTA chr11 5198844 5198865 5198861 5198866 +
tgttcttttatcttttttcttt

SEQ ID NO: 79201 - DNA, 22 bp, Artificial Sequence
  Synthetic oligonucleotide; TTC chr11 5198849 5198870 5198866 5198871 +
ttttatcttttttcttttaaac

SEQ ID NO: 79202 - DNA, 22 bp, Artificial Sequence
  Synthetic oligonucleotide; CTT chr11 5198851 5198872 5198868 5198873 +
ttatcttttttcttttaaactc

SEQ ID NO: 79203 - DNA, 22 bp, Artificial Sequence
  Synthetic oligonucleotide; TTT chr11 5198852 5198873 5198869 5198874 +
tatcttttttcttttaaactca

SEQ ID NO: 79204 - DNA, 22 bp, Artificial Sequence
  Synthetic oligonucleotide; TTT chr11 5198853 5198874 5198870 5198875 +
atcttttttcttttaaactcag

SEQ ID NO: 79205 - DNA, 22 bp, Artificial Sequence
  Synthetic oligonucleotide; TTA chr11 5198854 5198875 5198871 5198876 +
tcttttttcttttaaactcaga

SEQ ID NO: 79206 - DNA, 22 bp, Artificial Sequence
  Synthetic oligonucleotide; CTT chr11 5198858 5198879 5198875 5198880 +
ttttcttttaaactcagaataa

SEQ ID NO: 79207 - DNA, 22 bp, Artificial Sequence
  Synthetic oligonucleotide; TTT chr11 5198859 5198880 5198876 5198881 +
tttcttttaaactcagaataag

SEQ ID NO: 79208 - DNA, 22 bp, Artificial Sequence
  Synthetic oligonucleotide; TTT chr11 5198860 5198881 5198877 5198882 +
ttcttttaaactcagaataagt

SEQ ID NO: 79209 - DNA, 22 bp, Artificial Sequence
  Synthetic oligonucleotide; TTT chr11 5198861 5198882 5198878 5198883 +
tcttttaaactcagaataagtc

SEQ ID NO: 79210 - DNA, 22 bp, Artificial Sequence
  Synthetic oligonucleotide; TTT chr11 5198862 5198883 5198879 5198884 +
cttttaaactcagaataagtcg

SEQ ID NO: 79211 - DNA, 22 bp, Artificial Sequence
  Synthetic oligonucleotide; TTC chr11 5198863 5198884 5198880 5198885 +
ttttaaactcagaataagtcgg

SEQ ID NO: 79212 - DNA, 22 bp, Artificial Sequence
  Synthetic oligonucleotide; CTT chr11 5198865 5198886 5198882 5198887 +
ttaaactcagaataagtcggta

SEQ ID NO: 79213 - DNA, 22 bp, Artificial Sequence
  Synthetic oligonucleotide; TTT chr11 5198866 5198887 5198883 5198888 +
taaactcagaataagtcggtag

SEQ ID NO: 79214 - DNA, 22 bp, Artificial Sequence
  Synthetic oligonucleotide; TTT chr11 5198867 5198888 5198884 5198889 +
aaactcagaataagtcggtagc

SEQ ID NO: 79215 - DNA, 22 bp, Artificial Sequence
  Synthetic oligonucleotide; TTA chr11 5198868 5198889 5198885 5198890 +
aactcagaataagtcggtagcg

SEQ ID NO: 79216 - DNA, 22 bp, Artificial Sequence
  Synthetic oligonucleotide; CTC chr11 5198873 5198894 5198890 5198895 +
agaataagtcggtagcggacag

SEQ ID NO: 79217 - DNA, 22 bp, Artificial Sequence
  Synthetic oligonucleotide; CTC chr11 5198899 5198920 5198916 5198921 +
atctgttcagaagatcccccac

SEQ ID NO: 79218 - DNA, 22 bp, Artificial Sequence
  Synthetic oligonucleotide; CTG chr11 5198904 5198925 5198921 5198926 +
ttcagaagatcccccacttaga

SEQ ID NO: 79219 - DNA, 22 bp, Artificial Sequence
  Synthetic oligonucleotide; TTC chr11 5198907 5198928 5198924 5198929 +
agaagatcccccacttagatat

SEQ ID NO: 79220 - DNA, 22 bp, Artificial Sequence
  Synthetic oligonucleotide; CTT chr11 5198923 5198944 5198940 5198945 +
agatataaaagcaaaagatcta

SEQ ID NO: 79221 - DNA, 22 bp, Artificial Sequence
  Synthetic oligonucleotide; TTA chr11 5198924 5198945 5198941 5198946 +
gatataaaagcaaaagatctag

SEQ ID NO: 79222 - DNA, 22 bp, Artificial Sequence
  Synthetic oligonucleotide; CTA chr11 5198945 5198966 5198962 5198967 +
gagcaaaatctgcttccagcct

SEQ ID NO: 79223 - DNA, 22 bp, Artificial Sequence
  Synthetic oligonucleotide; CTG chr11 5198957 5198978 5198974 5198979 +
cttccagccttgtagcagtgga

SEQ ID NO: 79224 - DNA, 22 bp, Artificial Sequence
  Synthetic oligonucleotide; CTT chr11 5198960 5198981 5198977 5198982 +
ccagccttgtagcagtggagtc

SEQ ID NO: 79225 - DNA, 22 bp, Artificial Sequence
  Synthetic oligonucleotide; TTC chr11 5198961 5198982 5198978 5198983 +
cagccttgtagcagtggagtcc

SEQ ID NO: 79226 - DNA, 22 bp, Artificial Sequence
  Synthetic oligonucleotide; CTT chr11 5198968 5198989 5198985 5198990 +
gtagcagtggagtccacatata

SEQ ID NO: 79227 - DNA, 22 bp, Artificial Sequence
  Synthetic oligonucleotide; TTG chr11 5198969 5198990 5198986 5198991 +
tagcagtggagtccacatataa

SEQ ID NO: 79228 - DNA, 22 bp, Artificial Sequence
  Synthetic oligonucleotide; CTA chr11 5198997 5199018 5199014 5199019 +
aaaaataaggattctaatttaa

SEQ ID NO: 79229 - DNA, 22 bp, Artificial Sequence
  Synthetic oligonucleotide; TTC chr11 5199011 5199032 5199028 5199033 +
taatttaaattagacatggtag

SEQ ID NO: 79230 - DNA, 22 bp, Artificial Sequence
  Synthetic oligonucleotide; CTA chr11 5199013 5199034 5199030 5199035 +
atttaaattagacatggtagaa

SEQ ID NO: 79231 - DNA, 22 bp, Artificial Sequence
  Synthetic oligonucleotide; TTT chr11 5199017 5199038 5199034 5199039 +
aaattagacatggtagaagttg

SEQ ID NO: 79232 - DNA, 22 bp, Artificial Sequence
  Synthetic oligonucleotide; TTA chr11 5199018 5199039 5199035 5199040 +
aattagacatggtagaagttga

SEQ ID NO: 79233 - DNA, 22 bp, Artificial Sequence
  Synthetic oligonucleotide; TTA chr11 5199023 5199044 5199040 5199045 +
gacatggtagaagttgaatcca

SEQ ID NO: 79234 - DNA, 22 bp, Artificial Sequence
  Synthetic oligonucleotide; TTG chr11 5199039 5199060 5199056 5199061 +
aatccaaagtcatatttctttg

SEQ ID NO: 79235 - DNA, 22 bp, Artificial Sequence
  Synthetic oligonucleotide; TTT chr11 5199056 5199077 5199073 5199078 +
ctttgtgtcctctttatgaact

SEQ ID NO: 79236 - DNA, 22 bp, Artificial Sequence
  Synthetic oligonucleotide; TTC chr11 5199057 5199078 5199074 5199079 +
tttgtgtcctctttatgaactg

SEQ ID NO: 79237 - DNA, 22 bp, Artificial Sequence
  Synthetic oligonucleotide; CTT chr11 5199059 5199080 5199076 5199081 +
tgtgtcctctttatgaactgta

SEQ ID NO: 79238 - DNA, 22 bp, Artificial Sequence
  Synthetic oligonucleotide; TTT chr11 5199060 5199081 5199077 5199082 +
gtgtcctctttatgaactgtag

SEQ ID NO: 79239 - DNA, 22 bp, Artificial Sequence
  Synthetic oligonucleotide; TTG chr11 5199061 5199082 5199078 5199083 +
tgtcctctttatgaactgtagc

SEQ ID NO: 79240 - DNA, 22 bp, Artificial Sequence
  Synthetic oligonucleotide; CTC chr11 5199068 5199089 5199085 5199090 +
tttatgaactgtagcttccctg

SEQ ID NO: 79241 - DNA, 22 bp, Artificial Sequence
  Synthetic oligonucleotide; CTT chr11 5199070 5199091 5199087 5199092 +
tatgaactgtagcttccctgtc

SEQ ID NO: 79242 - DNA, 22 bp, Artificial Sequence
  Synthetic oligonucleotide; TTT chr11 5199071 5199092 5199088 5199093 +
atgaactgtagcttccctgtcc

SEQ ID NO: 79243 - DNA, 22 bp, Artificial Sequence
  Synthetic oligonucleotide; TTA chr11 5199072 5199093 5199089 5199094 +
tgaactgtagcttccctgtcca

SEQ ID NO: 79244 - DNA, 22 bp, Artificial Sequence
  Synthetic oligonucleotide; CTG chr11 5199079 5199100 5199096 5199101 +
tagcttccctgtccaatatagt

SEQ ID NO: 79245 - DNA, 22 bp, Artificial Sequence
  Synthetic oligonucleotide; CTT chr11 5199085 5199106 5199102 5199107 +
ccctgtccaatatagtggctgc

SEQ ID NO: 79246 - DNA, 22 bp, Artificial Sequence
  Synthetic oligonucleotide; TTC chr11 5199086 5199107 5199103 5199108 +
cctgtccaatatagtggctgct

SEQ ID NO: 79247 - DNA, 22 bp, Artificial Sequence
  Synthetic oligonucleotide; CTG chr11 5199090 5199111 5199107 5199112 +
tccaatatagtggctgctgaac

SEQ ID NO: 79248 - DNA, 22 bp, Artificial Sequence
  Synthetic oligonucleotide; CTG chr11 5199106 5199127 5199123 5199128 +
ctgaactgaactgtccaataca

SEQ ID NO: 79249 - DNA, 22 bp, Artificial Sequence
  Synthetic oligonucleotide; CTG chr11 5199109 5199130 5199126 5199131 +
aactgaactgtccaatacaagg

SEQ ID NO: 79250 - DNA, 22 bp, Artificial Sequence
  Synthetic oligonucleotide; CTG chr11 5199114 5199135 5199131 5199136 +
aactgtccaatacaaggacatt

SEQ ID NO: 79251 - DNA, 22 bp, Artificial Sequence
  Synthetic oligonucleotide; CTG chr11 5199119 5199140 5199136 5199141 +
tccaatacaaggacattaaaca

SEQ ID NO: 79252 - DNA, 22 bp, Artificial Sequence
  Synthetic oligonucleotide; TTA chr11 5199137 5199158 5199154 5199159 +
aacatttaaatataaattaact

SEQ ID NO: 79253 - DNA, 22 bp, Artificial Sequence
  Synthetic oligonucleotide; TTT chr11 5199144 5199165 5199161 5199166 +
aaatataaattaacttaaagta

SEQ ID NO: 79254 - DNA, 22 bp, Artificial Sequence
  Synthetic oligonucleotide; TTA chr11 5199145 5199166 5199162 5199167 +
aatataaattaacttaaagtaa

SEQ ID NO: 79255 - DNA, 22 bp, Artificial Sequence
  Synthetic oligonucleotide; TTA chr11 5199156 5199177 5199173 5199178 +
acttaaagtaactgaaattgta

SEQ ID NO: 79256 - DNA, 22 bp, Artificial Sequence
  Synthetic oligonucleotide; CTT chr11 5199160 5199181 5199177 5199182 +
aaagtaactgaaattgtaaatg

SEQ ID NO: 79257 - DNA, 22 bp, Artificial Sequence
  Synthetic oligonucleotide; TTA chr11 5199161 5199182 5199178 5199183 +
aagtaactgaaattgtaaatgc

SEQ ID NO: 79258 - DNA, 22 bp, Artificial Sequence
  Synthetic oligonucleotide; CTG chr11 5199170 5199191 5199187 5199192 +
aaattgtaaatgcagttgttca

SEQ ID NO: 79259 - DNA, 22 bp, Artificial Sequence
  Synthetic oligonucleotide; TTG chr11 5199176 5199197 5199193 5199198 +
taaatgcagttgttcaattaca

SEQ ID NO: 79260 - DNA, 22 bp, Artificial Sequence
  Synthetic oligonucleotide; TTG chr11 5199188 5199209 5199205 5199210 +
ttcaattacactaccatcattt

SEQ ID NO: 79261 - DNA, 22 bp, Artificial Sequence
  Synthetic oligonucleotide; TTC chr11 5199191 5199212 5199208 5199213 +
aattacactaccatcatttcaa

SEQ ID NO: 79262 - DNA, 22 bp, Artificial Sequence
  Synthetic oligonucleotide; TTA chr11 5199196 5199217 5199213 5199218 +
cactaccatcatttcaagcgca

SEQ ID NO: 79263 - DNA, 22 bp, Artificial Sequence
  Synthetic oligonucleotide; CTA chr11 5199201 5199222 5199218 5199223 +
ccatcatttcaagcgcacagga

SEQ ID NO: 79264 - DNA, 22 bp, Artificial Sequence
  Synthetic oligonucleotide; TTT chr11 5199210 5199231 5199227 5199232 +
caagcgcacaggagccatatat

SEQ ID NO: 79265 - DNA, 22 bp, Artificial Sequence
  Synthetic oligonucleotide; TTC chr11 5199211 5199232 5199228 5199233 +
aagcgcacaggagccatatatt

SEQ ID NO: 79266 - DNA, 22 bp, Artificial Sequence
  Synthetic oligonucleotide; TTC chr11 5199234 5199255 5199251 5199256 +
cactttagccattttatggtat

SEQ ID NO: 79267 - DNA, 22 bp, Artificial Sequence
  Synthetic oligonucleotide; CTT chr11 5199239 5199260 5199256 5199261 +
tagccattttatggtattttat

SEQ ID NO: 79268 - DNA, 22 bp, Artificial Sequence
  Synthetic oligonucleotide; TTT chr11 5199240 5199261 5199257 5199262 +
agccattttatggtattttata

SEQ ID NO: 79269 - DNA, 22 bp, Artificial Sequence
  Synthetic oligonucleotide; TTA chr11 5199241 5199262 5199258 5199263 +
gccattttatggtattttatag

SEQ ID NO: 79270 - DNA, 22 bp, Artificial Sequence
  Synthetic oligonucleotide; TTT chr11 5199248 5199269 5199265 5199270 +
tatggtattttatagaacatcg

SEQ ID NO: 79271 - DNA, 22 bp, Artificial Sequence
  Synthetic oligonucleotide; TTT chr11 5199249 5199270 5199266 5199271 +
atggtattttatagaacatcgc

SEQ ID NO: 79272 - DNA, 22 bp, Artificial Sequence
  Synthetic oligonucleotide; TTA chr11 5199250 5199271 5199267 5199272 +
tggtattttatagaacatcgcc

SEQ ID NO: 79273 - DNA, 22 bp, Artificial Sequence
  Synthetic oligonucleotide; TTT chr11 5199258 5199279 5199275 5199280 +
tatagaacatcgccatcagttt

SEQ ID NO: 79274 - DNA, 22 bp, Artificial Sequence
  Synthetic oligonucleotide; TTT chr11 5199259 5199280 5199276 5199281 +
atagaacatcgccatcagttta

SEQ ID NO: 79275 - DNA, 22 bp, Artificial Sequence
  Synthetic oligonucleotide; TTA chr11 5199260 5199281 5199277 5199282 +
tagaacatcgccatcagtttag

SEQ ID NO: 79276 - DNA, 22 bp, Artificial Sequence
  Synthetic oligonucleotide; TTT chr11 5199280 5199301 5199297 5199302 +
agaaaagttcccttggacaatt

SEQ ID NO: 79277 - DNA, 22 bp, Artificial Sequence
  Synthetic oligonucleotide; TTA chr11 5199281 5199302 5199298 5199303 +
gaaaagttcccttggacaattc

SEQ ID NO: 79278 - DNA, 22 bp, Artificial Sequence
  Synthetic oligonucleotide; TTC chr11 5199290 5199311 5199307 5199312 +
ccttggacaattctggtccata

SEQ ID NO: 79279 - DNA, 22 bp, Artificial Sequence
  Synthetic oligonucleotide; CTT chr11 5199294 5199315 5199311 5199316 +
ggacaattctggtccatacaga

SEQ ID NO: 79280 - DNA, 22 bp, Artificial Sequence
  Synthetic oligonucleotide; TTG chr11 5199295 5199316 5199312 5199317 +
gacaattctggtccatacagat

SEQ ID NO: 79281 - DNA, 22 bp, Artificial Sequence
  Synthetic oligonucleotide; TTC chr11 5199303 5199324 5199320 5199325 +
tggtccatacagatatcacaac

SEQ ID NO: 79282 - DNA, 22 bp, Artificial Sequence
  Synthetic oligonucleotide; CTG chr11 5199305 5199326 5199322 5199327 +
gtccatacagatatcacaacat

SEQ ID NO: 79283 - DNA, 22 bp, Artificial Sequence
  Synthetic oligonucleotide; TTC chr11 5199329 5199350 5199346 5199351 +
ctgtgagttggctatagtctcc

SEQ ID NO: 79284 - DNA, 22 bp, Artificial Sequence
  Synthetic oligonucleotide; CTG chr11 5199332 5199353 5199349 5199354 +
tgagttggctatagtctccatt

SEQ ID NO: 79285 - DNA, 22 bp, Artificial Sequence
  Synthetic oligonucleotide; TTG chr11 5199339 5199360 5199356 5199361 +
gctatagtctccattttgaagg

SEQ ID NO: 79286 - DNA, 22 bp, Artificial Sequence
  Synthetic oligonucleotide; CTA chr11 5199343 5199364 5199360 5199365 +
tagtctccattttgaaggttaa

SEQ ID NO: 79287 - DNA, 22 bp, Artificial Sequence
  Synthetic oligonucleotide; CTC chr11 5199350 5199371 5199367 5199372 +
cattttgaaggttaattaagta

SEQ ID NO: 79288 - DNA, 22 bp, Artificial Sequence
  Synthetic oligonucleotide; TTT chr11 5199355 5199376 5199372 5199377 +
tgaaggttaattaagtaaacct

SEQ ID NO: 79289 - DNA, 22 bp, Artificial Sequence
  Synthetic oligonucleotide; TTT chr11 5199356 5199377 5199373 5199378 +
gaaggttaattaagtaaacctc

SEQ ID NO: 79290 - DNA, 22 bp, Artificial Sequence
  Synthetic oligonucleotide; TTG chr11 5199357 5199378 5199374 5199379 +
aaggttaattaagtaaacctca

SEQ ID NO: 79291 - DNA, 22 bp, Artificial Sequence
  Synthetic oligonucleotide; TTA chr11 5199364 5199385 5199381 5199386 +
attaagtaaacctcagagaatg

SEQ ID NO: 79292 - DNA, 22 bp, Artificial Sequence
  Synthetic oligonucleotide; TTA chr11 5199368 5199389 5199385 5199390 +
agtaaacctcagagaatgaaag

SEQ ID NO: 79293 - DNA, 22 bp, Artificial Sequence
  Synthetic oligonucleotide; CTC chr11 5199378 5199399 5199395 5199400 +
agagaatgaaagaaacttcaag

SEQ ID NO: 79294 - DNA, 22 bp, Artificial Sequence
  Synthetic oligonucleotide; CTT chr11 5199396 5199417 5199413 5199418 +
caagttttctactttgaaactt

SEQ ID NO: 79295 - DNA, 22 bp, Artificial Sequence
  Synthetic oligonucleotide; TTC chr11 5199397 5199418 5199414 5199419 +
aagttttctactttgaaacttg

SEQ ID NO: 79296 - DNA, 22 bp, Artificial Sequence
  Synthetic oligonucleotide; TTT chr11 5199403 5199424 5199420 5199425 +
tctactttgaaacttgaaaacc

SEQ ID NO: 79297 - DNA, 22 bp, Artificial Sequence
  Synthetic oligonucleotide; TTT chr11 5199404 5199425 5199421 5199426 +
ctactttgaaacttgaaaacct

SEQ ID NO: 79298 - DNA, 22 bp, Artificial Sequence
  Synthetic oligonucleotide; TTC chr11 5199405 5199426 5199422 5199427 +
tactttgaaacttgaaaaccta

SEQ ID NO: 79299 - DNA, 22 bp, Artificial Sequence
  Synthetic oligonucleotide; CTA chr11 5199407 5199428 5199424 5199429 +
ctttgaaacttgaaaacctagg

SEQ ID NO: 79300 - DNA, 22 bp, Artificial Sequence
  Synthetic oligonucleotide; CTT chr11 5199410 5199431 5199427 5199432 +
tgaaacttgaaaacctaggttt

SEQ ID NO: 79301 - DNA, 22 bp, Artificial Sequence
  Synthetic oligonucleotide; TTT chr11 5199411 5199432 5199428 5199433 +
gaaacttgaaaacctaggtttt

SEQ ID NO: 79302 - DNA, 22 bp, Artificial Sequence
  Synthetic oligonucleotide; TTG chr11 5199412 5199433 5199429 5199434 +
aaacttgaaaacctaggttttt

SEQ ID NO: 79303 - DNA, 22 bp, Artificial Sequence
  Synthetic oligonucleotide; CTT chr11 5199418 5199439 5199435 5199440 +
gaaaacctaggtttttaatcca

SEQ ID NO: 79304 - DNA, 22 bp, Artificial Sequence
  Synthetic oligonucleotide; TTG chr11 5199419 5199440 5199436 5199441 +
aaaacctaggtttttaatccag

SEQ ID NO: 79305 - DNA, 22 bp, Artificial Sequence
  Synthetic oligonucleotide; CTA chr11 5199427 5199448 5199444 5199449 +
ggtttttaatccagctttgttt

SEQ ID NO: 79306 - DNA, 22 bp, Artificial Sequence
  Synthetic oligonucleotide; TTT chr11 5199432 5199453 5199449 5199454 +
ttaatccagctttgttttacag

SEQ ID NO: 79307 - DNA, 22 bp, Artificial Sequence
  Synthetic oligonucleotide; TTT chr11 5199433 5199454 5199450 5199455 +
taatccagctttgttttacagc

SEQ ID NO: 79308 - DNA, 22 bp, Artificial Sequence
  Synthetic oligonucleotide; TTT chr11 5199434 5199455 5199451 5199456 +
aatccagctttgttttacagca

SEQ ID NO: 79309 - DNA, 22 bp, Artificial Sequence
  Synthetic oligonucleotide; TTA chr11 5199435 5199456 5199452 5199457 +
atccagctttgttttacagcaa

SEQ ID NO: 79310 - DNA, 22 bp, Artificial Sequence
  Synthetic oligonucleotide; CTT chr11 5199444 5199465 5199461 5199466 +
tgttttacagcaaaggaaatgc

SEQ ID NO: 79311 - DNA, 22 bp, Artificial Sequence
  Synthetic oligonucleotide; TTT chr11 5199445 5199466 5199462 5199467 +
gttttacagcaaaggaaatgct

SEQ ID NO: 79312 - DNA, 22 bp, Artificial Sequence
  Synthetic oligonucleotide; TTG chr11 5199446 5199467 5199463 5199468 +
ttttacagcaaaggaaatgctc

SEQ ID NO: 79313 - DNA, 22 bp, Artificial Sequence
  Synthetic oligonucleotide; TTT chr11 5199449 5199470 5199466 5199471 +
tacagcaaaggaaatgctcaaa

SEQ ID NO: 79314 - DNA, 22 bp, Artificial Sequence
  Synthetic oligonucleotide; TTT chr11 5199450 5199471 5199467 5199472 +
acagcaaaggaaatgctcaaaa

SEQ ID NO: 79315 - DNA, 22 bp, Artificial Sequence
  Synthetic oligonucleotide; TTA chr11 5199451 5199472 5199468 5199473 +
cagcaaaggaaatgctcaaaag

SEQ ID NO: 79316 - DNA, 22 bp, Artificial Sequence
  Synthetic oligonucleotide; CTC chr11 5199468 5199489 5199485 5199490 +
aaaagtacatttcaggcaaata

SEQ ID NO: 79317 - DNA, 22 bp, Artificial Sequence
  Synthetic oligonucleotide; TTT chr11 5199480 5199501 5199497 5199502 +
caggcaaataaacaattttttc

SEQ ID NO: 79318 - DNA, 22 bp, Artificial Sequence
  Synthetic oligonucleotide; TTC chr11 5199481 5199502 5199498 5199503 +
aggcaaataaacaattttttcc

SEQ ID NO: 79319 - DNA, 22 bp, Artificial Sequence
  Synthetic oligonucleotide; TTT chr11 5199498 5199519 5199515 5199520 +
tttcctctttcttaaatatggt

SEQ ID NO: 79320 - DNA, 22 bp, Artificial Sequence
  Synthetic oligonucleotide; TTT chr11 5199499 5199520 5199516 5199521 +
ttcctctttcttaaatatggtc

SEQ ID NO: 79321 - DNA, 22 bp, Artificial Sequence
  Synthetic oligonucleotide; TTT chr11 5199500 5199521 5199517 5199522 +
tcctctttcttaaatatggtca

SEQ ID NO: 79322 - DNA, 22 bp, Artificial Sequence
  Synthetic oligonucleotide; TTT chr11 5199501 5199522 5199518 5199523 +
cctctttcttaaatatggtcag

SEQ ID NO: 79323 - DNA, 22 bp, Artificial Sequence
  Synthetic oligonucleotide; TTC chr11 5199502 5199523 5199519 5199524 +
ctctttcttaaatatggtcaga

SEQ ID NO: 79324 - DNA, 22 bp, Artificial Sequence
  Synthetic oligonucleotide; CTC chr11 5199505 5199526 5199522 5199527 +
tttcttaaatatggtcagactg

SEQ ID NO: 79325 - DNA, 22 bp, Artificial Sequence
  Synthetic oligonucleotide; CTT chr11 5199507 5199528 5199524 5199529 +
tcttaaatatggtcagactgat

SEQ ID NO: 79326 - DNA, 22 bp, Artificial Sequence
  Synthetic oligonucleotide; TTT chr11 5199508 5199529 5199525 5199530 +
cttaaatatggtcagactgata

SEQ ID NO: 79327 - DNA, 22 bp, Artificial Sequence
  Synthetic oligonucleotide; TTC chr11 5199509 5199530 5199526 5199531 +
ttaaatatggtcagactgatag

SEQ ID NO: 79328 - DNA, 22 bp, Artificial Sequence
  Synthetic oligonucleotide; CTT chr11 5199511 5199532 5199528 5199533 +
aaatatggtcagactgatagag

SEQ ID NO: 79329 - DNA, 22 bp, Artificial Sequence
  Synthetic oligonucleotide; TTA chr11 5199512 5199533 5199529 5199534 +
aatatggtcagactgatagagt

SEQ ID NO: 79330 - DNA, 22 bp, Artificial Sequence
  Synthetic oligonucleotide; CTG chr11 5199527 5199548 5199544 5199549 +
atagagtgacctacatgtgtcc

SEQ ID NO: 79331 - DNA, 22 bp, Artificial Sequence
  Synthetic oligonucleotide; CTA chr11 5199540 5199561 5199557 5199562 +
catgtgtccaggctgacacaat

SEQ ID NO: 79332 - DNA, 22 bp, Artificial Sequence
  Synthetic oligonucleotide; CTG chr11 5199555 5199576 5199572 5199577 +
acacaatggaacttgtttgttg

SEQ ID NO: 79333 - DNA, 22 bp, Artificial Sequence
  Synthetic oligonucleotide; CTT chr11 5199569 5199590 5199586 5199591 +
gtttgttgattctctgactata

SEQ ID NO: 79334 - DNA, 22 bp, Artificial Sequence
  Synthetic oligonucleotide; TTG chr11 5199570 5199591 5199587 5199592 +
tttgttgattctctgactatat

SEQ ID NO: 79335 - DNA, 22 bp, Artificial Sequence
  Synthetic oligonucleotide; TTT chr11 5199573 5199594 5199590 5199595 +
gttgattctctgactatattta

SEQ ID NO: 79336 - DNA, 22 bp, Artificial Sequence
  Synthetic oligonucleotide; TTG chr11 5199574 5199595 5199591 5199596 +
ttgattctctgactatatttaa

SEQ ID NO: 79337 - DNA, 22 bp, Artificial Sequence
  Synthetic oligonucleotide; TTG chr11 5199577 5199598 5199594 5199599 +
attctctgactatatttaaata

SEQ ID NO: 79338 - DNA, 22 bp, Artificial Sequence
  Synthetic oligonucleotide; TTC chr11 5199581 5199602 5199598 5199603 +
tctgactatatttaaatatttt

SEQ ID NO: 79339 - DNA, 22 bp, Artificial Sequence
  Synthetic oligonucleotide; CTC chr11 5199583 5199604 5199600 5199605 +
tgactatatttaaatatttttt

SEQ ID NO: 79340 - DNA, 22 bp, Artificial Sequence
  Synthetic oligonucleotide; CTG chr11 5199585 5199606 5199602 5199607 +
actatatttaaatattttttaa

SEQ ID NO: 79341 - DNA, 22 bp, Artificial Sequence
  Synthetic oligonucleotide; CTA chr11 5199589 5199610 5199606 5199611 +
tatttaaatattttttaaggtc

SEQ ID NO: 79342 - DNA, 22 bp, Artificial Sequence
  Synthetic oligonucleotide; TTT chr11 5199594 5199615 5199611 5199616 +
aaatattttttaaggtcatttg

SEQ ID NO: 79343 - DNA, 22 bp, Artificial Sequence
  Synthetic oligonucleotide; TTA chr11 5199595 5199616 5199612 5199617 +
aatattttttaaggtcatttgt

SEQ ID NO: 79344 - DNA, 22 bp, Artificial Sequence
  Synthetic oligonucleotide; TTT chr11 5199602 5199623 5199619 5199624 +
tttaaggtcatttgtcatggac

SEQ ID NO: 79345 - DNA, 22 bp, Artificial Sequence
  Synthetic oligonucleotide; TTT chr11 5199603 5199624 5199620 5199625 +
ttaaggtcatttgtcatggact

SEQ ID NO: 79346 - DNA, 22 bp, Artificial Sequence
  Synthetic oligonucleotide; TTT chr11 5199604 5199625 5199621 5199626 +
taaggtcatttgtcatggactc

SEQ ID NO: 79347 - DNA, 22 bp, Artificial Sequence
  Synthetic oligonucleotide; TTT chr11 5199605 5199626 5199622 5199627 +
aaggtcatttgtcatggactca

SEQ ID NO: 79348 - DNA, 22 bp, Artificial Sequence
  Synthetic oligonucleotide; TTA chr11 5199606 5199627 5199623 5199628 +
aggtcatttgtcatggactcag

SEQ ID NO: 79349 - DNA, 22 bp, Artificial Sequence
  Synthetic oligonucleotide; TTT chr11 5199615 5199636 5199632 5199637 +
gtcatggactcagagtaaatct

SEQ ID NO: 79350 - DNA, 22 bp, Artificial Sequence
  Synthetic oligonucleotide; TTG chr11 5199616 5199637 5199633 5199638 +
tcatggactcagagtaaatcta

SEQ ID NO: 79351 - DNA, 22 bp, Artificial Sequence
  Synthetic oligonucleotide; CTC chr11 5199626 5199647 5199643 5199648 +
agagtaaatctacaattttaat

SEQ ID NO: 79352 - DNA, 22 bp, Artificial Sequence
  Synthetic oligonucleotide; CTA chr11 5199638 5199659 5199655 5199660 +
caattttaataattttttcttt

SEQ ID NO: 79353 - DNA, 22 bp, Artificial Sequence
  Synthetic oligonucleotide; TTT chr11 5199644 5199665 5199661 5199666 +
taataattttttcttttttatg

SEQ ID NO: 79354 - DNA, 22 bp, Artificial Sequence
  Synthetic oligonucleotide; TTT chr11 5199645 5199666 5199662 5199667 +
aataattttttcttttttatgg

SEQ ID NO: 79355 - DNA, 22 bp, Artificial Sequence
  Synthetic oligonucleotide; TTA chr11 5199646 5199667 5199663 5199668 +
ataattttttcttttttatggc

SEQ ID NO: 79356 - DNA, 22 bp, Artificial Sequence
  Synthetic oligonucleotide; TTT chr11 5199653 5199674 5199670 5199675 +
tttcttttttatggcactgatt

SEQ ID NO: 79357 - DNA, 22 bp, Artificial Sequence
  Synthetic oligonucleotide; TTT chr11 5199654 5199675 5199671 5199676 +
ttcttttttatggcactgattt

SEQ ID NO: 79358 - DNA, 22 bp, Artificial Sequence
  Synthetic oligonucleotide; TTT chr11 5199655 5199676 5199672 5199677 +
tcttttttatggcactgatttt

SEQ ID NO: 79359 - DNA, 22 bp, Artificial Sequence
  Synthetic oligonucleotide; TTT chr11 5199656 5199677 5199673 5199678 +
cttttttatggcactgattttt

SEQ ID NO: 79360 - DNA, 22 bp, Artificial Sequence
  Synthetic oligonucleotide; TTC chr11 5199657 5199678 5199674 5199679 +
ttttttatggcactgatttttg

SEQ ID NO: 79361 - DNA, 22 bp, Artificial Sequence
  Synthetic oligonucleotide; CTT chr11 5199659 5199680 5199676 5199681 +
ttttatggcactgatttttgtt

SEQ ID NO: 79362 - DNA, 22 bp, Artificial Sequence
  Synthetic oligonucleotide; TTT chr11 5199660 5199681 5199677 5199682 +
tttatggcactgatttttgttt

SEQ ID NO: 79363 - DNA, 22 bp, Artificial Sequence
  Synthetic oligonucleotide; TTT chr11 5199661 5199682 5199678 5199683 +
ttatggcactgatttttgttta

SEQ ID NO: 79364 - DNA, 22 bp, Artificial Sequence
  Synthetic oligonucleotide; TTT chr11 5199662 5199683 5199679 5199684 +
tatggcactgatttttgtttat

SEQ ID NO: 79365 - DNA, 22 bp, Artificial Sequence
  Synthetic oligonucleotide; TTT chr11 5199663 5199684 5199680 5199685 +
atggcactgatttttgtttatt

SEQ ID NO: 79366 - DNA, 22 bp, Artificial Sequence
  Synthetic oligonucleotide; TTA chr11 5199664 5199685 5199681 5199686 +
tggcactgatttttgtttatta

SEQ ID NO: 79367 - DNA, 22 bp, Artificial Sequence
  Synthetic oligonucleotide; CTG chr11 5199672 5199693 5199689 5199694 +
atttttgtttattattgttgct

SEQ ID NO: 79368 - DNA, 22 bp, Artificial Sequence
  Synthetic oligonucleotide; TTT chr11 5199676 5199697 5199693 5199698 +
ttgtttattattgttgctgctt

SEQ ID NO: 79369 - DNA, 22 bp, Artificial Sequence
  Synthetic oligonucleotide; TTT chr11 5199677 5199698 5199694 5199699 +
tgtttattattgttgctgcttt

SEQ ID NO: 79370 - DNA, 22 bp, Artificial Sequence
  Synthetic oligonucleotide; TTT chr11 5199678 5199699 5199695 5199700 +
gtttattattgttgctgctttt

SEQ ID NO: 79371 - DNA, 22 bp, Artificial Sequence
  Synthetic oligonucleotide; TTG chr11 5199679 5199700 5199696 5199701 +
tttattattgttgctgcttttc

SEQ ID NO: 79372 - DNA, 22 bp, Artificial Sequence
  Synthetic oligonucleotide; TTT chr11 5199682 5199703 5199699 5199704 +
attattgttgctgcttttcttt

SEQ ID NO: 79373 - DNA, 22 bp, Artificial Sequence
  Synthetic oligonucleotide; TTA chr11 5199683 5199704 5199700 5199705 +
ttattgttgctgcttttctttc

SEQ ID NO: 79374 - DNA, 22 bp, Artificial Sequence
  Synthetic oligonucleotide; TTA chr11 5199686 5199707 5199703 5199708 +
ttgttgctgcttttctttcttt

SEQ ID NO: 79375 - DNA, 22 bp, Artificial Sequence
  Synthetic oligonucleotide; TTG chr11 5199689 5199710 5199706 5199711 +
ttgctgcttttctttctttttt

SEQ ID NO: 79376 - DNA, 22 bp, Artificial Sequence
  Synthetic oligonucleotide; TTG chr11 5199692 5199713 5199709 5199714 +
ctgcttttctttctttttttta

SEQ ID NO: 79377 - DNA, 22 bp, Artificial Sequence
  Synthetic oligonucleotide; CTG chr11 5199695 5199716 5199712 5199717 +
cttttctttcttttttttaggc

SEQ ID NO: 79378 - DNA, 22 bp, Artificial Sequence
  Synthetic oligonucleotide; CTT chr11 5199698 5199719 5199715 5199720 +
ttctttcttttttttaggcaat

SEQ ID NO: 79379 - DNA, 22 bp, Artificial Sequence
  Synthetic oligonucleotide; TTT chr11 5199699 5199720 5199716 5199721 +
tctttcttttttttaggcaata

SEQ ID NO: 79380 - DNA, 22 bp, Artificial Sequence
  Synthetic oligonucleotide; TTT chr11 5199700 5199721 5199717 5199722 +
ctttcttttttttaggcaatac

SEQ ID NO: 79381 - DNA, 22 bp, Artificial Sequence
  Synthetic oligonucleotide; TTC chr11 5199701 5199722 5199718 5199723 +
tttcttttttttaggcaataca

SEQ ID NO: 79382 - DNA, 22 bp, Artificial Sequence
  Synthetic oligonucleotide; CTT chr11 5199703 5199724 5199720 5199725 +
tcttttttttaggcaatacatc

SEQ ID NO: 79383 - DNA, 22 bp, Artificial Sequence
  Synthetic oligonucleotide; TTT chr11 5199704 5199725 5199721 5199726 +
cttttttttaggcaatacatct

SEQ ID NO: 79384 - DNA, 22 bp, Artificial Sequence
  Synthetic oligonucleotide; TTC chr11 5199705 5199726 5199722 5199727 +
ttttttttaggcaatacatctc

SEQ ID NO: 79385 - DNA, 22 bp, Artificial Sequence
  Synthetic oligonucleotide; CTT chr11 5199707 5199728 5199724 5199729 +
ttttttaggcaatacatctcaa

SEQ ID NO: 79386 - DNA, 22 bp, Artificial Sequence
  Synthetic oligonucleotide; TTT chr11 5199708 5199729 5199725 5199730 +
tttttaggcaatacatctcaat

SEQ ID NO: 79387 - DNA, 22 bp, Artificial Sequence
  Synthetic oligonucleotide; TTT chr11 5199709 5199730 5199726 5199731 +
ttttaggcaatacatctcaata

SEQ ID NO: 79388 - DNA, 22 bp, Artificial Sequence
  Synthetic oligonucleotide; TTT chr11 5199710 5199731 5199727 5199732 +
tttaggcaatacatctcaatat

SEQ ID NO: 79389 - DNA, 22 bp, Artificial Sequence
  Synthetic oligonucleotide; TTT chr11 5199711 5199732 5199728 5199733 +
ttaggcaatacatctcaatatc

SEQ ID NO: 79390 - DNA, 22 bp, Artificial Sequence
  Synthetic oligonucleotide; TTT chr11 5199712 5199733 5199729 5199734 +
taggcaatacatctcaatatct

SEQ ID NO: 79391 - DNA, 22 bp, Artificial Sequence
  Synthetic oligonucleotide; TTT chr11 5199713 5199734 5199730 5199735 +
aggcaatacatctcaatatctc

SEQ ID NO: 79392 - DNA, 22 bp, Artificial Sequence
  Synthetic oligonucleotide; TTA chr11 5199714 5199735 5199731 5199736 +
ggcaatacatctcaatatctct

SEQ ID NO: 79393 - DNA, 22 bp, Artificial Sequence
  Synthetic oligonucleotide; CTC chr11 5199727 5199748 5199744 5199749 +
aatatctctcaatatcttttca

SEQ ID NO: 79394 - DNA, 22 bp, Artificial Sequence
  Synthetic oligonucleotide; CTC chr11 5199735 5199756 5199752 5199757 +
tcaatatcttttcagagaaaag

SEQ ID NO: 79395 - DNA, 22 bp, Artificial Sequence
  Synthetic oligonucleotide; CTC chr11 5199737 5199758 5199754 5199759 +
aatatcttttcagagaaaagag

SEQ ID NO: 79396 - DNA, 22 bp, Artificial Sequence
  Synthetic oligonucleotide; CTT chr11 5199745 5199766 5199762 5199767 +
ttcagagaaaagagtctaagca

SEQ ID NO: 79397 - DNA, 22 bp, Artificial Sequence
  Synthetic oligonucleotide; TTT chr11 5199746 5199767 5199763 5199768 +
tcagagaaaagagtctaagcat

SEQ ID NO: 79398 - DNA, 22 bp, Artificial Sequence
  Synthetic oligonucleotide; TTT chr11 5199747 5199768 5199764 5199769 +
cagagaaaagagtctaagcatt

SEQ ID NO: 79399 - DNA, 22 bp, Artificial Sequence
  Synthetic oligonucleotide; TTC chr11 5199748 5199769 5199765 5199770 +
agagaaaagagtctaagcattc

SEQ ID NO: 79400 - DNA, 22 bp, Artificial Sequence
  Synthetic oligonucleotide; CTA chr11 5199763 5199784 5199780 5199785 +
agcattctggtatgaatctgtt

SEQ ID NO: 79401 - DNA, 22 bp, Artificial Sequence
  Synthetic oligonucleotide; TTC chr11 5199770 5199791 5199787 5199792 +
tggtatgaatctgttgggtctt

SEQ ID NO: 79402 - DNA, 22 bp, Artificial Sequence
  Synthetic oligonucleotide; CTG chr11 5199772 5199793 5199789 5199794 +
gtatgaatctgttgggtcttga

SEQ ID NO: 79403 - DNA, 22 bp, Artificial Sequence
  Synthetic oligonucleotide; CTG chr11 5199783 5199804 5199800 5199805 +
ttgggtcttgacactgtagatg

SEQ ID NO: 79404 - DNA, 22 bp, Artificial Sequence
  Synthetic oligonucleotide; TTG chr11 5199786 5199807 5199803 5199808 +
ggtcttgacactgtagatgatg

SEQ ID NO: 79405 - DNA, 22 bp, Artificial Sequence
  Synthetic oligonucleotide; CTT chr11 5199792 5199813 5199809 5199814 +
gacactgtagatgatgggattc

SEQ ID NO: 79406 - DNA, 22 bp, Artificial Sequence
  Synthetic oligonucleotide; TTG chr11 5199793 5199814 5199810 5199815 +
acactgtagatgatgggattca

SEQ ID NO: 79407 - DNA, 22 bp, Artificial Sequence
  Synthetic oligonucleotide; CTG chr11 5199799 5199820 5199816 5199821 +
tagatgatgggattcattaaag

SEQ ID NO: 79408 - DNA, 22 bp, Artificial Sequence
  Synthetic oligonucleotide; TTC chr11 5199814 5199835 5199831 5199836 +
attaaaggtgggaaaaggatgt

SEQ ID NO: 79409 - DNA, 22 bp, Artificial Sequence
  Synthetic oligonucleotide; TTA chr11 5199818 5199839 5199835 5199840 +
aaggtgggaaaaggatgtagat

SEQ ID NO: 79410 - DNA, 22 bp, Artificial Sequence
  Synthetic oligonucleotide; TTG chr11 5199844 5199865 5199861 5199866 +
ccaatgagaacgtgggccacgg

SEQ ID NO: 79411 - DNA, 22 bp, Artificial Sequence
  Synthetic oligonucleotide; CTT chr11 5199879 5199900 5199896 5199901 +
gccaaaacggtgcaccattgtg

SEQ ID NO: 79412 - DNA, 22 bp, Artificial Sequence
  Synthetic oligonucleotide; TTG chr11 5199880 5199901 5199897 5199902 +
ccaaaacggtgcaccattgtga

SEQ ID NO: 79413 - DNA, 22 bp, Artificial Sequence
  Synthetic oligonucleotide; TTG chr11 5199899 5199920 5199916 5199921 +
tgaggctaatgatagggatgta

SEQ ID NO: 79414 - DNA, 22 bp, Artificial Sequence
  Synthetic oligonucleotide; CTA chr11 5199907 5199928 5199924 5199929 +
atgatagggatgtagaacacaa

SEQ ID NO: 79415 - DNA, 22 bp, Artificial Sequence
  Synthetic oligonucleotide; CTG chr11 5199960 5199981 5199977 5199982 +
aaataatttatgcctctcttcc

SEQ ID NO: 79416 - DNA, 22 bp, Artificial Sequence
  Synthetic oligonucleotide; TTT chr11 5199969 5199990 5199986 5199991 +
atgcctctcttcctgagaggca

SEQ ID NO: 79417 - DNA, 22 bp, Artificial Sequence
  Synthetic oligonucleotide; TTA chr11 5199970 5199991 5199987 5199992 +
tgcctctcttcctgagaggcaa

SEQ ID NO: 79418 - DNA, 22 bp, Artificial Sequence
  Synthetic oligonucleotide; CTC chr11 5199976 5199997 5199993 5199998 +
tcttcctgagaggcaactgcca

SEQ ID NO: 79419 - DNA, 22 bp, Artificial Sequence
  Synthetic oligonucleotide; CTC chr11 5199978 5199999 5199995 5200000 +
ttcctgagaggcaactgccagg

SEQ ID NO: 79420 - DNA, 22 bp, Artificial Sequence
  Synthetic oligonucleotide; CTT chr11 5199980 5200001 5199997 5200002 +
cctgagaggcaactgccaggac

SEQ ID NO: 79421 - DNA, 22 bp, Artificial Sequence
  Synthetic oligonucleotide; TTC chr11 5199981 5200002 5199998 5200003 +
ctgagaggcaactgccaggact

SEQ ID NO: 79422 - DNA, 22 bp, Artificial Sequence
  Synthetic oligonucleotide; CTG chr11 5199984 5200005 5200001 5200006 +
agaggcaactgccaggactgac

SEQ ID NO: 79423 - DNA, 22 bp, Artificial Sequence
  Synthetic oligonucleotide; CTG chr11 5199995 5200016 5200012 5200017 +
ccaggactgacttaagaatcag

SEQ ID NO: 79424 - DNA, 22 bp, Artificial Sequence
  Synthetic oligonucleotide; CTG chr11 5200004 5200025 5200021 5200026 +
acttaagaatcaggatgtagga

SEQ ID NO: 79425 - DNA, 22 bp, Artificial Sequence
  Synthetic oligonucleotide; CTT chr11 5200008 5200029 5200025 5200030 +
aagaatcaggatgtaggagaaa

SEQ ID NO: 79426 - DNA, 22 bp, Artificial Sequence
  Synthetic oligonucleotide; TTA chr11 5200009 5200030 5200026 5200031 +
agaatcaggatgtaggagaaaa

SEQ ID NO: 79427 - DNA, 22 bp, Artificial Sequence
  Synthetic oligonucleotide; CTA chr11 5200090 5200111 5200107 5200112 +
ttgaatcggatgtctgaacagg

SEQ ID NO: 79428 - DNA, 22 bp, Artificial Sequence
  Synthetic oligonucleotide; TTG chr11 5200093 5200114 5200110 5200115 +
aatcggatgtctgaacaggcta

SEQ ID NO: 79429 - DNA, 22 bp, Artificial Sequence
  Synthetic oligonucleotide; CTG chr11 5200106 5200127 5200123 5200128 +
aacaggctaagcggagaagatc

SEQ ID NO: 79430 - DNA, 22 bp, Artificial Sequence
  Synthetic oligonucleotide; CTA chr11 5200115 5200136 5200132 5200137 +
agcggagaagatcctggtgcag

SEQ ID NO: 79431 - DNA, 22 bp, Artificial Sequence
  Synthetic oligonucleotide; CTG chr11 5200131 5200152 5200148 5200153 +
gtgcaggcagaaagagtgagaa

SEQ ID NO: 79432 - DNA, 22 bp, Artificial Sequence
  Synthetic oligonucleotide; TTA chr11 5200177 5200198 5200194 5200199 +
aaaaatttcagacagatgatgg

SEQ ID NO: 79433 - DNA, 22 bp, Artificial Sequence
  Synthetic oligonucleotide; TTT chr11 5200185 5200206 5200202 5200207 +
cagacagatgatggggggtgta

SEQ ID NO: 79434 - DNA, 22 bp, Artificial Sequence
  Synthetic oligonucleotide; TTC chr11 5200186 5200207 5200203 5200208 +
agacagatgatggggggtgtaa

SEQ ID NO: 79435 - DNA, 22 bp, Artificial Sequence
  Synthetic oligonucleotide; CTC chr11 5200222 5200243 5200239 5200244 +
ctacctattatagtgagcccaa

SEQ ID NO: 79436 - DNA, 22 bp, Artificial Sequence
  Synthetic oligonucleotide; CTA chr11 5200225 5200246 5200242 5200247 +
cctattatagtgagcccaattt

SEQ ID NO: 79437 - DNA, 22 bp, Artificial Sequence
  Synthetic oligonucleotide; CTA chr11 5200229 5200250 5200246 5200251 +
ttatagtgagcccaattttgat

SEQ ID NO: 79438 - DNA, 22 bp, Artificial Sequence
  Synthetic oligonucleotide; TTA chr11 5200232 5200253 5200249 5200254 +
tagtgagcccaattttgataat

SEQ ID NO: 79439 - DNA, 22 bp, Artificial Sequence
  Synthetic oligonucleotide; TTT chr11 5200247 5200268 5200264 5200269 +
tgataattctggaattagtcag

SEQ ID NO: 79440 - DNA, 22 bp, Artificial Sequence
  Synthetic oligonucleotide; TTT chr11 5200248 5200269 5200265 5200270 +
gataattctggaattagtcagg

SEQ ID NO: 79441 - DNA, 22 bp, Artificial Sequence
  Synthetic oligonucleotide; TTG chr11 5200249 5200270 5200266 5200271 +
ataattctggaattagtcagga

SEQ ID NO: 79442 - DNA, 22 bp, Artificial Sequence
  Synthetic oligonucleotide; TTC chr11 5200256 5200277 5200273 5200278 +
tggaattagtcaggatggagga

SEQ ID NO: 79443 - DNA, 22 bp, Artificial Sequence
  Synthetic oligonucleotide; CTG chr11 5200258 5200279 5200275 5200280 +
gaattagtcaggatggaggaat

SEQ ID NO: 79444 - DNA, 22 bp, Artificial Sequence
  Synthetic oligonucleotide; TTA chr11 5200264 5200285 5200281 5200286 +
gtcaggatggaggaataacgta

SEQ ID NO: 79445 - DNA, 22 bp, Artificial Sequence
  Synthetic oligonucleotide; TTG chr11 5200294 5200315 5200311 5200316 +
caaattgcaatgtaccggtcaa

SEQ ID NO: 79446 - DNA, 22 bp, Artificial Sequence
  Synthetic oligonucleotide; TTG chr11 5200301 5200322 5200318 5200323 +
caatgtaccggtcaaaggccat

SEQ ID NO: 79447 - DNA, 22 bp, Artificial Sequence
  Synthetic oligonucleotide; CTC chr11 5200344 5200365 5200361 5200366 +
catgaaggacagaccatggatg

SEQ ID NO: 79448 - DNA, 22 bp, Artificial Sequence
  Synthetic oligonucleotide; CTG chr11 5200377 5200398 5200394 5200399 +
ggcaatgcaggaatccaagctg

SEQ ID NO: 79449 - DNA, 22 bp, Artificial Sequence
  Synthetic oligonucleotide; CTG chr11 5200399 5200420 5200416 5200421 +
atctctcgaatgatcccccaca

SEQ ID NO: 79450 - DNA, 22 bp, Artificial Sequence
  Synthetic oligonucleotide; CTC chr11 5200404 5200425 5200421 5200426 +
tcgaatgatcccccacaggatc

SEQ ID NO: 79451 - DNA, 22 bp, Artificial Sequence
  Synthetic oligonucleotide; CTC chr11 5200406 5200427 5200423 5200428 +
gaatgatcccccacaggatccc

SEQ ID NO: 79452 - DNA, 22 bp, Artificial Sequence
  Synthetic oligonucleotide; CTG chr11 5200436 5200457 5200453 5200458 +
tgtacacagtggacagccccat

SEQ ID NO: 79453 - DNA, 22 bp, Artificial Sequence
  Synthetic oligonucleotide; CTG chr11 5200506 5200527 5200523 5200528 +
gtgcaggcttggctcagtccat

SEQ ID NO: 79454 - DNA, 22 bp, Artificial Sequence
  Synthetic oligonucleotide; CTT chr11 5200516 5200537 5200533 5200538 +
ggctcagtccatatcacatgga

SEQ ID NO: 79455 - DNA, 22 bp, Artificial Sequence
  Synthetic oligonucleotide; TTG chr11 5200517 5200538 5200534 5200539 +
gctcagtccatatcacatggag

SEQ ID NO: 79456 - DNA, 22 bp, Artificial Sequence
  Synthetic oligonucleotide; CTC chr11 5200521 5200542 5200538 5200543 +
agtccatatcacatggagaacc

SEQ ID NO: 79457 - DNA, 22 bp, Artificial Sequence
  Synthetic oligonucleotide; TTG chr11 5200552 5200573 5200569 5200574 +
cccaaaagcaccatggcataga

SEQ ID NO: 79458 - DNA, 22 bp, Artificial Sequence
  Synthetic oligonucleotide; TTG chr11 5200577 5200598 5200594 5200599 +
aggagaaggggatggaaagcca

SEQ ID NO: 79459 - DNA, 22 bp, Artificial Sequence
  Synthetic oligonucleotide; TTG chr11 5200608 5200629 5200625 5200630 +
ctgctccatgccagaaaatcca

SEQ ID NO: 79460 - DNA, 22 bp, Artificial Sequence
  Synthetic oligonucleotide; CTG chr11 5200611 5200632 5200628 5200633 +
ctccatgccagaaaatccagtg

SEQ ID NO: 79461 - DNA, 22 bp, Artificial Sequence
  Synthetic oligonucleotide; CTC chr11 5200614 5200635 5200631 5200636 +
catgccagaaaatccagtgaga

SEQ ID NO: 79462 - DNA, 22 bp, Artificial Sequence
  Synthetic oligonucleotide; TTC chr11 5200651 5200672 5200668 5200673 +
gtgctggtgctagggcttactg

SEQ ID NO: 79463 - DNA, 22 bp, Artificial Sequence
  Synthetic oligonucleotide; CTG chr11 5200657 5200678 5200674 5200679 +
gtgctagggcttactgaagtaa

SEQ ID NO: 79464 - DNA, 22 bp, Artificial Sequence
  Synthetic oligonucleotide; CTA chr11 5200663 5200684 5200680 5200685 +
gggcttactgaagtaatcattc

SEQ ID NO: 79465 - DNA, 22 bp, Artificial Sequence
  Synthetic oligonucleotide; CTT chr11 5200669 5200690 5200686 5200691 +
actgaagtaatcattctggaac

SEQ ID NO: 79466 - DNA, 22 bp, Artificial Sequence
  Synthetic oligonucleotide; TTA chr11 5200670 5200691 5200687 5200692 +
ctgaagtaatcattctggaact

SEQ ID NO: 79467 - DNA, 22 bp, Artificial Sequence
  Synthetic oligonucleotide; CTG chr11 5200673 5200694 5200690 5200695 +
aagtaatcattctggaactgag

SEQ ID NO: 79468 - DNA, 22 bp, Artificial Sequence
  Synthetic oligonucleotide; TTC chr11 5200685 5200706 5200702 5200707 +
tggaactgagaaacatgtgaga

SEQ ID NO: 79469 - DNA, 22 bp, Artificial Sequence
  Synthetic oligonucleotide; CTG chr11 5200687 5200708 5200704 5200709 +
gaactgagaaacatgtgagagt

SEQ ID NO: 79470 - DNA, 22 bp, Artificial Sequence
  Synthetic oligonucleotide; CTG chr11 5200693 5200714 5200710 5200715 +
agaaacatgtgagagtattttt

SEQ ID NO: 79471 - DNA, 22 bp, Artificial Sequence
  Synthetic oligonucleotide; TTT chr11 5200713 5200734 5200730 5200735 +
tttcaaaggaaatgtttcaatt

SEQ ID NO: 79472 - DNA, 22 bp, Artificial Sequence
  Synthetic oligonucleotide; TTT chr11 5200714 5200735 5200731 5200736 +
ttcaaaggaaatgtttcaattt

SEQ ID NO: 79473 - DNA, 22 bp, Artificial Sequence
  Synthetic oligonucleotide; TTT chr11 5200715 5200736 5200732 5200737 +
tcaaaggaaatgtttcaatttc

SEQ ID NO: 79474 - DNA, 22 bp, Artificial Sequence
  Synthetic oligonucleotide; TTT chr11 5200716 5200737 5200733 5200738 +
caaaggaaatgtttcaatttca

SEQ ID NO: 79475 - DNA, 22 bp, Artificial Sequence
  Synthetic oligonucleotide; TTC chr11 5200717 5200738 5200734 5200739 +
aaaggaaatgtttcaatttcac

SEQ ID NO: 79476 - DNA, 22 bp, Artificial Sequence
  Synthetic oligonucleotide; TTT chr11 5200730 5200751 5200747 5200752 +
caatttcacctgaatacaatga

SEQ ID NO: 79477 - DNA, 22 bp, Artificial Sequence
  Synthetic oligonucleotide; TTC chr11 5200731 5200752 5200748 5200753 +
aatttcacctgaatacaatgaa

SEQ ID NO: 79478 - DNA, 22 bp, Artificial Sequence
  Synthetic oligonucleotide; TTT chr11 5200736 5200757 5200753 5200758 +
cacctgaatacaatgaaatttc

SEQ ID NO: 79479 - DNA, 22 bp, Artificial Sequence
  Synthetic oligonucleotide; TTC chr11 5200737 5200758 5200754 5200759 +
acctgaatacaatgaaatttct

SEQ ID NO: 79480 - DNA, 22 bp, Artificial Sequence
  Synthetic oligonucleotide; CTG chr11 5200742 5200763 5200759 5200764 +
aatacaatgaaatttctaagta

SEQ ID NO: 79481 - DNA, 22 bp, Artificial Sequence
  Synthetic oligonucleotide; TTT chr11 5200757 5200778 5200774 5200779 +
ctaagtaaatgaaataccctaa

SEQ ID NO: 79482 - DNA, 22 bp, Artificial Sequence
  Synthetic oligonucleotide; TTC chr11 5200758 5200779 5200775 5200780 +
taagtaaatgaaataccctaaa

SEQ ID NO: 79483 - DNA, 22 bp, Artificial Sequence
  Synthetic oligonucleotide; CTA chr11 5200760 5200781 5200777 5200782 +
agtaaatgaaataccctaaaac

SEQ ID NO: 79484 - DNA, 22 bp, Artificial Sequence
  Synthetic oligonucleotide; CTA chr11 5200778 5200799 5200795 5200800 +
aaacttactgacttaaaaaaaa

SEQ ID NO: 79485 - DNA, 22 bp, Artificial Sequence
  Synthetic oligonucleotide; CTT chr11 5200784 5200805 5200801 5200806 +
actgacttaaaaaaaacagctg

SEQ ID NO: 79486 - DNA, 22 bp, Artificial Sequence
  Synthetic oligonucleotide; TTA chr11 5200785 5200806 5200802 5200807 +
ctgacttaaaaaaaacagctga

SEQ ID NO: 79487 - DNA, 22 bp, Artificial Sequence
  Synthetic oligonucleotide; CTG chr11 5200788 5200809 5200805 5200810 +
acttaaaaaaaacagctgagaa

SEQ ID NO: 79488 - DNA, 22 bp, Artificial Sequence
  Synthetic oligonucleotide; CTT chr11 5200792 5200813 5200809 5200814 +
aaaaaaaacagctgagaaattc

SEQ ID NO: 79489 - DNA, 22 bp, Artificial Sequence
  Synthetic oligonucleotide; TTA chr11 5200793 5200814 5200810 5200815 +
aaaaaaacagctgagaaattct

SEQ ID NO: 79490 - DNA, 22 bp, Artificial Sequence
  Synthetic oligonucleotide; CTG chr11 5200806 5200827 5200823 5200828 +
agaaattctgtttctttgagac

SEQ ID NO: 79491 - DNA, 22 bp, Artificial Sequence
  Synthetic oligonucleotide; TTC chr11 5200814 5200835 5200831 5200836 +
tgtttctttgagacatagtatc

SEQ ID NO: 79492 - DNA, 22 bp, Artificial Sequence
  Synthetic oligonucleotide; CTG chr11 5200816 5200837 5200833 5200838 +
tttctttgagacatagtatcca

SEQ ID NO: 79493 - DNA, 22 bp, Artificial Sequence
  Synthetic oligonucleotide; TTT chr11 5200819 5200840 5200836 5200841 +
ctttgagacatagtatccattg

SEQ ID NO: 79494 - DNA, 22 bp, Artificial Sequence
  Synthetic oligonucleotide; TTC chr11 5200820 5200841 5200837 5200842 +
tttgagacatagtatccattgc

SEQ ID NO: 79495 - DNA, 22 bp, Artificial Sequence
  Synthetic oligonucleotide; CTT chr11 5200822 5200843 5200839 5200844 +
tgagacatagtatccattgcct

SEQ ID NO: 79496 - DNA, 22 bp, Artificial Sequence
  Synthetic oligonucleotide; TTT chr11 5200823 5200844 5200840 5200845 +
gagacatagtatccattgcctt

SEQ ID NO: 79497 - DNA, 22 bp, Artificial Sequence
  Synthetic oligonucleotide; TTG chr11 5200824 5200845 5200841 5200846 +
agacatagtatccattgccttt

SEQ ID NO: 79498 - DNA, 22 bp, Artificial Sequence
  Synthetic oligonucleotide; TTG chr11 5200841 5200862 5200858 5200863 +
cctttgagaaaatggtcttctt

SEQ ID NO: 79499 - DNA, 22 bp, Artificial Sequence
  Synthetic oligonucleotide; CTT chr11 5200845 5200866 5200862 5200867 +
tgagaaaatggtcttcttttga

SEQ ID NO: 79500 - DNA, 22 bp, Artificial Sequence
  Synthetic oligonucleotide; TTT chr11 5200846 5200867 5200863 5200868 +
gagaaaatggtcttcttttgat

SEQ ID NO: 79501 - DNA, 22 bp, Artificial Sequence
  Synthetic oligonucleotide; TTG chr11 5200847 5200868 5200864 5200869 +
agaaaatggtcttcttttgatg

SEQ ID NO: 79502 - DNA, 22 bp, Artificial Sequence
  Synthetic oligonucleotide; CTT chr11 5200860 5200881 5200877 5200882 +
cttttgatgtcatttaaaagtc

SEQ ID NO: 79503 - DNA, 22 bp, Artificial Sequence
  Synthetic oligonucleotide; TTC chr11 5200861 5200882 5200878 5200883 +
ttttgatgtcatttaaaagtca

SEQ ID NO: 79504 - DNA, 22 bp, Artificial Sequence
  Synthetic oligonucleotide; CTT chr11 5200863 5200884 5200880 5200885 +
ttgatgtcatttaaaagtcatt

SEQ ID NO: 79505 - DNA, 22 bp, Artificial Sequence
  Synthetic oligonucleotide; TTT chr11 5200864 5200885 5200881 5200886 +
tgatgtcatttaaaagtcatta

SEQ ID NO: 79506 - DNA, 22 bp, Artificial Sequence
  Synthetic oligonucleotide; TTT chr11 5200865 5200886 5200882 5200887 +
gatgtcatttaaaagtcattat

SEQ ID NO: 79507 - DNA, 22 bp, Artificial Sequence
  Synthetic oligonucleotide; TTG chr11 5200866 5200887 5200883 5200888 +
atgtcatttaaaagtcattatt

SEQ ID NO: 79508 - DNA, 22 bp, Artificial Sequence
  Synthetic oligonucleotide; TTT chr11 5200875 5200896 5200892 5200897 +
aaaagtcattattttttcactg

SEQ ID NO: 79509 - DNA, 22 bp, Artificial Sequence
  Synthetic oligonucleotide; TTA chr11 5200876 5200897 5200893 5200898 +
aaagtcattattttttcactgt

SEQ ID NO: 79510 - DNA, 22 bp, Artificial Sequence
  Synthetic oligonucleotide; TTA chr11 5200886 5200907 5200903 5200908 +
ttttttcactgtctggatgtga

SEQ ID NO: 79511 - DNA, 22 bp, Artificial Sequence
  Synthetic oligonucleotide; TTT chr11 5200889 5200910 5200906 5200911 +
tttcactgtctggatgtgaaca

SEQ ID NO: 79512 - DNA, 22 bp, Artificial Sequence
  Synthetic oligonucleotide; TTT chr11 5200890 5200911 5200907 5200912 +
ttcactgtctggatgtgaacat

SEQ ID NO: 79513 - DNA, 22 bp, Artificial Sequence
  Synthetic oligonucleotide; TTT chr11 5200891 5200912 5200908 5200913 +
tcactgtctggatgtgaacata

SEQ ID NO: 79514 - DNA, 22 bp, Artificial Sequence
  Synthetic oligonucleotide; TTT chr11 5200892 5200913 5200909 5200914 +
cactgtctggatgtgaacatat

SEQ ID NO: 79515 - DNA, 22 bp, Artificial Sequence
  Synthetic oligonucleotide; TTC chr11 5200893 5200914 5200910 5200915 +
actgtctggatgtgaacatatc

SEQ ID NO: 79516 - DNA, 22 bp, Artificial Sequence
  Synthetic oligonucleotide; CTG chr11 5200897 5200918 5200914 5200919 +
tctggatgtgaacatatcctta

SEQ ID NO: 79517 - DNA, 22 bp, Artificial Sequence
  Synthetic oligonucleotide; CTG chr11 5200901 5200922 5200918 5200923 +
gatgtgaacatatccttagaag

SEQ ID NO: 79518 - DNA, 22 bp, Artificial Sequence
  Synthetic oligonucleotide; CTT chr11 5200918 5200939 5200935 5200940 +
agaagccataagcaaaaacaaa

SEQ ID NO: 79519 - DNA, 22 bp, Artificial Sequence
  Synthetic oligonucleotide; TTA chr11 5200919 5200940 5200936 5200941 +
gaagccataagcaaaaacaaat

SEQ ID NO: 79520 - DNA, 22 bp, Artificial Sequence
  Synthetic oligonucleotide; TTA chr11 5200954 5200975 5200971 5200976 +
gtaaaaggagaaggctagtttt

SEQ ID NO: 79521 - DNA, 22 bp, Artificial Sequence
  Synthetic oligonucleotide; CTA chr11 5200971 5200992 5200988 5200993 +
gttttaaaaaaatacgttgctt

SEQ ID NO: 79522 - DNA, 22 bp, Artificial Sequence
  Synthetic oligonucleotide; TTT chr11 5200975 5200996 5200992 5200997 +
taaaaaaatacgttgcttagac

SEQ ID NO: 79523 - DNA, 22 bp, Artificial Sequence
  Synthetic oligonucleotide; TTT chr11 5200976 5200997 5200993 5200998 +
aaaaaaatacgttgcttagaca

SEQ ID NO: 79524 - DNA, 22 bp, Artificial Sequence
  Synthetic oligonucleotide; TTA chr11 5200977 5200998 5200994 5200999 +
aaaaaatacgttgcttagacat

SEQ ID NO: 79525 - DNA, 22 bp, Artificial Sequence
  Synthetic oligonucleotide; TTG chr11 5200990 5201011 5201007 5201012 +
cttagacattttcccaaggata

SEQ ID NO: 79526 - DNA, 22 bp, Artificial Sequence
  Synthetic oligonucleotide; CTT chr11 5200993 5201014 5201010 5201015 +
agacattttcccaaggatagtg

SEQ ID NO: 79527 - DNA, 22 bp, Artificial Sequence
  Synthetic oligonucleotide; TTA chr11 5200994 5201015 5201011 5201016 +
gacattttcccaaggatagtgg

SEQ ID NO: 79528 - DNA, 22 bp, Artificial Sequence
  Synthetic oligonucleotide; TTT chr11 5201001 5201022 5201018 5201023 +
tcccaaggatagtggtaaaaat

SEQ ID NO: 79529 - DNA, 22 bp, Artificial Sequence
  Synthetic oligonucleotide; TTT chr11 5201002 5201023 5201019 5201024 +
cccaaggatagtggtaaaaatt

SEQ ID NO: 79530 - DNA, 22 bp, Artificial Sequence
  Synthetic oligonucleotide; TTC chr11 5201003 5201024 5201020 5201025 +
ccaaggatagtggtaaaaattt

SEQ ID NO: 79531 - DNA, 22 bp, Artificial Sequence
  Synthetic oligonucleotide; TTT chr11 5201025 5201046 5201042 5201047 +
tataccagtaaagagccgaggt

SEQ ID NO: 79532 - DNA, 22 bp, Artificial Sequence
  Synthetic oligonucleotide; TTT chr11 5201026 5201047 5201043 5201048 +
ataccagtaaagagccgaggtt

SEQ ID NO: 79533 - DNA, 22 bp, Artificial Sequence
  Synthetic oligonucleotide; TTA chr11 5201027 5201048 5201044 5201049 +
taccagtaaagagccgaggttc

SEQ ID NO: 79534 - DNA, 22 bp, Artificial Sequence
  Synthetic oligonucleotide; TTC chr11 5201049 5201070 5201066 5201071 +
ttgaaaaattattttcttctct

SEQ ID NO: 79535 - DNA, 22 bp, Artificial Sequence
  Synthetic oligonucleotide; CTT chr11 5201051 5201072 5201068 5201073 +
gaaaaattattttcttctctcc

SEQ ID NO: 79536 - DNA, 22 bp, Artificial Sequence
  Synthetic oligonucleotide; TTG chr11 5201052 5201073 5201069 5201074 +
aaaaattattttcttctctcca

SEQ ID NO: 79537 - DNA, 22 bp, Artificial Sequence
  Synthetic oligonucleotide; TTA chr11 5201060 5201081 5201077 5201082 +
ttttcttctctccaattcatta

SEQ ID NO: 79538 - DNA, 22 bp, Artificial Sequence
  Synthetic oligonucleotide; TTT chr11 5201063 5201084 5201080 5201085 +
tcttctctccaattcattaaac

SEQ ID NO: 79539 - DNA, 22 bp, Artificial Sequence
  Synthetic oligonucleotide; TTT chr11 5201064 5201085 5201081 5201086 +
cttctctccaattcattaaaca

SEQ ID NO: 79540 - DNA, 22 bp, Artificial Sequence
  Synthetic oligonucleotide; TTC chr11 5201065 5201086 5201082 5201087 +
ttctctccaattcattaaacat

SEQ ID NO: 79541 - DNA, 22 bp, Artificial Sequence
  Synthetic oligonucleotide; CTT chr11 5201067 5201088 5201084 5201089 +
ctctccaattcattaaacattc

SEQ ID NO: 79542 - DNA, 22 bp, Artificial Sequence
  Synthetic oligonucleotide; TTC chr11 5201068 5201089 5201085 5201090 +
tctccaattcattaaacattcg

SEQ ID NO: 79543 - DNA, 22 bp, Artificial Sequence
  Synthetic oligonucleotide; CTC chr11 5201070 5201091 5201087 5201092 +
tccaattcattaaacattcgaa

SEQ ID NO: 79544 - DNA, 22 bp, Artificial Sequence
  Synthetic oligonucleotide; CTC chr11 5201072 5201093 5201089 5201094 +
caattcattaaacattcgaagt

SEQ ID NO: 79545 - DNA, 22 bp, Artificial Sequence
  Synthetic oligonucleotide; TTC chr11 5201078 5201099 5201095 5201100 +
attaaacattcgaagtgaagag

SEQ ID NO: 79546 - DNA, 22 bp, Artificial Sequence
  Synthetic oligonucleotide; TTA chr11 5201082 5201103 5201099 5201104 +
aacattcgaagtgaagagtaat

SEQ ID NO: 79547 - DNA, 22 bp, Artificial Sequence
  Synthetic oligonucleotide; TTC chr11 5201089 5201110 5201106 5201111 +
gaagtgaagagtaatctttggg

SEQ ID NO: 79548 - DNA, 22 bp, Artificial Sequence
  Synthetic oligonucleotide; CTT chr11 5201107 5201128 5201124 5201129 +
tgggctttaaatatcataagtc

SEQ ID NO: 79549 - DNA, 22 bp, Artificial Sequence
  Synthetic oligonucleotide; TTT chr11 5201108 5201129 5201125 5201130 +
gggctttaaatatcataagtct

SEQ ID NO: 79550 - DNA, 22 bp, Artificial Sequence
  Synthetic oligonucleotide; TTG chr11 5201109 5201130 5201126 5201131 +
ggctttaaatatcataagtcta

SEQ ID NO: 79551 - DNA, 22 bp, Artificial Sequence
  Synthetic oligonucleotide; CTT chr11 5201114 5201135 5201131 5201136 +
taaatatcataagtctattaaa

SEQ ID NO: 79552 - DNA, 22 bp, Artificial Sequence
  Synthetic oligonucleotide; TTT chr11 5201115 5201136 5201132 5201137 +
aaatatcataagtctattaaat

SEQ ID NO: 79553 - DNA, 22 bp, Artificial Sequence
  Synthetic oligonucleotide; TTA chr11 5201116 5201137 5201133 5201138 +
aatatcataagtctattaaata

SEQ ID NO: 79554 - DNA, 22 bp, Artificial Sequence
  Synthetic oligonucleotide; CTA chr11 5201131 5201152 5201148 5201153 +
ttaaatagtcacttttccgtca

SEQ ID NO: 79555 - DNA, 22 bp, Artificial Sequence
  Synthetic oligonucleotide; TTA chr11 5201134 5201155 5201151 5201156 +
aatagtcacttttccgtcattt

SEQ ID NO: 79556 - DNA, 22 bp, Artificial Sequence
  Synthetic oligonucleotide; CTT chr11 5201145 5201166 5201162 5201167 +
ttccgtcattttccattttgtg

SEQ ID NO: 79557 - DNA, 22 bp, Artificial Sequence
  Synthetic oligonucleotide; TTT chr11 5201146 5201167 5201163 5201168 +
tccgtcattttccattttgtgc

SEQ ID NO: 79558 - DNA, 22 bp, Artificial Sequence
  Synthetic oligonucleotide; TTT chr11 5201147 5201168 5201164 5201169 +
ccgtcattttccattttgtgcc

SEQ ID NO: 79559 - DNA, 22 bp, Artificial Sequence
  Synthetic oligonucleotide; TTC chr11 5201148 5201169 5201165 5201170 +
cgtcattttccattttgtgccg

SEQ ID NO: 79560 - DNA, 22 bp, Artificial Sequence
  Synthetic oligonucleotide; TTT chr11 5201156 5201177 5201173 5201178 +
tccattttgtgccgtctccaag

SEQ ID NO: 79561 - DNA, 22 bp, Artificial Sequence
  Synthetic oligonucleotide; TTT chr11 5201157 5201178 5201174 5201179 +
ccattttgtgccgtctccaagt

SEQ ID NO: 79562 - DNA, 22 bp, Artificial Sequence
  Synthetic oligonucleotide; TTC chr11 5201158 5201179 5201175 5201180 +
cattttgtgccgtctccaagta

SEQ ID NO: 79563 - DNA, 22 bp, Artificial Sequence
  Synthetic oligonucleotide; TTT chr11 5201163 5201184 5201180 5201185 +
tgtgccgtctccaagtatattt

SEQ ID NO: 79564 - DNA, 22 bp, Artificial Sequence
  Synthetic oligonucleotide; TTT chr11 5201164 5201185 5201181 5201186 +
gtgccgtctccaagtatatttt

SEQ ID NO: 79565 - DNA, 22 bp, Artificial Sequence
  Synthetic oligonucleotide; TTG chr11 5201165 5201186 5201182 5201187 +
tgccgtctccaagtatattttt

SEQ ID NO: 79566 - DNA, 22 bp, Artificial Sequence
  Synthetic oligonucleotide; CTC chr11 5201174 5201195 5201191 5201196 +
caagtatattttttctccaaat

SEQ ID NO: 79567 - DNA, 22 bp, Artificial Sequence
  Synthetic oligonucleotide; TTT chr11 5201185 5201206 5201202 5201207 +
tttctccaaatactatttaatg

SEQ ID NO: 79568 - DNA, 22 bp, Artificial Sequence
  Synthetic oligonucleotide; TTT chr11 5201186 5201207 5201203 5201208 +
ttctccaaatactatttaatga

SEQ ID NO: 79569 - DNA, 22 bp, Artificial Sequence
  Synthetic oligonucleotide; TTT chr11 5201187 5201208 5201204 5201209 +
tctccaaatactatttaatgaa

SEQ ID NO: 79570 - DNA, 22 bp, Artificial Sequence
  Synthetic oligonucleotide; TTT chr11 5201188 5201209 5201205 5201210 +
ctccaaatactatttaatgaag

SEQ ID NO: 79571 - DNA, 22 bp, Artificial Sequence
  Synthetic oligonucleotide; TTC chr11 5201189 5201210 5201206 5201211 +
tccaaatactatttaatgaaga

SEQ ID NO: 79572 - DNA, 22 bp, Artificial Sequence
  Synthetic oligonucleotide; CTC chr11 5201191 5201212 5201208 5201213 +
caaatactatttaatgaagata

SEQ ID NO: 79573 - DNA, 22 bp, Artificial Sequence
  Synthetic oligonucleotide; CTA chr11 5201200 5201221 5201217 5201222 +
tttaatgaagatactcctgttt

SEQ ID NO: 79574 - DNA, 22 bp, Artificial Sequence
  Synthetic oligonucleotide; TTT chr11 5201203 5201224 5201220 5201225 +
aatgaagatactcctgttttct

SEQ ID NO: 79575 - DNA, 22 bp, Artificial Sequence
  Synthetic oligonucleotide; TTA chr11 5201204 5201225 5201221 5201226 +
atgaagatactcctgttttctc

SEQ ID NO: 79576 - DNA, 22 bp, Artificial Sequence
  Synthetic oligonucleotide; CTC chr11 5201216 5201237 5201233 5201238 +
ctgttttctccccctccagatg

SEQ ID NO: 79577 - DNA, 22 bp, Artificial Sequence
  Synthetic oligonucleotide; CTG chr11 5201219 5201240 5201236 5201241 +
ttttctccccctccagatgacg

SEQ ID NO: 79578 - DNA, 22 bp, Artificial Sequence
  Synthetic oligonucleotide; TTT chr11 5201222 5201243 5201239 5201244 +
tctccccctccagatgacgtag

SEQ ID NO: 79579 - DNA, 22 bp, Artificial Sequence
  Synthetic oligonucleotide; TTT chr11 5201223 5201244 5201240 5201245 +
ctccccctccagatgacgtagc

SEQ ID NO: 79580 - DNA, 22 bp, Artificial Sequence
  Synthetic oligonucleotide; TTC chr11 5201224 5201245 5201241 5201246 +
tccccctccagatgacgtagcc

SEQ ID NO: 79581 - DNA, 22 bp, Artificial Sequence
  Synthetic oligonucleotide; CTC chr11 5201226 5201247 5201243 5201248 +
cccctccagatgacgtagccag

SEQ ID NO: 79582 - DNA, 22 bp, Artificial Sequence
  Synthetic oligonucleotide; CTC chr11 5201232 5201253 5201249 5201254 +
cagatgacgtagccagcaatta

SEQ ID NO: 79583 - DNA, 22 bp, Artificial Sequence
  Synthetic oligonucleotide; TTA chr11 5201254 5201275 5201271 5201276 +
ctttttcttcattggtgataag

SEQ ID NO: 79584 - DNA, 22 bp, Artificial Sequence
  Synthetic oligonucleotide; CTT chr11 5201257 5201278 5201274 5201279 +
tttcttcattggtgataagcag

SEQ ID NO: 79585 - DNA, 22 bp, Artificial Sequence
  Synthetic oligonucleotide; TTT chr11 5201258 5201279 5201275 5201280 +
ttcttcattggtgataagcaga

SEQ ID NO: 79586 - DNA, 22 bp, Artificial Sequence
  Synthetic oligonucleotide; TTT chr11 5201259 5201280 5201276 5201281 +
tcttcattggtgataagcagac

SEQ ID NO: 79587 - DNA, 22 bp, Artificial Sequence
  Synthetic oligonucleotide; TTT chr11 5201260 5201281 5201277 5201282 +
cttcattggtgataagcagaca

SEQ ID NO: 79588 - DNA, 22 bp, Artificial Sequence
  Synthetic oligonucleotide; TTC chr11 5201261 5201282 5201278 5201283 +
ttcattggtgataagcagacag

SEQ ID NO: 79589 - DNA, 22 bp, Artificial Sequence
  Synthetic oligonucleotide; CTT chr11 5201263 5201284 5201280 5201285 +
cattggtgataagcagacagga

SEQ ID NO: 79590 - DNA, 22 bp, Artificial Sequence
  Synthetic oligonucleotide; TTC chr11 5201264 5201285 5201281 5201286 +
attggtgataagcagacaggaa

SEQ ID NO: 79591 - DNA, 22 bp, Artificial Sequence
  Synthetic oligonucleotide; TTG chr11 5201268 5201289 5201285 5201290 +
gtgataagcagacaggaatatt

SEQ ID NO: 79592 - DNA, 22 bp, Artificial Sequence
  Synthetic oligonucleotide; TTT chr11 5201291 5201312 5201308 5201313 +
atgcatgagaccttgggtaaat

SEQ ID NO: 79593 - DNA, 22 bp, Artificial Sequence
  Synthetic oligonucleotide; TTA chr11 5201292 5201313 5201309 5201314 +
tgcatgagaccttgggtaaatg

SEQ ID NO: 79594 - DNA, 22 bp, Artificial Sequence
  Synthetic oligonucleotide; CTT chr11 5201305 5201326 5201322 5201327 +
gggtaaatgatttctcactgga

SEQ ID NO: 79595 - DNA, 22 bp, Artificial Sequence
  Synthetic oligonucleotide; TTG chr11 5201306 5201327 5201323 5201328 +
ggtaaatgatttctcactggag

SEQ ID NO: 79596 - DNA, 22 bp, Artificial Sequence
  Synthetic oligonucleotide; TTT chr11 5201318 5201339 5201335 5201340 +
ctcactggagctctggcctctt

SEQ ID NO: 79597 - DNA, 22 bp, Artificial Sequence
  Synthetic oligonucleotide; TTC chr11 5201319 5201340 5201336 5201341 +
tcactggagctctggcctcttg

SEQ ID NO: 79598 - DNA, 22 bp, Artificial Sequence
  Synthetic oligonucleotide; CTC chr11 5201321 5201342 5201338 5201343 +
actggagctctggcctcttgag

SEQ ID NO: 79599 - DNA, 22 bp, Artificial Sequence
  Synthetic oligonucleotide; CTG chr11 5201325 5201346 5201342 5201347 +
gagctctggcctcttgagatgt

SEQ ID NO: 79600 - DNA, 22 bp, Artificial Sequence
  Synthetic oligonucleotide; CTC chr11 5201331 5201352 5201348 5201353 +
tggcctcttgagatgttcaact

SEQ ID NO: 79601 - DNA, 22 bp, Artificial Sequence
  Synthetic oligonucleotide; CTG chr11 5201333 5201354 5201350 5201355 +
gcctcttgagatgttcaactca

SEQ ID NO: 79602 - DNA, 22 bp, Artificial Sequence
  Synthetic oligonucleotide; CTC chr11 5201338 5201359 5201355 5201360 +
ttgagatgttcaactcatttgt

SEQ ID NO: 79603 - DNA, 22 bp, Artificial Sequence
  Synthetic oligonucleotide; CTT chr11 5201340 5201361 5201357 5201362 +
gagatgttcaactcatttgtgc

SEQ ID NO: 79604 - DNA, 22 bp, Artificial Sequence
  Synthetic oligonucleotide; TTG chr11 5201341 5201362 5201358 5201363 +
agatgttcaactcatttgtgcc

SEQ ID NO: 79605 - DNA, 22 bp, Artificial Sequence
  Synthetic oligonucleotide; TTC chr11 5201349 5201370 5201366 5201371 +
aactcatttgtgcctttgtgat

SEQ ID NO: 79606 - DNA, 22 bp, Artificial Sequence
  Synthetic oligonucleotide; CTC chr11 5201354 5201375 5201371 5201376 +
atttgtgcctttgtgatgtaga

SEQ ID NO: 79607 - DNA, 22 bp, Artificial Sequence
  Synthetic oligonucleotide; TTT chr11 5201358 5201379 5201375 5201380 +
gtgcctttgtgatgtagagaat

SEQ ID NO: 79608 - DNA, 22 bp, Artificial Sequence
  Synthetic oligonucleotide; TTG chr11 5201359 5201380 5201376 5201381 +
tgcctttgtgatgtagagaatt

SEQ ID NO: 79609 - DNA, 22 bp, Artificial Sequence
  Synthetic oligonucleotide; CTT chr11 5201365 5201386 5201382 5201387 +
tgtgatgtagagaattagattg

SEQ ID NO: 79610 - DNA, 22 bp, Artificial Sequence
  Synthetic oligonucleotide; TTT chr11 5201366 5201387 5201383 5201388 +
gtgatgtagagaattagattga

SEQ ID NO: 79611 - DNA, 22 bp, Artificial Sequence
  Synthetic oligonucleotide; TTG chr11 5201367 5201388 5201384 5201389 +
tgatgtagagaattagattgaa

SEQ ID NO: 79612 - DNA, 22 bp, Artificial Sequence
  Synthetic oligonucleotide; TTA chr11 5201382 5201403 5201399 5201404 +
gattgaagacactgagcctttg

SEQ ID NO: 79613 - DNA, 22 bp, Artificial Sequence
  Synthetic oligonucleotide; TTG chr11 5201387 5201408 5201404 5201409 +
aagacactgagcctttgatagc

SEQ ID NO: 79614 - DNA, 22 bp, Artificial Sequence
  Synthetic oligonucleotide; CTG chr11 5201396 5201417 5201413 5201418 +
agcctttgatagcagctcagtg

SEQ ID NO: 79615 - DNA, 22 bp, Artificial Sequence
  Synthetic oligonucleotide; CTT chr11 5201402 5201423 5201419 5201424 +
tgatagcagctcagtgcttccc

SEQ ID NO: 79616 - DNA, 22 bp, Artificial Sequence
  Synthetic oligonucleotide; TTT chr11 5201403 5201424 5201420 5201425 +
gatagcagctcagtgcttccca

SEQ ID NO: 79617 - DNA, 22 bp, Artificial Sequence
  Synthetic oligonucleotide; TTG chr11 5201404 5201425 5201421 5201426 +
atagcagctcagtgcttcccat

SEQ ID NO: 79618 - DNA, 22 bp, Artificial Sequence
  Synthetic oligonucleotide; CTC chr11 5201414 5201435 5201431 5201436 +
agtgcttcccattcctttattt

SEQ ID NO: 79619 - DNA, 22 bp, Artificial Sequence
  Synthetic oligonucleotide; CTT chr11 5201421 5201442 5201438 5201443 +
cccattcctttatttattcagt

SEQ ID NO: 79620 - DNA, 22 bp, Artificial Sequence
  Synthetic oligonucleotide; TTC chr11 5201422 5201443 5201439 5201444 +
ccattcctttatttattcagtt

SEQ ID NO: 79621 - DNA, 22 bp, Artificial Sequence
  Synthetic oligonucleotide; TTC chr11 5201428 5201449 5201445 5201450 +
ctttatttattcagttaatgag

SEQ ID NO: 79622 - DNA, 22 bp, Artificial Sequence
  Synthetic oligonucleotide; CTT chr11 5201431 5201452 5201448 5201453 +
tatttattcagttaatgagctg

SEQ ID NO: 79623 - DNA, 22 bp, Artificial Sequence
  Synthetic oligonucleotide; TTT chr11 5201432 5201453 5201449 5201454 +
atttattcagttaatgagctga

SEQ ID NO: 79624 - DNA, 22 bp, Artificial Sequence
  Synthetic oligonucleotide; TTA chr11 5201433 5201454 5201450 5201455 +
tttattcagttaatgagctgat

SEQ ID NO: 79625 - DNA, 22 bp, Artificial Sequence
  Synthetic oligonucleotide; TTT chr11 5201436 5201457 5201453 5201458 +
attcagttaatgagctgattaa

SEQ ID NO: 79626 - DNA, 22 bp, Artificial Sequence
  Synthetic oligonucleotide; TTA chr11 5201437 5201458 5201454 5201459 +
ttcagttaatgagctgattaac

SEQ ID NO: 79627 - DNA, 22 bp, Artificial Sequence
  Synthetic oligonucleotide; TTC chr11 5201440 5201461 5201457 5201462 +
agttaatgagctgattaactat

SEQ ID NO: 79628 - DNA, 22 bp, Artificial Sequence
  Synthetic oligonucleotide; TTA chr11 5201445 5201466 5201462 5201467 +
atgagctgattaactatttatt

SEQ ID NO: 79629 - DNA, 22 bp, Artificial Sequence
  Synthetic oligonucleotide; CTG chr11 5201453 5201474 5201470 5201475 +
attaactatttattcaatatac

SEQ ID NO: 79630 - DNA, 22 bp, Artificial Sequence
  Synthetic oligonucleotide; TTA chr11 5201457 5201478 5201474 5201479 +
actatttattcaatatacattt

SEQ ID NO: 79631 - DNA, 22 bp, Artificial Sequence
  Synthetic oligonucleotide; CTA chr11 5201461 5201482 5201478 5201483 +
tttattcaatatacatttattc

SEQ ID NO: 79632 - DNA, 22 bp, Artificial Sequence
  Synthetic oligonucleotide; TTT chr11 5201464 5201485 5201481 5201486 +
attcaatatacatttattcaat

SEQ ID NO: 79633 - DNA, 22 bp, Artificial Sequence
  Synthetic oligonucleotide; TTA chr11 5201465 5201486 5201482 5201487 +
ttcaatatacatttattcaatg

SEQ ID NO: 79634 - DNA, 22 bp, Artificial Sequence
  Synthetic oligonucleotide; TTC chr11 5201468 5201489 5201485 5201490 +
aatatacatttattcaatgtat

SEQ ID NO: 79635 - DNA, 22 bp, Artificial Sequence
  Synthetic oligonucleotide; TTT chr11 5201479 5201500 5201496 5201501 +
attcaatgtattggccaattgt

SEQ ID NO: 79636 - DNA, 22 bp, Artificial Sequence
  Synthetic oligonucleotide; TTA chr11 5201480 5201501 5201497 5201502 +
ttcaatgtattggccaattgtg

SEQ ID NO: 79637 - DNA, 22 bp, Artificial Sequence
  Synthetic oligonucleotide; TTC chr11 5201483 5201504 5201500 5201505 +
aatgtattggccaattgtgttt

SEQ ID NO: 79638 - DNA, 22 bp, Artificial Sequence
  Synthetic oligonucleotide; TTG chr11 5201492 5201513 5201509 5201514 +
gccaattgtgttttctttctta

SEQ ID NO: 79639 - DNA, 22 bp, Artificial Sequence
  Synthetic oligonucleotide; TTG chr11 5201500 5201521 5201517 5201522 +
tgttttctttcttagaacctgc

SEQ ID NO: 79640 - DNA, 22 bp, Artificial Sequence
  Synthetic oligonucleotide; TTT chr11 5201505 5201526 5201522 5201527 +
tctttcttagaacctgcagttc

SEQ ID NO: 79641 - DNA, 22 bp, Artificial Sequence
  Synthetic oligonucleotide; TTT chr11 5201506 5201527 5201523 5201528 +
ctttcttagaacctgcagttct

SEQ ID NO: 79642 - DNA, 22 bp, Artificial Sequence
  Synthetic oligonucleotide; TTC chr11 5201507 5201528 5201524 5201529 +
tttcttagaacctgcagttcta

SEQ ID NO: 79643 - DNA, 22 bp, Artificial Sequence
  Synthetic oligonucleotide; CTT chr11 5201509 5201530 5201526 5201531 +
tcttagaacctgcagttctaca

SEQ ID NO: 79644 - DNA, 22 bp, Artificial Sequence
  Synthetic oligonucleotide; TTT chr11 5201510 5201531 5201527 5201532 +
cttagaacctgcagttctacag

SEQ ID NO: 79645 - DNA, 22 bp, Artificial Sequence
  Synthetic oligonucleotide; TTC chr11 5201511 5201532 5201528 5201533 +
ttagaacctgcagttctacaga

SEQ ID NO: 79646 - DNA, 22 bp, Artificial Sequence
  Synthetic oligonucleotide; CTT chr11 5201513 5201534 5201530 5201535 +
agaacctgcagttctacagatc

SEQ ID NO: 79647 - DNA, 22 bp, Artificial Sequence
  Synthetic oligonucleotide; TTA chr11 5201514 5201535 5201531 5201536 +
gaacctgcagttctacagatca

SEQ ID NO: 79648 - DNA, 22 bp, Artificial Sequence
  Synthetic oligonucleotide; CTG chr11 5201521 5201542 5201538 5201543 +
cagttctacagatcacaaagcc

SEQ ID NO: 79649 - DNA, 22 bp, Artificial Sequence
  Synthetic oligonucleotide; TTC chr11 5201527 5201548 5201544 5201549 +
tacagatcacaaagccaggctc

SEQ ID NO: 79650 - DNA, 22 bp, Artificial Sequence
  Synthetic oligonucleotide; CTA chr11 5201529 5201550 5201546 5201551 +
cagatcacaaagccaggctcaa

SEQ ID NO: 79651 - DNA, 22 bp, Artificial Sequence
  Synthetic oligonucleotide; CTC chr11 5201549 5201570 5201566 5201571 +
aaacaagcaagcttataatttc

SEQ ID NO: 79652 - DNA, 22 bp, Artificial Sequence
  Synthetic oligonucleotide; CTT chr11 5201563 5201584 5201580 5201585 +
ataatttcaaaagcctcatggt

SEQ ID NO: 79653 - DNA, 22 bp, Artificial Sequence
  Synthetic oligonucleotide; TTA chr11 5201564 5201585 5201581 5201586 +
taatttcaaaagcctcatggta

SEQ ID NO: 79654 - DNA, 22 bp, Artificial Sequence
  Synthetic oligonucleotide; TTT chr11 5201570 5201591 5201587 5201592 +
caaaagcctcatggtagcagaa

SEQ ID NO: 79655 - DNA, 22 bp, Artificial Sequence
  Synthetic oligonucleotide; TTC chr11 5201571 5201592 5201588 5201593 +
aaaagcctcatggtagcagaat

SEQ ID NO: 79656 - DNA, 22 bp, Artificial Sequence
  Synthetic oligonucleotide; CTC chr11 5201580 5201601 5201597 5201602 +
atggtagcagaatcaattggct

SEQ ID NO: 79657 - DNA, 22 bp, Artificial Sequence
  Synthetic oligonucleotide; TTG chr11 5201599 5201620 5201616 5201621 +
gcttcttctttacattgtttgc

SEQ ID NO: 79658 - DNA, 22 bp, Artificial Sequence
  Synthetic oligonucleotide; CTT chr11 5201603 5201624 5201620 5201625 +
cttctttacattgtttgcctgc

SEQ ID NO: 79659 - DNA, 22 bp, Artificial Sequence
  Synthetic oligonucleotide; TTC chr11 5201604 5201625 5201621 5201626 +
ttctttacattgtttgcctgct

SEQ ID NO: 79660 - DNA, 22 bp, Artificial Sequence
  Synthetic oligonucleotide; CTT chr11 5201606 5201627 5201623 5201628 +
ctttacattgtttgcctgcttt

SEQ ID NO: 79661 - DNA, 22 bp, Artificial Sequence
  Synthetic oligonucleotide; TTC chr11 5201607 5201628 5201624 5201629 +
tttacattgtttgcctgcttta

SEQ ID NO: 79662 - DNA, 22 bp, Artificial Sequence
  Synthetic oligonucleotide; CTT chr11 5201609 5201630 5201626 5201631 +
tacattgtttgcctgctttaag

SEQ ID NO: 79663 - DNA, 22 bp, Artificial Sequence
  Synthetic oligonucleotide; TTT chr11 5201610 5201631 5201627 5201632 +
acattgtttgcctgctttaagt

SEQ ID NO: 79664 - DNA, 22 bp, Artificial Sequence
  Synthetic oligonucleotide; TTA chr11 5201611 5201632 5201628 5201633 +
cattgtttgcctgctttaagtt

SEQ ID NO: 79665 - DNA, 22 bp, Artificial Sequence
  Synthetic oligonucleotide; TTG chr11 5201616 5201637 5201633 5201638 +
tttgcctgctttaagttccaga

SEQ ID NO: 79666 - DNA, 22 bp, Artificial Sequence
  Synthetic oligonucleotide; TTT chr11 5201619 5201640 5201636 5201641 +
gcctgctttaagttccagacct

SEQ ID NO: 79667 - DNA, 22 bp, Artificial Sequence
  Synthetic oligonucleotide; TTG chr11 5201620 5201641 5201637 5201642 +
cctgctttaagttccagacctg

SEQ ID NO: 79668 - DNA, 22 bp, Artificial Sequence
  Synthetic oligonucleotide; CTG chr11 5201624 5201645 5201641 5201646 +
ctttaagttccagacctgagaa

SEQ ID NO: 79669 - DNA, 22 bp, Artificial Sequence
  Synthetic oligonucleotide; CTT chr11 5201627 5201648 5201644 5201649 +
taagttccagacctgagaatca

SEQ ID NO: 79670 - DNA, 22 bp, Artificial Sequence
  Synthetic oligonucleotide; TTT chr11 5201628 5201649 5201645 5201650 +
aagttccagacctgagaatcat

SEQ ID NO: 79671 - DNA, 22 bp, Artificial Sequence
  Synthetic oligonucleotide; TTA chr11 5201629 5201650 5201646 5201651 +
agttccagacctgagaatcatc

SEQ ID NO: 79672 - DNA, 22 bp, Artificial Sequence
  Synthetic oligonucleotide; TTC chr11 5201634 5201655 5201651 5201656 +
cagacctgagaatcatcataag

SEQ ID NO: 79673 - DNA, 22 bp, Artificial Sequence
  Synthetic oligonucleotide; CTG chr11 5201642 5201663 5201659 5201664 +
agaatcatcataagttttttta

SEQ ID NO: 79674 - DNA, 22 bp, Artificial Sequence
  Synthetic oligonucleotide; TTT chr11 5201659 5201680 5201676 5201681 +
ttttaaagctctaataatgtaa

SEQ ID NO: 79675 - DNA, 22 bp, Artificial Sequence
  Synthetic oligonucleotide; TTT chr11 5201660 5201681 5201677 5201682 +
tttaaagctctaataatgtaaa

SEQ ID NO: 79676 - DNA, 22 bp, Artificial Sequence
  Synthetic oligonucleotide; TTT chr11 5201661 5201682 5201678 5201683 +
ttaaagctctaataatgtaaac

SEQ ID NO: 79677 - DNA, 22 bp, Artificial Sequence
  Synthetic oligonucleotide; TTT chr11 5201662 5201683 5201679 5201684 +
taaagctctaataatgtaaaca

SEQ ID NO: 79678 - DNA, 22 bp, Artificial Sequence
  Synthetic oligonucleotide; TTT chr11 5201663 5201684 5201680 5201685 +
aaagctctaataatgtaaacag

SEQ ID NO: 79679 - DNA, 22 bp, Artificial Sequence
  Synthetic oligonucleotide; TTA chr11 5201664 5201685 5201681 5201686 +
aagctctaataatgtaaacaga

SEQ ID NO: 79680 - DNA, 22 bp, Artificial Sequence
  Synthetic oligonucleotide; CTC chr11 5201670 5201691 5201687 5201692 +
taataatgtaaacagatgttca

SEQ ID NO: 79681 - DNA, 22 bp, Artificial Sequence
  Synthetic oligonucleotide; CTA chr11 5201672 5201693 5201689 5201694 +
ataatgtaaacagatgttcaaa

SEQ ID NO: 79682 - DNA, 22 bp, Artificial Sequence
  Synthetic oligonucleotide; TTC chr11 5201691 5201712 5201708 5201713 +
aaaagtccatactttcatgttt

SEQ ID NO: 79683 - DNA, 22 bp, Artificial Sequence
  Synthetic oligonucleotide; CTT chr11 5201705 5201726 5201722 5201727 +
tcatgtttgattgagtaacttc

SEQ ID NO: 79684 - DNA, 22 bp, Artificial Sequence
  Synthetic oligonucleotide; TTT chr11 5201706 5201727 5201723 5201728 +
catgtttgattgagtaacttcg

SEQ ID NO: 79685 - DNA, 22 bp, Artificial Sequence
  Synthetic oligonucleotide; TTC chr11 5201707 5201728 5201724 5201729 +
atgtttgattgagtaacttcga

SEQ ID NO: 79686 - DNA, 22 bp, Artificial Sequence
  Synthetic oligonucleotide; TTT chr11 5201713 5201734 5201730 5201735 +
gattgagtaacttcgagatgtt

SEQ ID NO: 79687 - DNA, 22 bp, Artificial Sequence
  Synthetic oligonucleotide; TTG chr11 5201714 5201735 5201731 5201736 +
attgagtaacttcgagatgtta

SEQ ID NO: 79688 - DNA, 22 bp, Artificial Sequence
  Synthetic oligonucleotide; TTG chr11 5201718 5201739 5201735 5201740 +
agtaacttcgagatgttaaagt

SEQ ID NO: 79689 - DNA, 22 bp, Artificial Sequence
  Synthetic oligonucleotide; CTT chr11 5201726 5201747 5201743 5201748 +
cgagatgttaaagtaacttcag

SEQ ID NO: 79690 - DNA, 22 bp, Artificial Sequence
  Synthetic oligonucleotide; TTC chr11 5201727 5201748 5201744 5201749 +
gagatgttaaagtaacttcaga

SEQ ID NO: 79691 - DNA, 22 bp, Artificial Sequence
  Synthetic oligonucleotide; TTA chr11 5201736 5201757 5201753 5201758 +
aagtaacttcagatttgggctg

SEQ ID NO: 79692 - DNA, 22 bp, Artificial Sequence
  Synthetic oligonucleotide; CTT chr11 5201745 5201766 5201762 5201767 +
cagatttgggctgccctttatg

SEQ ID NO: 79693 - DNA, 22 bp, Artificial Sequence
  Synthetic oligonucleotide; TTC chr11 5201746 5201767 5201763 5201768 +
agatttgggctgccctttatgt

SEQ ID NO: 79694 - DNA, 22 bp, Artificial Sequence
  Synthetic oligonucleotide; TTT chr11 5201752 5201773 5201769 5201774 +
gggctgccctttatgtcctact

SEQ ID NO: 79695 - DNA, 22 bp, Artificial Sequence
  Synthetic oligonucleotide; TTG chr11 5201753 5201774 5201770 5201775 +
ggctgccctttatgtcctactt

SEQ ID NO: 79696 - DNA, 22 bp, Artificial Sequence
  Synthetic oligonucleotide; CTG chr11 5201758 5201779 5201775 5201780 +
ccctttatgtcctacttttcag

SEQ ID NO: 79697 - DNA, 22 bp, Artificial Sequence
  Synthetic oligonucleotide; CTT chr11 5201763 5201784 5201780 5201785 +
tatgtcctacttttcagctttg

SEQ ID NO: 79698 - DNA, 22 bp, Artificial Sequence
  Synthetic oligonucleotide; TTT chr11 5201764 5201785 5201781 5201786 +
atgtcctacttttcagctttgt

SEQ ID NO: 79699 - DNA, 22 bp, Artificial Sequence
  Synthetic oligonucleotide; TTA chr11 5201765 5201786 5201782 5201787 +
tgtcctacttttcagctttgtc

SEQ ID NO: 79700 - DNA, 22 bp, Artificial Sequence
  Synthetic oligonucleotide; CTA chr11 5201772 5201793 5201789 5201794 +
cttttcagctttgtcttattag

SEQ ID NO: 79701 - DNA, 22 bp, Artificial Sequence
  Synthetic oligonucleotide; CTT chr11 5201775 5201796 5201792 5201797 +
ttcagctttgtcttattagcct

SEQ ID NO: 79702 - DNA, 22 bp, Artificial Sequence
  Synthetic oligonucleotide; TTT chr11 5201776 5201797 5201793 5201798 +
tcagctttgtcttattagcctc

SEQ ID NO: 79703 - DNA, 22 bp, Artificial Sequence
  Synthetic oligonucleotide; TTT chr11 5201777 5201798 5201794 5201799 +
cagctttgtcttattagcctca

SEQ ID NO: 79704 - DNA, 22 bp, Artificial Sequence
  Synthetic oligonucleotide; TTC chr11 5201778 5201799 5201795 5201800 +
agctttgtcttattagcctcac

SEQ ID NO: 79705 - DNA, 22 bp, Artificial Sequence
  Synthetic oligonucleotide; CTT chr11 5201783 5201804 5201800 5201805 +
tgtcttattagcctcacaacac

SEQ ID NO: 79706 - DNA, 22 bp, Artificial Sequence
  Synthetic oligonucleotide; TTT chr11 5201784 5201805 5201801 5201806 +
gtcttattagcctcacaacaca

SEQ ID NO: 79707 - DNA, 22 bp, Artificial Sequence
  Synthetic oligonucleotide; TTG chr11 5201785 5201806 5201802 5201807 +
tcttattagcctcacaacacag

SEQ ID NO: 79708 - DNA, 22 bp, Artificial Sequence
  Synthetic oligonucleotide; CTT chr11 5201789 5201810 5201806 5201811 +
attagcctcacaacacagttcc

SEQ ID NO: 79709 - DNA, 22 bp, Artificial Sequence
  Synthetic oligonucleotide; TTA chr11 5201790 5201811 5201807 5201812 +
ttagcctcacaacacagttcca

SEQ ID NO: 79710 - DNA, 22 bp, Artificial Sequence
  Synthetic oligonucleotide; TTA chr11 5201793 5201814 5201810 5201815 +
gcctcacaacacagttccacag

SEQ ID NO: 79711 - DNA, 22 bp, Artificial Sequence
  Synthetic oligonucleotide; CTC chr11 5201798 5201819 5201815 5201820 +
acaacacagttccacagacttt

SEQ ID NO: 79712 - DNA, 22 bp, Artificial Sequence
  Synthetic oligonucleotide; TTC chr11 5201810 5201831 5201827 5201832 +
cacagactttcttctcaatgta

SEQ ID NO: 79713 - DNA, 22 bp, Artificial Sequence
  Synthetic oligonucleotide; CTT chr11 5201819 5201840 5201836 5201841 +
tcttctcaatgtactctctata

SEQ ID NO: 79714 - DNA, 22 bp, Artificial Sequence
  Synthetic oligonucleotide; TTT chr11 5201820 5201841 5201837 5201842 +
cttctcaatgtactctctatac

SEQ ID NO: 79715 - DNA, 22 bp, Artificial Sequence
  Synthetic oligonucleotide; TTC chr11 5201821 5201842 5201838 5201843 +
ttctcaatgtactctctatact

SEQ ID NO: 79716 - DNA, 22 bp, Artificial Sequence
  Synthetic oligonucleotide; CTT chr11 5201823 5201844 5201840 5201845 +
ctcaatgtactctctatactac

SEQ ID NO: 79717 - DNA, 22 bp, Artificial Sequence
  Synthetic oligonucleotide; TTC chr11 5201824 5201845 5201841 5201846 +
tcaatgtactctctatactaca

SEQ ID NO: 79718 - DNA, 22 bp, Artificial Sequence
  Synthetic oligonucleotide; CTC chr11 5201826 5201847 5201843 5201848 +
aatgtactctctatactacact

SEQ ID NO: 79719 - DNA, 22 bp, Artificial Sequence
  Synthetic oligonucleotide; CTC chr11 5201835 5201856 5201852 5201857 +
tctatactacactgacgtcttc

SEQ ID NO: 79720 - DNA, 22 bp, Artificial Sequence
  Synthetic oligonucleotide; CTC chr11 5201837 5201858 5201854 5201859 +
tatactacactgacgtcttcta

SEQ ID NO: 79721 - DNA, 22 bp, Artificial Sequence
  Synthetic oligonucleotide; CTA chr11 5201839 5201860 5201856 5201861 +
tactacactgacgtcttctagc

SEQ ID NO: 79722 - DNA, 22 bp, Artificial Sequence
  Synthetic oligonucleotide; CTA chr11 5201844 5201865 5201861 5201866 +
cactgacgtcttctagcagtct

SEQ ID NO: 79723 - DNA, 22 bp, Artificial Sequence
  Synthetic oligonucleotide; CTG chr11 5201849 5201870 5201866 5201871 +
acgtcttctagcagtctaacca

SEQ ID NO: 79724 - DNA, 22 bp, Artificial Sequence
  Synthetic oligonucleotide; CTT chr11 5201856 5201877 5201873 5201878 +
ctagcagtctaaccattgtttt

SEQ ID NO: 79725 - DNA, 22 bp, Artificial Sequence
  Synthetic oligonucleotide; TTC chr11 5201857 5201878 5201874 5201879 +
tagcagtctaaccattgttttt

SEQ ID NO: 79726 - DNA, 22 bp, Artificial Sequence
  Synthetic oligonucleotide; CTA chr11 5201859 5201880 5201876 5201881 +
gcagtctaaccattgtttttct

SEQ ID NO: 79727 - DNA, 22 bp, Artificial Sequence
  Synthetic oligonucleotide; CTA chr11 5201867 5201888 5201884 5201889 +
accattgtttttcttgccctga

SEQ ID NO: 79728 - DNA, 22 bp, Artificial Sequence
  Synthetic oligonucleotide; TTG chr11 5201874 5201895 5201891 5201896 +
tttttcttgccctgactccttc

SEQ ID NO: 79729 - DNA, 22 bp, Artificial Sequence
  Synthetic oligonucleotide; TTT chr11 5201877 5201898 5201894 5201899 +
ttcttgccctgactccttctca

SEQ ID NO: 79730 - DNA, 22 bp, Artificial Sequence
  Synthetic oligonucleotide; TTT chr11 5201878 5201899 5201895 5201900 +
tcttgccctgactccttctcag

SEQ ID NO: 79731 - DNA, 22 bp, Artificial Sequence
  Synthetic oligonucleotide; TTT chr11 5201879 5201900 5201896 5201901 +
cttgccctgactccttctcagc

SEQ ID NO: 79732 - DNA, 22 bp, Artificial Sequence
  Synthetic oligonucleotide; TTC chr11 5201880 5201901 5201897 5201902 +
ttgccctgactccttctcagca

SEQ ID NO: 79733 - DNA, 22 bp, Artificial Sequence
  Synthetic oligonucleotide; CTT chr11 5201882 5201903 5201899 5201904 +
gccctgactccttctcagcatt

SEQ ID NO: 79734 - DNA, 22 bp, Artificial Sequence
  Synthetic oligonucleotide; TTG chr11 5201883 5201904 5201900 5201905 +
ccctgactccttctcagcattg

SEQ ID NO: 79735 - DNA, 22 bp, Artificial Sequence
  Synthetic oligonucleotide; CTG chr11 5201888 5201909 5201905 5201910 +
actccttctcagcattgaataa

SEQ ID NO: 79736 - DNA, 22 bp, Artificial Sequence
  Synthetic oligonucleotide; CTC chr11 5201892 5201913 5201909 5201914 +
cttctcagcattgaataactta

SEQ ID NO: 79737 - DNA, 22 bp, Artificial Sequence
  Synthetic oligonucleotide; CTT chr11 5201895 5201916 5201912 5201917 +
ctcagcattgaataacttagct

SEQ ID NO: 79738 - DNA, 22 bp, Artificial Sequence
  Synthetic oligonucleotide; TTC chr11 5201896 5201917 5201913 5201918 +
tcagcattgaataacttagctc

SEQ ID NO: 79739 - DNA, 22 bp, Artificial Sequence
  Synthetic oligonucleotide; CTC chr11 5201898 5201919 5201915 5201920 +
agcattgaataacttagctcac

SEQ ID NO: 79740 - DNA, 22 bp, Artificial Sequence
  Synthetic oligonucleotide; TTG chr11 5201905 5201926 5201922 5201927 +
aataacttagctcactattttt

SEQ ID NO: 79741 - DNA, 22 bp, Artificial Sequence
  Synthetic oligonucleotide; CTT chr11 5201913 5201934 5201930 5201935 +
agctcactatttttaatacttt

SEQ ID NO: 79742 - DNA, 22 bp, Artificial Sequence
  Synthetic oligonucleotide; TTA chr11 5201914 5201935 5201931 5201936 +
gctcactatttttaatactttt

SEQ ID NO: 79743 - DNA, 22 bp, Artificial Sequence
  Synthetic oligonucleotide; CTC chr11 5201918 5201939 5201935 5201940 +
actatttttaatacttttttct

SEQ ID NO: 79744 - DNA, 22 bp, Artificial Sequence
  Synthetic oligonucleotide; CTA chr11 5201922 5201943 5201939 5201944 +
tttttaatacttttttctccat

SEQ ID NO: 79745 - DNA, 22 bp, Artificial Sequence
  Synthetic oligonucleotide; TTT chr11 5201925 5201946 5201942 5201947 +
ttaatacttttttctccataga

SEQ ID NO: 79746 - DNA, 22 bp, Artificial Sequence
  Synthetic oligonucleotide; TTT chr11 5201926 5201947 5201943 5201948 +
taatacttttttctccatagaa

SEQ ID NO: 79747 - DNA, 22 bp, Artificial Sequence
  Synthetic oligonucleotide; TTT chr11 5201927 5201948 5201944 5201949 +
aatacttttttctccatagaat

SEQ ID NO: 79748 - DNA, 22 bp, Artificial Sequence
  Synthetic oligonucleotide; TTA chr11 5201928 5201949 5201945 5201950 +
atacttttttctccatagaatg

SEQ ID NO: 79749 - DNA, 22 bp, Artificial Sequence
  Synthetic oligonucleotide; CTT chr11 5201934 5201955 5201951 5201956 +
ttttctccatagaatgcttgaa

SEQ ID NO: 79750 - DNA, 22 bp, Artificial Sequence
  Synthetic oligonucleotide; TTT chr11 5201935 5201956 5201952 5201957 +
tttctccatagaatgcttgaag

SEQ ID NO: 79751 - DNA, 22 bp, Artificial Sequence
  Synthetic oligonucleotide; TTT chr11 5201936 5201957 5201953 5201958 +
ttctccatagaatgcttgaagt

SEQ ID NO: 79752 - DNA, 22 bp, Artificial Sequence
  Synthetic oligonucleotide; TTT chr11 5201937 5201958 5201954 5201959 +
tctccatagaatgcttgaagtt

SEQ ID NO: 79753 - DNA, 22 bp, Artificial Sequence
  Synthetic oligonucleotide; TTT chr11 5201938 5201959 5201955 5201960 +
ctccatagaatgcttgaagttt

SEQ ID NO: 79754 - DNA, 22 bp, Artificial Sequence
  Synthetic oligonucleotide; TTC chr11 5201939 5201960 5201956 5201961 +
tccatagaatgcttgaagtttc

SEQ ID NO: 79755 - DNA, 22 bp, Artificial Sequence
  Synthetic oligonucleotide; CTC chr11 5201941 5201962 5201958 5201963 +
catagaatgcttgaagtttctt

SEQ ID NO: 79756 - DNA, 22 bp, Artificial Sequence
  Synthetic oligonucleotide; CTT chr11 5201953 5201974 5201970 5201975 +
gaagtttcttcgtttcttgcag

SEQ ID NO: 79757 - DNA, 22 bp, Artificial Sequence
  Synthetic oligonucleotide; TTG chr11 5201954 5201975 5201971 5201976 +
aagtttcttcgtttcttgcaga

SEQ ID NO: 79758 - DNA, 22 bp, Artificial Sequence
  Synthetic oligonucleotide; TTT chr11 5201960 5201981 5201977 5201982 +
cttcgtttcttgcagaggattt

SEQ ID NO: 79759 - DNA, 22 bp, Artificial Sequence
  Synthetic oligonucleotide; TTC chr11 5201961 5201982 5201978 5201983 +
ttcgtttcttgcagaggatttt

SEQ ID NO: 79760 - DNA, 22 bp, Artificial Sequence
  Synthetic oligonucleotide; CTT chr11 5201963 5201984 5201980 5201985 +
cgtttcttgcagaggatttttc

SEQ ID NO: 79761 - DNA, 22 bp, Artificial Sequence
  Synthetic oligonucleotide; TTC chr11 5201964 5201985 5201981 5201986 +
gtttcttgcagaggatttttca

SEQ ID NO: 79762 - DNA, 22 bp, Artificial Sequence
  Synthetic oligonucleotide; TTT chr11 5201968 5201989 5201985 5201990 +
cttgcagaggatttttcagtct

SEQ ID NO: 79763 - DNA, 22 bp, Artificial Sequence
  Synthetic oligonucleotide; TTC chr11 5201969 5201990 5201986 5201991 +
ttgcagaggatttttcagtctt

SEQ ID NO: 79764 - DNA, 22 bp, Artificial Sequence
  Synthetic oligonucleotide; CTT chr11 5201971 5201992 5201988 5201993 +
gcagaggatttttcagtctttt

SEQ ID NO: 79765 - DNA, 22 bp, Artificial Sequence
  Synthetic oligonucleotide; TTG chr11 5201972 5201993 5201989 5201994 +
cagaggatttttcagtcttttg

SEQ ID NO: 79766 - DNA, 22 bp, Artificial Sequence
  Synthetic oligonucleotide; TTT chr11 5201982 5202003 5201999 5202004 +
ttcagtcttttgaatacgtatc

SEQ ID NO: 79767 - DNA, 22 bp, Artificial Sequence
  Synthetic oligonucleotide; TTT chr11 5201983 5202004 5202000 5202005 +
tcagtcttttgaatacgtatct

SEQ ID NO: 79768 - DNA, 22 bp, Artificial Sequence
  Synthetic oligonucleotide; TTT chr11 5201984 5202005 5202001 5202006 +
cagtcttttgaatacgtatctt

SEQ ID NO: 79769 - DNA, 22 bp, Artificial Sequence
  Synthetic oligonucleotide; TTC chr11 5201985 5202006 5202002 5202007 +
agtcttttgaatacgtatcttc

SEQ ID NO: 79770 - DNA, 22 bp, Artificial Sequence
  Synthetic oligonucleotide; CTT chr11 5201991 5202012 5202008 5202013 +
ttgaatacgtatcttctttcat

SEQ ID NO: 79771 - DNA, 22 bp, Artificial Sequence
  Synthetic oligonucleotide; TTT chr11 5201992 5202013 5202009 5202014 +
tgaatacgtatcttctttcatt

SEQ ID NO: 79772 - DNA, 22 bp, Artificial Sequence
  Synthetic oligonucleotide; TTT chr11 5201993 5202014 5202010 5202015 +
gaatacgtatcttctttcattt

SEQ ID NO: 79773 - DNA, 22 bp, Artificial Sequence
  Synthetic oligonucleotide; TTG chr11 5201994 5202015 5202011 5202016 +
aatacgtatcttctttcatttc

SEQ ID NO: 79774 - DNA, 22 bp, Artificial Sequence
  Synthetic oligonucleotide; CTT chr11 5202006 5202027 5202023 5202028 +
ctttcatttctctaaatcgaat

SEQ ID NO: 79775 - DNA, 22 bp, Artificial Sequence
  Synthetic oligonucleotide; TTC chr11 5202007 5202028 5202024 5202029 +
tttcatttctctaaatcgaatt

SEQ ID NO: 79776 - DNA, 22 bp, Artificial Sequence
  Synthetic oligonucleotide; CTT chr11 5202009 5202030 5202026 5202031 +
tcatttctctaaatcgaatttc

SEQ ID NO: 79777 - DNA, 22 bp, Artificial Sequence
  Synthetic oligonucleotide; TTT chr11 5202010 5202031 5202027 5202032 +
catttctctaaatcgaatttct

SEQ ID NO: 79778 - DNA, 22 bp, Artificial Sequence
  Synthetic oligonucleotide; TTC chr11 5202011 5202032 5202028 5202033 +
atttctctaaatcgaatttctc

SEQ ID NO: 79779 - DNA, 22 bp, Artificial Sequence
  Synthetic oligonucleotide; TTT chr11 5202015 5202036 5202032 5202037 +
ctctaaatcgaatttctcttct

SEQ ID NO: 79780 - DNA, 22 bp, Artificial Sequence
  Synthetic oligonucleotide; TTC chr11 5202016 5202037 5202033 5202038 +
tctaaatcgaatttctcttctt

SEQ ID NO: 79781 - DNA, 22 bp, Artificial Sequence
  Synthetic oligonucleotide; CTC chr11 5202018 5202039 5202035 5202040 +
taaatcgaatttctcttctttc

SEQ ID NO: 79782 - DNA, 22 bp, Artificial Sequence
  Synthetic oligonucleotide; CTA chr11 5202020 5202041 5202037 5202042 +
aatcgaatttctcttctttcgt

SEQ ID NO: 79783 - DNA, 22 bp, Artificial Sequence
  Synthetic oligonucleotide; TTT chr11 5202030 5202051 5202047 5202052 +
ctcttctttcgtaaaatttttc

SEQ ID NO: 79784 - DNA, 22 bp, Artificial Sequence
  Synthetic oligonucleotide; TTC chr11 5202031 5202052 5202048 5202053 +
tcttctttcgtaaaatttttct

SEQ ID NO: 79785 - DNA, 22 bp, Artificial Sequence
  Synthetic oligonucleotide; CTC chr11 5202033 5202054 5202050 5202055 +
ttctttcgtaaaatttttctcg

SEQ ID NO: 79786 - DNA, 22 bp, Artificial Sequence
  Synthetic oligonucleotide; CTT chr11 5202035 5202056 5202052 5202057 +
ctttcgtaaaatttttctcgaa

SEQ ID NO: 79787 - DNA, 22 bp, Artificial Sequence
  Synthetic oligonucleotide; TTC chr11 5202036 5202057 5202053 5202058 +
tttcgtaaaatttttctcgaaa

SEQ ID NO: 79788 - DNA, 22 bp, Artificial Sequence
  Synthetic oligonucleotide; CTT chr11 5202038 5202059 5202055 5202060 +
tcgtaaaatttttctcgaaatg

SEQ ID NO: 79789 - DNA, 22 bp, Artificial Sequence
  Synthetic oligonucleotide; TTT chr11 5202039 5202060 5202056 5202061 +
cgtaaaatttttctcgaaatgt

SEQ ID NO: 79790 - DNA, 22 bp, Artificial Sequence
  Synthetic oligonucleotide; TTC chr11 5202040 5202061 5202057 5202062 +
gtaaaatttttctcgaaatgtt

SEQ ID NO: 79791 - DNA, 22 bp, Artificial Sequence
  Synthetic oligonucleotide; TTT chr11 5202049 5202070 5202066 5202071 +
ttctcgaaatgttctatctgcc

SEQ ID NO: 79792 - DNA, 22 bp, Artificial Sequence
  Synthetic oligonucleotide; TTT chr11 5202050 5202071 5202067 5202072 +
tctcgaaatgttctatctgcct

SEQ ID NO: 79793 - DNA, 22 bp, Artificial Sequence
  Synthetic oligonucleotide; TTT chr11 5202051 5202072 5202068 5202073 +
ctcgaaatgttctatctgccta

SEQ ID NO: 79794 - DNA, 22 bp, Artificial Sequence
  Synthetic oligonucleotide; TTC chr11 5202052 5202073 5202069 5202074 +
tcgaaatgttctatctgcctaa

SEQ ID NO: 79795 - DNA, 22 bp, Artificial Sequence
  Synthetic oligonucleotide; CTC chr11 5202054 5202075 5202071 5202076 +
gaaatgttctatctgcctaaat

SEQ ID NO: 79796 - DNA, 22 bp, Artificial Sequence
  Synthetic oligonucleotide; TTC chr11 5202063 5202084 5202080 5202085 +
tatctgcctaaattattcatca

SEQ ID NO: 79797 - DNA, 22 bp, Artificial Sequence
  Synthetic oligonucleotide; CTA chr11 5202065 5202086 5202082 5202087 +
tctgcctaaattattcatcatc

SEQ ID NO: 79798 - DNA, 22 bp, Artificial Sequence
  Synthetic oligonucleotide; CTG chr11 5202069 5202090 5202086 5202091 +
cctaaattattcatcatctttt

SEQ ID NO: 79799 - DNA, 22 bp, Artificial Sequence
  Synthetic oligonucleotide; CTA chr11 5202073 5202094 5202090 5202095 +
aattattcatcatcttttcctc

SEQ ID NO: 79800 - DNA, 22 bp, Artificial Sequence
  Synthetic oligonucleotide; TTA chr11 5202078 5202099 5202095 5202100 +
ttcatcatcttttcctcaattt

SEQ ID NO: 79801 - DNA, 22 bp, Artificial Sequence
  Synthetic oligonucleotide; TTC chr11 5202081 5202102 5202098 5202103 +
atcatcttttcctcaatttctt

SEQ ID NO: 79802 - DNA, 22 bp, Artificial Sequence
  Synthetic oligonucleotide; CTT chr11 5202089 5202110 5202106 5202111 +
ttcctcaatttcttcctaccct

SEQ ID NO: 79803 - DNA, 22 bp, Artificial Sequence
  Synthetic oligonucleotide; TTT chr11 5202090 5202111 5202107 5202112 +
tcctcaatttcttcctaccctt

SEQ ID NO: 79804 - DNA, 22 bp, Artificial Sequence
  Synthetic oligonucleotide; TTT chr11 5202091 5202112 5202108 5202113 +
cctcaatttcttcctacccttt

SEQ ID NO: 79805 - DNA, 22 bp, Artificial Sequence
  Synthetic oligonucleotide; TTC chr11 5202092 5202113 5202109 5202114 +
ctcaatttcttcctaccctttt

SEQ ID NO: 79806 - DNA, 22 bp, Artificial Sequence
  Synthetic oligonucleotide; CTC chr11 5202095 5202116 5202112 5202117 +
aatttcttcctaccctttttaa

SEQ ID NO: 79807 - DNA, 22 bp, Artificial Sequence
  Synthetic oligonucleotide; TTT chr11 5202100 5202121 5202117 5202122 +
cttcctaccctttttaaaacga

SEQ ID NO: 79808 - DNA, 22 bp, Artificial Sequence
  Synthetic oligonucleotide; TTC chr11 5202101 5202122 5202118 5202123 +
ttcctaccctttttaaaacgat

SEQ ID NO: 79809 - DNA, 22 bp, Artificial Sequence
  Synthetic oligonucleotide; CTT chr11 5202103 5202124 5202120 5202125 +
cctaccctttttaaaacgatct

SEQ ID NO: 79810 - DNA, 22 bp, Artificial Sequence
  Synthetic oligonucleotide; TTC chr11 5202104 5202125 5202121 5202126 +
ctaccctttttaaaacgatctt

SEQ ID NO: 79811 - DNA, 22 bp, Artificial Sequence
  Synthetic oligonucleotide; CTA chr11 5202107 5202128 5202124 5202129 +
ccctttttaaaacgatcttgca

SEQ ID NO: 79812 - DNA, 22 bp, Artificial Sequence
  Synthetic oligonucleotide; CTT chr11 5202112 5202133 5202129 5202134 +
tttaaaacgatcttgcaactca

SEQ ID NO: 79813 - DNA, 22 bp, Artificial Sequence
  Synthetic oligonucleotide; TTT chr11 5202113 5202134 5202130 5202135 +
ttaaaacgatcttgcaactcaa

SEQ ID NO: 79814 - DNA, 22 bp, Artificial Sequence
  Synthetic oligonucleotide; TTT chr11 5202114 5202135 5202131 5202136 +
taaaacgatcttgcaactcaac

SEQ ID NO: 79815 - DNA, 22 bp, Artificial Sequence
  Synthetic oligonucleotide; TTT chr11 5202115 5202136 5202132 5202137 +
aaaacgatcttgcaactcaaca

SEQ ID NO: 79816 - DNA, 22 bp, Artificial Sequence
  Synthetic oligonucleotide; TTA chr11 5202116 5202137 5202133 5202138 +
aaacgatcttgcaactcaacaa

SEQ ID NO: 79817 - DNA, 22 bp, Artificial Sequence
  Synthetic oligonucleotide; CTT chr11 5202126 5202147 5202143 5202148 +
gcaactcaacaatcacttttca

SEQ ID NO: 79818 - DNA, 22 bp, Artificial Sequence
  Synthetic oligonucleotide; TTG chr11 5202127 5202148 5202144 5202149 +
caactcaacaatcacttttcaa

SEQ ID NO: 79819 - DNA, 22 bp, Artificial Sequence
  Synthetic oligonucleotide; CTC chr11 5202133 5202154 5202150 5202155 +
aacaatcacttttcaagaagtt

SEQ ID NO: 79820 - DNA, 22 bp, Artificial Sequence
  Synthetic oligonucleotide; CTT chr11 5202144 5202165 5202161 5202166 +
ttcaagaagtttcttaagacaa

SEQ ID NO: 79821 - DNA, 22 bp, Artificial Sequence
  Synthetic oligonucleotide; TTT chr11 5202145 5202166 5202162 5202167 +
tcaagaagtttcttaagacaaa

SEQ ID NO: 79822 - DNA, 22 bp, Artificial Sequence
  Synthetic oligonucleotide; TTT chr11 5202146 5202167 5202163 5202168 +
caagaagtttcttaagacaaat

SEQ ID NO: 79823 - DNA, 22 bp, Artificial Sequence
  Synthetic oligonucleotide; TTC chr11 5202147 5202168 5202164 5202169 +
aagaagtttcttaagacaaatt

SEQ ID NO: 79824 - DNA, 22 bp, Artificial Sequence
  Synthetic oligonucleotide; TTT chr11 5202156 5202177 5202173 5202178 +
cttaagacaaatttatccatat

SEQ ID NO: 79825 - DNA, 22 bp, Artificial Sequence
  Synthetic oligonucleotide; TTC chr11 5202157 5202178 5202174 5202179 +
ttaagacaaatttatccatata

SEQ ID NO: 79826 - DNA, 22 bp, Artificial Sequence
  Synthetic oligonucleotide; CTT chr11 5202159 5202180 5202176 5202181 +
aagacaaatttatccatatatc

SEQ ID NO: 79827 - DNA, 22 bp, Artificial Sequence
  Synthetic oligonucleotide; TTA chr11 5202160 5202181 5202177 5202182 +
agacaaatttatccatatatct

SEQ ID NO: 79828 - DNA, 22 bp, Artificial Sequence
  Synthetic oligonucleotide; TTT chr11 5202170 5202191 5202187 5202192 +
atccatatatctattattttgg

SEQ ID NO: 79829 - DNA, 22 bp, Artificial Sequence
  Synthetic oligonucleotide; TTA chr11 5202171 5202192 5202188 5202193 +
tccatatatctattattttggt

SEQ ID NO: 79830 - DNA, 22 bp, Artificial Sequence
  Synthetic oligonucleotide; CTA chr11 5202183 5202204 5202200 5202205 +
ttattttggtatcatgtttcaa

SEQ ID NO: 79831 - DNA, 22 bp, Artificial Sequence
  Synthetic oligonucleotide; TTA chr11 5202186 5202207 5202203 5202208 +
ttttggtatcatgtttcaattt

SEQ ID NO: 79832 - DNA, 22 bp, Artificial Sequence
  Synthetic oligonucleotide; TTT chr11 5202189 5202210 5202206 5202211 +
tggtatcatgtttcaattttaa

SEQ ID NO: 79833 - DNA, 22 bp, Artificial Sequence
  Synthetic oligonucleotide; TTT chr11 5202190 5202211 5202207 5202212 +
ggtatcatgtttcaattttaaa

SEQ ID NO: 79834 - DNA, 22 bp, Artificial Sequence
  Synthetic oligonucleotide; TTG chr11 5202191 5202212 5202208 5202213 +
gtatcatgtttcaattttaaat

SEQ ID NO: 79835 - DNA, 22 bp, Artificial Sequence
  Synthetic oligonucleotide; TTT chr11 5202202 5202223 5202219 5202224 +
caattttaaataaaacttataa

SEQ ID NO: 79836 - DNA, 22 bp, Artificial Sequence
  Synthetic oligonucleotide; TTC chr11 5202203 5202224 5202220 5202225 +
aattttaaataaaacttataat

SEQ ID NO: 79837 - DNA, 22 bp, Artificial Sequence
  Synthetic oligonucleotide; TTT chr11 5202208 5202229 5202225 5202230 +
taaataaaacttataattttgt

SEQ ID NO: 79838 - DNA, 22 bp, Artificial Sequence
  Synthetic oligonucleotide; TTT chr11 5202209 5202230 5202226 5202231 +
aaataaaacttataattttgta

SEQ ID NO: 79839 - DNA, 22 bp, Artificial Sequence
  Synthetic oligonucleotide; TTA chr11 5202210 5202231 5202227 5202232 +
aataaaacttataattttgtat

SEQ ID NO: 79840 - DNA, 22 bp, Artificial Sequence
  Synthetic oligonucleotide; CTT chr11 5202220 5202241 5202237 5202242 +
ataattttgtatttattagcta

SEQ ID NO: 79841 - DNA, 22 bp, Artificial Sequence
  Synthetic oligonucleotide; TTA chr11 5202221 5202242 5202238 5202243 +
taattttgtatttattagctaa

SEQ ID NO: 79842 - DNA, 22 bp, Artificial Sequence
  Synthetic oligonucleotide; TTT chr11 5202227 5202248 5202244 5202249 +
tgtatttattagctaaatattt

SEQ ID NO: 79843 - DNA, 22 bp, Artificial Sequence
  Synthetic oligonucleotide; TTT chr11 5202228 5202249 5202245 5202250 +
gtatttattagctaaatattta

SEQ ID NO: 79844 - DNA, 22 bp, Artificial Sequence
  Synthetic oligonucleotide; TTG chr11 5202229 5202250 5202246 5202251 +
tatttattagctaaatatttaa

SEQ ID NO: 79845 - DNA, 22 bp, Artificial Sequence
  Synthetic oligonucleotide; TTT chr11 5202234 5202255 5202251 5202256 +
attagctaaatatttaactaat

SEQ ID NO: 79846 - DNA, 22 bp, Artificial Sequence
  Synthetic oligonucleotide; TTA chr11 5202235 5202256 5202252 5202257 +
ttagctaaatatttaactaata

SEQ ID NO: 79847 - DNA, 22 bp, Artificial Sequence
  Synthetic oligonucleotide; TTA chr11 5202238 5202259 5202255 5202260 +
gctaaatatttaactaatattt

SEQ ID NO: 79848 - DNA, 22 bp, Artificial Sequence
  Synthetic oligonucleotide; CTA chr11 5202242 5202263 5202259 5202264 +
aatatttaactaatatttaaac

SEQ ID NO: 79849 - DNA, 22 bp, Artificial Sequence
  Synthetic oligonucleotide; TTT chr11 5202249 5202270 5202266 5202271 +
aactaatatttaaactaaatat

SEQ ID NO: 79850 - DNA, 22 bp, Artificial Sequence
  Synthetic oligonucleotide; TTA chr11 5202250 5202271 5202267 5202272 +
actaatatttaaactaaatatt

SEQ ID NO: 79851 - DNA, 22 bp, Artificial Sequence
  Synthetic oligonucleotide; CTA chr11 5202254 5202275 5202271 5202276 +
atatttaaactaaatatttaac

SEQ ID NO: 79852 - DNA, 22 bp, Artificial Sequence
  Synthetic oligonucleotide; TTT chr11 5202260 5202281 5202277 5202282 +
aaactaaatatttaactaatat

SEQ ID NO: 79853 - DNA, 22 bp, Artificial Sequence
  Synthetic oligonucleotide; TTA chr11 5202261 5202282 5202278 5202283 +
aactaaatatttaactaatatc

SEQ ID NO: 79854 - DNA, 22 bp, Artificial Sequence
  Synthetic oligonucleotide; CTA chr11 5202266 5202287 5202283 5202288 +
aatatttaactaatatctctgt

SEQ ID NO: 79855 - DNA, 22 bp, Artificial Sequence
  Synthetic oligonucleotide; TTT chr11 5202273 5202294 5202290 5202295 +
aactaatatctctgttacaaac

SEQ ID NO: 79856 - DNA, 22 bp, Artificial Sequence
  Synthetic oligonucleotide; TTA chr11 5202274 5202295 5202291 5202296 +
actaatatctctgttacaaact

SEQ ID NO: 79857 - DNA, 22 bp, Artificial Sequence
  Synthetic oligonucleotide; CTA chr11 5202278 5202299 5202295 5202300 +
atatctctgttacaaactaaat

SEQ ID NO: 79858 - DNA, 22 bp, Artificial Sequence
  Synthetic oligonucleotide; CTC chr11 5202285 5202306 5202302 5202307 +
tgttacaaactaaattctcagt

SEQ ID NO: 79859 - DNA, 22 bp, Artificial Sequence
  Synthetic oligonucleotide; CTG chr11 5202287 5202308 5202304 5202309 +
ttacaaactaaattctcagttc

SEQ ID NO: 79860 - DNA, 22 bp, Artificial Sequence
  Synthetic oligonucleotide; TTA chr11 5202290 5202311 5202307 5202312 +
caaactaaattctcagttcctt

SEQ ID NO: 79861 - DNA, 22 bp, Artificial Sequence
  Synthetic oligonucleotide; CTA chr11 5202297 5202318 5202314 5202319 +
aattctcagttccttaatgtgc

SEQ ID NO: 79862 - DNA, 22 bp, Artificial Sequence
  Synthetic oligonucleotide; TTC chr11 5202302 5202323 5202319 5202324 +
tcagttccttaatgtgcagact

SEQ ID NO: 79863 - DNA, 22 bp, Artificial Sequence
  Synthetic oligonucleotide; CTC chr11 5202304 5202325 5202321 5202326 +
agttccttaatgtgcagactat

SEQ ID NO: 79864 - DNA, 22 bp, Artificial Sequence
  Synthetic oligonucleotide; TTC chr11 5202309 5202330 5202326 5202331 +
cttaatgtgcagactatgtcaa

SEQ ID NO: 79865 - DNA, 22 bp, Artificial Sequence
  Synthetic oligonucleotide; CTT chr11 5202312 5202333 5202329 5202334 +
aatgtgcagactatgtcaactt

SEQ ID NO: 79866 - DNA, 22 bp, Artificial Sequence
  Synthetic oligonucleotide; TTA chr11 5202313 5202334 5202330 5202335 +
atgtgcagactatgtcaacttt

SEQ ID NO: 79867 - DNA, 22 bp, Artificial Sequence
  Synthetic oligonucleotide; CTA chr11 5202325 5202346 5202342 5202347 +
tgtcaactttttcttattattt

SEQ ID NO: 79868 - DNA, 22 bp, Artificial Sequence
  Synthetic oligonucleotide; CTT chr11 5202334 5202355 5202351 5202356 +
tttcttattatttgaaactaac

SEQ ID NO: 79869 - DNA, 22 bp, Artificial Sequence
  Synthetic oligonucleotide; TTT chr11 5202335 5202356 5202352 5202357 +
ttcttattatttgaaactaaca

SEQ ID NO: 79870 - DNA, 22 bp, Artificial Sequence
  Synthetic oligonucleotide; TTT chr11 5202336 5202357 5202353 5202358 +
tcttattatttgaaactaacat

SEQ ID NO: 79871 - DNA, 22 bp, Artificial Sequence
  Synthetic oligonucleotide; TTT chr11 5202337 5202358 5202354 5202359 +
cttattatttgaaactaacatt

SEQ ID NO: 79872 - DNA, 22 bp, Artificial Sequence
  Synthetic oligonucleotide; TTC chr11 5202338 5202359 5202355 5202360 +
ttattatttgaaactaacattt

SEQ ID NO: 79873 - DNA, 22 bp, Artificial Sequence
  Synthetic oligonucleotide; CTT chr11 5202340 5202361 5202357 5202362 +
attatttgaaactaacatttgc

SEQ ID NO: 79874 - DNA, 22 bp, Artificial Sequence
  Synthetic oligonucleotide; TTA chr11 5202341 5202362 5202358 5202363 +
ttatttgaaactaacatttgca

SEQ ID NO: 79875 - DNA, 22 bp, Artificial Sequence
  Synthetic oligonucleotide; TTA chr11 5202344 5202365 5202361 5202366 +
tttgaaactaacatttgcacct

SEQ ID NO: 79876 - DNA, 22 bp, Artificial Sequence
  Synthetic oligonucleotide; TTT chr11 5202347 5202368 5202364 5202369 +
gaaactaacatttgcacctctg

SEQ ID NO: 79877 - DNA, 22 bp, Artificial Sequence
  Synthetic oligonucleotide; TTG chr11 5202348 5202369 5202365 5202370 +
aaactaacatttgcacctctga

SEQ ID NO: 79878 - DNA, 22 bp, Artificial Sequence
  Synthetic oligonucleotide; CTA chr11 5202354 5202375 5202371 5202376 +
acatttgcacctctgattcctg

SEQ ID NO: 79879 - DNA, 22 bp, Artificial Sequence
  Synthetic oligonucleotide; TTT chr11 5202360 5202381 5202377 5202382 +
gcacctctgattcctgaccact

SEQ ID NO: 79880 - DNA, 22 bp, Artificial Sequence
  Synthetic oligonucleotide; TTG chr11 5202361 5202382 5202378 5202383 +
cacctctgattcctgaccactc

SEQ ID NO: 79881 - DNA, 22 bp, Artificial Sequence
  Synthetic oligonucleotide; CTC chr11 5202367 5202388 5202384 5202389 +
tgattcctgaccactcctgaga

SEQ ID NO: 79882 - DNA, 22 bp, Artificial Sequence
  Synthetic oligonucleotide; CTG chr11 5202369 5202390 5202386 5202391 +
attcctgaccactcctgagagc

SEQ ID NO: 79883 - DNA, 22 bp, Artificial Sequence
  Synthetic oligonucleotide; TTC chr11 5202373 5202394 5202390 5202395 +
ctgaccactcctgagagctcaa

SEQ ID NO: 79884 - DNA, 22 bp, Artificial Sequence
  Synthetic oligonucleotide; CTG chr11 5202376 5202397 5202393 5202398 +
accactcctgagagctcaaatt

SEQ ID NO: 79885 - DNA, 22 bp, Artificial Sequence
  Synthetic oligonucleotide; CTC chr11 5202383 5202404 5202400 5202405 +
ctgagagctcaaattcatgaat

SEQ ID NO: 79886 - DNA, 22 bp, Artificial Sequence
  Synthetic oligonucleotide; CTG chr11 5202386 5202407 5202403 5202408 +
agagctcaaattcatgaataca

SEQ ID NO: 79887 - DNA, 22 bp, Artificial Sequence
  Synthetic oligonucleotide; CTC chr11 5202393 5202414 5202410 5202415 +
aaattcatgaatacaactggct

SEQ ID NO: 79888 - DNA, 22 bp, Artificial Sequence
  Synthetic oligonucleotide; TTC chr11 5202399 5202420 5202416 5202421 +
atgaatacaactggctatttaa

SEQ ID NO: 79889 - DNA, 22 bp, Artificial Sequence
  Synthetic oligonucleotide; CTG chr11 5202412 5202433 5202429 5202434 +
gctatttaatatattcatctga

SEQ ID NO: 79890 - DNA, 22 bp, Artificial Sequence
  Synthetic oligonucleotide; CTA chr11 5202416 5202437 5202433 5202438 +
tttaatatattcatctgagtgt

SEQ ID NO: 79891 - DNA, 22 bp, Artificial Sequence
  Synthetic oligonucleotide; TTT chr11 5202419 5202440 5202436 5202441 +
aatatattcatctgagtgttta

SEQ ID NO: 79892 - DNA, 22 bp, Artificial Sequence
  Synthetic oligonucleotide; TTA chr11 5202420 5202441 5202437 5202442 +
atatattcatctgagtgtttaa

SEQ ID NO: 79893 - DNA, 22 bp, Artificial Sequence
  Synthetic oligonucleotide; TTC chr11 5202428 5202449 5202445 5202450 +
atctgagtgtttaatcttaaaa

SEQ ID NO: 79894 - DNA, 22 bp, Artificial Sequence
  Synthetic oligonucleotide; CTG chr11 5202433 5202454 5202450 5202455 +
agtgtttaatcttaaaataaga

SEQ ID NO: 79895 - DNA, 22 bp, Artificial Sequence
  Synthetic oligonucleotide; TTT chr11 5202440 5202461 5202457 5202462 +
aatcttaaaataagaatgatgc

SEQ ID NO: 79896 - DNA, 22 bp, Artificial Sequence
  Synthetic oligonucleotide; TTA chr11 5202441 5202462 5202458 5202463 +
atcttaaaataagaatgatgcc

SEQ ID NO: 79897 - DNA, 22 bp, Artificial Sequence
  Synthetic oligonucleotide; CTT chr11 5202446 5202467 5202463 5202468 +
aaaataagaatgatgccaataa

SEQ ID NO: 79898 - DNA, 22 bp, Artificial Sequence
  Synthetic oligonucleotide; TTA chr11 5202447 5202468 5202464 5202469 +
aaataagaatgatgccaataaa

SEQ ID NO: 79899 - DNA, 22 bp, Artificial Sequence
  Synthetic oligonucleotide; CTT chr11 5202475 5202496 5202492 5202497 +
gattttccccccaaaatctatt

SEQ ID NO: 79900 - DNA, 22 bp, Artificial Sequence
  Synthetic oligonucleotide; TTG chr11 5202476 5202497 5202493 5202498 +
attttccccccaaaatctattt

SEQ ID NO: 79901 - DNA, 22 bp, Artificial Sequence
  Synthetic oligonucleotide; TTT chr11 5202480 5202501 5202497 5202502 +
tccccccaaaatctattttctg

SEQ ID NO: 79902 - DNA, 22 bp, Artificial Sequence
  Synthetic oligonucleotide; TTT chr11 5202481 5202502 5202498 5202503 +
ccccccaaaatctattttctgt

SEQ ID NO: 79903 - DNA, 22 bp, Artificial Sequence
  Synthetic oligonucleotide; TTC chr11 5202482 5202503 5202499 5202504 +
cccccaaaatctattttctgtc

SEQ ID NO: 79904 - DNA, 22 bp, Artificial Sequence
  Synthetic oligonucleotide; CTA chr11 5202495 5202516 5202512 5202517 +
ttttctgtcccttttctcctaa

SEQ ID NO: 79905 - DNA, 22 bp, Artificial Sequence
  Synthetic oligonucleotide; TTT chr11 5202498 5202519 5202515 5202520 +
tctgtcccttttctcctaatat

SEQ ID NO: 79906 - DNA, 22 bp, Artificial Sequence
  Synthetic oligonucleotide; TTT chr11 5202499 5202520 5202516 5202521 +
ctgtcccttttctcctaatatt

SEQ ID NO: 79907 - DNA, 22 bp, Artificial Sequence
  Synthetic oligonucleotide; TTC chr11 5202500 5202521 5202517 5202522 +
tgtcccttttctcctaatatta

SEQ ID NO: 79908 - DNA, 22 bp, Artificial Sequence
  Synthetic oligonucleotide; CTG chr11 5202502 5202523 5202519 5202524 +
tcccttttctcctaatattata

SEQ ID NO: 79909 - DNA, 22 bp, Artificial Sequence
  Synthetic oligonucleotide; CTT chr11 5202508 5202529 5202525 5202530 +
ttctcctaatattataaagtga

SEQ ID NO: 79910 - DNA, 22 bp, Artificial Sequence
  Synthetic oligonucleotide; TTT chr11 5202509 5202530 5202526 5202531 +
tctcctaatattataaagtgac

SEQ ID NO: 79911 - DNA, 22 bp, Artificial Sequence
  Synthetic oligonucleotide; TTT chr11 5202510 5202531 5202527 5202532 +
ctcctaatattataaagtgact

SEQ ID NO: 79912 - DNA, 22 bp, Artificial Sequence
  Synthetic oligonucleotide; TTC chr11 5202511 5202532 5202528 5202533 +
tcctaatattataaagtgactc

SEQ ID NO: 79913 - DNA, 22 bp, Artificial Sequence
  Synthetic oligonucleotide; CTC chr11 5202513 5202534 5202530 5202535 +
ctaatattataaagtgactcca

SEQ ID NO: 79914 - DNA, 22 bp, Artificial Sequence
  Synthetic oligonucleotide; CTA chr11 5202516 5202537 5202533 5202538 +
atattataaagtgactccacca

SEQ ID NO: 79915 - DNA, 22 bp, Artificial Sequence
  Synthetic oligonucleotide; TTA chr11 5202522 5202543 5202539 5202544 +
taaagtgactccaccaataaca

SEQ ID NO: 79916 - DNA, 22 bp, Artificial Sequence
  Synthetic oligonucleotide; CTC chr11 5202533 5202554 5202550 5202555 +
caccaataacacaattgcataa

SEQ ID NO: 79917 - DNA, 22 bp, Artificial Sequence
  Synthetic oligonucleotide; TTG chr11 5202550 5202571 5202567 5202572 +
cataagacaagtcttgagtcat

SEQ ID NO: 79918 - DNA, 22 bp, Artificial Sequence
  Synthetic oligonucleotide; CTT chr11 5202565 5202586 5202582 5202587 +
gagtcatttttaaaatttttta

SEQ ID NO: 79919 - DNA, 22 bp, Artificial Sequence
  Synthetic oligonucleotide; TTG chr11 5202566 5202587 5202583 5202588 +
agtcatttttaaaattttttat

SEQ ID NO: 79920 - DNA, 22 bp, Artificial Sequence
  Synthetic oligonucleotide; TTT chr11 5202574 5202595 5202591 5202596 +
ttaaaattttttatttctctct

SEQ ID NO: 79921 - DNA, 22 bp, Artificial Sequence
  Synthetic oligonucleotide; TTT chr11 5202575 5202596 5202592 5202597 +
taaaattttttatttctctctt

SEQ ID NO: 79922 - DNA, 22 bp, Artificial Sequence
  Synthetic oligonucleotide; TTT chr11 5202576 5202597 5202593 5202598 +
aaaattttttatttctctcttt

SEQ ID NO: 79923 - DNA, 22 bp, Artificial Sequence
  Synthetic oligonucleotide; TTA chr11 5202577 5202598 5202594 5202599 +
aaattttttatttctctctttc

SEQ ID NO: 79924 - DNA, 22 bp, Artificial Sequence
  Synthetic oligonucleotide; TTT chr11 5202583 5202604 5202600 5202605 +
tttatttctctctttccttccc

SEQ ID NO: 79925 - DNA, 22 bp, Artificial Sequence
  Synthetic oligonucleotide; TTT chr11 5202584 5202605 5202601 5202606 +
ttatttctctctttccttccct

SEQ ID NO: 79926 - DNA, 22 bp, Artificial Sequence
  Synthetic oligonucleotide; TTT chr11 5202585 5202606 5202602 5202607 +
tatttctctctttccttccctt

SEQ ID NO: 79927 - DNA, 22 bp, Artificial Sequence
  Synthetic oligonucleotide; TTT chr11 5202586 5202607 5202603 5202608 +
atttctctctttccttcccttt

SEQ ID NO: 79928 - DNA, 22 bp, Artificial Sequence
  Synthetic oligonucleotide; TTA chr11 5202587 5202608 5202604 5202609 +
tttctctctttccttccctttc

SEQ ID NO: 79929 - DNA, 22 bp, Artificial Sequence
  Synthetic oligonucleotide; TTT chr11 5202590 5202611 5202607 5202612 +
ctctctttccttccctttcctc

SEQ ID NO: 79930 - DNA, 22 bp, Artificial Sequence
  Synthetic oligonucleotide; TTC chr11 5202591 5202612 5202608 5202613 +
tctctttccttccctttcctct

SEQ ID NO: 79931 - DNA, 22 bp, Artificial Sequence
  Synthetic oligonucleotide; CTC chr11 5202593 5202614 5202610 5202615 +
tctttccttccctttcctctct

SEQ ID NO: 79932 - DNA, 22 bp, Artificial Sequence
  Synthetic oligonucleotide; CTC chr11 5202595 5202616 5202612 5202617 +
tttccttccctttcctctctcc

SEQ ID NO: 79933 - DNA, 22 bp, Artificial Sequence
  Synthetic oligonucleotide; CTT chr11 5202597 5202618 5202614 5202619 +
tccttccctttcctctctccat

SEQ ID NO: 79934 - DNA, 22 bp, Artificial Sequence
  Synthetic oligonucleotide; TTT chr11 5202598 5202619 5202615 5202620 +
ccttccctttcctctctccatc

SEQ ID NO: 79935 - DNA, 22 bp, Artificial Sequence
  Synthetic oligonucleotide; TTC chr11 5202599 5202620 5202616 5202621 +
cttccctttcctctctccatca

SEQ ID NO: 79936 - DNA, 22 bp, Artificial Sequence
  Synthetic oligonucleotide; CTT chr11 5202602 5202623 5202619 5202624 +
ccctttcctctctccatcaaat

SEQ ID NO: 79937 - DNA, 22 bp, Artificial Sequence
  Synthetic oligonucleotide; TTC chr11 5202603 5202624 5202620 5202625 +
cctttcctctctccatcaaatc

SEQ ID NO: 79938 - DNA, 22 bp, Artificial Sequence
  Synthetic oligonucleotide; CTT chr11 5202607 5202628 5202624 5202629 +
tcctctctccatcaaatctttc

SEQ ID NO: 79939 - DNA, 22 bp, Artificial Sequence
  Synthetic oligonucleotide; TTT chr11 5202608 5202629 5202625 5202630 +
cctctctccatcaaatctttca

SEQ ID NO: 79940 - DNA, 22 bp, Artificial Sequence
  Synthetic oligonucleotide; TTC chr11 5202609 5202630 5202626 5202631 +
ctctctccatcaaatctttcat

SEQ ID NO: 79941 - DNA, 22 bp, Artificial Sequence
  Synthetic oligonucleotide; CTC chr11 5202612 5202633 5202629 5202634 +
tctccatcaaatctttcatcaa

SEQ ID NO: 79942 - DNA, 22 bp, Artificial Sequence
  Synthetic oligonucleotide; CTC chr11 5202614 5202635 5202631 5202636 +
tccatcaaatctttcatcaatt

SEQ ID NO: 79943 - DNA, 22 bp, Artificial Sequence
  Synthetic oligonucleotide; CTC chr11 5202616 5202637 5202633 5202638 +
catcaaatctttcatcaatttc

SEQ ID NO: 79944 - DNA, 22 bp, Artificial Sequence
  Synthetic oligonucleotide; CTT chr11 5202627 5202648 5202644 5202649 +
tcatcaatttctaccatttcta

SEQ ID NO: 79945 - DNA, 22 bp, Artificial Sequence
  Synthetic oligonucleotide; TTT chr11 5202628 5202649 5202645 5202650 +
catcaatttctaccatttctac

SEQ ID NO: 79946 - DNA, 22 bp, Artificial Sequence
  Synthetic oligonucleotide; TTC chr11 5202629 5202650 5202646 5202651 +
atcaatttctaccatttctacc

SEQ ID NO: 79947 - DNA, 22 bp, Artificial Sequence
  Synthetic oligonucleotide; TTT chr11 5202637 5202658 5202654 5202659 +
ctaccatttctaccagaaacac

SEQ ID NO: 79948 - DNA, 22 bp, Artificial Sequence
  Synthetic oligonucleotide; TTC chr11 5202638 5202659 5202655 5202660 +
taccatttctaccagaaacaca

SEQ ID NO: 79949 - DNA, 22 bp, Artificial Sequence
  Synthetic oligonucleotide; CTA chr11 5202640 5202661 5202657 5202662 +
ccatttctaccagaaacacatc

SEQ ID NO: 79950 - DNA, 22 bp, Artificial Sequence
  Synthetic oligonucleotide; TTT chr11 5202646 5202667 5202663 5202668 +
ctaccagaaacacatcccagat

SEQ ID NO: 79951 - DNA, 22 bp, Artificial Sequence
  Synthetic oligonucleotide; TTC chr11 5202647 5202668 5202664 5202669 +
taccagaaacacatcccagata

SEQ ID NO: 79952 - DNA, 22 bp, Artificial Sequence
  Synthetic oligonucleotide; CTA chr11 5202649 5202670 5202666 5202671 +
ccagaaacacatcccagatagg

SEQ ID NO: 79953 - DNA, 22 bp, Artificial Sequence
  Synthetic oligonucleotide; CTT chr11 5202678 5202699 5202695 5202700 +
ttacacattgcccgtcttggtt

SEQ ID NO: 79954 - DNA, 22 bp, Artificial Sequence
  Synthetic oligonucleotide; TTT chr11 5202679 5202700 5202696 5202701 +
tacacattgcccgtcttggttt

SEQ ID NO: 79955 - DNA, 22 bp, Artificial Sequence
  Synthetic oligonucleotide; TTT chr11 5202680 5202701 5202697 5202702 +
acacattgcccgtcttggttta

SEQ ID NO: 79956 - DNA, 22 bp, Artificial Sequence
  Synthetic oligonucleotide; TTA chr11 5202681 5202702 5202698 5202703 +
cacattgcccgtcttggtttat

SEQ ID NO: 79957 - DNA, 22 bp, Artificial Sequence
  Synthetic oligonucleotide; TTG chr11 5202688 5202709 5202705 5202710 +
cccgtcttggtttataatatca

SEQ ID NO: 79958 - DNA, 22 bp, Artificial Sequence
  Synthetic oligonucleotide; CTT chr11 5202696 5202717 5202713 5202718 +
ggtttataatatcattgtttcc

SEQ ID NO: 79959 - DNA, 22 bp, Artificial Sequence
  Synthetic oligonucleotide; TTG chr11 5202697 5202718 5202714 5202719 +
gtttataatatcattgtttccc

SEQ ID NO: 79960 - DNA, 22 bp, Artificial Sequence
  Synthetic oligonucleotide; TTT chr11 5202701 5202722 5202718 5202723 +
ataatatcattgtttccctggc

SEQ ID NO: 79961 - DNA, 22 bp, Artificial Sequence
  Synthetic oligonucleotide; TTA chr11 5202702 5202723 5202719 5202724 +
taatatcattgtttccctggct

SEQ ID NO: 79962 - DNA, 22 bp, Artificial Sequence
  Synthetic oligonucleotide; TTG chr11 5202713 5202734 5202730 5202735 +
tttccctggctactatgataat

SEQ ID NO: 79963 - DNA, 22 bp, Artificial Sequence
  Synthetic oligonucleotide; TTT chr11 5202716 5202737 5202733 5202738 +
ccctggctactatgataattta

SEQ ID NO: 79964 - DNA, 22 bp, Artificial Sequence
  Synthetic oligonucleotide; TTC chr11 5202717 5202738 5202734 5202739 +
cctggctactatgataatttat

SEQ ID NO: 79965 - DNA, 22 bp, Artificial Sequence
  Synthetic oligonucleotide; CTG chr11 5202721 5202742 5202738 5202743 +
gctactatgataatttattaaa

SEQ ID NO: 79966 - DNA, 22 bp, Artificial Sequence
  Synthetic oligonucleotide; CTA chr11 5202725 5202746 5202742 5202747 +
ctatgataatttattaaattaa

SEQ ID NO: 79967 - DNA, 22 bp, Artificial Sequence
  Synthetic oligonucleotide; CTA chr11 5202728 5202749 5202745 5202750 +
tgataatttattaaattaataa

SEQ ID NO: 79968 - DNA, 22 bp, Artificial Sequence
  Synthetic oligonucleotide; TTT chr11 5202737 5202758 5202754 5202759 +
attaaattaataataatttaat

SEQ ID NO: 79969 - DNA, 22 bp, Artificial Sequence
  Synthetic oligonucleotide; TTA chr11 5202738 5202759 5202755 5202760 +
ttaaattaataataatttaata

SEQ ID NO: 79970 - DNA, 22 bp, Artificial Sequence
  Synthetic oligonucleotide; TTA chr11 5202741 5202762 5202758 5202763 +
aattaataataatttaatatta

SEQ ID NO: 79971 - DNA, 22 bp, Artificial Sequence
  Synthetic oligonucleotide; TTA chr11 5202746 5202767 5202763 5202768 +
ataataatttaatattattact

SEQ ID NO: 79972 - DNA, 22 bp, Artificial Sequence
  Synthetic oligonucleotide; TTT chr11 5202756 5202777 5202773 5202778 +
aatattattactagctaatatc

SEQ ID NO: 79973 - DNA, 22 bp, Artificial Sequence
  Synthetic oligonucleotide; TTA chr11 5202757 5202778 5202774 5202779 +
atattattactagctaatatca

SEQ ID NO: 79974 - DNA, 22 bp, Artificial Sequence
  Synthetic oligonucleotide; TTA chr11 5202763 5202784 5202780 5202785 +
ttactagctaatatcatgattt

SEQ ID NO: 79975 - DNA, 22 bp, Artificial Sequence
  Synthetic oligonucleotide; TTA chr11 5202766 5202787 5202783 5202788 +
ctagctaatatcatgatttatc

SEQ ID NO: 79976 - DNA, 22 bp, Artificial Sequence
  Synthetic oligonucleotide; CTA chr11 5202769 5202790 5202786 5202791 +
gctaatatcatgatttatctgt

SEQ ID NO: 79977 - DNA, 22 bp, Artificial Sequence
  Synthetic oligonucleotide; CTA chr11 5202773 5202794 5202790 5202795 +
atatcatgatttatctgtttgt

SEQ ID NO: 79978 - DNA, 22 bp, Artificial Sequence
  Synthetic oligonucleotide; TTT chr11 5202785 5202806 5202802 5202807 +
atctgtttgtcctctaaaaaat

SEQ ID NO: 79979 - DNA, 22 bp, Artificial Sequence
  Synthetic oligonucleotide; TTA chr11 5202786 5202807 5202803 5202808 +
tctgtttgtcctctaaaaaatg

SEQ ID NO: 79980 - DNA, 22 bp, Artificial Sequence
  Synthetic oligonucleotide; CTG chr11 5202790 5202811 5202807 5202812 +
tttgtcctctaaaaaatgtatt

SEQ ID NO: 79981 - DNA, 22 bp, Artificial Sequence
  Synthetic oligonucleotide; TTT chr11 5202793 5202814 5202810 5202815 +
gtcctctaaaaaatgtattatc

SEQ ID NO: 79982 - DNA, 22 bp, Artificial Sequence
  Synthetic oligonucleotide; TTG chr11 5202794 5202815 5202811 5202816 +
tcctctaaaaaatgtattatct

SEQ ID NO: 79983 - DNA, 22 bp, Artificial Sequence
  Synthetic oligonucleotide; CTC chr11 5202799 5202820 5202816 5202821 +
taaaaaatgtattatctccagg

SEQ ID NO: 79984 - DNA, 22 bp, Artificial Sequence
  Synthetic oligonucleotide; CTA chr11 5202801 5202822 5202818 5202823 +
aaaaatgtattatctccaggga

SEQ ID NO: 79985 - DNA, 22 bp, Artificial Sequence
  Synthetic oligonucleotide; TTA chr11 5202813 5202834 5202830 5202835 +
tctccagggaaaccaaattgct

SEQ ID NO: 79986 - DNA, 22 bp, Artificial Sequence
  Synthetic oligonucleotide; CTC chr11 5202817 5202838 5202834 5202839 +
cagggaaaccaaattgcttttc

SEQ ID NO: 79987 - DNA, 22 bp, Artificial Sequence
  Synthetic oligonucleotide; TTG chr11 5202833 5202854 5202850 5202855 +
cttttctacaaacatctactaa

SEQ ID NO: 79988 - DNA, 22 bp, Artificial Sequence
  Synthetic oligonucleotide; CTT chr11 5202836 5202857 5202853 5202858 +
ttctacaaacatctactaaatc

SEQ ID NO: 79989 - DNA, 22 bp, Artificial Sequence
  Synthetic oligonucleotide; TTT chr11 5202837 5202858 5202854 5202859 +
tctacaaacatctactaaatca

SEQ ID NO: 79990 - DNA, 22 bp, Artificial Sequence
  Synthetic oligonucleotide; TTT chr11 5202838 5202859 5202855 5202860 +
ctacaaacatctactaaatcac

SEQ ID NO: 79991 - DNA, 22 bp, Artificial Sequence
  Synthetic oligonucleotide; TTC chr11 5202839 5202860 5202856 5202861 +
tacaaacatctactaaatcaca

SEQ ID NO: 79992 - DNA, 22 bp, Artificial Sequence
  Synthetic oligonucleotide; CTA chr11 5202841 5202862 5202858 5202863 +
caaacatctactaaatcacaca

SEQ ID NO: 79993 - DNA, 22 bp, Artificial Sequence
  Synthetic oligonucleotide; CTA chr11 5202851 5202872 5202868 5202873 +
ctaaatcacacaaacctttgtt

SEQ ID NO: 79994 - DNA, 22 bp, Artificial Sequence
  Synthetic oligonucleotide; CTA chr11 5202854 5202875 5202871 5202876 +
aatcacacaaacctttgttgaa

SEQ ID NO: 79995 - DNA, 22 bp, Artificial Sequence
  Synthetic oligonucleotide; CTT chr11 5202869 5202890 5202886 5202891 +
tgttgaaaaaactctttgatgg

SEQ ID NO: 79996 - DNA, 22 bp, Artificial Sequence
  Synthetic oligonucleotide; TTT chr11 5202870 5202891 5202887 5202892 +
gttgaaaaaactctttgatggt

SEQ ID NO: 79997 - DNA, 22 bp, Artificial Sequence
  Synthetic oligonucleotide; TTG chr11 5202871 5202892 5202888 5202893 +
ttgaaaaaactctttgatggtc

SEQ ID NO: 79998 - DNA, 22 bp, Artificial Sequence
  Synthetic oligonucleotide; TTG chr11 5202874 5202895 5202891 5202896 +
aaaaaactctttgatggtcact

SEQ ID NO: 79999 - DNA, 22 bp, Artificial Sequence
  Synthetic oligonucleotide; CTC chr11 5202883 5202904 5202900 5202905 +
tttgatggtcacttacccattg

SEQ ID NO: 80000 - DNA, 22 bp, Artificial Sequence
  Synthetic oligonucleotide; CTT chr11 5202885 5202906 5202902 5202907 +
tgatggtcacttacccattgct

SEQ ID NO: 80001 - DNA, 22 bp, Artificial Sequence
  Synthetic oligonucleotide; TTT chr11 5202886 5202907 5202903 5202908 +
gatggtcacttacccattgctc

SEQ ID NO: 80002 - DNA, 22 bp, Artificial Sequence
  Synthetic oligonucleotide; TTG chr11 5202887 5202908 5202904 5202909 +
atggtcacttacccattgctcg

SEQ ID NO: 80003 - DNA, 22 bp, Artificial Sequence
  Synthetic oligonucleotide; CTT chr11 5202897 5202918 5202914 5202919 +
acccattgctcgtaatgtaaaa

SEQ ID NO: 80004 - DNA, 22 bp, Artificial Sequence
  Synthetic oligonucleotide; TTA chr11 5202898 5202919 5202915 5202920 +
cccattgctcgtaatgtaaaat

SEQ ID NO: 80005 - DNA, 22 bp, Artificial Sequence
  Synthetic oligonucleotide; TTG chr11 5202905 5202926 5202922 5202927 +
ctcgtaatgtaaaatacaaatt

SEQ ID NO: 80006 - DNA, 22 bp, Artificial Sequence
  Synthetic oligonucleotide; CTC chr11 5202908 5202929 5202925 5202930 +
gtaatgtaaaatacaaattctt

SEQ ID NO: 80007 - DNA, 22 bp, Artificial Sequence
  Synthetic oligonucleotide; TTC chr11 5202928 5202949 5202945 5202950 +
tttatcatagtcaaaaagcctt

SEQ ID NO: 80008 - DNA, 22 bp, Artificial Sequence
  Synthetic oligonucleotide; CTT chr11 5202930 5202951 5202947 5202952 +
tatcatagtcaaaaagccttgt

SEQ ID NO: 80009 - DNA, 22 bp, Artificial Sequence
  Synthetic oligonucleotide; TTT chr11 5202931 5202952 5202948 5202953 +
atcatagtcaaaaagccttgta

SEQ ID NO: 80010 - DNA, 22 bp, Artificial Sequence
  Synthetic oligonucleotide; TTA chr11 5202932 5202953 5202949 5202954 +
tcatagtcaaaaagccttgtat

SEQ ID NO: 80011 - DNA, 22 bp, Artificial Sequence
  Synthetic oligonucleotide; CTT chr11 5202950 5202971 5202967 5202972 +
gtataacgtggctcacctgcct

SEQ ID NO: 80012 - DNA, 22 bp, Artificial Sequence
  Synthetic oligonucleotide; TTG chr11 5202951 5202972 5202968 5202973 +
tataacgtggctcacctgcctc

SEQ ID NO: 80013 - DNA, 22 bp, Artificial Sequence
  Synthetic oligonucleotide; CTC chr11 5202964 5202985 5202981 5202986 +
acctgcctcttctattacatct

SEQ ID NO: 80014 - DNA, 22 bp, Artificial Sequence
  Synthetic oligonucleotide; CTG chr11 5202969 5202990 5202986 5202991 +
cctcttctattacatctttaga

SEQ ID NO: 80015 - DNA, 22 bp, Artificial Sequence
  Synthetic oligonucleotide; CTC chr11 5202973 5202994 5202990 5202995 +
ttctattacatctttagaccac

SEQ ID NO: 80016 - DNA, 22 bp, Artificial Sequence
  Synthetic oligonucleotide; CTT chr11 5202975 5202996 5202992 5202997 +
ctattacatctttagaccacta

SEQ ID NO: 80017 - DNA, 22 bp, Artificial Sequence
  Synthetic oligonucleotide; TTC chr11 5202976 5202997 5202993 5202998 +
tattacatctttagaccactac

SEQ ID NO: 80018 - DNA, 22 bp, Artificial Sequence
  Synthetic oligonucleotide; CTA chr11 5202978 5202999 5202995 5203000 +
ttacatctttagaccactactg

SEQ ID NO: 80019 - DNA, 22 bp, Artificial Sequence
  Synthetic oligonucleotide; TTA chr11 5202981 5203002 5202998 5203003 +
catctttagaccactactgcct

SEQ ID NO: 80020 - DNA, 22 bp, Artificial Sequence
  Synthetic oligonucleotide; CTT chr11 5202987 5203008 5203004 5203009 +
tagaccactactgcctacactc

SEQ ID NO: 80021 - DNA, 22 bp, Artificial Sequence
  Synthetic oligonucleotide; TTT chr11 5202988 5203009 5203005 5203010 +
agaccactactgcctacactcc

SEQ ID NO: 80022 - DNA, 22 bp, Artificial Sequence
  Synthetic oligonucleotide; TTA chr11 5202989 5203010 5203006 5203011 +
gaccactactgcctacactcct

SEQ ID NO: 80023 - DNA, 22 bp, Artificial Sequence
  Synthetic oligonucleotide; CTA chr11 5202997 5203018 5203014 5203019 +
ctgcctacactccttaatattt

SEQ ID NO: 80024 - DNA, 22 bp, Artificial Sequence
  Synthetic oligonucleotide; CTG chr11 5203000 5203021 5203017 5203022 +
cctacactccttaatatttagg

SEQ ID NO: 80025 - DNA, 22 bp, Artificial Sequence
  Synthetic oligonucleotide; CTA chr11 5203004 5203025 5203021 5203026 +
cactccttaatatttaggtatc

SEQ ID NO: 80026 - DNA, 22 bp, Artificial Sequence
  Synthetic oligonucleotide; CTC chr11 5203009 5203030 5203026 5203031 +
cttaatatttaggtatctttat

SEQ ID NO: 80027 - DNA, 22 bp, Artificial Sequence
  Synthetic oligonucleotide; CTT chr11 5203012 5203033 5203029 5203034 +
aatatttaggtatctttatctt

SEQ ID NO: 80028 - DNA, 22 bp, Artificial Sequence
  Synthetic oligonucleotide; TTA chr11 5203013 5203034 5203030 5203035 +
atatttaggtatctttatcttc

SEQ ID NO: 80029 - DNA, 22 bp, Artificial Sequence
  Synthetic oligonucleotide; TTT chr11 5203019 5203040 5203036 5203041 +
aggtatctttatcttcctcaaa

SEQ ID NO: 80030 - DNA, 22 bp, Artificial Sequence
  Synthetic oligonucleotide; TTA chr11 5203020 5203041 5203037 5203042 +
ggtatctttatcttcctcaaaa

SEQ ID NO: 80031 - DNA, 22 bp, Artificial Sequence
  Synthetic oligonucleotide; CTT chr11 5203028 5203049 5203045 5203050 +
tatcttcctcaaaacaagctaa

SEQ ID NO: 80032 - DNA, 22 bp, Artificial Sequence
  Synthetic oligonucleotide; TTT chr11 5203029 5203050 5203046 5203051 +
atcttcctcaaaacaagctaag

SEQ ID NO: 80033 - DNA, 22 bp, Artificial Sequence
  Synthetic oligonucleotide; TTA chr11 5203030 5203051 5203047 5203052 +
tcttcctcaaaacaagctaagt

SEQ ID NO: 80034 - DNA, 22 bp, Artificial Sequence
  Synthetic oligonucleotide; CTT chr11 5203034 5203055 5203051 5203056 +
cctcaaaacaagctaagtacat

SEQ ID NO: 80035 - DNA, 22 bp, Artificial Sequence
  Synthetic oligonucleotide; TTC chr11 5203035 5203056 5203052 5203057 +
ctcaaaacaagctaagtacatg

SEQ ID NO: 80036 - DNA, 22 bp, Artificial Sequence
  Synthetic oligonucleotide; CTC chr11 5203038 5203059 5203055 5203060 +
aaaacaagctaagtacatgcat

SEQ ID NO: 80037 - DNA, 22 bp, Artificial Sequence
  Synthetic oligonucleotide; CTA chr11 5203049 5203070 5203066 5203071 +
agtacatgcatgtctcaggatc

SEQ ID NO: 80038 - DNA, 22 bp, Artificial Sequence
  Synthetic oligonucleotide; CTC chr11 5203065 5203086 5203082 5203087 +
aggatctttgcccatggtcttc

SEQ ID NO: 80039 - DNA, 22 bp, Artificial Sequence
  Synthetic oligonucleotide; CTT chr11 5203073 5203094 5203090 5203095 +
tgcccatggtcttctctgtgct

SEQ ID NO: 80040 - DNA, 22 bp, Artificial Sequence
  Synthetic oligonucleotide; TTT chr11 5203074 5203095 5203091 5203096 +
gcccatggtcttctctgtgctc

SEQ ID NO: 80041 - DNA, 22 bp, Artificial Sequence
  Synthetic oligonucleotide; TTG chr11 5203075 5203096 5203092 5203097 +
cccatggtcttctctgtgctcc

SEQ ID NO: 80042 - DNA, 22 bp, Artificial Sequence
  Synthetic oligonucleotide; CTT chr11 5203086 5203107 5203103 5203108 +
ctctgtgctccgaattatctac

SEQ ID NO: 80043 - DNA, 22 bp, Artificial Sequence
  Synthetic oligonucleotide; TTC chr11 5203087 5203108 5203104 5203109 +
tctgtgctccgaattatctacc

SEQ ID NO: 80044 - DNA, 22 bp, Artificial Sequence
  Synthetic oligonucleotide; CTC chr11 5203089 5203110 5203106 5203111 +
tgtgctccgaattatctacccc

SEQ ID NO: 80045 - DNA, 22 bp, Artificial Sequence
  Synthetic oligonucleotide; CTG chr11 5203091 5203112 5203108 5203113 +
tgctccgaattatctaccccaa

SEQ ID NO: 80046 - DNA, 22 bp, Artificial Sequence
  Synthetic oligonucleotide; CTC chr11 5203096 5203117 5203113 5203118 +
cgaattatctaccccaagtatt

SEQ ID NO: 80047 - DNA, 22 bp, Artificial Sequence
  Synthetic oligonucleotide; TTA chr11 5203103 5203124 5203120 5203125 +
tctaccccaagtatttgcacag

SEQ ID NO: 80048 - DNA, 22 bp, Artificial Sequence
  Synthetic oligonucleotide; CTA chr11 5203107 5203128 5203124 5203129 +
ccccaagtatttgcacagcaat

SEQ ID NO: 80049 - DNA, 22 bp, Artificial Sequence
  Synthetic oligonucleotide; TTT chr11 5203119 5203140 5203136 5203141 +
gcacagcaattcctttcaccat

SEQ ID NO: 80050 - DNA, 22 bp, Artificial Sequence
  Synthetic oligonucleotide; TTG chr11 5203120 5203141 5203137 5203142 +
cacagcaattcctttcaccatt

SEQ ID NO: 80051 - DNA, 22 bp, Artificial Sequence
  Synthetic oligonucleotide; TTC chr11 5203131 5203152 5203148 5203153 +
ctttcaccattaacttttgagt

SEQ ID NO: 80052 - DNA, 22 bp, Artificial Sequence
  Synthetic oligonucleotide; CTT chr11 5203134 5203155 5203151 5203156 +
tcaccattaacttttgagttaa

SEQ ID NO: 80053 - DNA, 22 bp, Artificial Sequence
  Synthetic oligonucleotide; TTT chr11 5203135 5203156 5203152 5203157 +
caccattaacttttgagttaaa

SEQ ID NO: 80054 - DNA, 22 bp, Artificial Sequence
  Synthetic oligonucleotide; TTC chr11 5203136 5203157 5203153 5203158 +
accattaacttttgagttaaaa

SEQ ID NO: 80055 - DNA, 22 bp, Artificial Sequence
  Synthetic oligonucleotide; TTA chr11 5203143 5203164 5203160 5203165 +
acttttgagttaaaatgattac

SEQ ID NO: 80056 - DNA, 22 bp, Artificial Sequence
  Synthetic oligonucleotide; CTT chr11 5203147 5203168 5203164 5203169 +
ttgagttaaaatgattacttcc

SEQ ID NO: 80057 - DNA, 22 bp, Artificial Sequence
  Synthetic oligonucleotide; TTT chr11 5203148 5203169 5203165 5203170 +
tgagttaaaatgattacttcct

SEQ ID NO: 80058 - DNA, 22 bp, Artificial Sequence
  Synthetic oligonucleotide; TTT chr11 5203149 5203170 5203166 5203171 +
gagttaaaatgattacttcctc

SEQ ID NO: 80059 - DNA, 22 bp, Artificial Sequence
  Synthetic oligonucleotide; TTG chr11 5203150 5203171 5203167 5203172 +
agttaaaatgattacttcctca

SEQ ID NO: 80060 - DNA, 22 bp, Artificial Sequence
  Synthetic oligonucleotide; TTA chr11 5203155 5203176 5203172 5203177 +
aaatgattacttcctcaggggg

SEQ ID NO: 80061 - DNA, 22 bp, Artificial Sequence
  Synthetic oligonucleotide; TTA chr11 5203164 5203185 5203181 5203186 +
cttcctcagggggatttttcta

SEQ ID NO: 80062 - DNA, 22 bp, Artificial Sequence
  Synthetic oligonucleotide; CTT chr11 5203167 5203188 5203184 5203189 +
cctcagggggatttttctaata

SEQ ID NO: 80063 - DNA, 22 bp, Artificial Sequence
  Synthetic oligonucleotide; TTC chr11 5203168 5203189 5203185 5203190 +
ctcagggggatttttctaatac

SEQ ID NO: 80064 - DNA, 22 bp, Artificial Sequence
  Synthetic oligonucleotide; CTC chr11 5203171 5203192 5203188 5203193 +
agggggatttttctaatactgc

SEQ ID NO: 80065 - DNA, 22 bp, Artificial Sequence
  Synthetic oligonucleotide; TTT chr11 5203181 5203202 5203198 5203203 +
ttctaatactgctccccaccta

SEQ ID NO: 80066 - DNA, 22 bp, Artificial Sequence
  Synthetic oligonucleotide; TTT chr11 5203182 5203203 5203199 5203204 +
tctaatactgctccccacctag

SEQ ID NO: 80067 - DNA, 22 bp, Artificial Sequence
  Synthetic oligonucleotide; TTT chr11 5203183 5203204 5203200 5203205 +
ctaatactgctccccacctaga

SEQ ID NO: 80068 - DNA, 22 bp, Artificial Sequence
  Synthetic oligonucleotide; TTC chr11 5203184 5203205 5203201 5203206 +
taatactgctccccacctagat

SEQ ID NO: 80069 - DNA, 22 bp, Artificial Sequence
  Synthetic oligonucleotide; CTA chr11 5203186 5203207 5203203 5203208 +
atactgctccccacctagatta

SEQ ID NO: 80070 - DNA, 22 bp, Artificial Sequence
  Synthetic oligonucleotide; CTG chr11 5203192 5203213 5203209 5203214 +
ctccccacctagattatctcat

SEQ ID NO: 80071 - DNA, 22 bp, Artificial Sequence
  Synthetic oligonucleotide; CTC chr11 5203195 5203216 5203212 5203217 +
cccacctagattatctcatttc

SEQ ID NO: 80072 - DNA, 22 bp, Artificial Sequence
  Synthetic oligonucleotide; CTA chr11 5203203 5203224 5203220 5203225 +
gattatctcatttcttcaaccc

SEQ ID NO: 80073 - DNA, 22 bp, Artificial Sequence
  Synthetic oligonucleotide; TTA chr11 5203208 5203229 5203225 5203230 +
tctcatttcttcaaccccctta

SEQ ID NO: 80074 - DNA, 22 bp, Artificial Sequence
  Synthetic oligonucleotide; CTC chr11 5203212 5203233 5203229 5203234 +
atttcttcaacccccttaacta

SEQ ID NO: 80075 - DNA, 22 bp, Artificial Sequence
  Synthetic oligonucleotide; TTT chr11 5203216 5203237 5203233 5203238 +
cttcaacccccttaactaactt

SEQ ID NO: 80076 - DNA, 22 bp, Artificial Sequence
  Synthetic oligonucleotide; TTC chr11 5203217 5203238 5203234 5203239 +
ttcaacccccttaactaactta

SEQ ID NO: 80077 - DNA, 22 bp, Artificial Sequence
  Synthetic oligonucleotide; CTT chr11 5203219 5203240 5203236 5203241 +
caacccccttaactaacttact

SEQ ID NO: 80078 - DNA, 22 bp, Artificial Sequence
  Synthetic oligonucleotide; TTC chr11 5203220 5203241 5203237 5203242 +
aacccccttaactaacttactc

SEQ ID NO: 80079 - DNA, 22 bp, Artificial Sequence
  Synthetic oligonucleotide; CTT chr11 5203229 5203250 5203246 5203251 +
aactaacttactctcatcacag

SEQ ID NO: 80080 - DNA, 22 bp, Artificial Sequence
  Synthetic oligonucleotide; TTA chr11 5203230 5203251 5203247 5203252 +
actaacttactctcatcacagt

SEQ ID NO: 80081 - DNA, 22 bp, Artificial Sequence
  Synthetic oligonucleotide; CTA chr11 5203234 5203255 5203251 5203256 +
acttactctcatcacagtatac

SEQ ID NO: 80082 - DNA, 22 bp, Artificial Sequence
  Synthetic oligonucleotide; CTT chr11 5203238 5203259 5203255 5203260 +
actctcatcacagtatactagt

SEQ ID NO: 80083 - DNA, 22 bp, Artificial Sequence
  Synthetic oligonucleotide; TTA chr11 5203239 5203260 5203256 5203261 +
ctctcatcacagtatactagtt

SEQ ID NO: 80084 - DNA, 22 bp, Artificial Sequence
  Synthetic oligonucleotide; CTC chr11 5203242 5203263 5203259 5203264 +
tcatcacagtatactagtttat

SEQ ID NO: 80085 - DNA, 22 bp, Artificial Sequence
  Synthetic oligonucleotide; CTC chr11 5203244 5203265 5203261 5203266 +
atcacagtatactagtttatat

SEQ ID NO: 80086 - DNA, 22 bp, Artificial Sequence
  Synthetic oligonucleotide; CTA chr11 5203258 5203279 5203275 5203280 +
gtttatatttataccacttatt

SEQ ID NO: 80087 - DNA, 22 bp, Artificial Sequence
  Synthetic oligonucleotide; TTT chr11 5203262 5203283 5203279 5203284 +
atatttataccacttattatac

SEQ ID NO: 80088 - DNA, 22 bp, Artificial Sequence
  Synthetic oligonucleotide; TTA chr11 5203263 5203284 5203280 5203285 +
tatttataccacttattataca

SEQ ID NO: 80089 - DNA, 22 bp, Artificial Sequence
  Synthetic oligonucleotide; TTT chr11 5203268 5203289 5203285 5203290 +
ataccacttattatacactgaa

SEQ ID NO: 80090 - DNA, 22 bp, Artificial Sequence
  Synthetic oligonucleotide; TTA chr11 5203269 5203290 5203286 5203291 +
taccacttattatacactgaat

SEQ ID NO: 80091 - DNA, 22 bp, Artificial Sequence
  Synthetic oligonucleotide; CTT chr11 5203277 5203298 5203294 5203299 +
attatacactgaatttccatta

SEQ ID NO: 80092 - DNA, 22 bp, Artificial Sequence
  Synthetic oligonucleotide; TTA chr11 5203278 5203299 5203295 5203300 +
ttatacactgaatttccattag

SEQ ID NO: 80093 - DNA, 22 bp, Artificial Sequence
  Synthetic oligonucleotide; TTA chr11 5203281 5203302 5203298 5203303 +
tacactgaatttccattagatt

SEQ ID NO: 80094 - DNA, 22 bp, Artificial Sequence
  Synthetic oligonucleotide; CTG chr11 5203288 5203309 5203305 5203310 +
aatttccattagattcattaga

SEQ ID NO: 80095 - DNA, 22 bp, Artificial Sequence
  Synthetic oligonucleotide; TTT chr11 5203293 5203314 5203310 5203315 +
ccattagattcattagaggctg

SEQ ID NO: 80096 - DNA, 22 bp, Artificial Sequence
  Synthetic oligonucleotide; TTC chr11 5203294 5203315 5203311 5203316 +
cattagattcattagaggctgt

SEQ ID NO: 80097 - DNA, 22 bp, Artificial Sequence
  Synthetic oligonucleotide; TTA chr11 5203299 5203320 5203316 5203321 +
gattcattagaggctgtagaag

SEQ ID NO: 80098 - DNA, 22 bp, Artificial Sequence
  Synthetic oligonucleotide; TTC chr11 5203304 5203325 5203321 5203326 +
attagaggctgtagaagattag

SEQ ID NO: 80099 - DNA, 22 bp, Artificial Sequence
  Synthetic oligonucleotide; TTA chr11 5203308 5203329 5203325 5203330 +
gaggctgtagaagattaggaac

SEQ ID NO: 80100 - DNA, 22 bp, Artificial Sequence
  Synthetic oligonucleotide; CTG chr11 5203315 5203336 5203332 5203337 +
tagaagattaggaaccatatct

SEQ ID NO: 80101 - DNA, 22 bp, Artificial Sequence
  Synthetic oligonucleotide; TTA chr11 5203325 5203346 5203342 5203347 +
ggaaccatatctgttttttgct

SEQ ID NO: 80102 - DNA, 22 bp, Artificial Sequence
  Synthetic oligonucleotide; CTG chr11 5203338 5203359 5203355 5203360 +
ttttttgctcaagaatatgaaa

SEQ ID NO: 80103 - DNA, 22 bp, Artificial Sequence
  Synthetic oligonucleotide; TTT chr11 5203341 5203362 5203358 5203363 +
tttgctcaagaatatgaaaaat

SEQ ID NO: 80104 - DNA, 22 bp, Artificial Sequence
  Synthetic oligonucleotide; TTT chr11 5203342 5203363 5203359 5203364 +
ttgctcaagaatatgaaaaata

SEQ ID NO: 80105 - DNA, 22 bp, Artificial Sequence
  Synthetic oligonucleotide; TTT chr11 5203343 5203364 5203360 5203365 +
tgctcaagaatatgaaaaataa

SEQ ID NO: 80106 - DNA, 22 bp, Artificial Sequence
  Synthetic oligonucleotide; TTT chr11 5203344 5203365 5203361 5203366 +
gctcaagaatatgaaaaataag

SEQ ID NO: 80107 - DNA, 22 bp, Artificial Sequence
  Synthetic oligonucleotide; TTG chr11 5203345 5203366 5203362 5203367 +
ctcaagaatatgaaaaataagg

SEQ ID NO: 80108 - DNA, 22 bp, Artificial Sequence
  Synthetic oligonucleotide; CTC chr11 5203348 5203369 5203365 5203370 +
aagaatatgaaaaataagggtt

SEQ ID NO: 80109 - DNA, 22 bp, Artificial Sequence
  Synthetic oligonucleotide; TTA chr11 5203371 5203392 5203388 5203393 +
gcatagaatgggcacttatcaa

SEQ ID NO: 80110 - DNA, 22 bp, Artificial Sequence
  Synthetic oligonucleotide; CTT chr11 5203388 5203409 5203405 5203410 +
atcaaataatttttaattaatt

SEQ ID NO: 80111 - DNA, 22 bp, Artificial Sequence
  Synthetic oligonucleotide; TTA chr11 5203389 5203410 5203406 5203411 +
tcaaataatttttaattaatta

SEQ ID NO: 80112 - DNA, 22 bp, Artificial Sequence
  Synthetic oligonucleotide; TTT chr11 5203400 5203421 5203417 5203422 +
ttaattaattattctatgaaat

SEQ ID NO: 80113 - DNA, 22 bp, Artificial Sequence
  Synthetic oligonucleotide; TTT chr11 5203401 5203422 5203418 5203423 +
taattaattattctatgaaata

SEQ ID NO: 80114 - DNA, 22 bp, Artificial Sequence
  Synthetic oligonucleotide; TTT chr11 5203402 5203423 5203419 5203424 +
aattaattattctatgaaataa

SEQ ID NO: 80115 - DNA, 22 bp, Artificial Sequence
  Synthetic oligonucleotide; TTA chr11 5203403 5203424 5203420 5203425 +
attaattattctatgaaataag

SEQ ID NO: 80116 - DNA, 22 bp, Artificial Sequence
  Synthetic oligonucleotide; TTA chr11 5203407 5203428 5203424 5203429 +
attattctatgaaataagagct

SEQ ID NO: 80117 - DNA, 22 bp, Artificial Sequence
  Synthetic oligonucleotide; TTA chr11 5203411 5203432 5203428 5203433 +
ttctatgaaataagagctagac

SEQ ID NO: 80118 - DNA, 22 bp, Artificial Sequence
  Synthetic oligonucleotide; TTC chr11 5203414 5203435 5203431 5203436 +
tatgaaataagagctagacaat

SEQ ID NO: 80119 - DNA, 22 bp, Artificial Sequence
  Synthetic oligonucleotide; CTA chr11 5203416 5203437 5203433 5203438 +
tgaaataagagctagacaatca

SEQ ID NO: 80120 - DNA, 22 bp, Artificial Sequence
  Synthetic oligonucleotide; CTA chr11 5203430 5203451 5203447 5203452 +
gacaatcacagagatataaaga

SEQ ID NO: 80121 - DNA, 22 bp, Artificial Sequence
  Synthetic oligonucleotide; CTC chr11 5203472 5203493 5203489 5203494 +
ctatcaaagtgtgtgtaaaatc

SEQ ID NO: 80122 - DNA, 22 bp, Artificial Sequence
  Synthetic oligonucleotide; CTA chr11 5203475 5203496 5203492 5203497 +
tcaaagtgtgtgtaaaatcatc

SEQ ID NO: 80123 - DNA, 22 bp, Artificial Sequence
  Synthetic oligonucleotide; CTG chr11 5203499 5203520 5203516 5203521 +
tgtacacttagtcttttctgac

SEQ ID NO: 80124 - DNA, 22 bp, Artificial Sequence
  Synthetic oligonucleotide; CTT chr11 5203508 5203529 5203525 5203530 +
agtcttttctgacctttggcca

SEQ ID NO: 80125 - DNA, 22 bp, Artificial Sequence
  Synthetic oligonucleotide; TTA chr11 5203509 5203530 5203526 5203531 +
gtcttttctgacctttggccac

SEQ ID NO: 80126 - DNA, 22 bp, Artificial Sequence
  Synthetic oligonucleotide; CTT chr11 5203514 5203535 5203531 5203536 +
ttctgacctttggccaccaatt

SEQ ID NO: 80127 - DNA, 22 bp, Artificial Sequence
  Synthetic oligonucleotide; TTT chr11 5203515 5203536 5203532 5203537 +
tctgacctttggccaccaattg

SEQ ID NO: 80128 - DNA, 22 bp, Artificial Sequence
  Synthetic oligonucleotide; TTT chr11 5203516 5203537 5203533 5203538 +
ctgacctttggccaccaattga

SEQ ID NO: 80129 - DNA, 22 bp, Artificial Sequence
  Synthetic oligonucleotide; TTC chr11 5203517 5203538 5203534 5203539 +
tgacctttggccaccaattgag

SEQ ID NO: 80130 - DNA, 22 bp, Artificial Sequence
  Synthetic oligonucleotide; CTG chr11 5203519 5203540 5203536 5203541 +
acctttggccaccaattgagtc

SEQ ID NO: 80131 - DNA, 22 bp, Artificial Sequence
  Synthetic oligonucleotide; CTT chr11 5203524 5203545 5203541 5203546 +
tggccaccaattgagtcatcat

SEQ ID NO: 80132 - DNA, 22 bp, Artificial Sequence
  Synthetic oligonucleotide; TTT chr11 5203525 5203546 5203542 5203547 +
ggccaccaattgagtcatcata

SEQ ID NO: 80133 - DNA, 22 bp, Artificial Sequence
  Synthetic oligonucleotide; TTG chr11 5203526 5203547 5203543 5203548 +
gccaccaattgagtcatcatat

SEQ ID NO: 80134 - DNA, 22 bp, Artificial Sequence
  Synthetic oligonucleotide; TTG chr11 5203537 5203558 5203554 5203559 +
agtcatcatataccaagtttga

SEQ ID NO: 80135 - DNA, 22 bp, Artificial Sequence
  Synthetic oligonucleotide; TTT chr11 5203557 5203578 5203574 5203579 +
gaatggtttataaaacagatgc

SEQ ID NO: 80136 - DNA, 22 bp, Artificial Sequence
  Synthetic oligonucleotide; TTG chr11 5203558 5203579 5203575 5203580 +
aatggtttataaaacagatgct

SEQ ID NO: 80137 - DNA, 22 bp, Artificial Sequence
  Synthetic oligonucleotide; TTT chr11 5203566 5203587 5203583 5203588 +
ataaaacagatgctgctccagg

SEQ ID NO: 80138 - DNA, 22 bp, Artificial Sequence
  Synthetic oligonucleotide; TTA chr11 5203567 5203588 5203584 5203589 +
taaaacagatgctgctccaggg

SEQ ID NO: 80139 - DNA, 22 bp, Artificial Sequence
  Synthetic oligonucleotide; CTG chr11 5203581 5203602 5203598 5203603 +
ctccagggatcttgctgacctt

SEQ ID NO: 80140 - DNA, 22 bp, Artificial Sequence
  Synthetic oligonucleotide; CTC chr11 5203584 5203605 5203601 5203606 +
cagggatcttgctgaccttgaa

SEQ ID NO: 80141 - DNA, 22 bp, Artificial Sequence
  Synthetic oligonucleotide; CTT chr11 5203594 5203615 5203611 5203616 +
gctgaccttgaatacaacactc

SEQ ID NO: 80142 - DNA, 22 bp, Artificial Sequence
  Synthetic oligonucleotide; TTG chr11 5203595 5203616 5203612 5203617 +
ctgaccttgaatacaacactcc

SEQ ID NO: 80143 - DNA, 22 bp, Artificial Sequence
  Synthetic oligonucleotide; CTG chr11 5203598 5203619 5203615 5203620 +
accttgaatacaacactccaat

SEQ ID NO: 80144 - DNA, 22 bp, Artificial Sequence
  Synthetic oligonucleotide; CTT chr11 5203603 5203624 5203620 5203625 +
gaatacaacactccaatttcaa

SEQ ID NO: 80145 - DNA, 22 bp, Artificial Sequence
  Synthetic oligonucleotide; TTG chr11 5203604 5203625 5203621 5203626 +
aatacaacactccaatttcaaa

SEQ ID NO: 80146 - DNA, 22 bp, Artificial Sequence
  Synthetic oligonucleotide; CTC chr11 5203616 5203637 5203633 5203638 +
caatttcaaacatgatttctct

SEQ ID NO: 80147 - DNA, 22 bp, Artificial Sequence
  Synthetic oligonucleotide; TTT chr11 5203622 5203643 5203639 5203644 +
caaacatgatttctctcatttc

SEQ ID NO: 80148 - DNA, 22 bp, Artificial Sequence
  Synthetic oligonucleotide; TTC chr11 5203623 5203644 5203640 5203645 +
aaacatgatttctctcatttcc

SEQ ID NO: 80149 - DNA, 22 bp, Artificial Sequence
  Synthetic oligonucleotide; TTT chr11 5203634 5203655 5203651 5203656 +
ctctcatttccagcctgactca

SEQ ID NO: 80150 - DNA, 22 bp, Artificial Sequence
  Synthetic oligonucleotide; TTC chr11 5203635 5203656 5203652 5203657 +
tctcatttccagcctgactcag

SEQ ID NO: 80151 - DNA, 22 bp, Artificial Sequence
  Synthetic oligonucleotide; CTC chr11 5203637 5203658 5203654 5203659 +
tcatttccagcctgactcagac

SEQ ID NO: 80152 - DNA, 22 bp, Artificial Sequence
  Synthetic oligonucleotide; CTC chr11 5203639 5203660 5203656 5203661 +
atttccagcctgactcagacat

SEQ ID NO: 80153 - DNA, 22 bp, Artificial Sequence
  Synthetic oligonucleotide; TTT chr11 5203643 5203664 5203660 5203665 +
ccagcctgactcagacatatcg

SEQ ID NO: 80154 - DNA, 22 bp, Artificial Sequence
  Synthetic oligonucleotide; TTC chr11 5203644 5203665 5203661 5203666 +
cagcctgactcagacatatcgt

SEQ ID NO: 80155 - DNA, 22 bp, Artificial Sequence
  Synthetic oligonucleotide; CTG chr11 5203651 5203672 5203668 5203673 +
actcagacatatcgtcaaggat

SEQ ID NO: 80156 - DNA, 22 bp, Artificial Sequence
  Synthetic oligonucleotide; CTC chr11 5203655 5203676 5203672 5203677 +
agacatatcgtcaaggatctgg

SEQ ID NO: 80157 - DNA, 22 bp, Artificial Sequence
  Synthetic oligonucleotide; CTG chr11 5203676 5203697 5203693 5203698 +
ggattgatcacaaaagatttaa

SEQ ID NO: 80158 - DNA, 22 bp, Artificial Sequence
  Synthetic oligonucleotide; TTG chr11 5203682 5203703 5203699 5203704 +
atcacaaaagatttaatattct

SEQ ID NO: 80159 - DNA, 22 bp, Artificial Sequence
  Synthetic oligonucleotide; TTT chr11 5203696 5203717 5203713 5203718 +
aatattctgtgaatgtaggtat

SEQ ID NO: 80160 - DNA, 22 bp, Artificial Sequence
  Synthetic oligonucleotide; TTA chr11 5203697 5203718 5203714 5203719 +
atattctgtgaatgtaggtatg

SEQ ID NO: 80161 - DNA, 22 bp, Artificial Sequence
  Synthetic oligonucleotide; TTC chr11 5203703 5203724 5203720 5203725 +
tgtgaatgtaggtatgtgttaa

SEQ ID NO: 80162 - DNA, 22 bp, Artificial Sequence
  Synthetic oligonucleotide; CTG chr11 5203705 5203726 5203722 5203727 +
tgaatgtaggtatgtgttaaaa

SEQ ID NO: 80163 - DNA, 22 bp, Artificial Sequence
  Synthetic oligonucleotide; TTA chr11 5203724 5203745 5203741 5203746 +
aaagtatctactttcagccagg

SEQ ID NO: 80164 - DNA, 22 bp, Artificial Sequence
  Synthetic oligonucleotide; CTA chr11 5203734 5203755 5203751 5203756 +
ctttcagccaggcttggtggct

SEQ ID NO: 80165 - DNA, 22 bp, Artificial Sequence
  Synthetic oligonucleotide; CTT chr11 5203737 5203758 5203754 5203759 +
tcagccaggcttggtggctcac

SEQ ID NO: 80166 - DNA, 22 bp, Artificial Sequence
  Synthetic oligonucleotide; TTT chr11 5203738 5203759 5203755 5203760 +
cagccaggcttggtggctcacg

SEQ ID NO: 80167 - DNA, 22 bp, Artificial Sequence
  Synthetic oligonucleotide; TTC chr11 5203739 5203760 5203756 5203761 +
agccaggcttggtggctcacgc

SEQ ID NO: 80168 - DNA, 22 bp, Artificial Sequence
  Synthetic oligonucleotide; CTT chr11 5203749 5203770 5203766 5203771 +
ggtggctcacgcctgtaatcct

SEQ ID NO: 80169 - DNA, 22 bp, Artificial Sequence
  Synthetic oligonucleotide; TTG chr11 5203750 5203771 5203767 5203772 +
gtggctcacgcctgtaatccta

SEQ ID NO: 80170 - DNA, 22 bp, Artificial Sequence
  Synthetic oligonucleotide; CTC chr11 5203757 5203778 5203774 5203779 +
acgcctgtaatcctagcacttt

SEQ ID NO: 80171 - DNA, 22 bp, Artificial Sequence
  Synthetic oligonucleotide; CTG chr11 5203764 5203785 5203781 5203786 +
taatcctagcactttgggaggc

SEQ ID NO: 80172 - DNA, 22 bp, Artificial Sequence
  Synthetic oligonucleotide; CTA chr11 5203772 5203793 5203789 5203794 +
gcactttgggaggccgaggcag

SEQ ID NO: 80173 - DNA, 22 bp, Artificial Sequence
  Synthetic oligonucleotide; CTT chr11 5203778 5203799 5203795 5203800 +
tgggaggccgaggcaggtggat

SEQ ID NO: 80174 - DNA, 22 bp, Artificial Sequence
  Synthetic oligonucleotide; TTT chr11 5203779 5203800 5203796 5203801 +
gggaggccgaggcaggtggatt

SEQ ID NO: 80175 - DNA, 22 bp, Artificial Sequence
  Synthetic oligonucleotide; TTG chr11 5203780 5203801 5203797 5203802 +
ggaggccgaggcaggtggattg

SEQ ID NO: 80176 - DNA, 22 bp, Artificial Sequence
  Synthetic oligonucleotide; TTG chr11 5203802 5203823 5203819 5203824 +
gctgagctcaggagttggagac

SEQ ID NO: 80177 - DNA, 22 bp, Artificial Sequence
  Synthetic oligonucleotide; CTG chr11 5203806 5203827 5203823 5203828 +
agctcaggagttggagaccaac

SEQ ID NO: 80178 - DNA, 22 bp, Artificial Sequence
  Synthetic oligonucleotide; CTC chr11 5203811 5203832 5203828 5203833 +
aggagttggagaccaacctggg

SEQ ID NO: 80179 - DNA, 22 bp, Artificial Sequence
  Synthetic oligonucleotide; TTG chr11 5203819 5203840 5203836 5203841 +
gagaccaacctgggcaaaatgg

SEQ ID NO: 80180 - DNA, 22 bp, Artificial Sequence
  Synthetic oligonucleotide; CTG chr11 5203831 5203852 5203848 5203853 +
ggcaaaatggtgaaaccctgtc

SEQ ID NO: 80181 - DNA, 22 bp, Artificial Sequence
  Synthetic oligonucleotide; CTG chr11 5203851 5203872 5203868 5203873 +
tctctactaaaacacaaaaata

SEQ ID NO: 80182 - DNA, 22 bp, Artificial Sequence
  Synthetic oligonucleotide; CTC chr11 5203855 5203876 5203872 5203877 +
tactaaaacacaaaaataatta

SEQ ID NO: 80183 - DNA, 22 bp, Artificial Sequence
  Synthetic oligonucleotide; CTA chr11 5203857 5203878 5203874 5203879 +
ctaaaacacaaaaataattagc

SEQ ID NO: 80184 - DNA, 22 bp, Artificial Sequence
  Synthetic oligonucleotide; CTA chr11 5203860 5203881 5203877 5203882 +
aaacacaaaaataattagctgg

SEQ ID NO: 80185 - DNA, 22 bp, Artificial Sequence
  Synthetic oligonucleotide; TTA chr11 5203877 5203898 5203894 5203899 +
gctgggcatggcagtgtgctcc

SEQ ID NO: 80186 - DNA, 22 bp, Artificial Sequence
  Synthetic oligonucleotide; CTG chr11 5203881 5203902 5203898 5203903 +
ggcatggcagtgtgctcctgta

SEQ ID NO: 80187 - DNA, 22 bp, Artificial Sequence
  Synthetic oligonucleotide; CTC chr11 5203898 5203919 5203915 5203920 +
ctgtaatcccagttacttggga

SEQ ID NO: 80188 - DNA, 22 bp, Artificial Sequence
  Synthetic oligonucleotide; CTG chr11 5203901 5203922 5203918 5203923 +
taatcccagttacttgggagac

SEQ ID NO: 80189 - DNA, 22 bp, Artificial Sequence
  Synthetic oligonucleotide; TTA chr11 5203913 5203934 5203930 5203935 +
cttgggagactgaggcaggaga

SEQ ID NO: 80190 - DNA, 22 bp, Artificial Sequence
  Synthetic oligonucleotide; CTT chr11 5203916 5203937 5203933 5203938 +
gggagactgaggcaggagaatt

SEQ ID NO: 80191 - DNA, 22 bp, Artificial Sequence
  Synthetic oligonucleotide; TTG chr11 5203917 5203938 5203934 5203939 +
ggagactgaggcaggagaattg

SEQ ID NO: 80192 - DNA, 22 bp, Artificial Sequence
  Synthetic oligonucleotide; CTG chr11 5203925 5203946 5203942 5203947 +
aggcaggagaattgcttgatcc

SEQ ID NO: 80193 - DNA, 22 bp, Artificial Sequence
  Synthetic oligonucleotide; TTG chr11 5203939 5203960 5203956 5203961 +
cttgatcctgggaggtggaagt

SEQ ID NO: 80194 - DNA, 22 bp, Artificial Sequence
  Synthetic oligonucleotide; CTT chr11 5203942 5203963 5203959 5203964 +
gatcctgggaggtggaagttgc

SEQ ID NO: 80195 - DNA, 22 bp, Artificial Sequence
  Synthetic oligonucleotide; TTG chr11 5203943 5203964 5203960 5203965 +
atcctgggaggtggaagttgca

SEQ ID NO: 80196 - DNA, 22 bp, Artificial Sequence
  Synthetic oligonucleotide; CTG chr11 5203949 5203970 5203966 5203971 +
ggaggtggaagttgcagtgagc

SEQ ID NO: 80197 - DNA, 22 bp, Artificial Sequence
  Synthetic oligonucleotide; TTG chr11 5203963 5203984 5203980 5203985 +
cagtgagccgagatcgcgccat

SEQ ID NO: 80198 - DNA, 22 bp, Artificial Sequence
  Synthetic oligonucleotide; TTG chr11 5203987 5204008 5204004 5204009 +
cactccagtctgggcgacagag

SEQ ID NO: 80199 - DNA, 22 bp, Artificial Sequence
  Synthetic oligonucleotide; CTC chr11 5203992 5204013 5204009 5204014 +
cagtctgggcgacagagcaaga

SEQ ID NO: 80200 - DNA, 22 bp, Artificial Sequence
  Synthetic oligonucleotide; CTG chr11 5203999 5204020 5204016 5204021 +
ggcgacagagcaagactctgtc

SEQ ID NO: 80201 - DNA, 22 bp, Artificial Sequence
  Synthetic oligonucleotide; CTC chr11 5204017 5204038 5204034 5204039 +
tgtcccaaaggaaaaaaaaaat

SEQ ID NO: 80202 - DNA, 22 bp, Artificial Sequence
  Synthetic oligonucleotide; CTG chr11 5204019 5204040 5204036 5204041 +
tcccaaaggaaaaaaaaaatct

SEQ ID NO: 80203 - DNA, 22 bp, Artificial Sequence
  Synthetic oligonucleotide; CTA chr11 5204042 5204063 5204059 5204064 +
ttttcatgcaggtttcttcaga

SEQ ID NO: 80204 - DNA, 22 bp, Artificial Sequence
  Synthetic oligonucleotide; TTT chr11 5204045 5204066 5204062 5204067 +
tcatgcaggtttcttcagactg

SEQ ID NO: 80205 - DNA, 22 bp, Artificial Sequence
  Synthetic oligonucleotide; TTT chr11 5204046 5204067 5204063 5204068 +
catgcaggtttcttcagactga

SEQ ID NO: 80206 - DNA, 22 bp, Artificial Sequence
  Synthetic oligonucleotide; TTC chr11 5204047 5204068 5204064 5204069 +
atgcaggtttcttcagactgac

SEQ ID NO: 80207 - DNA, 22 bp, Artificial Sequence
  Synthetic oligonucleotide; TTT chr11 5204057 5204078 5204074 5204079 +
cttcagactgactacaaaggct

SEQ ID NO: 80208 - DNA, 22 bp, Artificial Sequence
  Synthetic oligonucleotide; TTC chr11 5204058 5204079 5204075 5204080 +
ttcagactgactacaaaggctt

SEQ ID NO: 80209 - DNA, 22 bp, Artificial Sequence
  Synthetic oligonucleotide; CTT chr11 5204060 5204081 5204077 5204082 +
cagactgactacaaaggcttca

SEQ ID NO: 80210 - DNA, 22 bp, Artificial Sequence
  Synthetic oligonucleotide; TTC chr11 5204061 5204082 5204078 5204083 +
agactgactacaaaggcttcag

SEQ ID NO: 80211 - DNA, 22 bp, Artificial Sequence
  Synthetic oligonucleotide; CTG chr11 5204067 5204088 5204084 5204089 +
actacaaaggcttcagactagc

SEQ ID NO: 80212 - DNA, 22 bp, Artificial Sequence
  Synthetic oligonucleotide; CTA chr11 5204071 5204092 5204088 5204093 +
caaaggcttcagactagctaca

SEQ ID NO: 80213 - DNA, 22 bp, Artificial Sequence
  Synthetic oligonucleotide; CTT chr11 5204080 5204101 5204097 5204102 +
cagactagctacaaagcttaaa

SEQ ID NO: 80214 - DNA, 22 bp, Artificial Sequence
  Synthetic oligonucleotide; TTC chr11 5204081 5204102 5204098 5204103 +
agactagctacaaagcttaaaa

SEQ ID NO: 80215 - DNA, 22 bp, Artificial Sequence
  Synthetic oligonucleotide; CTA chr11 5204087 5204108 5204104 5204109 +
gctacaaagcttaaaaatctac

SEQ ID NO: 80216 - DNA, 22 bp, Artificial Sequence
  Synthetic oligonucleotide; CTA chr11 5204091 5204112 5204108 5204113 +
caaagcttaaaaatctactttc

SEQ ID NO: 80217 - DNA, 22 bp, Artificial Sequence
  Synthetic oligonucleotide; CTT chr11 5204099 5204120 5204116 5204121 +
aaaaatctactttcattcaggc

SEQ ID NO: 80218 - DNA, 22 bp, Artificial Sequence
  Synthetic oligonucleotide; TTA chr11 5204100 5204121 5204117 5204122 +
aaaatctactttcattcaggct

SEQ ID NO: 80219 - DNA, 22 bp, Artificial Sequence
  Synthetic oligonucleotide; CTA chr11 5204108 5204129 5204125 5204130 +
ctttcattcaggcttcttcaga

SEQ ID NO: 80220 - DNA, 22 bp, Artificial Sequence
  Synthetic oligonucleotide; CTT chr11 5204111 5204132 5204128 5204133 +
tcattcaggcttcttcagacta

SEQ ID NO: 80221 - DNA, 22 bp, Artificial Sequence
  Synthetic oligonucleotide; TTT chr11 5204112 5204133 5204129 5204134 +
cattcaggcttcttcagactag

SEQ ID NO: 80222 - DNA, 22 bp, Artificial Sequence
  Synthetic oligonucleotide; TTC chr11 5204113 5204134 5204130 5204135 +
attcaggcttcttcagactaga

SEQ ID NO: 80223 - DNA, 22 bp, Artificial Sequence
  Synthetic oligonucleotide; TTC chr11 5204117 5204138 5204134 5204139 +
aggcttcttcagactagataca

SEQ ID NO: 80224 - DNA, 22 bp, Artificial Sequence
  Synthetic oligonucleotide; CTT chr11 5204123 5204144 5204140 5204145 +
cttcagactagatacagaagaa

SEQ ID NO: 80225 - DNA, 22 bp, Artificial Sequence
  Synthetic oligonucleotide; TTC chr11 5204124 5204145 5204141 5204146 +
ttcagactagatacagaagaaa

SEQ ID NO: 80226 - DNA, 22 bp, Artificial Sequence
  Synthetic oligonucleotide; CTT chr11 5204126 5204147 5204143 5204148 +
cagactagatacagaagaaatg

SEQ ID NO: 80227 - DNA, 22 bp, Artificial Sequence
  Synthetic oligonucleotide; TTC chr11 5204127 5204148 5204144 5204149 +
agactagatacagaagaaatga

SEQ ID NO: 80228 - DNA, 22 bp, Artificial Sequence
  Synthetic oligonucleotide; CTA chr11 5204133 5204154 5204150 5204155 +
gatacagaagaaatgagaccat

SEQ ID NO: 80229 - DNA, 22 bp, Artificial Sequence
  Synthetic oligonucleotide; CTA chr11 5204158 5204179 5204175 5204180 +
gatggggaacagtattatccat

SEQ ID NO: 80230 - DNA, 22 bp, Artificial Sequence
  Synthetic oligonucleotide; TTA chr11 5204175 5204196 5204192 5204197 +
tccatgttgccaccatagagac

SEQ ID NO: 80231 - DNA, 22 bp, Artificial Sequence
  Synthetic oligonucleotide; TTG chr11 5204184 5204205 5204201 5204206 +
ccaccatagagactatcagcct

SEQ ID NO: 80232 - DNA, 22 bp, Artificial Sequence
  Synthetic oligonucleotide; CTA chr11 5204199 5204220 5204216 5204221 +
tcagccttttgggattaccaga

SEQ ID NO: 80233 - DNA, 22 bp, Artificial Sequence
  Synthetic oligonucleotide; CTT chr11 5204207 5204228 5204224 5204229 +
ttgggattaccagagcaaaata

SEQ ID NO: 80234 - DNA, 22 bp, Artificial Sequence
  Synthetic oligonucleotide; TTT chr11 5204208 5204229 5204225 5204230 +
tgggattaccagagcaaaatac

SEQ ID NO: 80235 - DNA, 22 bp, Artificial Sequence
  Synthetic oligonucleotide; TTT chr11 5204209 5204230 5204226 5204231 +
gggattaccagagcaaaataca

SEQ ID NO: 80236 - DNA, 22 bp, Artificial Sequence
  Synthetic oligonucleotide; TTG chr11 5204210 5204231 5204227 5204232 +
ggattaccagagcaaaatacat

SEQ ID NO: 80237 - DNA, 22 bp, Artificial Sequence
  Synthetic oligonucleotide; TTA chr11 5204216 5204237 5204233 5204238 +
ccagagcaaaatacatgttgga

SEQ ID NO: 80238 - DNA, 22 bp, Artificial Sequence
  Synthetic oligonucleotide; TTG chr11 5204236 5204257 5204253 5204258 +
gaggattttttaaaatatgttt

SEQ ID NO: 80239 - DNA, 22 bp, Artificial Sequence
  Synthetic oligonucleotide; TTT chr11 5204244 5204265 5204261 5204266 +
tttaaaatatgttttgaaaggt

SEQ ID NO: 80240 - DNA, 22 bp, Artificial Sequence
  Synthetic oligonucleotide; TTT chr11 5204245 5204266 5204262 5204267 +
ttaaaatatgttttgaaaggta

SEQ ID NO: 80241 - DNA, 22 bp, Artificial Sequence
  Synthetic oligonucleotide; TTT chr11 5204246 5204267 5204263 5204268 +
taaaatatgttttgaaaggtag

SEQ ID NO: 80242 - DNA, 22 bp, Artificial Sequence
  Synthetic oligonucleotide; TTT chr11 5204247 5204268 5204264 5204269 +
aaaatatgttttgaaaggtagg

SEQ ID NO: 80243 - DNA, 22 bp, Artificial Sequence
  Synthetic oligonucleotide; TTA chr11 5204248 5204269 5204265 5204270 +
aaatatgttttgaaaggtagga

SEQ ID NO: 80244 - DNA, 22 bp, Artificial Sequence
  Synthetic oligonucleotide; TTT chr11 5204258 5204279 5204275 5204280 +
tgaaaggtaggatgaaagagca

SEQ ID NO: 80245 - DNA, 22 bp, Artificial Sequence
  Synthetic oligonucleotide; TTT chr11 5204259 5204280 5204276 5204281 +
gaaaggtaggatgaaagagcat

SEQ ID NO: 80246 - DNA, 22 bp, Artificial Sequence
  Synthetic oligonucleotide; TTG chr11 5204260 5204281 5204277 5204282 +
aaaggtaggatgaaagagcata

SEQ ID NO: 80247 - DNA, 22 bp, Artificial Sequence
  Synthetic oligonucleotide; TTT chr11 5204286 5204307 5204303 5204308 +
tgataaggtaaataaatgaaga

SEQ ID NO: 80248 - DNA, 22 bp, Artificial Sequence
  Synthetic oligonucleotide; TTT chr11 5204287 5204308 5204304 5204309 +
gataaggtaaataaatgaagat

SEQ ID NO: 80249 - DNA, 22 bp, Artificial Sequence
  Synthetic oligonucleotide; TTG chr11 5204288 5204309 5204305 5204310 +
ataaggtaaataaatgaagatt

SEQ ID NO: 80250 - DNA, 22 bp, Artificial Sequence
  Synthetic oligonucleotide; TTT chr11 5204311 5204332 5204328 5204333 +
aaagaaaaacaagatcaatatg

SEQ ID NO: 80251 - DNA, 22 bp, Artificial Sequence
  Synthetic oligonucleotide; TTA chr11 5204312 5204333 5204329 5204334 +
aagaaaaacaagatcaatatgt

SEQ ID NO: 80252 - DNA, 22 bp, Artificial Sequence
  Synthetic oligonucleotide; CTC chr11 5204352 5204373 5204369 5204374 +
cacctgtatttaaaaaacaaaa

SEQ ID NO: 80253 - DNA, 22 bp, Artificial Sequence
  Synthetic oligonucleotide; CTG chr11 5204358 5204379 5204375 5204380 +
tatttaaaaaacaaaaagattt

SEQ ID NO: 80254 - DNA, 22 bp, Artificial Sequence
  Synthetic oligonucleotide; TTT chr11 5204363 5204384 5204380 5204385 +
aaaaaacaaaaagatttacagt

SEQ ID NO: 80255 - DNA, 22 bp, Artificial Sequence
  Synthetic oligonucleotide; TTA chr11 5204364 5204385 5204381 5204386 +
aaaaacaaaaagatttacagtt

SEQ ID NO: 80256 - DNA, 22 bp, Artificial Sequence
  Synthetic oligonucleotide; TTT chr11 5204380 5204401 5204397 5204402 +
acagttttccaagacatcatgt

SEQ ID NO: 80257 - DNA, 22 bp, Artificial Sequence
  Synthetic oligonucleotide; TTA chr11 5204381 5204402 5204398 5204403 +
cagttttccaagacatcatgtt

SEQ ID NO: 80258 - DNA, 22 bp, Artificial Sequence
  Synthetic oligonucleotide; TTT chr11 5204387 5204408 5204404 5204409 +
tccaagacatcatgttgtgtta

SEQ ID NO: 80259 - DNA, 22 bp, Artificial Sequence
  Synthetic oligonucleotide; TTT chr11 5204388 5204409 5204405 5204410 +
ccaagacatcatgttgtgttat

SEQ ID NO: 80260 - DNA, 22 bp, Artificial Sequence
  Synthetic oligonucleotide; TTC chr11 5204389 5204410 5204406 5204411 +
caagacatcatgttgtgttatg

SEQ ID NO: 80261 - DNA, 22 bp, Artificial Sequence
  Synthetic oligonucleotide; TTG chr11 5204404 5204425 5204421 5204426 +
tgttatgctatctgagagtcag

SEQ ID NO: 80262 - DNA, 22 bp, Artificial Sequence
  Synthetic oligonucleotide; TTA chr11 5204409 5204430 5204426 5204431 +
tgctatctgagagtcagtgtat

SEQ ID NO: 80263 - DNA, 22 bp, Artificial Sequence
  Synthetic oligonucleotide; CTA chr11 5204414 5204435 5204431 5204436 +
tctgagagtcagtgtatggtat

SEQ ID NO: 80264 - DNA, 22 bp, Artificial Sequence
  Synthetic oligonucleotide; CTG chr11 5204418 5204439 5204435 5204440 +
agagtcagtgtatggtatctca

SEQ ID NO: 80265 - DNA, 22 bp, Artificial Sequence
  Synthetic oligonucleotide; CTC chr11 5204439 5204460 5204456 5204461 +
agtctgagttcccagcaaccag

SEQ ID NO: 80266 - DNA, 22 bp, Artificial Sequence
  Synthetic oligonucleotide; CTG chr11 5204445 5204466 5204462 5204467 +
agttcccagcaaccagaacaat

SEQ ID NO: 80267 - DNA, 22 bp, Artificial Sequence
  Synthetic oligonucleotide; TTC chr11 5204450 5204471 5204467 5204472 +
ccagcaaccagaacaatgccta

SEQ ID NO: 80268 - DNA, 22 bp, Artificial Sequence
  Synthetic oligonucleotide; CTA chr11 5204472 5204493 5204489 5204494 +
taataaaataaatagagaagac

SEQ ID NO: 80269 - DNA, 22 bp, Artificial Sequence
  Synthetic oligonucleotide; TTT chr11 5204510 5204531 5204527 5204532 +
gagtctggagaaataaaagggt

SEQ ID NO: 80270 - DNA, 22 bp, Artificial Sequence
  Synthetic oligonucleotide; TTG chr11 5204511 5204532 5204528 5204533 +
agtctggagaaataaaagggtt

SEQ ID NO: 80271 - DNA, 22 bp, Artificial Sequence
  Synthetic oligonucleotide; CTG chr11 5204517 5204538 5204534 5204539 +
gagaaataaaagggttttcgta

SEQ ID NO: 80272 - DNA, 22 bp, Artificial Sequence
  Synthetic oligonucleotide; TTT chr11 5204534 5204555 5204551 5204556 +
tcgtatcccctctgagcactgt

SEQ ID NO: 80273 - DNA, 22 bp, Artificial Sequence
  Synthetic oligonucleotide; TTT chr11 5204535 5204556 5204552 5204557 +
cgtatcccctctgagcactgtc

SEQ ID NO: 80274 - DNA, 22 bp, Artificial Sequence
  Synthetic oligonucleotide; TTC chr11 5204536 5204557 5204553 5204558 +
gtatcccctctgagcactgtct

SEQ ID NO: 80275 - DNA, 22 bp, Artificial Sequence
  Synthetic oligonucleotide; CTC chr11 5204546 5204567 5204563 5204568 +
tgagcactgtctggaatgttga

SEQ ID NO: 80276 - DNA, 22 bp, Artificial Sequence
  Synthetic oligonucleotide; CTG chr11 5204548 5204569 5204565 5204570 +
agcactgtctggaatgttgact

SEQ ID NO: 80277 - DNA, 22 bp, Artificial Sequence
  Synthetic oligonucleotide; CTG chr11 5204555 5204576 5204572 5204577 +
tctggaatgttgacttggaaag

SEQ ID NO: 80278 - DNA, 22 bp, Artificial Sequence
  Synthetic oligonucleotide; CTG chr11 5204559 5204580 5204576 5204581 +
gaatgttgacttggaaagcaaa

SEQ ID NO: 80279 - DNA, 22 bp, Artificial Sequence
  Synthetic oligonucleotide; TTG chr11 5204567 5204588 5204584 5204589 +
acttggaaagcaaatctgtgat

SEQ ID NO: 80280 - DNA, 22 bp, Artificial Sequence
  Synthetic oligonucleotide; CTT chr11 5204571 5204592 5204588 5204593 +
ggaaagcaaatctgtgattata

SEQ ID NO: 80281 - DNA, 22 bp, Artificial Sequence
  Synthetic oligonucleotide; TTG chr11 5204572 5204593 5204589 5204594 +
gaaagcaaatctgtgattataa

SEQ ID NO: 80282 - DNA, 22 bp, Artificial Sequence
  Synthetic oligonucleotide; CTG chr11 5204585 5204606 5204602 5204607 +
tgattataataaccaggtcatt

SEQ ID NO: 80283 - DNA, 22 bp, Artificial Sequence
  Synthetic oligonucleotide; TTA chr11 5204591 5204612 5204608 5204613 +
taataaccaggtcattctttca

SEQ ID NO: 80284 - DNA, 22 bp, Artificial Sequence
  Synthetic oligonucleotide; TTC chr11 5204608 5204629 5204625 5204630 +
tttcaggagtcttttctgatgc

SEQ ID NO: 80285 - DNA, 22 bp, Artificial Sequence
  Synthetic oligonucleotide; CTT chr11 5204610 5204631 5204627 5204632 +
tcaggagtcttttctgatgccc

SEQ ID NO: 80286 - DNA, 22 bp, Artificial Sequence
  Synthetic oligonucleotide; TTT chr11 5204611 5204632 5204628 5204633 +
caggagtcttttctgatgccct

SEQ ID NO: 80287 - DNA, 22 bp, Artificial Sequence
  Synthetic oligonucleotide; TTC chr11 5204612 5204633 5204629 5204634 +
aggagtcttttctgatgccctc

SEQ ID NO: 80288 - DNA, 22 bp, Artificial Sequence
  Synthetic oligonucleotide; CTT chr11 5204621 5204642 5204638 5204643 +
ttctgatgccctctgattaaaa

SEQ ID NO: 80289 - DNA, 22 bp, Artificial Sequence
  Synthetic oligonucleotide; TTT chr11 5204622 5204643 5204639 5204644 +
tctgatgccctctgattaaaac

SEQ ID NO: 80290 - DNA, 22 bp, Artificial Sequence
  Synthetic oligonucleotide; TTT chr11 5204623 5204644 5204640 5204645 +
ctgatgccctctgattaaaact

SEQ ID NO: 80291 - DNA, 22 bp, Artificial Sequence
  Synthetic oligonucleotide; TTC chr11 5204624 5204645 5204641 5204646 +
tgatgccctctgattaaaactg

SEQ ID NO: 80292 - DNA, 22 bp, Artificial Sequence
  Synthetic oligonucleotide; CTG chr11 5204626 5204647 5204643 5204648 +
atgccctctgattaaaactgac

SEQ ID NO: 80293 - DNA, 22 bp, Artificial Sequence
  Synthetic oligonucleotide; CTC chr11 5204634 5204655 5204651 5204656 +
tgattaaaactgacctacatat

SEQ ID NO: 80294 - DNA, 22 bp, Artificial Sequence
  Synthetic oligonucleotide; CTG chr11 5204636 5204657 5204653 5204658 +
attaaaactgacctacatatgc

SEQ ID NO: 80295 - DNA, 22 bp, Artificial Sequence
  Synthetic oligonucleotide; TTA chr11 5204640 5204661 5204657 5204662 +
aaactgacctacatatgcagaa

SEQ ID NO: 80296 - DNA, 22 bp, Artificial Sequence
  Synthetic oligonucleotide; CTG chr11 5204646 5204667 5204663 5204668 +
acctacatatgcagaaatctct

SEQ ID NO: 80297 - DNA, 22 bp, Artificial Sequence
  Synthetic oligonucleotide; CTA chr11 5204651 5204672 5204668 5204673 +
catatgcagaaatctcttggtt

SEQ ID NO: 80298 - DNA, 22 bp, Artificial Sequence
  Synthetic oligonucleotide; CTC chr11 5204667 5204688 5204684 5204689 +
ttggttttttttttttttctgt

SEQ ID NO: 80299 - DNA, 22 bp, Artificial Sequence
  Synthetic oligonucleotide; CTT chr11 5204669 5204690 5204686 5204691 +
ggttttttttttttttctgtct

SEQ ID NO: 80300 - DNA, 22 bp, Artificial Sequence
  Synthetic oligonucleotide; TTG chr11 5204670 5204691 5204687 5204692 +
gttttttttttttttctgtctt

SEQ ID NO: 80301 - DNA, 22 bp, Artificial Sequence
  Synthetic oligonucleotide; TTT chr11 5204674 5204695 5204691 5204696 +
tttttttttttctgtcttttca

SEQ ID NO: 80302 - DNA, 22 bp, Artificial Sequence
  Synthetic oligonucleotide; TTT chr11 5204675 5204696 5204692 5204697 +
ttttttttttctgtcttttcag

SEQ ID NO: 80303 - DNA, 22 bp, Artificial Sequence
  Synthetic oligonucleotide; TTT chr11 5204676 5204697 5204693 5204698 +
tttttttttctgtcttttcaga

SEQ ID NO: 80304 - DNA, 22 bp, Artificial Sequence
  Synthetic oligonucleotide; TTT chr11 5204677 5204698 5204694 5204699 +
ttttttttctgtcttttcagaa

SEQ ID NO: 80305 - DNA, 22 bp, Artificial Sequence
  Synthetic oligonucleotide; TTT chr11 5204678 5204699 5204695 5204700 +
tttttttctgtcttttcagaat

SEQ ID NO: 80306 - DNA, 22 bp, Artificial Sequence
  Synthetic oligonucleotide; TTT chr11 5204679 5204700 5204696 5204701 +
ttttttctgtcttttcagaata

SEQ ID NO: 80307 - DNA, 22 bp, Artificial Sequence
  Synthetic oligonucleotide; TTT chr11 5204680 5204701 5204697 5204702 +
tttttctgtcttttcagaataa

SEQ ID NO: 80308 - DNA, 22 bp, Artificial Sequence
  Synthetic oligonucleotide; TTT chr11 5204681 5204702 5204698 5204703 +
ttttctgtcttttcagaataat

SEQ ID NO: 80309 - DNA, 22 bp, Artificial Sequence
  Synthetic oligonucleotide; TTT chr11 5204682 5204703 5204699 5204704 +
tttctgtcttttcagaataatt

SEQ ID NO: 80310 - DNA, 22 bp, Artificial Sequence
  Synthetic oligonucleotide; TTT chr11 5204683 5204704 5204700 5204705 +
ttctgtcttttcagaataattc

SEQ ID NO: 80311 - DNA, 22 bp, Artificial Sequence
  Synthetic oligonucleotide; TTT chr11 5204684 5204705 5204701 5204706 +
tctgtcttttcagaataattcc

SEQ ID NO: 80312 - DNA, 22 bp, Artificial Sequence
  Synthetic oligonucleotide; TTT chr11 5204685 5204706 5204702 5204707 +
ctgtcttttcagaataattccc

SEQ ID NO: 80313 - DNA, 22 bp, Artificial Sequence
  Synthetic oligonucleotide; TTC chr11 5204686 5204707 5204703 5204708 +
tgtcttttcagaataattccct

SEQ ID NO: 80314 - DNA, 22 bp, Artificial Sequence
  Synthetic oligonucleotide; CTG chr11 5204688 5204709 5204705 5204710 +
tcttttcagaataattccctgt

SEQ ID NO: 80315 - DNA, 22 bp, Artificial Sequence
  Synthetic oligonucleotide; CTT chr11 5204692 5204713 5204709 5204714 +
ttcagaataattccctgtgtga

SEQ ID NO: 80316 - DNA, 22 bp, Artificial Sequence
  Synthetic oligonucleotide; TTT chr11 5204693 5204714 5204710 5204715 +
tcagaataattccctgtgtgat

SEQ ID NO: 80317 - DNA, 22 bp, Artificial Sequence
  Synthetic oligonucleotide; TTT chr11 5204694 5204715 5204711 5204716 +
cagaataattccctgtgtgatt

SEQ ID NO: 80318 - DNA, 22 bp, Artificial Sequence
  Synthetic oligonucleotide; TTC chr11 5204695 5204716 5204712 5204717 +
agaataattccctgtgtgatta

SEQ ID NO: 80319 - DNA, 22 bp, Artificial Sequence
  Synthetic oligonucleotide; TTC chr11 5204705 5204726 5204722 5204727 +
cctgtgtgattacttgcttact

SEQ ID NO: 80320 - DNA, 22 bp, Artificial Sequence
  Synthetic oligonucleotide; CTG chr11 5204709 5204730 5204726 5204731 +
tgtgattacttgcttactttaa

SEQ ID NO: 80321 - DNA, 22 bp, Artificial Sequence
  Synthetic oligonucleotide; TTA chr11 5204717 5204738 5204734 5204739 +
cttgcttactttaaaatagggt

SEQ ID NO: 80322 - DNA, 22 bp, Artificial Sequence
  Synthetic oligonucleotide; CTT chr11 5204720 5204741 5204737 5204742 +
gcttactttaaaatagggtaat

SEQ ID NO: 80323 - DNA, 22 bp, Artificial Sequence
  Synthetic oligonucleotide; TTG chr11 5204721 5204742 5204738 5204743 +
cttactttaaaatagggtaatg

SEQ ID NO: 80324 - DNA, 22 bp, Artificial Sequence
  Synthetic oligonucleotide; CTT chr11 5204724 5204745 5204741 5204746 +
actttaaaatagggtaatgacc

SEQ ID NO: 80325 - DNA, 22 bp, Artificial Sequence
  Synthetic oligonucleotide; TTA chr11 5204725 5204746 5204742 5204747 +
ctttaaaatagggtaatgacca

SEQ ID NO: 80326 - DNA, 22 bp, Artificial Sequence
  Synthetic oligonucleotide; CTT chr11 5204728 5204749 5204745 5204750 +
taaaatagggtaatgaccaata

SEQ ID NO: 80327 - DNA, 22 bp, Artificial Sequence
  Synthetic oligonucleotide; TTT chr11 5204729 5204750 5204746 5204751 +
aaaatagggtaatgaccaatag

SEQ ID NO: 80328 - DNA, 22 bp, Artificial Sequence
  Synthetic oligonucleotide; TTA chr11 5204730 5204751 5204747 5204752 +
aaatagggtaatgaccaatagt

SEQ ID NO: 80329 - DNA, 22 bp, Artificial Sequence
  Synthetic oligonucleotide; TTG chr11 5204757 5204778 5204774 5204779 +
ttccaaagacatagagaaagta

SEQ ID NO: 80330 - DNA, 22 bp, Artificial Sequence
  Synthetic oligonucleotide; TTC chr11 5204760 5204781 5204777 5204782 +
caaagacatagagaaagtatat

SEQ ID NO: 80331 - DNA, 22 bp, Artificial Sequence
  Synthetic oligonucleotide; TTG chr11 5204784 5204805 5204801 5204806 +
tgtttaaaagacagcttcttta

SEQ ID NO: 80332 - DNA, 22 bp, Artificial Sequence
  Synthetic oligonucleotide; TTT chr11 5204789 5204810 5204806 5204811 +
aaaagacagcttctttataatt

SEQ ID NO: 80333 - DNA, 22 bp, Artificial Sequence
  Synthetic oligonucleotide; TTA chr11 5204790 5204811 5204807 5204812 +
aaagacagcttctttataattc

SEQ ID NO: 80334 - DNA, 22 bp, Artificial Sequence
  Synthetic oligonucleotide; CTT chr11 5204801 5204822 5204818 5204823 +
ctttataattctatagaactaa

SEQ ID NO: 80335 - DNA, 22 bp, Artificial Sequence
  Synthetic oligonucleotide; TTC chr11 5204802 5204823 5204819 5204824 +
tttataattctatagaactaaa

SEQ ID NO: 80336 - DNA, 22 bp, Artificial Sequence
  Synthetic oligonucleotide; CTT chr11 5204804 5204825 5204821 5204826 +
tataattctatagaactaaaac

SEQ ID NO: 80337 - DNA, 22 bp, Artificial Sequence
  Synthetic oligonucleotide; TTT chr11 5204805 5204826 5204822 5204827 +
ataattctatagaactaaaaca

SEQ ID NO: 80338 - DNA, 22 bp, Artificial Sequence
  Synthetic oligonucleotide; TTA chr11 5204806 5204827 5204823 5204828 +
taattctatagaactaaaacat

SEQ ID NO: 80339 - DNA, 22 bp, Artificial Sequence
  Synthetic oligonucleotide; TTC chr11 5204812 5204833 5204829 5204834 +
tatagaactaaaacattcctat

SEQ ID NO: 80340 - DNA, 22 bp, Artificial Sequence
  Synthetic oligonucleotide; CTA chr11 5204814 5204835 5204831 5204836 +
tagaactaaaacattcctattt

SEQ ID NO: 80341 - DNA, 22 bp, Artificial Sequence
  Synthetic oligonucleotide; CTA chr11 5204822 5204843 5204839 5204844 +
aaacattcctatttgccaaggc

SEQ ID NO: 80342 - DNA, 22 bp, Artificial Sequence
  Synthetic oligonucleotide; TTC chr11 5204830 5204851 5204847 5204852 +
ctatttgccaaggcagtggagt

SEQ ID NO: 80343 - DNA, 22 bp, Artificial Sequence
  Synthetic oligonucleotide; CTA chr11 5204833 5204854 5204850 5204855 +
tttgccaaggcagtggagtttt

SEQ ID NO: 80344 - DNA, 22 bp, Artificial Sequence
  Synthetic oligonucleotide; TTT chr11 5204836 5204857 5204853 5204858 +
gccaaggcagtggagtttttgc

SEQ ID NO: 80345 - DNA, 22 bp, Artificial Sequence
  Synthetic oligonucleotide; TTG chr11 5204837 5204858 5204854 5204859 +
ccaaggcagtggagtttttgct

SEQ ID NO: 80346 - DNA, 22 bp, Artificial Sequence
  Synthetic oligonucleotide; TTT chr11 5204854 5204875 5204871 5204876 +
ttgctgttcttagaacataatt

SEQ ID NO: 80347 - DNA, 22 bp, Artificial Sequence
  Synthetic oligonucleotide; TTT chr11 5204855 5204876 5204872 5204877 +
tgctgttcttagaacataatta

SEQ ID NO: 80348 - DNA, 22 bp, Artificial Sequence
  Synthetic oligonucleotide; TTT chr11 5204856 5204877 5204873 5204878 +
gctgttcttagaacataattac

SEQ ID NO: 80349 - DNA, 22 bp, Artificial Sequence
  Synthetic oligonucleotide; TTG chr11 5204857 5204878 5204874 5204879 +
ctgttcttagaacataattact

SEQ ID NO: 80350 - DNA, 22 bp, Artificial Sequence
  Synthetic oligonucleotide; CTG chr11 5204860 5204881 5204877 5204882 +
ttcttagaacataattactgaa

SEQ ID NO: 80351 - DNA, 22 bp, Artificial Sequence
  Synthetic oligonucleotide; TTC chr11 5204863 5204884 5204880 5204885 +
ttagaacataattactgaaaga

SEQ ID NO: 80352 - DNA, 22 bp, Artificial Sequence
  Synthetic oligonucleotide; CTT chr11 5204865 5204886 5204882 5204887 +
agaacataattactgaaagaca

SEQ ID NO: 80353 - DNA, 22 bp, Artificial Sequence
  Synthetic oligonucleotide; TTA chr11 5204866 5204887 5204883 5204888 +
gaacataattactgaaagacac

SEQ ID NO: 80354 - DNA, 22 bp, Artificial Sequence
  Synthetic oligonucleotide; TTA chr11 5204877 5204898 5204894 5204899 +
ctgaaagacacccacacatgtc

SEQ ID NO: 80355 - DNA, 22 bp, Artificial Sequence
  Synthetic oligonucleotide; CTG chr11 5204880 5204901 5204897 5204902 +
aaagacacccacacatgtcctg

SEQ ID NO: 80356 - DNA, 22 bp, Artificial Sequence
  Synthetic oligonucleotide; CTG chr11 5204902 5204923 5204919 5204924 +
ccttggacaaaaaattgtatgt

SEQ ID NO: 80357 - DNA, 22 bp, Artificial Sequence
  Synthetic oligonucleotide; CTT chr11 5204906 5204927 5204923 5204928 +
ggacaaaaaattgtatgtccat

SEQ ID NO: 80358 - DNA, 22 bp, Artificial Sequence
  Synthetic oligonucleotide; TTG chr11 5204907 5204928 5204924 5204929 +
gacaaaaaattgtatgtccatc

SEQ ID NO: 80359 - DNA, 22 bp, Artificial Sequence
  Synthetic oligonucleotide; TTG chr11 5204919 5204940 5204936 5204941 +
tatgtccatcctttaaaggtca

SEQ ID NO: 80360 - DNA, 22 bp, Artificial Sequence
  Synthetic oligonucleotide; CTT chr11 5204932 5204953 5204949 5204954 +
taaaggtcattcctttaatggt

SEQ ID NO: 80361 - DNA, 22 bp, Artificial Sequence
  Synthetic oligonucleotide; TTT chr11 5204933 5204954 5204950 5204955 +
aaaggtcattcctttaatggtc

SEQ ID NO: 80362 - DNA, 22 bp, Artificial Sequence
  Synthetic oligonucleotide; TTA chr11 5204934 5204955 5204951 5204956 +
aaggtcattcctttaatggtct

SEQ ID NO: 80363 - DNA, 22 bp, Artificial Sequence
  Synthetic oligonucleotide; TTC chr11 5204944 5204965 5204961 5204966 +
ctttaatggtcttttctggaca

SEQ ID NO: 80364 - DNA, 22 bp, Artificial Sequence
  Synthetic oligonucleotide; CTT chr11 5204947 5204968 5204964 5204969 +
taatggtcttttctggacacca

SEQ ID NO: 80365 - DNA, 22 bp, Artificial Sequence
  Synthetic oligonucleotide; TTT chr11 5204948 5204969 5204965 5204970 +
aatggtcttttctggacaccac

SEQ ID NO: 80366 - DNA, 22 bp, Artificial Sequence
  Synthetic oligonucleotide; TTA chr11 5204949 5204970 5204966 5204971 +
atggtcttttctggacaccact

SEQ ID NO: 80367 - DNA, 22 bp, Artificial Sequence
  Synthetic oligonucleotide; CTT chr11 5204957 5204978 5204974 5204979 +
ttctggacaccactaggggtca

SEQ ID NO: 80368 - DNA, 22 bp, Artificial Sequence
  Synthetic oligonucleotide; TTT chr11 5204958 5204979 5204975 5204980 +
tctggacaccactaggggtcag

SEQ ID NO: 80369 - DNA, 22 bp, Artificial Sequence
  Synthetic oligonucleotide; TTT chr11 5204959 5204980 5204976 5204981 +
ctggacaccactaggggtcaga

SEQ ID NO: 80370 - DNA, 22 bp, Artificial Sequence
  Synthetic oligonucleotide; TTC chr11 5204960 5204981 5204977 5204982 +
tggacaccactaggggtcagaa

SEQ ID NO: 80371 - DNA, 22 bp, Artificial Sequence
  Synthetic oligonucleotide; CTG chr11 5204962 5204983 5204979 5204984 +
gacaccactaggggtcagaagt

SEQ ID NO: 80372 - DNA, 22 bp, Artificial Sequence
  Synthetic oligonucleotide; CTA chr11 5204972 5204993 5204989 5204994 +
ggggtcagaagtagttcatcaa

SEQ ID NO: 80373 - DNA, 22 bp, Artificial Sequence
  Synthetic oligonucleotide; TTC chr11 5204989 5205010 5205006 5205011 +
atcaaactttcttccctcccta

SEQ ID NO: 80374 - DNA, 22 bp, Artificial Sequence
  Synthetic oligonucleotide; CTT chr11 5204998 5205019 5205015 5205020 +
tcttccctccctacttcagtga

SEQ ID NO: 80375 - DNA, 22 bp, Artificial Sequence
  Synthetic oligonucleotide; TTT chr11 5204999 5205020 5205016 5205021 +
cttccctccctacttcagtgat

SEQ ID NO: 80376 - DNA, 22 bp, Artificial Sequence
  Synthetic oligonucleotide; TTC chr11 5205000 5205021 5205017 5205022 +
ttccctccctacttcagtgatg

SEQ ID NO: 80377 - DNA, 22 bp, Artificial Sequence
  Synthetic oligonucleotide; CTT chr11 5205002 5205023 5205019 5205024 +
ccctccctacttcagtgatgca

SEQ ID NO: 80378 - DNA, 22 bp, Artificial Sequence
  Synthetic oligonucleotide; TTC chr11 5205003 5205024 5205020 5205025 +
cctccctacttcagtgatgcat

SEQ ID NO: 80379 - DNA, 22 bp, Artificial Sequence
  Synthetic oligonucleotide; CTC chr11 5205007 5205028 5205024 5205029 +
cctacttcagtgatgcataagg

SEQ ID NO: 80380 - DNA, 22 bp, Artificial Sequence
  Synthetic oligonucleotide; CTA chr11 5205011 5205032 5205028 5205033 +
cttcagtgatgcataaggcaga

SEQ ID NO: 80381 - DNA, 22 bp, Artificial Sequence
  Synthetic oligonucleotide; CTT chr11 5205014 5205035 5205031 5205036 +
cagtgatgcataaggcagatct

SEQ ID NO: 80382 - DNA, 22 bp, Artificial Sequence
  Synthetic oligonucleotide; TTC chr11 5205015 5205036 5205032 5205037 +
agtgatgcataaggcagatctg

SEQ ID NO: 80383 - DNA, 22 bp, Artificial Sequence
  Synthetic oligonucleotide; CTG chr11 5205037 5205058 5205054 5205059 +
ctttagtgtaagcgaggtcagg

SEQ ID NO: 80384 - DNA, 22 bp, Artificial Sequence
  Synthetic oligonucleotide; CTT chr11 5205040 5205061 5205057 5205062 +
tagtgtaagcgaggtcaggccc

SEQ ID NO: 80385 - DNA, 22 bp, Artificial Sequence
  Synthetic oligonucleotide; TTT chr11 5205041 5205062 5205058 5205063 +
agtgtaagcgaggtcaggccct

SEQ ID NO: 80386 - DNA, 22 bp, Artificial Sequence
  Synthetic oligonucleotide; TTA chr11 5205042 5205063 5205059 5205064 +
gtgtaagcgaggtcaggccctc

SEQ ID NO: 80387 - DNA, 22 bp, Artificial Sequence
  Synthetic oligonucleotide; CTC chr11 5205064 5205085 5205081 5205086 +
aagagtcttgggatggctgaag

SEQ ID NO: 80388 - DNA, 22 bp, Artificial Sequence
  Synthetic oligonucleotide; CTT chr11 5205073 5205094 5205090 5205095 +
gggatggctgaagaggtaagaa

SEQ ID NO: 80389 - DNA, 22 bp, Artificial Sequence
  Synthetic oligonucleotide; TTG chr11 5205074 5205095 5205091 5205096 +
ggatggctgaagaggtaagaac

SEQ ID NO: 80390 - DNA, 22 bp, Artificial Sequence
  Synthetic oligonucleotide; CTG chr11 5205083 5205104 5205100 5205105 +
aagaggtaagaacattctataa

SEQ ID NO: 80391 - DNA, 22 bp, Artificial Sequence
  Synthetic oligonucleotide; TTC chr11 5205100 5205121 5205117 5205122 +
tataagacttgtccaaagaact

SEQ ID NO: 80392 - DNA, 22 bp, Artificial Sequence
  Synthetic oligonucleotide; CTA chr11 5205102 5205123 5205119 5205124 +
taagacttgtccaaagaactga

SEQ ID NO: 80393 - DNA, 22 bp, Artificial Sequence
  Synthetic oligonucleotide; CTT chr11 5205110 5205131 5205127 5205132 +
gtccaaagaactgactgtttaa

SEQ ID NO: 80394 - DNA, 22 bp, Artificial Sequence
  Synthetic oligonucleotide; TTG chr11 5205111 5205132 5205128 5205133 +
tccaaagaactgactgtttaat

SEQ ID NO: 80395 - DNA, 22 bp, Artificial Sequence
  Synthetic oligonucleotide; CTG chr11 5205123 5205144 5205140 5205145 +
actgtttaatgattctgaatat

SEQ ID NO: 80396 - DNA, 22 bp, Artificial Sequence
  Synthetic oligonucleotide; CTG chr11 5205127 5205148 5205144 5205149 +
tttaatgattctgaatatgcta

SEQ ID NO: 80397 - DNA, 22 bp, Artificial Sequence
  Synthetic oligonucleotide; TTT chr11 5205130 5205151 5205147 5205152 +
aatgattctgaatatgctagtt

SEQ ID NO: 80398 - DNA, 22 bp, Artificial Sequence
  Synthetic oligonucleotide; TTA chr11 5205131 5205152 5205148 5205153 +
atgattctgaatatgctagttc

SEQ ID NO: 80399 - DNA, 22 bp, Artificial Sequence
  Synthetic oligonucleotide; TTC chr11 5205138 5205159 5205155 5205160 +
tgaatatgctagttcagagaga

SEQ ID NO: 80400 - DNA, 22 bp, Artificial Sequence
  Synthetic oligonucleotide; CTG chr11 5205140 5205161 5205157 5205162 +
aatatgctagttcagagagaat

SEQ ID NO: 80401 - DNA, 22 bp, Artificial Sequence
  Synthetic oligonucleotide; CTA chr11 5205149 5205170 5205166 5205171 +
gttcagagagaatctatttacc

SEQ ID NO: 80402 - DNA, 22 bp, Artificial Sequence
  Synthetic oligonucleotide; TTC chr11 5205153 5205174 5205170 5205175 +
agagagaatctatttaccacaa

SEQ ID NO: 80403 - DNA, 22 bp, Artificial Sequence
  Synthetic oligonucleotide; CTA chr11 5205165 5205186 5205182 5205187 +
tttaccacaaacctgaagtagg

SEQ ID NO: 80404 - DNA, 22 bp, Artificial Sequence
  Synthetic oligonucleotide; TTT chr11 5205168 5205189 5205185 5205190 +
accacaaacctgaagtaggctt

SEQ ID NO: 80405 - DNA, 22 bp, Artificial Sequence
  Synthetic oligonucleotide; TTA chr11 5205169 5205190 5205186 5205191 +
ccacaaacctgaagtaggctta

SEQ ID NO: 80406 - DNA, 22 bp, Artificial Sequence
  Synthetic oligonucleotide; CTG chr11 5205180 5205201 5205197 5205202 +
aagtaggcttaaatttccagtt

SEQ ID NO: 80407 - DNA, 22 bp, Artificial Sequence
  Synthetic oligonucleotide; CTT chr11 5205190 5205211 5205207 5205212 +
aaatttccagtttacctgaatg

SEQ ID NO: 80408 - DNA, 22 bp, Artificial Sequence
  Synthetic oligonucleotide; TTA chr11 5205191 5205212 5205208 5205213 +
aatttccagtttacctgaatgg

SEQ ID NO: 80409 - DNA, 22 bp, Artificial Sequence
  Synthetic oligonucleotide; TTT chr11 5205196 5205217 5205213 5205218 +
ccagtttacctgaatggttatg

SEQ ID NO: 80410 - DNA, 22 bp, Artificial Sequence
  Synthetic oligonucleotide; TTC chr11 5205197 5205218 5205214 5205219 +
cagtttacctgaatggttatga

SEQ ID NO: 80411 - DNA, 22 bp, Artificial Sequence
  Synthetic oligonucleotide; TTT chr11 5205203 5205224 5205220 5205225 +
acctgaatggttatgacctaat

SEQ ID NO: 80412 - DNA, 22 bp, Artificial Sequence
  Synthetic oligonucleotide; TTA chr11 5205204 5205225 5205221 5205226 +
cctgaatggttatgacctaatt

SEQ ID NO: 80413 - DNA, 22 bp, Artificial Sequence
  Synthetic oligonucleotide; CTG chr11 5205208 5205229 5205225 5205230 +
aatggttatgacctaattagag

SEQ ID NO: 80414 - DNA, 22 bp, Artificial Sequence
  Synthetic oligonucleotide; TTA chr11 5205216 5205237 5205233 5205238 +
tgacctaattagaggaatgact

SEQ ID NO: 80415 - DNA, 22 bp, Artificial Sequence
  Synthetic oligonucleotide; CTA chr11 5205223 5205244 5205240 5205245 +
attagaggaatgactttataaa

SEQ ID NO: 80416 - DNA, 22 bp, Artificial Sequence
  Synthetic oligonucleotide; TTA chr11 5205227 5205248 5205244 5205249 +
gaggaatgactttataaacata

SEQ ID NO: 80417 - DNA, 22 bp, Artificial Sequence
  Synthetic oligonucleotide; CTT chr11 5205239 5205260 5205256 5205261 +
tataaacatatatagatacaaa

SEQ ID NO: 80418 - DNA, 22 bp, Artificial Sequence
  Synthetic oligonucleotide; TTT chr11 5205240 5205261 5205257 5205262 +
ataaacatatatagatacaaat

SEQ ID NO: 80419 - DNA, 22 bp, Artificial Sequence
  Synthetic oligonucleotide; TTA chr11 5205241 5205262 5205258 5205263 +
taaacatatatagatacaaata

SEQ ID NO: 80420 - DNA, 22 bp, Artificial Sequence
  Synthetic oligonucleotide; TTT chr11 5205277 5205298 5205294 5205299 +
attatatactatatatttatta

SEQ ID NO: 80421 - DNA, 22 bp, Artificial Sequence
  Synthetic oligonucleotide; TTA chr11 5205278 5205299 5205295 5205300 +
ttatatactatatatttattat

SEQ ID NO: 80422 - DNA, 22 bp, Artificial Sequence
  Synthetic oligonucleotide; TTA chr11 5205281 5205302 5205298 5205303 +
tatactatatatttattatata

SEQ ID NO: 80423 - DNA, 22 bp, Artificial Sequence
  Synthetic oligonucleotide; CTA chr11 5205288 5205309 5205305 5205310 +
tatatttattatatattatata

SEQ ID NO: 80424 - DNA, 22 bp, Artificial Sequence
  Synthetic oligonucleotide; TTT chr11 5205295 5205316 5205312 5205317 +
attatatattatataagcataa

SEQ ID NO: 80425 - DNA, 22 bp, Artificial Sequence
  Synthetic oligonucleotide; TTA chr11 5205296 5205317 5205313 5205318 +
ttatatattatataagcataaa

SEQ ID NO: 80426 - DNA, 22 bp, Artificial Sequence
  Synthetic oligonucleotide; TTA chr11 5205299 5205320 5205316 5205321 +
tatattatataagcataaaatg

SEQ ID NO: 80427 - DNA, 22 bp, Artificial Sequence
  Synthetic oligonucleotide; TTA chr11 5205306 5205327 5205323 5205328 +
tataagcataaaatgtaataga

SEQ ID NO: 80428 - DNA, 22 bp, Artificial Sequence
  Synthetic oligonucleotide; TTA chr11 5205331 5205352 5205348 5205353 +
ttgtatatatttaataacatat

SEQ ID NO: 80429 - DNA, 22 bp, Artificial Sequence
  Synthetic oligonucleotide; TTG chr11 5205334 5205355 5205351 5205356 +
tatatatttaataacatattat

SEQ ID NO: 80430 - DNA, 22 bp, Artificial Sequence
  Synthetic oligonucleotide; TTT chr11 5205343 5205364 5205360 5205365 +
aataacatattattacatattt

SEQ ID NO: 80431 - DNA, 22 bp, Artificial Sequence
  Synthetic oligonucleotide; TTA chr11 5205344 5205365 5205361 5205366 +
ataacatattattacatatttt

SEQ ID NO: 80432 - DNA, 22 bp, Artificial Sequence
  Synthetic oligonucleotide; TTA chr11 5205355 5205376 5205372 5205377 +
ttacatattttaatatataata

SEQ ID NO: 80433 - DNA, 22 bp, Artificial Sequence
  Synthetic oligonucleotide; TTA chr11 5205358 5205379 5205375 5205380 +
catattttaatatataatatat

SEQ ID NO: 80434 - DNA, 22 bp, Artificial Sequence
  Synthetic oligonucleotide; TTT chr11 5205365 5205386 5205382 5205387 +
taatatataatatataaaatgt

SEQ ID NO: 80435 - DNA, 22 bp, Artificial Sequence
  Synthetic oligonucleotide; TTT chr11 5205366 5205387 5205383 5205388 +
aatatataatatataaaatgta

SEQ ID NO: 80436 - DNA, 22 bp, Artificial Sequence
  Synthetic oligonucleotide; TTA chr11 5205367 5205388 5205384 5205389 +
atatataatatataaaatgtat

SEQ ID NO: 80437 - DNA, 22 bp, Artificial Sequence
  Synthetic oligonucleotide; TTA chr11 5205391 5205412 5205408 5205413 +
tatttaatatataatgcatgta

SEQ ID NO: 80438 - DNA, 22 bp, Artificial Sequence
  Synthetic oligonucleotide; TTT chr11 5205396 5205417 5205413 5205418 +
aatatataatgcatgtaatata

SEQ ID NO: 80439 - DNA, 22 bp, Artificial Sequence
  Synthetic oligonucleotide; TTA chr11 5205397 5205418 5205414 5205419 +
atatataatgcatgtaatatat

SEQ ID NO: 80440 - DNA, 22 bp, Artificial Sequence
  Synthetic oligonucleotide; TTA chr11 5205431 5205452 5205448 5205453 +
tatattatatattatgtaataa

SEQ ID NO: 80441 - DNA, 22 bp, Artificial Sequence
  Synthetic oligonucleotide; TTA chr11 5205438 5205459 5205455 5205460 +
tatattatgtaataaatatata

SEQ ID NO: 80442 - DNA, 22 bp, Artificial Sequence
  Synthetic oligonucleotide; TTA chr11 5205445 5205466 5205462 5205467 +
tgtaataaatatatattatgta

SEQ ID NO: 80443 - DNA, 22 bp, Artificial Sequence
  Synthetic oligonucleotide; TTA chr11 5205463 5205484 5205480 5205485 +
tgtatatacacatttatctaga

SEQ ID NO: 80444 - DNA, 22 bp, Artificial Sequence
  Synthetic oligonucleotide; TTT chr11 5205478 5205499 5205495 5205500 +
atctagactttattacatattt

SEQ ID NO: 80445 - DNA, 22 bp, Artificial Sequence
  Synthetic oligonucleotide; TTA chr11 5205479 5205500 5205496 5205501 +
tctagactttattacatatttc

SEQ ID NO: 80446 - DNA, 22 bp, Artificial Sequence
  Synthetic oligonucleotide; CTA chr11 5205483 5205504 5205500 5205505 +
gactttattacatatttcatta

SEQ ID NO: 80447 - DNA, 22 bp, Artificial Sequence
  Synthetic oligonucleotide; CTT chr11 5205488 5205509 5205505 5205510 +
tattacatatttcattatatat

SEQ ID NO: 80448 - DNA, 22 bp, Artificial Sequence
  Synthetic oligonucleotide; TTT chr11 5205489 5205510 5205506 5205511 +
attacatatttcattatatatt

SEQ ID NO: 80449 - DNA, 22 bp, Artificial Sequence
  Synthetic oligonucleotide; TTA chr11 5205490 5205511 5205507 5205512 +
ttacatatttcattatatattt

SEQ ID NO: 80450 - DNA, 22 bp, Artificial Sequence
  Synthetic oligonucleotide; TTA chr11 5205493 5205514 5205510 5205515 +
catatttcattatatattttat

SEQ ID NO: 80451 - DNA, 22 bp, Artificial Sequence
  Synthetic oligonucleotide; TTT chr11 5205500 5205521 5205517 5205522 +
cattatatattttataagattt

SEQ ID NO: 80452 - DNA, 22 bp, Artificial Sequence
  Synthetic oligonucleotide; TTC chr11 5205501 5205522 5205518 5205523 +
attatatattttataagatttc

SEQ ID NO: 80453 - DNA, 22 bp, Artificial Sequence
  Synthetic oligonucleotide; TTA chr11 5205505 5205526 5205522 5205527 +
tatattttataagatttctata

SEQ ID NO: 80454 - DNA, 22 bp, Artificial Sequence
  Synthetic oligonucleotide; TTT chr11 5205512 5205533 5205529 5205534 +
tataagatttctataaataata

SEQ ID NO: 80455 - DNA, 22 bp, Artificial Sequence
  Synthetic oligonucleotide; TTT chr11 5205513 5205534 5205530 5205535 +
ataagatttctataaataatat

SEQ ID NO: 80456 - DNA, 22 bp, Artificial Sequence
  Synthetic oligonucleotide; TTA chr11 5205514 5205535 5205531 5205536 +
taagatttctataaataatatt

SEQ ID NO: 80457 - DNA, 22 bp, Artificial Sequence
  Synthetic oligonucleotide; TTT chr11 5205522 5205543 5205539 5205544 +
ctataaataatattcccatcat

SEQ ID NO: 80458 - DNA, 22 bp, Artificial Sequence
  Synthetic oligonucleotide; TTC chr11 5205523 5205544 5205540 5205545 +
tataaataatattcccatcatt

SEQ ID NO: 80459 - DNA, 22 bp, Artificial Sequence
  Synthetic oligonucleotide; CTA chr11 5205525 5205546 5205542 5205547 +
taaataatattcccatcattac

SEQ ID NO: 80460 - DNA, 22 bp, Artificial Sequence
  Synthetic oligonucleotide; TTC chr11 5205537 5205558 5205554 5205559 +
ccatcattactaaaatattttt

SEQ ID NO: 80461 - DNA, 22 bp, Artificial Sequence
  Synthetic oligonucleotide; TTA chr11 5205546 5205567 5205563 5205568 +
ctaaaatattttttaaaaatta

SEQ ID NO: 80462 - DNA, 22 bp, Artificial Sequence
  Synthetic oligonucleotide; CTA chr11 5205549 5205570 5205566 5205571 +
aaatattttttaaaaattagcc

SEQ ID NO: 80463 - DNA, 22 bp, Artificial Sequence
  Synthetic oligonucleotide; TTT chr11 5205557 5205578 5205574 5205579 +
tttaaaaattagccatacctta

SEQ ID NO: 80464 - DNA, 22 bp, Artificial Sequence
  Synthetic oligonucleotide; TTT chr11 5205558 5205579 5205575 5205580 +
ttaaaaattagccataccttag

SEQ ID NO: 80465 - DNA, 22 bp, Artificial Sequence
  Synthetic oligonucleotide; TTT chr11 5205559 5205580 5205576 5205581 +
taaaaattagccataccttaga

SEQ ID NO: 80466 - DNA, 22 bp, Artificial Sequence
  Synthetic oligonucleotide; TTT chr11 5205560 5205581 5205577 5205582 +
aaaaattagccataccttagaa

SEQ ID NO: 80467 - DNA, 22 bp, Artificial Sequence
  Synthetic oligonucleotide; TTA chr11 5205561 5205582 5205578 5205583 +
aaaattagccataccttagaag

SEQ ID NO: 80468 - DNA, 22 bp, Artificial Sequence
  Synthetic oligonucleotide; TTA chr11 5205568 5205589 5205585 5205590 +
gccataccttagaagcattata

SEQ ID NO: 80469 - DNA, 22 bp, Artificial Sequence
  Synthetic oligonucleotide; CTT chr11 5205578 5205599 5205595 5205600 +
agaagcattataaaaaatatat

SEQ ID NO: 80470 - DNA, 22 bp, Artificial Sequence
  Synthetic oligonucleotide; TTA chr11 5205579 5205600 5205596 5205601 +
gaagcattataaaaaatatatg

SEQ ID NO: 80471 - DNA, 22 bp, Artificial Sequence
  Synthetic oligonucleotide; TTA chr11 5205588 5205609 5205605 5205610 +
taaaaaatatatgacatggtcc

SEQ ID NO: 80472 - DNA, 22 bp, Artificial Sequence
  Synthetic oligonucleotide; CTG chr11 5205615 5205636 5205632 5205637 +
ttcaactgtagccatctaacca

SEQ ID NO: 80473 - DNA, 22 bp, Artificial Sequence
  Synthetic oligonucleotide; TTC chr11 5205618 5205639 5205635 5205640 +
aactgtagccatctaaccattt

SEQ ID NO: 80474 - DNA, 22 bp, Artificial Sequence
  Synthetic oligonucleotide; CTG chr11 5205623 5205644 5205640 5205645 +
tagccatctaaccatttgagaa

SEQ ID NO: 80475 - DNA, 22 bp, Artificial Sequence
  Synthetic oligonucleotide; CTA chr11 5205633 5205654 5205650 5205655 +
accatttgagaagtttttataa

SEQ ID NO: 80476 - DNA, 22 bp, Artificial Sequence
  Synthetic oligonucleotide; TTT chr11 5205640 5205661 5205657 5205662 +
gagaagtttttataagatttat

SEQ ID NO: 80477 - DNA, 22 bp, Artificial Sequence
  Synthetic oligonucleotide; TTG chr11 5205641 5205662 5205658 5205663 +
agaagtttttataagatttata

SEQ ID NO: 80478 - DNA, 22 bp, Artificial Sequence
  Synthetic oligonucleotide; TTT chr11 5205649 5205670 5205666 5205671 +
ttataagatttatagcatttga

SEQ ID NO: 80479 - DNA, 22 bp, Artificial Sequence
  Synthetic oligonucleotide; TTT chr11 5205650 5205671 5205667 5205672 +
tataagatttatagcatttgat

SEQ ID NO: 80480 - DNA, 22 bp, Artificial Sequence
  Synthetic oligonucleotide; TTT chr11 5205651 5205672 5205668 5205673 +
ataagatttatagcatttgatt

SEQ ID NO: 80481 - DNA, 22 bp, Artificial Sequence
  Synthetic oligonucleotide; TTA chr11 5205652 5205673 5205669 5205674 +
taagatttatagcatttgattg

SEQ ID NO: 80482 - DNA, 22 bp, Artificial Sequence
  Synthetic oligonucleotide; TTT chr11 5205660 5205681 5205677 5205682 +
atagcatttgattgtaccatga

SEQ ID NO: 80483 - DNA, 22 bp, Artificial Sequence
  Synthetic oligonucleotide; TTA chr11 5205661 5205682 5205678 5205683 +
tagcatttgattgtaccatgac

SEQ ID NO: 80484 - DNA, 22 bp, Artificial Sequence
  Synthetic oligonucleotide; TTT chr11 5205669 5205690 5205686 5205691 +
gattgtaccatgacataaatca

SEQ ID NO: 80485 - DNA, 22 bp, Artificial Sequence
  Synthetic oligonucleotide; TTG chr11 5205670 5205691 5205687 5205692 +
attgtaccatgacataaatcat

SEQ ID NO: 80486 - DNA, 22 bp, Artificial Sequence
  Synthetic oligonucleotide; TTG chr11 5205674 5205695 5205691 5205696 +
taccatgacataaatcatctca

SEQ ID NO: 80487 - DNA, 22 bp, Artificial Sequence
  Synthetic oligonucleotide; CTC chr11 5205695 5205716 5205712 5205717 +
atgcaagatagtgtatttgttt

SEQ ID NO: 80488 - DNA, 22 bp, Artificial Sequence
  Synthetic oligonucleotide; TTT chr11 5205713 5205734 5205730 5205735 +
gttttgttggctttaatatgtt

SEQ ID NO: 80489 - DNA, 22 bp, Artificial Sequence
  Synthetic oligonucleotide; TTG chr11 5205714 5205735 5205731 5205736 +
ttttgttggctttaatatgttc

SEQ ID NO: 80490 - DNA, 22 bp, Artificial Sequence
  Synthetic oligonucleotide; TTT chr11 5205717 5205738 5205734 5205739 +
tgttggctttaatatgttccct

SEQ ID NO: 80491 - DNA, 22 bp, Artificial Sequence
  Synthetic oligonucleotide; TTT chr11 5205718 5205739 5205735 5205740 +
gttggctttaatatgttccctt

SEQ ID NO: 80492 - DNA, 22 bp, Artificial Sequence
  Synthetic oligonucleotide; TTG chr11 5205719 5205740 5205736 5205741 +
ttggctttaatatgttcccttt

SEQ ID NO: 80493 - DNA, 22 bp, Artificial Sequence
  Synthetic oligonucleotide; TTG chr11 5205722 5205743 5205739 5205744 +
gctttaatatgttcccttttct

SEQ ID NO: 80494 - DNA, 22 bp, Artificial Sequence
  Synthetic oligonucleotide; CTT chr11 5205726 5205747 5205743 5205748 +
taatatgttcccttttcttcag

SEQ ID NO: 80495 - DNA, 22 bp, Artificial Sequence
  Synthetic oligonucleotide; TTT chr11 5205727 5205748 5205744 5205749 +
aatatgttcccttttcttcaga

SEQ ID NO: 80496 - DNA, 22 bp, Artificial Sequence
  Synthetic oligonucleotide; TTA chr11 5205728 5205749 5205745 5205750 +
atatgttcccttttcttcagaa

SEQ ID NO: 80497 - DNA, 22 bp, Artificial Sequence
  Synthetic oligonucleotide; TTC chr11 5205736 5205757 5205753 5205758 +
ccttttcttcagaaaatgtgag

SEQ ID NO: 80498 - DNA, 22 bp, Artificial Sequence
  Synthetic oligonucleotide; CTT chr11 5205740 5205761 5205757 5205762 +
ttcttcagaaaatgtgagacag

SEQ ID NO: 80499 - DNA, 22 bp, Artificial Sequence
  Synthetic oligonucleotide; TTT chr11 5205741 5205762 5205758 5205763 +
tcttcagaaaatgtgagacagc

SEQ ID NO: 80500 - DNA, 22 bp, Artificial Sequence
  Synthetic oligonucleotide; TTT chr11 5205742 5205763 5205759 5205764 +
cttcagaaaatgtgagacagct

SEQ ID NO: 80501 - DNA, 22 bp, Artificial Sequence
  Synthetic oligonucleotide; TTC chr11 5205743 5205764 5205760 5205765 +
ttcagaaaatgtgagacagctt

SEQ ID NO: 80502 - DNA, 22 bp, Artificial Sequence
  Synthetic oligonucleotide; CTT chr11 5205745 5205766 5205762 5205767 +
cagaaaatgtgagacagcttaa

SEQ ID NO: 80503 - DNA, 22 bp, Artificial Sequence
  Synthetic oligonucleotide; TTC chr11 5205746 5205767 5205763 5205768 +
agaaaatgtgagacagcttaaa

SEQ ID NO: 80504 - DNA, 22 bp, Artificial Sequence
  Synthetic oligonucleotide; CTT chr11 5205765 5205786 5205782 5205787 +
aaaataaaattaactataagaa

SEQ ID NO: 80505 - DNA, 22 bp, Artificial Sequence
  Synthetic oligonucleotide; TTA chr11 5205766 5205787 5205783 5205788 +
aaataaaattaactataagaaa

SEQ ID NO: 80506 - DNA, 22 bp, Artificial Sequence
  Synthetic oligonucleotide; TTA chr11 5205777 5205798 5205794 5205799 +
actataagaaactggtaaacac

SEQ ID NO: 80507 - DNA, 22 bp, Artificial Sequence
  Synthetic oligonucleotide; CTA chr11 5205781 5205802 5205798 5205803 +
taagaaactggtaaacactgaa

SEQ ID NO: 80508 - DNA, 22 bp, Artificial Sequence
  Synthetic oligonucleotide; CTG chr11 5205791 5205812 5205808 5205813 +
gtaaacactgaatgaaagaaga

SEQ ID NO: 80509 - DNA, 22 bp, Artificial Sequence
  Synthetic oligonucleotide; CTG chr11 5205801 5205822 5205818 5205823 +
aatgaaagaagaaaaccaagca

SEQ ID NO: 80510 - DNA, 22 bp, Artificial Sequence
  Synthetic oligonucleotide; TTA chr11 5205842 5205863 5205859 5205864 +
caaataaatttatattttaaaa

SEQ ID NO: 80511 - DNA, 22 bp, Artificial Sequence
  Synthetic oligonucleotide; TTT chr11 5205853 5205874 5205870 5205875 +
atattttaaaaacattttttat

SEQ ID NO: 80512 - DNA, 22 bp, Artificial Sequence
  Synthetic oligonucleotide; TTA chr11 5205854 5205875 5205871 5205876 +
tattttaaaaacattttttatt

SEQ ID NO: 80513 - DNA, 22 bp, Artificial Sequence
  Synthetic oligonucleotide; TTT chr11 5205859 5205880 5205876 5205881 +
taaaaacattttttatttgcct

SEQ ID NO: 80514 - DNA, 22 bp, Artificial Sequence
  Synthetic oligonucleotide; TTT chr11 5205860 5205881 5205877 5205882 +
aaaaacattttttatttgcctg

SEQ ID NO: 80515 - DNA, 22 bp, Artificial Sequence
  Synthetic oligonucleotide; TTA chr11 5205861 5205882 5205878 5205883 +
aaaacattttttatttgcctgg

SEQ ID NO: 80516 - DNA, 22 bp, Artificial Sequence
  Synthetic oligonucleotide; TTT chr11 5205870 5205891 5205887 5205892 +
tttatttgcctggcaaataata

SEQ ID NO: 80517 - DNA, 22 bp, Artificial Sequence
  Synthetic oligonucleotide; TTT chr11 5205871 5205892 5205888 5205893 +
ttatttgcctggcaaataataa

SEQ ID NO: 80518 - DNA, 22 bp, Artificial Sequence
  Synthetic oligonucleotide; TTT chr11 5205872 5205893 5205889 5205894 +
tatttgcctggcaaataataag

SEQ ID NO: 80519 - DNA, 22 bp, Artificial Sequence
  Synthetic oligonucleotide; TTT chr11 5205873 5205894 5205890 5205895 +
atttgcctggcaaataataagt

SEQ ID NO: 80520 - DNA, 22 bp, Artificial Sequence
  Synthetic oligonucleotide; TTA chr11 5205874 5205895 5205891 5205896 +
tttgcctggcaaataataagtg

SEQ ID NO: 80521 - DNA, 22 bp, Artificial Sequence
  Synthetic oligonucleotide; TTT chr11 5205877 5205898 5205894 5205899 +
gcctggcaaataataagtgcat

SEQ ID NO: 80522 - DNA, 22 bp, Artificial Sequence
  Synthetic oligonucleotide; TTG chr11 5205878 5205899 5205895 5205900 +
cctggcaaataataagtgcata

SEQ ID NO: 80523 - DNA, 22 bp, Artificial Sequence
  Synthetic oligonucleotide; CTG chr11 5205882 5205903 5205899 5205904 +
gcaaataataagtgcatatatt

SEQ ID NO: 80524 - DNA, 22 bp, Artificial Sequence
  Synthetic oligonucleotide; TTA chr11 5205905 5205926 5205922 5205927 +
atggatacaataataatatata

SEQ ID NO: 80525 - DNA, 22 bp, Artificial Sequence
  Synthetic oligonucleotide; TTA chr11 5205957 5205978 5205974 5205979 +
tgggatacaatgtgatgtttga

SEQ ID NO: 80526 - DNA, 22 bp, Artificial Sequence
  Synthetic oligonucleotide; TTT chr11 5205977 5205998 5205994 5205999 +
gatctatatatacattgtagag

SEQ ID NO: 80527 - DNA, 22 bp, Artificial Sequence
  Synthetic oligonucleotide; TTG chr11 5205978 5205999 5205995 5206000 +
atctatatatacattgtagaga

SEQ ID NO: 80528 - DNA, 22 bp, Artificial Sequence
  Synthetic oligonucleotide; CTA chr11 5205983 5206004 5206000 5206005 +
tatatacattgtagagagagtc

SEQ ID NO: 80529 - DNA, 22 bp, Artificial Sequence
  Synthetic oligonucleotide; TTG chr11 5205994 5206015 5206011 5206016 +
tagagagagtctatcaagctaa

SEQ ID NO: 80530 - DNA, 22 bp, Artificial Sequence
  Synthetic oligonucleotide; CTA chr11 5206007 5206028 5206024 5206029 +
tcaagctaattagcatatgaat

SEQ ID NO: 80531 - DNA, 22 bp, Artificial Sequence
  Synthetic oligonucleotide; CTA chr11 5206015 5206036 5206032 5206037 +
attagcatatgaatcaccttcc

SEQ ID NO: 80532 - DNA, 22 bp, Artificial Sequence
  Synthetic oligonucleotide; TTA chr11 5206019 5206040 5206036 5206041 +
gcatatgaatcaccttccaact

SEQ ID NO: 80533 - DNA, 22 bp, Artificial Sequence
  Synthetic oligonucleotide; CTT chr11 5206035 5206056 5206052 5206057 +
ccaactttttttgtggtgagaa

SEQ ID NO: 80534 - DNA, 22 bp, Artificial Sequence
  Synthetic oligonucleotide; TTC chr11 5206036 5206057 5206053 5206058 +
caactttttttgtggtgagaac

SEQ ID NO: 80535 - DNA, 22 bp, Artificial Sequence
  Synthetic oligonucleotide; CTT chr11 5206042 5206063 5206059 5206064 +
tttttgtggtgagaacataaaa

SEQ ID NO: 80536 - DNA, 22 bp, Artificial Sequence
  Synthetic oligonucleotide; TTT chr11 5206043 5206064 5206060 5206065 +
ttttgtggtgagaacataaaat

SEQ ID NO: 80537 - DNA, 22 bp, Artificial Sequence
  Synthetic oligonucleotide; TTT chr11 5206044 5206065 5206061 5206066 +
tttgtggtgagaacataaaata

SEQ ID NO: 80538 - DNA, 22 bp, Artificial Sequence
  Synthetic oligonucleotide; TTT chr11 5206045 5206066 5206062 5206067 +
ttgtggtgagaacataaaatat

SEQ ID NO: 80539 - DNA, 22 bp, Artificial Sequence
  Synthetic oligonucleotide; TTT chr11 5206046 5206067 5206063 5206068 +
tgtggtgagaacataaaatatt

SEQ ID NO: 80540 - DNA, 22 bp, Artificial Sequence
  Synthetic oligonucleotide; TTT chr11 5206047 5206068 5206064 5206069 +
gtggtgagaacataaaatattt

SEQ ID NO: 80541 - DNA, 22 bp, Artificial Sequence
  Synthetic oligonucleotide; TTG chr11 5206048 5206069 5206065 5206070 +
tggtgagaacataaaatattta

SEQ ID NO: 80542 - DNA, 22 bp, Artificial Sequence
  Synthetic oligonucleotide; TTT chr11 5206069 5206090 5206086 5206091 +
attttttagcaatttttaattt

SEQ ID NO: 80543 - DNA, 22 bp, Artificial Sequence
  Synthetic oligonucleotide; TTA chr11 5206070 5206091 5206087 5206092 +
ttttttagcaatttttaattta

SEQ ID NO: 80544 - DNA, 22 bp, Artificial Sequence
  Synthetic oligonucleotide; TTT chr11 5206073 5206094 5206090 5206095 +
tttagcaatttttaatttaaat

SEQ ID NO: 80545 - DNA, 22 bp, Artificial Sequence
  Synthetic oligonucleotide; TTT chr11 5206074 5206095 5206091 5206096 +
ttagcaatttttaatttaaata

SEQ ID NO: 80546 - DNA, 22 bp, Artificial Sequence
  Synthetic oligonucleotide; TTT chr11 5206075 5206096 5206092 5206097 +
tagcaatttttaatttaaatac

SEQ ID NO: 80547 - DNA, 22 bp, Artificial Sequence
  Synthetic oligonucleotide; TTT chr11 5206076 5206097 5206093 5206098 +
agcaatttttaatttaaataca

SEQ ID NO: 80548 - DNA, 22 bp, Artificial Sequence
  Synthetic oligonucleotide; TTA chr11 5206077 5206098 5206094 5206099 +
gcaatttttaatttaaatacat

SEQ ID NO: 80549 - DNA, 22 bp, Artificial Sequence
  Synthetic oligonucleotide; TTT chr11 5206084 5206105 5206101 5206106 +
ttaatttaaatacataatatat

SEQ ID NO: 80550 - DNA, 22 bp, Artificial Sequence
  Synthetic oligonucleotide; TTT chr11 5206085 5206106 5206102 5206107 +
taatttaaatacataatatatt

SEQ ID NO: 80551 - DNA, 22 bp, Artificial Sequence
  Synthetic oligonucleotide; TTT chr11 5206086 5206107 5206103 5206108 +
aatttaaatacataatatatta

SEQ ID NO: 80552 - DNA, 22 bp, Artificial Sequence
  Synthetic oligonucleotide; TTA chr11 5206087 5206108 5206104 5206109 +
atttaaatacataatatattat

SEQ ID NO: 80553 - DNA, 22 bp, Artificial Sequence
  Synthetic oligonucleotide; TTT chr11 5206091 5206112 5206108 5206113 +
aaatacataatatattattaac

SEQ ID NO: 80554 - DNA, 22 bp, Artificial Sequence
  Synthetic oligonucleotide; TTA chr11 5206092 5206113 5206109 5206114 +
aatacataatatattattaact

SEQ ID NO: 80555 - DNA, 22 bp, Artificial Sequence
  Synthetic oligonucleotide; TTA chr11 5206108 5206129 5206125 5206130 +
ttaactgtgttcactatgcagt

SEQ ID NO: 80556 - DNA, 22 bp, Artificial Sequence
  Synthetic oligonucleotide; TTA chr11 5206111 5206132 5206128 5206133 +
actgtgttcactatgcagtgtg

SEQ ID NO: 80557 - DNA, 22 bp, Artificial Sequence
  Synthetic oligonucleotide; CTG chr11 5206115 5206136 5206132 5206137 +
tgttcactatgcagtgtgagag

SEQ ID NO: 80558 - DNA, 22 bp, Artificial Sequence
  Synthetic oligonucleotide; TTC chr11 5206120 5206141 5206137 5206142 +
actatgcagtgtgagagatcac

SEQ ID NO: 80559 - DNA, 22 bp, Artificial Sequence
  Synthetic oligonucleotide; CTA chr11 5206124 5206145 5206141 5206146 +
tgcagtgtgagagatcactaaa

SEQ ID NO: 80560 - DNA, 22 bp, Artificial Sequence
  Synthetic oligonucleotide; CTA chr11 5206144 5206165 5206161 5206166 +
aaacttattcctctagtctaac

SEQ ID NO: 80561 - DNA, 22 bp, Artificial Sequence
  Synthetic oligonucleotide; CTT chr11 5206150 5206171 5206167 5206172 +
attcctctagtctaactgaaga

SEQ ID NO: 80562 - DNA, 22 bp, Artificial Sequence
  Synthetic oligonucleotide; TTA chr11 5206151 5206172 5206168 5206173 +
ttcctctagtctaactgaagat

SEQ ID NO: 80563 - DNA, 22 bp, Artificial Sequence
  Synthetic oligonucleotide; TTC chr11 5206154 5206175 5206171 5206176 +
ctctagtctaactgaagatcaa

SEQ ID NO: 80564 - DNA, 22 bp, Artificial Sequence
  Synthetic oligonucleotide; CTC chr11 5206157 5206178 5206174 5206179 +
tagtctaactgaagatcaactt

SEQ ID NO: 80565 - DNA, 22 bp, Artificial Sequence
  Synthetic oligonucleotide; CTA chr11 5206159 5206180 5206176 5206181 +
gtctaactgaagatcaacttct

SEQ ID NO: 80566 - DNA, 22 bp, Artificial Sequence
  Synthetic oligonucleotide; CTA chr11 5206164 5206185 5206181 5206186 +
actgaagatcaacttctttccc

SEQ ID NO: 80567 - DNA, 22 bp, Artificial Sequence
  Synthetic oligonucleotide; CTG chr11 5206168 5206189 5206185 5206190 +
aagatcaacttctttcccttcc

SEQ ID NO: 80568 - DNA, 22 bp, Artificial Sequence
  Synthetic oligonucleotide; CTT chr11 5206179 5206200 5206196 5206201 +
ctttcccttcccatccctcctc

SEQ ID NO: 80569 - DNA, 22 bp, Artificial Sequence
  Synthetic oligonucleotide; TTC chr11 5206180 5206201 5206197 5206202 +
tttcccttcccatccctcctct

SEQ ID NO: 80570 - DNA, 22 bp, Artificial Sequence
  Synthetic oligonucleotide; CTT chr11 5206182 5206203 5206199 5206204 +
tcccttcccatccctcctctac

SEQ ID NO: 80571 - DNA, 22 bp, Artificial Sequence
  Synthetic oligonucleotide; TTT chr11 5206183 5206204 5206200 5206205 +
cccttcccatccctcctctaca

SEQ ID NO: 80572 - DNA, 22 bp, Artificial Sequence
  Synthetic oligonucleotide; TTC chr11 5206184 5206205 5206201 5206206 +
ccttcccatccctcctctacac

SEQ ID NO: 80573 - DNA, 22 bp, Artificial Sequence
  Synthetic oligonucleotide; CTT chr11 5206188 5206209 5206205 5206210 +
cccatccctcctctacactctc

SEQ ID NO: 80574 - DNA, 22 bp, Artificial Sequence
  Synthetic oligonucleotide; TTC chr11 5206189 5206210 5206206 5206211 +
ccatccctcctctacactctca

SEQ ID NO: 80575 - DNA, 22 bp, Artificial Sequence
  Synthetic oligonucleotide; CTC chr11 5206198 5206219 5206215 5206220 +
ctctacactctcagtcagccta

SEQ ID NO: 80576 - DNA, 22 bp, Artificial Sequence
  Synthetic oligonucleotide; CTC chr11 5206201 5206222 5206218 5206223 +
tacactctcagtcagcctatgg

SEQ ID NO: 80577 - DNA, 22 bp, Artificial Sequence
  Synthetic oligonucleotide; CTA chr11 5206203 5206224 5206220 5206225 +
cactctcagtcagcctatggaa

SEQ ID NO: 80578 - DNA, 22 bp, Artificial Sequence
  Synthetic oligonucleotide; CTC chr11 5206208 5206229 5206225 5206230 +
tcagtcagcctatggaaccatc

SEQ ID NO: 80579 - DNA, 22 bp, Artificial Sequence
  Synthetic oligonucleotide; CTC chr11 5206210 5206231 5206227 5206232 +
agtcagcctatggaaccatctt

SEQ ID NO: 80580 - DNA, 22 bp, Artificial Sequence
  Synthetic oligonucleotide; CTA chr11 5206220 5206241 5206237 5206242 +
tggaaccatctttctattcccg

SEQ ID NO: 80581 - DNA, 22 bp, Artificial Sequence
  Synthetic oligonucleotide; CTT chr11 5206232 5206253 5206249 5206254 +
tctattcccgtttttatgaaat

SEQ ID NO: 80582 - DNA, 22 bp, Artificial Sequence
  Synthetic oligonucleotide; TTT chr11 5206233 5206254 5206250 5206255 +
ctattcccgtttttatgaaatc

SEQ ID NO: 80583 - DNA, 22 bp, Artificial Sequence
  Synthetic oligonucleotide; TTC chr11 5206234 5206255 5206251 5206256 +
tattcccgtttttatgaaatca

SEQ ID NO: 80584 - DNA, 22 bp, Artificial Sequence
  Synthetic oligonucleotide; CTA chr11 5206236 5206257 5206253 5206258 +
ttcccgtttttatgaaatcaac

SEQ ID NO: 80585 - DNA, 22 bp, Artificial Sequence
  Synthetic oligonucleotide; TTC chr11 5206239 5206260 5206256 5206261 +
ccgtttttatgaaatcaacttt

SEQ ID NO: 80586 - DNA, 22 bp, Artificial Sequence
  Synthetic oligonucleotide; TTT chr11 5206245 5206266 5206262 5206267 +
ttatgaaatcaactttttaaaa

SEQ ID NO: 80587 - DNA, 22 bp, Artificial Sequence
  Synthetic oligonucleotide; TTT chr11 5206246 5206267 5206263 5206268 +
tatgaaatcaactttttaaaaa

SEQ ID NO: 80588 - DNA, 22 bp, Artificial Sequence
  Synthetic oligonucleotide; TTT chr11 5206247 5206268 5206264 5206269 +
atgaaatcaactttttaaaaaa

SEQ ID NO: 80589 - DNA, 22 bp, Artificial Sequence
  Synthetic oligonucleotide; TTA chr11 5206248 5206269 5206265 5206270 +
tgaaatcaactttttaaaaaat

SEQ ID NO: 80590 - DNA, 22 bp, Artificial Sequence
  Synthetic oligonucleotide; CTT chr11 5206260 5206281 5206277 5206282 +
tttaaaaaattcatccttaaat

SEQ ID NO: 80591 - DNA, 22 bp, Artificial Sequence
  Synthetic oligonucleotide; TTT chr11 5206261 5206282 5206278 5206283 +
ttaaaaaattcatccttaaata

SEQ ID NO: 80592 - DNA, 22 bp, Artificial Sequence
  Synthetic oligonucleotide; TTT chr11 5206262 5206283 5206279 5206284 +
taaaaaattcatccttaaatat

SEQ ID NO: 80593 - DNA, 22 bp, Artificial Sequence
  Synthetic oligonucleotide; TTT chr11 5206263 5206284 5206280 5206285 +
aaaaaattcatccttaaatata

SEQ ID NO: 80594 - DNA, 22 bp, Artificial Sequence
  Synthetic oligonucleotide; TTA chr11 5206264 5206285 5206281 5206286 +
aaaaattcatccttaaatatat

SEQ ID NO: 80595 - DNA, 22 bp, Artificial Sequence
  Synthetic oligonucleotide; TTC chr11 5206272 5206293 5206289 5206294 +
atccttaaatatattaaaatga

SEQ ID NO: 80596 - DNA, 22 bp, Artificial Sequence
  Synthetic oligonucleotide; CTT chr11 5206278 5206299 5206295 5206300 +
aaatatattaaaatgaacagtt

SEQ ID NO: 80597 - DNA, 22 bp, Artificial Sequence
  Synthetic oligonucleotide; TTA chr11 5206279 5206300 5206296 5206301 +
aatatattaaaatgaacagtta

SEQ ID NO: 80598 - DNA, 22 bp, Artificial Sequence
  Synthetic oligonucleotide; TTA chr11 5206288 5206309 5206305 5206310 +
aaatgaacagttaaatttatga

SEQ ID NO: 80599 - DNA, 22 bp, Artificial Sequence
  Synthetic oligonucleotide; TTA chr11 5206301 5206322 5206318 5206323 +
aatttatgaggataaataatta

SEQ ID NO: 80600 - DNA, 22 bp, Artificial Sequence
  Synthetic oligonucleotide; TTT chr11 5206306 5206327 5206323 5206328 +
atgaggataaataattaaaact

SEQ ID NO: 80601 - DNA, 22 bp, Artificial Sequence
  Synthetic oligonucleotide; TTA chr11 5206307 5206328 5206324 5206329 +
tgaggataaataattaaaacta

SEQ ID NO: 80602 - DNA, 22 bp, Artificial Sequence
  Synthetic oligonucleotide; TTA chr11 5206323 5206344 5206340 5206345 +
aaactattacacatattttaag

SEQ ID NO: 80603 - DNA, 22 bp, Artificial Sequence
  Synthetic oligonucleotide; CTA chr11 5206329 5206350 5206346 5206351 +
ttacacatattttaagttgtcc

SEQ ID NO: 80604 - DNA, 22 bp, Artificial Sequence
  Synthetic oligonucleotide; TTA chr11 5206332 5206353 5206349 5206354 +
cacatattttaagttgtcctct

SEQ ID NO: 80605 - DNA, 22 bp, Artificial Sequence
  Synthetic oligonucleotide; TTT chr11 5206341 5206362 5206358 5206363 +
taagttgtcctctgaaaattct

SEQ ID NO: 80606 - DNA, 22 bp, Artificial Sequence
  Synthetic oligonucleotide; TTT chr11 5206342 5206363 5206359 5206364 +
aagttgtcctctgaaaattcta

SEQ ID NO: 80607 - DNA, 22 bp, Artificial Sequence
  Synthetic oligonucleotide; TTA chr11 5206343 5206364 5206360 5206365 +
agttgtcctctgaaaattctag

SEQ ID NO: 80608 - DNA, 22 bp, Artificial Sequence
  Synthetic oligonucleotide; TTG chr11 5206348 5206369 5206365 5206370 +
tcctctgaaaattctagaattc

SEQ ID NO: 80609 - DNA, 22 bp, Artificial Sequence
  Synthetic oligonucleotide; CTC chr11 5206353 5206374 5206370 5206375 +
tgaaaattctagaattctactt

SEQ ID NO: 80610 - DNA, 22 bp, Artificial Sequence
  Synthetic oligonucleotide; CTG chr11 5206355 5206376 5206372 5206377 +
aaaattctagaattctacttca

SEQ ID NO: 80611 - DNA, 22 bp, Artificial Sequence
  Synthetic oligonucleotide; TTC chr11 5206362 5206383 5206379 5206384 +
tagaattctacttcaataccct

SEQ ID NO: 80612 - DNA, 22 bp, Artificial Sequence
  Synthetic oligonucleotide; CTA chr11 5206364 5206385 5206381 5206386 +
gaattctacttcaataccctta

SEQ ID NO: 80613 - DNA, 22 bp, Artificial Sequence
  Synthetic oligonucleotide; TTC chr11 5206370 5206391 5206387 5206392 +
tacttcaatacccttattttta

SEQ ID NO: 80614 - DNA, 22 bp, Artificial Sequence
  Synthetic oligonucleotide; CTA chr11 5206372 5206393 5206389 5206394 +
cttcaatacccttatttttaag

SEQ ID NO: 80615 - DNA, 22 bp, Artificial Sequence
  Synthetic oligonucleotide; CTT chr11 5206375 5206396 5206392 5206397 +
caatacccttatttttaagata

SEQ ID NO: 80616 - DNA, 22 bp, Artificial Sequence
  Synthetic oligonucleotide; TTC chr11 5206376 5206397 5206393 5206398 +
aatacccttatttttaagataa

SEQ ID NO: 80617 - DNA, 22 bp, Artificial Sequence
  Synthetic oligonucleotide; CTT chr11 5206385 5206406 5206402 5206407 +
atttttaagataaaggaaattg

SEQ ID NO: 80618 - DNA, 22 bp, Artificial Sequence
  Synthetic oligonucleotide; TTA chr11 5206386 5206407 5206403 5206408 +
tttttaagataaaggaaattgt

SEQ ID NO: 80619 - DNA, 22 bp, Artificial Sequence
  Synthetic oligonucleotide; TTT chr11 5206389 5206410 5206406 5206411 +
ttaagataaaggaaattgtaaa

SEQ ID NO: 80620 - DNA, 22 bp, Artificial Sequence
  Synthetic oligonucleotide; TTT chr11 5206390 5206411 5206407 5206412 +
taagataaaggaaattgtaaag

SEQ ID NO: 80621 - DNA, 22 bp, Artificial Sequence
  Synthetic oligonucleotide; TTT chr11 5206391 5206412 5206408 5206413 +
aagataaaggaaattgtaaagg

SEQ ID NO: 80622 - DNA, 22 bp, Artificial Sequence
  Synthetic oligonucleotide; TTA chr11 5206392 5206413 5206409 5206414 +
agataaaggaaattgtaaaggc

SEQ ID NO: 80623 - DNA, 22 bp, Artificial Sequence
  Synthetic oligonucleotide; TTG chr11 5206407 5206428 5206424 5206429 +
taaaggctttctaagaaatcga

SEQ ID NO: 80624 - DNA, 22 bp, Artificial Sequence
  Synthetic oligonucleotide; CTT chr11 5206416 5206437 5206433 5206438 +
tctaagaaatcgagtacccata

SEQ ID NO: 80625 - DNA, 22 bp, Artificial Sequence
  Synthetic oligonucleotide; TTT chr11 5206417 5206438 5206434 5206439 +
ctaagaaatcgagtacccatac

SEQ ID NO: 80626 - DNA, 22 bp, Artificial Sequence
  Synthetic oligonucleotide; TTC chr11 5206418 5206439 5206435 5206440 +
taagaaatcgagtacccatacc

SEQ ID NO: 80627 - DNA, 22 bp, Artificial Sequence
  Synthetic oligonucleotide; CTA chr11 5206420 5206441 5206437 5206442 +
agaaatcgagtacccataccta

SEQ ID NO: 80628 - DNA, 22 bp, Artificial Sequence
  Synthetic oligonucleotide; CTA chr11 5206442 5206463 5206459 5206464 +
ggctgctagactccaggtccaa

SEQ ID NO: 80629 - DNA, 22 bp, Artificial Sequence
  Synthetic oligonucleotide; CTG chr11 5206447 5206468 5206464 5206469 +
ctagactccaggtccaattttt

SEQ ID NO: 80630 - DNA, 22 bp, Artificial Sequence
  Synthetic oligonucleotide; CTA chr11 5206450 5206471 5206467 5206472 +
gactccaggtccaatttttctc

SEQ ID NO: 80631 - DNA, 22 bp, Artificial Sequence
  Synthetic oligonucleotide; CTC chr11 5206455 5206476 5206472 5206477 +
caggtccaatttttctccaggg

SEQ ID NO: 80632 - DNA, 22 bp, Artificial Sequence
  Synthetic oligonucleotide; TTT chr11 5206467 5206488 5206484 5206489 +
ttctccagggggttactatggc

SEQ ID NO: 80633 - DNA, 22 bp, Artificial Sequence
  Synthetic oligonucleotide; TTT chr11 5206468 5206489 5206485 5206490 +
tctccagggggttactatggct

SEQ ID NO: 80634 - DNA, 22 bp, Artificial Sequence
  Synthetic oligonucleotide; TTT chr11 5206469 5206490 5206486 5206491 +
ctccagggggttactatggctt

SEQ ID NO: 80635 - DNA, 22 bp, Artificial Sequence
  Synthetic oligonucleotide; TTC chr11 5206470 5206491 5206487 5206492 +
tccagggggttactatggcttc

SEQ ID NO: 80636 - DNA, 22 bp, Artificial Sequence
  Synthetic oligonucleotide; CTC chr11 5206472 5206493 5206489 5206494 +
cagggggttactatggcttcag

SEQ ID NO: 80637 - DNA, 22 bp, Artificial Sequence
  Synthetic oligonucleotide; TTA chr11 5206482 5206503 5206499 5206504 +
ctatggcttcagggaagctatc

SEQ ID NO: 80638 - DNA, 22 bp, Artificial Sequence
  Synthetic oligonucleotide; CTA chr11 5206485 5206506 5206502 5206507 +
tggcttcagggaagctatctat

SEQ ID NO: 80639 - DNA, 22 bp, Artificial Sequence
  Synthetic oligonucleotide; CTT chr11 5206491 5206512 5206508 5206513 +
cagggaagctatctataatcac

SEQ ID NO: 80640 - DNA, 22 bp, Artificial Sequence
  Synthetic oligonucleotide; TTC chr11 5206492 5206513 5206509 5206514 +
agggaagctatctataatcacc

SEQ ID NO: 80641 - DNA, 22 bp, Artificial Sequence
  Synthetic oligonucleotide; CTA chr11 5206502 5206523 5206519 5206524 +
tctataatcaccatctccagaa

SEQ ID NO: 80642 - DNA, 22 bp, Artificial Sequence
  Synthetic oligonucleotide; CTA chr11 5206506 5206527 5206523 5206528 +
taatcaccatctccagaacatc

SEQ ID NO: 80643 - DNA, 22 bp, Artificial Sequence
  Synthetic oligonucleotide; CTC chr11 5206519 5206540 5206536 5206541 +
cagaacatctctcactttctca

SEQ ID NO: 80644 - DNA, 22 bp, Artificial Sequence
  Synthetic oligonucleotide; CTC chr11 5206530 5206551 5206547 5206552 +
tcactttctcatcaccacacag

SEQ ID NO: 80645 - DNA, 22 bp, Artificial Sequence
  Synthetic oligonucleotide; CTC chr11 5206532 5206553 5206549 5206554 +
actttctcatcaccacacagtg

SEQ ID NO: 80646 - DNA, 22 bp, Artificial Sequence
  Synthetic oligonucleotide; CTT chr11 5206536 5206557 5206553 5206558 +
tctcatcaccacacagtggaat

SEQ ID NO: 80647 - DNA, 22 bp, Artificial Sequence
  Synthetic oligonucleotide; TTT chr11 5206537 5206558 5206554 5206559 +
ctcatcaccacacagtggaata

SEQ ID NO: 80648 - DNA, 22 bp, Artificial Sequence
  Synthetic oligonucleotide; TTC chr11 5206538 5206559 5206555 5206560 +
tcatcaccacacagtggaataa

SEQ ID NO: 80649 - DNA, 22 bp, Artificial Sequence
  Synthetic oligonucleotide; CTC chr11 5206540 5206561 5206557 5206562 +
atcaccacacagtggaataaga

SEQ ID NO: 80650 - DNA, 22 bp, Artificial Sequence
  Synthetic oligonucleotide; TTT chr11 5206569 5206590 5206586 5206591 +
tggcagcaataaaaaagtaatg

SEQ ID NO: 80651 - DNA, 22 bp, Artificial Sequence
  Synthetic oligonucleotide; TTT chr11 5206570 5206591 5206587 5206592 +
ggcagcaataaaaaagtaatgc

SEQ ID NO: 80652 - DNA, 22 bp, Artificial Sequence
  Synthetic oligonucleotide; TTG chr11 5206571 5206592 5206588 5206593 +
gcagcaataaaaaagtaatgcc

SEQ ID NO: 80653 - DNA, 22 bp, Artificial Sequence
  Synthetic oligonucleotide; TTA chr11 5206604 5206625 5206621 5206626 +
gtaaagccttcagaaaaagtat

SEQ ID NO: 80654 - DNA, 22 bp, Artificial Sequence
  Synthetic oligonucleotide; CTT chr11 5206614 5206635 5206631 5206636 +
cagaaaaagtatgaatattaca

SEQ ID NO: 80655 - DNA, 22 bp, Artificial Sequence
  Synthetic oligonucleotide; TTC chr11 5206615 5206636 5206632 5206637 +
agaaaaagtatgaatattacac

SEQ ID NO: 80656 - DNA, 22 bp, Artificial Sequence
  Synthetic oligonucleotide; TTA chr11 5206634 5206655 5206651 5206656 +
cacagttacacttatattagaa

SEQ ID NO: 80657 - DNA, 22 bp, Artificial Sequence
  Synthetic oligonucleotide; TTA chr11 5206642 5206663 5206659 5206664 +
cacttatattagaactaaaatt

SEQ ID NO: 80658 - DNA, 22 bp, Artificial Sequence
  Synthetic oligonucleotide; CTT chr11 5206647 5206668 5206664 5206669 +
atattagaactaaaatttattt

SEQ ID NO: 80659 - DNA, 22 bp, Artificial Sequence
  Synthetic oligonucleotide; TTA chr11 5206648 5206669 5206665 5206670 +
tattagaactaaaatttattta

SEQ ID NO: 80660 - DNA, 22 bp, Artificial Sequence
  Synthetic oligonucleotide; TTA chr11 5206653 5206674 5206670 5206675 +
gaactaaaatttatttattgaa

SEQ ID NO: 80661 - DNA, 22 bp, Artificial Sequence
  Synthetic oligonucleotide; CTA chr11 5206659 5206680 5206676 5206681 +
aaatttatttattgaaattcac

SEQ ID NO: 80662 - DNA, 22 bp, Artificial Sequence
  Synthetic oligonucleotide; TTT chr11 5206665 5206686 5206682 5206687 +
atttattgaaattcacattacc

SEQ ID NO: 80663 - DNA, 22 bp, Artificial Sequence
  Synthetic oligonucleotide; TTA chr11 5206666 5206687 5206683 5206688 +
tttattgaaattcacattacca

SEQ ID NO: 80664 - DNA, 22 bp, Artificial Sequence
  Synthetic oligonucleotide; TTT chr11 5206669 5206690 5206686 5206691 +
attgaaattcacattaccataa

SEQ ID NO: 80665 - DNA, 22 bp, Artificial Sequence
  Synthetic oligonucleotide; TTA chr11 5206670 5206691 5206687 5206692 +
ttgaaattcacattaccataat

SEQ ID NO: 80666 - DNA, 22 bp, Artificial Sequence
  Synthetic oligonucleotide; TTG chr11 5206673 5206694 5206690 5206695 +
aaattcacattaccataattat

SEQ ID NO: 80667 - DNA, 22 bp, Artificial Sequence
  Synthetic oligonucleotide; TTC chr11 5206679 5206700 5206696 5206701 +
acattaccataattatttatgt

SEQ ID NO: 80668 - DNA, 22 bp, Artificial Sequence
  Synthetic oligonucleotide; TTA chr11 5206685 5206706 5206702 5206707 +
ccataattatttatgtctgatt

SEQ ID NO: 80669 - DNA, 22 bp, Artificial Sequence
  Synthetic oligonucleotide; TTA chr11 5206694 5206715 5206711 5206716 +
tttatgtctgattaaatgttat

SEQ ID NO: 80670 - DNA, 22 bp, Artificial Sequence
  Synthetic oligonucleotide; TTT chr11 5206697 5206718 5206714 5206719 +
atgtctgattaaatgttattaa

SEQ ID NO: 80671 - DNA, 22 bp, Artificial Sequence
  Synthetic oligonucleotide; TTA chr11 5206698 5206719 5206715 5206720 +
tgtctgattaaatgttattaaa

SEQ ID NO: 80672 - DNA, 22 bp, Artificial Sequence
  Synthetic oligonucleotide; CTG chr11 5206704 5206725 5206721 5206726 +
attaaatgttattaaagctaaa

SEQ ID NO: 80673 - DNA, 22 bp, Artificial Sequence
  Synthetic oligonucleotide; TTA chr11 5206708 5206729 5206725 5206730 +
aatgttattaaagctaaaattt

SEQ ID NO: 80674 - DNA, 22 bp, Artificial Sequence
  Synthetic oligonucleotide; TTA chr11 5206715 5206736 5206732 5206737 +
ttaaagctaaaattttgaattt

SEQ ID NO: 80675 - DNA, 22 bp, Artificial Sequence
  Synthetic oligonucleotide; TTA chr11 5206718 5206739 5206735 5206740 +
aagctaaaattttgaatttata

SEQ ID NO: 80676 - DNA, 22 bp, Artificial Sequence
  Synthetic oligonucleotide; CTA chr11 5206724 5206745 5206741 5206746 +
aaattttgaatttatatactac

SEQ ID NO: 80677 - DNA, 22 bp, Artificial Sequence
  Synthetic oligonucleotide; TTT chr11 5206730 5206751 5206747 5206752 +
tgaatttatatactactattaa

SEQ ID NO: 80678 - DNA, 22 bp, Artificial Sequence
  Synthetic oligonucleotide; TTT chr11 5206731 5206752 5206748 5206753 +
gaatttatatactactattaat

SEQ ID NO: 80679 - DNA, 22 bp, Artificial Sequence
  Synthetic oligonucleotide; TTG chr11 5206732 5206753 5206749 5206754 +
aatttatatactactattaatt

SEQ ID NO: 80680 - DNA, 22 bp, Artificial Sequence
  Synthetic oligonucleotide; TTT chr11 5206737 5206758 5206754 5206759 +
atatactactattaatttccag

SEQ ID NO: 80681 - DNA, 22 bp, Artificial Sequence
  Synthetic oligonucleotide; TTA chr11 5206738 5206759 5206755 5206760 +
tatactactattaatttccagt

SEQ ID NO: 80682 - DNA, 22 bp, Artificial Sequence
  Synthetic oligonucleotide; CTA chr11 5206745 5206766 5206762 5206767 +
ctattaatttccagttctatct

SEQ ID NO: 80683 - DNA, 22 bp, Artificial Sequence
  Synthetic oligonucleotide; CTA chr11 5206748 5206769 5206765 5206770 +
ttaatttccagttctatctttc

SEQ ID NO: 80684 - DNA, 22 bp, Artificial Sequence
  Synthetic oligonucleotide; TTA chr11 5206751 5206772 5206768 5206773 +
atttccagttctatctttctgt

SEQ ID NO: 80685 - DNA, 22 bp, Artificial Sequence
  Synthetic oligonucleotide; TTT chr11 5206755 5206776 5206772 5206777 +
ccagttctatctttctgttcaa

SEQ ID NO: 80686 - DNA, 22 bp, Artificial Sequence
  Synthetic oligonucleotide; TTC chr11 5206756 5206777 5206773 5206778 +
cagttctatctttctgttcaag

SEQ ID NO: 80687 - DNA, 22 bp, Artificial Sequence
  Synthetic oligonucleotide; TTC chr11 5206762 5206783 5206779 5206784 +
tatctttctgttcaagaaaaga

SEQ ID NO: 80688 - DNA, 22 bp, Artificial Sequence
  Synthetic oligonucleotide; CTA chr11 5206764 5206785 5206781 5206786 +
tctttctgttcaagaaaagaat

SEQ ID NO: 80689 - DNA, 22 bp, Artificial Sequence
  Synthetic oligonucleotide; CTT chr11 5206768 5206789 5206785 5206790 +
tctgttcaagaaaagaatgtga

SEQ ID NO: 80690 - DNA, 22 bp, Artificial Sequence
  Synthetic oligonucleotide; TTT chr11 5206769 5206790 5206786 5206791 +
ctgttcaagaaaagaatgtgag

SEQ ID NO: 80691 - DNA, 22 bp, Artificial Sequence
  Synthetic oligonucleotide; TTC chr11 5206770 5206791 5206787 5206792 +
tgttcaagaaaagaatgtgaga

SEQ ID NO: 80692 - DNA, 22 bp, Artificial Sequence
  Synthetic oligonucleotide; CTG chr11 5206772 5206793 5206789 5206794 +
ttcaagaaaagaatgtgagaag

SEQ ID NO: 80693 - DNA, 22 bp, Artificial Sequence
  Synthetic oligonucleotide; TTC chr11 5206775 5206796 5206792 5206797 +
aagaaaagaatgtgagaagtaa

SEQ ID NO: 80694 - DNA, 22 bp, Artificial Sequence
  Synthetic oligonucleotide; TTA chr11 5206801 5206822 5206818 5206823 +
gtgcctcaaatttgcctacttc

SEQ ID NO: 80695 - DNA, 22 bp, Artificial Sequence
  Synthetic oligonucleotide; CTC chr11 5206808 5206829 5206825 5206830 +
aaatttgcctacttcatcccca

SEQ ID NO: 80696 - DNA, 22 bp, Artificial Sequence
  Synthetic oligonucleotide; TTT chr11 5206814 5206835 5206831 5206836 +
gcctacttcatccccaacagag

SEQ ID NO: 80697 - DNA, 22 bp, Artificial Sequence
  Synthetic oligonucleotide; TTG chr11 5206815 5206836 5206832 5206837 +
cctacttcatccccaacagagg

SEQ ID NO: 80698 - DNA, 22 bp, Artificial Sequence
  Synthetic oligonucleotide; CTA chr11 5206819 5206840 5206836 5206841 +
cttcatccccaacagaggagat

SEQ ID NO: 80699 - DNA, 22 bp, Artificial Sequence
  Synthetic oligonucleotide; CTT chr11 5206822 5206843 5206839 5206844 +
catccccaacagaggagatcat

SEQ ID NO: 80700 - DNA, 22 bp, Artificial Sequence
  Synthetic oligonucleotide; TTC chr11 5206823 5206844 5206840 5206845 +
atccccaacagaggagatcatg

SEQ ID NO: 80701 - DNA, 22 bp, Artificial Sequence
  Synthetic oligonucleotide; CTA chr11 5206849 5206870 5206866 5206871 +
tatcaataatggagcctgggcc

SEQ ID NO: 80702 - DNA, 22 bp, Artificial Sequence
  Synthetic oligonucleotide; CTG chr11 5206867 5206888 5206884 5206889 +
ggcccagacaactggttaagag

SEQ ID NO: 80703 - DNA, 22 bp, Artificial Sequence
  Synthetic oligonucleotide; CTG chr11 5206881 5206902 5206898 5206903 +
gttaagagagaggtcattctga

SEQ ID NO: 80704 - DNA, 22 bp, Artificial Sequence
  Synthetic oligonucleotide; TTA chr11 5206885 5206906 5206902 5206907 +
agagagaggtcattctgacctc

SEQ ID NO: 80705 - DNA, 22 bp, Artificial Sequence
  Synthetic oligonucleotide; TTC chr11 5206900 5206921 5206917 5206922 +
tgacctcagaacataggagaga

SEQ ID NO: 80706 - DNA, 22 bp, Artificial Sequence
  Synthetic oligonucleotide; CTG chr11 5206902 5206923 5206919 5206924 +
acctcagaacataggagagatg

SEQ ID NO: 80707 - DNA, 22 bp, Artificial Sequence
  Synthetic oligonucleotide; CTC chr11 5206907 5206928 5206924 5206929 +
agaacataggagagatggatat

SEQ ID NO: 80708 - DNA, 22 bp, Artificial Sequence
  Synthetic oligonucleotide; TTG chr11 5206931 5206952 5206948 5206953 +
tacaccacagagtccaggatga

SEQ ID NO: 80709 - DNA, 22 bp, Artificial Sequence
  Synthetic oligonucleotide; CTA chr11 5206956 5206977 5206973 5206978 +
gcagtgaaggattcaaatgcct

SEQ ID NO: 80710 - DNA, 22 bp, Artificial Sequence
  Synthetic oligonucleotide; TTC chr11 5206970 5206991 5206987 5206992 +
aaatgcctggcgaaatctccta

SEQ ID NO: 80711 - DNA, 22 bp, Artificial Sequence
  Synthetic oligonucleotide; CTG chr11 5206979 5207000 5206996 5207001 +
gcgaaatctcctatacaaccgg

SEQ ID NO: 80712 - DNA, 22 bp, Artificial Sequence
  Synthetic oligonucleotide; CTC chr11 5206989 5207010 5207006 5207011 +
ctatacaaccggagagacccaa

SEQ ID NO: 80713 - DNA, 22 bp, Artificial Sequence
  Synthetic oligonucleotide; CTA chr11 5206992 5207013 5207009 5207014 +
tacaaccggagagacccaagtc

SEQ ID NO: 80714 - DNA, 22 bp, Artificial Sequence
  Synthetic oligonucleotide; CTC chr11 5207047 5207068 5207064 5207069 +
tgcatgacatgacttgcctatg

SEQ ID NO: 80715 - DNA, 22 bp, Artificial Sequence
  Synthetic oligonucleotide; CTG chr11 5207049 5207070 5207066 5207071 +
catgacatgacttgcctatgag

SEQ ID NO: 80716 - DNA, 22 bp, Artificial Sequence
  Synthetic oligonucleotide; CTT chr11 5207062 5207083 5207079 5207084 +
gcctatgagccctcccattgct

SEQ ID NO: 80717 - DNA, 22 bp, Artificial Sequence
  Synthetic oligonucleotide; TTG chr11 5207063 5207084 5207080 5207085 +
cctatgagccctcccattgcta

SEQ ID NO: 80718 - DNA, 22 bp, Artificial Sequence
  Synthetic oligonucleotide; CTA chr11 5207067 5207088 5207084 5207089 +
tgagccctcccattgctataag

SEQ ID NO: 80719 - DNA, 22 bp, Artificial Sequence
  Synthetic oligonucleotide; CTC chr11 5207076 5207097 5207093 5207098 +
ccattgctataaggatggggat

SEQ ID NO: 80720 - DNA, 22 bp, Artificial Sequence
  Synthetic oligonucleotide; TTG chr11 5207082 5207103 5207099 5207104 +
ctataaggatggggatcttagc

SEQ ID NO: 80721 - DNA, 22 bp, Artificial Sequence
  Synthetic oligonucleotide; CTA chr11 5207085 5207106 5207102 5207107 +
taaggatggggatcttagcaca

SEQ ID NO: 80722 - DNA, 22 bp, Artificial Sequence
  Synthetic oligonucleotide; CTT chr11 5207101 5207122 5207118 5207123 +
agcacagtgccttgtgtgaaca

SEQ ID NO: 80723 - DNA, 22 bp, Artificial Sequence
  Synthetic oligonucleotide; TTA chr11 5207102 5207123 5207119 5207124 +
gcacagtgccttgtgtgaacag

SEQ ID NO: 80724 - DNA, 22 bp, Artificial Sequence
  Synthetic oligonucleotide; CTT chr11 5207114 5207135 5207131 5207136 +
gtgtgaacagtaatgctagcct

SEQ ID NO: 80725 - DNA, 22 bp, Artificial Sequence
  Synthetic oligonucleotide; TTG chr11 5207115 5207136 5207132 5207137 +
tgtgaacagtaatgctagcctt

SEQ ID NO: 80726 - DNA, 22 bp, Artificial Sequence
  Synthetic oligonucleotide; CTA chr11 5207132 5207153 5207149 5207154 +
gccttgattttaccatggcaag

SEQ ID NO: 80727 - DNA, 22 bp, Artificial Sequence
  Synthetic oligonucleotide; CTT chr11 5207137 5207158 5207154 5207159 +
gattttaccatggcaagtttgt

SEQ ID NO: 80728 - DNA, 22 bp, Artificial Sequence
  Synthetic oligonucleotide; TTG chr11 5207138 5207159 5207155 5207160 +
attttaccatggcaagtttgtt

SEQ ID NO: 80729 - DNA, 22 bp, Artificial Sequence
  Synthetic oligonucleotide; TTT chr11 5207142 5207163 5207159 5207164 +
taccatggcaagtttgtttagg

SEQ ID NO: 80730 - DNA, 22 bp, Artificial Sequence
  Synthetic oligonucleotide; TTT chr11 5207143 5207164 5207160 5207165 +
accatggcaagtttgtttaggg

SEQ ID NO: 80731 - DNA, 22 bp, Artificial Sequence
  Synthetic oligonucleotide; TTA chr11 5207144 5207165 5207161 5207166 +
ccatggcaagtttgtttaggga

SEQ ID NO: 80732 - DNA, 22 bp, Artificial Sequence
  Synthetic oligonucleotide; TTT chr11 5207157 5207178 5207174 5207179 +
gtttagggaaaaattcaaccca

SEQ ID NO: 80733 - DNA, 22 bp, Artificial Sequence
  Synthetic oligonucleotide; TTG chr11 5207158 5207179 5207175 5207180 +
tttagggaaaaattcaacccac

SEQ ID NO: 80734 - DNA, 22 bp, Artificial Sequence
  Synthetic oligonucleotide; TTT chr11 5207161 5207182 5207178 5207183 +
agggaaaaattcaacccaccca

SEQ ID NO: 80735 - DNA, 22 bp, Artificial Sequence
  Synthetic oligonucleotide; TTA chr11 5207162 5207183 5207179 5207184 +
gggaaaaattcaacccacccat

SEQ ID NO: 80736 - DNA, 22 bp, Artificial Sequence
  Synthetic oligonucleotide; TTC chr11 5207173 5207194 5207190 5207195 +
aacccacccattgaaattccaa

SEQ ID NO: 80737 - DNA, 22 bp, Artificial Sequence
  Synthetic oligonucleotide; TTG chr11 5207186 5207207 5207203 5207208 +
aaattccaacctcaaccaaatg

SEQ ID NO: 80738 - DNA, 22 bp, Artificial Sequence
  Synthetic oligonucleotide; TTC chr11 5207192 5207213 5207209 5207214 +
caacctcaaccaaatgagggat

SEQ ID NO: 80739 - DNA, 22 bp, Artificial Sequence
  Synthetic oligonucleotide; CTC chr11 5207199 5207220 5207216 5207221 +
aaccaaatgagggatggctggg

SEQ ID NO: 80740 - DNA, 22 bp, Artificial Sequence
  Synthetic oligonucleotide; CTG chr11 5207219 5207240 5207236 5207241 +
gggatgcaaccacaaagatact

SEQ ID NO: 80741 - DNA, 22 bp, Artificial Sequence
  Synthetic oligonucleotide; CTG chr11 5207242 5207263 5207259 5207264 +
tatcttaggaggggagtttttt

SEQ ID NO: 80742 - DNA, 22 bp, Artificial Sequence
  Synthetic oligonucleotide; CTT chr11 5207248 5207269 5207265 5207270 +
aggaggggagtttttttttttt

SEQ ID NO: 80743 - DNA, 22 bp, Artificial Sequence
  Synthetic oligonucleotide; TTA chr11 5207249 5207270 5207266 5207271 +
ggaggggagtttttttttttta

SEQ ID NO: 80744 - DNA, 22 bp, Artificial Sequence
  Synthetic oligonucleotide; TTT chr11 5207261 5207282 5207278 5207283 +
tttttttttatagaaactcgtc

SEQ ID NO: 80745 - DNA, 22 bp, Artificial Sequence
  Synthetic oligonucleotide; TTT chr11 5207262 5207283 5207279 5207284 +
ttttttttatagaaactcgtca

SEQ ID NO: 80746 - DNA, 22 bp, Artificial Sequence
  Synthetic oligonucleotide; TTT chr11 5207263 5207284 5207280 5207285 +
tttttttatagaaactcgtcag

SEQ ID NO: 80747 - DNA, 22 bp, Artificial Sequence
  Synthetic oligonucleotide; TTT chr11 5207264 5207285 5207281 5207286 +
ttttttatagaaactcgtcagg

SEQ ID NO: 80748 - DNA, 22 bp, Artificial Sequence
  Synthetic oligonucleotide; TTT chr11 5207265 5207286 5207282 5207287 +
tttttatagaaactcgtcagga

SEQ ID NO: 80749 - DNA, 22 bp, Artificial Sequence
  Synthetic oligonucleotide; TTT chr11 5207266 5207287 5207283 5207288 +
ttttatagaaactcgtcaggat

SEQ ID NO: 80750 - DNA, 22 bp, Artificial Sequence
  Synthetic oligonucleotide; TTT chr11 5207267 5207288 5207284 5207289 +
tttatagaaactcgtcaggata

SEQ ID NO: 80751 - DNA, 22 bp, Artificial Sequence
  Synthetic oligonucleotide; TTT chr11 5207268 5207289 5207285 5207290 +
ttatagaaactcgtcaggatat

SEQ ID NO: 80752 - DNA, 22 bp, Artificial Sequence
  Synthetic oligonucleotide; TTT chr11 5207269 5207290 5207286 5207291 +
tatagaaactcgtcaggatatt

SEQ ID NO: 80753 - DNA, 22 bp, Artificial Sequence
  Synthetic oligonucleotide; TTT chr11 5207270 5207291 5207287 5207292 +
atagaaactcgtcaggatatta

SEQ ID NO: 80754 - DNA, 22 bp, Artificial Sequence
  Synthetic oligonucleotide; TTA chr11 5207271 5207292 5207288 5207293 +
tagaaactcgtcaggatattat

SEQ ID NO: 80755 - DNA, 22 bp, Artificial Sequence
  Synthetic oligonucleotide; CTC chr11 5207280 5207301 5207297 5207302 +
gtcaggatattattgctaggat

SEQ ID NO: 80756 - DNA, 22 bp, Artificial Sequence
  Synthetic oligonucleotide; TTA chr11 5207292 5207313 5207309 5207314 +
ttgctaggatgtgttgttactg

SEQ ID NO: 80757 - DNA, 22 bp, Artificial Sequence
  Synthetic oligonucleotide; TTG chr11 5207295 5207316 5207312 5207317 +
ctaggatgtgttgttactggga

SEQ ID NO: 80758 - DNA, 22 bp, Artificial Sequence
  Synthetic oligonucleotide; CTA chr11 5207298 5207319 5207315 5207320 +
ggatgtgttgttactgggaaaa

SEQ ID NO: 80759 - DNA, 22 bp, Artificial Sequence
  Synthetic oligonucleotide; TTG chr11 5207308 5207329 5207325 5207330 +
ttactgggaaaaaagctgatgg

SEQ ID NO: 80760 - DNA, 22 bp, Artificial Sequence
  Synthetic oligonucleotide; TTA chr11 5207311 5207332 5207328 5207333 +
ctgggaaaaaagctgatggaat

SEQ ID NO: 80761 - DNA, 22 bp, Artificial Sequence
  Synthetic oligonucleotide; CTG chr11 5207314 5207335 5207331 5207336 +
ggaaaaaagctgatggaataca

SEQ ID NO: 80762 - DNA, 22 bp, Artificial Sequence
  Synthetic oligonucleotide; CTG chr11 5207326 5207347 5207343 5207348 +
atggaatacaaaagagtagaca

SEQ ID NO: 80763 - DNA, 22 bp, Artificial Sequence
  Synthetic oligonucleotide; TTA chr11 5207363 5207384 5207380 5207385 +
tttgaggcaatcagtgactaac

SEQ ID NO: 80764 - DNA, 22 bp, Artificial Sequence
  Synthetic oligonucleotide; TTT chr11 5207366 5207387 5207383 5207388 +
gaggcaatcagtgactaacatg

SEQ ID NO: 80765 - DNA, 22 bp, Artificial Sequence
  Synthetic oligonucleotide; TTG chr11 5207367 5207388 5207384 5207389 +
aggcaatcagtgactaacatga

SEQ ID NO: 80766 - DNA, 22 bp, Artificial Sequence
  Synthetic oligonucleotide; CTA chr11 5207383 5207404 5207400 5207405 +
acatgaccactttgctttctct

SEQ ID NO: 80767 - DNA, 22 bp, Artificial Sequence
  Synthetic oligonucleotide; CTT chr11 5207395 5207416 5207412 5207417 +
tgctttctctatgcaggtgtca

SEQ ID NO: 80768 - DNA, 22 bp, Artificial Sequence
  Synthetic oligonucleotide; TTT chr11 5207396 5207417 5207413 5207418 +
gctttctctatgcaggtgtcat

SEQ ID NO: 80769 - DNA, 22 bp, Artificial Sequence
  Synthetic oligonucleotide; TTG chr11 5207397 5207418 5207414 5207419 +
ctttctctatgcaggtgtcatc

SEQ ID NO: 80770 - DNA, 22 bp, Artificial Sequence
  Synthetic oligonucleotide; CTT chr11 5207400 5207421 5207417 5207422 +
tctctatgcaggtgtcatctat

SEQ ID NO: 80771 - DNA, 22 bp, Artificial Sequence
  Synthetic oligonucleotide; TTT chr11 5207401 5207422 5207418 5207423 +
ctctatgcaggtgtcatctatt

SEQ ID NO: 80772 - DNA, 22 bp, Artificial Sequence
  Synthetic oligonucleotide; TTC chr11 5207402 5207423 5207419 5207424 +
tctatgcaggtgtcatctattg

SEQ ID NO: 80773 - DNA, 22 bp, Artificial Sequence
  Synthetic oligonucleotide; CTC chr11 5207404 5207425 5207421 5207426 +
tatgcaggtgtcatctattgtg

SEQ ID NO: 80774 - DNA, 22 bp, Artificial Sequence
  Synthetic oligonucleotide; CTA chr11 5207406 5207427 5207423 5207428 +
tgcaggtgtcatctattgtgat

SEQ ID NO: 80775 - DNA, 22 bp, Artificial Sequence
  Synthetic oligonucleotide; CTA chr11 5207421 5207442 5207438 5207443 +
ttgtgatatagtgccaggaggt

SEQ ID NO: 80776 - DNA, 22 bp, Artificial Sequence
  Synthetic oligonucleotide; TTG chr11 5207424 5207445 5207441 5207446 +
tgatatagtgccaggaggttgc

SEQ ID NO: 80777 - DNA, 22 bp, Artificial Sequence
  Synthetic oligonucleotide; TTG chr11 5207445 5207466 5207462 5207467 +
cctttgctgtggctttcgaccc

SEQ ID NO: 80778 - DNA, 22 bp, Artificial Sequence
  Synthetic oligonucleotide; CTT chr11 5207449 5207470 5207466 5207471 +
tgctgtggctttcgaccctaga

SEQ ID NO: 80779 - DNA, 22 bp, Artificial Sequence
  Synthetic oligonucleotide; TTT chr11 5207450 5207471 5207467 5207472 +
gctgtggctttcgaccctagat

SEQ ID NO: 80780 - DNA, 22 bp, Artificial Sequence
  Synthetic oligonucleotide; TTG chr11 5207451 5207472 5207468 5207473 +
ctgtggctttcgaccctagatt

SEQ ID NO: 80781 - DNA, 22 bp, Artificial Sequence
  Synthetic oligonucleotide; CTG chr11 5207454 5207475 5207471 5207476 +
tggctttcgaccctagattttt

SEQ ID NO: 80782 - DNA, 22 bp, Artificial Sequence
  Synthetic oligonucleotide; CTT chr11 5207460 5207481 5207477 5207482 +
tcgaccctagatttttaaattg

SEQ ID NO: 80783 - DNA, 22 bp, Artificial Sequence
  Synthetic oligonucleotide; TTT chr11 5207461 5207482 5207478 5207483 +
cgaccctagatttttaaattgt

SEQ ID NO: 80784 - DNA, 22 bp, Artificial Sequence
  Synthetic oligonucleotide; TTC chr11 5207462 5207483 5207479 5207484 +
gaccctagatttttaaattgtg

SEQ ID NO: 80785 - DNA, 22 bp, Artificial Sequence
  Synthetic oligonucleotide; CTA chr11 5207469 5207490 5207486 5207491 +
gatttttaaattgtgtgacaaa

SEQ ID NO: 80786 - DNA, 22 bp, Artificial Sequence
  Synthetic oligonucleotide; TTT chr11 5207474 5207495 5207491 5207496 +
ttaaattgtgtgacaaacccat

SEQ ID NO: 80787 - DNA, 22 bp, Artificial Sequence
  Synthetic oligonucleotide; TTT chr11 5207475 5207496 5207492 5207497 +
taaattgtgtgacaaacccatc

SEQ ID NO: 80788 - DNA, 22 bp, Artificial Sequence
  Synthetic oligonucleotide; TTT chr11 5207476 5207497 5207493 5207498 +
aaattgtgtgacaaacccatct

SEQ ID NO: 80789 - DNA, 22 bp, Artificial Sequence
  Synthetic oligonucleotide; TTA chr11 5207477 5207498 5207494 5207499 +
aattgtgtgacaaacccatctt

SEQ ID NO: 80790 - DNA, 22 bp, Artificial Sequence
  Synthetic oligonucleotide; TTG chr11 5207482 5207503 5207499 5207504 +
tgtgacaaacccatcttttatt

SEQ ID NO: 80791 - DNA, 22 bp, Artificial Sequence
  Synthetic oligonucleotide; CTT chr11 5207499 5207520 5207516 5207521 +
ttatttatgtaaataaaatgtc

SEQ ID NO: 80792 - DNA, 22 bp, Artificial Sequence
  Synthetic oligonucleotide; TTT chr11 5207500 5207521 5207517 5207522 +
tatttatgtaaataaaatgtcc

SEQ ID NO: 80793 - DNA, 22 bp, Artificial Sequence
  Synthetic oligonucleotide; TTT chr11 5207501 5207522 5207518 5207523 +
atttatgtaaataaaatgtccg

SEQ ID NO: 80794 - DNA, 22 bp, Artificial Sequence
  Synthetic oligonucleotide; TTA chr11 5207502 5207523 5207519 5207524 +
tttatgtaaataaaatgtccgt

SEQ ID NO: 80795 - DNA, 22 bp, Artificial Sequence
  Synthetic oligonucleotide; TTT chr11 5207505 5207526 5207522 5207527 +
atgtaaataaaatgtccgtgtt

SEQ ID NO: 80796 - DNA, 22 bp, Artificial Sequence
  Synthetic oligonucleotide; TTA chr11 5207506 5207527 5207523 5207528 +
tgtaaataaaatgtccgtgttt

SEQ ID NO: 80797 - DNA, 22 bp, Artificial Sequence
  Synthetic oligonucleotide; TTT chr11 5207528 5207549 5207545 5207550 +
attggttattgttatattgtga

SEQ ID NO: 80798 - DNA, 22 bp, Artificial Sequence
  Synthetic oligonucleotide; TTA chr11 5207529 5207550 5207546 5207551 +
ttggttattgttatattgtgaa

SEQ ID NO: 80799 - DNA, 22 bp, Artificial Sequence
  Synthetic oligonucleotide; TTG chr11 5207532 5207553 5207549 5207554 +
gttattgttatattgtgaaatt

SEQ ID NO: 80800 - DNA, 22 bp, Artificial Sequence
  Synthetic oligonucleotide; TTA chr11 5207536 5207557 5207553 5207558 +
ttgttatattgtgaaattgtag

SEQ ID NO: 80801 - DNA, 22 bp, Artificial Sequence
  Synthetic oligonucleotide; TTG chr11 5207539 5207560 5207556 5207561 +
ttatattgtgaaattgtagtag

SEQ ID NO: 80802 - DNA, 22 bp, Artificial Sequence
  Synthetic oligonucleotide; TTA chr11 5207542 5207563 5207559 5207564 +
tattgtgaaattgtagtagatc

SEQ ID NO: 80803 - DNA, 22 bp, Artificial Sequence
  Synthetic oligonucleotide; TTG chr11 5207547 5207568 5207564 5207569 +
tgaaattgtagtagatctaaaa

SEQ ID NO: 80804 - DNA, 22 bp, Artificial Sequence
  Synthetic oligonucleotide; TTG chr11 5207555 5207576 5207572 5207577 +
tagtagatctaaaattgtaatt

SEQ ID NO: 80805 - DNA, 22 bp, Artificial Sequence
  Synthetic oligonucleotide; CTA chr11 5207566 5207587 5207583 5207588 +
aaattgtaatttcttggattcc

SEQ ID NO: 80806 - DNA, 22 bp, Artificial Sequence
  Synthetic oligonucleotide; TTG chr11 5207572 5207593 5207589 5207594 +
taatttcttggattcctagaat

SEQ ID NO: 80807 - DNA, 22 bp, Artificial Sequence
  Synthetic oligonucleotide; TTT chr11 5207578 5207599 5207595 5207600 +
cttggattcctagaatttctaa

SEQ ID NO: 80808 - DNA, 22 bp, Artificial Sequence
  Synthetic oligonucleotide; TTC chr11 5207579 5207600 5207596 5207601 +
ttggattcctagaatttctaaa

SEQ ID NO: 80809 - DNA, 22 bp, Artificial Sequence
  Synthetic oligonucleotide; CTT chr11 5207581 5207602 5207598 5207603 +
ggattcctagaatttctaaatc

SEQ ID NO: 80810 - DNA, 22 bp, Artificial Sequence
  Synthetic oligonucleotide; TTG chr11 5207582 5207603 5207599 5207604 +
gattcctagaatttctaaatct

SEQ ID NO: 80811 - DNA, 22 bp, Artificial Sequence
  Synthetic oligonucleotide; TTC chr11 5207587 5207608 5207604 5207609 +
ctagaatttctaaatctgtgga

SEQ ID NO: 80812 - DNA, 22 bp, Artificial Sequence
  Synthetic oligonucleotide; CTA chr11 5207590 5207611 5207607 5207612 +
gaatttctaaatctgtggattt

SEQ ID NO: 80813 - DNA, 22 bp, Artificial Sequence
  Synthetic oligonucleotide; TTT chr11 5207596 5207617 5207613 5207618 +
ctaaatctgtggatttttagaa

SEQ ID NO: 80814 - DNA, 22 bp, Artificial Sequence
  Synthetic oligonucleotide; TTC chr11 5207597 5207618 5207614 5207619 +
taaatctgtggatttttagaat

SEQ ID NO: 80815 - DNA, 22 bp, Artificial Sequence
  Synthetic oligonucleotide; CTA chr11 5207599 5207620 5207616 5207621 +
aatctgtggatttttagaattc

SEQ ID NO: 80816 - DNA, 22 bp, Artificial Sequence
  Synthetic oligonucleotide; CTG chr11 5207605 5207626 5207622 5207627 +
tggatttttagaattctctaga

SEQ ID NO: 80817 - DNA, 22 bp, Artificial Sequence
  Synthetic oligonucleotide; TTT chr11 5207612 5207633 5207629 5207634 +
ttagaattctctagaggtgaca

SEQ ID NO: 80818 - DNA, 22 bp, Artificial Sequence
  Synthetic oligonucleotide; TTT chr11 5207613 5207634 5207630 5207635 +
tagaattctctagaggtgacaa

SEQ ID NO: 80819 - DNA, 22 bp, Artificial Sequence
  Synthetic oligonucleotide; TTT chr11 5207614 5207635 5207631 5207636 +
agaattctctagaggtgacaaa

SEQ ID NO: 80820 - DNA, 22 bp, Artificial Sequence
  Synthetic oligonucleotide; TTA chr11 5207615 5207636 5207632 5207637 +
gaattctctagaggtgacaaag

SEQ ID NO: 80821 - DNA, 22 bp, Artificial Sequence
  Synthetic oligonucleotide; TTC chr11 5207621 5207642 5207638 5207643 +
tctagaggtgacaaaggtttat

SEQ ID NO: 80822 - DNA, 22 bp, Artificial Sequence
  Synthetic oligonucleotide; CTC chr11 5207623 5207644 5207640 5207645 +
tagaggtgacaaaggtttatta

SEQ ID NO: 80823 - DNA, 22 bp, Artificial Sequence
  Synthetic oligonucleotide; CTA chr11 5207625 5207646 5207642 5207647 +
gaggtgacaaaggtttattatc

SEQ ID NO: 80824 - DNA, 22 bp, Artificial Sequence
  Synthetic oligonucleotide; TTT chr11 5207641 5207662 5207658 5207663 +
attatctaagctaccggagcta

SEQ ID NO: 80825 - DNA, 22 bp, Artificial Sequence
  Synthetic oligonucleotide; TTA chr11 5207642 5207663 5207659 5207664 +
ttatctaagctaccggagctat

SEQ ID NO: 80826 - DNA, 22 bp, Artificial Sequence
  Synthetic oligonucleotide; TTA chr11 5207645 5207666 5207662 5207667 +
tctaagctaccggagctatgta

SEQ ID NO: 80827 - DNA, 22 bp, Artificial Sequence
  Synthetic oligonucleotide; CTA chr11 5207649 5207670 5207666 5207671 +
agctaccggagctatgtacttt

SEQ ID NO: 80828 - DNA, 22 bp, Artificial Sequence
  Synthetic oligonucleotide; CTA chr11 5207654 5207675 5207671 5207676 +
ccggagctatgtacttttggat

SEQ ID NO: 80829 - DNA, 22 bp, Artificial Sequence
  Synthetic oligonucleotide; CTA chr11 5207663 5207684 5207680 5207685 +
tgtacttttggatataagagtg

SEQ ID NO: 80830 - DNA, 22 bp, Artificial Sequence
  Synthetic oligonucleotide; CTT chr11 5207670 5207691 5207687 5207692 +
ttggatataagagtgtctccat

SEQ ID NO: 80831 - DNA, 22 bp, Artificial Sequence
  Synthetic oligonucleotide; TTT chr11 5207671 5207692 5207688 5207693 +
tggatataagagtgtctccatc

SEQ ID NO: 80832 - DNA, 22 bp, Artificial Sequence
  Synthetic oligonucleotide; TTT chr11 5207672 5207693 5207689 5207694 +
ggatataagagtgtctccatct

SEQ ID NO: 80833 - DNA, 22 bp, Artificial Sequence
  Synthetic oligonucleotide; TTG chr11 5207673 5207694 5207690 5207695 +
gatataagagtgtctccatctc

SEQ ID NO: 80834 - DNA, 22 bp, Artificial Sequence
  Synthetic oligonucleotide; CTC chr11 5207689 5207710 5207706 5207711 +
catctccattgccttacaaatc

SEQ ID NO: 80835 - DNA, 22 bp, Artificial Sequence
  Synthetic oligonucleotide; CTC chr11 5207695 5207716 5207712 5207717 +
cattgccttacaaatcaggtgt

SEQ ID NO: 80836 - DNA, 22 bp, Artificial Sequence
  Synthetic oligonucleotide; TTG chr11 5207700 5207721 5207717 5207722 +
ccttacaaatcaggtgtgagcc

SEQ ID NO: 80837 - DNA, 22 bp, Artificial Sequence
  Synthetic oligonucleotide; CTT chr11 5207704 5207725 5207721 5207726 +
acaaatcaggtgtgagccaggc

SEQ ID NO: 80838 - DNA, 22 bp, Artificial Sequence
  Synthetic oligonucleotide; TTA chr11 5207705 5207726 5207722 5207727 +
caaatcaggtgtgagccaggca

SEQ ID NO: 80839 - DNA, 22 bp, Artificial Sequence
  Synthetic oligonucleotide; CTC chr11 5207733 5207754 5207750 5207755 +
tcagactggaaaaggtaactaa

SEQ ID NO: 80840 - DNA, 22 bp, Artificial Sequence
  Synthetic oligonucleotide; CTC chr11 5207735 5207756 5207752 5207757 +
agactggaaaaggtaactaatc

SEQ ID NO: 80841 - DNA, 22 bp, Artificial Sequence
  Synthetic oligonucleotide; CTG chr11 5207741 5207762 5207758 5207763 +
gaaaaggtaactaatcagaagg

SEQ ID NO: 80842 - DNA, 22 bp, Artificial Sequence
  Synthetic oligonucleotide; CTA chr11 5207754 5207775 5207771 5207776 +
atcagaaggaaccattgtccta

SEQ ID NO: 80843 - DNA, 22 bp, Artificial Sequence
  Synthetic oligonucleotide; TTG chr11 5207771 5207792 5207788 5207793 +
tcctagaatggggcaagtgtac

SEQ ID NO: 80844 - DNA, 22 bp, Artificial Sequence
  Synthetic oligonucleotide; CTA chr11 5207776 5207797 5207793 5207798 +
gaatggggcaagtgtacaatac

SEQ ID NO: 80845 - DNA, 22 bp, Artificial Sequence
  Synthetic oligonucleotide; CTG chr11 5207813 5207834 5207830 5207835 +
gtgccgtagcatataacatatt

SEQ ID NO: 80846 - DNA, 22 bp, Artificial Sequence
  Synthetic oligonucleotide; TTC chr11 5207836 5207857 5207853 5207858 +
actcaatccttcataccctttg

SEQ ID NO: 80847 - DNA, 22 bp, Artificial Sequence
  Synthetic oligonucleotide; CTC chr11 5207840 5207861 5207857 5207862 +
aatccttcataccctttgtatc

SEQ ID NO: 80848 - DNA, 22 bp, Artificial Sequence
  Synthetic oligonucleotide; CTT chr11 5207847 5207868 5207864 5207869 +
cataccctttgtatcgtttttt

SEQ ID NO: 80849 - DNA, 22 bp, Artificial Sequence
  Synthetic oligonucleotide; TTC chr11 5207848 5207869 5207865 5207870 +
ataccctttgtatcgttttttt

SEQ ID NO: 80850 - DNA, 22 bp, Artificial Sequence
  Synthetic oligonucleotide; CTT chr11 5207856 5207877 5207873 5207878 +
tgtatcgttttttttctgtttt

SEQ ID NO: 80851 - DNA, 22 bp, Artificial Sequence
  Synthetic oligonucleotide; TTT chr11 5207857 5207878 5207874 5207879 +
gtatcgttttttttctgtttta

SEQ ID NO: 80852 - DNA, 22 bp, Artificial Sequence
  Synthetic oligonucleotide; TTG chr11 5207858 5207879 5207875 5207880 +
tatcgttttttttctgttttat

SEQ ID NO: 80853 - DNA, 22 bp, Artificial Sequence
  Synthetic oligonucleotide; TTT chr11 5207866 5207887 5207883 5207888 +
tttttctgttttatttatttta

SEQ ID NO: 80854 - DNA, 22 bp, Artificial Sequence
  Synthetic oligonucleotide; TTT chr11 5207867 5207888 5207884 5207889 +
ttttctgttttatttattttat

SEQ ID NO: 80855 - DNA, 22 bp, Artificial Sequence
  Synthetic oligonucleotide; TTT chr11 5207868 5207889 5207885 5207890 +
tttctgttttatttattttatt

SEQ ID NO: 80856 - DNA, 22 bp, Artificial Sequence
  Synthetic oligonucleotide; TTT chr11 5207869 5207890 5207886 5207891 +
ttctgttttatttattttattt

SEQ ID NO: 80857 - DNA, 22 bp, Artificial Sequence
  Synthetic oligonucleotide; TTT chr11 5207870 5207891 5207887 5207892 +
tctgttttatttattttattta

SEQ ID NO: 80858 - DNA, 22 bp, Artificial Sequence
  Synthetic oligonucleotide; TTT chr11 5207871 5207892 5207888 5207893 +
ctgttttatttattttatttat

SEQ ID NO: 80859 - DNA, 22 bp, Artificial Sequence
  Synthetic oligonucleotide; TTC chr11 5207872 5207893 5207889 5207894 +
tgttttatttattttatttatt

SEQ ID NO: 80860 - DNA, 22 bp, Artificial Sequence
  Synthetic oligonucleotide; CTG chr11 5207874 5207895 5207891 5207896 +
ttttatttattttatttattta

SEQ ID NO: 80861 - DNA, 22 bp, Artificial Sequence
  Synthetic oligonucleotide; TTT chr11 5207877 5207898 5207894 5207899 +
tatttattttatttatttatta

SEQ ID NO: 80862 - DNA, 22 bp, Artificial Sequence
  Synthetic oligonucleotide; TTT chr11 5207878 5207899 5207895 5207900 +
atttattttatttatttattag

SEQ ID NO: 80863 - DNA, 22 bp, Artificial Sequence
  Synthetic oligonucleotide; TTA chr11 5207879 5207900 5207896 5207901 +
tttattttatttatttattaga

SEQ ID NO: 80864 - DNA, 22 bp, Artificial Sequence
  Synthetic oligonucleotide; TTT chr11 5207882 5207903 5207899 5207904 +
attttatttatttattagagat

SEQ ID NO: 80865 - DNA, 22 bp, Artificial Sequence
  Synthetic oligonucleotide; TTA chr11 5207883 5207904 5207900 5207905 +
ttttatttatttattagagatc

SEQ ID NO: 80866 - DNA, 22 bp, Artificial Sequence
  Synthetic oligonucleotide; TTT chr11 5207886 5207907 5207903 5207908 +
tatttatttattagagatcata

SEQ ID NO: 80867 - DNA, 22 bp, Artificial Sequence
  Synthetic oligonucleotide; TTT chr11 5207887 5207908 5207904 5207909 +
atttatttattagagatcatag

SEQ ID NO: 80868 - DNA, 22 bp, Artificial Sequence
  Synthetic oligonucleotide; TTA chr11 5207888 5207909 5207905 5207910 +
tttatttattagagatcatagt

SEQ ID NO: 80869 - DNA, 22 bp, Artificial Sequence
  Synthetic oligonucleotide; TTT chr11 5207891 5207912 5207908 5207913 +
atttattagagatcatagtgtg

SEQ ID NO: 80870 - DNA, 22 bp, Artificial Sequence
  Synthetic oligonucleotide; TTA chr11 5207892 5207913 5207909 5207914 +
tttattagagatcatagtgtgt

SEQ ID NO: 80871 - DNA, 22 bp, Artificial Sequence
  Synthetic oligonucleotide; TTT chr11 5207895 5207916 5207912 5207917 +
attagagatcatagtgtgtgca

SEQ ID NO: 80872 - DNA, 22 bp, Artificial Sequence
  Synthetic oligonucleotide; TTA chr11 5207896 5207917 5207913 5207918 +
ttagagatcatagtgtgtgcaa

SEQ ID NO: 80873 - DNA, 22 bp, Artificial Sequence
  Synthetic oligonucleotide; TTA chr11 5207899 5207920 5207916 5207921 +
gagatcatagtgtgtgcaacac

SEQ ID NO: 80874 - DNA, 22 bp, Artificial Sequence
  Synthetic oligonucleotide; CTA chr11 5207924 5207945 5207941 5207946 +
tgtccaggttctgtggtaaacg

SEQ ID NO: 80875 - DNA, 22 bp, Artificial Sequence
  Synthetic oligonucleotide; TTC chr11 5207935 5207956 5207952 5207957 +
tgtggtaaacgtcagcgtggag

SEQ ID NO: 80876 - DNA, 22 bp, Artificial Sequence
  Synthetic oligonucleotide; CTG chr11 5207937 5207958 5207954 5207959 +
tggtaaacgtcagcgtggagaa

SEQ ID NO: 80877 - DNA, 22 bp, Artificial Sequence
  Synthetic oligonucleotide; TTA chr11 5207963 5207984 5207980 5207985 +
gtagctattagatcataaaaag

SEQ ID NO: 80878 - DNA, 22 bp, Artificial Sequence
  Synthetic oligonucleotide; CTA chr11 5207970 5207991 5207987 5207992 +
ttagatcataaaaaggtgaggc

SEQ ID NO: 80879 - DNA, 22 bp, Artificial Sequence
  Synthetic oligonucleotide; TTA chr11 5207973 5207994 5207990 5207995 +
gatcataaaaaggtgaggcata

SEQ ID NO: 80880 - DNA, 22 bp, Artificial Sequence
  Synthetic oligonucleotide; TTT chr11 5208004 5208025 5208021 5208026 +
gtctttgagaagctgactgtgg

SEQ ID NO: 80881 - DNA, 22 bp, Artificial Sequence
  Synthetic oligonucleotide; TTG chr11 5208005 5208026 5208022 5208027 +
tctttgagaagctgactgtggc

SEQ ID NO: 80882 - DNA, 22 bp, Artificial Sequence
  Synthetic oligonucleotide; CTT chr11 5208009 5208030 5208026 5208031 +
tgagaagctgactgtggctata

SEQ ID NO: 80883 - DNA, 22 bp, Artificial Sequence
  Synthetic oligonucleotide; TTT chr11 5208010 5208031 5208027 5208032 +
gagaagctgactgtggctatag

SEQ ID NO: 80884 - DNA, 22 bp, Artificial Sequence
  Synthetic oligonucleotide; TTG chr11 5208011 5208032 5208028 5208033 +
agaagctgactgtggctatagg

SEQ ID NO: 80885 - DNA, 22 bp, Artificial Sequence
  Synthetic oligonucleotide; CTG chr11 5208019 5208040 5208036 5208041 +
actgtggctataggtgaagaaa

SEQ ID NO: 80886 - DNA, 22 bp, Artificial Sequence
  Synthetic oligonucleotide; CTG chr11 5208023 5208044 5208040 5208045 +
tggctataggtgaagaaaaaaa

SEQ ID NO: 80887 - DNA, 22 bp, Artificial Sequence
  Synthetic oligonucleotide; CTA chr11 5208029 5208050 5208046 5208051 +
taggtgaagaaaaaaattataa

SEQ ID NO: 80888 - DNA, 22 bp, Artificial Sequence
  Synthetic oligonucleotide; TTA chr11 5208048 5208069 5208065 5208070 +
taattttagttttattattaat

SEQ ID NO: 80889 - DNA, 22 bp, Artificial Sequence
  Synthetic oligonucleotide; TTT chr11 5208054 5208075 5208071 5208076 +
tagttttattattaatatcacc

SEQ ID NO: 80890 - DNA, 22 bp, Artificial Sequence
  Synthetic oligonucleotide; TTT chr11 5208055 5208076 5208072 5208077 +
agttttattattaatatcacca

SEQ ID NO: 80891 - DNA, 22 bp, Artificial Sequence
  Synthetic oligonucleotide; TTA chr11 5208056 5208077 5208073 5208078 +
gttttattattaatatcaccat

SEQ ID NO: 80892 - DNA, 22 bp, Artificial Sequence
  Synthetic oligonucleotide; TTT chr11 5208060 5208081 5208077 5208082 +
tattattaatatcaccatgatc

SEQ ID NO: 80893 - DNA, 22 bp, Artificial Sequence
  Synthetic oligonucleotide; TTT chr11 5208061 5208082 5208078 5208083 +
attattaatatcaccatgatca

SEQ ID NO: 80894 - DNA, 22 bp, Artificial Sequence
  Synthetic oligonucleotide; TTA chr11 5208062 5208083 5208079 5208084 +
ttattaatatcaccatgatcat

SEQ ID NO: 80895 - DNA, 22 bp, Artificial Sequence
  Synthetic oligonucleotide; TTA chr11 5208065 5208086 5208082 5208087 +
ttaatatcaccatgatcatcat

SEQ ID NO: 80896 - DNA, 22 bp, Artificial Sequence
  Synthetic oligonucleotide; TTA chr11 5208068 5208089 5208085 5208090 +
atatcaccatgatcatcatgat

SEQ ID NO: 80897 - DNA, 22 bp, Artificial Sequence
  Synthetic oligonucleotide; TTA chr11 5208099 5208120 5208116 5208121 +
atatttactgggaacttatttg

SEQ ID NO: 80898 - DNA, 22 bp, Artificial Sequence
  Synthetic oligonucleotide; TTT chr11 5208105 5208126 5208122 5208127 +
actgggaacttatttggtttgt

SEQ ID NO: 80899 - DNA, 22 bp, Artificial Sequence
  Synthetic oligonucleotide; TTA chr11 5208106 5208127 5208123 5208128 +
ctgggaacttatttggtttgtc

SEQ ID NO: 80900 - DNA, 22 bp, Artificial Sequence
  Synthetic oligonucleotide; CTG chr11 5208109 5208130 5208126 5208131 +
ggaacttatttggtttgtcatt

SEQ ID NO: 80901 - DNA, 22 bp, Artificial Sequence
  Synthetic oligonucleotide; CTT chr11 5208116 5208137 5208133 5208138 +
atttggtttgtcatttttcgaa

SEQ ID NO: 80902 - DNA, 22 bp, Artificial Sequence
  Synthetic oligonucleotide; TTA chr11 5208117 5208138 5208134 5208139 +
tttggtttgtcatttttcgaag

SEQ ID NO: 80903 - DNA, 22 bp, Artificial Sequence
  Synthetic oligonucleotide; TTT chr11 5208120 5208141 5208137 5208142 +
ggtttgtcatttttcgaaggaa

SEQ ID NO: 80904 - DNA, 22 bp, Artificial Sequence
  Synthetic oligonucleotide; TTG chr11 5208121 5208142 5208138 5208143 +
gtttgtcatttttcgaaggaat

SEQ ID NO: 80905 - DNA, 22 bp, Artificial Sequence
  Synthetic oligonucleotide; TTT chr11 5208125 5208146 5208142 5208147 +
gtcatttttcgaaggaatttat

SEQ ID NO: 80906 - DNA, 22 bp, Artificial Sequence
  Synthetic oligonucleotide; TTG chr11 5208126 5208147 5208143 5208148 +
tcatttttcgaaggaatttatg

SEQ ID NO: 80907 - DNA, 22 bp, Artificial Sequence
  Synthetic oligonucleotide; TTT chr11 5208132 5208153 5208149 5208154 +
ttcgaaggaatttatgttaatt

SEQ ID NO: 80908 - DNA, 22 bp, Artificial Sequence
  Synthetic oligonucleotide; TTT chr11 5208133 5208154 5208150 5208155 +
tcgaaggaatttatgttaattt

SEQ ID NO: 80909 - DNA, 22 bp, Artificial Sequence
  Synthetic oligonucleotide; TTT chr11 5208134 5208155 5208151 5208156 +
cgaaggaatttatgttaattta

SEQ ID NO: 80910 - DNA, 22 bp, Artificial Sequence
  Synthetic oligonucleotide; TTC chr11 5208135 5208156 5208152 5208157 +
gaaggaatttatgttaatttac

SEQ ID NO: 80911 - DNA, 22 bp, Artificial Sequence
  Synthetic oligonucleotide; TTT chr11 5208145 5208166 5208162 5208167 +
atgttaatttactcactataag

SEQ ID NO: 80912 - DNA, 22 bp, Artificial Sequence
  Synthetic oligonucleotide; TTA chr11 5208146 5208167 5208163 5208168 +
tgttaatttactcactataaga

SEQ ID NO: 80913 - DNA, 22 bp, Artificial Sequence
  Synthetic oligonucleotide; TTA chr11 5208151 5208172 5208168 5208173 +
atttactcactataagaaattt

SEQ ID NO: 80914 - DNA, 22 bp, Artificial Sequence
  Synthetic oligonucleotide; TTT chr11 5208155 5208176 5208172 5208177 +
actcactataagaaatttataa

SEQ ID NO: 80915 - DNA, 22 bp, Artificial Sequence
  Synthetic oligonucleotide; TTA chr11 5208156 5208177 5208173 5208178 +
ctcactataagaaatttataaa

SEQ ID NO: 80916 - DNA, 22 bp, Artificial Sequence
  Synthetic oligonucleotide; CTC chr11 5208159 5208180 5208176 5208181 +
actataagaaatttataaagta

SEQ ID NO: 80917 - DNA, 22 bp, Artificial Sequence
  Synthetic oligonucleotide; CTA chr11 5208163 5208184 5208180 5208185 +
taagaaatttataaagtagatt

SEQ ID NO: 80918 - DNA, 22 bp, Artificial Sequence
  Synthetic oligonucleotide; TTT chr11 5208173 5208194 5208190 5208195 +
ataaagtagattccattatagc

SEQ ID NO: 80919 - DNA, 22 bp, Artificial Sequence
  Synthetic oligonucleotide; TTA chr11 5208174 5208195 5208191 5208196 +
taaagtagattccattatagct

SEQ ID NO: 80920 - DNA, 22 bp, Artificial Sequence
  Synthetic oligonucleotide; TTC chr11 5208186 5208207 5208203 5208208 +
cattatagctcttaatttatta

SEQ ID NO: 80921 - DNA, 22 bp, Artificial Sequence
  Synthetic oligonucleotide; TTA chr11 5208191 5208212 5208208 5208213 +
tagctcttaatttattattgag

SEQ ID NO: 80922 - DNA, 22 bp, Artificial Sequence
  Synthetic oligonucleotide; CTC chr11 5208197 5208218 5208214 5208219 +
ttaatttattattgaggaatgt

SEQ ID NO: 80923 - DNA, 22 bp, Artificial Sequence
  Synthetic oligonucleotide; CTT chr11 5208199 5208220 5208216 5208221 +
aatttattattgaggaatgtaa

SEQ ID NO: 80924 - DNA, 22 bp, Artificial Sequence
  Synthetic oligonucleotide; TTA chr11 5208200 5208221 5208217 5208222 +
atttattattgaggaatgtaag

SEQ ID NO: 80925 - DNA, 22 bp, Artificial Sequence
  Synthetic oligonucleotide; TTT chr11 5208204 5208225 5208221 5208226 +
attattgaggaatgtaaggcat

SEQ ID NO: 80926 - DNA, 22 bp, Artificial Sequence
  Synthetic oligonucleotide; TTA chr11 5208205 5208226 5208222 5208227 +
ttattgaggaatgtaaggcata

SEQ ID NO: 80927 - DNA, 22 bp, Artificial Sequence
  Synthetic oligonucleotide; TTA chr11 5208208 5208229 5208225 5208230 +
ttgaggaatgtaaggcatagag

SEQ ID NO: 80928 - DNA, 22 bp, Artificial Sequence
  Synthetic oligonucleotide; TTG chr11 5208211 5208232 5208228 5208233 +
aggaatgtaaggcatagagaag

SEQ ID NO: 80929 - DNA, 22 bp, Artificial Sequence
  Synthetic oligonucleotide; CTT chr11 5208239 5208260 5208256 5208261 +
atcctcaaaacaaagctattaa

SEQ ID NO: 80930 - DNA, 22 bp, Artificial Sequence
  Synthetic oligonucleotide; TTA chr11 5208240 5208261 5208257 5208262 +
tcctcaaaacaaagctattaac

SEQ ID NO: 80931 - DNA, 22 bp, Artificial Sequence
  Synthetic oligonucleotide; CTC chr11 5208245 5208266 5208262 5208267 +
aaaacaaagctattaacttatg

SEQ ID NO: 80932 - DNA, 22 bp, Artificial Sequence
  Synthetic oligonucleotide; CTA chr11 5208257 5208278 5208274 5208279 +
ttaacttatggacctgagagta

SEQ ID NO: 80933 - DNA, 22 bp, Artificial Sequence
  Synthetic oligonucleotide; TTA chr11 5208260 5208281 5208277 5208282 +
acttatggacctgagagtagag

SEQ ID NO: 80934 - DNA, 22 bp, Artificial Sequence
  Synthetic oligonucleotide; CTT chr11 5208264 5208285 5208281 5208286 +
atggacctgagagtagagcccg

SEQ ID NO: 80935 - DNA, 22 bp, Artificial Sequence
  Synthetic oligonucleotide; TTA chr11 5208265 5208286 5208282 5208287 +
tggacctgagagtagagcccgg

SEQ ID NO: 80936 - DNA, 22 bp, Artificial Sequence
  Synthetic oligonucleotide; CTG chr11 5208273 5208294 5208290 5208295 +
agagtagagcccgggctgtctc

SEQ ID NO: 80937 - DNA, 22 bp, Artificial Sequence
  Synthetic oligonucleotide; CTG chr11 5208291 5208312 5208308 5208313 +
tctcatgccagaacctattatc

SEQ ID NO: 80938 - DNA, 22 bp, Artificial Sequence
  Synthetic oligonucleotide; CTC chr11 5208295 5208316 5208312 5208317 +
atgccagaacctattatcccat

SEQ ID NO: 80939 - DNA, 22 bp, Artificial Sequence
  Synthetic oligonucleotide; CTA chr11 5208308 5208329 5208325 5208330 +
ttatcccatgttgcaagacaca

SEQ ID NO: 80940 - DNA, 22 bp, Artificial Sequence
  Synthetic oligonucleotide; TTA chr11 5208311 5208332 5208328 5208333 +
tcccatgttgcaagacacaaat

SEQ ID NO: 80941 - DNA, 22 bp, Artificial Sequence
  Synthetic oligonucleotide; TTG chr11 5208321 5208342 5208338 5208343 +
caagacacaaataggaaaatag

SEQ ID NO: 80942 - DNA, 22 bp, Artificial Sequence
  Synthetic oligonucleotide; TTA chr11 5208352 5208373 5208369 5208374 +
gaagttattgaagggcatgaaa

SEQ ID NO: 80943 - DNA, 22 bp, Artificial Sequence
  Synthetic oligonucleotide; TTA chr11 5208359 5208380 5208376 5208381 +
ttgaagggcatgaaataatagt

SEQ ID NO: 80944 - DNA, 22 bp, Artificial Sequence
  Synthetic oligonucleotide; TTG chr11 5208362 5208383 5208379 5208384 +
aagggcatgaaataatagtggt

SEQ ID NO: 80945 - DNA, 22 bp, Artificial Sequence
  Synthetic oligonucleotide; TTT chr11 5208386 5208407 5208403 5208408 +
gaaatttgagtagagtaggacc

SEQ ID NO: 80946 - DNA, 22 bp, Artificial Sequence
  Synthetic oligonucleotide; TTG chr11 5208387 5208408 5208404 5208409 +
aaatttgagtagagtaggacca

SEQ ID NO: 80947 - DNA, 22 bp, Artificial Sequence
  Synthetic oligonucleotide; TTT chr11 5208393 5208414 5208410 5208415 +
gagtagagtaggaccaagaaaa

SEQ ID NO: 80948 - DNA, 22 bp, Artificial Sequence
  Synthetic oligonucleotide; TTG chr11 5208394 5208415 5208411 5208416 +
agtagagtaggaccaagaaaat

SEQ ID NO: 80949 - DNA, 22 bp, Artificial Sequence
  Synthetic oligonucleotide; TTT chr11 5208424 5208445 5208441 5208446 +
cagggaatacctgagaggaaaa

SEQ ID NO: 80950 - DNA, 22 bp, Artificial Sequence
  Synthetic oligonucleotide; TTC chr11 5208425 5208446 5208442 5208447 +
agggaatacctgagaggaaaaa

SEQ ID NO: 80951 - DNA, 22 bp, Artificial Sequence
  Synthetic oligonucleotide; CTG chr11 5208437 5208458 5208454 5208459 +
agaggaaaaaaaaaaactatga

SEQ ID NO: 80952 - DNA, 22 bp, Artificial Sequence
  Synthetic oligonucleotide; CTA chr11 5208456 5208477 5208473 5208478 +
tgaaggaacgcagtaattagct

SEQ ID NO: 80953 - DNA, 22 bp, Artificial Sequence
  Synthetic oligonucleotide; TTA chr11 5208475 5208496 5208492 5208497 +
gctccttagctgaaagaatgat

SEQ ID NO: 80954 - DNA, 22 bp, Artificial Sequence
  Synthetic oligonucleotide; CTC chr11 5208479 5208500 5208496 5208501 +
cttagctgaaagaatgatcttc

SEQ ID NO: 80955 - DNA, 22 bp, Artificial Sequence
  Synthetic oligonucleotide; CTT chr11 5208482 5208503 5208499 5208504 +
agctgaaagaatgatcttctgg

SEQ ID NO: 80956 - DNA, 22 bp, Artificial Sequence
  Synthetic oligonucleotide; TTA chr11 5208483 5208504 5208500 5208505 +
gctgaaagaatgatcttctggt

SEQ ID NO: 80957 - DNA, 22 bp, Artificial Sequence
  Synthetic oligonucleotide; CTG chr11 5208487 5208508 5208504 5208509 +
aaagaatgatcttctggtcagt

SEQ ID NO: 80958 - DNA, 22 bp, Artificial Sequence
  Synthetic oligonucleotide; CTT chr11 5208500 5208521 5208517 5208522 +
ctggtcagtgagaactggtttc

SEQ ID NO: 80959 - DNA, 22 bp, Artificial Sequence
  Synthetic oligonucleotide; TTC chr11 5208501 5208522 5208518 5208523 +
tggtcagtgagaactggtttca

SEQ ID NO: 80960 - DNA, 22 bp, Artificial Sequence
  Synthetic oligonucleotide; CTG chr11 5208503 5208524 5208520 5208525 +
gtcagtgagaactggtttcaaa

SEQ ID NO: 80961 - DNA, 22 bp, Artificial Sequence
  Synthetic oligonucleotide; CTG chr11 5208517 5208538 5208534 5208539 +
gtttcaaatcttggttttgtca

SEQ ID NO: 80962 - DNA, 22 bp, Artificial Sequence
  Synthetic oligonucleotide; TTT chr11 5208521 5208542 5208538 5208543 +
caaatcttggttttgtcatttc

SEQ ID NO: 80963 - DNA, 22 bp, Artificial Sequence
  Synthetic oligonucleotide; TTC chr11 5208522 5208543 5208539 5208544 +
aaatcttggttttgtcatttct

SEQ ID NO: 80964 - DNA, 22 bp, Artificial Sequence
  Synthetic oligonucleotide; CTT chr11 5208529 5208550 5208546 5208551 +
ggttttgtcatttcttaggtat

SEQ ID NO: 80965 - DNA, 22 bp, Artificial Sequence
  Synthetic oligonucleotide; TTG chr11 5208530 5208551 5208547 5208552 +
gttttgtcatttcttaggtata

SEQ ID NO: 80966 - DNA, 22 bp, Artificial Sequence
  Synthetic oligonucleotide; TTT chr11 5208534 5208555 5208551 5208556 +
tgtcatttcttaggtatataat

SEQ ID NO: 80967 - DNA, 22 bp, Artificial Sequence
  Synthetic oligonucleotide; TTT chr11 5208535 5208556 5208552 5208557 +
gtcatttcttaggtatataatt

SEQ ID NO: 80968 - DNA, 22 bp, Artificial Sequence
  Synthetic oligonucleotide; TTG chr11 5208536 5208557 5208553 5208558 +
tcatttcttaggtatataattt

SEQ ID NO: 80969 - DNA, 22 bp, Artificial Sequence
  Synthetic oligonucleotide; TTT chr11 5208542 5208563 5208559 5208564 +
cttaggtatataatttttagct

SEQ ID NO: 80970 - DNA, 22 bp, Artificial Sequence
  Synthetic oligonucleotide; TTC chr11 5208543 5208564 5208560 5208565 +
ttaggtatataatttttagctc

SEQ ID NO: 80971 - DNA, 22 bp, Artificial Sequence
  Synthetic oligonucleotide; CTT chr11 5208545 5208566 5208562 5208567 +
aggtatataatttttagctcaa

SEQ ID NO: 80972 - DNA, 22 bp, Artificial Sequence
  Synthetic oligonucleotide; TTA chr11 5208546 5208567 5208563 5208568 +
ggtatataatttttagctcaac

SEQ ID NO: 80973 - DNA, 22 bp, Artificial Sequence
  Synthetic oligonucleotide; TTT chr11 5208558 5208579 5208575 5208580 +
ttagctcaacacttagctgcac

SEQ ID NO: 80974 - DNA, 22 bp, Artificial Sequence
  Synthetic oligonucleotide; TTT chr11 5208559 5208580 5208576 5208581 +
tagctcaacacttagctgcaca

SEQ ID NO: 80975 - DNA, 22 bp, Artificial Sequence
  Synthetic oligonucleotide; TTT chr11 5208560 5208581 5208577 5208582 +
agctcaacacttagctgcacaa

SEQ ID NO: 80976 - DNA, 22 bp, Artificial Sequence
  Synthetic oligonucleotide; TTA chr11 5208561 5208582 5208578 5208583 +
gctcaacacttagctgcacaat

SEQ ID NO: 80977 - DNA, 22 bp, Artificial Sequence
  Synthetic oligonucleotide; CTC chr11 5208565 5208586 5208582 5208587 +
aacacttagctgcacaattttt

SEQ ID NO: 80978 - DNA, 22 bp, Artificial Sequence
  Synthetic oligonucleotide; CTT chr11 5208572 5208593 5208589 5208594 +
agctgcacaatttttaaaaata

SEQ ID NO: 80979 - DNA, 22 bp, Artificial Sequence
  Synthetic oligonucleotide; TTA chr11 5208573 5208594 5208590 5208595 +
gctgcacaatttttaaaaatat

SEQ ID NO: 80980 - DNA, 22 bp, Artificial Sequence
  Synthetic oligonucleotide; CTG chr11 5208577 5208598 5208594 5208599 +
cacaatttttaaaaatattgtt

SEQ ID NO: 80981 - DNA, 22 bp, Artificial Sequence
  Synthetic oligonucleotide; TTT chr11 5208585 5208606 5208602 5208607 +
ttaaaaatattgttggtatgat

SEQ ID NO: 80982 - DNA, 22 bp, Artificial Sequence
  Synthetic oligonucleotide; TTT chr11 5208586 5208607 5208603 5208608 +
taaaaatattgttggtatgatg

SEQ ID NO: 80983 - DNA, 22 bp, Artificial Sequence
  Synthetic oligonucleotide; TTT chr11 5208587 5208608 5208604 5208609 +
aaaaatattgttggtatgatga

SEQ ID NO: 80984 - DNA, 22 bp, Artificial Sequence
  Synthetic oligonucleotide; TTA chr11 5208588 5208609 5208605 5208610 +
aaaatattgttggtatgatgat

SEQ ID NO: 80985 - DNA, 22 bp, Artificial Sequence
  Synthetic oligonucleotide; TTG chr11 5208597 5208618 5208614 5208619 +
ttggtatgatgataatatataa

SEQ ID NO: 80986 - DNA, 22 bp, Artificial Sequence
  Synthetic oligonucleotide; TTG chr11 5208600 5208621 5208617 5208622 +
gtatgatgataatatataaaaa

SEQ ID NO: 80987 - DNA, 22 bp, Artificial Sequence
  Synthetic oligonucleotide; CTC chr11 5208628 5208649 5208645 5208650 +
attatctgccactcaaaagcta

SEQ ID NO: 80988 - DNA, 22 bp, Artificial Sequence
  Synthetic oligonucleotide; TTA chr11 5208632 5208653 5208649 5208654 +
tctgccactcaaaagctatcag

SEQ ID NO: 80989 - DNA, 22 bp, Artificial Sequence
  Synthetic oligonucleotide; CTG chr11 5208636 5208657 5208653 5208658 +
ccactcaaaagctatcagtatt

SEQ ID NO: 80990 - DNA, 22 bp, Artificial Sequence
  Synthetic oligonucleotide; CTC chr11 5208642 5208663 5208659 5208664 +
aaaagctatcagtatttatgat

SEQ ID NO: 80991 - DNA, 22 bp, Artificial Sequence
  Synthetic oligonucleotide; CTA chr11 5208650 5208671 5208667 5208672 +
tcagtatttatgataataattc

SEQ ID NO: 80992 - DNA, 22 bp, Artificial Sequence
  Synthetic oligonucleotide; TTT chr11 5208659 5208680 5208676 5208681 +
atgataataattctagttgtga

SEQ ID NO: 80993 - DNA, 22 bp, Artificial Sequence
  Synthetic oligonucleotide; TTA chr11 5208660 5208681 5208677 5208682 +
tgataataattctagttgtgag

SEQ ID NO: 80994 - DNA, 22 bp, Artificial Sequence
  Synthetic oligonucleotide; TTC chr11 5208672 5208693 5208689 5208694 +
tagttgtgagaaattgattatt

SEQ ID NO: 80995 - DNA, 22 bp, Artificial Sequence
  Synthetic oligonucleotide; CTA chr11 5208674 5208695 5208691 5208696 +
gttgtgagaaattgattattaa

SEQ ID NO: 80996 - DNA, 22 bp, Artificial Sequence
  Synthetic oligonucleotide; TTG chr11 5208678 5208699 5208695 5208700 +
tgagaaattgattattaaatat

SEQ ID NO: 80997 - DNA, 22 bp, Artificial Sequence
  Synthetic oligonucleotide; TTG chr11 5208688 5208709 5208705 5208710 +
attattaaatatatataaggga

SEQ ID NO: 80998 - DNA, 22 bp, Artificial Sequence
  Synthetic oligonucleotide; TTA chr11 5208692 5208713 5208709 5208714 +
ttaaatatatataagggataga

SEQ ID NO: 80999 - DNA, 22 bp, Artificial Sequence
  Synthetic oligonucleotide; TTA chr11 5208695 5208716 5208712 5208717 +
aatatatataagggatagaaga

SEQ ID NO: 81000 - DNA, 22 bp, Artificial Sequence
  Synthetic oligonucleotide; TTG chr11 5208745 5208766 5208762 5208767 +
acaaaattttgtcttggaaatc

SEQ ID NO: 81001 - DNA, 22 bp, Artificial Sequence
  Synthetic oligonucleotide; TTT chr11 5208754 5208775 5208771 5208776 +
tgtcttggaaatctgagtgaac

SEQ ID NO: 81002 - DNA, 22 bp, Artificial Sequence
  Synthetic oligonucleotide; TTT chr11 5208755 5208776 5208772 5208777 +
gtcttggaaatctgagtgaacc

SEQ ID NO: 81003 - DNA, 22 bp, Artificial Sequence
  Synthetic oligonucleotide; TTG chr11 5208756 5208777 5208773 5208778 +
tcttggaaatctgagtgaacca

SEQ ID NO: 81004 - DNA, 22 bp, Artificial Sequence
  Synthetic oligonucleotide; CTT chr11 5208760 5208781 5208777 5208782 +
ggaaatctgagtgaaccattca

SEQ ID NO: 81005 - DNA, 22 bp, Artificial Sequence
  Synthetic oligonucleotide; TTG chr11 5208761 5208782 5208778 5208783 +
gaaatctgagtgaaccattcat

SEQ ID NO: 81006 - DNA, 22 bp, Artificial Sequence
  Synthetic oligonucleotide; CTG chr11 5208769 5208790 5208786 5208791 +
agtgaaccattcatcaagtttg

SEQ ID NO: 81007 - DNA, 22 bp, Artificial Sequence
  Synthetic oligonucleotide; TTC chr11 5208781 5208802 5208798 5208803 +
atcaagtttggaagcattagag

SEQ ID NO: 81008 - DNA, 22 bp, Artificial Sequence
  Synthetic oligonucleotide; TTT chr11 5208790 5208811 5208807 5208812 +
ggaagcattagaggaaactgaa

SEQ ID NO: 81009 - DNA, 22 bp, Artificial Sequence
  Synthetic oligonucleotide; TTG chr11 5208791 5208812 5208808 5208813 +
gaagcattagaggaaactgaaa

SEQ ID NO: 81010 - DNA, 22 bp, Artificial Sequence
  Synthetic oligonucleotide; TTA chr11 5208800 5208821 5208817 5208822 +
gaggaaactgaaagaagtggag

SEQ ID NO: 81011 - DNA, 22 bp, Artificial Sequence
  Synthetic oligonucleotide; CTG chr11 5208810 5208831 5208827 5208832 +
aaagaagtggaggataatttac

SEQ ID NO: 81012 - DNA, 22 bp, Artificial Sequence
  Synthetic oligonucleotide; TTT chr11 5208830 5208851 5208847 5208852 +
actatcttttcaactcgctgag

SEQ ID NO: 81013 - DNA, 22 bp, Artificial Sequence
  Synthetic oligonucleotide; TTA chr11 5208831 5208852 5208848 5208853 +
ctatcttttcaactcgctgagt

SEQ ID NO: 81014 - DNA, 22 bp, Artificial Sequence
  Synthetic oligonucleotide; CTA chr11 5208834 5208855 5208851 5208856 +
tcttttcaactcgctgagttta

SEQ ID NO: 81015 - DNA, 22 bp, Artificial Sequence
  Synthetic oligonucleotide; CTT chr11 5208838 5208859 5208855 5208860 +
ttcaactcgctgagtttaagag

SEQ ID NO: 81016 - DNA, 22 bp, Artificial Sequence
  Synthetic oligonucleotide; TTT chr11 5208839 5208860 5208856 5208861 +
tcaactcgctgagtttaagagg

SEQ ID NO: 81017 - DNA, 22 bp, Artificial Sequence
  Synthetic oligonucleotide; TTT chr11 5208840 5208861 5208857 5208862 +
caactcgctgagtttaagaggt

SEQ ID NO: 81018 - DNA, 22 bp, Artificial Sequence
  Synthetic oligonucleotide; TTC chr11 5208841 5208862 5208858 5208863 +
aactcgctgagtttaagaggtc

SEQ ID NO: 81019 - DNA, 22 bp, Artificial Sequence
  Synthetic oligonucleotide; CTC chr11 5208846 5208867 5208863 5208868 +
gctgagtttaagaggtccatag

SEQ ID NO: 81020 - DNA, 22 bp, Artificial Sequence
  Synthetic oligonucleotide; CTG chr11 5208850 5208871 5208867 5208872 +
agtttaagaggtccataggtca

SEQ ID NO: 81021 - DNA, 22 bp, Artificial Sequence
  Synthetic oligonucleotide; TTT chr11 5208855 5208876 5208872 5208877 +
aagaggtccataggtcatataa

SEQ ID NO: 81022 - DNA, 22 bp, Artificial Sequence
  Synthetic oligonucleotide; TTA chr11 5208856 5208877 5208873 5208878 +
agaggtccataggtcatataag

SEQ ID NO: 81023 - DNA, 22 bp, Artificial Sequence
  Synthetic oligonucleotide; CTG chr11 5208891 5208912 5208908 5208913 +
taagctattgtaacattttttt

SEQ ID NO: 81024 - DNA, 22 bp, Artificial Sequence
  Synthetic oligonucleotide; CTA chr11 5208898 5208919 5208915 5208920 +
ttgtaacatttttttttcatgt

SEQ ID NO: 81025 - DNA, 22 bp, Artificial Sequence
  Synthetic oligonucleotide; TTG chr11 5208901 5208922 5208918 5208923 +
taacatttttttttcatgtccc

SEQ ID NO: 81026 - DNA, 22 bp, Artificial Sequence
  Synthetic oligonucleotide; TTT chr11 5208909 5208930 5208926 5208931 +
ttttttcatgtcccaaaatgtt

SEQ ID NO: 81027 - DNA, 22 bp, Artificial Sequence
  Synthetic oligonucleotide; TTT chr11 5208910 5208931 5208927 5208932 +
tttttcatgtcccaaaatgtta

SEQ ID NO: 81028 - DNA, 22 bp, Artificial Sequence
  Synthetic oligonucleotide; TTT chr11 5208911 5208932 5208928 5208933 +
ttttcatgtcccaaaatgttaa

SEQ ID NO: 81029 - DNA, 22 bp, Artificial Sequence
  Synthetic oligonucleotide; TTT chr11 5208912 5208933 5208929 5208934 +
tttcatgtcccaaaatgttaat

SEQ ID NO: 81030 - DNA, 22 bp, Artificial Sequence
  Synthetic oligonucleotide; TTT chr11 5208913 5208934 5208930 5208935 +
ttcatgtcccaaaatgttaatg

SEQ ID NO: 81031 - DNA, 22 bp, Artificial Sequence
  Synthetic oligonucleotide; TTT chr11 5208914 5208935 5208931 5208936 +
tcatgtcccaaaatgttaatgt

SEQ ID NO: 81032 - DNA, 22 bp, Artificial Sequence
  Synthetic oligonucleotide; TTT chr11 5208915 5208936 5208932 5208937 +
catgtcccaaaatgttaatgta

SEQ ID NO: 81033 - DNA, 22 bp, Artificial Sequence
  Synthetic oligonucleotide; TTC chr11 5208916 5208937 5208933 5208938 +
atgtcccaaaatgttaatgtat

SEQ ID NO: 81034 - DNA, 22 bp, Artificial Sequence
  Synthetic oligonucleotide; TTA chr11 5208932 5208953 5208949 5208954 +
atgtatccctaacagagagcaa

SEQ ID NO: 81035 - DNA, 22 bp, Artificial Sequence
  Synthetic oligonucleotide; CTA chr11 5208943 5208964 5208960 5208965 +
acagagagcaatgaagttcttt

SEQ ID NO: 81036 - DNA, 22 bp, Artificial Sequence
  Synthetic oligonucleotide; TTC chr11 5208962 5208983 5208979 5208984 +
tttttagtggagtttctctttc

SEQ ID NO: 81037 - DNA, 22 bp, Artificial Sequence
  Synthetic oligonucleotide; CTT chr11 5208964 5208985 5208981 5208986 +
tttagtggagtttctctttctt

SEQ ID NO: 81038 - DNA, 22 bp, Artificial Sequence
  Synthetic oligonucleotide; TTT chr11 5208965 5208986 5208982 5208987 +
ttagtggagtttctctttcttg

SEQ ID NO: 81039 - DNA, 22 bp, Artificial Sequence
  Synthetic oligonucleotide; TTT chr11 5208966 5208987 5208983 5208988 +
tagtggagtttctctttcttga

SEQ ID NO: 81040 - DNA, 22 bp, Artificial Sequence
  Synthetic oligonucleotide; TTT chr11 5208967 5208988 5208984 5208989 +
agtggagtttctctttcttgac

SEQ ID NO: 81041 - DNA, 22 bp, Artificial Sequence
  Synthetic oligonucleotide; TTA chr11 5208968 5208989 5208985 5208990 +
gtggagtttctctttcttgaca

SEQ ID NO: 81042 - DNA, 22 bp, Artificial Sequence
  Synthetic oligonucleotide; TTT chr11 5208977 5208998 5208994 5208999 +
ctctttcttgacatagtaccat

SEQ ID NO: 81043 - DNA, 22 bp, Artificial Sequence
  Synthetic oligonucleotide; TTC chr11 5208978 5208999 5208995 5209000 +
tctttcttgacatagtaccatg

SEQ ID NO: 81044 - DNA, 22 bp, Artificial Sequence
  Synthetic oligonucleotide; CTC chr11 5208980 5209001 5208997 5209002 +
tttcttgacatagtaccatgta

SEQ ID NO: 81045 - DNA, 22 bp, Artificial Sequence
  Synthetic oligonucleotide; CTT chr11 5208982 5209003 5208999 5209004 +
tcttgacatagtaccatgtagt

SEQ ID NO: 81046 - DNA, 22 bp, Artificial Sequence
  Synthetic oligonucleotide; TTT chr11 5208983 5209004 5209000 5209005 +
cttgacatagtaccatgtagtg

SEQ ID NO: 81047 - DNA, 22 bp, Artificial Sequence
  Synthetic oligonucleotide; TTC chr11 5208984 5209005 5209001 5209006 +
ttgacatagtaccatgtagtga

SEQ ID NO: 81048 - DNA, 22 bp, Artificial Sequence
  Synthetic oligonucleotide; CTT chr11 5208986 5209007 5209003 5209008 +
gacatagtaccatgtagtgaag

SEQ ID NO: 81049 - DNA, 22 bp, Artificial Sequence
  Synthetic oligonucleotide; TTG chr11 5208987 5209008 5209004 5209009 +
acatagtaccatgtagtgaaga

SEQ ID NO: 81050 - DNA, 22 bp, Artificial Sequence
  Synthetic oligonucleotide; CTG chr11 5209014 5209035 5209031 5209036 +
ctgactttggaattgaaagaat

SEQ ID NO: 81051 - DNA, 22 bp, Artificial Sequence
  Synthetic oligonucleotide; CTG chr11 5209017 5209038 5209034 5209039 +
actttggaattgaaagaatctt

SEQ ID NO: 81052 - DNA, 22 bp, Artificial Sequence
  Synthetic oligonucleotide; CTT chr11 5209021 5209042 5209038 5209043 +
tggaattgaaagaatcttagct

SEQ ID NO: 81053 - DNA, 22 bp, Artificial Sequence
  Synthetic oligonucleotide; TTT chr11 5209022 5209043 5209039 5209044 +
ggaattgaaagaatcttagctc

SEQ ID NO: 81054 - DNA, 22 bp, Artificial Sequence
  Synthetic oligonucleotide; TTG chr11 5209023 5209044 5209040 5209045 +
gaattgaaagaatcttagctca

SEQ ID NO: 81055 - DNA, 22 bp, Artificial Sequence
  Synthetic oligonucleotide; TTG chr11 5209029 5209050 5209046 5209051 +
aaagaatcttagctcagctact

SEQ ID NO: 81056 - DNA, 22 bp, Artificial Sequence
  Synthetic oligonucleotide; CTT chr11 5209039 5209060 5209056 5209061 +
agctcagctacttactagctga

SEQ ID NO: 81057 - DNA, 22 bp, Artificial Sequence
  Synthetic oligonucleotide; TTA chr11 5209040 5209061 5209057 5209062 +
gctcagctacttactagctgag

SEQ ID NO: 81058 - DNA, 22 bp, Artificial Sequence
  Synthetic oligonucleotide; CTC chr11 5209044 5209065 5209061 5209066 +
agctacttactagctgagtagc

SEQ ID NO: 81059 - DNA, 22 bp, Artificial Sequence
  Synthetic oligonucleotide; CTA chr11 5209049 5209070 5209066 5209071 +
cttactagctgagtagctacaa

SEQ ID NO: 81060 - DNA, 22 bp, Artificial Sequence
  Synthetic oligonucleotide; CTT chr11 5209052 5209073 5209069 5209074 +
actagctgagtagctacaacac

SEQ ID NO: 81061 - DNA, 22 bp, Artificial Sequence
  Synthetic oligonucleotide; TTA chr11 5209053 5209074 5209070 5209075 +
ctagctgagtagctacaacacc

SEQ ID NO: 81062 - DNA, 22 bp, Artificial Sequence
  Synthetic oligonucleotide; CTA chr11 5209056 5209077 5209073 5209078 +
gctgagtagctacaacacctta

SEQ ID NO: 81063 - DNA, 22 bp, Artificial Sequence
  Synthetic oligonucleotide; CTG chr11 5209060 5209081 5209077 5209082 +
agtagctacaacaccttaatgc

SEQ ID NO: 81064 - DNA, 22 bp, Artificial Sequence
  Synthetic oligonucleotide; CTA chr11 5209068 5209089 5209085 5209090 +
caacaccttaatgcccatccca

SEQ ID NO: 81065 - DNA, 22 bp, Artificial Sequence
  Synthetic oligonucleotide; CTT chr11 5209077 5209098 5209094 5209099 +
aatgcccatcccaagacagtgt

SEQ ID NO: 81066 - DNA, 22 bp, Artificial Sequence
  Synthetic oligonucleotide; TTA chr11 5209078 5209099 5209095 5209100 +
atgcccatcccaagacagtgtg

SEQ ID NO: 81067 - DNA, 22 bp, Artificial Sequence
  Synthetic oligonucleotide; CTC chr11 5209125 5209146 5209142 5209147 +
aggaagcacaggatgtaccaga

SEQ ID NO: 81068 - DNA, 22 bp, Artificial Sequence
  Synthetic oligonucleotide; CTT chr11 5209159 5209180 5209176 5209181 +
ttcatgttgctttcctaggctt

SEQ ID NO: 81069 - DNA, 22 bp, Artificial Sequence
  Synthetic oligonucleotide; TTT chr11 5209160 5209181 5209177 5209182 +
tcatgttgctttcctaggcttt

SEQ ID NO: 81070 - DNA, 22 bp, Artificial Sequence
  Synthetic oligonucleotide; TTT chr11 5209161 5209182 5209178 5209183 +
catgttgctttcctaggctttt

SEQ ID NO: 81071 - DNA, 22 bp, Artificial Sequence
  Synthetic oligonucleotide; TTC chr11 5209162 5209183 5209179 5209184 +
atgttgctttcctaggcttttt

SEQ ID NO: 81072 - DNA, 22 bp, Artificial Sequence
  Synthetic oligonucleotide; TTG chr11 5209168 5209189 5209185 5209190 +
ctttcctaggctttttatttcc

SEQ ID NO: 81073 - DNA, 22 bp, Artificial Sequence
  Synthetic oligonucleotide; CTT chr11 5209171 5209192 5209188 5209193 +
tcctaggctttttatttccctc

SEQ ID NO: 81074 - DNA, 22 bp, Artificial Sequence
  Synthetic oligonucleotide; TTT chr11 5209172 5209193 5209189 5209194 +
cctaggctttttatttccctcc

SEQ ID NO: 81075 - DNA, 22 bp, Artificial Sequence
  Synthetic oligonucleotide; TTC chr11 5209173 5209194 5209190 5209195 +
ctaggctttttatttccctcct

SEQ ID NO: 81076 - DNA, 22 bp, Artificial Sequence
  Synthetic oligonucleotide; CTA chr11 5209176 5209197 5209193 5209198 +
ggctttttatttccctcctcta

SEQ ID NO: 81077 - DNA, 22 bp, Artificial Sequence
  Synthetic oligonucleotide; CTT chr11 5209181 5209202 5209198 5209203 +
tttatttccctcctctaggtat

SEQ ID NO: 81078 - DNA, 22 bp, Artificial Sequence
  Synthetic oligonucleotide; TTT chr11 5209182 5209203 5209199 5209204 +
ttatttccctcctctaggtatt

SEQ ID NO: 81079 - DNA, 22 bp, Artificial Sequence
  Synthetic oligonucleotide; TTT chr11 5209183 5209204 5209200 5209205 +
tatttccctcctctaggtattt

SEQ ID NO: 81080 - DNA, 22 bp, Artificial Sequence
  Synthetic oligonucleotide; TTT chr11 5209184 5209205 5209201 5209206 +
atttccctcctctaggtatttc

SEQ ID NO: 81081 - DNA, 22 bp, Artificial Sequence
  Synthetic oligonucleotide; TTA chr11 5209185 5209206 5209202 5209207 +
tttccctcctctaggtatttct

SEQ ID NO: 81082 - DNA, 22 bp, Artificial Sequence
  Synthetic oligonucleotide; TTT chr11 5209188 5209209 5209205 5209210 +
ccctcctctaggtatttctgtt

SEQ ID NO: 81083 - DNA, 22 bp, Artificial Sequence
  Synthetic oligonucleotide; TTC chr11 5209189 5209210 5209206 5209211 +
cctcctctaggtatttctgtta

SEQ ID NO: 81084 - DNA, 22 bp, Artificial Sequence
  Synthetic oligonucleotide; CTC chr11 5209193 5209214 5209210 5209215 +
ctctaggtatttctgttatttt

SEQ ID NO: 81085 - DNA, 22 bp, Artificial Sequence
  Synthetic oligonucleotide; CTC chr11 5209196 5209217 5209213 5209218 +
taggtatttctgttattttcct

SEQ ID NO: 81086 - DNA, 22 bp, Artificial Sequence
  Synthetic oligonucleotide; CTA chr11 5209198 5209219 5209215 5209220 +
ggtatttctgttattttccttt

SEQ ID NO: 81087 - DNA, 22 bp, Artificial Sequence
  Synthetic oligonucleotide; TTT chr11 5209205 5209226 5209222 5209227 +
ctgttattttccttttttcatt

SEQ ID NO: 81088 - DNA, 22 bp, Artificial Sequence
  Synthetic oligonucleotide; TTC chr11 5209206 5209227 5209223 5209228 +
tgttattttccttttttcatta

SEQ ID NO: 81089 - DNA, 22 bp, Artificial Sequence
  Synthetic oligonucleotide; CTG chr11 5209208 5209229 5209225 5209230 +
ttattttccttttttcattatt

SEQ ID NO: 81090 - DNA, 22 bp, Artificial Sequence
  Synthetic oligonucleotide; TTA chr11 5209211 5209232 5209228 5209233 +
ttttccttttttcattatttct

SEQ ID NO: 81091 - DNA, 22 bp, Artificial Sequence
  Synthetic oligonucleotide; TTT chr11 5209214 5209235 5209231 5209236 +
tccttttttcattatttcttcc

SEQ ID NO: 81092 - DNA, 22 bp, Artificial Sequence
  Synthetic oligonucleotide; TTT chr11 5209215 5209236 5209232 5209237 +
ccttttttcattatttcttccc

SEQ ID NO: 81093 - DNA, 22 bp, Artificial Sequence
  Synthetic oligonucleotide; TTC chr11 5209216 5209237 5209233 5209238 +
cttttttcattatttcttccct

SEQ ID NO: 81094 - DNA, 22 bp, Artificial Sequence
  Synthetic oligonucleotide; CTT chr11 5209219 5209240 5209236 5209241 +
ttttcattatttcttccctctt

SEQ ID NO: 81095 - DNA, 22 bp, Artificial Sequence
  Synthetic oligonucleotide; TTT chr11 5209220 5209241 5209237 5209242 +
tttcattatttcttccctcttc

SEQ ID NO: 81096 - DNA, 22 bp, Artificial Sequence
  Synthetic oligonucleotide; TTT chr11 5209221 5209242 5209238 5209243 +
ttcattatttcttccctcttct

SEQ ID NO: 81097 - DNA, 22 bp, Artificial Sequence
  Synthetic oligonucleotide; TTT chr11 5209222 5209243 5209239 5209244 +
tcattatttcttccctcttctt

SEQ ID NO: 81098 - DNA, 22 bp, Artificial Sequence
  Synthetic oligonucleotide; TTT chr11 5209223 5209244 5209240 5209245 +
cattatttcttccctcttcttc

SEQ ID NO: 81099 - DNA, 22 bp, Artificial Sequence
  Synthetic oligonucleotide; TTC chr11 5209224 5209245 5209241 5209246 +
attatttcttccctcttcttca

SEQ ID NO: 81100 - DNA, 22 bp, Artificial Sequence
  Synthetic oligonucleotide; TTA chr11 5209228 5209249 5209245 5209250 +
tttcttccctcttcttcaggaa

SEQ ID NO: 81101 - DNA, 22 bp, Artificial Sequence
  Synthetic oligonucleotide; TTT chr11 5209231 5209252 5209248 5209253 +
cttccctcttcttcaggaagtt

SEQ ID NO: 81102 - DNA, 22 bp, Artificial Sequence
  Synthetic oligonucleotide; TTC chr11 5209232 5209253 5209249 5209254 +
ttccctcttcttcaggaagtta

SEQ ID NO: 81103 - DNA, 22 bp, Artificial Sequence
  Synthetic oligonucleotide; CTT chr11 5209234 5209255 5209251 5209256 +
ccctcttcttcaggaagttaag

SEQ ID NO: 81104 - DNA, 22 bp, Artificial Sequence
  Synthetic oligonucleotide; TTC chr11 5209235 5209256 5209252 5209257 +
cctcttcttcaggaagttaaga

SEQ ID NO: 81105 - DNA, 22 bp, Artificial Sequence
  Synthetic oligonucleotide; CTC chr11 5209239 5209260 5209256 5209261 +
ttcttcaggaagttaagacagt

SEQ ID NO: 81106 - DNA, 22 bp, Artificial Sequence
  Synthetic oligonucleotide; CTT chr11 5209241 5209262 5209258 5209263 +
cttcaggaagttaagacagtct

SEQ ID NO: 81107 - DNA, 22 bp, Artificial Sequence
  Synthetic oligonucleotide; TTC chr11 5209242 5209263 5209259 5209264 +
ttcaggaagttaagacagtcta

SEQ ID NO: 81108 - DNA, 22 bp, Artificial Sequence
  Synthetic oligonucleotide; CTT chr11 5209244 5209265 5209261 5209266 +
caggaagttaagacagtctacc

SEQ ID NO: 81109 - DNA, 22 bp, Artificial Sequence
  Synthetic oligonucleotide; TTC chr11 5209245 5209266 5209262 5209267 +
aggaagttaagacagtctacct

SEQ ID NO: 81110 - DNA, 22 bp, Artificial Sequence
  Synthetic oligonucleotide; TTA chr11 5209254 5209275 5209271 5209276 +
agacagtctacctagatttaga

SEQ ID NO: 81111 - DNA, 22 bp, Artificial Sequence
  Synthetic oligonucleotide; CTA chr11 5209264 5209285 5209281 5209286 +
cctagatttagaagcaaatgtt

SEQ ID NO: 81112 - DNA, 22 bp, Artificial Sequence
  Synthetic oligonucleotide; CTA chr11 5209268 5209289 5209285 5209290 +
gatttagaagcaaatgtttata

SEQ ID NO: 81113 - DNA, 22 bp, Artificial Sequence
  Synthetic oligonucleotide; TTT chr11 5209273 5209294 5209290 5209295 +
agaagcaaatgtttatatagtg

SEQ ID NO: 81114 - DNA, 22 bp, Artificial Sequence
  Synthetic oligonucleotide; TTA chr11 5209274 5209295 5209291 5209296 +
gaagcaaatgtttatatagtgg

SEQ ID NO: 81115 - DNA, 22 bp, Artificial Sequence
  Synthetic oligonucleotide; TTT chr11 5209287 5209308 5209304 5209309 +
atatagtggtgaaatttaaagc

SEQ ID NO: 81116 - DNA, 22 bp, Artificial Sequence
  Synthetic oligonucleotide; TTA chr11 5209288 5209309 5209305 5209310 +
tatagtggtgaaatttaaagcc

SEQ ID NO: 81117 - DNA, 22 bp, Artificial Sequence
  Synthetic oligonucleotide; TTT chr11 5209304 5209325 5209321 5209326 +
aaagcctaattgactaaagcca

SEQ ID NO: 81118 - DNA, 22 bp, Artificial Sequence
  Synthetic oligonucleotide; TTA chr11 5209305 5209326 5209322 5209327 +
aagcctaattgactaaagccat

SEQ ID NO: 81119 - DNA, 22 bp, Artificial Sequence
  Synthetic oligonucleotide; CTA chr11 5209312 5209333 5209329 5209334 +
attgactaaagccatttaagaa

SEQ ID NO: 81120 - DNA, 22 bp, Artificial Sequence
  Synthetic oligonucleotide; TTG chr11 5209316 5209337 5209333 5209338 +
actaaagccatttaagaatgta

SEQ ID NO: 81121 - DNA, 22 bp, Artificial Sequence
  Synthetic oligonucleotide; CTA chr11 5209320 5209341 5209337 5209342 +
aagccatttaagaatgtaatat

SEQ ID NO: 81122 - DNA, 22 bp, Artificial Sequence
  Synthetic oligonucleotide; TTT chr11 5209329 5209350 5209346 5209351 +
aagaatgtaatatctcagttag

SEQ ID NO: 81123 - DNA, 22 bp, Artificial Sequence
  Synthetic oligonucleotide; TTA chr11 5209330 5209351 5209347 5209352 +
agaatgtaatatctcagttagt

SEQ ID NO: 81124 - DNA, 22 bp, Artificial Sequence
  Synthetic oligonucleotide; CTC chr11 5209345 5209366 5209362 5209367 +
agttagtatgcacttcttgaaa

SEQ ID NO: 81125 - DNA, 22 bp, Artificial Sequence
  Synthetic oligonucleotide; TTA chr11 5209350 5209371 5209367 5209372 +
gtatgcacttcttgaaatgcaa

SEQ ID NO: 81126 - DNA, 22 bp, Artificial Sequence
  Synthetic oligonucleotide; CTT chr11 5209360 5209381 5209377 5209382 +
cttgaaatgcaaagaaatggtc

SEQ ID NO: 81127 - DNA, 22 bp, Artificial Sequence
  Synthetic oligonucleotide; TTC chr11 5209361 5209382 5209378 5209383 +
ttgaaatgcaaagaaatggtct

SEQ ID NO: 81128 - DNA, 22 bp, Artificial Sequence
  Synthetic oligonucleotide; CTT chr11 5209363 5209384 5209380 5209385 +
gaaatgcaaagaaatggtctga

SEQ ID NO: 81129 - DNA, 22 bp, Artificial Sequence
  Synthetic oligonucleotide; TTG chr11 5209364 5209385 5209381 5209386 +
aaatgcaaagaaatggtctgac

SEQ ID NO: 81130 - DNA, 22 bp, Artificial Sequence
  Synthetic oligonucleotide; CTG chr11 5209384 5209405 5209401 5209406 +
acttttttccattgtttagttt

SEQ ID NO: 81131 - DNA, 22 bp, Artificial Sequence
  Synthetic oligonucleotide; CTT chr11 5209388 5209409 5209405 5209410 +
ttttccattgtttagtttctaa

SEQ ID NO: 81132 - DNA, 22 bp, Artificial Sequence
  Synthetic oligonucleotide; TTT chr11 5209389 5209410 5209406 5209411 +
tttccattgtttagtttctaaa

SEQ ID NO: 81133 - DNA, 22 bp, Artificial Sequence
  Synthetic oligonucleotide; TTT chr11 5209390 5209411 5209407 5209412 +
ttccattgtttagtttctaaat

SEQ ID NO: 81134 - DNA, 22 bp, Artificial Sequence
  Synthetic oligonucleotide; TTT chr11 5209391 5209412 5209408 5209413 +
tccattgtttagtttctaaatt

SEQ ID NO: 81135 - DNA, 22 bp, Artificial Sequence
  Synthetic oligonucleotide; TTT chr11 5209392 5209413 5209409 5209414 +
ccattgtttagtttctaaattt

SEQ ID NO: 81136 - DNA, 22 bp, Artificial Sequence
  Synthetic oligonucleotide; TTC chr11 5209393 5209414 5209410 5209415 +
cattgtttagtttctaaattta

SEQ ID NO: 81137 - DNA, 22 bp, Artificial Sequence
  Synthetic oligonucleotide; TTG chr11 5209398 5209419 5209415 5209420 +
tttagtttctaaatttagtttt

SEQ ID NO: 81138 - DNA, 22 bp, Artificial Sequence
  Synthetic oligonucleotide; TTT chr11 5209401 5209422 5209418 5209423 +
agtttctaaatttagtttttat

SEQ ID NO: 81139 - DNA, 22 bp, Artificial Sequence
  Synthetic oligonucleotide; TTA chr11 5209402 5209423 5209419 5209424 +
gtttctaaatttagtttttatt

SEQ ID NO: 81140 - DNA, 22 bp, Artificial Sequence
  Synthetic oligonucleotide; TTT chr11 5209406 5209427 5209423 5209428 +
ctaaatttagtttttattttaa

SEQ ID NO: 81141 - DNA, 22 bp, Artificial Sequence
  Synthetic oligonucleotide; TTC chr11 5209407 5209428 5209424 5209429 +
taaatttagtttttattttaat

SEQ ID NO: 81142 - DNA, 22 bp, Artificial Sequence
  Synthetic oligonucleotide; CTA chr11 5209409 5209430 5209426 5209431 +
aatttagtttttattttaatat

SEQ ID NO: 81143 - DNA, 22 bp, Artificial Sequence
  Synthetic oligonucleotide; TTT chr11 5209414 5209435 5209431 5209436 +
agtttttattttaatattttaa

SEQ ID NO: 81144 - DNA, 22 bp, Artificial Sequence
  Synthetic oligonucleotide; TTA chr11 5209415 5209436 5209432 5209437 +
gtttttattttaatattttaag

SEQ ID NO: 81145 - DNA, 22 bp, Artificial Sequence
  Synthetic oligonucleotide; TTT chr11 5209419 5209440 5209436 5209441 +
ttattttaatattttaagtaca

SEQ ID NO: 81146 - DNA, 22 bp, Artificial Sequence
  Synthetic oligonucleotide; TTT chr11 5209420 5209441 5209437 5209442 +
tattttaatattttaagtacag

SEQ ID NO: 81147 - DNA, 22 bp, Artificial Sequence
  Synthetic oligonucleotide; TTT chr11 5209421 5209442 5209438 5209443 +
attttaatattttaagtacagc

SEQ ID NO: 81148 - DNA, 22 bp, Artificial Sequence
  Synthetic oligonucleotide; TTA chr11 5209422 5209443 5209439 5209444 +
ttttaatattttaagtacagca

SEQ ID NO: 81149 - DNA, 22 bp, Artificial Sequence
  Synthetic oligonucleotide; TTT chr11 5209425 5209446 5209442 5209447 +
taatattttaagtacagcatgc

SEQ ID NO: 81150 - DNA, 22 bp, Artificial Sequence
  Synthetic oligonucleotide; TTT chr11 5209426 5209447 5209443 5209448 +
aatattttaagtacagcatgca

SEQ ID NO: 81151 - DNA, 22 bp, Artificial Sequence
  Synthetic oligonucleotide; TTA chr11 5209427 5209448 5209444 5209449 +
atattttaagtacagcatgcat

SEQ ID NO: 81152 - DNA, 22 bp, Artificial Sequence
  Synthetic oligonucleotide; TTT chr11 5209433 5209454 5209450 5209455 +
taagtacagcatgcatatataa

SEQ ID NO: 81153 - DNA, 22 bp, Artificial Sequence
  Synthetic oligonucleotide; TTT chr11 5209434 5209455 5209451 5209456 +
aagtacagcatgcatatataaa

SEQ ID NO: 81154 - DNA, 22 bp, Artificial Sequence
  Synthetic oligonucleotide; TTA chr11 5209435 5209456 5209452 5209457 +
agtacagcatgcatatataaaa

SEQ ID NO: 81155 - DNA, 22 bp, Artificial Sequence
  Synthetic oligonucleotide; TTA chr11 5209469 5209490 5209486 5209491 +
tacatgcacagctgaattaact

SEQ ID NO: 81156 - DNA, 22 bp, Artificial Sequence
  Synthetic oligonucleotide; CTG chr11 5209483 5209504 5209500 5209505 +
aattaacttttggaaggtgaac

SEQ ID NO: 81157 - DNA, 22 bp, Artificial Sequence
  Synthetic oligonucleotide; TTA chr11 5209488 5209509 5209505 5209510 +
acttttggaaggtgaacacacc

SEQ ID NO: 81158 - DNA, 22 bp, Artificial Sequence
  Synthetic oligonucleotide; CTT chr11 5209492 5209513 5209509 5209514 +
ttggaaggtgaacacacccatg

SEQ ID NO: 81159 - DNA, 22 bp, Artificial Sequence
  Synthetic oligonucleotide; TTT chr11 5209493 5209514 5209510 5209515 +
tggaaggtgaacacacccatgt

SEQ ID NO: 81160 - DNA, 22 bp, Artificial Sequence
  Synthetic oligonucleotide; TTT chr11 5209494 5209515 5209511 5209516 +
ggaaggtgaacacacccatgta

SEQ ID NO: 81161 - DNA, 22 bp, Artificial Sequence
  Synthetic oligonucleotide; TTG chr11 5209495 5209516 5209512 5209517 +
gaaggtgaacacacccatgtaa

SEQ ID NO: 81162 - DNA, 22 bp, Artificial Sequence
  Synthetic oligonucleotide; CTA chr11 5209523 5209544 5209540 5209545 +
ataagataggaaattaaagagt

SEQ ID NO: 81163 - DNA, 22 bp, Artificial Sequence
  Synthetic oligonucleotide; TTA chr11 5209539 5209560 5209556 5209561 +
aagagtaaacatatgctcactc

SEQ ID NO: 81164 - DNA, 22 bp, Artificial Sequence
  Synthetic oligonucleotide; CTC chr11 5209557 5209578 5209574 5209579 +
actctttatcattccactaatt

SEQ ID NO: 81165 - DNA, 22 bp, Artificial Sequence
  Synthetic oligonucleotide; CTC chr11 5209561 5209582 5209578 5209583 +
tttatcattccactaattgtct

SEQ ID NO: 81166 - DNA, 22 bp, Artificial Sequence
  Synthetic oligonucleotide; CTT chr11 5209563 5209584 5209580 5209585 +
tatcattccactaattgtctcc

SEQ ID NO: 81167 - DNA, 22 bp, Artificial Sequence
  Synthetic oligonucleotide; TTT chr11 5209564 5209585 5209581 5209586 +
atcattccactaattgtctcca

SEQ ID NO: 81168 - DNA, 22 bp, Artificial Sequence
  Synthetic oligonucleotide; TTA chr11 5209565 5209586 5209582 5209587 +
tcattccactaattgtctccaa

SEQ ID NO: 81169 - DNA, 22 bp, Artificial Sequence
  Synthetic oligonucleotide; TTC chr11 5209571 5209592 5209588 5209593 +
cactaattgtctccaaagttaa

SEQ ID NO: 81170 - DNA, 22 bp, Artificial Sequence
  Synthetic oligonucleotide; CTA chr11 5209576 5209597 5209593 5209598 +
attgtctccaaagttaataatt

SEQ ID NO: 81171 - DNA, 22 bp, Artificial Sequence
  Synthetic oligonucleotide; TTG chr11 5209580 5209601 5209597 5209602 +
tctccaaagttaataattatcc

SEQ ID NO: 81172 - DNA, 22 bp, Artificial Sequence
  Synthetic oligonucleotide; CTC chr11 5209584 5209605 5209601 5209606 +
caaagttaataattatcctgat

SEQ ID NO: 81173 - DNA, 22 bp, Artificial Sequence
  Synthetic oligonucleotide; TTA chr11 5209592 5209613 5209609 5209614 +
ataattatcctgatataattca

SEQ ID NO: 81174 - DNA, 22 bp, Artificial Sequence
  Synthetic oligonucleotide; TTA chr11 5209599 5209620 5209616 5209621 +
tcctgatataattcatttttat

SEQ ID NO: 81175 - DNA, 22 bp, Artificial Sequence
  Synthetic oligonucleotide; CTG chr11 5209604 5209625 5209621 5209626 +
atataattcatttttatcacga

SEQ ID NO: 81176 - DNA, 22 bp, Artificial Sequence
  Synthetic oligonucleotide; TTC chr11 5209613 5209634 5209630 5209635 +
atttttatcacgattgactcat

SEQ ID NO: 81177 - DNA, 22 bp, Artificial Sequence
  Synthetic oligonucleotide; TTT chr11 5209617 5209638 5209634 5209639 +
ttatcacgattgactcatgtcc

SEQ ID NO: 81178 - DNA, 22 bp, Artificial Sequence
  Synthetic oligonucleotide; TTT chr11 5209618 5209639 5209635 5209640 +
tatcacgattgactcatgtccc

SEQ ID NO: 81179 - DNA, 22 bp, Artificial Sequence
  Synthetic oligonucleotide; TTT chr11 5209619 5209640 5209636 5209641 +
atcacgattgactcatgtccct

SEQ ID NO: 81180 - DNA, 22 bp, Artificial Sequence
  Synthetic oligonucleotide; TTA chr11 5209620 5209641 5209637 5209642 +
tcacgattgactcatgtccctt

SEQ ID NO: 81181 - DNA, 22 bp, Artificial Sequence
  Synthetic oligonucleotide; TTG chr11 5209629 5209650 5209646 5209651 +
actcatgtccctttttttaaaa

SEQ ID NO: 81182 - DNA, 22 bp, Artificial Sequence
  Synthetic oligonucleotide; CTC chr11 5209633 5209654 5209650 5209655 +
atgtccctttttttaaaagtgt

SEQ ID NO: 81183 - DNA, 22 bp, Artificial Sequence
  Synthetic oligonucleotide; CTT chr11 5209642 5209663 5209659 5209664 +
tttttaaaagtgtgtatacatt

SEQ ID NO: 81184 - DNA, 22 bp, Artificial Sequence
  Synthetic oligonucleotide; TTT chr11 5209643 5209664 5209660 5209665 +
ttttaaaagtgtgtatacattg

SEQ ID NO: 81185 - DNA, 22 bp, Artificial Sequence
  Synthetic oligonucleotide; TTT chr11 5209644 5209665 5209661 5209666 +
tttaaaagtgtgtatacattga

SEQ ID NO: 81186 - DNA, 22 bp, Artificial Sequence
  Synthetic oligonucleotide; TTT chr11 5209645 5209666 5209662 5209667 +
ttaaaagtgtgtatacattgaa

SEQ ID NO: 81187 - DNA, 22 bp, Artificial Sequence
  Synthetic oligonucleotide; TTT chr11 5209646 5209667 5209663 5209668 +
taaaagtgtgtatacattgaat

SEQ ID NO: 81188 - DNA, 22 bp, Artificial Sequence
  Synthetic oligonucleotide; TTT chr11 5209647 5209668 5209664 5209669 +
aaaagtgtgtatacattgaatt

SEQ ID NO: 81189 - DNA, 22 bp, Artificial Sequence
  Synthetic oligonucleotide; TTA chr11 5209648 5209669 5209665 5209670 +
aaagtgtgtatacattgaatta

SEQ ID NO: 81190 - DNA, 22 bp, Artificial Sequence
  Synthetic oligonucleotide; TTG chr11 5209665 5209686 5209682 5209687 +
aattatactgtgttgcttatgt

SEQ ID NO: 81191 - DNA, 22 bp, Artificial Sequence
  Synthetic oligonucleotide; TTA chr11 5209670 5209691 5209687 5209692 +
tactgtgttgcttatgtctgac

SEQ ID NO: 81192 - DNA, 22 bp, Artificial Sequence
  Synthetic oligonucleotide; CTG chr11 5209675 5209696 5209692 5209697 +
tgttgcttatgtctgactttat

SEQ ID NO: 81193 - DNA, 22 bp, Artificial Sequence
  Synthetic oligonucleotide; TTG chr11 5209680 5209701 5209697 5209702 +
cttatgtctgactttattcaat

SEQ ID NO: 81194 - DNA, 22 bp, Artificial Sequence
  Synthetic oligonucleotide; CTT chr11 5209683 5209704 5209700 5209705 +
atgtctgactttattcaatatt

SEQ ID NO: 81195 - DNA, 22 bp, Artificial Sequence
  Synthetic oligonucleotide; TTA chr11 5209684 5209705 5209701 5209706 +
tgtctgactttattcaatatta

SEQ ID NO: 81196 - DNA, 22 bp, Artificial Sequence
  Synthetic oligonucleotide; CTG chr11 5209690 5209711 5209707 5209712 +
actttattcaatattatgtttg

SEQ ID NO: 81197 - DNA, 22 bp, Artificial Sequence
  Synthetic oligonucleotide; CTT chr11 5209694 5209715 5209711 5209716 +
tattcaatattatgtttgtgaa

SEQ ID NO: 81198 - DNA, 22 bp, Artificial Sequence
  Synthetic oligonucleotide; TTT chr11 5209695 5209716 5209712 5209717 +
attcaatattatgtttgtgaat

SEQ ID NO: 81199 - DNA, 22 bp, Artificial Sequence
  Synthetic oligonucleotide; TTA chr11 5209696 5209717 5209713 5209718 +
ttcaatattatgtttgtgaatt

SEQ ID NO: 81200 - DNA, 22 bp, Artificial Sequence
  Synthetic oligonucleotide; TTC chr11 5209699 5209720 5209716 5209721 +
aatattatgtttgtgaattgca

SEQ ID NO: 81201 - DNA, 22 bp, Artificial Sequence
  Synthetic oligonucleotide; TTA chr11 5209706 5209727 5209723 5209728 +
tgtttgtgaattgcattcatac

SEQ ID NO: 81202 - DNA, 22 bp, Artificial Sequence
  Synthetic oligonucleotide; TTT chr11 5209711 5209732 5209728 5209733 +
gtgaattgcattcatactagtg

SEQ ID NO: 81203 - DNA, 22 bp, Artificial Sequence
  Synthetic oligonucleotide; TTG chr11 5209712 5209733 5209729 5209734 +
tgaattgcattcatactagtgt

SEQ ID NO: 81204 - DNA, 22 bp, Artificial Sequence
  Synthetic oligonucleotide; TTG chr11 5209719 5209740 5209736 5209741 +
cattcatactagtgtatgactg

SEQ ID NO: 81205 - DNA, 22 bp, Artificial Sequence
  Synthetic oligonucleotide; TTC chr11 5209724 5209745 5209741 5209746 +
atactagtgtatgactgtagtt

SEQ ID NO: 81206 - DNA, 22 bp, Artificial Sequence
  Synthetic oligonucleotide; CTA chr11 5209730 5209751 5209747 5209752 +
gtgtatgactgtagttgatttt

SEQ ID NO: 81207 - DNA, 22 bp, Artificial Sequence
  Synthetic oligonucleotide; CTG chr11 5209741 5209762 5209758 5209763 +
tagttgatttttcatttctgaa

SEQ ID NO: 81208 - DNA, 22 bp, Artificial Sequence
  Synthetic oligonucleotide; TTG chr11 5209747 5209768 5209764 5209769 +
atttttcatttctgaatgtcat

SEQ ID NO: 81209 - DNA, 22 bp, Artificial Sequence
  Synthetic oligonucleotide; TTT chr11 5209751 5209772 5209768 5209773 +
ttcatttctgaatgtcattcta

SEQ ID NO: 81210 - DNA, 22 bp, Artificial Sequence
  Synthetic oligonucleotide; TTT chr11 5209752 5209773 5209769 5209774 +
tcatttctgaatgtcattctat

SEQ ID NO: 81211 - DNA, 22 bp, Artificial Sequence
  Synthetic oligonucleotide; TTT chr11 5209753 5209774 5209770 5209775 +
catttctgaatgtcattctatt

SEQ ID NO: 81212 - DNA, 22 bp, Artificial Sequence
  Synthetic oligonucleotide; TTC chr11 5209754 5209775 5209771 5209776 +
atttctgaatgtcattctattt

SEQ ID NO: 81213 - DNA, 22 bp, Artificial Sequence
  Synthetic oligonucleotide; TTT chr11 5209758 5209779 5209775 5209780 +
ctgaatgtcattctattttatg

SEQ ID NO: 81214 - DNA, 22 bp, Artificial Sequence
  Synthetic oligonucleotide; TTC chr11 5209759 5209780 5209776 5209781 +
tgaatgtcattctattttatgt

SEQ ID NO: 81215 - DNA, 22 bp, Artificial Sequence
  Synthetic oligonucleotide; CTG chr11 5209761 5209782 5209778 5209783 +
aatgtcattctattttatgtat

SEQ ID NO: 81216 - DNA, 22 bp, Artificial Sequence
  Synthetic oligonucleotide; TTC chr11 5209771 5209792 5209788 5209793 +
tattttatgtatataccacaat

SEQ ID NO: 81217 - DNA, 22 bp, Artificial Sequence
  Synthetic oligonucleotide; CTA chr11 5209773 5209794 5209790 5209795 +
ttttatgtatataccacaatat

SEQ ID NO: 81218 - DNA, 22 bp, Artificial Sequence
  Synthetic oligonucleotide; TTT chr11 5209776 5209797 5209793 5209798 +
tatgtatataccacaatatatt

SEQ ID NO: 81219 - DNA, 22 bp, Artificial Sequence
  Synthetic oligonucleotide; TTT chr11 5209777 5209798 5209794 5209799 +
atgtatataccacaatatattt

SEQ ID NO: 81220 - DNA, 22 bp, Artificial Sequence
  Synthetic oligonucleotide; TTA chr11 5209778 5209799 5209795 5209800 +
tgtatataccacaatatattta

SEQ ID NO: 81221 - DNA, 22 bp, Artificial Sequence
  Synthetic oligonucleotide; TTT chr11 5209799 5209820 5209816 5209821 +
attgactccacagttgatagat

SEQ ID NO: 81222 - DNA, 22 bp, Artificial Sequence
  Synthetic oligonucleotide; TTA chr11 5209800 5209821 5209817 5209822 +
ttgactccacagttgatagata

SEQ ID NO: 81223 - DNA, 22 bp, Artificial Sequence
  Synthetic oligonucleotide; TTG chr11 5209803 5209824 5209820 5209825 +
actccacagttgatagatattt

SEQ ID NO: 81224 - DNA, 22 bp, Artificial Sequence
  Synthetic oligonucleotide; CTC chr11 5209807 5209828 5209824 5209829 +
cacagttgatagatatttgagt

SEQ ID NO: 81225 - DNA, 22 bp, Artificial Sequence
  Synthetic oligonucleotide; TTG chr11 5209815 5209836 5209832 5209837 +
atagatatttgagtaccttcta

SEQ ID NO: 81226 - DNA, 22 bp, Artificial Sequence
  Synthetic oligonucleotide; TTT chr11 5209825 5209846 5209842 5209847 +
gagtaccttctagcttttggct

SEQ ID NO: 81227 - DNA, 22 bp, Artificial Sequence
  Synthetic oligonucleotide; TTG chr11 5209826 5209847 5209843 5209848 +
agtaccttctagcttttggcta

SEQ ID NO: 81228 - DNA, 22 bp, Artificial Sequence
  Synthetic oligonucleotide; CTT chr11 5209834 5209855 5209851 5209856 +
ctagcttttggctataatataa

SEQ ID NO: 81229 - DNA, 22 bp, Artificial Sequence
  Synthetic oligonucleotide; TTC chr11 5209835 5209856 5209852 5209857 +
tagcttttggctataatataaa

SEQ ID NO: 81230 - DNA, 22 bp, Artificial Sequence
  Synthetic oligonucleotide; CTA chr11 5209837 5209858 5209854 5209859 +
gcttttggctataatataaatt

SEQ ID NO: 81231 - DNA, 22 bp, Artificial Sequence
  Synthetic oligonucleotide; CTT chr11 5209841 5209862 5209858 5209863 +
ttggctataatataaattgctg

SEQ ID NO: 81232 - DNA, 22 bp, Artificial Sequence
  Synthetic oligonucleotide; TTT chr11 5209842 5209863 5209859 5209864 +
tggctataatataaattgctgc

SEQ ID NO: 81233 - DNA, 22 bp, Artificial Sequence
  Synthetic oligonucleotide; TTT chr11 5209843 5209864 5209860 5209865 +
ggctataatataaattgctgct

SEQ ID NO: 81234 - DNA, 22 bp, Artificial Sequence
  Synthetic oligonucleotide; TTG chr11 5209844 5209865 5209861 5209866 +
gctataatataaattgctgcta

SEQ ID NO: 81235 - DNA, 22 bp, Artificial Sequence
  Synthetic oligonucleotide; CTA chr11 5209848 5209869 5209865 5209870 +
taatataaattgctgctatgaa

SEQ ID NO: 81236 - DNA, 22 bp, Artificial Sequence
  Synthetic oligonucleotide; TTG chr11 5209860 5209881 5209877 5209882 +
ctgctatgaagattcttatata

SEQ ID NO: 81237 - DNA, 22 bp, Artificial Sequence
  Synthetic oligonucleotide; CTG chr11 5209863 5209884 5209880 5209885 +
ctatgaagattcttatatattt

SEQ ID NO: 81238 - DNA, 22 bp, Artificial Sequence
  Synthetic oligonucleotide; CTA chr11 5209866 5209887 5209883 5209888 +
tgaagattcttatatatttttg

SEQ ID NO: 81239 - DNA, 22 bp, Artificial Sequence
  Synthetic oligonucleotide; TTC chr11 5209875 5209896 5209892 5209897 +
ttatatatttttgtatatatat

SEQ ID NO: 81240 - DNA, 22 bp, Artificial Sequence
  Synthetic oligonucleotide; CTT chr11 5209877 5209898 5209894 5209899 +
atatatttttgtatatatattc

SEQ ID NO: 81241 - DNA, 22 bp, Artificial Sequence
  Synthetic oligonucleotide; TTA chr11 5209878 5209899 5209895 5209900 +
tatatttttgtatatatattct

SEQ ID NO: 81242 - DNA, 22 bp, Artificial Sequence
  Synthetic oligonucleotide; TTT chr11 5209885 5209906 5209902 5209907 +
ttgtatatatattctgtaaatt

SEQ ID NO: 81243 - DNA, 22 bp, Artificial Sequence
  Synthetic oligonucleotide; TTT chr11 5209886 5209907 5209903 5209908 +
tgtatatatattctgtaaattg

SEQ ID NO: 81244 - DNA, 22 bp, Artificial Sequence
  Synthetic oligonucleotide; TTT chr11 5209887 5209908 5209904 5209909 +
gtatatatattctgtaaattgc

SEQ ID NO: 81245 - DNA, 22 bp, Artificial Sequence
  Synthetic oligonucleotide; TTG chr11 5209888 5209909 5209905 5209910 +
tatatatattctgtaaattgct

SEQ ID NO: 81246 - DNA, 22 bp, Artificial Sequence
  Synthetic oligonucleotide; TTC chr11 5209899 5209920 5209916 5209921 +
tgtaaattgctaggtcataaaa

SEQ ID NO: 81247 - DNA, 22 bp, Artificial Sequence
  Synthetic oligonucleotide; CTG chr11 5209901 5209922 5209918 5209923 +
taaattgctaggtcataaaata

SEQ ID NO: 81248 - DNA, 22 bp, Artificial Sequence
  Synthetic oligonucleotide; TTG chr11 5209908 5209929 5209925 5209930 +
ctaggtcataaaatatgcatat

SEQ ID NO: 81249 - DNA, 22 bp, Artificial Sequence
  Synthetic oligonucleotide; CTA chr11 5209911 5209932 5209928 5209933 +
ggtcataaaatatgcatatgtt

SEQ ID NO: 81250 - DNA, 22 bp, Artificial Sequence
  Synthetic oligonucleotide; TTC chr11 5209934 5209955 5209951 5209956 +
aactttaaaatacactgccaac

SEQ ID NO: 81251 - DNA, 22 bp, Artificial Sequence
  Synthetic oligonucleotide; CTT chr11 5209939 5209960 5209956 5209961 +
taaaatacactgccaacctgtt

SEQ ID NO: 81252 - DNA, 22 bp, Artificial Sequence
  Synthetic oligonucleotide; TTT chr11 5209940 5209961 5209957 5209962 +
aaaatacactgccaacctgttt

SEQ ID NO: 81253 - DNA, 22 bp, Artificial Sequence
  Synthetic oligonucleotide; TTA chr11 5209941 5209962 5209958 5209963 +
aaatacactgccaacctgttta

SEQ ID NO: 81254 - DNA, 22 bp, Artificial Sequence
  Synthetic oligonucleotide; CTG chr11 5209951 5209972 5209968 5209973 +
ccaacctgtttacctccccact

SEQ ID NO: 81255 - DNA, 22 bp, Artificial Sequence
  Synthetic oligonucleotide; CTG chr11 5209959 5209980 5209976 5209981 +
tttacctccccactataattta

SEQ ID NO: 81256 - DNA, 22 bp, Artificial Sequence
  Synthetic oligonucleotide; TTT chr11 5209962 5209983 5209979 5209984 +
acctccccactataatttaatg

SEQ ID NO: 81257 - DNA, 22 bp, Artificial Sequence
  Synthetic oligonucleotide; TTA chr11 5209963 5209984 5209980 5209985 +
cctccccactataatttaatgt

SEQ ID NO: 81258 - DNA, 22 bp, Artificial Sequence
  Synthetic oligonucleotide; CTC chr11 5209967 5209988 5209984 5209989 +
cccactataatttaatgtcatt

SEQ ID NO: 81259 - DNA, 22 bp, Artificial Sequence
  Synthetic oligonucleotide; CTA chr11 5209974 5209995 5209991 5209996 +
taatttaatgtcatttggtcaa

SEQ ID NO: 81260 - DNA, 22 bp, Artificial Sequence
  Synthetic oligonucleotide; TTT chr11 5209980 5210001 5209997 5210002 +
aatgtcatttggtcaacctata

SEQ ID NO: 81261 - DNA, 22 bp, Artificial Sequence
  Synthetic oligonucleotide; TTA chr11 5209981 5210002 5209998 5210003 +
atgtcatttggtcaacctataa

SEQ ID NO: 81262 - DNA, 22 bp, Artificial Sequence
  Synthetic oligonucleotide; TTT chr11 5209990 5210011 5210007 5210012 +
ggtcaacctataatatcataga

SEQ ID NO: 81263 - DNA, 22 bp, Artificial Sequence
  Synthetic oligonucleotide; TTG chr11 5209991 5210012 5210008 5210013 +
gtcaacctataatatcatagat

SEQ ID NO: 81264 - DNA, 22 bp, Artificial Sequence
  Synthetic oligonucleotide; CTA chr11 5210000 5210021 5210017 5210022 +
taatatcatagatgttttctct

SEQ ID NO: 81265 - DNA, 22 bp, Artificial Sequence
  Synthetic oligonucleotide; TTT chr11 5210017 5210038 5210034 5210039 +
tctcttatagcagcctgcatgt

SEQ ID NO: 81266 - DNA, 22 bp, Artificial Sequence
  Synthetic oligonucleotide; TTT chr11 5210018 5210039 5210035 5210040 +
ctcttatagcagcctgcatgtg

SEQ ID NO: 81267 - DNA, 22 bp, Artificial Sequence
  Synthetic oligonucleotide; TTC chr11 5210019 5210040 5210036 5210041 +
tcttatagcagcctgcatgtgc

SEQ ID NO: 81268 - DNA, 22 bp, Artificial Sequence
  Synthetic oligonucleotide; CTC chr11 5210021 5210042 5210038 5210043 +
ttatagcagcctgcatgtgccc

SEQ ID NO: 81269 - DNA, 22 bp, Artificial Sequence
  Synthetic oligonucleotide; CTT chr11 5210023 5210044 5210040 5210045 +
atagcagcctgcatgtgcccag

SEQ ID NO: 81270 - DNA, 22 bp, Artificial Sequence
  Synthetic oligonucleotide; TTA chr11 5210024 5210045 5210041 5210046 +
tagcagcctgcatgtgcccaga

SEQ ID NO: 81271 - DNA, 22 bp, Artificial Sequence
  Synthetic oligonucleotide; CTG chr11 5210034 5210055 5210051 5210056 +
catgtgcccagattttgaattt

SEQ ID NO: 81272 - DNA, 22 bp, Artificial Sequence
  Synthetic oligonucleotide; TTT chr11 5210049 5210070 5210066 5210071 +
tgaatttatcctttgtatattt

SEQ ID NO: 81273 - DNA, 22 bp, Artificial Sequence
  Synthetic oligonucleotide; TTT chr11 5210050 5210071 5210067 5210072 +
gaatttatcctttgtatattta

SEQ ID NO: 81274 - DNA, 22 bp, Artificial Sequence
  Synthetic oligonucleotide; TTG chr11 5210051 5210072 5210068 5210073 +
aatttatcctttgtatatttac

SEQ ID NO: 81275 - DNA, 22 bp, Artificial Sequence
  Synthetic oligonucleotide; TTT chr11 5210056 5210077 5210073 5210078 +
atcctttgtatatttacattta

SEQ ID NO: 81276 - DNA, 22 bp, Artificial Sequence
  Synthetic oligonucleotide; TTA chr11 5210057 5210078 5210074 5210079 +
tcctttgtatatttacatttag

SEQ ID NO: 81277 - DNA, 22 bp, Artificial Sequence
  Synthetic oligonucleotide; CTT chr11 5210062 5210083 5210079 5210084 +
tgtatatttacatttagttctg

SEQ ID NO: 81278 - DNA, 22 bp, Artificial Sequence
  Synthetic oligonucleotide; TTT chr11 5210063 5210084 5210080 5210085 +
gtatatttacatttagttctgt

SEQ ID NO: 81279 - DNA, 22 bp, Artificial Sequence
  Synthetic oligonucleotide; TTG chr11 5210064 5210085 5210081 5210086 +
tatatttacatttagttctgta

SEQ ID NO: 81280 - DNA, 22 bp, Artificial Sequence
  Synthetic oligonucleotide; TTT chr11 5210071 5210092 5210088 5210093 +
acatttagttctgtattattac

SEQ ID NO: 81281 - DNA, 22 bp, Artificial Sequence
  Synthetic oligonucleotide; TTA chr11 5210072 5210093 5210089 5210094 +
catttagttctgtattattaca

SEQ ID NO: 81282 - DNA, 22 bp, Artificial Sequence
  Synthetic oligonucleotide; TTT chr11 5210077 5210098 5210094 5210099 +
agttctgtattattacaattag

SEQ ID NO: 81283 - DNA, 22 bp, Artificial Sequence
  Synthetic oligonucleotide; TTA chr11 5210078 5210099 5210095 5210100 +
gttctgtattattacaattagt

SEQ ID NO: 81284 - DNA, 22 bp, Artificial Sequence
  Synthetic oligonucleotide; TTC chr11 5210082 5210103 5210099 5210104 +
tgtattattacaattagttcgt

SEQ ID NO: 81285 - DNA, 22 bp, Artificial Sequence
  Synthetic oligonucleotide; CTG chr11 5210084 5210105 5210101 5210106 +
tattattacaattagttcgtag

SEQ ID NO: 81286 - DNA, 22 bp, Artificial Sequence
  Synthetic oligonucleotide; TTA chr11 5210089 5210110 5210106 5210111 +
ttacaattagttcgtagacctg

SEQ ID NO: 81287 - DNA, 22 bp, Artificial Sequence
  Synthetic oligonucleotide; TTA chr11 5210092 5210113 5210109 5210114 +
caattagttcgtagacctgtta

SEQ ID NO: 81288 - DNA, 22 bp, Artificial Sequence
  Synthetic oligonucleotide; TTA chr11 5210098 5210119 5210115 5210120 +
gttcgtagacctgttattatta

SEQ ID NO: 81289 - DNA, 22 bp, Artificial Sequence
  Synthetic oligonucleotide; TTC chr11 5210102 5210123 5210119 5210124 +
gtagacctgttattattattct

SEQ ID NO: 81290 - DNA, 22 bp, Artificial Sequence
  Synthetic oligonucleotide; CTG chr11 5210111 5210132 5210128 5210133 +
ttattattattctcatttgtag

SEQ ID NO: 81291 - DNA, 22 bp, Artificial Sequence
  Synthetic oligonucleotide; TTA chr11 5210114 5210135 5210131 5210136 +
ttattattctcatttgtagttg

SEQ ID NO: 81292 - DNA, 22 bp, Artificial Sequence
  Synthetic oligonucleotide; TTA chr11 5210117 5210138 5210134 5210139 +
ttattctcatttgtagttgaag

SEQ ID NO: 81293 - DNA, 22 bp, Artificial Sequence
  Synthetic oligonucleotide; TTA chr11 5210120 5210141 5210137 5210142 +
ttctcatttgtagttgaagaaa

SEQ ID NO: 81294 - DNA, 22 bp, Artificial Sequence
  Synthetic oligonucleotide; TTC chr11 5210123 5210144 5210140 5210145 +
tcatttgtagttgaagaaattg

SEQ ID NO: 81295 - DNA, 22 bp, Artificial Sequence
  Synthetic oligonucleotide; CTC chr11 5210125 5210146 5210142 5210147 +
atttgtagttgaagaaattgca

SEQ ID NO: 81296 - DNA, 22 bp, Artificial Sequence
  Synthetic oligonucleotide; TTT chr11 5210129 5210150 5210146 5210151 +
gtagttgaagaaattgcactcc

SEQ ID NO: 81297 - DNA, 22 bp, Artificial Sequence
  Synthetic oligonucleotide; TTG chr11 5210130 5210151 5210147 5210152 +
tagttgaagaaattgcactcca

SEQ ID NO: 81298 - DNA, 22 bp, Artificial Sequence
  Synthetic oligonucleotide; TTG chr11 5210136 5210157 5210153 5210158 +
aagaaattgcactccagcaagt

SEQ ID NO: 81299 - DNA, 22 bp, Artificial Sequence
  Synthetic oligonucleotide; TTG chr11 5210145 5210166 5210162 5210167 +
cactccagcaagtttaaattgc

SEQ ID NO: 81300 - DNA, 22 bp, Artificial Sequence
  Synthetic oligonucleotide; CTC chr11 5210150 5210171 5210167 5210172 +
cagcaagtttaaattgctcctg

SEQ ID NO: 81301 - DNA, 22 bp, Artificial Sequence
  Synthetic oligonucleotide; TTT chr11 5210160 5210181 5210177 5210182 +
aaattgctcctggctacatccc

SEQ ID NO: 81302 - DNA, 22 bp, Artificial Sequence
  Synthetic oligonucleotide; TTA chr11 5210161 5210182 5210178 5210183 +
aattgctcctggctacatccca

SEQ ID NO: 81303 - DNA, 22 bp, Artificial Sequence
  Synthetic oligonucleotide; TTG chr11 5210166 5210187 5210183 5210188 +
ctcctggctacatcccagaaaa

SEQ ID NO: 81304 - DNA, 22 bp, Artificial Sequence
  Synthetic oligonucleotide; CTC chr11 5210169 5210190 5210186 5210191 +
ctggctacatcccagaaaaaca

SEQ ID NO: 81305 - DNA, 22 bp, Artificial Sequence
  Synthetic oligonucleotide; CTG chr11 5210172 5210193 5210189 5210194 +
gctacatcccagaaaaacaata

SEQ ID NO: 81306 - DNA, 22 bp, Artificial Sequence
  Synthetic oligonucleotide; CTA chr11 5210176 5210197 5210193 5210198 +
catcccagaaaaacaataataa

SEQ ID NO: 81307 - DNA, 22 bp, Artificial Sequence
  Synthetic oligonucleotide; CTT chr11 5210210 5210231 5210227 5210232 +
tttgcccctacttgactaggaa

SEQ ID NO: 81308 - DNA, 22 bp, Artificial Sequence
  Synthetic oligonucleotide; TTT chr11 5210211 5210232 5210228 5210233 +
ttgcccctacttgactaggaat

SEQ ID NO: 81309 - DNA, 22 bp, Artificial Sequence
  Synthetic oligonucleotide; TTT chr11 5210212 5210233 5210229 5210234 +
tgcccctacttgactaggaatt

SEQ ID NO: 81310 - DNA, 22 bp, Artificial Sequence
  Synthetic oligonucleotide; TTT chr11 5210213 5210234 5210230 5210235 +
gcccctacttgactaggaattg

SEQ ID NO: 81311 - DNA, 22 bp, Artificial Sequence
  Synthetic oligonucleotide; TTG chr11 5210214 5210235 5210231 5210236 +
cccctacttgactaggaattgt

SEQ ID NO: 81312 - DNA, 22 bp, Artificial Sequence
  Synthetic oligonucleotide; CTA chr11 5210220 5210241 5210237 5210242 +
cttgactaggaattgtataaag

SEQ ID NO: 81313 - DNA, 22 bp, Artificial Sequence
  Synthetic oligonucleotide; CTT chr11 5210223 5210244 5210240 5210245 +
gactaggaattgtataaagaga

SEQ ID NO: 81314 - DNA, 22 bp, Artificial Sequence
  Synthetic oligonucleotide; TTG chr11 5210224 5210245 5210241 5210246 +
actaggaattgtataaagagaa

SEQ ID NO: 81315 - DNA, 22 bp, Artificial Sequence
  Synthetic oligonucleotide; CTA chr11 5210228 5210249 5210245 5210250 +
ggaattgtataaagagaacagt

SEQ ID NO: 81316 - DNA, 22 bp, Artificial Sequence
  Synthetic oligonucleotide; TTG chr11 5210235 5210256 5210252 5210257 +
tataaagagaacagttattctt

SEQ ID NO: 81317 - DNA, 22 bp, Artificial Sequence
  Synthetic oligonucleotide; TTA chr11 5210252 5210273 5210269 5210274 +
ttcttctagtgggaagcaagct

SEQ ID NO: 81318 - DNA, 22 bp, Artificial Sequence
  Synthetic oligonucleotide; TTC chr11 5210255 5210276 5210272 5210277 +
ttctagtgggaagcaagctggc

SEQ ID NO: 81319 - DNA, 22 bp, Artificial Sequence
  Synthetic oligonucleotide; CTT chr11 5210257 5210278 5210274 5210279 +
ctagtgggaagcaagctggcct

SEQ ID NO: 81320 - DNA, 22 bp, Artificial Sequence
  Synthetic oligonucleotide; TTC chr11 5210258 5210279 5210275 5210280 +
tagtgggaagcaagctggcctc

SEQ ID NO: 81321 - DNA, 22 bp, Artificial Sequence
  Synthetic oligonucleotide; CTA chr11 5210260 5210281 5210277 5210282 +
gtgggaagcaagctggcctcaa

SEQ ID NO: 81322 - DNA, 22 bp, Artificial Sequence
  Synthetic oligonucleotide; CTG chr11 5210275 5210296 5210292 5210297 +
gcctcaactggaacagaatgag

SEQ ID NO: 81323 - DNA, 22 bp, Artificial Sequence
  Synthetic oligonucleotide; CTC chr11 5210280 5210301 5210297 5210302 +
aactggaacagaatgagagaaa

SEQ ID NO: 81324 - DNA, 22 bp, Artificial Sequence
  Synthetic oligonucleotide; CTG chr11 5210285 5210306 5210302 5210307 +
gaacagaatgagagaaatgcaa

SEQ ID NO: 81325 - DNA, 22 bp, Artificial Sequence
  Synthetic oligonucleotide; CTA chr11 5210315 5210336 5210332 5210337 +
ataatccaacagtcccacaccc

SEQ ID NO: 81326 - DNA, 22 bp, Artificial Sequence
  Synthetic oligonucleotide; CTA chr11 5210342 5210363 5210359 5210364 +
aatgtactttttccttttcccc

SEQ ID NO: 81327 - DNA, 22 bp, Artificial Sequence
  Synthetic oligonucleotide; CTT chr11 5210351 5210372 5210368 5210373 +
tttccttttccccatggagtca

SEQ ID NO: 81328 - DNA, 22 bp, Artificial Sequence
  Synthetic oligonucleotide; TTT chr11 5210352 5210373 5210369 5210374 +
ttccttttccccatggagtcaa

SEQ ID NO: 81329 - DNA, 22 bp, Artificial Sequence
  Synthetic oligonucleotide; TTT chr11 5210353 5210374 5210370 5210375 +
tccttttccccatggagtcaag

SEQ ID NO: 81330 - DNA, 22 bp, Artificial Sequence
  Synthetic oligonucleotide; TTT chr11 5210354 5210375 5210371 5210376 +
ccttttccccatggagtcaagg

SEQ ID NO: 81331 - DNA, 22 bp, Artificial Sequence
  Synthetic oligonucleotide; TTC chr11 5210355 5210376 5210372 5210377 +
cttttccccatggagtcaaggc

SEQ ID NO: 81332 - DNA, 22 bp, Artificial Sequence
  Synthetic oligonucleotide; CTT chr11 5210358 5210379 5210375 5210380 +
ttccccatggagtcaaggctat

SEQ ID NO: 81333 - DNA, 22 bp, Artificial Sequence
  Synthetic oligonucleotide; TTT chr11 5210359 5210380 5210376 5210381 +
tccccatggagtcaaggctatc

SEQ ID NO: 81334 - DNA, 22 bp, Artificial Sequence
  Synthetic oligonucleotide; TTT chr11 5210360 5210381 5210377 5210382 +
ccccatggagtcaaggctatct

SEQ ID NO: 81335 - DNA, 22 bp, Artificial Sequence
  Synthetic oligonucleotide; TTC chr11 5210361 5210382 5210378 5210383 +
cccatggagtcaaggctatcta

SEQ ID NO: 81336 - DNA, 22 bp, Artificial Sequence
  Synthetic oligonucleotide; CTA chr11 5210379 5210400 5210396 5210401 +
tctaaacttcctttaagtgcac

SEQ ID NO: 81337 - DNA, 22 bp, Artificial Sequence
  Synthetic oligonucleotide; CTA chr11 5210383 5210404 5210400 5210405 +
aacttcctttaagtgcacaagc

SEQ ID NO: 81338 - DNA, 22 bp, Artificial Sequence
  Synthetic oligonucleotide; CTT chr11 5210388 5210409 5210405 5210410 +
cctttaagtgcacaagctaata

SEQ ID NO: 81339 - DNA, 22 bp, Artificial Sequence
  Synthetic oligonucleotide; TTC chr11 5210389 5210410 5210406 5210411 +
ctttaagtgcacaagctaatat

SEQ ID NO: 81340 - DNA, 22 bp, Artificial Sequence
  Synthetic oligonucleotide; CTT chr11 5210392 5210413 5210409 5210414 +
taagtgcacaagctaatatggt

SEQ ID NO: 81341 - DNA, 22 bp, Artificial Sequence
  Synthetic oligonucleotide; TTT chr11 5210393 5210414 5210410 5210415 +
aagtgcacaagctaatatggta

SEQ ID NO: 81342 - DNA, 22 bp, Artificial Sequence
  Synthetic oligonucleotide; TTA chr11 5210394 5210415 5210411 5210416 +
agtgcacaagctaatatggtag

SEQ ID NO: 81343 - DNA, 22 bp, Artificial Sequence
  Synthetic oligonucleotide; CTA chr11 5210407 5210428 5210424 5210429 +
atatggtagggaaatataaagc

SEQ ID NO: 81344 - DNA, 22 bp, Artificial Sequence
  Synthetic oligonucleotide; CTA chr11 5210432 5210453 5210449 5210454 +
atcctgccatccagaatgagca

SEQ ID NO: 81345 - DNA, 22 bp, Artificial Sequence
  Synthetic oligonucleotide; CTG chr11 5210438 5210459 5210455 5210460 +
ccatccagaatgagcaagtgga

SEQ ID NO: 81346 - DNA, 22 bp, Artificial Sequence
  Synthetic oligonucleotide; CTG chr11 5210495 5210516 5210512 5210517 +
ccaagtctgacctaatgccctc

SEQ ID NO: 81347 - DNA, 22 bp, Artificial Sequence
  Synthetic oligonucleotide; CTG chr11 5210504 5210525 5210521 5210526 +
acctaatgccctctgtttctcc

SEQ ID NO: 81348 - DNA, 22 bp, Artificial Sequence
  Synthetic oligonucleotide; CTA chr11 5210509 5210530 5210526 5210531 +
atgccctctgtttctcccactt

SEQ ID NO: 81349 - DNA, 22 bp, Artificial Sequence
  Synthetic oligonucleotide; CTC chr11 5210517 5210538 5210534 5210539 +
tgtttctcccacttgctctgca

SEQ ID NO: 81350 - DNA, 22 bp, Artificial Sequence
  Synthetic oligonucleotide; CTG chr11 5210519 5210540 5210536 5210541 +
tttctcccacttgctctgcagg

SEQ ID NO: 81351 - DNA, 22 bp, Artificial Sequence
  Synthetic oligonucleotide; TTT chr11 5210522 5210543 5210539 5210544 +
ctcccacttgctctgcaggatg

SEQ ID NO: 81352 - DNA, 22 bp, Artificial Sequence
  Synthetic oligonucleotide; TTC chr11 5210523 5210544 5210540 5210545 +
tcccacttgctctgcaggatgg

SEQ ID NO: 81353 - DNA, 22 bp, Artificial Sequence
  Synthetic oligonucleotide; CTC chr11 5210525 5210546 5210542 5210547 +
ccacttgctctgcaggatggct

SEQ ID NO: 81354 - DNA, 22 bp, Artificial Sequence
  Synthetic oligonucleotide; CTT chr11 5210531 5210552 5210548 5210553 +
gctctgcaggatggcttagcag

SEQ ID NO: 81355 - DNA, 22 bp, Artificial Sequence
  Synthetic oligonucleotide; TTG chr11 5210532 5210553 5210549 5210554 +
ctctgcaggatggcttagcagc

SEQ ID NO: 81356 - DNA, 22 bp, Artificial Sequence
  Synthetic oligonucleotide; CTC chr11 5210535 5210556 5210552 5210557 +
tgcaggatggcttagcagctcc

SEQ ID NO: 81357 - DNA, 22 bp, Artificial Sequence
  Synthetic oligonucleotide; CTG chr11 5210537 5210558 5210554 5210559 +
caggatggcttagcagctccca

SEQ ID NO: 81358 - DNA, 22 bp, Artificial Sequence
  Synthetic oligonucleotide; CTT chr11 5210548 5210569 5210565 5210570 +
agcagctcccagctcagggcct

SEQ ID NO: 81359 - DNA, 22 bp, Artificial Sequence
  Synthetic oligonucleotide; TTA chr11 5210549 5210570 5210566 5210571 +
gcagctcccagctcagggccta

SEQ ID NO: 81360 - DNA, 22 bp, Artificial Sequence
  Synthetic oligonucleotide; CTC chr11 5210556 5210577 5210573 5210578 +
ccagctcagggcctatcagagg

SEQ ID NO: 81361 - DNA, 22 bp, Artificial Sequence
  Synthetic oligonucleotide; CTC chr11 5210563 5210584 5210580 5210585 +
agggcctatcagaggctgagaa

SEQ ID NO: 81362 - DNA, 22 bp, Artificial Sequence
  Synthetic oligonucleotide; CTA chr11 5210571 5210592 5210588 5210593 +
tcagaggctgagaaggtcggcc

SEQ ID NO: 81363 - DNA, 22 bp, Artificial Sequence
  Synthetic oligonucleotide; CTG chr11 5210581 5210602 5210598 5210603 +
agaaggtcggccctctgatgca

SEQ ID NO: 81364 - DNA, 22 bp, Artificial Sequence
  Synthetic oligonucleotide; CTC chr11 5210596 5210617 5210613 5210618 +
tgatgcattttattccttcact

SEQ ID NO: 81365 - DNA, 22 bp, Artificial Sequence
  Synthetic oligonucleotide; CTG chr11 5210598 5210619 5210615 5210620 +
atgcattttattccttcactaa

SEQ ID NO: 81366 - DNA, 22 bp, Artificial Sequence
  Synthetic oligonucleotide; TTT chr11 5210606 5210627 5210623 5210628 +
tattccttcactaacaaagcaa

SEQ ID NO: 81367 - DNA, 22 bp, Artificial Sequence
  Synthetic oligonucleotide; TTT chr11 5210607 5210628 5210624 5210629 +
attccttcactaacaaagcaaa

SEQ ID NO: 81368 - DNA, 22 bp, Artificial Sequence
  Synthetic oligonucleotide; TTA chr11 5210608 5210629 5210625 5210630 +
ttccttcactaacaaagcaaac

SEQ ID NO: 81369 - DNA, 22 bp, Artificial Sequence
  Synthetic oligonucleotide; TTC chr11 5210611 5210632 5210628 5210633 +
cttcactaacaaagcaaaccca

SEQ ID NO: 81370 - DNA, 22 bp, Artificial Sequence
  Synthetic oligonucleotide; CTT chr11 5210614 5210635 5210631 5210636 +
cactaacaaagcaaacccagct

SEQ ID NO: 81371 - DNA, 22 bp, Artificial Sequence
  Synthetic oligonucleotide; TTC chr11 5210615 5210636 5210632 5210637 +
actaacaaagcaaacccagctt

SEQ ID NO: 81372 - DNA, 22 bp, Artificial Sequence
  Synthetic oligonucleotide; CTA chr11 5210619 5210640 5210636 5210641 +
acaaagcaaacccagctttact

SEQ ID NO: 81373 - DNA, 22 bp, Artificial Sequence
  Synthetic oligonucleotide; CTT chr11 5210637 5210658 5210654 5210659 +
tacttctaccctctcctctatg

SEQ ID NO: 81374 - DNA, 22 bp, Artificial Sequence
  Synthetic oligonucleotide; TTT chr11 5210638 5210659 5210655 5210660 +
acttctaccctctcctctatgc

SEQ ID NO: 81375 - DNA, 22 bp, Artificial Sequence
  Synthetic oligonucleotide; TTA chr11 5210639 5210660 5210656 5210661 +
cttctaccctctcctctatgca

SEQ ID NO: 81376 - DNA, 22 bp, Artificial Sequence
  Synthetic oligonucleotide; CTT chr11 5210642 5210663 5210659 5210664 +
ctaccctctcctctatgcactc

SEQ ID NO: 81377 - DNA, 22 bp, Artificial Sequence
  Synthetic oligonucleotide; TTC chr11 5210643 5210664 5210660 5210665 +
taccctctcctctatgcactct

SEQ ID NO: 81378 - DNA, 22 bp, Artificial Sequence
  Synthetic oligonucleotide; CTA chr11 5210645 5210666 5210662 5210667 +
ccctctcctctatgcactctct

SEQ ID NO: 81379 - DNA, 22 bp, Artificial Sequence
  Synthetic oligonucleotide; CTC chr11 5210650 5210671 5210667 5210672 +
tcctctatgcactctctcgggg

SEQ ID NO: 81380 - DNA, 22 bp, Artificial Sequence
  Synthetic oligonucleotide; CTC chr11 5210652 5210673 5210669 5210674 +
ctctatgcactctctcggggca

SEQ ID NO: 81381 - DNA, 22 bp, Artificial Sequence
  Synthetic oligonucleotide; CTC chr11 5210655 5210676 5210672 5210677 +
tatgcactctctcggggcactt

SEQ ID NO: 81382 - DNA, 22 bp, Artificial Sequence
  Synthetic oligonucleotide; CTA chr11 5210657 5210678 5210674 5210679 +
tgcactctctcggggcacttcc

SEQ ID NO: 81383 - DNA, 22 bp, Artificial Sequence
  Synthetic oligonucleotide; CTC chr11 5210664 5210685 5210681 5210686 +
tctcggggcacttcctaatctc

SEQ ID NO: 81384 - DNA, 22 bp, Artificial Sequence
  Synthetic oligonucleotide; CTC chr11 5210666 5210687 5210683 5210688 +
tcggggcacttcctaatctcgt

SEQ ID NO: 81385 - DNA, 22 bp, Artificial Sequence
  Synthetic oligonucleotide; CTC chr11 5210668 5210689 5210685 5210690 +
ggggcacttcctaatctcgtta

SEQ ID NO: 81386 - DNA, 22 bp, Artificial Sequence
  Synthetic oligonucleotide; CTT chr11 5210677 5210698 5210694 5210699 +
cctaatctcgttagtacctttt

SEQ ID NO: 81387 - DNA, 22 bp, Artificial Sequence
  Synthetic oligonucleotide; TTC chr11 5210678 5210699 5210695 5210700 +
ctaatctcgttagtaccttttg

SEQ ID NO: 81388 - DNA, 22 bp, Artificial Sequence
  Synthetic oligonucleotide; CTA chr11 5210681 5210702 5210698 5210703 +
atctcgttagtaccttttgaat

SEQ ID NO: 81389 - DNA, 22 bp, Artificial Sequence
  Synthetic oligonucleotide; CTC chr11 5210686 5210707 5210703 5210708 +
gttagtaccttttgaattagtt

SEQ ID NO: 81390 - DNA, 22 bp, Artificial Sequence
  Synthetic oligonucleotide; TTA chr11 5210690 5210711 5210707 5210712 +
gtaccttttgaattagttttca

SEQ ID NO: 81391 - DNA, 22 bp, Artificial Sequence
  Synthetic oligonucleotide; CTT chr11 5210697 5210718 5210714 5210719 +
ttgaattagttttcaagatagg

SEQ ID NO: 81392 - DNA, 22 bp, Artificial Sequence
  Synthetic oligonucleotide; TTT chr11 5210698 5210719 5210715 5210720 +
tgaattagttttcaagatagga

SEQ ID NO: 81393 - DNA, 22 bp, Artificial Sequence
  Synthetic oligonucleotide; TTT chr11 5210699 5210720 5210716 5210721 +
gaattagttttcaagataggac

SEQ ID NO: 81394 - DNA, 22 bp, Artificial Sequence
  Synthetic oligonucleotide; TTG chr11 5210700 5210721 5210717 5210722 +
aattagttttcaagataggact

SEQ ID NO: 81395 - DNA, 22 bp, Artificial Sequence
  Synthetic oligonucleotide; TTA chr11 5210705 5210726 5210722 5210727 +
gttttcaagataggacttgagt

SEQ ID NO: 81396 - DNA, 22 bp, Artificial Sequence
  Synthetic oligonucleotide; TTT chr11 5210709 5210730 5210726 5210731 +
tcaagataggacttgagttcct

SEQ ID NO: 81397 - DNA, 22 bp, Artificial Sequence
  Synthetic oligonucleotide; TTT chr11 5210710 5210731 5210727 5210732 +
caagataggacttgagttcctc

SEQ ID NO: 81398 - DNA, 22 bp, Artificial Sequence
  Synthetic oligonucleotide; TTC chr11 5210711 5210732 5210728 5210733 +
aagataggacttgagttcctcg

SEQ ID NO: 81399 - DNA, 22 bp, Artificial Sequence
  Synthetic oligonucleotide; CTT chr11 5210723 5210744 5210740 5210745 +
gagttcctcgaaggattagaaa

SEQ ID NO: 81400 - DNA, 22 bp, Artificial Sequence
  Synthetic oligonucleotide; TTG chr11 5210724 5210745 5210741 5210746 +
agttcctcgaaggattagaaaa

SEQ ID NO: 81401 - DNA, 22 bp, Artificial Sequence
  Synthetic oligonucleotide; TTC chr11 5210729 5210750 5210746 5210751 +
ctcgaaggattagaaaataaca

SEQ ID NO: 81402 - DNA, 22 bp, Artificial Sequence
  Synthetic oligonucleotide; CTC chr11 5210732 5210753 5210749 5210754 +
gaaggattagaaaataacagta

SEQ ID NO: 81403 - DNA, 22 bp, Artificial Sequence
  Synthetic oligonucleotide; TTA chr11 5210741 5210762 5210758 5210763 +
gaaaataacagtaacagttcat

SEQ ID NO: 81404 - DNA, 22 bp, Artificial Sequence
  Synthetic oligonucleotide; TTC chr11 5210761 5210782 5210778 5210783 +
atgttgtctgggccaagcacag

SEQ ID NO: 81405 - DNA, 22 bp, Artificial Sequence
  Synthetic oligonucleotide; TTG chr11 5210767 5210788 5210784 5210789 +
tctgggccaagcacagtggctc

SEQ ID NO: 81406 - DNA, 22 bp, Artificial Sequence
  Synthetic oligonucleotide; CTG chr11 5210771 5210792 5210788 5210793 +
ggccaagcacagtggctcacac

SEQ ID NO: 81407 - DNA, 22 bp, Artificial Sequence
  Synthetic oligonucleotide; CTC chr11 5210789 5210810 5210806 5210811 +
acacctgtaatcacagccgagg

SEQ ID NO: 81408 - DNA, 22 bp, Artificial Sequence
  Synthetic oligonucleotide; CTG chr11 5210796 5210817 5210813 5210818 +
taatcacagccgaggccggagg

SEQ ID NO: 81409 - DNA, 22 bp, Artificial Sequence
  Synthetic oligonucleotide; TTT chr11 5210829 5210850 5210846 5210851 +
gagctcaggagttggagaccag

SEQ ID NO: 81410 - DNA, 22 bp, Artificial Sequence
  Synthetic oligonucleotide; TTG chr11 5210830 5210851 5210847 5210852 +
agctcaggagttggagaccagc

SEQ ID NO: 81411 - DNA, 22 bp, Artificial Sequence
  Synthetic oligonucleotide; CTC chr11 5210835 5210856 5210852 5210857 +
aggagttggagaccagcttggg

SEQ ID NO: 81412 - DNA, 22 bp, Artificial Sequence
  Synthetic oligonucleotide; TTG chr11 5210843 5210864 5210860 5210865 +
gagaccagcttgggcaacatgg

SEQ ID NO: 81413 - DNA, 22 bp, Artificial Sequence
  Synthetic oligonucleotide; CTT chr11 5210854 5210875 5210871 5210876 +
gggcaacatggagaaacccctc

SEQ ID NO: 81414 - DNA, 22 bp, Artificial Sequence
  Synthetic oligonucleotide; TTG chr11 5210855 5210876 5210872 5210877 +
ggcaacatggagaaacccctct

SEQ ID NO: 81415 - DNA, 22 bp, Artificial Sequence
  Synthetic oligonucleotide; CTC chr11 5210876 5210897 5210893 5210898 +
tctacaaaaaattttaaaaagt

SEQ ID NO: 81416 - DNA, 22 bp, Artificial Sequence
  Synthetic oligonucleotide; CTC chr11 5210878 5210899 5210895 5210900 +
tacaaaaaattttaaaaagtag

SEQ ID NO: 81417 - DNA, 22 bp, Artificial Sequence
  Synthetic oligonucleotide; CTA chr11 5210880 5210901 5210897 5210902 +
caaaaaattttaaaaagtagcc

SEQ ID NO: 81418 - DNA, 22 bp, Artificial Sequence
  Synthetic oligonucleotide; TTT chr11 5210890 5210911 5210907 5210912 +
taaaaagtagccgaatatggtg

SEQ ID NO: 81419 - DNA, 22 bp, Artificial Sequence
  Synthetic oligonucleotide; TTT chr11 5210891 5210912 5210908 5210913 +
aaaaagtagccgaatatggtgt

SEQ ID NO: 81420 - DNA, 22 bp, Artificial Sequence
  Synthetic oligonucleotide; TTA chr11 5210892 5210913 5210909 5210914 +
aaaagtagccgaatatggtgtt

SEQ ID NO: 81421 - DNA, 22 bp, Artificial Sequence
  Synthetic oligonucleotide; TTA chr11 5210915 5210936 5210932 5210937 +
cgtgcctgtagtcccagctact

SEQ ID NO: 81422 - DNA, 22 bp, Artificial Sequence
  Synthetic oligonucleotide; CTG chr11 5210923 5210944 5210940 5210945 +
tagtcccagctacttgggaggc

SEQ ID NO: 81423 - DNA, 22 bp, Artificial Sequence
  Synthetic oligonucleotide; CTA chr11 5210935 5210956 5210952 5210957 +
cttgggaggctgaggtggaagg

SEQ ID NO: 81424 - DNA, 22 bp, Artificial Sequence
  Synthetic oligonucleotide; CTT chr11 5210938 5210959 5210955 5210960 +
gggaggctgaggtggaaggata

SEQ ID NO: 81425 - DNA, 22 bp, Artificial Sequence
  Synthetic oligonucleotide; TTG chr11 5210939 5210960 5210956 5210961 +
ggaggctgaggtggaaggatat

SEQ ID NO: 81426 - DNA, 22 bp, Artificial Sequence
  Synthetic oligonucleotide; CTG chr11 5210947 5210968 5210964 5210969 +
aggtggaaggatatcttgagcc

SEQ ID NO: 81427 - DNA, 22 bp, Artificial Sequence
  Synthetic oligonucleotide; CTT chr11 5210964 5210985 5210981 5210986 +
gagccaaggagggggagattgc

SEQ ID NO: 81428 - DNA, 22 bp, Artificial Sequence
  Synthetic oligonucleotide; TTG chr11 5210965 5210986 5210982 5210987 +
agccaaggagggggagattgca

SEQ ID NO: 81429 - DNA, 22 bp, Artificial Sequence
  Synthetic oligonucleotide; TTG chr11 5210985 5211006 5211002 5211007 +
cagtgagcaaagattgtaccac

SEQ ID NO: 81430 - DNA, 22 bp, Artificial Sequence
  Synthetic oligonucleotide; TTG chr11 5211001 5211022 5211018 5211023 +
taccactgcactccaacctggg

SEQ ID NO: 81431 - DNA, 22 bp, Artificial Sequence
  Synthetic oligonucleotide; CTG chr11 5211009 5211030 5211026 5211031 +
cactccaacctgggcaacacag

SEQ ID NO: 81432 - DNA, 22 bp, Artificial Sequence
  Synthetic oligonucleotide; CTC chr11 5211014 5211035 5211031 5211036 +
caacctgggcaacacagcgaga

SEQ ID NO: 81433 - DNA, 22 bp, Artificial Sequence
  Synthetic oligonucleotide; CTG chr11 5211021 5211042 5211038 5211043 +
ggcaacacagcgagaccctgtc

SEQ ID NO: 81434 - DNA, 22 bp, Artificial Sequence
  Synthetic oligonucleotide; CTG chr11 5211041 5211062 5211058 5211063 +
tcaaaaaaaaaaaaaagagagc

SEQ ID NO: 81435 - DNA, 22 bp, Artificial Sequence
  Synthetic oligonucleotide; CTA chr11 5211065 5211086 5211082 5211087 +
gaaagaaagaaattaacaattc

SEQ ID NO: 81436 - DNA, 22 bp, Artificial Sequence
  Synthetic oligonucleotide; TTA chr11 5211080 5211101 5211097 5211102 +
acaattcaggttgtcagaagta

SEQ ID NO: 81437 - DNA, 22 bp, Artificial Sequence
  Synthetic oligonucleotide; TTC chr11 5211087 5211108 5211104 5211109 +
aggttgtcagaagtaactgaat

SEQ ID NO: 81438 - DNA, 22 bp, Artificial Sequence
  Synthetic oligonucleotide; TTG chr11 5211093 5211114 5211110 5211115 +
tcagaagtaactgaatgtcttt

SEQ ID NO: 81439 - DNA, 22 bp, Artificial Sequence
  Synthetic oligonucleotide; CTG chr11 5211106 5211127 5211123 5211128 +
aatgtctttaacaaataggagc

SEQ ID NO: 81440 - DNA, 22 bp, Artificial Sequence
  Synthetic oligonucleotide; CTT chr11 5211114 5211135 5211131 5211136 +
taacaaataggagccataggac

SEQ ID NO: 81441 - DNA, 22 bp, Artificial Sequence
  Synthetic oligonucleotide; TTT chr11 5211115 5211136 5211132 5211137 +
aacaaataggagccataggact

SEQ ID NO: 81442 - DNA, 22 bp, Artificial Sequence
  Synthetic oligonucleotide; TTA chr11 5211116 5211137 5211133 5211138 +
acaaataggagccataggacta

SEQ ID NO: 81443 - DNA, 22 bp, Artificial Sequence
  Synthetic oligonucleotide; CTA chr11 5211138 5211159 5211155 5211160 +
aattgctcacattattttgagg

SEQ ID NO: 81444 - DNA, 22 bp, Artificial Sequence
  Synthetic oligonucleotide; TTG chr11 5211143 5211164 5211160 5211165 +
ctcacattattttgagggcaaa

SEQ ID NO: 81445 - DNA, 22 bp, Artificial Sequence
  Synthetic oligonucleotide; CTC chr11 5211146 5211167 5211163 5211168 +
acattattttgagggcaaaaat

SEQ ID NO: 81446 - DNA, 22 bp, Artificial Sequence
  Synthetic oligonucleotide; TTA chr11 5211152 5211173 5211169 5211174 +
ttttgagggcaaaaattacatt

SEQ ID NO: 81447 - DNA, 22 bp, Artificial Sequence
  Synthetic oligonucleotide; TTT chr11 5211155 5211176 5211172 5211177 +
tgagggcaaaaattacattgtc

SEQ ID NO: 81448 - DNA, 22 bp, Artificial Sequence
  Synthetic oligonucleotide; TTT chr11 5211156 5211177 5211173 5211178 +
gagggcaaaaattacattgtca

SEQ ID NO: 81449 - DNA, 22 bp, Artificial Sequence
  Synthetic oligonucleotide; TTG chr11 5211157 5211178 5211174 5211179 +
agggcaaaaattacattgtcat

SEQ ID NO: 81450 - DNA, 22 bp, Artificial Sequence
  Synthetic oligonucleotide; TTA chr11 5211170 5211191 5211187 5211192 +
cattgtcattattttttacctc

SEQ ID NO: 81451 - DNA, 22 bp, Artificial Sequence
  Synthetic oligonucleotide; TTG chr11 5211175 5211196 5211192 5211197 +
tcattattttttacctccaaca

SEQ ID NO: 81452 - DNA, 22 bp, Artificial Sequence
  Synthetic oligonucleotide; TTA chr11 5211181 5211202 5211198 5211203 +
ttttttacctccaacatatata

SEQ ID NO: 81453 - DNA, 22 bp, Artificial Sequence
  Synthetic oligonucleotide; TTT chr11 5211184 5211205 5211201 5211206 +
tttacctccaacatatatacag

SEQ ID NO: 81454 - DNA, 22 bp, Artificial Sequence
  Synthetic oligonucleotide; TTT chr11 5211185 5211206 5211202 5211207 +
ttacctccaacatatatacagt

SEQ ID NO: 81455 - DNA, 22 bp, Artificial Sequence
  Synthetic oligonucleotide; TTT chr11 5211186 5211207 5211203 5211208 +
tacctccaacatatatacagtt

SEQ ID NO: 81456 - DNA, 22 bp, Artificial Sequence
  Synthetic oligonucleotide; TTT chr11 5211187 5211208 5211204 5211209 +
acctccaacatatatacagttt

SEQ ID NO: 81457 - DNA, 22 bp, Artificial Sequence
  Synthetic oligonucleotide; TTA chr11 5211188 5211209 5211205 5211210 +
cctccaacatatatacagtttt

SEQ ID NO: 81458 - DNA, 22 bp, Artificial Sequence
  Synthetic oligonucleotide; CTC chr11 5211192 5211213 5211209 5211214 +
caacatatatacagtttttata

SEQ ID NO: 81459 - DNA, 22 bp, Artificial Sequence
  Synthetic oligonucleotide; TTT chr11 5211209 5211230 5211226 5211231 +
ttatatttactatataggaaca

SEQ ID NO: 81460 - DNA, 22 bp, Artificial Sequence
  Synthetic oligonucleotide; TTT chr11 5211210 5211231 5211227 5211232 +
tatatttactatataggaacac

SEQ ID NO: 81461 - DNA, 22 bp, Artificial Sequence
  Synthetic oligonucleotide; TTT chr11 5211211 5211232 5211228 5211233 +
atatttactatataggaacaca

SEQ ID NO: 81462 - DNA, 22 bp, Artificial Sequence
  Synthetic oligonucleotide; TTA chr11 5211212 5211233 5211229 5211234 +
tatttactatataggaacacaa

SEQ ID NO: 81463 - DNA, 22 bp, Artificial Sequence
  Synthetic oligonucleotide; TTT chr11 5211217 5211238 5211234 5211239 +
actatataggaacacaataaat

SEQ ID NO: 81464 - DNA, 22 bp, Artificial Sequence
  Synthetic oligonucleotide; TTA chr11 5211218 5211239 5211235 5211240 +
ctatataggaacacaataaatg

SEQ ID NO: 81465 - DNA, 22 bp, Artificial Sequence
  Synthetic oligonucleotide; CTA chr11 5211221 5211242 5211238 5211243 +
tataggaacacaataaatgctt

SEQ ID NO: 81466 - DNA, 22 bp, Artificial Sequence
  Synthetic oligonucleotide; CTT chr11 5211243 5211264 5211260 5211265 +
gttgcataaaatcaaattacaa

SEQ ID NO: 81467 - DNA, 22 bp, Artificial Sequence
  Synthetic oligonucleotide; TTG chr11 5211244 5211265 5211261 5211266 +
ttgcataaaatcaaattacaaa

SEQ ID NO: 81468 - DNA, 22 bp, Artificial Sequence
  Synthetic oligonucleotide; TTG chr11 5211247 5211268 5211264 5211269 +
cataaaatcaaattacaaagaa

SEQ ID NO: 81469 - DNA, 22 bp, Artificial Sequence
  Synthetic oligonucleotide; TTA chr11 5211262 5211283 5211279 5211284 +
caaagaaggacagagaatcatt

SEQ ID NO: 81470 - DNA, 22 bp, Artificial Sequence
  Synthetic oligonucleotide; TTA chr11 5211285 5211306 5211302 5211307 +
aattactttcataatgcgcata

SEQ ID NO: 81471 - DNA, 22 bp, Artificial Sequence
  Synthetic oligonucleotide; TTA chr11 5211290 5211311 5211307 5211312 +
ctttcataatgcgcataaaaca

SEQ ID NO: 81472 - DNA, 22 bp, Artificial Sequence
  Synthetic oligonucleotide; CTT chr11 5211293 5211314 5211310 5211315 +
tcataatgcgcataaaacaaca

SEQ ID NO: 81473 - DNA, 22 bp, Artificial Sequence
  Synthetic oligonucleotide; TTT chr11 5211294 5211315 5211311 5211316 +
cataatgcgcataaaacaacat

SEQ ID NO: 81474 - DNA, 22 bp, Artificial Sequence
  Synthetic oligonucleotide; TTC chr11 5211295 5211316 5211312 5211317 +
ataatgcgcataaaacaacatt

SEQ ID NO: 81475 - DNA, 22 bp, Artificial Sequence
  Synthetic oligonucleotide; TTT chr11 5211318 5211339 5211335 5211340 +
tgttagacttaaaaacaagctg

SEQ ID NO: 81476 - DNA, 22 bp, Artificial Sequence
  Synthetic oligonucleotide; TTT chr11 5211319 5211340 5211336 5211341 +
gttagacttaaaaacaagctga

SEQ ID NO: 81477 - DNA, 22 bp, Artificial Sequence
  Synthetic oligonucleotide; TTG chr11 5211320 5211341 5211337 5211342 +
ttagacttaaaaacaagctgat

SEQ ID NO: 81478 - DNA, 22 bp, Artificial Sequence
  Synthetic oligonucleotide; TTA chr11 5211323 5211344 5211340 5211345 +
gacttaaaaacaagctgattat

SEQ ID NO: 81479 - DNA, 22 bp, Artificial Sequence
  Synthetic oligonucleotide; CTT chr11 5211328 5211349 5211345 5211350 +
aaaaacaagctgattataacta

SEQ ID NO: 81480 - DNA, 22 bp, Artificial Sequence
  Synthetic oligonucleotide; TTA chr11 5211329 5211350 5211346 5211351 +
aaaacaagctgattataactat

SEQ ID NO: 81481 - DNA, 22 bp, Artificial Sequence
  Synthetic oligonucleotide; CTG chr11 5211340 5211361 5211357 5211362 +
attataactataaaaagatatg

SEQ ID NO: 81482 - DNA, 22 bp, Artificial Sequence
  Synthetic oligonucleotide; TTA chr11 5211344 5211365 5211361 5211366 +
taactataaaaagatatgtgac

SEQ ID NO: 81483 - DNA, 22 bp, Artificial Sequence
  Synthetic oligonucleotide; CTA chr11 5211350 5211371 5211367 5211372 +
taaaaagatatgtgactaatag

SEQ ID NO: 81484 - DNA, 22 bp, Artificial Sequence
  Synthetic oligonucleotide; CTA chr11 5211368 5211389 5211385 5211390 +
ataggtggaaagaggagcaagg

SEQ ID NO: 81485 - DNA, 22 bp, Artificial Sequence
  Synthetic oligonucleotide; CTG chr11 5211416 5211437 5211433 5211438 +
ctaaagactcacgatggtttgt

SEQ ID NO: 81486 - DNA, 22 bp, Artificial Sequence
  Synthetic oligonucleotide; CTA chr11 5211419 5211440 5211436 5211441 +
aagactcacgatggtttgttac

SEQ ID NO: 81487 - DNA, 22 bp, Artificial Sequence
  Synthetic oligonucleotide; CTC chr11 5211426 5211447 5211443 5211448 +
acgatggtttgttacatagcta

SEQ ID NO: 81488 - DNA, 22 bp, Artificial Sequence
  Synthetic oligonucleotide; TTT chr11 5211436 5211457 5211453 5211458 +
gttacatagctaaacacatgtc

SEQ ID NO: 81489 - DNA, 22 bp, Artificial Sequence
  Synthetic oligonucleotide; TTG chr11 5211437 5211458 5211454 5211459 +
ttacatagctaaacacatgtca

SEQ ID NO: 81490 - DNA, 22 bp, Artificial Sequence
  Synthetic oligonucleotide; TTA chr11 5211440 5211461 5211457 5211462 +
catagctaaacacatgtcatgg

SEQ ID NO: 81491 - DNA, 22 bp, Artificial Sequence
  Synthetic oligonucleotide; CTA chr11 5211448 5211469 5211465 5211470 +
aacacatgtcatgggtttgtcg

SEQ ID NO: 81492 - DNA, 22 bp, Artificial Sequence
  Synthetic oligonucleotide; TTT chr11 5211466 5211487 5211483 5211488 +
gtcgtacagattatttcatctc

SEQ ID NO: 81493 - DNA, 22 bp, Artificial Sequence
  Synthetic oligonucleotide; TTG chr11 5211467 5211488 5211484 5211489 +
tcgtacagattatttcatctcc

SEQ ID NO: 81494 - DNA, 22 bp, Artificial Sequence
  Synthetic oligonucleotide; TTA chr11 5211479 5211500 5211496 5211501 +
tttcatctcccagtactcaata

SEQ ID NO: 81495 - DNA, 22 bp, Artificial Sequence
  Synthetic oligonucleotide; TTT chr11 5211482 5211503 5211499 5211504 +
catctcccagtactcaatagtt

SEQ ID NO: 81496 - DNA, 22 bp, Artificial Sequence
  Synthetic oligonucleotide; TTC chr11 5211483 5211504 5211500 5211505 +
atctcccagtactcaatagtta

SEQ ID NO: 81497 - DNA, 22 bp, Artificial Sequence
  Synthetic oligonucleotide; CTC chr11 5211488 5211509 5211505 5211510 +
ccagtactcaatagttactttt

SEQ ID NO: 81498 - DNA, 22 bp, Artificial Sequence
  Synthetic oligonucleotide; CTC chr11 5211497 5211518 5211514 5211519 +
aatagttactttttctgctctt

SEQ ID NO: 81499 - DNA, 22 bp, Artificial Sequence
  Synthetic oligonucleotide; TTA chr11 5211505 5211526 5211522 5211527 +
ctttttctgctcttctccccgt

SEQ ID NO: 81500 - DNA, 22 bp, Artificial Sequence
  Synthetic oligonucleotide; CTT chr11 5211508 5211529 5211525 5211530 +
tttctgctcttctccccgttcc

SEQ ID NO: 81501 - DNA, 22 bp, Artificial Sequence
  Synthetic oligonucleotide; TTT chr11 5211509 5211530 5211526 5211531 +
ttctgctcttctccccgttccc

SEQ ID NO: 81502 - DNA, 22 bp, Artificial Sequence
  Synthetic oligonucleotide; TTT chr11 5211510 5211531 5211527 5211532 +
tctgctcttctccccgttccca

SEQ ID NO: 81503 - DNA, 22 bp, Artificial Sequence
  Synthetic oligonucleotide; TTT chr11 5211511 5211532 5211528 5211533 +
ctgctcttctccccgttcccac

SEQ ID NO: 81504 - DNA, 22 bp, Artificial Sequence
  Synthetic oligonucleotide; TTC chr11 5211512 5211533 5211529 5211534 +
tgctcttctccccgttcccacc

SEQ ID NO: 81505 - DNA, 22 bp, Artificial Sequence
  Synthetic oligonucleotide; CTG chr11 5211514 5211535 5211531 5211536 +
ctcttctccccgttcccaccct

SEQ ID NO: 81506 - DNA, 22 bp, Artificial Sequence
  Synthetic oligonucleotide; CTC chr11 5211517 5211538 5211534 5211539 +
ttctccccgttcccaccctcca

SEQ ID NO: 81507 - DNA, 22 bp, Artificial Sequence
  Synthetic oligonucleotide; CTT chr11 5211519 5211540 5211536 5211541 +
ctccccgttcccaccctccaaa

SEQ ID NO: 81508 - DNA, 22 bp, Artificial Sequence
  Synthetic oligonucleotide; TTC chr11 5211520 5211541 5211537 5211542 +
tccccgttcccaccctccaaac

SEQ ID NO: 81509 - DNA, 22 bp, Artificial Sequence
  Synthetic oligonucleotide; CTC chr11 5211522 5211543 5211539 5211544 +
cccgttcccaccctccaaactc

SEQ ID NO: 81510 - DNA, 22 bp, Artificial Sequence
  Synthetic oligonucleotide; TTC chr11 5211529 5211550 5211546 5211551 +
ccaccctccaaactcaattagg

SEQ ID NO: 81511 - DNA, 22 bp, Artificial Sequence
  Synthetic oligonucleotide; CTC chr11 5211537 5211558 5211554 5211559 +
caaactcaattaggctgcagtg

SEQ ID NO: 81512 - DNA, 22 bp, Artificial Sequence
  Synthetic oligonucleotide; CTC chr11 5211544 5211565 5211561 5211566 +
aattaggctgcagtgtcttttg

SEQ ID NO: 81513 - DNA, 22 bp, Artificial Sequence
  Synthetic oligonucleotide; TTA chr11 5211549 5211570 5211566 5211571 +
ggctgcagtgtcttttgttccc

SEQ ID NO: 81514 - DNA, 22 bp, Artificial Sequence
  Synthetic oligonucleotide; CTG chr11 5211554 5211575 5211571 5211576 +
cagtgtcttttgttcccgttat

SEQ ID NO: 81515 - DNA, 22 bp, Artificial Sequence
  Synthetic oligonucleotide; CTT chr11 5211563 5211584 5211580 5211585 +
ttgttcccgttatgtgtgcatg

SEQ ID NO: 81516 - DNA, 22 bp, Artificial Sequence
  Synthetic oligonucleotide; TTT chr11 5211564 5211585 5211581 5211586 +
tgttcccgttatgtgtgcatgt

SEQ ID NO: 81517 - DNA, 22 bp, Artificial Sequence
  Synthetic oligonucleotide; TTT chr11 5211565 5211586 5211582 5211587 +
gttcccgttatgtgtgcatgtt

SEQ ID NO: 81518 - DNA, 22 bp, Artificial Sequence
  Synthetic oligonucleotide; TTG chr11 5211566 5211587 5211583 5211588 +
ttcccgttatgtgtgcatgttt

SEQ ID NO: 81519 - DNA, 22 bp, Artificial Sequence
  Synthetic oligonucleotide; TTC chr11 5211569 5211590 5211586 5211591 +
ccgttatgtgtgcatgttttct

SEQ ID NO: 81520 - DNA, 22 bp, Artificial Sequence
  Synthetic oligonucleotide; TTA chr11 5211575 5211596 5211592 5211597 +
tgtgtgcatgttttctcatcat

SEQ ID NO: 81521 - DNA, 22 bp, Artificial Sequence
  Synthetic oligonucleotide; TTT chr11 5211588 5211609 5211605 5211610 +
tctcatcatttagttcctactt

SEQ ID NO: 81522 - DNA, 22 bp, Artificial Sequence
  Synthetic oligonucleotide; TTT chr11 5211589 5211610 5211606 5211611 +
ctcatcatttagttcctacttg

SEQ ID NO: 81523 - DNA, 22 bp, Artificial Sequence
  Synthetic oligonucleotide; TTC chr11 5211590 5211611 5211607 5211612 +
tcatcatttagttcctacttgt

SEQ ID NO: 81524 - DNA, 22 bp, Artificial Sequence
  Synthetic oligonucleotide; CTC chr11 5211592 5211613 5211609 5211614 +
atcatttagttcctacttgtaa

SEQ ID NO: 81525 - DNA, 22 bp, Artificial Sequence
  Synthetic oligonucleotide; TTT chr11 5211599 5211620 5211616 5211621 +
agttcctacttgtaagtgataa

SEQ ID NO: 81526 - DNA, 22 bp, Artificial Sequence
  Synthetic oligonucleotide; TTA chr11 5211600 5211621 5211617 5211622 +
gttcctacttgtaagtgataat

SEQ ID NO: 81527 - DNA, 22 bp, Artificial Sequence
  Synthetic oligonucleotide; TTC chr11 5211604 5211625 5211621 5211626 +
ctacttgtaagtgataatatgt

SEQ ID NO: 81528 - DNA, 22 bp, Artificial Sequence
  Synthetic oligonucleotide; CTA chr11 5211607 5211628 5211624 5211629 +
cttgtaagtgataatatgtagt

SEQ ID NO: 81529 - DNA, 22 bp, Artificial Sequence
  Synthetic oligonucleotide; CTT chr11 5211610 5211631 5211627 5211632 +
gtaagtgataatatgtagtatt

SEQ ID NO: 81530 - DNA, 22 bp, Artificial Sequence
  Synthetic oligonucleotide; TTG chr11 5211611 5211632 5211628 5211633 +
taagtgataatatgtagtattt

SEQ ID NO: 81531 - DNA, 22 bp, Artificial Sequence
  Synthetic oligonucleotide; TTT chr11 5211633 5211654 5211650 5211655 +
ggttttctgttcttacattagt

SEQ ID NO: 81532 - DNA, 22 bp, Artificial Sequence
  Synthetic oligonucleotide; TTG chr11 5211634 5211655 5211651 5211656 +
gttttctgttcttacattagtt

SEQ ID NO: 81533 - DNA, 22 bp, Artificial Sequence
  Synthetic oligonucleotide; TTT chr11 5211638 5211659 5211655 5211660 +
tctgttcttacattagtttgtt

SEQ ID NO: 81534 - DNA, 22 bp, Artificial Sequence
  Synthetic oligonucleotide; TTT chr11 5211639 5211660 5211656 5211661 +
ctgttcttacattagtttgtta

SEQ ID NO: 81535 - DNA, 22 bp, Artificial Sequence
  Synthetic oligonucleotide; TTC chr11 5211640 5211661 5211657 5211662 +
tgttcttacattagtttgttaa

SEQ ID NO: 81536 - DNA, 22 bp, Artificial Sequence
  Synthetic oligonucleotide; CTG chr11 5211642 5211663 5211659 5211664 +
ttcttacattagtttgttaagg

SEQ ID NO: 81537 - DNA, 22 bp, Artificial Sequence
  Synthetic oligonucleotide; TTC chr11 5211645 5211666 5211662 5211667 +
ttacattagtttgttaaggata

SEQ ID NO: 81538 - DNA, 22 bp, Artificial Sequence
  Synthetic oligonucleotide; CTT chr11 5211647 5211668 5211664 5211669 +
acattagtttgttaaggataat

SEQ ID NO: 81539 - DNA, 22 bp, Artificial Sequence
  Synthetic oligonucleotide; TTA chr11 5211648 5211669 5211665 5211670 +
cattagtttgttaaggataatg

SEQ ID NO: 81540 - DNA, 22 bp, Artificial Sequence
  Synthetic oligonucleotide; TTA chr11 5211653 5211674 5211670 5211675 +
gtttgttaaggataatggtgtc

SEQ ID NO: 81541 - DNA, 22 bp, Artificial Sequence
  Synthetic oligonucleotide; TTT chr11 5211657 5211678 5211674 5211679 +
gttaaggataatggtgtccggc

SEQ ID NO: 81542 - DNA, 22 bp, Artificial Sequence
  Synthetic oligonucleotide; TTG chr11 5211658 5211679 5211675 5211680 +
ttaaggataatggtgtccggct

SEQ ID NO: 81543 - DNA, 22 bp, Artificial Sequence
  Synthetic oligonucleotide; TTA chr11 5211661 5211682 5211678 5211683 +
aggataatggtgtccggctcca

SEQ ID NO: 81544 - DNA, 22 bp, Artificial Sequence
  Synthetic oligonucleotide; CTC chr11 5211681 5211702 5211698 5211703 +
catccatgttcctgcaaaggac

SEQ ID NO: 81545 - DNA, 22 bp, Artificial Sequence
  Synthetic oligonucleotide; TTC chr11 5211692 5211713 5211709 5211714 +
ctgcaaaggacatgatctcatt

SEQ ID NO: 81546 - DNA, 22 bp, Artificial Sequence
  Synthetic oligonucleotide; CTG chr11 5211695 5211716 5211712 5211717 +
caaaggacatgatctcattctt

SEQ ID NO: 81547 - DNA, 22 bp, Artificial Sequence
  Synthetic oligonucleotide; CTC chr11 5211711 5211732 5211728 5211733 +
attcttttttatggccacatag

SEQ ID NO: 81548 - DNA, 22 bp, Artificial Sequence
  Synthetic oligonucleotide; TTC chr11 5211715 5211736 5211732 5211737 +
ttttttatggccacatagtatt

SEQ ID NO: 81549 - DNA, 22 bp, Artificial Sequence
  Synthetic oligonucleotide; CTT chr11 5211717 5211738 5211734 5211739 +
ttttatggccacatagtattcc

SEQ ID NO: 81550 - DNA, 22 bp, Artificial Sequence
  Synthetic oligonucleotide; TTT chr11 5211718 5211739 5211735 5211740 +
tttatggccacatagtattcca

SEQ ID NO: 81551 - DNA, 22 bp, Artificial Sequence
  Synthetic oligonucleotide; TTT chr11 5211719 5211740 5211736 5211741 +
ttatggccacatagtattccat

SEQ ID NO: 81552 - DNA, 22 bp, Artificial Sequence
  Synthetic oligonucleotide; TTT chr11 5211720 5211741 5211737 5211742 +
tatggccacatagtattccatg

SEQ ID NO: 81553 - DNA, 22 bp, Artificial Sequence
  Synthetic oligonucleotide; TTT chr11 5211721 5211742 5211738 5211743 +
atggccacatagtattccatgg

SEQ ID NO: 81554 - DNA, 22 bp, Artificial Sequence
  Synthetic oligonucleotide; TTA chr11 5211722 5211743 5211739 5211744 +
tggccacatagtattccatggt

SEQ ID NO: 81555 - DNA, 22 bp, Artificial Sequence
  Synthetic oligonucleotide; TTC chr11 5211738 5211759 5211755 5211760 +
catggtgtatatgtacatgttc

SEQ ID NO: 81556 - DNA, 22 bp, Artificial Sequence
  Synthetic oligonucleotide; TTC chr11 5211760 5211781 5211777 5211782 +
tttatcggtataccactaatgg

SEQ ID NO: 81557 - DNA, 22 bp, Artificial Sequence
  Synthetic oligonucleotide; CTT chr11 5211762 5211783 5211779 5211784 +
tatcggtataccactaatgggc

SEQ ID NO: 81558 - DNA, 22 bp, Artificial Sequence
  Synthetic oligonucleotide; TTT chr11 5211763 5211784 5211780 5211785 +
atcggtataccactaatgggcc

SEQ ID NO: 81559 - DNA, 22 bp, Artificial Sequence
  Synthetic oligonucleotide; TTA chr11 5211764 5211785 5211781 5211786 +
tcggtataccactaatgggcct

SEQ ID NO: 81560 - DNA, 22 bp, Artificial Sequence
  Synthetic oligonucleotide; CTA chr11 5211778 5211799 5211795 5211800 +
atgggccttcaggttgattcta

SEQ ID NO: 81561 - DNA, 22 bp, Artificial Sequence
  Synthetic oligonucleotide; CTT chr11 5211787 5211808 5211804 5211809 +
caggttgattctatgtctttgc

SEQ ID NO: 81562 - DNA, 22 bp, Artificial Sequence
  Synthetic oligonucleotide; TTC chr11 5211788 5211809 5211805 5211810 +
aggttgattctatgtctttgct

SEQ ID NO: 81563 - DNA, 22 bp, Artificial Sequence
  Synthetic oligonucleotide; TTG chr11 5211794 5211815 5211811 5211816 +
attctatgtctttgctattgtg

SEQ ID NO: 81564 - DNA, 22 bp, Artificial Sequence
  Synthetic oligonucleotide; TTC chr11 5211798 5211819 5211815 5211820 +
tatgtctttgctattgtgatta

SEQ ID NO: 81565 - DNA, 22 bp, Artificial Sequence
  Synthetic oligonucleotide; CTA chr11 5211800 5211821 5211817 5211822 +
tgtctttgctattgtgattatg

SEQ ID NO: 81566 - DNA, 22 bp, Artificial Sequence
  Synthetic oligonucleotide; CTT chr11 5211806 5211827 5211823 5211828 +
tgctattgtgattatgctgcaa

SEQ ID NO: 81567 - DNA, 22 bp, Artificial Sequence
  Synthetic oligonucleotide; TTT chr11 5211807 5211828 5211824 5211829 +
gctattgtgattatgctgcaat

SEQ ID NO: 81568 - DNA, 22 bp, Artificial Sequence
  Synthetic oligonucleotide; TTG chr11 5211808 5211829 5211825 5211830 +
ctattgtgattatgctgcaatg

SEQ ID NO: 81569 - DNA, 22 bp, Artificial Sequence
  Synthetic oligonucleotide; CTA chr11 5211811 5211832 5211828 5211833 +
ttgtgattatgctgcaatggac

SEQ ID NO: 81570 - DNA, 22 bp, Artificial Sequence
  Synthetic oligonucleotide; TTG chr11 5211814 5211835 5211831 5211836 +
tgattatgctgcaatggacaca

SEQ ID NO: 81571 - DNA, 22 bp, Artificial Sequence
  Synthetic oligonucleotide; TTA chr11 5211820 5211841 5211837 5211842 +
tgctgcaatggacacaggtgtg

SEQ ID NO: 81572 - DNA, 22 bp, Artificial Sequence
  Synthetic oligonucleotide; CTG chr11 5211825 5211846 5211842 5211847 +
caatggacacaggtgtgcatgt

SEQ ID NO: 81573 - DNA, 22 bp, Artificial Sequence
  Synthetic oligonucleotide; CTT chr11 5211852 5211873 5211869 5211874 +
tgtgatagaatggtttattttc

SEQ ID NO: 81574 - DNA, 22 bp, Artificial Sequence
  Synthetic oligonucleotide; TTT chr11 5211853 5211874 5211870 5211875 +
gtgatagaatggtttattttcc

SEQ ID NO: 81575 - DNA, 22 bp, Artificial Sequence
  Synthetic oligonucleotide; TTG chr11 5211854 5211875 5211871 5211876 +
tgatagaatggtttattttcct

SEQ ID NO: 81576 - DNA, 22 bp, Artificial Sequence
  Synthetic oligonucleotide; TTT chr11 5211868 5211889 5211885 5211890 +
attttcctttaggtatatactc

SEQ ID NO: 81577 - DNA, 22 bp, Artificial Sequence
  Synthetic oligonucleotide; TTA chr11 5211869 5211890 5211886 5211891 +
ttttcctttaggtatatactca

SEQ ID NO: 81578 - DNA, 22 bp, Artificial Sequence
  Synthetic oligonucleotide; TTT chr11 5211872 5211893 5211889 5211894 +
tcctttaggtatatactcaata

SEQ ID NO: 81579 - DNA, 22 bp, Artificial Sequence
  Synthetic oligonucleotide; TTT chr11 5211873 5211894 5211890 5211895 +
cctttaggtatatactcaataa

SEQ ID NO: 81580 - DNA, 22 bp, Artificial Sequence
  Synthetic oligonucleotide; TTC chr11 5211874 5211895 5211891 5211896 +
ctttaggtatatactcaataat

SEQ ID NO: 81581 - DNA, 22 bp, Artificial Sequence
  Synthetic oligonucleotide; CTT chr11 5211877 5211898 5211894 5211899 +
taggtatatactcaataatagg

SEQ ID NO: 81582 - DNA, 22 bp, Artificial Sequence
  Synthetic oligonucleotide; TTT chr11 5211878 5211899 5211895 5211900 +
aggtatatactcaataatagga

SEQ ID NO: 81583 - DNA, 22 bp, Artificial Sequence
  Synthetic oligonucleotide; TTA chr11 5211879 5211900 5211896 5211901 +
ggtatatactcaataataggat

SEQ ID NO: 81584 - DNA, 22 bp, Artificial Sequence
  Synthetic oligonucleotide; CTC chr11 5211890 5211911 5211907 5211912 +
aataataggattgttgggttaa

SEQ ID NO: 81585 - DNA, 22 bp, Artificial Sequence
  Synthetic oligonucleotide; TTG chr11 5211903 5211924 5211920 5211925 +
ttgggttaaatggtatttctgt

SEQ ID NO: 81586 - DNA, 22 bp, Artificial Sequence
  Synthetic oligonucleotide; TTG chr11 5211906 5211927 5211923 5211928 +
ggttaaatggtatttctgtttt

SEQ ID NO: 81587 - DNA, 22 bp, Artificial Sequence
  Synthetic oligonucleotide; TTA chr11 5211911 5211932 5211928 5211933 +
aatggtatttctgtttttaggt

SEQ ID NO: 81588 - DNA, 22 bp, Artificial Sequence
  Synthetic oligonucleotide; TTT chr11 5211921 5211942 5211938 5211943 +
ctgtttttaggtctttagggaa

SEQ ID NO: 81589 - DNA, 22 bp, Artificial Sequence
  Synthetic oligonucleotide; TTC chr11 5211922 5211943 5211939 5211944 +
tgtttttaggtctttagggaat

SEQ ID NO: 81590 - DNA, 22 bp, Artificial Sequence
  Synthetic oligonucleotide; CTG chr11 5211924 5211945 5211941 5211946 +
tttttaggtctttagggaattg

SEQ ID NO: 81591 - DNA, 22 bp, Artificial Sequence
  Synthetic oligonucleotide; TTT chr11 5211927 5211948 5211944 5211949 +
ttaggtctttagggaattgcca

SEQ ID NO: 81592 - DNA, 22 bp, Artificial Sequence
  Synthetic oligonucleotide; TTT chr11 5211928 5211949 5211945 5211950 +
taggtctttagggaattgccac

SEQ ID NO: 81593 - DNA, 22 bp, Artificial Sequence
  Synthetic oligonucleotide; TTT chr11 5211929 5211950 5211946 5211951 +
aggtctttagggaattgccaca

SEQ ID NO: 81594 - DNA, 22 bp, Artificial Sequence
  Synthetic oligonucleotide; TTA chr11 5211930 5211951 5211947 5211952 +
ggtctttagggaattgccacac

SEQ ID NO: 81595 - DNA, 22 bp, Artificial Sequence
  Synthetic oligonucleotide; CTT chr11 5211936 5211957 5211953 5211958 +
tagggaattgccacactgctgt

SEQ ID NO: 81596 - DNA, 22 bp, Artificial Sequence
  Synthetic oligonucleotide; TTT chr11 5211937 5211958 5211954 5211959 +
agggaattgccacactgctgtc

SEQ ID NO: 81597 - DNA, 22 bp, Artificial Sequence
  Synthetic oligonucleotide; TTA chr11 5211938 5211959 5211955 5211960 +
gggaattgccacactgctgtct

SEQ ID NO: 81598 - DNA, 22 bp, Artificial Sequence
  Synthetic oligonucleotide; TTG chr11 5211946 5211967 5211963 5211968 +
ccacactgctgtctacaatggt

SEQ ID NO: 81599 - DNA, 22 bp, Artificial Sequence
  Synthetic oligonucleotide; CTG chr11 5211954 5211975 5211971 5211976 +
ctgtctacaatggtcgaactaa

SEQ ID NO: 81600 - DNA, 22 bp, Artificial Sequence
  Synthetic oligonucleotide; CTG chr11 5211957 5211978 5211974 5211979 +
tctacaatggtcgaactaattt

SEQ ID NO: 81601 - DNA, 22 bp, Artificial Sequence
  Synthetic oligonucleotide; CTA chr11 5211961 5211982 5211978 5211983 +
caatggtcgaactaatttatat

SEQ ID NO: 81602 - DNA, 22 bp, Artificial Sequence
  Synthetic oligonucleotide; CTA chr11 5211975 5211996 5211992 5211997 +
atttatattgccaccaatggtg

SEQ ID NO: 81603 - DNA, 22 bp, Artificial Sequence
  Synthetic oligonucleotide; TTT chr11 5211979 5212000 5211996 5212001 +
atattgccaccaatggtgtata

SEQ ID NO: 81604 - DNA, 22 bp, Artificial Sequence
  Synthetic oligonucleotide; TTA chr11 5211980 5212001 5211997 5212002 +
tattgccaccaatggtgtataa

SEQ ID NO: 81605 - DNA, 22 bp, Artificial Sequence
  Synthetic oligonucleotide; TTG chr11 5211985 5212006 5212002 5212007 +
ccaccaatggtgtataaacatt

SEQ ID NO: 81606 - DNA, 22 bp, Artificial Sequence
  Synthetic oligonucleotide; TTC chr11 5212008 5212029 5212025 5212030 +
ccttttctccacaaccttaccc

SEQ ID NO: 81607 - DNA, 22 bp, Artificial Sequence
  Synthetic oligonucleotide; CTT chr11 5212012 5212033 5212029 5212034 +
ttctccacaaccttacccacat

SEQ ID NO: 81608 - DNA, 22 bp, Artificial Sequence
  Synthetic oligonucleotide; TTT chr11 5212013 5212034 5212030 5212035 +
tctccacaaccttacccacatc

SEQ ID NO: 81609 - DNA, 22 bp, Artificial Sequence
  Synthetic oligonucleotide; TTT chr11 5212014 5212035 5212031 5212036 +
ctccacaaccttacccacatct

SEQ ID NO: 81610 - DNA, 22 bp, Artificial Sequence
  Synthetic oligonucleotide; TTC chr11 5212015 5212036 5212032 5212037 +
tccacaaccttacccacatctg

SEQ ID NO: 81611 - DNA, 22 bp, Artificial Sequence
  Synthetic oligonucleotide; CTC chr11 5212017 5212038 5212034 5212039 +
cacaaccttacccacatctgtt

SEQ ID NO: 81612 - DNA, 22 bp, Artificial Sequence
  Synthetic oligonucleotide; CTT chr11 5212026 5212047 5212043 5212048 +
acccacatctgttattttttga

SEQ ID NO: 81613 - DNA, 22 bp, Artificial Sequence
  Synthetic oligonucleotide; TTA chr11 5212027 5212048 5212044 5212049 +
cccacatctgttattttttgac

SEQ ID NO: 81614 - DNA, 22 bp, Artificial Sequence
  Synthetic oligonucleotide; CTG chr11 5212037 5212058 5212054 5212059 +
ttattttttgactatttaatta

SEQ ID NO: 81615 - DNA, 22 bp, Artificial Sequence
  Synthetic oligonucleotide; TTA chr11 5212040 5212061 5212057 5212062 +
ttttttgactatttaattatag

SEQ ID NO: 81616 - DNA, 22 bp, Artificial Sequence
  Synthetic oligonucleotide; TTT chr11 5212043 5212064 5212060 5212065 +
tttgactatttaattatagata

SEQ ID NO: 81617 - DNA, 22 bp, Artificial Sequence
  Synthetic oligonucleotide; TTT chr11 5212044 5212065 5212061 5212066 +
ttgactatttaattatagatat

SEQ ID NO: 81618 - DNA, 22 bp, Artificial Sequence
  Synthetic oligonucleotide; TTT chr11 5212045 5212066 5212062 5212067 +
tgactatttaattatagatatt

SEQ ID NO: 81619 - DNA, 22 bp, Artificial Sequence
  Synthetic oligonucleotide; TTT chr11 5212046 5212067 5212063 5212068 +
gactatttaattatagatattt

SEQ ID NO: 81620 - DNA, 22 bp, Artificial Sequence
  Synthetic oligonucleotide; TTG chr11 5212047 5212068 5212064 5212069 +
actatttaattatagatatttt

SEQ ID NO: 81621 - DNA, 22 bp, Artificial Sequence
  Synthetic oligonucleotide; CTA chr11 5212051 5212072 5212068 5212073 +
tttaattatagatattttaagt

SEQ ID NO: 81622 - DNA, 22 bp, Artificial Sequence
  Synthetic oligonucleotide; TTT chr11 5212054 5212075 5212071 5212076 +
aattatagatattttaagtgat

SEQ ID NO: 81623 - DNA, 22 bp, Artificial Sequence
  Synthetic oligonucleotide; TTA chr11 5212055 5212076 5212072 5212077 +
attatagatattttaagtgatg

SEQ ID NO: 81624 - DNA, 22 bp, Artificial Sequence
  Synthetic oligonucleotide; TTA chr11 5212059 5212080 5212076 5212081 +
tagatattttaagtgatgtgag

SEQ ID NO: 81625 - DNA, 22 bp, Artificial Sequence
  Synthetic oligonucleotide; TTT chr11 5212068 5212089 5212085 5212090 +
taagtgatgtgagatagtatct

SEQ ID NO: 81626 - DNA, 22 bp, Artificial Sequence
  Synthetic oligonucleotide; TTT chr11 5212069 5212090 5212086 5212091 +
aagtgatgtgagatagtatctc

SEQ ID NO: 81627 - DNA, 22 bp, Artificial Sequence
  Synthetic oligonucleotide; TTA chr11 5212070 5212091 5212087 5212092 +
agtgatgtgagatagtatctca

SEQ ID NO: 81628 - DNA, 22 bp, Artificial Sequence
  Synthetic oligonucleotide; CTC chr11 5212091 5212112 5212108 5212113 +
attttgggtttgattggcattt

SEQ ID NO: 81629 - DNA, 22 bp, Artificial Sequence
  Synthetic oligonucleotide; TTT chr11 5212095 5212116 5212112 5212117 +
tgggtttgattggcatttctct

SEQ ID NO: 81630 - DNA, 22 bp, Artificial Sequence
  Synthetic oligonucleotide; TTT chr11 5212096 5212117 5212113 5212118 +
gggtttgattggcatttctcta

SEQ ID NO: 81631 - DNA, 22 bp, Artificial Sequence
  Synthetic oligonucleotide; TTG chr11 5212097 5212118 5212114 5212119 +
ggtttgattggcatttctctaa

SEQ ID NO: 81632 - DNA, 22 bp, Artificial Sequence
  Synthetic oligonucleotide; TTT chr11 5212102 5212123 5212119 5212124 +
gattggcatttctctaatgatc

SEQ ID NO: 81633 - DNA, 22 bp, Artificial Sequence
  Synthetic oligonucleotide; TTG chr11 5212103 5212124 5212120 5212125 +
attggcatttctctaatgatca

SEQ ID NO: 81634 - DNA, 22 bp, Artificial Sequence
  Synthetic oligonucleotide; TTG chr11 5212107 5212128 5212124 5212129 +
gcatttctctaatgatcagtga

SEQ ID NO: 81635 - DNA, 22 bp, Artificial Sequence
  Synthetic oligonucleotide; TTT chr11 5212113 5212134 5212130 5212135 +
ctctaatgatcagtgacactga

SEQ ID NO: 81636 - DNA, 22 bp, Artificial Sequence
  Synthetic oligonucleotide; TTC chr11 5212114 5212135 5212131 5212136 +
tctaatgatcagtgacactgag

SEQ ID NO: 81637 - DNA, 22 bp, Artificial Sequence
  Synthetic oligonucleotide; CTC chr11 5212116 5212137 5212133 5212138 +
taatgatcagtgacactgagct

SEQ ID NO: 81638 - DNA, 22 bp, Artificial Sequence
  Synthetic oligonucleotide; CTA chr11 5212118 5212139 5212135 5212140 +
atgatcagtgacactgagcttt

SEQ ID NO: 81639 - DNA, 22 bp, Artificial Sequence
  Synthetic oligonucleotide; CTG chr11 5212134 5212155 5212151 5212156 +
agcttttttcatatgcttggtg

SEQ ID NO: 81640 - DNA, 22 bp, Artificial Sequence
  Synthetic oligonucleotide; CTT chr11 5212139 5212160 5212156 5212161 +
ttttcatatgcttggtggccac

SEQ ID NO: 81641 - DNA, 22 bp, Artificial Sequence
  Synthetic oligonucleotide; TTT chr11 5212140 5212161 5212157 5212162 +
tttcatatgcttggtggccaca

SEQ ID NO: 81642 - DNA, 22 bp, Artificial Sequence
  Synthetic oligonucleotide; TTT chr11 5212141 5212162 5212158 5212163 +
ttcatatgcttggtggccacat

SEQ ID NO: 81643 - DNA, 22 bp, Artificial Sequence
  Synthetic oligonucleotide; TTT chr11 5212142 5212163 5212159 5212164 +
tcatatgcttggtggccacatg

SEQ ID NO: 81644 - DNA, 22 bp, Artificial Sequence
  Synthetic oligonucleotide; TTT chr11 5212143 5212164 5212160 5212165 +
catatgcttggtggccacatgt

SEQ ID NO: 81645 - DNA, 22 bp, Artificial Sequence
  Synthetic oligonucleotide; TTC chr11 5212144 5212165 5212161 5212166 +
atatgcttggtggccacatgta

SEQ ID NO: 81646 - DNA, 22 bp, Artificial Sequence
  Synthetic oligonucleotide; CTT chr11 5212152 5212173 5212169 5212174 +
ggtggccacatgtatgtcttct

SEQ ID NO: 81647 - DNA, 22 bp, Artificial Sequence
  Synthetic oligonucleotide; TTG chr11 5212153 5212174 5212170 5212175 +
gtggccacatgtatgtcttctt

SEQ ID NO: 81648 - DNA, 22 bp, Artificial Sequence
  Synthetic oligonucleotide; CTT chr11 5212172 5212193 5212189 5212194 +
cttttgaatactgtctgttcat

SEQ ID NO: 81649 - DNA, 22 bp, Artificial Sequence
  Synthetic oligonucleotide; TTC chr11 5212173 5212194 5212190 5212195 +
ttttgaatactgtctgttcatg

SEQ ID NO: 81650 - DNA, 22 bp, Artificial Sequence
  Synthetic oligonucleotide; CTT chr11 5212175 5212196 5212192 5212197 +
ttgaatactgtctgttcatgtc

SEQ ID NO: 81651 - DNA, 22 bp, Artificial Sequence
  Synthetic oligonucleotide; TTT chr11 5212176 5212197 5212193 5212198 +
tgaatactgtctgttcatgtcc

SEQ ID NO: 81652 - DNA, 22 bp, Artificial Sequence
  Synthetic oligonucleotide; TTT chr11 5212177 5212198 5212194 5212199 +
gaatactgtctgttcatgtcct

SEQ ID NO: 81653 - DNA, 22 bp, Artificial Sequence
  Synthetic oligonucleotide; TTG chr11 5212178 5212199 5212195 5212200 +
aatactgtctgttcatgtcctt

SEQ ID NO: 81654 - DNA, 22 bp, Artificial Sequence
  Synthetic oligonucleotide; CTG chr11 5212185 5212206 5212202 5212207 +
tctgttcatgtcctttacccat

SEQ ID NO: 81655 - DNA, 22 bp, Artificial Sequence
  Synthetic oligonucleotide; CTG chr11 5212189 5212210 5212206 5212211 +
ttcatgtcctttacccattttt

SEQ ID NO: 81656 - DNA, 22 bp, Artificial Sequence
  Synthetic oligonucleotide; TTC chr11 5212192 5212213 5212209 5212214 +
atgtcctttacccattttttgt

SEQ ID NO: 81657 - DNA, 22 bp, Artificial Sequence
  Synthetic oligonucleotide; CTT chr11 5212200 5212221 5212217 5212222 +
tacccattttttgtggcattgt

SEQ ID NO: 81658 - DNA, 22 bp, Artificial Sequence
  Synthetic oligonucleotide; TTT chr11 5212201 5212222 5212218 5212223 +
acccattttttgtggcattgtt

SEQ ID NO: 81659 - DNA, 22 bp, Artificial Sequence
  Synthetic oligonucleotide; TTA chr11 5212202 5212223 5212219 5212224 +
cccattttttgtggcattgttt

SEQ ID NO: 81660 - DNA, 22 bp, Artificial Sequence
  Synthetic oligonucleotide; TTT chr11 5212209 5212230 5212226 5212231 +
tttgtggcattgtttgttttgt

SEQ ID NO: 81661 - DNA, 22 bp, Artificial Sequence
  Synthetic oligonucleotide; TTT chr11 5212210 5212231 5212227 5212232 +
ttgtggcattgtttgttttgtt

SEQ ID NO: 81662 - DNA, 22 bp, Artificial Sequence
  Synthetic oligonucleotide; TTT chr11 5212211 5212232 5212228 5212233 +
tgtggcattgtttgttttgttc

SEQ ID NO: 81663 - DNA, 22 bp, Artificial Sequence
  Synthetic oligonucleotide; TTT chr11 5212212 5212233 5212229 5212234 +
gtggcattgtttgttttgttct

SEQ ID NO: 81664 - DNA, 22 bp, Artificial Sequence
  Synthetic oligonucleotide; TTG chr11 5212213 5212234 5212230 5212235 +
tggcattgtttgttttgttctt

SEQ ID NO: 81665 - DNA, 22 bp, Artificial Sequence
  Synthetic oligonucleotide; TTG chr11 5212221 5212242 5212238 5212243 +
tttgttttgttcttgtagattc

SEQ ID NO: 81666 - DNA, 22 bp, Artificial Sequence
  Synthetic oligonucleotide; TTT chr11 5212224 5212245 5212241 5212246 +
gttttgttcttgtagattcatt

SEQ ID NO: 81667 - DNA, 22 bp, Artificial Sequence
  Synthetic oligonucleotide; TTG chr11 5212225 5212246 5212242 5212247 +
ttttgttcttgtagattcattt

SEQ ID NO: 81668 - DNA, 22 bp, Artificial Sequence
  Synthetic oligonucleotide; TTT chr11 5212228 5212249 5212245 5212250 +
tgttcttgtagattcatttaag

SEQ ID NO: 81669 - DNA, 22 bp, Artificial Sequence
  Synthetic oligonucleotide; TTT chr11 5212229 5212250 5212246 5212251 +
gttcttgtagattcatttaagt

SEQ ID NO: 81670 - DNA, 22 bp, Artificial Sequence
  Synthetic oligonucleotide; TTG chr11 5212230 5212251 5212247 5212252 +
ttcttgtagattcatttaagtt

SEQ ID NO: 81671 - DNA, 22 bp, Artificial Sequence
  Synthetic oligonucleotide; TTC chr11 5212233 5212254 5212250 5212255 +
ttgtagattcatttaagttcct

SEQ ID NO: 81672 - DNA, 22 bp, Artificial Sequence
  Synthetic oligonucleotide; CTT chr11 5212235 5212256 5212252 5212257 +
gtagattcatttaagttcctta

SEQ ID NO: 81673 - DNA, 22 bp, Artificial Sequence
  Synthetic oligonucleotide; TTG chr11 5212236 5212257 5212253 5212258 +
tagattcatttaagttccttat

SEQ ID NO: 81674 - DNA, 22 bp, Artificial Sequence
  Synthetic oligonucleotide; TTC chr11 5212243 5212264 5212260 5212265 +
atttaagttccttatagattct

SEQ ID NO: 81675 - DNA, 22 bp, Artificial Sequence
  Synthetic oligonucleotide; TTT chr11 5212247 5212268 5212264 5212269 +
aagttccttatagattctgaat

SEQ ID NO: 81676 - DNA, 22 bp, Artificial Sequence
  Synthetic oligonucleotide; TTA chr11 5212248 5212269 5212265 5212270 +
agttccttatagattctgaata

SEQ ID NO: 81677 - DNA, 22 bp, Artificial Sequence
  Synthetic oligonucleotide; TTC chr11 5212253 5212274 5212270 5212275 +
cttatagattctgaatattagg

SEQ ID NO: 81678 - DNA, 22 bp, Artificial Sequence
  Synthetic oligonucleotide; CTT chr11 5212256 5212277 5212273 5212278 +
atagattctgaatattaggcct

SEQ ID NO: 81679 - DNA, 22 bp, Artificial Sequence
  Synthetic oligonucleotide; TTA chr11 5212257 5212278 5212274 5212279 +
tagattctgaatattaggcctt

SEQ ID NO: 81680 - DNA, 22 bp, Artificial Sequence
  Synthetic oligonucleotide; TTC chr11 5212264 5212285 5212281 5212286 +
tgaatattaggcctttgttgga

SEQ ID NO: 81681 - DNA, 22 bp, Artificial Sequence
  Synthetic oligonucleotide; CTG chr11 5212266 5212287 5212283 5212288 +
aatattaggcctttgttggatg

SEQ ID NO: 81682 - DNA, 22 bp, Artificial Sequence
  Synthetic oligonucleotide; TTA chr11 5212273 5212294 5212290 5212295 +
ggcctttgttggatgcatagtt

SEQ ID NO: 81683 - DNA, 22 bp, Artificial Sequence
  Synthetic oligonucleotide; CTT chr11 5212279 5212300 5212296 5212301 +
tgttggatgcatagtttgcaaa

SEQ ID NO: 81684 - DNA, 22 bp, Artificial Sequence
  Synthetic oligonucleotide; TTT chr11 5212280 5212301 5212297 5212302 +
gttggatgcatagtttgcaaaa

SEQ ID NO: 81685 - DNA, 22 bp, Artificial Sequence
  Synthetic oligonucleotide; TTG chr11 5212281 5212302 5212298 5212303 +
ttggatgcatagtttgcaaaaa

SEQ ID NO: 81686 - DNA, 22 bp, Artificial Sequence
  Synthetic oligonucleotide; TTG chr11 5212284 5212305 5212301 5212306 +
gatgcatagtttgcaaaaattt

SEQ ID NO: 81687 - DNA, 22 bp, Artificial Sequence
  Synthetic oligonucleotide; TTT chr11 5212296 5212317 5212313 5212318 +
gcaaaaattttctcccattcta

SEQ ID NO: 81688 - DNA, 22 bp, Artificial Sequence
  Synthetic oligonucleotide; TTG chr11 5212297 5212318 5212314 5212319 +
caaaaattttctcccattctat

SEQ ID NO: 81689 - DNA, 22 bp, Artificial Sequence
  Synthetic oligonucleotide; TTT chr11 5212306 5212327 5212323 5212328 +
tctcccattctataggttgttt

SEQ ID NO: 81690 - DNA, 22 bp, Artificial Sequence
  Synthetic oligonucleotide; TTT chr11 5212307 5212328 5212324 5212329 +
ctcccattctataggttgttta

SEQ ID NO: 81691 - DNA, 22 bp, Artificial Sequence
  Synthetic oligonucleotide; TTC chr11 5212308 5212329 5212325 5212330 +
tcccattctataggttgtttac

SEQ ID NO: 81692 - DNA, 22 bp, Artificial Sequence
  Synthetic oligonucleotide; CTC chr11 5212310 5212331 5212327 5212332 +
ccattctataggttgtttactc

SEQ ID NO: 81693 - DNA, 22 bp, Artificial Sequence
  Synthetic oligonucleotide; TTC chr11 5212316 5212337 5212333 5212338 +
tataggttgtttactcagttga

SEQ ID NO: 81694 - DNA, 22 bp, Artificial Sequence
  Synthetic oligonucleotide; CTA chr11 5212318 5212339 5212335 5212340 +
taggttgtttactcagttgata

SEQ ID NO: 81695 - DNA, 22 bp, Artificial Sequence
  Synthetic oligonucleotide; TTG chr11 5212325 5212346 5212342 5212347 +
tttactcagttgatagtttctt

SEQ ID NO: 81696 - DNA, 22 bp, Artificial Sequence
  Synthetic oligonucleotide; TTT chr11 5212328 5212349 5212345 5212350 +
actcagttgatagtttcttttg

SEQ ID NO: 81697 - DNA, 22 bp, Artificial Sequence
  Synthetic oligonucleotide; TTA chr11 5212329 5212350 5212346 5212351 +
ctcagttgatagtttcttttgc

SEQ ID NO: 81698 - DNA, 22 bp, Artificial Sequence
  Synthetic oligonucleotide; CTC chr11 5212332 5212353 5212349 5212354 +
agttgatagtttcttttgctgt

SEQ ID NO: 81699 - DNA, 22 bp, Artificial Sequence
  Synthetic oligonucleotide; TTG chr11 5212337 5212358 5212354 5212359 +
atagtttcttttgctgtgcaga

SEQ ID NO: 81700 - DNA, 22 bp, Artificial Sequence
  Synthetic oligonucleotide; TTT chr11 5212344 5212365 5212361 5212366 +
cttttgctgtgcagaaacttta

SEQ ID NO: 81701 - DNA, 22 bp, Artificial Sequence
  Synthetic oligonucleotide; TTC chr11 5212345 5212366 5212362 5212367 +
ttttgctgtgcagaaactttat

SEQ ID NO: 81702 - DNA, 22 bp, Artificial Sequence
  Synthetic oligonucleotide; CTT chr11 5212347 5212368 5212364 5212369 +
ttgctgtgcagaaactttattt

SEQ ID NO: 81703 - DNA, 22 bp, Artificial Sequence
  Synthetic oligonucleotide; TTT chr11 5212348 5212369 5212365 5212370 +
tgctgtgcagaaactttatttt

SEQ ID NO: 81704 - DNA, 22 bp, Artificial Sequence
  Synthetic oligonucleotide; TTT chr11 5212349 5212370 5212366 5212371 +
gctgtgcagaaactttatttta

SEQ ID NO: 81705 - DNA, 22 bp, Artificial Sequence
  Synthetic oligonucleotide; TTG chr11 5212350 5212371 5212367 5212372 +
ctgtgcagaaactttattttaa

SEQ ID NO: 81706 - DNA, 22 bp, Artificial Sequence
  Synthetic oligonucleotide; CTG chr11 5212353 5212374 5212370 5212375 +
tgcagaaactttattttaatta

SEQ ID NO: 81707 - DNA, 22 bp, Artificial Sequence
  Synthetic oligonucleotide; CTT chr11 5212364 5212385 5212381 5212386 +
tattttaattagatcctatttg

SEQ ID NO: 81708 - DNA, 22 bp, Artificial Sequence
  Synthetic oligonucleotide; TTT chr11 5212365 5212386 5212382 5212387 +
attttaattagatcctatttgt

SEQ ID NO: 81709 - DNA, 22 bp, Artificial Sequence
  Synthetic oligonucleotide; TTA chr11 5212366 5212387 5212383 5212388 +
ttttaattagatcctatttgtc

SEQ ID NO: 81710 - DNA, 22 bp, Artificial Sequence
  Synthetic oligonucleotide; TTT chr11 5212369 5212390 5212386 5212391 +
taattagatcctatttgtcaat

SEQ ID NO: 81711 - DNA, 22 bp, Artificial Sequence
  Synthetic oligonucleotide; TTT chr11 5212370 5212391 5212387 5212392 +
aattagatcctatttgtcaatt

SEQ ID NO: 81712 - DNA, 22 bp, Artificial Sequence
  Synthetic oligonucleotide; TTA chr11 5212371 5212392 5212388 5212393 +
attagatcctatttgtcaattt

SEQ ID NO: 81713 - DNA, 22 bp, Artificial Sequence
  Synthetic oligonucleotide; TTA chr11 5212375 5212396 5212392 5212397 +
gatcctatttgtcaatttttgc

SEQ ID NO: 81714 - DNA, 22 bp, Artificial Sequence
  Synthetic oligonucleotide; CTA chr11 5212382 5212403 5212399 5212404 +
tttgtcaatttttgcttttgct

SEQ ID NO: 81715 - DNA, 22 bp, Artificial Sequence
  Synthetic oligonucleotide; TTT chr11 5212385 5212406 5212402 5212407 +
gtcaatttttgcttttgctgca

SEQ ID NO: 81716 - DNA, 22 bp, Artificial Sequence
  Synthetic oligonucleotide; TTG chr11 5212386 5212407 5212403 5212408 +
tcaatttttgcttttgctgcaa

SEQ ID NO: 81717 - DNA, 22 bp, Artificial Sequence
  Synthetic oligonucleotide; TTT chr11 5212393 5212414 5212410 5212415 +
ttgcttttgctgcaatgactgt

SEQ ID NO: 81718 - DNA, 22 bp, Artificial Sequence
  Synthetic oligonucleotide; TTT chr11 5212394 5212415 5212411 5212416 +
tgcttttgctgcaatgactgtt

SEQ ID NO: 81719 - DNA, 22 bp, Artificial Sequence
  Synthetic oligonucleotide; TTT chr11 5212395 5212416 5212412 5212417 +
gcttttgctgcaatgactgttg

SEQ ID NO: 81720 - DNA, 22 bp, Artificial Sequence
  Synthetic oligonucleotide; TTG chr11 5212396 5212417 5212413 5212418 +
cttttgctgcaatgactgttgg

SEQ ID NO: 81721 - DNA, 22 bp, Artificial Sequence
  Synthetic oligonucleotide; CTT chr11 5212399 5212420 5212416 5212421 +
ttgctgcaatgactgttggcat

SEQ ID NO: 81722 - DNA, 22 bp, Artificial Sequence
  Synthetic oligonucleotide; TTT chr11 5212400 5212421 5212417 5212422 +
tgctgcaatgactgttggcatc

SEQ ID NO: 81723 - DNA, 22 bp, Artificial Sequence
  Synthetic oligonucleotide; TTT chr11 5212401 5212422 5212418 5212423 +
gctgcaatgactgttggcatct

SEQ ID NO: 81724 - DNA, 22 bp, Artificial Sequence
  Synthetic oligonucleotide; TTG chr11 5212402 5212423 5212419 5212424 +
ctgcaatgactgttggcatctt

SEQ ID NO: 81725 - DNA, 22 bp, Artificial Sequence
  Synthetic oligonucleotide; CTG chr11 5212405 5212426 5212422 5212427 +
caatgactgttggcatctttgt

SEQ ID NO: 81726 - DNA, 22 bp, Artificial Sequence
  Synthetic oligonucleotide; CTG chr11 5212414 5212435 5212431 5212436 +
ttggcatctttgtcatgaaatc

SEQ ID NO: 81727 - DNA, 22 bp, Artificial Sequence
  Synthetic oligonucleotide; TTG chr11 5212417 5212438 5212434 5212439 +
gcatctttgtcatgaaatcttt

SEQ ID NO: 81728 - DNA, 22 bp, Artificial Sequence
  Synthetic oligonucleotide; CTT chr11 5212424 5212445 5212441 5212446 +
tgtcatgaaatctttgcccctg

SEQ ID NO: 81729 - DNA, 22 bp, Artificial Sequence
  Synthetic oligonucleotide; TTT chr11 5212425 5212446 5212442 5212447 +
gtcatgaaatctttgcccctgc

SEQ ID NO: 81730 - DNA, 22 bp, Artificial Sequence
  Synthetic oligonucleotide; TTG chr11 5212426 5212447 5212443 5212448 +
tcatgaaatctttgcccctgct

SEQ ID NO: 81731 - DNA, 22 bp, Artificial Sequence
  Synthetic oligonucleotide; CTT chr11 5212438 5212459 5212455 5212460 +
tgcccctgcttatgtccggaat

SEQ ID NO: 81732 - DNA, 22 bp, Artificial Sequence
  Synthetic oligonucleotide; TTT chr11 5212439 5212460 5212456 5212461 +
gcccctgcttatgtccggaatg

SEQ ID NO: 81733 - DNA, 22 bp, Artificial Sequence
  Synthetic oligonucleotide; TTG chr11 5212440 5212461 5212457 5212462 +
cccctgcttatgtccggaatgg

SEQ ID NO: 81734 - DNA, 22 bp, Artificial Sequence
  Synthetic oligonucleotide; CTG chr11 5212446 5212467 5212463 5212468 +
cttatgtccggaatggtattgc

SEQ ID NO: 81735 - DNA, 22 bp, Artificial Sequence
  Synthetic oligonucleotide; CTT chr11 5212449 5212470 5212466 5212471 +
atgtccggaatggtattgccta

SEQ ID NO: 81736 - DNA, 22 bp, Artificial Sequence
  Synthetic oligonucleotide; TTA chr11 5212450 5212471 5212467 5212472 +
tgtccggaatggtattgcctag

SEQ ID NO: 81737 - DNA, 22 bp, Artificial Sequence
  Synthetic oligonucleotide; TTG chr11 5212467 5212488 5212484 5212489 +
cctaggttgctttcaagcattt

SEQ ID NO: 81738 - DNA, 22 bp, Artificial Sequence
  Synthetic oligonucleotide; CTA chr11 5212471 5212492 5212488 5212493 +
ggttgctttcaagcatttttat

SEQ ID NO: 81739 - DNA, 22 bp, Artificial Sequence
  Synthetic oligonucleotide; TTG chr11 5212476 5212497 5212493 5212498 +
ctttcaagcatttttatagttt

SEQ ID NO: 81740 - DNA, 22 bp, Artificial Sequence
  Synthetic oligonucleotide; CTT chr11 5212479 5212500 5212496 5212501 +
tcaagcatttttatagtttggg

SEQ ID NO: 81741 - DNA, 22 bp, Artificial Sequence
  Synthetic oligonucleotide; TTT chr11 5212480 5212501 5212497 5212502 +
caagcatttttatagtttgggt

SEQ ID NO: 81742 - DNA, 22 bp, Artificial Sequence
  Synthetic oligonucleotide; TTC chr11 5212481 5212502 5212498 5212503 +
aagcatttttatagtttgggtt

SEQ ID NO: 81743 - DNA, 22 bp, Artificial Sequence
  Synthetic oligonucleotide; TTT chr11 5212489 5212510 5212506 5212511 +
ttatagtttgggttttgcattt

SEQ ID NO: 81744 - DNA, 22 bp, Artificial Sequence
  Synthetic oligonucleotide; TTT chr11 5212490 5212511 5212507 5212512 +
tatagtttgggttttgcattta

SEQ ID NO: 81745 - DNA, 22 bp, Artificial Sequence
  Synthetic oligonucleotide; TTT chr11 5212491 5212512 5212508 5212513 +
atagtttgggttttgcatttaa

SEQ ID NO: 81746 - DNA, 22 bp, Artificial Sequence
  Synthetic oligonucleotide; TTA chr11 5212492 5212513 5212509 5212514 +
tagtttgggttttgcatttaag

SEQ ID NO: 81747 - DNA, 22 bp, Artificial Sequence
  Synthetic oligonucleotide; TTT chr11 5212498 5212519 5212515 5212520 +
gggttttgcatttaagtctcta

SEQ ID NO: 81748 - DNA, 22 bp, Artificial Sequence
  Synthetic oligonucleotide; TTG chr11 5212499 5212520 5212516 5212521 +
ggttttgcatttaagtctctaa

SEQ ID NO: 81749 - DNA, 22 bp, Artificial Sequence
  Synthetic oligonucleotide; TTT chr11 5212504 5212525 5212521 5212526 +
tgcatttaagtctctaatccat

SEQ ID NO: 81750 - DNA, 22 bp, Artificial Sequence
  Synthetic oligonucleotide; TTT chr11 5212505 5212526 5212522 5212527 +
gcatttaagtctctaatccatc

SEQ ID NO: 81751 - DNA, 22 bp, Artificial Sequence
  Synthetic oligonucleotide; TTG chr11 5212506 5212527 5212523 5212528 +
catttaagtctctaatccatct

SEQ ID NO: 81752 - DNA, 22 bp, Artificial Sequence
  Synthetic oligonucleotide; TTT chr11 5212511 5212532 5212528 5212533 +
aagtctctaatccatcttgagt

SEQ ID NO: 81753 - DNA, 22 bp, Artificial Sequence
  Synthetic oligonucleotide; TTA chr11 5212512 5212533 5212529 5212534 +
agtctctaatccatcttgagtt

SEQ ID NO: 81754 - DNA, 22 bp, Artificial Sequence
  Synthetic oligonucleotide; CTC chr11 5212518 5212539 5212535 5212540 +
taatccatcttgagtttatttg

SEQ ID NO: 81755 - DNA, 22 bp, Artificial Sequence
  Synthetic oligonucleotide; CTA chr11 5212520 5212541 5212537 5212542 +
atccatcttgagtttatttgtg

SEQ ID NO: 81756 - DNA, 22 bp, Artificial Sequence
  Synthetic oligonucleotide; CTT chr11 5212529 5212550 5212546 5212551 +
gagtttatttgtgtatatgata

SEQ ID NO: 81757 - DNA, 22 bp, Artificial Sequence
  Synthetic oligonucleotide; TTG chr11 5212530 5212551 5212547 5212552 +
agtttatttgtgtatatgatat

SEQ ID NO: 81758 - DNA, 22 bp, Artificial Sequence
  Synthetic oligonucleotide; TTT chr11 5212535 5212556 5212552 5212557 +
atttgtgtatatgatatagaac

SEQ ID NO: 81759 - DNA, 22 bp, Artificial Sequence
  Synthetic oligonucleotide; TTA chr11 5212536 5212557 5212553 5212558 +
tttgtgtatatgatatagaacg

SEQ ID NO: 81760 - DNA, 22 bp, Artificial Sequence
  Synthetic oligonucleotide; TTT chr11 5212539 5212560 5212556 5212561 +
gtgtatatgatatagaacgggg

SEQ ID NO: 81761 - DNA, 22 bp, Artificial Sequence
  Synthetic oligonucleotide; TTG chr11 5212540 5212561 5212557 5212562 +
tgtatatgatatagaacggggt

SEQ ID NO: 81762 - DNA, 22 bp, Artificial Sequence
  Synthetic oligonucleotide; CTG chr11 5212565 5212586 5212582 5212587 +
gtttcaatcttctacatacggt

SEQ ID NO: 81763 - DNA, 22 bp, Artificial Sequence
  Synthetic oligonucleotide; TTT chr11 5212569 5212590 5212586 5212591 +
caatcttctacatacggttagt

SEQ ID NO: 81764 - DNA, 22 bp, Artificial Sequence
  Synthetic oligonucleotide; TTC chr11 5212570 5212591 5212587 5212592 +
aatcttctacatacggttagtc

SEQ ID NO: 81765 - DNA, 22 bp, Artificial Sequence
  Synthetic oligonucleotide; CTT chr11 5212576 5212597 5212593 5212598 +
ctacatacggttagtcagttat

SEQ ID NO: 81766 - DNA, 22 bp, Artificial Sequence
  Synthetic oligonucleotide; TTC chr11 5212577 5212598 5212594 5212599 +
tacatacggttagtcagttatc

SEQ ID NO: 81767 - DNA, 22 bp, Artificial Sequence
  Synthetic oligonucleotide; CTA chr11 5212579 5212600 5212596 5212601 +
catacggttagtcagttatccc

SEQ ID NO: 81768 - DNA, 22 bp, Artificial Sequence
  Synthetic oligonucleotide; TTA chr11 5212589 5212610 5212606 5212611 +
gtcagttatcccaacaccactt

SEQ ID NO: 81769 - DNA, 22 bp, Artificial Sequence
  Synthetic oligonucleotide; TTA chr11 5212597 5212618 5212614 5212619 +
tcccaacaccacttgttgaata

SEQ ID NO: 81770 - DNA, 22 bp, Artificial Sequence
  Synthetic oligonucleotide; CTT chr11 5212611 5212632 5212628 5212633 +
gttgaatagggtgtcttttcct

SEQ ID NO: 81771 - DNA, 22 bp, Artificial Sequence
  Synthetic oligonucleotide; TTG chr11 5212612 5212633 5212629 5212634 +
ttgaatagggtgtcttttcctc

SEQ ID NO: 81772 - DNA, 22 bp, Artificial Sequence
  Synthetic oligonucleotide; TTG chr11 5212615 5212636 5212632 5212637 +
aatagggtgtcttttcctcatt

SEQ ID NO: 81773 - DNA, 22 bp, Artificial Sequence
  Synthetic oligonucleotide; CTT chr11 5212628 5212649 5212645 5212650 +
ttcctcattgcttgtttttatc

SEQ ID NO: 81774 - DNA, 22 bp, Artificial Sequence
  Synthetic oligonucleotide; TTT chr11 5212629 5212650 5212646 5212651 +
tcctcattgcttgtttttatca

SEQ ID NO: 81775 - DNA, 22 bp, Artificial Sequence
  Synthetic oligonucleotide; TTT chr11 5212630 5212651 5212647 5212652 +
cctcattgcttgtttttatcag

SEQ ID NO: 81776 - DNA, 22 bp, Artificial Sequence
  Synthetic oligonucleotide; TTC chr11 5212631 5212652 5212648 5212653 +
ctcattgcttgtttttatcagc

SEQ ID NO: 81777 - DNA, 22 bp, Artificial Sequence
  Synthetic oligonucleotide; CTC chr11 5212634 5212655 5212651 5212656 +
attgcttgtttttatcagcttt

SEQ ID NO: 81778 - DNA, 22 bp, Artificial Sequence
  Synthetic oligonucleotide; TTG chr11 5212638 5212659 5212655 5212660 +
cttgtttttatcagctttgtca

SEQ ID NO: 81779 - DNA, 22 bp, Artificial Sequence
  Synthetic oligonucleotide; CTT chr11 5212641 5212662 5212658 5212663 +
gtttttatcagctttgtcaaag

SEQ ID NO: 81780 - DNA, 22 bp, Artificial Sequence
  Synthetic oligonucleotide; TTG chr11 5212642 5212663 5212659 5212664 +
tttttatcagctttgtcaaaga

SEQ ID NO: 81781 - DNA, 22 bp, Artificial Sequence
  Synthetic oligonucleotide; TTT chr11 5212645 5212666 5212662 5212667 +
ttatcagctttgtcaaagatca

SEQ ID NO: 81782 - DNA, 22 bp, Artificial Sequence
  Synthetic oligonucleotide; TTT chr11 5212646 5212667 5212663 5212668 +
tatcagctttgtcaaagatcag

SEQ ID NO: 81783 - DNA, 22 bp, Artificial Sequence
  Synthetic oligonucleotide; TTT chr11 5212647 5212668 5212664 5212669 +
atcagctttgtcaaagatcaga

SEQ ID NO: 81784 - DNA, 22 bp, Artificial Sequence
  Synthetic oligonucleotide; TTA chr11 5212648 5212669 5212665 5212670 +
tcagctttgtcaaagatcagat

SEQ ID NO: 81785 - DNA, 22 bp, Artificial Sequence
  Synthetic oligonucleotide; CTT chr11 5212655 5212676 5212672 5212677 +
tgtcaaagatcagatggttgta

SEQ ID NO: 81786 - DNA, 22 bp, Artificial Sequence
  Synthetic oligonucleotide; TTT chr11 5212656 5212677 5212673 5212678 +
gtcaaagatcagatggttgtag

SEQ ID NO: 81787 - DNA, 22 bp, Artificial Sequence
  Synthetic oligonucleotide; TTG chr11 5212657 5212678 5212674 5212679 +
tcaaagatcagatggttgtagg

SEQ ID NO: 81788 - DNA, 22 bp, Artificial Sequence
  Synthetic oligonucleotide; TTG chr11 5212675 5212696 5212692 5212697 +
taggcatgtggtcttatttctg

SEQ ID NO: 81789 - DNA, 22 bp, Artificial Sequence
  Synthetic oligonucleotide; CTT chr11 5212690 5212711 5212707 5212712 +
atttctgggctctctattctgt

SEQ ID NO: 81790 - DNA, 22 bp, Artificial Sequence
  Synthetic oligonucleotide; TTA chr11 5212691 5212712 5212708 5212713 +
tttctgggctctctattctgtt

SEQ ID NO: 81791 - DNA, 22 bp, Artificial Sequence
  Synthetic oligonucleotide; TTT chr11 5212694 5212715 5212711 5212716 +
ctgggctctctattctgttcca

SEQ ID NO: 81792 - DNA, 22 bp, Artificial Sequence
  Synthetic oligonucleotide; TTC chr11 5212695 5212716 5212712 5212717 +
tgggctctctattctgttccat

SEQ ID NO: 81793 - DNA, 22 bp, Artificial Sequence
  Synthetic oligonucleotide; CTG chr11 5212697 5212718 5212714 5212719 +
ggctctctattctgttccattt

SEQ ID NO: 81794 - DNA, 22 bp, Artificial Sequence
  Synthetic oligonucleotide; CTC chr11 5212702 5212723 5212719 5212724 +
tctattctgttccatttgtctg

SEQ ID NO: 81795 - DNA, 22 bp, Artificial Sequence
  Synthetic oligonucleotide; CTC chr11 5212704 5212725 5212721 5212726 +
tattctgttccatttgtctgtg

SEQ ID NO: 81796 - DNA, 22 bp, Artificial Sequence
  Synthetic oligonucleotide; CTA chr11 5212706 5212727 5212723 5212728 +
ttctgttccatttgtctgtgtg

SEQ ID NO: 81797 - DNA, 22 bp, Artificial Sequence
  Synthetic oligonucleotide; TTC chr11 5212709 5212730 5212726 5212731 +
tgttccatttgtctgtgtgtct

SEQ ID NO: 81798 - DNA, 22 bp, Artificial Sequence
  Synthetic oligonucleotide; CTG chr11 5212711 5212732 5212728 5212733 +
ttccatttgtctgtgtgtcttt

SEQ ID NO: 81799 - DNA, 22 bp, Artificial Sequence
  Synthetic oligonucleotide; TTC chr11 5212714 5212735 5212731 5212736 +
catttgtctgtgtgtcttttct

SEQ ID NO: 81800 - DNA, 22 bp, Artificial Sequence
  Synthetic oligonucleotide; TTT chr11 5212719 5212740 5212736 5212741 +
gtctgtgtgtcttttctgtaac

SEQ ID NO: 81801 - DNA, 22 bp, Artificial Sequence
  Synthetic oligonucleotide; TTG chr11 5212720 5212741 5212737 5212742 +
tctgtgtgtcttttctgtaaca

SEQ ID NO: 81802 - DNA, 22 bp, Artificial Sequence
  Synthetic oligonucleotide; CTG chr11 5212724 5212745 5212741 5212746 +
tgtgtcttttctgtaacagtac

SEQ ID NO: 81803 - DNA, 22 bp, Artificial Sequence
  Synthetic oligonucleotide; CTT chr11 5212732 5212753 5212749 5212754 +
ttctgtaacagtaccacactgt

SEQ ID NO: 81804 - DNA, 22 bp, Artificial Sequence
  Synthetic oligonucleotide; TTT chr11 5212733 5212754 5212750 5212755 +
tctgtaacagtaccacactgtt

SEQ ID NO: 81805 - DNA, 22 bp, Artificial Sequence
  Synthetic oligonucleotide; TTT chr11 5212734 5212755 5212751 5212756 +
ctgtaacagtaccacactgttt

SEQ ID NO: 81806 - DNA, 22 bp, Artificial Sequence
  Synthetic oligonucleotide; TTC chr11 5212735 5212756 5212752 5212757 +
tgtaacagtaccacactgtttt

SEQ ID NO: 81807 - DNA, 22 bp, Artificial Sequence
  Synthetic oligonucleotide; CTG chr11 5212737 5212758 5212754 5212759 +
taacagtaccacactgttttgg

SEQ ID NO: 81808 - DNA, 22 bp, Artificial Sequence
  Synthetic oligonucleotide; CTG chr11 5212753 5212774 5212770 5212775 +
ttttggttactgtagccctgtg

SEQ ID NO: 81809 - DNA, 22 bp, Artificial Sequence
  Synthetic oligonucleotide; TTT chr11 5212756 5212777 5212773 5212778 +
tggttactgtagccctgtggta

SEQ ID NO: 81810 - DNA, 22 bp, Artificial Sequence
  Synthetic oligonucleotide; TTT chr11 5212757 5212778 5212774 5212779 +
ggttactgtagccctgtggtat

SEQ ID NO: 81811 - DNA, 22 bp, Artificial Sequence
  Synthetic oligonucleotide; TTG chr11 5212758 5212779 5212775 5212780 +
gttactgtagccctgtggtatg

SEQ ID NO: 81812 - DNA, 22 bp, Artificial Sequence
  Synthetic oligonucleotide; TTA chr11 5212762 5212783 5212779 5212784 +
ctgtagccctgtggtatggttt

SEQ ID NO: 81813 - DNA, 22 bp, Artificial Sequence
  Synthetic oligonucleotide; CTG chr11 5212765 5212786 5212782 5212787 +
tagccctgtggtatggtttgaa

SEQ ID NO: 81814 - DNA, 22 bp, Artificial Sequence
  Synthetic oligonucleotide; CTG chr11 5212773 5212794 5212790 5212795 +
tggtatggtttgaagttaggca

SEQ ID NO: 81815 - DNA, 22 bp, Artificial Sequence
  Synthetic oligonucleotide; TTT chr11 5212784 5212805 5212801 5212806 +
gaagttaggcaatgtattatct

SEQ ID NO: 81816 - DNA, 22 bp, Artificial Sequence
  Synthetic oligonucleotide; TTG chr11 5212785 5212806 5212802 5212807 +
aagttaggcaatgtattatctc

SEQ ID NO: 81817 - DNA, 22 bp, Artificial Sequence
  Synthetic oligonucleotide; TTA chr11 5212791 5212812 5212808 5212813 +
ggcaatgtattatctccagctt

SEQ ID NO: 81818 - DNA, 22 bp, Artificial Sequence
  Synthetic oligonucleotide; TTA chr11 5212803 5212824 5212820 5212825 +
tctccagcttttttctttttct

SEQ ID NO: 81819 - DNA, 22 bp, Artificial Sequence
  Synthetic oligonucleotide; CTC chr11 5212807 5212828 5212824 5212829 +
cagcttttttctttttctcttt

SEQ ID NO: 81820 - DNA, 22 bp, Artificial Sequence
  Synthetic oligonucleotide; CTT chr11 5212813 5212834 5212830 5212835 +
ttttctttttctcttttttttt

SEQ ID NO: 81821 - DNA, 22 bp, Artificial Sequence
  Synthetic oligonucleotide; TTT chr11 5212814 5212835 5212831 5212836 +
tttctttttctctttttttttt

SEQ ID NO: 81822 - DNA, 22 bp, Artificial Sequence
  Synthetic oligonucleotide; TTT chr11 5212815 5212836 5212832 5212837 +
ttctttttctcttttttttttt

SEQ ID NO: 81823 - DNA, 22 bp, Artificial Sequence
  Synthetic oligonucleotide; TTT chr11 5212816 5212837 5212833 5212838 +
tctttttctctttttttttttt

SEQ ID NO: 81824 - DNA, 22 bp, Artificial Sequence
  Synthetic oligonucleotide; TTT chr11 5212817 5212838 5212834 5212839 +
ctttttctcttttttttttttt

SEQ ID NO: 81825 - DNA, 22 bp, Artificial Sequence
  Synthetic oligonucleotide; TTC chr11 5212818 5212839 5212835 5212840 +
tttttctctttttttttttttg

SEQ ID NO: 81826 - DNA, 22 bp, Artificial Sequence
  Synthetic oligonucleotide; CTT chr11 5212820 5212841 5212837 5212842 +
tttctctttttttttttttgta

SEQ ID NO: 81827 - DNA, 22 bp, Artificial Sequence
  Synthetic oligonucleotide; TTT chr11 5212821 5212842 5212838 5212843 +
ttctctttttttttttttgtac

SEQ ID NO: 81828 - DNA, 22 bp, Artificial Sequence
  Synthetic oligonucleotide; TTT chr11 5212822 5212843 5212839 5212844 +
tctctttttttttttttgtact

SEQ ID NO: 81829 - DNA, 22 bp, Artificial Sequence
  Synthetic oligonucleotide; TTT chr11 5212823 5212844 5212840 5212845 +
ctctttttttttttttgtactc

SEQ ID NO: 81830 - DNA, 22 bp, Artificial Sequence
  Synthetic oligonucleotide; TTC chr11 5212824 5212845 5212841 5212846 +
tctttttttttttttgtactct

SEQ ID NO: 81831 - DNA, 22 bp, Artificial Sequence
  Synthetic oligonucleotide; CTC chr11 5212826 5212847 5212843 5212848 +
tttttttttttttgtactctaa

SEQ ID NO: 81832 - DNA, 22 bp, Artificial Sequence
  Synthetic oligonucleotide; CTT chr11 5212828 5212849 5212845 5212850 +
tttttttttttgtactctaagt

SEQ ID NO: 81833 - DNA, 22 bp, Artificial Sequence
  Synthetic oligonucleotide; TTT chr11 5212829 5212850 5212846 5212851 +
ttttttttttgtactctaagtt

SEQ ID NO: 81834 - DNA, 22 bp, Artificial Sequence
  Synthetic oligonucleotide; TTT chr11 5212830 5212851 5212847 5212852 +
tttttttttgtactctaagttc

SEQ ID NO: 81835 - DNA, 22 bp, Artificial Sequence
  Synthetic oligonucleotide; TTT chr11 5212831 5212852 5212848 5212853 +
ttttttttgtactctaagttct

SEQ ID NO: 81836 - DNA, 22 bp, Artificial Sequence
  Synthetic oligonucleotide; TTT chr11 5212832 5212853 5212849 5212854 +
tttttttgtactctaagttcta

SEQ ID NO: 81837 - DNA, 22 bp, Artificial Sequence
  Synthetic oligonucleotide; TTT chr11 5212833 5212854 5212850 5212855 +
ttttttgtactctaagttctac

SEQ ID NO: 81838 - DNA, 22 bp, Artificial Sequence
  Synthetic oligonucleotide; TTT chr11 5212834 5212855 5212851 5212856 +
tttttgtactctaagttctacg

SEQ ID NO: 81839 - DNA, 22 bp, Artificial Sequence
  Synthetic oligonucleotide; TTT chr11 5212835 5212856 5212852 5212857 +
ttttgtactctaagttctacgg

SEQ ID NO: 81840 - DNA, 22 bp, Artificial Sequence
  Synthetic oligonucleotide; TTT chr11 5212836 5212857 5212853 5212858 +
tttgtactctaagttctacggt

SEQ ID NO: 81841 - DNA, 22 bp, Artificial Sequence
  Synthetic oligonucleotide; TTT chr11 5212837 5212858 5212854 5212859 +
ttgtactctaagttctacggta

SEQ ID NO: 81842 - DNA, 22 bp, Artificial Sequence
  Synthetic oligonucleotide; TTT chr11 5212838 5212859 5212855 5212860 +
tgtactctaagttctacggtac

SEQ ID NO: 81843 - DNA, 22 bp, Artificial Sequence
  Synthetic oligonucleotide; TTT chr11 5212839 5212860 5212856 5212861 +
gtactctaagttctacggtacc

SEQ ID NO: 81844 - DNA, 22 bp, Artificial Sequence
  Synthetic oligonucleotide; TTG chr11 5212840 5212861 5212857 5212862 +
tactctaagttctacggtacct

SEQ ID NO: 81845 - DNA, 22 bp, Artificial Sequence
  Synthetic oligonucleotide; CTC chr11 5212845 5212866 5212862 5212867 +
taagttctacggtacctgtgca

SEQ ID NO: 81846 - DNA, 22 bp, Artificial Sequence
  Synthetic oligonucleotide; CTA chr11 5212847 5212868 5212864 5212869 +
agttctacggtacctgtgcagt

SEQ ID NO: 81847 - DNA, 22 bp, Artificial Sequence
  Synthetic oligonucleotide; TTC chr11 5212852 5212873 5212869 5212874 +
tacggtacctgtgcagtttgtt

SEQ ID NO: 81848 - DNA, 22 bp, Artificial Sequence
  Synthetic oligonucleotide; CTA chr11 5212854 5212875 5212871 5212876 +
cggtacctgtgcagtttgttac

SEQ ID NO: 81849 - DNA, 22 bp, Artificial Sequence
  Synthetic oligonucleotide; CTG chr11 5212863 5212884 5212880 5212885 +
tgcagtttgttacatatgtata

SEQ ID NO: 81850 - DNA, 22 bp, Artificial Sequence
  Synthetic oligonucleotide; TTT chr11 5212871 5212892 5212888 5212893 +
gttacatatgtatacgtgtgcc

SEQ ID NO: 81851 - DNA, 22 bp, Artificial Sequence
  Synthetic oligonucleotide; TTG chr11 5212872 5212893 5212889 5212894 +
ttacatatgtatacgtgtgcca

SEQ ID NO: 81852 - DNA, 22 bp, Artificial Sequence
  Synthetic oligonucleotide; TTA chr11 5212875 5212896 5212892 5212897 +
catatgtatacgtgtgccatat

SEQ ID NO: 81853 - DNA, 22 bp, Artificial Sequence
  Synthetic oligonucleotide; TTG chr11 5212899 5212920 5212916 5212921 +
gtgtgctgcacccgttaactcg

SEQ ID NO: 81854 - DNA, 22 bp, Artificial Sequence
  Synthetic oligonucleotide; CTG chr11 5212907 5212928 5212924 5212929 +
cacccgttaactcgtcatttac

SEQ ID NO: 81855 - DNA, 22 bp, Artificial Sequence
  Synthetic oligonucleotide; TTA chr11 5212916 5212937 5212933 5212938 +
actcgtcatttacattagatat

SEQ ID NO: 81856 - DNA, 22 bp, Artificial Sequence
  Synthetic oligonucleotide; CTC chr11 5212920 5212941 5212937 5212942 +
gtcatttacattagatatatct

SEQ ID NO: 81857 - DNA, 22 bp, Artificial Sequence
  Synthetic oligonucleotide; TTT chr11 5212927 5212948 5212944 5212949 +
acattagatatatctcctaatg

SEQ ID NO: 81858 - DNA, 22 bp, Artificial Sequence
  Synthetic oligonucleotide; TTA chr11 5212928 5212949 5212945 5212950 +
cattagatatatctcctaatgt

SEQ ID NO: 81859 - DNA, 22 bp, Artificial Sequence
  Synthetic oligonucleotide; TTA chr11 5212933 5212954 5212950 5212955 +
gatatatctcctaatgttatcc

SEQ ID NO: 81860 - DNA, 22 bp, Artificial Sequence
  Synthetic oligonucleotide; CTC chr11 5212943 5212964 5212960 5212965 +
ctaatgttatccctcctctctc

SEQ ID NO: 81861 - DNA, 22 bp, Artificial Sequence
  Synthetic oligonucleotide; CTA chr11 5212946 5212967 5212963 5212968 +
atgttatccctcctctctccta

SEQ ID NO: 81862 - DNA, 22 bp, Artificial Sequence
  Synthetic oligonucleotide; TTA chr11 5212952 5212973 5212969 5212974 +
tccctcctctctcctaccaccc

SEQ ID NO: 81863 - DNA, 22 bp, Artificial Sequence
  Synthetic oligonucleotide; CTC chr11 5212958 5212979 5212975 5212980 +
ctctctcctaccaccccacgac

SEQ ID NO: 81864 - DNA, 22 bp, Artificial Sequence
  Synthetic oligonucleotide; CTC chr11 5212961 5212982 5212978 5212983 +
tctcctaccaccccacgacagg

SEQ ID NO: 81865 - DNA, 22 bp, Artificial Sequence
  Synthetic oligonucleotide; CTC chr11 5212963 5212984 5212980 5212985 +
tcctaccaccccacgacaggcc

SEQ ID NO: 81866 - DNA, 22 bp, Artificial Sequence
  Synthetic oligonucleotide; CTC chr11 5212965 5212986 5212982 5212987 +
ctaccaccccacgacaggcccc

SEQ ID NO: 81867 - DNA, 22 bp, Artificial Sequence
  Synthetic oligonucleotide; CTA chr11 5212968 5212989 5212985 5212990 +
ccaccccacgacaggccccggt

SEQ ID NO: 81868 - DNA, 22 bp, Artificial Sequence
  Synthetic oligonucleotide; TTC chr11 5213001 5213022 5213018 5213023 +
cccaccctgtgtccaagtgttc

SEQ ID NO: 81869 - DNA, 22 bp, Artificial Sequence
  Synthetic oligonucleotide; CTG chr11 5213010 5213031 5213027 5213032 +
tgtccaagtgttctcatttttc

SEQ ID NO: 81870 - DNA, 22 bp, Artificial Sequence
  Synthetic oligonucleotide; TTC chr11 5213023 5213044 5213040 5213045 +
tcatttttcaattcccacctgt

SEQ ID NO: 81871 - DNA, 22 bp, Artificial Sequence
  Synthetic oligonucleotide; CTC chr11 5213025 5213046 5213042 5213047 +
atttttcaattcccacctgtga

SEQ ID NO: 81872 - DNA, 22 bp, Artificial Sequence
  Synthetic oligonucleotide; TTT chr11 5213029 5213050 5213046 5213051 +
ttcaattcccacctgtgagtat

SEQ ID NO: 81873 - DNA, 22 bp, Artificial Sequence
  Synthetic oligonucleotide; TTT chr11 5213030 5213051 5213047 5213052 +
tcaattcccacctgtgagtatt

SEQ ID NO: 81874 - DNA, 22 bp, Artificial Sequence
  Synthetic oligonucleotide; TTT chr11 5213031 5213052 5213048 5213053 +
caattcccacctgtgagtatta

SEQ ID NO: 81875 - DNA, 22 bp, Artificial Sequence
  Synthetic oligonucleotide; TTC chr11 5213032 5213053 5213049 5213054 +
aattcccacctgtgagtattag

SEQ ID NO: 81876 - DNA, 22 bp, Artificial Sequence
  Synthetic oligonucleotide; TTC chr11 5213037 5213058 5213054 5213059 +
ccacctgtgagtattaggattt

SEQ ID NO: 81877 - DNA, 22 bp, Artificial Sequence
  Synthetic oligonucleotide; CTG chr11 5213044 5213065 5213061 5213066 +
tgagtattaggatttcctaggc

SEQ ID NO: 81878 - DNA, 22 bp, Artificial Sequence
  Synthetic oligonucleotide; TTA chr11 5213053 5213074 5213070 5213075 +
ggatttcctaggctatttggac

SEQ ID NO: 81879 - DNA, 22 bp, Artificial Sequence
  Synthetic oligonucleotide; TTT chr11 5213059 5213080 5213076 5213081 +
cctaggctatttggactttttt

SEQ ID NO: 81880 - DNA, 22 bp, Artificial Sequence
  Synthetic oligonucleotide; TTC chr11 5213060 5213081 5213077 5213082 +
ctaggctatttggacttttttt

SEQ ID NO: 81881 - DNA, 22 bp, Artificial Sequence
  Synthetic oligonucleotide; CTA chr11 5213063 5213084 5213080 5213085 +
ggctatttggactttttttgtt

SEQ ID NO: 81882 - DNA, 22 bp, Artificial Sequence
  Synthetic oligonucleotide; CTA chr11 5213068 5213089 5213085 5213090 +
tttggactttttttgttgttgt

SEQ ID NO: 81883 - DNA, 22 bp, Artificial Sequence
  Synthetic oligonucleotide; TTT chr11 5213071 5213092 5213088 5213093 +
ggactttttttgttgttgttcc

SEQ ID NO: 81884 - DNA, 22 bp, Artificial Sequence
  Synthetic oligonucleotide; TTG chr11 5213072 5213093 5213089 5213094 +
gactttttttgttgttgttcca

SEQ ID NO: 81885 - DNA, 22 bp, Artificial Sequence
  Synthetic oligonucleotide; CTT chr11 5213077 5213098 5213094 5213099 +
tttttgttgttgttccatatga

SEQ ID NO: 81886 - DNA, 22 bp, Artificial Sequence
  Synthetic oligonucleotide; TTT chr11 5213078 5213099 5213095 5213100 +
ttttgttgttgttccatatgaa

SEQ ID NO: 81887 - DNA, 22 bp, Artificial Sequence
  Synthetic oligonucleotide; TTT chr11 5213079 5213100 5213096 5213101 +
tttgttgttgttccatatgaac

SEQ ID NO: 81888 - DNA, 22 bp, Artificial Sequence
  Synthetic oligonucleotide; TTT chr11 5213080 5213101 5213097 5213102 +
ttgttgttgttccatatgaact

SEQ ID NO: 81889 - DNA, 22 bp, Artificial Sequence
  Synthetic oligonucleotide; TTT chr11 5213081 5213102 5213098 5213103 +
tgttgttgttccatatgaactt

SEQ ID NO: 81890 - DNA, 22 bp, Artificial Sequence
  Synthetic oligonucleotide; TTT chr11 5213082 5213103 5213099 5213104 +
gttgttgttccatatgaacttt

SEQ ID NO: 81891 - DNA, 22 bp, Artificial Sequence
  Synthetic oligonucleotide; TTG chr11 5213083 5213104 5213100 5213105 +
ttgttgttccatatgaacttta

SEQ ID NO: 81892 - DNA, 22 bp, Artificial Sequence
  Synthetic oligonucleotide; TTG chr11 5213086 5213107 5213103 5213108 +
ttgttccatatgaactttaaag

SEQ ID NO: 81893 - DNA, 22 bp, Artificial Sequence
  Synthetic oligonucleotide; TTG chr11 5213089 5213110 5213106 5213111 +
ttccatatgaactttaaagtgt

SEQ ID NO: 81894 - DNA, 22 bp, Artificial Sequence
  Synthetic oligonucleotide; TTC chr11 5213092 5213113 5213109 5213114 +
catatgaactttaaagtgtatt

SEQ ID NO: 81895 - DNA, 22 bp, Artificial Sequence
  Synthetic oligonucleotide; CTT chr11 5213103 5213124 5213120 5213125 +
taaagtgtatttttctagttct

SEQ ID NO: 81896 - DNA, 22 bp, Artificial Sequence
  Synthetic oligonucleotide; TTT chr11 5213104 5213125 5213121 5213126 +
aaagtgtatttttctagttctg

SEQ ID NO: 81897 - DNA, 22 bp, Artificial Sequence
  Synthetic oligonucleotide; TTA chr11 5213105 5213126 5213122 5213127 +
aagtgtatttttctagttctgt

SEQ ID NO: 81898 - DNA, 22 bp, Artificial Sequence
  Synthetic oligonucleotide; TTT chr11 5213115 5213136 5213132 5213137 +
ttctagttctgtgaagaatgtc

SEQ ID NO: 81899 - DNA, 22 bp, Artificial Sequence
  Synthetic oligonucleotide; TTT chr11 5213116 5213137 5213133 5213138 +
tctagttctgtgaagaatgtca

SEQ ID NO: 81900 - DNA, 22 bp, Artificial Sequence
  Synthetic oligonucleotide; TTT chr11 5213117 5213138 5213134 5213139 +
ctagttctgtgaagaatgtcat

SEQ ID NO: 81901 - DNA, 22 bp, Artificial Sequence
  Synthetic oligonucleotide; TTC chr11 5213118 5213139 5213135 5213140 +
tagttctgtgaagaatgtcatt

SEQ ID NO: 81902 - DNA, 22 bp, Artificial Sequence
  Synthetic oligonucleotide; CTA chr11 5213120 5213141 5213137 5213142 +
gttctgtgaagaatgtcattgg

SEQ ID NO: 81903 - DNA, 22 bp, Artificial Sequence
  Synthetic oligonucleotide; TTC chr11 5213124 5213145 5213141 5213146 +
tgtgaagaatgtcattggtagt

SEQ ID NO: 81904 - DNA, 22 bp, Artificial Sequence
  Synthetic oligonucleotide; CTG chr11 5213126 5213147 5213143 5213148 +
tgaagaatgtcattggtagttt

SEQ ID NO: 81905 - DNA, 22 bp, Artificial Sequence
  Synthetic oligonucleotide; TTG chr11 5213141 5213162 5213158 5213163 +
gtagtttgataggaatagcttt

SEQ ID NO: 81906 - DNA, 22 bp, Artificial Sequence
  Synthetic oligonucleotide; TTT chr11 5213148 5213169 5213165 5213170 +
gataggaatagctttgaaactg

SEQ ID NO: 81907 - DNA, 22 bp, Artificial Sequence
  Synthetic oligonucleotide; TTG chr11 5213149 5213170 5213166 5213171 +
ataggaatagctttgaaactgt

SEQ ID NO: 81908 - DNA, 22 bp, Artificial Sequence
  Synthetic oligonucleotide; CTT chr11 5213162 5213183 5213179 5213184 +
tgaaactgtaaattgctctagg

SEQ ID NO: 81909 - DNA, 22 bp, Artificial Sequence
  Synthetic oligonucleotide; TTT chr11 5213163 5213184 5213180 5213185 +
gaaactgtaaattgctctaggc

SEQ ID NO: 81910 - DNA, 22 bp, Artificial Sequence
  Synthetic oligonucleotide; TTG chr11 5213164 5213185 5213181 5213186 +
aaactgtaaattgctctaggca

SEQ ID NO: 81911 - DNA, 22 bp, Artificial Sequence
  Synthetic oligonucleotide; CTG chr11 5213170 5213191 5213187 5213192 +
taaattgctctaggcagtatgg

SEQ ID NO: 81912 - DNA, 22 bp, Artificial Sequence
  Synthetic oligonucleotide; TTG chr11 5213177 5213198 5213194 5213199 +
ctctaggcagtatggacatttt

SEQ ID NO: 81913 - DNA, 22 bp, Artificial Sequence
  Synthetic oligonucleotide; CTC chr11 5213180 5213201 5213197 5213202 +
taggcagtatggacattttaac

SEQ ID NO: 81914 - DNA, 22 bp, Artificial Sequence
  Synthetic oligonucleotide; CTA chr11 5213182 5213203 5213199 5213204 +
ggcagtatggacattttaacaa

SEQ ID NO: 81915 - DNA, 22 bp, Artificial Sequence
  Synthetic oligonucleotide; TTT chr11 5213198 5213219 5213215 5213220 +
taacaatattgattctttttat

SEQ ID NO: 81916 - DNA, 22 bp, Artificial Sequence
  Synthetic oligonucleotide; TTT chr11 5213199 5213220 5213216 5213221 +
aacaatattgattctttttatc

SEQ ID NO: 81917 - DNA, 22 bp, Artificial Sequence
  Synthetic oligonucleotide; TTA chr11 5213200 5213221 5213217 5213222 +
acaatattgattctttttatcc

SEQ ID NO: 81918 - DNA, 22 bp, Artificial Sequence
  Synthetic oligonucleotide; TTG chr11 5213209 5213230 5213226 5213231 +
attctttttatccatgagcatg

SEQ ID NO: 81919 - DNA, 22 bp, Artificial Sequence
  Synthetic oligonucleotide; TTC chr11 5213213 5213234 5213230 5213235 +
tttttatccatgagcatggaaa

SEQ ID NO: 81920 - DNA, 22 bp, Artificial Sequence
  Synthetic oligonucleotide; CTT chr11 5213215 5213236 5213232 5213237 +
tttatccatgagcatggaaagt

SEQ ID NO: 81921 - DNA, 22 bp, Artificial Sequence
  Synthetic oligonucleotide; TTT chr11 5213216 5213237 5213233 5213238 +
ttatccatgagcatggaaagtt

SEQ ID NO: 81922 - DNA, 22 bp, Artificial Sequence
  Synthetic oligonucleotide; TTT chr11 5213217 5213238 5213234 5213239 +
tatccatgagcatggaaagttt

SEQ ID NO: 81923 - DNA, 22 bp, Artificial Sequence
  Synthetic oligonucleotide; TTT chr11 5213218 5213239 5213235 5213240 +
atccatgagcatggaaagtttt

SEQ ID NO: 81924 - DNA, 22 bp, Artificial Sequence
  Synthetic oligonucleotide; TTA chr11 5213219 5213240 5213236 5213241 +
tccatgagcatggaaagttttt

SEQ ID NO: 81925 - DNA, 22 bp, Artificial Sequence
  Synthetic oligonucleotide; TTT chr11 5213239 5213260 5213256 5213261 +
ttccatttgtttctatcagctc

SEQ ID NO: 81926 - DNA, 22 bp, Artificial Sequence
  Synthetic oligonucleotide; TTT chr11 5213240 5213261 5213257 5213262 +
tccatttgtttctatcagctct

SEQ ID NO: 81927 - DNA, 22 bp, Artificial Sequence
  Synthetic oligonucleotide; TTT chr11 5213241 5213262 5213258 5213263 +
ccatttgtttctatcagctctg

SEQ ID NO: 81928 - DNA, 22 bp, Artificial Sequence
  Synthetic oligonucleotide; TTC chr11 5213242 5213263 5213259 5213264 +
catttgtttctatcagctctga

SEQ ID NO: 81929 - DNA, 22 bp, Artificial Sequence
  Synthetic oligonucleotide; TTT chr11 5213247 5213268 5213264 5213269 +
gtttctatcagctctgatttct

SEQ ID NO: 81930 - DNA, 22 bp, Artificial Sequence
  Synthetic oligonucleotide; TTG chr11 5213248 5213269 5213265 5213270 +
tttctatcagctctgatttctt

SEQ ID NO: 81931 - DNA, 22 bp, Artificial Sequence
  Synthetic oligonucleotide; TTT chr11 5213251 5213272 5213268 5213273 +
ctatcagctctgatttctttga

SEQ ID NO: 81932 - DNA, 22 bp, Artificial Sequence
  Synthetic oligonucleotide; TTC chr11 5213252 5213273 5213269 5213274 +
tatcagctctgatttctttgag

SEQ ID NO: 81933 - DNA, 22 bp, Artificial Sequence
  Synthetic oligonucleotide; CTA chr11 5213254 5213275 5213271 5213276 +
tcagctctgatttctttgagca

SEQ ID NO: 81934 - DNA, 22 bp, Artificial Sequence
  Synthetic oligonucleotide; CTC chr11 5213261 5213282 5213278 5213283 +
tgatttctttgagcagtgtttt

SEQ ID NO: 81935 - DNA, 22 bp, Artificial Sequence
  Synthetic oligonucleotide; CTG chr11 5213263 5213284 5213280 5213285 +
atttctttgagcagtgttttgt

SEQ ID NO: 81936 - DNA, 22 bp, Artificial Sequence
  Synthetic oligonucleotide; TTT chr11 5213267 5213288 5213284 5213289 +
ctttgagcagtgttttgtaaat

SEQ ID NO: 81937 - DNA, 22 bp, Artificial Sequence
  Synthetic oligonucleotide; TTC chr11 5213268 5213289 5213285 5213290 +
tttgagcagtgttttgtaaatc

SEQ ID NO: 81938 - DNA, 22 bp, Artificial Sequence
  Synthetic oligonucleotide; CTT chr11 5213270 5213291 5213287 5213292 +
tgagcagtgttttgtaaatctc

SEQ ID NO: 81939 - DNA, 22 bp, Artificial Sequence
  Synthetic oligonucleotide; TTT chr11 5213271 5213292 5213288 5213293 +
gagcagtgttttgtaaatctca

SEQ ID NO: 81940 - DNA, 22 bp, Artificial Sequence
  Synthetic oligonucleotide; TTG chr11 5213272 5213293 5213289 5213294 +
agcagtgttttgtaaatctcat

SEQ ID NO: 81941 - DNA, 22 bp, Artificial Sequence
  Synthetic oligonucleotide; TTT chr11 5213282 5213303 5213299 5213304 +
tgtaaatctcattgtagagatc

SEQ ID NO: 81942 - DNA, 22 bp, Artificial Sequence
  Synthetic oligonucleotide; TTT chr11 5213283 5213304 5213300 5213305 +
gtaaatctcattgtagagatct

SEQ ID NO: 81943 - DNA, 22 bp, Artificial Sequence
  Synthetic oligonucleotide; TTG chr11 5213284 5213305 5213301 5213306 +
taaatctcattgtagagatctt

SEQ ID NO: 81944 - DNA, 22 bp, Artificial Sequence
  Synthetic oligonucleotide; CTC chr11 5213292 5213313 5213309 5213314 +
attgtagagatctttcaactgc

SEQ ID NO: 81945 - DNA, 22 bp, Artificial Sequence
  Synthetic oligonucleotide; TTG chr11 5213296 5213317 5213313 5213318 +
tagagatctttcaactgcttgg

SEQ ID NO: 81946 - DNA, 22 bp, Artificial Sequence
  Synthetic oligonucleotide; CTT chr11 5213306 5213327 5213323 5213328 +
tcaactgcttggttagatatat

SEQ ID NO: 81947 - DNA, 22 bp, Artificial Sequence
  Synthetic oligonucleotide; TTT chr11 5213307 5213328 5213324 5213329 +
caactgcttggttagatatatc

SEQ ID NO: 81948 - DNA, 22 bp, Artificial Sequence
  Synthetic oligonucleotide; TTC chr11 5213308 5213329 5213325 5213330 +
aactgcttggttagatatatcc

SEQ ID NO: 81949 - DNA, 22 bp, Artificial Sequence
  Synthetic oligonucleotide; CTG chr11 5213313 5213334 5213330 5213335 +
cttggttagatatatccttagg

SEQ ID NO: 81950 - DNA, 22 bp, Artificial Sequence
  Synthetic oligonucleotide; CTT chr11 5213316 5213337 5213333 5213338 +
ggttagatatatccttaggtat

SEQ ID NO: 81951 - DNA, 22 bp, Artificial Sequence
  Synthetic oligonucleotide; TTG chr11 5213317 5213338 5213334 5213339 +
gttagatatatccttaggtatt

SEQ ID NO: 81952 - DNA, 22 bp, Artificial Sequence
  Synthetic oligonucleotide; TTA chr11 5213321 5213342 5213338 5213343 +
gatatatccttaggtattttat

SEQ ID NO: 81953 - DNA, 22 bp, Artificial Sequence
  Synthetic oligonucleotide; CTT chr11 5213332 5213353 5213349 5213354 +
aggtattttattctttttgtgg

SEQ ID NO: 81954 - DNA, 22 bp, Artificial Sequence
  Synthetic oligonucleotide; TTA chr11 5213333 5213354 5213350 5213355 +
ggtattttattctttttgtggc

SEQ ID NO: 81955 - DNA, 22 bp, Artificial Sequence
  Synthetic oligonucleotide; TTT chr11 5213340 5213361 5213357 5213362 +
tattctttttgtggcaacggta

SEQ ID NO: 81956 - DNA, 22 bp, Artificial Sequence
  Synthetic oligonucleotide; TTT chr11 5213341 5213362 5213358 5213363 +
attctttttgtggcaacggtaa

SEQ ID NO: 81957 - DNA, 22 bp, Artificial Sequence
  Synthetic oligonucleotide; TTA chr11 5213342 5213363 5213359 5213364 +
ttctttttgtggcaacggtaaa

SEQ ID NO: 81958 - DNA, 22 bp, Artificial Sequence
  Synthetic oligonucleotide; TTC chr11 5213345 5213366 5213362 5213367 +
tttttgtggcaacggtaaatgg

SEQ ID NO: 81959 - DNA, 22 bp, Artificial Sequence
  Synthetic oligonucleotide; CTT chr11 5213347 5213368 5213364 5213369 +
tttgtggcaacggtaaatggga

SEQ ID NO: 81960 - DNA, 22 bp, Artificial Sequence
  Synthetic oligonucleotide; TTT chr11 5213348 5213369 5213365 5213370 +
ttgtggcaacggtaaatgggat

SEQ ID NO: 81961 - DNA, 22 bp, Artificial Sequence
  Synthetic oligonucleotide; TTT chr11 5213349 5213370 5213366 5213371 +
tgtggcaacggtaaatgggatt

SEQ ID NO: 81962 - DNA, 22 bp, Artificial Sequence
  Synthetic oligonucleotide; TTT chr11 5213350 5213371 5213367 5213372 +
gtggcaacggtaaatgggattg

SEQ ID NO: 81963 - DNA, 22 bp, Artificial Sequence
  Synthetic oligonucleotide; TTG chr11 5213351 5213372 5213368 5213373 +
tggcaacggtaaatgggattga

SEQ ID NO: 81964 - DNA, 22 bp, Artificial Sequence
  Synthetic oligonucleotide; TTG chr11 5213372 5213393 5213389 5213394 +
acttcctgatttggctctaggc

SEQ ID NO: 81965 - DNA, 22 bp, Artificial Sequence
  Synthetic oligonucleotide; CTT chr11 5213376 5213397 5213393 5213398 +
cctgatttggctctaggcttgg

SEQ ID NO: 81966 - DNA, 22 bp, Artificial Sequence
  Synthetic oligonucleotide; TTC chr11 5213377 5213398 5213394 5213399 +
ctgatttggctctaggcttggc

SEQ ID NO: 81967 - DNA, 22 bp, Artificial Sequence
  Synthetic oligonucleotide; CTG chr11 5213380 5213401 5213397 5213402 +
atttggctctaggcttggctat

SEQ ID NO: 81968 - DNA, 22 bp, Artificial Sequence
  Synthetic oligonucleotide; TTT chr11 5213384 5213405 5213401 5213406 +
ggctctaggcttggctattgtt

SEQ ID NO: 81969 - DNA, 22 bp, Artificial Sequence
  Synthetic oligonucleotide; TTG chr11 5213385 5213406 5213402 5213407 +
gctctaggcttggctattgttg

SEQ ID NO: 81970 - DNA, 22 bp, Artificial Sequence
  Synthetic oligonucleotide; CTC chr11 5213389 5213410 5213406 5213411 +
taggcttggctattgttgatgt

SEQ ID NO: 81971 - DNA, 22 bp, Artificial Sequence
  Synthetic oligonucleotide; CTA chr11 5213391 5213412 5213408 5213413 +
ggcttggctattgttgatgtat

SEQ ID NO: 81972 - DNA, 22 bp, Artificial Sequence
  Synthetic oligonucleotide; CTT chr11 5213396 5213417 5213413 5213418 +
ggctattgttgatgtatgggaa

SEQ ID NO: 81973 - DNA, 22 bp, Artificial Sequence
  Synthetic oligonucleotide; TTG chr11 5213397 5213418 5213414 5213419 +
gctattgttgatgtatgggaat

SEQ ID NO: 81974 - DNA, 22 bp, Artificial Sequence
  Synthetic oligonucleotide; CTA chr11 5213401 5213422 5213418 5213423 +
ttgttgatgtatgggaatgcta

SEQ ID NO: 81975 - DNA, 22 bp, Artificial Sequence
  Synthetic oligonucleotide; TTG chr11 5213404 5213425 5213421 5213426 +
ttgatgtatgggaatgctagtg

SEQ ID NO: 81976 - DNA, 22 bp, Artificial Sequence
  Synthetic oligonucleotide; TTG chr11 5213407 5213428 5213424 5213429 +
atgtatgggaatgctagtgatt

SEQ ID NO: 81977 - DNA, 22 bp, Artificial Sequence
  Synthetic oligonucleotide; CTA chr11 5213423 5213444 5213440 5213445 +
gtgatttttgtacattgatttt

SEQ ID NO: 81978 - DNA, 22 bp, Artificial Sequence
  Synthetic oligonucleotide; TTT chr11 5213430 5213451 5213447 5213452 +
ttgtacattgattttatatcct

SEQ ID NO: 81979 - DNA, 22 bp, Artificial Sequence
  Synthetic oligonucleotide; TTT chr11 5213431 5213452 5213448 5213453 +
tgtacattgattttatatcctg

SEQ ID NO: 81980 - DNA, 22 bp, Artificial Sequence
  Synthetic oligonucleotide; TTT chr11 5213432 5213453 5213449 5213454 +
gtacattgattttatatcctga

SEQ ID NO: 81981 - DNA, 22 bp, Artificial Sequence
  Synthetic oligonucleotide; TTG chr11 5213433 5213454 5213450 5213455 +
tacattgattttatatcctgaa

SEQ ID NO: 81982 - DNA, 22 bp, Artificial Sequence
  Synthetic oligonucleotide; TTG chr11 5213440 5213461 5213457 5213462 +
attttatatcctgaaactttgc

SEQ ID NO: 81983 - DNA, 22 bp, Artificial Sequence
  Synthetic oligonucleotide; TTT chr11 5213444 5213465 5213461 5213466 +
tatatcctgaaactttgctgaa

SEQ ID NO: 81984 - DNA, 22 bp, Artificial Sequence
  Synthetic oligonucleotide; TTT chr11 5213445 5213466 5213462 5213467 +
atatcctgaaactttgctgaag

SEQ ID NO: 81985 - DNA, 22 bp, Artificial Sequence
  Synthetic oligonucleotide; TTA chr11 5213446 5213467 5213463 5213468 +
tatcctgaaactttgctgaagt

SEQ ID NO: 81986 - DNA, 22 bp, Artificial Sequence
  Synthetic oligonucleotide; CTG chr11 5213453 5213474 5213470 5213475 +
aaactttgctgaagttatcagc

SEQ ID NO: 81987 - DNA, 22 bp, Artificial Sequence
  Synthetic oligonucleotide; CTT chr11 5213459 5213480 5213476 5213481 +
tgctgaagttatcagctgaagg

SEQ ID NO: 81988 - DNA, 22 bp, Artificial Sequence
  Synthetic oligonucleotide; TTT chr11 5213460 5213481 5213477 5213482 +
gctgaagttatcagctgaagga

SEQ ID NO: 81989 - DNA, 22 bp, Artificial Sequence
  Synthetic oligonucleotide; TTG chr11 5213461 5213482 5213478 5213483 +
ctgaagttatcagctgaaggag

SEQ ID NO: 81990 - DNA, 22 bp, Artificial Sequence
  Synthetic oligonucleotide; CTG chr11 5213464 5213485 5213481 5213486 +
aagttatcagctgaaggagctt

SEQ ID NO: 81991 - DNA, 22 bp, Artificial Sequence
  Synthetic oligonucleotide; TTA chr11 5213470 5213491 5213487 5213492 +
tcagctgaaggagcttttgggc

SEQ ID NO: 81992 - DNA, 22 bp, Artificial Sequence
  Synthetic oligonucleotide; CTG chr11 5213477 5213498 5213494 5213499 +
aaggagcttttgggccttgact

SEQ ID NO: 81993 - DNA, 22 bp, Artificial Sequence
  Synthetic oligonucleotide; CTT chr11 5213486 5213507 5213503 5213508 +
ttgggccttgactatggtgttt

SEQ ID NO: 81994 - DNA, 22 bp, Artificial Sequence
  Synthetic oligonucleotide; TTT chr11 5213487 5213508 5213504 5213509 +
tgggccttgactatggtgtttt

SEQ ID NO: 81995 - DNA, 22 bp, Artificial Sequence
  Synthetic oligonucleotide; TTT chr11 5213488 5213509 5213505 5213510 +
gggccttgactatggtgttttc

SEQ ID NO: 81996 - DNA, 22 bp, Artificial Sequence
  Synthetic oligonucleotide; TTG chr11 5213489 5213510 5213506 5213511 +
ggccttgactatggtgttttct

SEQ ID NO: 81997 - DNA, 22 bp, Artificial Sequence
  Synthetic oligonucleotide; CTT chr11 5213495 5213516 5213512 5213517 +
gactatggtgttttctagatac

SEQ ID NO: 81998 - DNA, 22 bp, Artificial Sequence
  Synthetic oligonucleotide; TTG chr11 5213496 5213517 5213513 5213518 +
actatggtgttttctagataca

SEQ ID NO: 81999 - DNA, 22 bp, Artificial Sequence
  Synthetic oligonucleotide; CTA chr11 5213500 5213521 5213517 5213522 +
tggtgttttctagatacagaaa

SEQ ID NO: 82000 - DNA, 22 bp, Artificial Sequence
  Synthetic oligonucleotide; TTT chr11 5213508 5213529 5213525 5213530 +
tctagatacagaaaacagggat

SEQ ID NO: 82001 - DNA, 22 bp, Artificial Sequence
  Synthetic oligonucleotide; TTT chr11 5213509 5213530 5213526 5213531 +
ctagatacagaaaacagggata

SEQ ID NO: 82002 - DNA, 22 bp, Artificial Sequence
  Synthetic oligonucleotide; TTC chr11 5213510 5213531 5213527 5213532 +
tagatacagaaaacagggatac

SEQ ID NO: 82003 - DNA, 22 bp, Artificial Sequence
  Synthetic oligonucleotide; CTA chr11 5213512 5213533 5213529 5213534 +
gatacagaaaacagggatactt

SEQ ID NO: 82004 - DNA, 22 bp, Artificial Sequence
  Synthetic oligonucleotide; CTT chr11 5213534 5213555 5213551 5213556 +
tgactttctctcttcctatttg

SEQ ID NO: 82005 - DNA, 22 bp, Artificial Sequence
  Synthetic oligonucleotide; TTT chr11 5213535 5213556 5213552 5213557 +
gactttctctcttcctatttgg

SEQ ID NO: 82006 - DNA, 22 bp, Artificial Sequence
  Synthetic oligonucleotide; TTG chr11 5213536 5213557 5213553 5213558 +
actttctctcttcctatttgga

SEQ ID NO: 82007 - DNA, 22 bp, Artificial Sequence
  Synthetic oligonucleotide; CTT chr11 5213540 5213561 5213557 5213562 +
tctctcttcctatttggatgcc

SEQ ID NO: 82008 - DNA, 22 bp, Artificial Sequence
  Synthetic oligonucleotide; TTT chr11 5213541 5213562 5213558 5213563 +
ctctcttcctatttggatgccc

SEQ ID NO: 82009 - DNA, 22 bp, Artificial Sequence
  Synthetic oligonucleotide; TTC chr11 5213542 5213563 5213559 5213564 +
tctcttcctatttggatgccct

SEQ ID NO: 82010 - DNA, 22 bp, Artificial Sequence
  Synthetic oligonucleotide; CTC chr11 5213544 5213565 5213561 5213566 +
tcttcctatttggatgcccttt

SEQ ID NO: 82011 - DNA, 22 bp, Artificial Sequence
  Synthetic oligonucleotide; CTC chr11 5213546 5213567 5213563 5213568 +
ttcctatttggatgccctttat

SEQ ID NO: 82012 - DNA, 22 bp, Artificial Sequence
  Synthetic oligonucleotide; CTT chr11 5213548 5213569 5213565 5213570 +
cctatttggatgccctttattc

SEQ ID NO: 82013 - DNA, 22 bp, Artificial Sequence
  Synthetic oligonucleotide; TTC chr11 5213549 5213570 5213566 5213571 +
ctatttggatgccctttattcc

SEQ ID NO: 82014 - DNA, 22 bp, Artificial Sequence
  Synthetic oligonucleotide; CTA chr11 5213552 5213573 5213569 5213574 +
tttggatgccctttattccctt

SEQ ID NO: 82015 - DNA, 22 bp, Artificial Sequence
  Synthetic oligonucleotide; TTT chr11 5213555 5213576 5213572 5213577 +
ggatgccctttattcccttctc

SEQ ID NO: 82016 - DNA, 22 bp, Artificial Sequence
  Synthetic oligonucleotide; TTG chr11 5213556 5213577 5213573 5213578 +
gatgccctttattcccttctct

SEQ ID NO: 82017 - DNA, 22 bp, Artificial Sequence
  Synthetic oligonucleotide; CTT chr11 5213565 5213586 5213582 5213587 +
tattcccttctcttgcctgatt

SEQ ID NO: 82018 - DNA, 22 bp, Artificial Sequence
  Synthetic oligonucleotide; TTT chr11 5213566 5213587 5213583 5213588 +
attcccttctcttgcctgattg

SEQ ID NO: 82019 - DNA, 22 bp, Artificial Sequence
  Synthetic oligonucleotide; TTA chr11 5213567 5213588 5213584 5213589 +
ttcccttctcttgcctgattgc

SEQ ID NO: 82020 - DNA, 22 bp, Artificial Sequence
  Synthetic oligonucleotide; TTC chr11 5213570 5213591 5213587 5213592 +
ccttctcttgcctgattgctct

SEQ ID NO: 82021 - DNA, 22 bp, Artificial Sequence
  Synthetic oligonucleotide; CTT chr11 5213574 5213595 5213591 5213596 +
ctcttgcctgattgctctggcc

SEQ ID NO: 82022 - DNA, 22 bp, Artificial Sequence
  Synthetic oligonucleotide; TTC chr11 5213575 5213596 5213592 5213597 +
tcttgcctgattgctctggcca

SEQ ID NO: 82023 - DNA, 22 bp, Artificial Sequence
  Synthetic oligonucleotide; CTC chr11 5213577 5213598 5213594 5213599 +
ttgcctgattgctctggccagg

SEQ ID NO: 82024 - DNA, 22 bp, Artificial Sequence
  Synthetic oligonucleotide; CTT chr11 5213579 5213600 5213596 5213601 +
gcctgattgctctggccaggac

SEQ ID NO: 82025 - DNA, 22 bp, Artificial Sequence
  Synthetic oligonucleotide; TTG chr11 5213580 5213601 5213597 5213602 +
cctgattgctctggccaggact

SEQ ID NO: 82026 - DNA, 22 bp, Artificial Sequence
  Synthetic oligonucleotide; CTG chr11 5213584 5213605 5213601 5213606 +
attgctctggccaggactgcca

SEQ ID NO: 82027 - DNA, 22 bp, Artificial Sequence
  Synthetic oligonucleotide; TTG chr11 5213588 5213609 5213605 5213610 +
ctctggccaggactgccagtac

SEQ ID NO: 82028 - DNA, 22 bp, Artificial Sequence
  Synthetic oligonucleotide; CTC chr11 5213591 5213612 5213608 5213613 +
tggccaggactgccagtactat

SEQ ID NO: 82029 - DNA, 22 bp, Artificial Sequence
  Synthetic oligonucleotide; CTG chr11 5213593 5213614 5213610 5213615 +
gccaggactgccagtactatac

SEQ ID NO: 82030 - DNA, 22 bp, Artificial Sequence
  Synthetic oligonucleotide; CTG chr11 5213603 5213624 5213620 5213625 +
ccagtactatactgaatagcag

SEQ ID NO: 82031 - DNA, 22 bp, Artificial Sequence
  Synthetic oligonucleotide; CTA chr11 5213612 5213633 5213629 5213634 +
tactgaatagcagtggtgagag

SEQ ID NO: 82032 - DNA, 22 bp, Artificial Sequence
  Synthetic oligonucleotide; CTG chr11 5213617 5213638 5213634 5213639 +
aatagcagtggtgagagagggc

SEQ ID NO: 82033 - DNA, 22 bp, Artificial Sequence
  Synthetic oligonucleotide; CTT chr11 5213645 5213666 5213662 5213667 +
gtcttgtgccagttttcaagaa

SEQ ID NO: 82034 - DNA, 22 bp, Artificial Sequence
  Synthetic oligonucleotide; TTG chr11 5213646 5213667 5213663 5213668 +
tcttgtgccagttttcaagaag

SEQ ID NO: 82035 - DNA, 22 bp, Artificial Sequence
  Synthetic oligonucleotide; CTT chr11 5213650 5213671 5213667 5213672 +
gtgccagttttcaagaagaatg

SEQ ID NO: 82036 - DNA, 22 bp, Artificial Sequence
  Synthetic oligonucleotide; TTG chr11 5213651 5213672 5213668 5213673 +
tgccagttttcaagaagaatgc

SEQ ID NO: 82037 - DNA, 22 bp, Artificial Sequence
  Synthetic oligonucleotide; TTT chr11 5213660 5213681 5213677 5213682 +
tcaagaagaatgcttccaggtt

SEQ ID NO: 82038 - DNA, 22 bp, Artificial Sequence
  Synthetic oligonucleotide; TTT chr11 5213661 5213682 5213678 5213683 +
caagaagaatgcttccaggttt

SEQ ID NO: 82039 - DNA, 22 bp, Artificial Sequence
  Synthetic oligonucleotide; TTC chr11 5213662 5213683 5213679 5213684 +
aagaagaatgcttccaggtttt

SEQ ID NO: 82040 - DNA, 22 bp, Artificial Sequence
  Synthetic oligonucleotide; CTT chr11 5213675 5213696 5213692 5213697 +
ccaggttttgcccattctgtat

SEQ ID NO: 82041 - DNA, 22 bp, Artificial Sequence
  Synthetic oligonucleotide; TTC chr11 5213676 5213697 5213693 5213698 +
caggttttgcccattctgtatg

SEQ ID NO: 82042 - DNA, 22 bp, Artificial Sequence
  Synthetic oligonucleotide; TTT chr11 5213683 5213704 5213700 5213705 +
tgcccattctgtatgatgttgg

SEQ ID NO: 82043 - DNA, 22 bp, Artificial Sequence
  Synthetic oligonucleotide; TTT chr11 5213684 5213705 5213701 5213706 +
gcccattctgtatgatgttggc

SEQ ID NO: 82044 - DNA, 22 bp, Artificial Sequence
  Synthetic oligonucleotide; TTG chr11 5213685 5213706 5213702 5213707 +
cccattctgtatgatgttggct

SEQ ID NO: 82045 - DNA, 22 bp, Artificial Sequence
  Synthetic oligonucleotide; TTC chr11 5213692 5213713 5213709 5213714 +
tgtatgatgttggctgtgggtt

SEQ ID NO: 82046 - DNA, 22 bp, Artificial Sequence
  Synthetic oligonucleotide; CTG chr11 5213694 5213715 5213711 5213716 +
tatgatgttggctgtgggtttg

SEQ ID NO: 82047 - DNA, 22 bp, Artificial Sequence
  Synthetic oligonucleotide; TTG chr11 5213704 5213725 5213721 5213726 +
gctgtgggtttgtcatagatgg

SEQ ID NO: 82048 - DNA, 22 bp, Artificial Sequence
  Synthetic oligonucleotide; CTG chr11 5213708 5213729 5213725 5213730 +
tgggtttgtcatagatggctca

SEQ ID NO: 82049 - DNA, 22 bp, Artificial Sequence
  Synthetic oligonucleotide; TTT chr11 5213715 5213736 5213732 5213737 +
gtcatagatggctcatattatt

SEQ ID NO: 82050 - DNA, 22 bp, Artificial Sequence
  Synthetic oligonucleotide; TTG chr11 5213716 5213737 5213733 5213738 +
tcatagatggctcatattattt

SEQ ID NO: 82051 - DNA, 22 bp, Artificial Sequence
  Synthetic oligonucleotide; CTC chr11 5213729 5213750 5213746 5213751 +
atattattttgaggtcatgtcc

SEQ ID NO: 82052 - DNA, 22 bp, Artificial Sequence
  Synthetic oligonucleotide; TTA chr11 5213735 5213756 5213752 5213757 +
ttttgaggtcatgtccttaaat

SEQ ID NO: 82053 - DNA, 22 bp, Artificial Sequence
  Synthetic oligonucleotide; TTT chr11 5213738 5213759 5213755 5213760 +
tgaggtcatgtccttaaatagc

SEQ ID NO: 82054 - DNA, 22 bp, Artificial Sequence
  Synthetic oligonucleotide; TTT chr11 5213739 5213760 5213756 5213761 +
gaggtcatgtccttaaatagct

SEQ ID NO: 82055 - DNA, 22 bp, Artificial Sequence
  Synthetic oligonucleotide; TTG chr11 5213740 5213761 5213757 5213762 +
aggtcatgtccttaaatagcta

SEQ ID NO: 82056 - DNA, 22 bp, Artificial Sequence
  Synthetic oligonucleotide; CTT chr11 5213753 5213774 5213770 5213775 +
aaatagctagtttgttgagagg

SEQ ID NO: 82057 - DNA, 22 bp, Artificial Sequence
  Synthetic oligonucleotide; TTA chr11 5213754 5213775 5213771 5213776 +
aatagctagtttgttgagaggt

SEQ ID NO: 82058 - DNA, 22 bp, Artificial Sequence
  Synthetic oligonucleotide; CTA chr11 5213762 5213783 5213779 5213784 +
gtttgttgagaggttttaacat

SEQ ID NO: 82059 - DNA, 22 bp, Artificial Sequence
  Synthetic oligonucleotide; TTT chr11 5213766 5213787 5213783 5213788 +
gttgagaggttttaacatgaag

SEQ ID NO: 82060 - DNA, 22 bp, Artificial Sequence
  Synthetic oligonucleotide; TTG chr11 5213767 5213788 5213784 5213789 +
ttgagaggttttaacatgaagt

SEQ ID NO: 82061 - DNA, 22 bp, Artificial Sequence
  Synthetic oligonucleotide; TTG chr11 5213770 5213791 5213787 5213792 +
agaggttttaacatgaagtgaa

SEQ ID NO: 82062 - DNA, 22 bp, Artificial Sequence
  Synthetic oligonucleotide; TTT chr11 5213778 5213799 5213795 5213800 +
taacatgaagtgaagttgaatt

SEQ ID NO: 82063 - DNA, 22 bp, Artificial Sequence
  Synthetic oligonucleotide; TTT chr11 5213779 5213800 5213796 5213801 +
aacatgaagtgaagttgaattt

SEQ ID NO: 82064 - DNA, 22 bp, Artificial Sequence
  Synthetic oligonucleotide; TTA chr11 5213780 5213801 5213797 5213802 +
acatgaagtgaagttgaatttt

SEQ ID NO: 82065 - DNA, 22 bp, Artificial Sequence
  Synthetic oligonucleotide; TTG chr11 5213796 5213817 5213813 5213818 +
aattttatcaaaatcttttttt

SEQ ID NO: 82066 - DNA, 22 bp, Artificial Sequence
  Synthetic oligonucleotide; TTT chr11 5213801 5213822 5213818 5213823 +
tatcaaaatctttttttgcaca

SEQ ID NO: 82067 - DNA, 22 bp, Artificial Sequence
  Synthetic oligonucleotide; TTT chr11 5213802 5213823 5213819 5213824 +
atcaaaatctttttttgcacat

SEQ ID NO: 82068 - DNA, 22 bp, Artificial Sequence
  Synthetic oligonucleotide; TTA chr11 5213803 5213824 5213820 5213825 +
tcaaaatctttttttgcacata

SEQ ID NO: 82069 - DNA, 22 bp, Artificial Sequence
  Synthetic oligonucleotide; CTT chr11 5213813 5213834 5213830 5213835 +
tttttgcacatattgaaatgat

SEQ ID NO: 82070 - DNA, 22 bp, Artificial Sequence
  Synthetic oligonucleotide; TTT chr11 5213814 5213835 5213831 5213836 +
ttttgcacatattgaaatgatc

SEQ ID NO: 82071 - DNA, 22 bp, Artificial Sequence
  Synthetic oligonucleotide; TTT chr11 5213815 5213836 5213832 5213837 +
tttgcacatattgaaatgatca

SEQ ID NO: 82072 - DNA, 22 bp, Artificial Sequence
  Synthetic oligonucleotide; TTT chr11 5213816 5213837 5213833 5213838 +
ttgcacatattgaaatgatcat

SEQ ID NO: 82073 - DNA, 22 bp, Artificial Sequence
  Synthetic oligonucleotide; TTT chr11 5213817 5213838 5213834 5213839 +
tgcacatattgaaatgatcatg

SEQ ID NO: 82074 - DNA, 22 bp, Artificial Sequence
  Synthetic oligonucleotide; TTT chr11 5213818 5213839 5213835 5213840 +
gcacatattgaaatgatcatgt

SEQ ID NO: 82075 - DNA, 22 bp, Artificial Sequence
  Synthetic oligonucleotide; TTG chr11 5213819 5213840 5213836 5213841 +
cacatattgaaatgatcatgtg

SEQ ID NO: 82076 - DNA, 22 bp, Artificial Sequence
  Synthetic oligonucleotide; TTG chr11 5213828 5213849 5213845 5213850 +
aaatgatcatgtggtttctgtt

SEQ ID NO: 82077 - DNA, 22 bp, Artificial Sequence
  Synthetic oligonucleotide; TTT chr11 5213845 5213866 5213862 5213867 +
ctgtttttagtgctgtatatat

SEQ ID NO: 82078 - DNA, 22 bp, Artificial Sequence
  Synthetic oligonucleotide; TTC chr11 5213846 5213867 5213863 5213868 +
tgtttttagtgctgtatatatg

SEQ ID NO: 82079 - DNA, 22 bp, Artificial Sequence
  Synthetic oligonucleotide; CTG chr11 5213848 5213869 5213865 5213870 +
tttttagtgctgtatatatgat

SEQ ID NO: 82080 - DNA, 22 bp, Artificial Sequence
  Synthetic oligonucleotide; TTT chr11 5213851 5213872 5213868 5213873 +
ttagtgctgtatatatgatgaa

SEQ ID NO: 82081 - DNA, 22 bp, Artificial Sequence
  Synthetic oligonucleotide; TTT chr11 5213852 5213873 5213869 5213874 +
tagtgctgtatatatgatgaat

SEQ ID NO: 82082 - DNA, 22 bp, Artificial Sequence
  Synthetic oligonucleotide; TTT chr11 5213853 5213874 5213870 5213875 +
agtgctgtatatatgatgaatc

SEQ ID NO: 82083 - DNA, 22 bp, Artificial Sequence
  Synthetic oligonucleotide; TTA chr11 5213854 5213875 5213871 5213876 +
gtgctgtatatatgatgaatca

SEQ ID NO: 82084 - DNA, 22 bp, Artificial Sequence
  Synthetic oligonucleotide; CTG chr11 5213860 5213881 5213877 5213882 +
tatatatgatgaatcacattta

SEQ ID NO: 82085 - DNA, 22 bp, Artificial Sequence
  Synthetic oligonucleotide; TTT chr11 5213881 5213902 5213898 5213903 +
atcaatttgtatatgctgaacc

SEQ ID NO: 82086 - DNA, 22 bp, Artificial Sequence
  Synthetic oligonucleotide; TTA chr11 5213882 5213903 5213899 5213904 +
tcaatttgtatatgctgaacca

SEQ ID NO: 82087 - DNA, 22 bp, Artificial Sequence
  Synthetic oligonucleotide; TTT chr11 5213889 5213910 5213906 5213911 +
gtatatgctgaaccaatcttgc

SEQ ID NO: 82088 - DNA, 22 bp, Artificial Sequence
  Synthetic oligonucleotide; TTG chr11 5213890 5213911 5213907 5213912 +
tatatgctgaaccaatcttgct

SEQ ID NO: 82089 - DNA, 22 bp, Artificial Sequence
  Synthetic oligonucleotide; CTG chr11 5213899 5213920 5213916 5213921 +
aaccaatcttgcttctcaggga

SEQ ID NO: 82090 - DNA, 22 bp, Artificial Sequence
  Synthetic oligonucleotide; CTT chr11 5213909 5213930 5213926 5213931 +
gcttctcagggataaagcctac

SEQ ID NO: 82091 - DNA, 22 bp, Artificial Sequence
  Synthetic oligonucleotide; TTG chr11 5213910 5213931 5213927 5213932 +
cttctcagggataaagcctact

SEQ ID NO: 82092 - DNA, 22 bp, Artificial Sequence
  Synthetic oligonucleotide; CTT chr11 5213913 5213934 5213930 5213935 +
ctcagggataaagcctacttga

SEQ ID NO: 82093 - DNA, 22 bp, Artificial Sequence
  Synthetic oligonucleotide; TTC chr11 5213914 5213935 5213931 5213936 +
tcagggataaagcctacttgat

SEQ ID NO: 82094 - DNA, 22 bp, Artificial Sequence
  Synthetic oligonucleotide; CTC chr11 5213916 5213937 5213933 5213938 +
agggataaagcctacttgattg

SEQ ID NO: 82095 - DNA, 22 bp, Artificial Sequence
  Synthetic oligonucleotide; CTA chr11 5213930 5213951 5213947 5213952 +
cttgattgaggtggattagctt

SEQ ID NO: 82096 - DNA, 22 bp, Artificial Sequence
  Synthetic oligonucleotide; CTT chr11 5213933 5213954 5213950 5213955 +
gattgaggtggattagctttgt

SEQ ID NO: 82097 - DNA, 22 bp, Artificial Sequence
  Synthetic oligonucleotide; TTG chr11 5213934 5213955 5213951 5213956 +
attgaggtggattagctttgtg

SEQ ID NO: 82098 - DNA, 22 bp, Artificial Sequence
  Synthetic oligonucleotide; TTG chr11 5213938 5213959 5213955 5213960 +
aggtggattagctttgtgatgt

SEQ ID NO: 82099 - DNA, 22 bp, Artificial Sequence
  Synthetic oligonucleotide; TTA chr11 5213948 5213969 5213965 5213970 +
gctttgtgatgtgttgctggat

SEQ ID NO: 82100 - DNA, 22 bp, Artificial Sequence
  Synthetic oligonucleotide; CTT chr11 5213952 5213973 5213969 5213974 +
tgtgatgtgttgctggatttgg

SEQ ID NO: 82101 - DNA, 22 bp, Artificial Sequence
  Synthetic oligonucleotide; TTT chr11 5213953 5213974 5213970 5213975 +
gtgatgtgttgctggatttggc

SEQ ID NO: 82102 - DNA, 22 bp, Artificial Sequence
  Synthetic oligonucleotide; TTG chr11 5213954 5213975 5213971 5213976 +
tgatgtgttgctggatttggct

SEQ ID NO: 82103 - DNA, 22 bp, Artificial Sequence
  Synthetic oligonucleotide; TTG chr11 5213964 5213985 5213981 5213986 +
ctggatttggcttgctagtatt

SEQ ID NO: 82104 - DNA, 22 bp, Artificial Sequence
  Synthetic oligonucleotide; CTG chr11 5213967 5213988 5213984 5213989 +
gatttggcttgctagtattttt

SEQ ID NO: 82105 - DNA, 22 bp, Artificial Sequence
  Synthetic oligonucleotide; TTT chr11 5213972 5213993 5213989 5213994 +
ggcttgctagtatttttgcatc

SEQ ID NO: 82106 - DNA, 22 bp, Artificial Sequence
  Synthetic oligonucleotide; TTG chr11 5213973 5213994 5213990 5213995 +
gcttgctagtatttttgcatca

SEQ ID NO: 82107 - DNA, 22 bp, Artificial Sequence
  Synthetic oligonucleotide; CTT chr11 5213977 5213998 5213994 5213999 +
gctagtatttttgcatcaatgt

SEQ ID NO: 82108 - DNA, 22 bp, Artificial Sequence
  Synthetic oligonucleotide; TTG chr11 5213978 5213999 5213995 5214000 +
ctagtatttttgcatcaatgtt

SEQ ID NO: 82109 - DNA, 22 bp, Artificial Sequence
  Synthetic oligonucleotide; CTA chr11 5213981 5214002 5213998 5214003 +
gtatttttgcatcaatgttcaa

SEQ ID NO: 82110 - DNA, 22 bp, Artificial Sequence
  Synthetic oligonucleotide; TTT chr11 5213987 5214008 5214004 5214009 +
ttgcatcaatgttcaaggatat

SEQ ID NO: 82111 - DNA, 22 bp, Artificial Sequence
  Synthetic oligonucleotide; TTT chr11 5213988 5214009 5214005 5214010 +
tgcatcaatgttcaaggatatt

SEQ ID NO: 82112 - DNA, 22 bp, Artificial Sequence
  Synthetic oligonucleotide; TTT chr11 5213989 5214010 5214006 5214011 +
gcatcaatgttcaaggatattg

SEQ ID NO: 82113 - DNA, 22 bp, Artificial Sequence
  Synthetic oligonucleotide; TTG chr11 5213990 5214011 5214007 5214012 +
catcaatgttcaaggatattgg

SEQ ID NO: 82114 - DNA, 22 bp, Artificial Sequence
  Synthetic oligonucleotide; TTC chr11 5214001 5214022 5214018 5214023 +
aaggatattggcctgaagtttt

SEQ ID NO: 82115 - DNA, 22 bp, Artificial Sequence
  Synthetic oligonucleotide; TTG chr11 5214011 5214032 5214028 5214033 +
gcctgaagttttctttttttgt

SEQ ID NO: 82116 - DNA, 22 bp, Artificial Sequence
  Synthetic oligonucleotide; CTG chr11 5214016 5214037 5214033 5214038 +
aagttttctttttttgttgttg

SEQ ID NO: 82117 - DNA, 22 bp, Artificial Sequence
  Synthetic oligonucleotide; TTT chr11 5214022 5214043 5214039 5214044 +
tctttttttgttgttgtgtgtc

SEQ ID NO: 82118 - DNA, 22 bp, Artificial Sequence
  Synthetic oligonucleotide; TTT chr11 5214023 5214044 5214040 5214045 +
ctttttttgttgttgtgtgtct

SEQ ID NO: 82119 - DNA, 22 bp, Artificial Sequence
  Synthetic oligonucleotide; TTC chr11 5214024 5214045 5214041 5214046 +
tttttttgttgttgtgtgtcta

SEQ ID NO: 82120 - DNA, 22 bp, Artificial Sequence
  Synthetic oligonucleotide; CTT chr11 5214026 5214047 5214043 5214048 +
tttttgttgttgtgtgtctatc

SEQ ID NO: 82121 - DNA, 22 bp, Artificial Sequence
  Synthetic oligonucleotide; TTT chr11 5214027 5214048 5214044 5214049 +
ttttgttgttgtgtgtctatca

SEQ ID NO: 82122 - DNA, 22 bp, Artificial Sequence
  Synthetic oligonucleotide; TTT chr11 5214028 5214049 5214045 5214050 +
tttgttgttgtgtgtctatcag

SEQ ID NO: 82123 - DNA, 22 bp, Artificial Sequence
  Synthetic oligonucleotide; TTT chr11 5214029 5214050 5214046 5214051 +
ttgttgttgtgtgtctatcagg

SEQ ID NO: 82124 - DNA, 22 bp, Artificial Sequence
  Synthetic oligonucleotide; TTT chr11 5214030 5214051 5214047 5214052 +
tgttgttgtgtgtctatcaggt

SEQ ID NO: 82125 - DNA, 22 bp, Artificial Sequence
  Synthetic oligonucleotide; TTT chr11 5214031 5214052 5214048 5214053 +
gttgttgtgtgtctatcaggtt

SEQ ID NO: 82126 - DNA, 22 bp, Artificial Sequence
  Synthetic oligonucleotide; TTG chr11 5214032 5214053 5214049 5214054 +
ttgttgtgtgtctatcaggttt

SEQ ID NO: 82127 - DNA, 22 bp, Artificial Sequence
  Synthetic oligonucleotide; TTG chr11 5214035 5214056 5214052 5214057 +
ttgtgtgtctatcaggttttgg

SEQ ID NO: 82128 - DNA, 22 bp, Artificial Sequence
  Synthetic oligonucleotide; TTG chr11 5214038 5214059 5214055 5214060 +
tgtgtctatcaggttttggtat

SEQ ID NO: 82129 - DNA, 22 bp, Artificial Sequence
  Synthetic oligonucleotide; CTA chr11 5214046 5214067 5214063 5214068 +
tcaggttttggtatcaggatga

SEQ ID NO: 82130 - DNA, 22 bp, Artificial Sequence
  Synthetic oligonucleotide; TTT chr11 5214054 5214075 5214071 5214076 +
tggtatcaggatgatgctggcc

SEQ ID NO: 82131 - DNA, 22 bp, Artificial Sequence
  Synthetic oligonucleotide; TTT chr11 5214055 5214076 5214072 5214077 +
ggtatcaggatgatgctggcct

SEQ ID NO: 82132 - DNA, 22 bp, Artificial Sequence
  Synthetic oligonucleotide; TTG chr11 5214056 5214077 5214073 5214078 +
gtatcaggatgatgctggcctc

SEQ ID NO: 82133 - DNA, 22 bp, Artificial Sequence
  Synthetic oligonucleotide; CTG chr11 5214073 5214094 5214090 5214095 +
gcctcataaaatgagctgaggt

SEQ ID NO: 82134 - DNA, 22 bp, Artificial Sequence
  Synthetic oligonucleotide; CTC chr11 5214078 5214099 5214095 5214100 +
ataaaatgagctgaggttgaat

SEQ ID NO: 82135 - DNA, 22 bp, Artificial Sequence
  Synthetic oligonucleotide; CTG chr11 5214091 5214112 5214108 5214113 +
aggttgaatccctccccctcaa

SEQ ID NO: 82136 - DNA, 22 bp, Artificial Sequence
  Synthetic oligonucleotide; TTG chr11 5214097 5214118 5214114 5214119 +
aatccctccccctcaatttttt

SEQ ID NO: 82137 - DNA, 22 bp, Artificial Sequence
  Synthetic oligonucleotide; CTC chr11 5214105 5214126 5214122 5214127 +
cccctcaattttttggagtagc

SEQ ID NO: 82138 - DNA, 22 bp, Artificial Sequence
  Synthetic oligonucleotide; CTC chr11 5214111 5214132 5214128 5214133 +
aattttttggagtagcttcagt

SEQ ID NO: 82139 - DNA, 22 bp, Artificial Sequence
  Synthetic oligonucleotide; TTT chr11 5214116 5214137 5214133 5214138 +
tttggagtagcttcagtaggaa

SEQ ID NO: 82140 - DNA, 22 bp, Artificial Sequence
  Synthetic oligonucleotide; TTT chr11 5214117 5214138 5214134 5214139 +
ttggagtagcttcagtaggaat

SEQ ID NO: 82141 - DNA, 22 bp, Artificial Sequence
  Synthetic oligonucleotide; TTT chr11 5214118 5214139 5214135 5214140 +
tggagtagcttcagtaggaatt

SEQ ID NO: 82142 - DNA, 22 bp, Artificial Sequence
  Synthetic oligonucleotide; TTT chr11 5214119 5214140 5214136 5214141 +
ggagtagcttcagtaggaattt

SEQ ID NO: 82143 - DNA, 22 bp, Artificial Sequence
  Synthetic oligonucleotide; TTG chr11 5214120 5214141 5214137 5214142 +
gagtagcttcagtaggaatttt

SEQ ID NO: 82144 - DNA, 22 bp, Artificial Sequence
  Synthetic oligonucleotide; CTT chr11 5214129 5214150 5214146 5214151 +
cagtaggaatttttccaactct

SEQ ID NO: 82145 - DNA, 22 bp, Artificial Sequence
  Synthetic oligonucleotide; TTC chr11 5214130 5214151 5214147 5214152 +
agtaggaatttttccaactctt

SEQ ID NO: 82146 - DNA, 22 bp, Artificial Sequence
  Synthetic oligonucleotide; TTT chr11 5214141 5214162 5214158 5214163 +
ttccaactcttctttgtgcatc

SEQ ID NO: 82147 - DNA, 22 bp, Artificial Sequence
  Synthetic oligonucleotide; TTT chr11 5214142 5214163 5214159 5214164 +
tccaactcttctttgtgcatct

SEQ ID NO: 82148 - DNA, 22 bp, Artificial Sequence
  Synthetic oligonucleotide; TTT chr11 5214143 5214164 5214160 5214165 +
ccaactcttctttgtgcatctg

SEQ ID NO: 82149 - DNA, 22 bp, Artificial Sequence
  Synthetic oligonucleotide; TTC chr11 5214144 5214165 5214161 5214166 +
caactcttctttgtgcatctga

SEQ ID NO: 82150 - DNA, 22 bp, Artificial Sequence
  Synthetic oligonucleotide; CTC chr11 5214150 5214171 5214167 5214172 +
ttctttgtgcatctgatagaat

SEQ ID NO: 82151 - DNA, 22 bp, Artificial Sequence
  Synthetic oligonucleotide; CTT chr11 5214152 5214173 5214169 5214174 +
ctttgtgcatctgatagaattt

SEQ ID NO: 82152 - DNA, 22 bp, Artificial Sequence
  Synthetic oligonucleotide; TTC chr11 5214153 5214174 5214170 5214175 +
tttgtgcatctgatagaatttg

SEQ ID NO: 82153 - DNA, 22 bp, Artificial Sequence
  Synthetic oligonucleotide; CTT chr11 5214155 5214176 5214172 5214177 +
tgtgcatctgatagaatttggt

SEQ ID NO: 82154 - DNA, 22 bp, Artificial Sequence
  Synthetic oligonucleotide; TTT chr11 5214156 5214177 5214173 5214178 +
gtgcatctgatagaatttggtt

SEQ ID NO: 82155 - DNA, 22 bp, Artificial Sequence
  Synthetic oligonucleotide; TTG chr11 5214157 5214178 5214174 5214179 +
tgcatctgatagaatttggttg

SEQ ID NO: 82156 - DNA, 22 bp, Artificial Sequence
  Synthetic oligonucleotide; CTG chr11 5214165 5214186 5214182 5214187 +
atagaatttggttgtgaatcat

SEQ ID NO: 82157 - DNA, 22 bp, Artificial Sequence
  Synthetic oligonucleotide; TTT chr11 5214174 5214195 5214191 5214196 +
ggttgtgaatcatattgtccag

SEQ ID NO: 82158 - DNA, 22 bp, Artificial Sequence
  Synthetic oligonucleotide; TTG chr11 5214175 5214196 5214192 5214197 +
gttgtgaatcatattgtccagg

SEQ ID NO: 82159 - DNA, 22 bp, Artificial Sequence
  Synthetic oligonucleotide; TTG chr11 5214179 5214200 5214196 5214201 +
tgaatcatattgtccagggctt

SEQ ID NO: 82160 - DNA, 22 bp, Artificial Sequence
  Synthetic oligonucleotide; TTG chr11 5214191 5214212 5214208 5214213 +
tccagggctttttttgtttgat

SEQ ID NO: 82161 - DNA, 22 bp, Artificial Sequence
  Synthetic oligonucleotide; CTT chr11 5214201 5214222 5214218 5214223 +
tttttgtttgataggctattta

SEQ ID NO: 82162 - DNA, 22 bp, Artificial Sequence
  Synthetic oligonucleotide; TTT chr11 5214202 5214223 5214219 5214224 +
ttttgtttgataggctatttat

SEQ ID NO: 82163 - DNA, 22 bp, Artificial Sequence
  Synthetic oligonucleotide; TTT chr11 5214203 5214224 5214220 5214225 +
tttgtttgataggctatttatt

SEQ ID NO: 82164 - DNA, 22 bp, Artificial Sequence
  Synthetic oligonucleotide; TTT chr11 5214204 5214225 5214221 5214226 +
ttgtttgataggctatttatta

SEQ ID NO: 82165 - DNA, 22 bp, Artificial Sequence
  Synthetic oligonucleotide; TTT chr11 5214205 5214226 5214222 5214227 +
tgtttgataggctatttattac

SEQ ID NO: 82166 - DNA, 22 bp, Artificial Sequence
  Synthetic oligonucleotide; TTT chr11 5214206 5214227 5214223 5214228 +
gtttgataggctatttattact

SEQ ID NO: 82167 - DNA, 22 bp, Artificial Sequence
  Synthetic oligonucleotide; TTG chr11 5214207 5214228 5214224 5214229 +
tttgataggctatttattactg

SEQ ID NO: 82168 - DNA, 22 bp, Artificial Sequence
  Synthetic oligonucleotide; TTT chr11 5214210 5214231 5214227 5214232 +
gataggctatttattactgaat

SEQ ID NO: 82169 - DNA, 22 bp, Artificial Sequence
  Synthetic oligonucleotide; TTG chr11 5214211 5214232 5214228 5214233 +
ataggctatttattactgaatc

SEQ ID NO: 82170 - DNA, 22 bp, Artificial Sequence
  Synthetic oligonucleotide; CTA chr11 5214219 5214240 5214236 5214241 +
tttattactgaatcattttcag

SEQ ID NO: 82171 - DNA, 22 bp, Artificial Sequence
  Synthetic oligonucleotide; TTT chr11 5214222 5214243 5214239 5214244 +
attactgaatcattttcagagc

SEQ ID NO: 82172 - DNA, 22 bp, Artificial Sequence
  Synthetic oligonucleotide; TTA chr11 5214223 5214244 5214240 5214245 +
ttactgaatcattttcagagct

SEQ ID NO: 82173 - DNA, 22 bp, Artificial Sequence
  Synthetic oligonucleotide; TTA chr11 5214226 5214247 5214243 5214248 +
ctgaatcattttcagagctcat

SEQ ID NO: 82174 - DNA, 22 bp, Artificial Sequence
  Synthetic oligonucleotide; CTG chr11 5214229 5214250 5214246 5214251 +
aatcattttcagagctcatcat

SEQ ID NO: 82175 - DNA, 22 bp, Artificial Sequence
  Synthetic oligonucleotide; TTT chr11 5214237 5214258 5214254 5214259 +
tcagagctcatcatggatctct

SEQ ID NO: 82176 - DNA, 22 bp, Artificial Sequence
  Synthetic oligonucleotide; TTT chr11 5214238 5214259 5214255 5214260 +
cagagctcatcatggatctctt

SEQ ID NO: 82177 - DNA, 22 bp, Artificial Sequence
  Synthetic oligonucleotide; TTC chr11 5214239 5214260 5214256 5214261 +
agagctcatcatggatctcttc

SEQ ID NO: 82178 - DNA, 22 bp, Artificial Sequence
  Synthetic oligonucleotide; CTC chr11 5214246 5214267 5214263 5214268 +
atcatggatctcttcaggaaat

SEQ ID NO: 82179 - DNA, 22 bp, Artificial Sequence
  Synthetic oligonucleotide; CTC chr11 5214258 5214279 5214275 5214280 +
ttcaggaaattgatttcttcct

SEQ ID NO: 82180 - DNA, 22 bp, Artificial Sequence
  Synthetic oligonucleotide; CTT chr11 5214260 5214281 5214277 5214282 +
caggaaattgatttcttcctgg

SEQ ID NO: 82181 - DNA, 22 bp, Artificial Sequence
  Synthetic oligonucleotide; TTC chr11 5214261 5214282 5214278 5214283 +
aggaaattgatttcttcctggt

SEQ ID NO: 82182 - DNA, 22 bp, Artificial Sequence
  Synthetic oligonucleotide; TTG chr11 5214270 5214291 5214287 5214292 +
atttcttcctggttcagccttg

SEQ ID NO: 82183 - DNA, 22 bp, Artificial Sequence
  Synthetic oligonucleotide; TTT chr11 5214274 5214295 5214291 5214296 +
cttcctggttcagccttgggag

SEQ ID NO: 82184 - DNA, 22 bp, Artificial Sequence
  Synthetic oligonucleotide; TTC chr11 5214275 5214296 5214292 5214297 +
ttcctggttcagccttgggagg

SEQ ID NO: 82185 - DNA, 22 bp, Artificial Sequence
  Synthetic oligonucleotide; CTT chr11 5214277 5214298 5214294 5214299 +
cctggttcagccttgggaggac

SEQ ID NO: 82186 - DNA, 22 bp, Artificial Sequence
  Synthetic oligonucleotide; TTC chr11 5214278 5214299 5214295 5214300 +
ctggttcagccttgggaggacc

SEQ ID NO: 82187 - DNA, 22 bp, Artificial Sequence
  Synthetic oligonucleotide; CTG chr11 5214281 5214302 5214298 5214303 +
gttcagccttgggaggacctaa

SEQ ID NO: 82188 - DNA, 22 bp, Artificial Sequence
  Synthetic oligonucleotide; TTC chr11 5214285 5214306 5214302 5214307 +
agccttgggaggacctaaaaca

SEQ ID NO: 82189 - DNA, 22 bp, Artificial Sequence
  Synthetic oligonucleotide; CTT chr11 5214291 5214312 5214308 5214313 +
gggaggacctaaaacaatcctc

SEQ ID NO: 82190 - DNA, 22 bp, Artificial Sequence
  Synthetic oligonucleotide; TTG chr11 5214292 5214313 5214309 5214314 +
ggaggacctaaaacaatcctca

SEQ ID NO: 82191 - DNA, 22 bp, Artificial Sequence
  Synthetic oligonucleotide; CTA chr11 5214302 5214323 5214319 5214324 +
aaacaatcctcagcaaatgcaa

SEQ ID NO: 82192 - DNA, 22 bp, Artificial Sequence
  Synthetic oligonucleotide; CTC chr11 5214313 5214334 5214330 5214335 +
agcaaatgcaaaaaaaaaatca

SEQ ID NO: 82193 - DNA, 22 bp, Artificial Sequence
  Synthetic oligonucleotide; CTC chr11 5214347 5214368 5214364 5214369 +
tcagaccacagaggaataaaaa

SEQ ID NO: 82194 - DNA, 22 bp, Artificial Sequence
  Synthetic oligonucleotide; CTC chr11 5214349 5214370 5214366 5214371 +
agaccacagaggaataaaaata

SEQ ID NO: 82195 - DNA, 22 bp, Artificial Sequence
  Synthetic oligonucleotide; TTT chr11 5214376 5214397 5214393 5214398 +
caagactaatgaatagctgaaa

SEQ ID NO: 82196 - DNA, 22 bp, Artificial Sequence
  Synthetic oligonucleotide; TTC chr11 5214377 5214398 5214394 5214399 +
aagactaatgaatagctgaaaa

SEQ ID NO: 82197 - DNA, 22 bp, Artificial Sequence
  Synthetic oligonucleotide; CTA chr11 5214384 5214405 5214401 5214406 +
atgaatagctgaaaactatgca

SEQ ID NO: 82198 - DNA, 22 bp, Artificial Sequence
  Synthetic oligonucleotide; CTG chr11 5214395 5214416 5214412 5214417 +
aaaactatgcaattacatggaa

SEQ ID NO: 82199 - DNA, 22 bp, Artificial Sequence
  Synthetic oligonucleotide; CTA chr11 5214402 5214423 5214419 5214424 +
tgcaattacatggaaattaaac

SEQ ID NO: 82200 - DNA, 22 bp, Artificial Sequence
  Synthetic oligonucleotide; TTA chr11 5214410 5214431 5214427 5214432 +
catggaaattaaacaacctgct

SEQ ID NO: 82201 - DNA, 22 bp, Artificial Sequence
  Synthetic oligonucleotide; TTA chr11 5214421 5214442 5214438 5214443 +
aacaacctgctcctgaatgaat

SEQ ID NO: 82202 - DNA, 22 bp, Artificial Sequence
  Synthetic oligonucleotide; CTG chr11 5214430 5214451 5214447 5214452 +
ctcctgaatgaattttgggtaa

SEQ ID NO: 82203 - DNA, 22 bp, Artificial Sequence
  Synthetic oligonucleotide; CTC chr11 5214433 5214454 5214450 5214455 +
ctgaatgaattttgggtaaata

SEQ ID NO: 82204 - DNA, 22 bp, Artificial Sequence
  Synthetic oligonucleotide; CTG chr11 5214436 5214457 5214453 5214458 +
aatgaattttgggtaaataatg

SEQ ID NO: 82205 - DNA, 22 bp, Artificial Sequence
  Synthetic oligonucleotide; TTT chr11 5214445 5214466 5214462 5214467 +
tgggtaaataatgaaaactaag

SEQ ID NO: 82206 - DNA, 22 bp, Artificial Sequence
  Synthetic oligonucleotide; TTT chr11 5214446 5214467 5214463 5214468 +
gggtaaataatgaaaactaagg

SEQ ID NO: 82207 - DNA, 22 bp, Artificial Sequence
  Synthetic oligonucleotide; TTG chr11 5214447 5214468 5214464 5214469 +
ggtaaataatgaaaactaaggc

SEQ ID NO: 82208 - DNA, 22 bp, Artificial Sequence
  Synthetic oligonucleotide; CTA chr11 5214465 5214486 5214482 5214487 +
aggcaaaaataaaatagttctt

SEQ ID NO: 82209 - DNA, 22 bp, Artificial Sequence
  Synthetic oligonucleotide; TTC chr11 5214485 5214506 5214502 5214507 +
tttgaaactaatgagaacaaag

SEQ ID NO: 82210 - DNA, 22 bp, Artificial Sequence
  Synthetic oligonucleotide; CTT chr11 5214487 5214508 5214504 5214509 +
tgaaactaatgagaacaaagat

SEQ ID NO: 82211 - DNA, 22 bp, Artificial Sequence
  Synthetic oligonucleotide; TTT chr11 5214488 5214509 5214505 5214510 +
gaaactaatgagaacaaagata

SEQ ID NO: 82212 - DNA, 22 bp, Artificial Sequence
  Synthetic oligonucleotide; TTG chr11 5214489 5214510 5214506 5214511 +
aaactaatgagaacaaagatac

SEQ ID NO: 82213 - DNA, 22 bp, Artificial Sequence
  Synthetic oligonucleotide; CTA chr11 5214495 5214516 5214512 5214517 +
atgagaacaaagatacaatata

SEQ ID NO: 82214 - DNA, 22 bp, Artificial Sequence
  Synthetic oligonucleotide; CTC chr11 5214527 5214548 5214544 5214549 +
tgggacacagcttagacagtgt

SEQ ID NO: 82215 - DNA, 22 bp, Artificial Sequence
  Synthetic oligonucleotide; CTG chr11 5214529 5214550 5214546 5214551 +
ggacacagcttagacagtgtta

SEQ ID NO: 82216 - DNA, 22 bp, Artificial Sequence
  Synthetic oligonucleotide; CTT chr11 5214540 5214561 5214557 5214562 +
agacagtgttaagagagaaatt

SEQ ID NO: 82217 - DNA, 22 bp, Artificial Sequence
  Synthetic oligonucleotide; TTA chr11 5214541 5214562 5214558 5214563 +
gacagtgttaagagagaaattt

SEQ ID NO: 82218 - DNA, 22 bp, Artificial Sequence
  Synthetic oligonucleotide; TTA chr11 5214551 5214572 5214568 5214573 +
agagagaaatttatacactaaa

SEQ ID NO: 82219 - DNA, 22 bp, Artificial Sequence
  Synthetic oligonucleotide; TTT chr11 5214563 5214584 5214580 5214585 +
atacactaaatgcccacatcaa

SEQ ID NO: 82220 - DNA, 22 bp, Artificial Sequence
  Synthetic oligonucleotide; TTA chr11 5214564 5214585 5214581 5214586 +
tacactaaatgcccacatcaaa

SEQ ID NO: 82221 - DNA, 22 bp, Artificial Sequence
  Synthetic oligonucleotide; CTA chr11 5214571 5214592 5214588 5214593 +
aatgcccacatcaaaaagtctt

SEQ ID NO: 82222 - DNA, 22 bp, Artificial Sequence
  Synthetic oligonucleotide; CTT chr11 5214593 5214614 5214610 5214615 +
aaagccctcaaattaacaacct

SEQ ID NO: 82223 - DNA, 22 bp, Artificial Sequence
  Synthetic oligonucleotide; TTA chr11 5214594 5214615 5214611 5214616 +
aagccctcaaattaacaaccta

SEQ ID NO: 82224 - DNA, 22 bp, Artificial Sequence
  Synthetic oligonucleotide; CTC chr11 5214602 5214623 5214619 5214624 +
aaattaacaacctaatgtcaca

SEQ ID NO: 82225 - DNA, 22 bp, Artificial Sequence
  Synthetic oligonucleotide; TTA chr11 5214608 5214629 5214625 5214630 +
acaacctaatgtcacaactaaa

SEQ ID NO: 82226 - DNA, 22 bp, Artificial Sequence
  Synthetic oligonucleotide; CTA chr11 5214616 5214637 5214633 5214638 +
atgtcacaactaaaagaaccag

SEQ ID NO: 82227 - DNA, 22 bp, Artificial Sequence
  Synthetic oligonucleotide; CTA chr11 5214628 5214649 5214645 5214650 +
aaagaaccagagaaccaagagc

SEQ ID NO: 82228 - DNA, 22 bp, Artificial Sequence
  Synthetic oligonucleotide; CTA chr11 5214662 5214683 5214679 5214684 +
aatctagcagaagacaagaaat

SEQ ID NO: 82229 - DNA, 22 bp, Artificial Sequence
  Synthetic oligonucleotide; CTA chr11 5214668 5214689 5214685 5214690 +
gcagaagacaagaaataaacaa

SEQ ID NO: 82230 - DNA, 22 bp, Artificial Sequence
  Synthetic oligonucleotide; CTA chr11 5214701 5214722 5214718 5214723 +
actgaaggatattaaaacacaa

SEQ ID NO: 82231 - DNA, 22 bp, Artificial Sequence
  Synthetic oligonucleotide; CTG chr11 5214705 5214726 5214722 5214727 +
aaggatattaaaacacaaaata

SEQ ID NO: 82232 - DNA, 22 bp, Artificial Sequence
  Synthetic oligonucleotide; TTA chr11 5214715 5214736 5214732 5214737 +
aaacacaaaataccattcaaaa

SEQ ID NO: 82233 - DNA, 22 bp, Artificial Sequence
  Synthetic oligonucleotide; TTC chr11 5214733 5214754 5214750 5214755 +
aaaagattaatgagtccaagag

SEQ ID NO: 82234 - DNA, 22 bp, Artificial Sequence
  Synthetic oligonucleotide; TTA chr11 5214742 5214763 5214759 5214764 +
atgagtccaagagctggttttg

SEQ ID NO: 82235 - DNA, 22 bp, Artificial Sequence
  Synthetic oligonucleotide; CTG chr11 5214758 5214779 5214775 5214780 +
gttttgtgaaaaaattaataag

SEQ ID NO: 82236 - DNA, 22 bp, Artificial Sequence
  Synthetic oligonucleotide; TTT chr11 5214762 5214783 5214779 5214784 +
tgtgaaaaaattaataaggtag

SEQ ID NO: 82237 - DNA, 22 bp, Artificial Sequence
  Synthetic oligonucleotide; TTT chr11 5214763 5214784 5214780 5214785 +
gtgaaaaaattaataaggtaga

SEQ ID NO: 82238 - DNA, 22 bp, Artificial Sequence
  Synthetic oligonucleotide; TTG chr11 5214764 5214785 5214781 5214786 +
tgaaaaaattaataaggtagat

SEQ ID NO: 82239 - DNA, 22 bp, Artificial Sequence
  Synthetic oligonucleotide; TTA chr11 5214775 5214796 5214792 5214797 +
ataaggtagatcactagctaga

SEQ ID NO: 82240 - DNA, 22 bp, Artificial Sequence
  Synthetic oligonucleotide; CTA chr11 5214791 5214812 5214808 5214813 +
gctagactaataaagaagacaa

SEQ ID NO: 82241 - DNA, 22 bp, Artificial Sequence
  Synthetic oligonucleotide; CTA chr11 5214795 5214816 5214812 5214817 +
gactaataaagaagacaagaga

SEQ ID NO: 82242 - DNA, 22 bp, Artificial Sequence
  Synthetic oligonucleotide; CTA chr11 5214800 5214821 5214817 5214822 +
ataaagaagacaagagagaaga

SEQ ID NO: 82243 - DNA, 22 bp, Artificial Sequence
  Synthetic oligonucleotide; TTA chr11 5214840 5214861 5214857 5214862 +
gaaatgaaaaagggaatattat

SEQ ID NO: 82244 - DNA, 22 bp, Artificial Sequence
  Synthetic oligonucleotide; TTA chr11 5214861 5214882 5214878 5214883 +
tcactcaccccacagaaataca

SEQ ID NO: 82245 - DNA, 22 bp, Artificial Sequence
  Synthetic oligonucleotide; CTC chr11 5214867 5214888 5214884 5214889 +
accccacagaaatacaaataat

SEQ ID NO: 82246 - DNA, 22 bp, Artificial Sequence
  Synthetic oligonucleotide; CTA chr11 5214901 5214922 5214918 5214923 +
ctatgaacatctctatgtacat

SEQ ID NO: 82247 - DNA, 22 bp, Artificial Sequence
  Synthetic oligonucleotide; CTA chr11 5214904 5214925 5214921 5214926 +
tgaacatctctatgtacataaa

SEQ ID NO: 82248 - DNA, 22 bp, Artificial Sequence
  Synthetic oligonucleotide; CTC chr11 5214914 5214935 5214931 5214936 +
tatgtacataaactagaaaatc

SEQ ID NO: 82249 - DNA, 22 bp, Artificial Sequence
  Synthetic oligonucleotide; CTA chr11 5214916 5214937 5214933 5214938 +
tgtacataaactagaaaatcta

SEQ ID NO: 82250 - DNA, 22 bp, Artificial Sequence
  Synthetic oligonucleotide; CTA chr11 5214929 5214950 5214946 5214951 +
gaaaatctaaaagaaatggata

SEQ ID NO: 82251 - DNA, 22 bp, Artificial Sequence
  Synthetic oligonucleotide; CTA chr11 5214938 5214959 5214955 5214960 +
aaagaaatggataacttcctgg

SEQ ID NO: 82252 - DNA, 22 bp, Artificial Sequence
  Synthetic oligonucleotide; CTT chr11 5214955 5214976 5214972 5214977 +
cctggactgctcattgtcttag

SEQ ID NO: 82253 - DNA, 22 bp, Artificial Sequence
  Synthetic oligonucleotide; TTC chr11 5214956 5214977 5214973 5214978 +
ctggactgctcattgtcttagg

SEQ ID NO: 82254 - DNA, 22 bp, Artificial Sequence
  Synthetic oligonucleotide; CTG chr11 5214959 5214980 5214976 5214981 +
gactgctcattgtcttaggcaa

SEQ ID NO: 82255 - DNA, 22 bp, Artificial Sequence
  Synthetic oligonucleotide; CTG chr11 5214964 5214985 5214981 5214986 +
ctcattgtcttaggcaaagaag

SEQ ID NO: 82256 - DNA, 22 bp, Artificial Sequence
  Synthetic oligonucleotide; CTC chr11 5214967 5214988 5214984 5214989 +
attgtcttaggcaaagaagact

SEQ ID NO: 82257 - DNA, 22 bp, Artificial Sequence
  Synthetic oligonucleotide; TTG chr11 5214971 5214992 5214988 5214993 +
tcttaggcaaagaagactagcc

SEQ ID NO: 82258 - DNA, 22 bp, Artificial Sequence
  Synthetic oligonucleotide; CTT chr11 5214975 5214996 5214992 5214997 +
aggcaaagaagactagccgtac

SEQ ID NO: 82259 - DNA, 22 bp, Artificial Sequence
  Synthetic oligonucleotide; TTA chr11 5214976 5214997 5214993 5214998 +
ggcaaagaagactagccgtact

SEQ ID NO: 82260 - DNA, 22 bp, Artificial Sequence
  Synthetic oligonucleotide; CTA chr11 5214990 5215011 5215007 5215012 +
gccgtactttatttgagggctc

SEQ ID NO: 82261 - DNA, 22 bp, Artificial Sequence
  Synthetic oligonucleotide; CTT chr11 5214999 5215020 5215016 5215021 +
tatttgagggctctttgagtag

SEQ ID NO: 82262 - DNA, 22 bp, Artificial Sequence
  Synthetic oligonucleotide; TTT chr11 5215000 5215021 5215017 5215022 +
atttgagggctctttgagtaga

SEQ ID NO: 82263 - DNA, 22 bp, Artificial Sequence
  Synthetic oligonucleotide; TTA chr11 5215001 5215022 5215018 5215023 +
tttgagggctctttgagtagag

SEQ ID NO: 82264 - DNA, 22 bp, Artificial Sequence
  Synthetic oligonucleotide; TTT chr11 5215004 5215025 5215021 5215026 +
gagggctctttgagtagagtcc

SEQ ID NO: 82265 - DNA, 22 bp, Artificial Sequence
  Synthetic oligonucleotide; TTG chr11 5215005 5215026 5215022 5215027 +
agggctctttgagtagagtcct

SEQ ID NO: 82266 - DNA, 22 bp, Artificial Sequence
  Synthetic oligonucleotide; CTC chr11 5215012 5215033 5215029 5215034 +
tttgagtagagtcctataaatt

SEQ ID NO: 82267 - DNA, 22 bp, Artificial Sequence
  Synthetic oligonucleotide; CTT chr11 5215014 5215035 5215031 5215036 +
tgagtagagtcctataaattcc

SEQ ID NO: 82268 - DNA, 22 bp, Artificial Sequence
  Synthetic oligonucleotide; TTT chr11 5215015 5215036 5215032 5215037 +
gagtagagtcctataaattcct

SEQ ID NO: 82269 - DNA, 22 bp, Artificial Sequence
  Synthetic oligonucleotide; TTG chr11 5215016 5215037 5215033 5215038 +
agtagagtcctataaattcctg

SEQ ID NO: 82270 - DNA, 22 bp, Artificial Sequence
  Synthetic oligonucleotide; CTA chr11 5215028 5215049 5215045 5215050 +
taaattcctgtatttctctcaa

SEQ ID NO: 82271 - DNA, 22 bp, Artificial Sequence
  Synthetic oligonucleotide; TTC chr11 5215035 5215056 5215052 5215057 +
ctgtatttctctcaactctatg

SEQ ID NO: 82272 - DNA, 22 bp, Artificial Sequence
  Synthetic oligonucleotide; CTG chr11 5215038 5215059 5215055 5215060 +
tatttctctcaactctatgtcc

SEQ ID NO: 82273 - DNA, 22 bp, Artificial Sequence
  Synthetic oligonucleotide; TTT chr11 5215043 5215064 5215060 5215065 +
ctctcaactctatgtccccctc

SEQ ID NO: 82274 - DNA, 22 bp, Artificial Sequence
  Synthetic oligonucleotide; TTC chr11 5215044 5215065 5215061 5215066 +
tctcaactctatgtccccctcc

SEQ ID NO: 82275 - DNA, 22 bp, Artificial Sequence
  Synthetic oligonucleotide; CTC chr11 5215046 5215067 5215063 5215068 +
tcaactctatgtccccctcccc

SEQ ID NO: 82276 - DNA, 22 bp, Artificial Sequence
  Synthetic oligonucleotide; CTC chr11 5215048 5215069 5215065 5215070 +
aactctatgtccccctccccag

SEQ ID NO: 82277 - DNA, 22 bp, Artificial Sequence
  Synthetic oligonucleotide; CTC chr11 5215053 5215074 5215070 5215075 +
tatgtccccctccccagaatac

SEQ ID NO: 82278 - DNA, 22 bp, Artificial Sequence
  Synthetic oligonucleotide; CTA chr11 5215055 5215076 5215072 5215077 +
tgtccccctccccagaatacaa

SEQ ID NO: 82279 - DNA, 22 bp, Artificial Sequence
  Synthetic oligonucleotide; CTC chr11 5215065 5215086 5215082 5215087 +
cccagaatacaaagccccttct

SEQ ID NO: 82280 - DNA, 22 bp, Artificial Sequence
  Synthetic oligonucleotide; CTT chr11 5215085 5215106 5215102 5215107 +
ctgtgatgcctcctttgcttct

SEQ ID NO: 82281 - DNA, 22 bp, Artificial Sequence
  Synthetic oligonucleotide; TTC chr11 5215086 5215107 5215103 5215108 +
tgtgatgcctcctttgcttctt

SEQ ID NO: 82282 - DNA, 22 bp, Artificial Sequence
  Synthetic oligonucleotide; CTG chr11 5215088 5215109 5215105 5215110 +
tgatgcctcctttgcttctttt

SEQ ID NO: 82283 - DNA, 22 bp, Artificial Sequence
  Synthetic oligonucleotide; CTC chr11 5215097 5215118 5215114 5215119 +
ctttgcttcttttggttatatc

SEQ ID NO: 82284 - DNA, 22 bp, Artificial Sequence
  Synthetic oligonucleotide; CTT chr11 5215100 5215121 5215117 5215122 +
tgcttcttttggttatatctgt

SEQ ID NO: 82285 - DNA, 22 bp, Artificial Sequence
  Synthetic oligonucleotide; TTT chr11 5215101 5215122 5215118 5215123 +
gcttcttttggttatatctgtg

SEQ ID NO: 82286 - DNA, 22 bp, Artificial Sequence
  Synthetic oligonucleotide; TTG chr11 5215102 5215123 5215119 5215124 +
cttcttttggttatatctgtgt

SEQ ID NO: 82287 - DNA, 22 bp, Artificial Sequence
  Synthetic oligonucleotide; CTT chr11 5215105 5215126 5215122 5215127 +
cttttggttatatctgtgttat

SEQ ID NO: 82288 - DNA, 22 bp, Artificial Sequence
  Synthetic oligonucleotide; TTC chr11 5215106 5215127 5215123 5215128 +
ttttggttatatctgtgttata

SEQ ID NO: 82289 - DNA, 22 bp, Artificial Sequence
  Synthetic oligonucleotide; CTT chr11 5215108 5215129 5215125 5215130 +
ttggttatatctgtgttatatc

SEQ ID NO: 82290 - DNA, 22 bp, Artificial Sequence
  Synthetic oligonucleotide; TTT chr11 5215109 5215130 5215126 5215131 +
tggttatatctgtgttatatct

SEQ ID NO: 82291 - DNA, 22 bp, Artificial Sequence
  Synthetic oligonucleotide; TTT chr11 5215110 5215131 5215127 5215132 +
ggttatatctgtgttatatctg

SEQ ID NO: 82292 - DNA, 22 bp, Artificial Sequence
  Synthetic oligonucleotide; TTG chr11 5215111 5215132 5215128 5215133 +
gttatatctgtgttatatctga

SEQ ID NO: 82293 - DNA, 22 bp, Artificial Sequence
  Synthetic oligonucleotide; TTA chr11 5215115 5215136 5215132 5215137 +
tatctgtgttatatctgaatat

SEQ ID NO: 82294 - DNA, 22 bp, Artificial Sequence
  Synthetic oligonucleotide; CTG chr11 5215121 5215142 5215138 5215143 +
tgttatatctgaatatatggct

SEQ ID NO: 82295 - DNA, 22 bp, Artificial Sequence
  Synthetic oligonucleotide; TTA chr11 5215126 5215147 5215143 5215148 +
tatctgaatatatggctctaga

SEQ ID NO: 82296 - DNA, 22 bp, Artificial Sequence
  Synthetic oligonucleotide; CTG chr11 5215132 5215153 5215149 5215154 +
aatatatggctctagagaatcc

SEQ ID NO: 82297 - DNA, 22 bp, Artificial Sequence
  Synthetic oligonucleotide; CTC chr11 5215144 5215165 5215161 5215166 +
tagagaatcccaagaaatagaa

SEQ ID NO: 82298 - DNA, 22 bp, Artificial Sequence
  Synthetic oligonucleotide; CTA chr11 5215146 5215167 5215163 5215168 +
gagaatcccaagaaatagaaaa

SEQ ID NO: 82299 - DNA, 22 bp, Artificial Sequence
  Synthetic oligonucleotide; CTA chr11 5215173 5215194 5215190 5215195 +
gtccaaaatccaagctctgaat

SEQ ID NO: 82300 - DNA, 22 bp, Artificial Sequence
  Synthetic oligonucleotide; CTC chr11 5215190 5215211 5215207 5215212 +
tgaataagacaggtgagacctt

SEQ ID NO: 82301 - DNA, 22 bp, Artificial Sequence
  Synthetic oligonucleotide; CTG chr11 5215192 5215213 5215209 5215214 +
aataagacaggtgagacctttg

SEQ ID NO: 82302 - DNA, 22 bp, Artificial Sequence
  Synthetic oligonucleotide; CTT chr11 5215212 5215233 5215229 5215234 +
tggatgaatatcttttcacaaa

SEQ ID NO: 82303 - DNA, 22 bp, Artificial Sequence
  Synthetic oligonucleotide; TTT chr11 5215213 5215234 5215230 5215235 +
ggatgaatatcttttcacaaag

SEQ ID NO: 82304 - DNA, 22 bp, Artificial Sequence
  Synthetic oligonucleotide; TTG chr11 5215214 5215235 5215231 5215236 +
gatgaatatcttttcacaaagt

SEQ ID NO: 82305 - DNA, 22 bp, Artificial Sequence
  Synthetic oligonucleotide; CTT chr11 5215226 5215247 5215243 5215248 +
ttcacaaagttgagaagatgtg

SEQ ID NO: 82306 - DNA, 22 bp, Artificial Sequence
  Synthetic oligonucleotide; TTT chr11 5215227 5215248 5215244 5215249 +
tcacaaagttgagaagatgtga

SEQ ID NO: 82307 - DNA, 22 bp, Artificial Sequence
  Synthetic oligonucleotide; TTT chr11 5215228 5215249 5215245 5215250 +
cacaaagttgagaagatgtgaa

SEQ ID NO: 82308 - DNA, 22 bp, Artificial Sequence
  Synthetic oligonucleotide; TTC chr11 5215229 5215250 5215246 5215251 +
acaaagttgagaagatgtgaag

SEQ ID NO: 82309 - DNA, 22 bp, Artificial Sequence
  Synthetic oligonucleotide; TTG chr11 5215238 5215259 5215255 5215260 +
agaagatgtgaagaacccaaga

SEQ ID NO: 82310 - DNA, 22 bp, Artificial Sequence
  Synthetic oligonucleotide; CTG chr11 5215268 5215289 5215285 5215290 +
gagaaacagccccgaggcactg

SEQ ID NO: 82311 - DNA, 22 bp, Artificial Sequence
  Synthetic oligonucleotide; CTG chr11 5215290 5215311 5215307 5215312 +
caaggggttcagacctgtgttg

SEQ ID NO: 82312 - DNA, 22 bp, Artificial Sequence
  Synthetic oligonucleotide; TTC chr11 5215300 5215321 5215317 5215322 +
agacctgtgttggagaatatca

SEQ ID NO: 82313 - DNA, 22 bp, Artificial Sequence
  Synthetic oligonucleotide; CTG chr11 5215307 5215328 5215324 5215329 +
tgttggagaatatcatcaccgt

SEQ ID NO: 82314 - DNA, 22 bp, Artificial Sequence
  Synthetic oligonucleotide; TTG chr11 5215312 5215333 5215329 5215334 +
gagaatatcatcaccgtaacaa

SEQ ID NO: 82315 - DNA, 22 bp, Artificial Sequence
  Synthetic oligonucleotide; CTT chr11 5215339 5215360 5215356 5215361 +
ctatgttcttaatatctgtgtg

SEQ ID NO: 82316 - DNA, 22 bp, Artificial Sequence
  Synthetic oligonucleotide; TTC chr11 5215340 5215361 5215357 5215362 +
tatgttcttaatatctgtgtgt

SEQ ID NO: 82317 - DNA, 22 bp, Artificial Sequence
  Synthetic oligonucleotide; CTA chr11 5215342 5215363 5215359 5215364 +
tgttcttaatatctgtgtgttt

SEQ ID NO: 82318 - DNA, 22 bp, Artificial Sequence
  Synthetic oligonucleotide; TTC chr11 5215347 5215368 5215364 5215369 +
ttaatatctgtgtgtttgtttg

SEQ ID NO: 82319 - DNA, 22 bp, Artificial Sequence
  Synthetic oligonucleotide; CTT chr11 5215349 5215370 5215366 5215371 +
aatatctgtgtgtttgtttgtt

SEQ ID NO: 82320 - DNA, 22 bp, Artificial Sequence
  Synthetic oligonucleotide; TTA chr11 5215350 5215371 5215367 5215372 +
atatctgtgtgtttgtttgttt

SEQ ID NO: 82321 - DNA, 22 bp, Artificial Sequence
  Synthetic oligonucleotide; CTG chr11 5215357 5215378 5215374 5215379 +
tgtgtttgtttgtttgtttttt

SEQ ID NO: 82322 - DNA, 22 bp, Artificial Sequence
  Synthetic oligonucleotide; TTT chr11 5215364 5215385 5215381 5215386 +
gtttgtttgttttttgcttgtt

SEQ ID NO: 82323 - DNA, 22 bp, Artificial Sequence
  Synthetic oligonucleotide; TTG chr11 5215365 5215386 5215382 5215387 +
tttgtttgttttttgcttgttt

SEQ ID NO: 82324 - DNA, 22 bp, Artificial Sequence
  Synthetic oligonucleotide; TTT chr11 5215368 5215389 5215385 5215390 +
gtttgttttttgcttgtttgtt

SEQ ID NO: 82325 - DNA, 22 bp, Artificial Sequence
  Synthetic oligonucleotide; TTG chr11 5215369 5215390 5215386 5215391 +
tttgttttttgcttgtttgttt

SEQ ID NO: 82326 - DNA, 22 bp, Artificial Sequence
  Synthetic oligonucleotide; TTT chr11 5215372 5215393 5215389 5215394 +
gttttttgcttgtttgtttgtt

SEQ ID NO: 82327 - DNA, 22 bp, Artificial Sequence
  Synthetic oligonucleotide; TTG chr11 5215373 5215394 5215390 5215395 +
ttttttgcttgtttgtttgttt

SEQ ID NO: 82328 - DNA, 22 bp, Artificial Sequence
  Synthetic oligonucleotide; TTT chr11 5215376 5215397 5215393 5215398 +
tttgcttgtttgtttgtttttc

SEQ ID NO: 82329 - DNA, 22 bp, Artificial Sequence
  Synthetic oligonucleotide; TTT chr11 5215377 5215398 5215394 5215399 +
ttgcttgtttgtttgtttttcc

SEQ ID NO: 82330 - DNA, 22 bp, Artificial Sequence
  Synthetic oligonucleotide; TTT chr11 5215378 5215399 5215395 5215400 +
tgcttgtttgtttgtttttcct

SEQ ID NO: 82331 - DNA, 22 bp, Artificial Sequence
  Synthetic oligonucleotide; TTT chr11 5215379 5215400 5215396 5215401 +
gcttgtttgtttgtttttcctc

SEQ ID NO: 82332 - DNA, 22 bp, Artificial Sequence
  Synthetic oligonucleotide; TTG chr11 5215380 5215401 5215397 5215402 +
cttgtttgtttgtttttcctca

SEQ ID NO: 82333 - DNA, 22 bp, Artificial Sequence
  Synthetic oligonucleotide; CTT chr11 5215383 5215404 5215400 5215405 +
gtttgtttgtttttcctcagag

SEQ ID NO: 82334 - DNA, 22 bp, Artificial Sequence
  Synthetic oligonucleotide; TTG chr11 5215384 5215405 5215401 5215406 +
tttgtttgtttttcctcagaga

SEQ ID NO: 82335 - DNA, 22 bp, Artificial Sequence
  Synthetic oligonucleotide; TTT chr11 5215387 5215408 5215404 5215409 +
gtttgtttttcctcagagacag

SEQ ID NO: 82336 - DNA, 22 bp, Artificial Sequence
  Synthetic oligonucleotide; TTG chr11 5215388 5215409 5215405 5215410 +
tttgtttttcctcagagacagg

SEQ ID NO: 82337 - DNA, 22 bp, Artificial Sequence
  Synthetic oligonucleotide; TTT chr11 5215391 5215412 5215408 5215413 +
gtttttcctcagagacaggatc

SEQ ID NO: 82338 - DNA, 22 bp, Artificial Sequence
  Synthetic oligonucleotide; TTG chr11 5215392 5215413 5215409 5215414 +
tttttcctcagagacaggatct

SEQ ID NO: 82339 - DNA, 22 bp, Artificial Sequence
  Synthetic oligonucleotide; TTT chr11 5215395 5215416 5215412 5215417 +
ttcctcagagacaggatctcag

SEQ ID NO: 82340 - DNA, 22 bp, Artificial Sequence
  Synthetic oligonucleotide; TTT chr11 5215396 5215417 5215413 5215418 +
tcctcagagacaggatctcagt

SEQ ID NO: 82341 - DNA, 22 bp, Artificial Sequence
  Synthetic oligonucleotide; TTT chr11 5215397 5215418 5215414 5215419 +
cctcagagacaggatctcagtc

SEQ ID NO: 82342 - DNA, 22 bp, Artificial Sequence
  Synthetic oligonucleotide; TTC chr11 5215398 5215419 5215415 5215420 +
ctcagagacaggatctcagtca

SEQ ID NO: 82343 - DNA, 22 bp, Artificial Sequence
  Synthetic oligonucleotide; CTC chr11 5215401 5215422 5215418 5215423 +
agagacaggatctcagtcacca

SEQ ID NO: 82344 - DNA, 22 bp, Artificial Sequence
  Synthetic oligonucleotide; CTC chr11 5215415 5215436 5215432 5215437 +
agtcaccaaggctagagagcag

SEQ ID NO: 82345 - DNA, 22 bp, Artificial Sequence
  Synthetic oligonucleotide; CTA chr11 5215429 5215450 5215446 5215451 +
gagagcagtggtgtcattattg

SEQ ID NO: 82346 - DNA, 22 bp, Artificial Sequence
  Synthetic oligonucleotide; TTA chr11 5215448 5215469 5215465 5215470 +
ttgctcactgcaaccctgaaat

SEQ ID NO: 82347 - DNA, 22 bp, Artificial Sequence
  Synthetic oligonucleotide; TTG chr11 5215451 5215472 5215468 5215473 +
ctcactgcaaccctgaaatcct

SEQ ID NO: 82348 - DNA, 22 bp, Artificial Sequence
  Synthetic oligonucleotide; CTC chr11 5215454 5215475 5215471 5215476 +
actgcaaccctgaaatcctggg

SEQ ID NO: 82349 - DNA, 22 bp, Artificial Sequence
  Synthetic oligonucleotide; CTG chr11 5215458 5215479 5215475 5215480 +
caaccctgaaatcctgggctca

SEQ ID NO: 82350 - DNA, 22 bp, Artificial Sequence
  Synthetic oligonucleotide; CTG chr11 5215466 5215487 5215483 5215488 +
aaatcctgggctcaagtgatcc

SEQ ID NO: 82351 - DNA, 22 bp, Artificial Sequence
  Synthetic oligonucleotide; CTG chr11 5215474 5215495 5215491 5215496 +
ggctcaagtgatcctatcactt

SEQ ID NO: 82352 - DNA, 22 bp, Artificial Sequence
  Synthetic oligonucleotide; CTC chr11 5215479 5215500 5215496 5215501 +
aagtgatcctatcacttcagcc

SEQ ID NO: 82353 - DNA, 22 bp, Artificial Sequence
  Synthetic oligonucleotide; CTA chr11 5215490 5215511 5215507 5215512 +
tcacttcagcctcctgggttac

SEQ ID NO: 82354 - DNA, 22 bp, Artificial Sequence
  Synthetic oligonucleotide; CTT chr11 5215496 5215517 5215513 5215518 +
cagcctcctgggttactgggac

SEQ ID NO: 82355 - DNA, 22 bp, Artificial Sequence
  Synthetic oligonucleotide; TTC chr11 5215497 5215518 5215514 5215519 +
agcctcctgggttactgggact

SEQ ID NO: 82356 - DNA, 22 bp, Artificial Sequence
  Synthetic oligonucleotide; CTC chr11 5215503 5215524 5215520 5215525 +
ctgggttactgggactacagat

SEQ ID NO: 82357 - DNA, 22 bp, Artificial Sequence
  Synthetic oligonucleotide; CTG chr11 5215506 5215527 5215523 5215528 +
ggttactgggactacagatgca

SEQ ID NO: 82358 - DNA, 22 bp, Artificial Sequence
  Synthetic oligonucleotide; TTA chr11 5215511 5215532 5215528 5215533 +
ctgggactacagatgcaagcca

SEQ ID NO: 82359 - DNA, 22 bp, Artificial Sequence
  Synthetic oligonucleotide; CTG chr11 5215514 5215535 5215531 5215536 +
ggactacagatgcaagccactg

SEQ ID NO: 82360 - DNA, 22 bp, Artificial Sequence
  Synthetic oligonucleotide; CTA chr11 5215520 5215541 5215537 5215542 +
cagatgcaagccactgtgccca

SEQ ID NO: 82361 - DNA, 22 bp, Artificial Sequence
  Synthetic oligonucleotide; CTG chr11 5215536 5215557 5215553 5215558 +
tgcccagcttggctctttcttt

SEQ ID NO: 82362 - DNA, 22 bp, Artificial Sequence
  Synthetic oligonucleotide; CTT chr11 5215546 5215567 5215563 5215568 +
ggctctttctttttattttaat

SEQ ID NO: 82363 - DNA, 22 bp, Artificial Sequence
  Synthetic oligonucleotide; TTG chr11 5215547 5215568 5215564 5215569 +
gctctttctttttattttaatt

SEQ ID NO: 82364 - DNA, 22 bp, Artificial Sequence
  Synthetic oligonucleotide; CTC chr11 5215551 5215572 5215568 5215573 +
tttctttttattttaattggtc

SEQ ID NO: 82365 - DNA, 22 bp, Artificial Sequence
  Synthetic oligonucleotide; CTT chr11 5215553 5215574 5215570 5215575 +
tctttttattttaattggtcac

SEQ ID NO: 82366 - DNA, 22 bp, Artificial Sequence
  Synthetic oligonucleotide; TTT chr11 5215554 5215575 5215571 5215576 +
ctttttattttaattggtcact

SEQ ID NO: 82367 - DNA, 22 bp, Artificial Sequence
  Synthetic oligonucleotide; TTC chr11 5215555 5215576 5215572 5215577 +
tttttattttaattggtcactt

SEQ ID NO: 82368 - DNA, 22 bp, Artificial Sequence
  Synthetic oligonucleotide; CTT chr11 5215557 5215578 5215574 5215579 +
tttattttaattggtcactttg

SEQ ID NO: 82369 - DNA, 22 bp, Artificial Sequence
  Synthetic oligonucleotide; TTT chr11 5215558 5215579 5215575 5215580 +
ttattttaattggtcactttgt

SEQ ID NO: 82370 - DNA, 22 bp, Artificial Sequence
  Synthetic oligonucleotide; TTT chr11 5215559 5215580 5215576 5215581 +
tattttaattggtcactttgtt

SEQ ID NO: 82371 - DNA, 22 bp, Artificial Sequence
  Synthetic oligonucleotide; TTT chr11 5215560 5215581 5215577 5215582 +
attttaattggtcactttgttt

SEQ ID NO: 82372 - DNA, 22 bp, Artificial Sequence
  Synthetic oligonucleotide; TTA chr11 5215561 5215582 5215578 5215583 +
ttttaattggtcactttgtttt

SEQ ID NO: 82373 - DNA, 22 bp, Artificial Sequence
  Synthetic oligonucleotide; TTT chr11 5215564 5215585 5215581 5215586 +
taattggtcactttgttttcag

SEQ ID NO: 82374 - DNA, 22 bp, Artificial Sequence
  Synthetic oligonucleotide; TTT chr11 5215565 5215586 5215582 5215587 +
aattggtcactttgttttcaga

SEQ ID NO: 82375 - DNA, 22 bp, Artificial Sequence
  Synthetic oligonucleotide; TTA chr11 5215566 5215587 5215583 5215588 +
attggtcactttgttttcagac

SEQ ID NO: 82376 - DNA, 22 bp, Artificial Sequence
  Synthetic oligonucleotide; TTG chr11 5215570 5215591 5215587 5215592 +
gtcactttgttttcagacctct

SEQ ID NO: 82377 - DNA, 22 bp, Artificial Sequence
  Synthetic oligonucleotide; CTT chr11 5215577 5215598 5215594 5215599 +
tgttttcagacctcttgttatc

SEQ ID NO: 82378 - DNA, 22 bp, Artificial Sequence
  Synthetic oligonucleotide; TTT chr11 5215578 5215599 5215595 5215600 +
gttttcagacctcttgttatct

SEQ ID NO: 82379 - DNA, 22 bp, Artificial Sequence
  Synthetic oligonucleotide; TTG chr11 5215579 5215600 5215596 5215601 +
ttttcagacctcttgttatctt

SEQ ID NO: 82380 - DNA, 22 bp, Artificial Sequence
  Synthetic oligonucleotide; TTT chr11 5215582 5215603 5215599 5215604 +
tcagacctcttgttatctttaa

SEQ ID NO: 82381 - DNA, 22 bp, Artificial Sequence
  Synthetic oligonucleotide; TTT chr11 5215583 5215604 5215600 5215605 +
cagacctcttgttatctttaat

SEQ ID NO: 82382 - DNA, 22 bp, Artificial Sequence
  Synthetic oligonucleotide; TTC chr11 5215584 5215605 5215601 5215606 +
agacctcttgttatctttaatc

SEQ ID NO: 82383 - DNA, 22 bp, Artificial Sequence
  Synthetic oligonucleotide; CTC chr11 5215591 5215612 5215608 5215613 +
ttgttatctttaatcatttttc

SEQ ID NO: 82384 - DNA, 22 bp, Artificial Sequence
  Synthetic oligonucleotide; CTT chr11 5215593 5215614 5215610 5215615 +
gttatctttaatcatttttcac

SEQ ID NO: 82385 - DNA, 22 bp, Artificial Sequence
  Synthetic oligonucleotide; TTG chr11 5215594 5215615 5215611 5215616 +
ttatctttaatcatttttcacc

SEQ ID NO: 82386 - DNA, 22 bp, Artificial Sequence
  Synthetic oligonucleotide; TTA chr11 5215597 5215618 5215614 5215619 +
tctttaatcatttttcacctct

SEQ ID NO: 82387 - DNA, 22 bp, Artificial Sequence
  Synthetic oligonucleotide; CTT chr11 5215601 5215622 5215618 5215623 +
taatcatttttcacctctgact

SEQ ID NO: 82388 - DNA, 22 bp, Artificial Sequence
  Synthetic oligonucleotide; TTT chr11 5215602 5215623 5215619 5215624 +
aatcatttttcacctctgactt

SEQ ID NO: 82389 - DNA, 22 bp, Artificial Sequence
  Synthetic oligonucleotide; TTA chr11 5215603 5215624 5215620 5215625 +
atcatttttcacctctgacttg

SEQ ID NO: 82390 - DNA, 22 bp, Artificial Sequence
  Synthetic oligonucleotide; TTT chr11 5215610 5215631 5215627 5215632 +
ttcacctctgacttgacctccc

SEQ ID NO: 82391 - DNA, 22 bp, Artificial Sequence
  Synthetic oligonucleotide; TTT chr11 5215611 5215632 5215628 5215633 +
tcacctctgacttgacctccca

SEQ ID NO: 82392 - DNA, 22 bp, Artificial Sequence
  Synthetic oligonucleotide; TTT chr11 5215612 5215633 5215629 5215634 +
cacctctgacttgacctcccag

SEQ ID NO: 82393 - DNA, 22 bp, Artificial Sequence
  Synthetic oligonucleotide; TTC chr11 5215613 5215634 5215630 5215635 +
acctctgacttgacctcccagt

SEQ ID NO: 82394 - DNA, 22 bp, Artificial Sequence
  Synthetic oligonucleotide; CTC chr11 5215618 5215639 5215635 5215640 +
tgacttgacctcccagttgtca

SEQ ID NO: 82395 - DNA, 22 bp, Artificial Sequence
  Synthetic oligonucleotide; CTG chr11 5215620 5215641 5215637 5215642 +
acttgacctcccagttgtcaaa

SEQ ID NO: 82396 - DNA, 22 bp, Artificial Sequence
  Synthetic oligonucleotide; CTT chr11 5215624 5215645 5215641 5215646 +
gacctcccagttgtcaaatatt

SEQ ID NO: 82397 - DNA, 22 bp, Artificial Sequence
  Synthetic oligonucleotide; TTG chr11 5215625 5215646 5215642 5215647 +
acctcccagttgtcaaatattt

SEQ ID NO: 82398 - DNA, 22 bp, Artificial Sequence
  Synthetic oligonucleotide; CTC chr11 5215630 5215651 5215647 5215652 +
ccagttgtcaaatatttgactt

SEQ ID NO: 82399 - DNA, 22 bp, Artificial Sequence
  Synthetic oligonucleotide; TTG chr11 5215637 5215658 5215654 5215659 +
tcaaatatttgacttaatggga

SEQ ID NO: 82400 - DNA, 22 bp, Artificial Sequence
  Synthetic oligonucleotide; TTT chr11 5215647 5215668 5215664 5215669 +
gacttaatgggagactttcccc

SEQ ID NO: 82401 - DNA, 22 bp, Artificial Sequence
  Synthetic oligonucleotide; TTG chr11 5215648 5215669 5215665 5215670 +
acttaatgggagactttcccct

SEQ ID NO: 82402 - DNA, 22 bp, Artificial Sequence
  Synthetic oligonucleotide; CTT chr11 5215652 5215673 5215669 5215674 +
aatgggagactttcccctagct

SEQ ID NO: 82403 - DNA, 22 bp, Artificial Sequence
  Synthetic oligonucleotide; TTA chr11 5215653 5215674 5215670 5215675 +
atgggagactttcccctagctt

SEQ ID NO: 82404 - DNA, 22 bp, Artificial Sequence
  Synthetic oligonucleotide; CTT chr11 5215664 5215685 5215681 5215686 +
tcccctagcttgttgattccag

SEQ ID NO: 82405 - DNA, 22 bp, Artificial Sequence
  Synthetic oligonucleotide; TTT chr11 5215665 5215686 5215682 5215687 +
cccctagcttgttgattccaga

SEQ ID NO: 82406 - DNA, 22 bp, Artificial Sequence
  Synthetic oligonucleotide; TTC chr11 5215666 5215687 5215683 5215688 +
ccctagcttgttgattccagaa

SEQ ID NO: 82407 - DNA, 22 bp, Artificial Sequence
  Synthetic oligonucleotide; CTA chr11 5215671 5215692 5215688 5215693 +
gcttgttgattccagaaattca

SEQ ID NO: 82408 - DNA, 22 bp, Artificial Sequence
  Synthetic oligonucleotide; CTT chr11 5215675 5215696 5215692 5215697 +
gttgattccagaaattcaactt

SEQ ID NO: 82409 - DNA, 22 bp, Artificial Sequence
  Synthetic oligonucleotide; TTG chr11 5215676 5215697 5215693 5215698 +
ttgattccagaaattcaacttt

SEQ ID NO: 82410 - DNA, 22 bp, Artificial Sequence
  Synthetic oligonucleotide; TTG chr11 5215679 5215700 5215696 5215701 +
attccagaaattcaactttatt

SEQ ID NO: 82411 - DNA, 22 bp, Artificial Sequence
  Synthetic oligonucleotide; TTC chr11 5215683 5215704 5215700 5215705 +
cagaaattcaactttattctag

SEQ ID NO: 82412 - DNA, 22 bp, Artificial Sequence
  Synthetic oligonucleotide; TTC chr11 5215692 5215713 5215709 5215714 +
aactttattctaggcttggctc

SEQ ID NO: 82413 - DNA, 22 bp, Artificial Sequence
  Synthetic oligonucleotide; CTT chr11 5215697 5215718 5215714 5215719 +
tattctaggcttggctcctgtt

SEQ ID NO: 82414 - DNA, 22 bp, Artificial Sequence
  Synthetic oligonucleotide; TTT chr11 5215698 5215719 5215715 5215720 +
attctaggcttggctcctgttt

SEQ ID NO: 82415 - DNA, 22 bp, Artificial Sequence
  Synthetic oligonucleotide; TTA chr11 5215699 5215720 5215716 5215721 +
ttctaggcttggctcctgttta

SEQ ID NO: 82416 - DNA, 22 bp, Artificial Sequence
  Synthetic oligonucleotide; TTC chr11 5215702 5215723 5215719 5215724 +
taggcttggctcctgtttagta

SEQ ID NO: 82417 - DNA, 22 bp, Artificial Sequence
  Synthetic oligonucleotide; CTA chr11 5215704 5215725 5215721 5215726 +
ggcttggctcctgtttagtatt

SEQ ID NO: 82418 - DNA, 22 bp, Artificial Sequence
  Synthetic oligonucleotide; CTT chr11 5215709 5215730 5215726 5215731 +
ggctcctgtttagtattgctgc

SEQ ID NO: 82419 - DNA, 22 bp, Artificial Sequence
  Synthetic oligonucleotide; TTG chr11 5215710 5215731 5215727 5215732 +
gctcctgtttagtattgctgct

SEQ ID NO: 82420 - DNA, 22 bp, Artificial Sequence
  Synthetic oligonucleotide; CTC chr11 5215714 5215735 5215731 5215736 +
ctgtttagtattgctgctttga

SEQ ID NO: 82421 - DNA, 22 bp, Artificial Sequence
  Synthetic oligonucleotide; CTG chr11 5215717 5215738 5215734 5215739 +
tttagtattgctgctttgagat

SEQ ID NO: 82422 - DNA, 22 bp, Artificial Sequence
  Synthetic oligonucleotide; TTT chr11 5215720 5215741 5215737 5215742 +
agtattgctgctttgagattgt

SEQ ID NO: 82423 - DNA, 22 bp, Artificial Sequence
  Synthetic oligonucleotide; TTA chr11 5215721 5215742 5215738 5215743 +
gtattgctgctttgagattgtt

SEQ ID NO: 82424 - DNA, 22 bp, Artificial Sequence
  Synthetic oligonucleotide; TTG chr11 5215727 5215748 5215744 5215749 +
ctgctttgagattgttctggtt

SEQ ID NO: 82425 - DNA, 22 bp, Artificial Sequence
  Synthetic oligonucleotide; CTG chr11 5215730 5215751 5215747 5215752 +
ctttgagattgttctggttcat

SEQ ID NO: 82426 - DNA, 22 bp, Artificial Sequence
  Synthetic oligonucleotide; CTT chr11 5215733 5215754 5215750 5215755 +
tgagattgttctggttcatgaa

SEQ ID NO: 82427 - DNA, 22 bp, Artificial Sequence
  Synthetic oligonucleotide; TTT chr11 5215734 5215755 5215751 5215756 +
gagattgttctggttcatgaaa

SEQ ID NO: 82428 - DNA, 22 bp, Artificial Sequence
  Synthetic oligonucleotide; TTG chr11 5215735 5215756 5215752 5215757 +
agattgttctggttcatgaaaa

SEQ ID NO: 82429 - DNA, 22 bp, Artificial Sequence
  Synthetic oligonucleotide; TTG chr11 5215741 5215762 5215758 5215763 +
ttctggttcatgaaaaacaagt

SEQ ID NO: 82430 - DNA, 22 bp, Artificial Sequence
  Synthetic oligonucleotide; TTC chr11 5215744 5215765 5215761 5215766 +
tggttcatgaaaaacaagtctc

SEQ ID NO: 82431 - DNA, 22 bp, Artificial Sequence
  Synthetic oligonucleotide; CTG chr11 5215746 5215767 5215763 5215768 +
gttcatgaaaaacaagtctcca

SEQ ID NO: 82432 - DNA, 22 bp, Artificial Sequence
  Synthetic oligonucleotide; TTC chr11 5215750 5215771 5215767 5215772 +
atgaaaaacaagtctccaaaat

SEQ ID NO: 82433 - DNA, 22 bp, Artificial Sequence
  Synthetic oligonucleotide; CTC chr11 5215766 5215787 5215783 5215788 +
caaaattttctacttctcaata

SEQ ID NO: 82434 - DNA, 22 bp, Artificial Sequence
  Synthetic oligonucleotide; TTT chr11 5215774 5215795 5215791 5215796 +
tctacttctcaatattgccatt

SEQ ID NO: 82435 - DNA, 22 bp, Artificial Sequence
  Synthetic oligonucleotide; TTT chr11 5215775 5215796 5215792 5215797 +
ctacttctcaatattgccattt

SEQ ID NO: 82436 - DNA, 22 bp, Artificial Sequence
  Synthetic oligonucleotide; TTC chr11 5215776 5215797 5215793 5215798 +
tacttctcaatattgccattta

SEQ ID NO: 82437 - DNA, 22 bp, Artificial Sequence
  Synthetic oligonucleotide; CTA chr11 5215778 5215799 5215795 5215800 +
cttctcaatattgccatttact

SEQ ID NO: 82438 - DNA, 22 bp, Artificial Sequence
  Synthetic oligonucleotide; CTT chr11 5215781 5215802 5215798 5215803 +
ctcaatattgccatttactaaa

SEQ ID NO: 82439 - DNA, 22 bp, Artificial Sequence
  Synthetic oligonucleotide; TTC chr11 5215782 5215803 5215799 5215804 +
tcaatattgccatttactaaat

SEQ ID NO: 82440 - DNA, 22 bp, Artificial Sequence
  Synthetic oligonucleotide; CTC chr11 5215784 5215805 5215801 5215806 +
aatattgccatttactaaattc

SEQ ID NO: 82441 - DNA, 22 bp, Artificial Sequence
  Synthetic oligonucleotide; TTG chr11 5215791 5215812 5215808 5215813 +
ccatttactaaattcttataaa

SEQ ID NO: 82442 - DNA, 22 bp, Artificial Sequence
  Synthetic oligonucleotide; TTT chr11 5215797 5215818 5215814 5215819 +
actaaattcttataaacaaata

SEQ ID NO: 82443 - DNA, 22 bp, Artificial Sequence
  Synthetic oligonucleotide; TTA chr11 5215798 5215819 5215815 5215820 +
ctaaattcttataaacaaataa

SEQ ID NO: 82444 - DNA, 22 bp, Artificial Sequence
  Synthetic oligonucleotide; CTA chr11 5215801 5215822 5215818 5215823 +
aattcttataaacaaataagaa

SEQ ID NO: 82445 - DNA, 22 bp, Artificial Sequence
  Synthetic oligonucleotide; TTC chr11 5215806 5215827 5215823 5215828 +
ttataaacaaataagaaggaag

SEQ ID NO: 82446 - DNA, 22 bp, Artificial Sequence
  Synthetic oligonucleotide; CTT chr11 5215808 5215829 5215825 5215830 +
ataaacaaataagaaggaagac

SEQ ID NO: 82447 - DNA, 22 bp, Artificial Sequence
  Synthetic oligonucleotide; TTA chr11 5215809 5215830 5215826 5215831 +
taaacaaataagaaggaagact

SEQ ID NO: 82448 - DNA, 22 bp, Artificial Sequence
  Synthetic oligonucleotide; CTC chr11 5215832 5215853 5215849 5215854 +
tcagaaatatatggagagactg

SEQ ID NO: 82449 - DNA, 22 bp, Artificial Sequence
  Synthetic oligonucleotide; CTC chr11 5215834 5215855 5215851 5215856 +
agaaatatatggagagactgag

SEQ ID NO: 82450 - DNA, 22 bp, Artificial Sequence
  Synthetic oligonucleotide; CTG chr11 5215854 5215875 5215871 5215876 +
aggttagagttgagcaaggcct

SEQ ID NO: 82451 - DNA, 22 bp, Artificial Sequence
  Synthetic oligonucleotide; TTA chr11 5215860 5215881 5215877 5215882 +
gagttgagcaaggcctgaaatt

SEQ ID NO: 82452 - DNA, 22 bp, Artificial Sequence
  Synthetic oligonucleotide; TTG chr11 5215866 5215887 5215883 5215888 +
agcaaggcctgaaattttgtca

SEQ ID NO: 82453 - DNA, 22 bp, Artificial Sequence
  Synthetic oligonucleotide; CTG chr11 5215877 5215898 5215894 5215899 +
aaattttgtcacaactaatcta

SEQ ID NO: 82454 - DNA, 22 bp, Artificial Sequence
  Synthetic oligonucleotide; TTT chr11 5215883 5215904 5215900 5215905 +
tgtcacaactaatctagttgaa

SEQ ID NO: 82455 - DNA, 22 bp, Artificial Sequence
  Synthetic oligonucleotide; TTT chr11 5215884 5215905 5215901 5215906 +
gtcacaactaatctagttgaag

SEQ ID NO: 82456 - DNA, 22 bp, Artificial Sequence
  Synthetic oligonucleotide; TTG chr11 5215885 5215906 5215902 5215907 +
tcacaactaatctagttgaagg

SEQ ID NO: 82457 - DNA, 22 bp, Artificial Sequence
  Synthetic oligonucleotide; CTA chr11 5215894 5215915 5215911 5215916 +
atctagttgaaggaatgttaac

SEQ ID NO: 82458 - DNA, 22 bp, Artificial Sequence
  Synthetic oligonucleotide; CTA chr11 5215899 5215920 5215916 5215921 +
gttgaaggaatgttaactgact

SEQ ID NO: 82459 - DNA, 22 bp, Artificial Sequence
  Synthetic oligonucleotide; TTG chr11 5215903 5215924 5215920 5215925 +
aaggaatgttaactgactgaga

SEQ ID NO: 82460 - DNA, 22 bp, Artificial Sequence
  Synthetic oligonucleotide; TTA chr11 5215914 5215935 5215931 5215936 +
actgactgagaaaacactaaat

SEQ ID NO: 82461 - DNA, 22 bp, Artificial Sequence
  Synthetic oligonucleotide; CTG chr11 5215918 5215939 5215935 5215940 +
actgagaaaacactaaatttct

SEQ ID NO: 82462 - DNA, 22 bp, Artificial Sequence
  Synthetic oligonucleotide; CTG chr11 5215922 5215943 5215939 5215944 +
agaaaacactaaatttctgtct

SEQ ID NO: 82463 - DNA, 22 bp, Artificial Sequence
  Synthetic oligonucleotide; CTA chr11 5215933 5215954 5215950 5215955 +
aatttctgtctatttcaaagag

SEQ ID NO: 82464 - DNA, 22 bp, Artificial Sequence
  Synthetic oligonucleotide; TTT chr11 5215938 5215959 5215955 5215960 +
ctgtctatttcaaagagaaaga

SEQ ID NO: 82465 - DNA, 22 bp, Artificial Sequence
  Synthetic oligonucleotide; TTC chr11 5215939 5215960 5215956 5215961 +
tgtctatttcaaagagaaagac

SEQ ID NO: 82466 - DNA, 22 bp, Artificial Sequence
  Synthetic oligonucleotide; CTG chr11 5215941 5215962 5215958 5215963 +
tctatttcaaagagaaagactt

SEQ ID NO: 82467 - DNA, 22 bp, Artificial Sequence
  Synthetic oligonucleotide; CTA chr11 5215945 5215966 5215962 5215967 +
tttcaaagagaaagacttgata

SEQ ID NO: 82468 - DNA, 22 bp, Artificial Sequence
  Synthetic oligonucleotide; TTT chr11 5215948 5215969 5215965 5215970 +
caaagagaaagacttgataatg

SEQ ID NO: 82469 - DNA, 22 bp, Artificial Sequence
  Synthetic oligonucleotide; TTC chr11 5215949 5215970 5215966 5215971 +
aaagagaaagacttgataatgg

SEQ ID NO: 82470 - DNA, 22 bp, Artificial Sequence
  Synthetic oligonucleotide; CTT chr11 5215963 5215984 5215980 5215985 +
gataatggctctacggatgtgt

SEQ ID NO: 82471 - DNA, 22 bp, Artificial Sequence
  Synthetic oligonucleotide; TTG chr11 5215964 5215985 5215981 5215986 +
ataatggctctacggatgtgtg

SEQ ID NO: 82472 - DNA, 22 bp, Artificial Sequence
  Synthetic oligonucleotide; CTC chr11 5215974 5215995 5215991 5215996 +
tacggatgtgtgagatcagttt

SEQ ID NO: 82473 - DNA, 22 bp, Artificial Sequence
  Synthetic oligonucleotide; CTA chr11 5215976 5215997 5215993 5215998 +
cggatgtgtgagatcagtttta

SEQ ID NO: 82474 - DNA, 22 bp, Artificial Sequence
  Synthetic oligonucleotide; TTT chr11 5215996 5216017 5216013 5216018 +
taataggataacttttttttat

SEQ ID NO: 82475 - DNA, 22 bp, Artificial Sequence
  Synthetic oligonucleotide; TTT chr11 5215997 5216018 5216014 5216019 +
aataggataacttttttttatt

SEQ ID NO: 82476 - DNA, 22 bp, Artificial Sequence
  Synthetic oligonucleotide; TTA chr11 5215998 5216019 5216015 5216020 +
ataggataacttttttttatta

SEQ ID NO: 82477 - DNA, 22 bp, Artificial Sequence
  Synthetic oligonucleotide; CTT chr11 5216010 5216031 5216027 5216032 +
ttttttattattatacttcaag

SEQ ID NO: 82478 - DNA, 22 bp, Artificial Sequence
  Synthetic oligonucleotide; TTT chr11 5216011 5216032 5216028 5216033 +
tttttattattatacttcaagt

SEQ ID NO: 82479 - DNA, 22 bp, Artificial Sequence
  Synthetic oligonucleotide; TTT chr11 5216012 5216033 5216029 5216034 +
ttttattattatacttcaagtt

SEQ ID NO: 82480 - DNA, 22 bp, Artificial Sequence
  Synthetic oligonucleotide; TTT chr11 5216013 5216034 5216030 5216035 +
tttattattatacttcaagttt

SEQ ID NO: 82481 - DNA, 22 bp, Artificial Sequence
  Synthetic oligonucleotide; TTT chr11 5216014 5216035 5216031 5216036 +
ttattattatacttcaagtttt

SEQ ID NO: 82482 - DNA, 22 bp, Artificial Sequence
  Synthetic oligonucleotide; TTT chr11 5216015 5216036 5216032 5216037 +
tattattatacttcaagtttta

SEQ ID NO: 82483 - DNA, 22 bp, Artificial Sequence
  Synthetic oligonucleotide; TTT chr11 5216016 5216037 5216033 5216038 +
attattatacttcaagttttag

SEQ ID NO: 82484 - DNA, 22 bp, Artificial Sequence
  Synthetic oligonucleotide; TTA chr11 5216017 5216038 5216034 5216039 +
ttattatacttcaagttttagg

SEQ ID NO: 82485 - DNA, 22 bp, Artificial Sequence
  Synthetic oligonucleotide; TTA chr11 5216020 5216041 5216037 5216042 +
ttatacttcaagttttagggta

SEQ ID NO: 82486 - DNA, 22 bp, Artificial Sequence
  Synthetic oligonucleotide; TTA chr11 5216023 5216044 5216040 5216045 +
tacttcaagttttagggtacat

SEQ ID NO: 82487 - DNA, 22 bp, Artificial Sequence
  Synthetic oligonucleotide; CTT chr11 5216028 5216049 5216045 5216050 +
caagttttagggtacatgtgca

SEQ ID NO: 82488 - DNA, 22 bp, Artificial Sequence
  Synthetic oligonucleotide; TTC chr11 5216029 5216050 5216046 5216051 +
aagttttagggtacatgtgcac

SEQ ID NO: 82489 - DNA, 22 bp, Artificial Sequence
  Synthetic oligonucleotide; TTT chr11 5216035 5216056 5216052 5216057 +
tagggtacatgtgcacaacatg

SEQ ID NO: 82490 - DNA, 22 bp, Artificial Sequence
  Synthetic oligonucleotide; TTT chr11 5216036 5216057 5216053 5216058 +
agggtacatgtgcacaacatgc

SEQ ID NO: 82491 - DNA, 22 bp, Artificial Sequence
  Synthetic oligonucleotide; TTA chr11 5216037 5216058 5216054 5216059 +
gggtacatgtgcacaacatgca

SEQ ID NO: 82492 - DNA, 22 bp, Artificial Sequence
  Synthetic oligonucleotide; TTT chr11 5216064 5216085 5216081 5216086 +
gttatatatgtatacatgtgcc

SEQ ID NO: 82493 - DNA, 22 bp, Artificial Sequence
  Synthetic oligonucleotide; TTG chr11 5216065 5216086 5216082 5216087 +
ttatatatgtatacatgtgcca

SEQ ID NO: 82494 - DNA, 22 bp, Artificial Sequence
  Synthetic oligonucleotide; TTA chr11 5216068 5216089 5216085 5216090 +
tatatgtatacatgtgccatgt

SEQ ID NO: 82495 - DNA, 22 bp, Artificial Sequence
  Synthetic oligonucleotide; TTG chr11 5216092 5216113 5216109 5216114 +
gtgtgctgcacccattaactcg

SEQ ID NO: 82496 - DNA, 22 bp, Artificial Sequence
  Synthetic oligonucleotide; CTG chr11 5216100 5216121 5216117 5216122 +
cacccattaactcgtcatttag

SEQ ID NO: 82497 - DNA, 22 bp, Artificial Sequence
  Synthetic oligonucleotide; TTA chr11 5216109 5216130 5216126 5216131 +
actcgtcatttagcattaggta

SEQ ID NO: 82498 - DNA, 22 bp, Artificial Sequence
  Synthetic oligonucleotide; CTC chr11 5216113 5216134 5216130 5216135 +
gtcatttagcattaggtatatc

SEQ ID NO: 82499 - DNA, 22 bp, Artificial Sequence
  Synthetic oligonucleotide; TTT chr11 5216120 5216141 5216137 5216142 +
agcattaggtatatctcctagt

SEQ ID NO: 82500 - DNA, 22 bp, Artificial Sequence
  Synthetic oligonucleotide; TTA chr11 5216121 5216142 5216138 5216143 +
gcattaggtatatctcctagtg

SEQ ID NO: 82501 - DNA, 22 bp, Artificial Sequence
  Synthetic oligonucleotide; TTA chr11 5216127 5216148 5216144 5216149 +
ggtatatctcctagtgctatcc

SEQ ID NO: 82502 - DNA, 22 bp, Artificial Sequence
  Synthetic oligonucleotide; CTC chr11 5216137 5216158 5216154 5216159 +
ctagtgctatccctgcccctgc

SEQ ID NO: 82503 - DNA, 22 bp, Artificial Sequence
  Synthetic oligonucleotide; CTA chr11 5216140 5216161 5216157 5216162 +
gtgctatccctgcccctgcccc

SEQ ID NO: 82504 - DNA, 22 bp, Artificial Sequence
  Synthetic oligonucleotide; CTA chr11 5216146 5216167 5216163 5216168 +
tccctgcccctgccccccaccc

SEQ ID NO: 82505 - DNA, 22 bp, Artificial Sequence
  Synthetic oligonucleotide; CTG chr11 5216152 5216173 5216169 5216174 +
cccctgccccccaccccataac

SEQ ID NO: 82506 - DNA, 22 bp, Artificial Sequence
  Synthetic oligonucleotide; CTG chr11 5216158 5216179 5216175 5216180 +
ccccccaccccataacagtccc

SEQ ID NO: 82507 - DNA, 22 bp, Artificial Sequence
  Synthetic oligonucleotide; TTC chr11 5216195 5216216 5216212 5216217 +
ctcttcatgtgtccatgtgttc

SEQ ID NO: 82508 - DNA, 22 bp, Artificial Sequence
  Synthetic oligonucleotide; CTC chr11 5216198 5216219 5216215 5216220 +
ttcatgtgtccatgtgttctca

SEQ ID NO: 82509 - DNA, 22 bp, Artificial Sequence
  Synthetic oligonucleotide; CTT chr11 5216200 5216221 5216217 5216222 +
catgtgtccatgtgttctcatt

SEQ ID NO: 82510 - DNA, 22 bp, Artificial Sequence
  Synthetic oligonucleotide; TTC chr11 5216201 5216222 5216218 5216223 +
atgtgtccatgtgttctcattg

SEQ ID NO: 82511 - DNA, 22 bp, Artificial Sequence
  Synthetic oligonucleotide; TTC chr11 5216217 5216238 5216234 5216239 +
tcattgttcaattcccacctat

SEQ ID NO: 82512 - DNA, 22 bp, Artificial Sequence
  Synthetic oligonucleotide; CTC chr11 5216219 5216240 5216236 5216241 +
attgttcaattcccacctatga

SEQ ID NO: 82513 - DNA, 22 bp, Artificial Sequence
  Synthetic oligonucleotide; TTG chr11 5216223 5216244 5216240 5216245 +
ttcaattcccacctatgagtga

SEQ ID NO: 82514 - DNA, 22 bp, Artificial Sequence
  Synthetic oligonucleotide; TTC chr11 5216226 5216247 5216243 5216248 +
aattcccacctatgagtgagaa

SEQ ID NO: 82515 - DNA, 22 bp, Artificial Sequence
  Synthetic oligonucleotide; TTC chr11 5216231 5216252 5216248 5216253 +
ccacctatgagtgagaacatgc

SEQ ID NO: 82516 - DNA, 22 bp, Artificial Sequence
  Synthetic oligonucleotide; CTA chr11 5216238 5216259 5216255 5216260 +
tgagtgagaacatgcggtgttt

SEQ ID NO: 82517 - DNA, 22 bp, Artificial Sequence
  Synthetic oligonucleotide; TTT chr11 5216260 5216281 5216277 5216282 +
ggtttattctccttgtgatagt

SEQ ID NO: 82518 - DNA, 22 bp, Artificial Sequence
  Synthetic oligonucleotide; TTG chr11 5216261 5216282 5216278 5216283 +
gtttattctccttgtgatagtt

SEQ ID NO: 82519 - DNA, 22 bp, Artificial Sequence
  Synthetic oligonucleotide; TTT chr11 5216265 5216286 5216282 5216287 +
attctccttgtgatagtttgct

SEQ ID NO: 82520 - DNA, 22 bp, Artificial Sequence
  Synthetic oligonucleotide; TTA chr11 5216266 5216287 5216283 5216288 +
ttctccttgtgatagtttgctg

SEQ ID NO: 82521 - DNA, 22 bp, Artificial Sequence
  Synthetic oligonucleotide; TTC chr11 5216269 5216290 5216286 5216291 +
tccttgtgatagtttgctgaga

SEQ ID NO: 82522 - DNA, 22 bp, Artificial Sequence
  Synthetic oligonucleotide; CTC chr11 5216271 5216292 5216288 5216293 +
cttgtgatagtttgctgagaat

SEQ ID NO: 82523 - DNA, 22 bp, Artificial Sequence
  Synthetic oligonucleotide; CTT chr11 5216274 5216295 5216291 5216296 +
gtgatagtttgctgagaatgat

SEQ ID NO: 82524 - DNA, 22 bp, Artificial Sequence
  Synthetic oligonucleotide; TTG chr11 5216275 5216296 5216292 5216297 +
tgatagtttgctgagaatgata

SEQ ID NO: 82525 - DNA, 22 bp, Artificial Sequence
  Synthetic oligonucleotide; TTT chr11 5216284 5216305 5216301 5216306 +
gctgagaatgatagtttccagc

SEQ ID NO: 82526 - DNA, 22 bp, Artificial Sequence
  Synthetic oligonucleotide; TTG chr11 5216285 5216306 5216302 5216307 +
ctgagaatgatagtttccagct

SEQ ID NO: 82527 - DNA, 22 bp, Artificial Sequence
  Synthetic oligonucleotide; CTG chr11 5216288 5216309 5216305 5216310 +
agaatgatagtttccagcttca

SEQ ID NO: 82528 - DNA, 22 bp, Artificial Sequence
  Synthetic oligonucleotide; TTT chr11 5216301 5216322 5216318 5216323 +
ccagcttcatccatgtccctac

SEQ ID NO: 82529 - DNA, 22 bp, Artificial Sequence
  Synthetic oligonucleotide; TTC chr11 5216302 5216323 5216319 5216324 +
cagcttcatccatgtccctaca

SEQ ID NO: 82530 - DNA, 22 bp, Artificial Sequence
  Synthetic oligonucleotide; CTT chr11 5216308 5216329 5216325 5216330 +
catccatgtccctacaaaggac

SEQ ID NO: 82531 - DNA, 22 bp, Artificial Sequence
  Synthetic oligonucleotide; TTC chr11 5216309 5216330 5216326 5216331 +
atccatgtccctacaaaggaca

SEQ ID NO: 82532 - DNA, 22 bp, Artificial Sequence
  Synthetic oligonucleotide; CTA chr11 5216322 5216343 5216339 5216344 +
caaaggacatgaactcatcatt

SEQ ID NO: 82533 - DNA, 22 bp, Artificial Sequence
  Synthetic oligonucleotide; CTC chr11 5216338 5216359 5216355 5216360 +
atcattttttatggctgcatag

SEQ ID NO: 82534 - DNA, 22 bp, Artificial Sequence
  Synthetic oligonucleotide; TTT chr11 5216345 5216366 5216362 5216367 +
tttatggctgcatagtattcca

SEQ ID NO: 82535 - DNA, 22 bp, Artificial Sequence
  Synthetic oligonucleotide; TTT chr11 5216346 5216367 5216363 5216368 +
ttatggctgcatagtattccat

SEQ ID NO: 82536 - DNA, 22 bp, Artificial Sequence
  Synthetic oligonucleotide; TTT chr11 5216347 5216368 5216364 5216369 +
tatggctgcatagtattccatg

SEQ ID NO: 82537 - DNA, 22 bp, Artificial Sequence
  Synthetic oligonucleotide; TTT chr11 5216348 5216369 5216365 5216370 +
atggctgcatagtattccatgg

SEQ ID NO: 82538 - DNA, 22 bp, Artificial Sequence
  Synthetic oligonucleotide; TTA chr11 5216349 5216370 5216366 5216371 +
tggctgcatagtattccatggt

SEQ ID NO: 82539 - DNA, 22 bp, Artificial Sequence
  Synthetic oligonucleotide; CTG chr11 5216355 5216376 5216372 5216377 +
catagtattccatggtgtatat

SEQ ID NO: 82540 - DNA, 22 bp, Artificial Sequence
  Synthetic oligonucleotide; TTC chr11 5216365 5216386 5216382 5216387 +
catggtgtatatgtgccacatt

SEQ ID NO: 82541 - DNA, 22 bp, Artificial Sequence
  Synthetic oligonucleotide; TTT chr11 5216388 5216409 5216405 5216410 +
tcttaatccagtctatcgttgt

SEQ ID NO: 82542 - DNA, 22 bp, Artificial Sequence
  Synthetic oligonucleotide; TTT chr11 5216389 5216410 5216406 5216411 +
cttaatccagtctatcgttgtt

SEQ ID NO: 82543 - DNA, 22 bp, Artificial Sequence
  Synthetic oligonucleotide; TTC chr11 5216390 5216411 5216407 5216412 +
ttaatccagtctatcgttgttg

SEQ ID NO: 82544 - DNA, 22 bp, Artificial Sequence
  Synthetic oligonucleotide; CTT chr11 5216392 5216413 5216409 5216414 +
aatccagtctatcgttgttgga

SEQ ID NO: 82545 - DNA, 22 bp, Artificial Sequence
  Synthetic oligonucleotide; TTA chr11 5216393 5216414 5216410 5216415 +
atccagtctatcgttgttggac

SEQ ID NO: 82546 - DNA, 22 bp, Artificial Sequence
  Synthetic oligonucleotide; CTA chr11 5216403 5216424 5216420 5216425 +
tcgttgttggacatttgggttg

SEQ ID NO: 82547 - DNA, 22 bp, Artificial Sequence
  Synthetic oligonucleotide; TTG chr11 5216409 5216430 5216426 5216431 +
ttggacatttgggttggttcca

SEQ ID NO: 82548 - DNA, 22 bp, Artificial Sequence
  Synthetic oligonucleotide; TTG chr11 5216412 5216433 5216429 5216434 +
gacatttgggttggttccaagt

SEQ ID NO: 82549 - DNA, 22 bp, Artificial Sequence
  Synthetic oligonucleotide; TTT chr11 5216419 5216440 5216436 5216441 +
gggttggttccaagtctttgct

SEQ ID NO: 82550 - DNA, 22 bp, Artificial Sequence
  Synthetic oligonucleotide; TTG chr11 5216420 5216441 5216437 5216442 +
ggttggttccaagtctttgcta

SEQ ID NO: 82551 - DNA, 22 bp, Artificial Sequence
  Synthetic oligonucleotide; TTG chr11 5216425 5216446 5216442 5216447 +
gttccaagtctttgctattgtg

SEQ ID NO: 82552 - DNA, 22 bp, Artificial Sequence
  Synthetic oligonucleotide; TTC chr11 5216429 5216450 5216446 5216451 +
caagtctttgctattgtgaata

SEQ ID NO: 82553 - DNA, 22 bp, Artificial Sequence
  Synthetic oligonucleotide; CTT chr11 5216437 5216458 5216454 5216459 +
tgctattgtgaatagtgctgca

SEQ ID NO: 82554 - DNA, 22 bp, Artificial Sequence
  Synthetic oligonucleotide; TTT chr11 5216438 5216459 5216455 5216460 +
gctattgtgaatagtgctgcaa

SEQ ID NO: 82555 - DNA, 22 bp, Artificial Sequence
  Synthetic oligonucleotide; TTG chr11 5216439 5216460 5216456 5216461 +
ctattgtgaatagtgctgcaat

SEQ ID NO: 82556 - DNA, 22 bp, Artificial Sequence
  Synthetic oligonucleotide; CTA chr11 5216442 5216463 5216459 5216464 +
ttgtgaatagtgctgcaataaa

SEQ ID NO: 82557 - DNA, 22 bp, Artificial Sequence
  Synthetic oligonucleotide; TTG chr11 5216445 5216466 5216462 5216467 +
tgaatagtgctgcaataaacat

SEQ ID NO: 82558 - DNA, 22 bp, Artificial Sequence
  Synthetic oligonucleotide; CTG chr11 5216457 5216478 5216474 5216479 +
caataaacatacgtgtgcatgt

SEQ ID NO: 82559 - DNA, 22 bp, Artificial Sequence
  Synthetic oligonucleotide; CTT chr11 5216484 5216505 5216501 5216506 +
tatagcagcatgatttataatc

SEQ ID NO: 82560 - DNA, 22 bp, Artificial Sequence
  Synthetic oligonucleotide; TTT chr11 5216485 5216506 5216502 5216507 +
atagcagcatgatttataatcc

SEQ ID NO: 82561 - DNA, 22 bp, Artificial Sequence
  Synthetic oligonucleotide; TTA chr11 5216486 5216507 5216503 5216508 +
tagcagcatgatttataatcct

SEQ ID NO: 82562 - DNA, 22 bp, Artificial Sequence
  Synthetic oligonucleotide; TTT chr11 5216500 5216521 5216517 5216522 +
ataatcctttgggtatgtaccc

SEQ ID NO: 82563 - DNA, 22 bp, Artificial Sequence
  Synthetic oligonucleotide; TTA chr11 5216501 5216522 5216518 5216523 +
taatcctttgggtatgtaccca

SEQ ID NO: 82564 - DNA, 22 bp, Artificial Sequence
  Synthetic oligonucleotide; CTT chr11 5216509 5216530 5216526 5216531 +
tgggtatgtacccagtaatggg

SEQ ID NO: 82565 - DNA, 22 bp, Artificial Sequence
  Synthetic oligonucleotide; TTT chr11 5216510 5216531 5216527 5216532 +
gggtatgtacccagtaatggga

SEQ ID NO: 82566 - DNA, 22 bp, Artificial Sequence
  Synthetic oligonucleotide; TTG chr11 5216511 5216532 5216528 5216533 +
ggtatgtacccagtaatgggat

SEQ ID NO: 82567 - DNA, 22 bp, Artificial Sequence
  Synthetic oligonucleotide; CTG chr11 5216538 5216559 5216555 5216560 +
ggtcaaatggtatttctagttc

SEQ ID NO: 82568 - DNA, 22 bp, Artificial Sequence
  Synthetic oligonucleotide; TTT chr11 5216553 5216574 5216570 5216575 +
ctagttctagattcctgaggaa

SEQ ID NO: 82569 - DNA, 22 bp, Artificial Sequence
  Synthetic oligonucleotide; TTC chr11 5216554 5216575 5216571 5216576 +
tagttctagattcctgaggaat

SEQ ID NO: 82570 - DNA, 22 bp, Artificial Sequence
  Synthetic oligonucleotide; CTA chr11 5216556 5216577 5216573 5216578 +
gttctagattcctgaggaattg

SEQ ID NO: 82571 - DNA, 22 bp, Artificial Sequence
  Synthetic oligonucleotide; TTC chr11 5216560 5216581 5216577 5216582 +
tagattcctgaggaattgccac

SEQ ID NO: 82572 - DNA, 22 bp, Artificial Sequence
  Synthetic oligonucleotide; CTA chr11 5216562 5216583 5216579 5216584 +
gattcctgaggaattgccacac

SEQ ID NO: 82573 - DNA, 22 bp, Artificial Sequence
  Synthetic oligonucleotide; TTC chr11 5216567 5216588 5216584 5216589 +
ctgaggaattgccacactgact

SEQ ID NO: 82574 - DNA, 22 bp, Artificial Sequence
  Synthetic oligonucleotide; CTG chr11 5216570 5216591 5216587 5216592 +
aggaattgccacactgacttcc

SEQ ID NO: 82575 - DNA, 22 bp, Artificial Sequence
  Synthetic oligonucleotide; TTG chr11 5216578 5216599 5216595 5216600 +
ccacactgacttccgcaatggt

SEQ ID NO: 82576 - DNA, 22 bp, Artificial Sequence
  Synthetic oligonucleotide; CTG chr11 5216586 5216607 5216603 5216608 +
acttccgcaatggttgaactag

SEQ ID NO: 82577 - DNA, 22 bp, Artificial Sequence
  Synthetic oligonucleotide; CTT chr11 5216590 5216611 5216607 5216612 +
ccgcaatggttgaactagttta

SEQ ID NO: 82578 - DNA, 22 bp, Artificial Sequence
  Synthetic oligonucleotide; TTC chr11 5216591 5216612 5216608 5216613 +
cgcaatggttgaactagtttac

SEQ ID NO: 82579 - DNA, 22 bp, Artificial Sequence
  Synthetic oligonucleotide; TTG chr11 5216602 5216623 5216619 5216624 +
aactagtttacagtcccaccaa

SEQ ID NO: 82580 - DNA, 22 bp, Artificial Sequence
  Synthetic oligonucleotide; CTA chr11 5216607 5216628 5216624 5216629 +
gtttacagtcccaccaacagtg

SEQ ID NO: 82581 - DNA, 22 bp, Artificial Sequence
  Synthetic oligonucleotide; TTT chr11 5216611 5216632 5216628 5216633 +
acagtcccaccaacagtgtaaa

SEQ ID NO: 82582 - DNA, 22 bp, Artificial Sequence
  Synthetic oligonucleotide; TTA chr11 5216612 5216633 5216629 5216634 +
cagtcccaccaacagtgtaaaa

SEQ ID NO: 82583 - DNA, 22 bp, Artificial Sequence
  Synthetic oligonucleotide; TTG chr11 5216638 5216659 5216655 5216660 +
ttcctgtttctccacatcctct

SEQ ID NO: 82584 - DNA, 22 bp, Artificial Sequence
  Synthetic oligonucleotide; TTC chr11 5216641 5216662 5216658 5216663 +
ctgtttctccacatcctctcca

SEQ ID NO: 82585 - DNA, 22 bp, Artificial Sequence
  Synthetic oligonucleotide; CTG chr11 5216644 5216665 5216661 5216666 +
tttctccacatcctctccagca

SEQ ID NO: 82586 - DNA, 22 bp, Artificial Sequence
  Synthetic oligonucleotide; TTT chr11 5216647 5216668 5216664 5216669 +
ctccacatcctctccagcacct

SEQ ID NO: 82587 - DNA, 22 bp, Artificial Sequence
  Synthetic oligonucleotide; TTC chr11 5216648 5216669 5216665 5216670 +
tccacatcctctccagcacctg

SEQ ID NO: 82588 - DNA, 22 bp, Artificial Sequence
  Synthetic oligonucleotide; CTC chr11 5216650 5216671 5216667 5216672 +
cacatcctctccagcacctgtt

SEQ ID NO: 82589 - DNA, 22 bp, Artificial Sequence
  Synthetic oligonucleotide; CTC chr11 5216659 5216680 5216676 5216681 +
tccagcacctgttgtttcctga

SEQ ID NO: 82590 - DNA, 22 bp, Artificial Sequence
  Synthetic oligonucleotide; CTC chr11 5216661 5216682 5216678 5216683 +
cagcacctgttgtttcctgact

SEQ ID NO: 82591 - DNA, 22 bp, Artificial Sequence
  Synthetic oligonucleotide; CTG chr11 5216670 5216691 5216687 5216692 +
ttgtttcctgactttttaatga

SEQ ID NO: 82592 - DNA, 22 bp, Artificial Sequence
  Synthetic oligonucleotide; TTG chr11 5216673 5216694 5216690 5216695 +
tttcctgactttttaatgatcg

SEQ ID NO: 82593 - DNA, 22 bp, Artificial Sequence
  Synthetic oligonucleotide; TTT chr11 5216676 5216697 5216693 5216698 +
cctgactttttaatgatcgcca

SEQ ID NO: 82594 - DNA, 22 bp, Artificial Sequence
  Synthetic oligonucleotide; TTC chr11 5216677 5216698 5216694 5216699 +
ctgactttttaatgatcgccat

SEQ ID NO: 82595 - DNA, 22 bp, Artificial Sequence
  Synthetic oligonucleotide; CTG chr11 5216680 5216701 5216697 5216702 +
actttttaatgatcgccattct

SEQ ID NO: 82596 - DNA, 22 bp, Artificial Sequence
  Synthetic oligonucleotide; CTT chr11 5216684 5216705 5216701 5216706 +
tttaatgatcgccattctaact

SEQ ID NO: 82597 - DNA, 22 bp, Artificial Sequence
  Synthetic oligonucleotide; TTT chr11 5216685 5216706 5216702 5216707 +
ttaatgatcgccattctaactg

SEQ ID NO: 82598 - DNA, 22 bp, Artificial Sequence
  Synthetic oligonucleotide; TTT chr11 5216686 5216707 5216703 5216708 +
taatgatcgccattctaactgg

SEQ ID NO: 82599 - DNA, 22 bp, Artificial Sequence
  Synthetic oligonucleotide; TTT chr11 5216687 5216708 5216704 5216709 +
aatgatcgccattctaactggt

SEQ ID NO: 82600 - DNA, 22 bp, Artificial Sequence
  Synthetic oligonucleotide; TTA chr11 5216688 5216709 5216705 5216710 +
atgatcgccattctaactggtg

SEQ ID NO: 82601 - DNA, 22 bp, Artificial Sequence
  Synthetic oligonucleotide; TTC chr11 5216701 5216722 5216718 5216723 +
taactggtgtgagatggtatct

SEQ ID NO: 82602 - DNA, 22 bp, Artificial Sequence
  Synthetic oligonucleotide; CTA chr11 5216703 5216724 5216720 5216725 +
actggtgtgagatggtatctca

SEQ ID NO: 82603 - DNA, 22 bp, Artificial Sequence
  Synthetic oligonucleotide; CTG chr11 5216707 5216728 5216724 5216729 +
gtgtgagatggtatctcattgt

SEQ ID NO: 82604 - DNA, 22 bp, Artificial Sequence
  Synthetic oligonucleotide; CTC chr11 5216724 5216745 5216741 5216746 +
attgtggttttgatttgcattt

SEQ ID NO: 82605 - DNA, 22 bp, Artificial Sequence
  Synthetic oligonucleotide; TTG chr11 5216728 5216749 5216745 5216750 +
tggttttgatttgcatttctct

SEQ ID NO: 82606 - DNA, 22 bp, Artificial Sequence
  Synthetic oligonucleotide; TTT chr11 5216734 5216755 5216751 5216756 +
tgatttgcatttctctgatggc

SEQ ID NO: 82607 - DNA, 22 bp, Artificial Sequence
  Synthetic oligonucleotide; TTT chr11 5216735 5216756 5216752 5216757 +
gatttgcatttctctgatggct

SEQ ID NO: 82608 - DNA, 22 bp, Artificial Sequence
  Synthetic oligonucleotide; TTG chr11 5216736 5216757 5216753 5216758 +
atttgcatttctctgatggcta

SEQ ID NO: 82609 - DNA, 22 bp, Artificial Sequence
  Synthetic oligonucleotide; TTT chr11 5216740 5216761 5216757 5216762 +
gcatttctctgatggctagtga

SEQ ID NO: 82610 - DNA, 22 bp, Artificial Sequence
  Synthetic oligonucleotide; TTG chr11 5216741 5216762 5216758 5216763 +
catttctctgatggctagtgat

SEQ ID NO: 82611 - DNA, 22 bp, Artificial Sequence
  Synthetic oligonucleotide; TTT chr11 5216746 5216767 5216763 5216768 +
ctctgatggctagtgatgatga

SEQ ID NO: 82612 - DNA, 22 bp, Artificial Sequence
  Synthetic oligonucleotide; TTC chr11 5216747 5216768 5216764 5216769 +
tctgatggctagtgatgatgag

SEQ ID NO: 82613 - DNA, 22 bp, Artificial Sequence
  Synthetic oligonucleotide; CTC chr11 5216749 5216770 5216766 5216771 +
tgatggctagtgatgatgagca

SEQ ID NO: 82614 - DNA, 22 bp, Artificial Sequence
  Synthetic oligonucleotide; CTG chr11 5216751 5216772 5216768 5216773 +
atggctagtgatgatgagcatt

SEQ ID NO: 82615 - DNA, 22 bp, Artificial Sequence
  Synthetic oligonucleotide; CTA chr11 5216758 5216779 5216775 5216780 +
gtgatgatgagcattttttcat

SEQ ID NO: 82616 - DNA, 22 bp, Artificial Sequence
  Synthetic oligonucleotide; TTT chr11 5216774 5216795 5216791 5216796 +
tttcatgtgttttttgattaca

SEQ ID NO: 82617 - DNA, 22 bp, Artificial Sequence
  Synthetic oligonucleotide; TTT chr11 5216775 5216796 5216792 5216797 +
ttcatgtgttttttgattacat

SEQ ID NO: 82618 - DNA, 22 bp, Artificial Sequence
  Synthetic oligonucleotide; TTT chr11 5216776 5216797 5216793 5216798 +
tcatgtgttttttgattacata

SEQ ID NO: 82619 - DNA, 22 bp, Artificial Sequence
  Synthetic oligonucleotide; TTT chr11 5216777 5216798 5216794 5216799 +
catgtgttttttgattacataa

SEQ ID NO: 82620 - DNA, 22 bp, Artificial Sequence
  Synthetic oligonucleotide; TTC chr11 5216778 5216799 5216795 5216800 +
atgtgttttttgattacataaa

SEQ ID NO: 82621 - DNA, 22 bp, Artificial Sequence
  Synthetic oligonucleotide; TTT chr11 5216786 5216807 5216803 5216808 +
tttgattacataaatgtcttct

SEQ ID NO: 82622 - DNA, 22 bp, Artificial Sequence
  Synthetic oligonucleotide; TTT chr11 5216787 5216808 5216804 5216809 +
ttgattacataaatgtcttctt

SEQ ID NO: 82623 - DNA, 22 bp, Artificial Sequence
  Synthetic oligonucleotide; TTT chr11 5216788 5216809 5216805 5216810 +
tgattacataaatgtcttcttt

SEQ ID NO: 82624 - DNA, 22 bp, Artificial Sequence
  Synthetic oligonucleotide; TTT chr11 5216789 5216810 5216806 5216811 +
gattacataaatgtcttctttt

SEQ ID NO: 82625 - DNA, 22 bp, Artificial Sequence
  Synthetic oligonucleotide; TTG chr11 5216790 5216811 5216807 5216812 +
attacataaatgtcttcttttg

SEQ ID NO: 82626 - DNA, 22 bp, Artificial Sequence
  Synthetic oligonucleotide; TTA chr11 5216794 5216815 5216811 5216816 +
cataaatgtcttcttttgcgaa

SEQ ID NO: 82627 - DNA, 22 bp, Artificial Sequence
  Synthetic oligonucleotide; CTT chr11 5216806 5216827 5216823 5216828 +
cttttgcgaagtgtctgttcat

SEQ ID NO: 82628 - DNA, 22 bp, Artificial Sequence
  Synthetic oligonucleotide; TTC chr11 5216807 5216828 5216824 5216829 +
ttttgcgaagtgtctgttcata

SEQ ID NO: 82629 - DNA, 22 bp, Artificial Sequence
  Synthetic oligonucleotide; CTT chr11 5216809 5216830 5216826 5216831 +
ttgcgaagtgtctgttcatatc

SEQ ID NO: 82630 - DNA, 22 bp, Artificial Sequence
  Synthetic oligonucleotide; TTT chr11 5216810 5216831 5216827 5216832 +
tgcgaagtgtctgttcatatcc

SEQ ID NO: 82631 - DNA, 22 bp, Artificial Sequence
  Synthetic oligonucleotide; TTT chr11 5216811 5216832 5216828 5216833 +
gcgaagtgtctgttcatatcct

SEQ ID NO: 82632 - DNA, 22 bp, Artificial Sequence
  Synthetic oligonucleotide; TTG chr11 5216812 5216833 5216829 5216834 +
cgaagtgtctgttcatatcctt

SEQ ID NO: 82633 - DNA, 22 bp, Artificial Sequence
  Synthetic oligonucleotide; CTG chr11 5216823 5216844 5216840 5216845 +
ttcatatcctttgcccactttt

SEQ ID NO: 82634 - DNA, 22 bp, Artificial Sequence
  Synthetic oligonucleotide; TTC chr11 5216826 5216847 5216843 5216848 +
atatcctttgcccactttttga

SEQ ID NO: 82635 - DNA, 22 bp, Artificial Sequence
  Synthetic oligonucleotide; CTT chr11 5216834 5216855 5216851 5216856 +
tgcccactttttgatggggttg

SEQ ID NO: 82636 - DNA, 22 bp, Artificial Sequence
  Synthetic oligonucleotide; TTT chr11 5216835 5216856 5216852 5216857 +
gcccactttttgatggggttgt

SEQ ID NO: 82637 - DNA, 22 bp, Artificial Sequence
  Synthetic oligonucleotide; TTG chr11 5216836 5216857 5216853 5216858 +
cccactttttgatggggttgtt

SEQ ID NO: 82638 - DNA, 22 bp, Artificial Sequence
  Synthetic oligonucleotide; CTT chr11 5216843 5216864 5216860 5216865 +
tttgatggggttgtttgttttt

SEQ ID NO: 82639 - DNA, 22 bp, Artificial Sequence
  Synthetic oligonucleotide; TTT chr11 5216844 5216865 5216861 5216866 +
ttgatggggttgtttgtttttt

SEQ ID NO: 82640 - DNA, 22 bp, Artificial Sequence
  Synthetic oligonucleotide; TTT chr11 5216845 5216866 5216862 5216867 +
tgatggggttgtttgttttttc

SEQ ID NO: 82641 - DNA, 22 bp, Artificial Sequence
  Synthetic oligonucleotide; TTT chr11 5216846 5216867 5216863 5216868 +
gatggggttgtttgttttttct

SEQ ID NO: 82642 - DNA, 22 bp, Artificial Sequence
  Synthetic oligonucleotide; TTG chr11 5216847 5216868 5216864 5216869 +
atggggttgtttgttttttctt

SEQ ID NO: 82643 - DNA, 22 bp, Artificial Sequence
  Synthetic oligonucleotide; TTG chr11 5216856 5216877 5216873 5216878 +
tttgttttttcttgtaaatttg

SEQ ID NO: 82644 - DNA, 22 bp, Artificial Sequence
  Synthetic oligonucleotide; TTT chr11 5216859 5216880 5216876 5216881 +
gttttttcttgtaaatttgttt

SEQ ID NO: 82645 - DNA, 22 bp, Artificial Sequence
  Synthetic oligonucleotide; TTG chr11 5216860 5216881 5216877 5216882 +
ttttttcttgtaaatttgtttg

SEQ ID NO: 82646 - DNA, 22 bp, Artificial Sequence
  Synthetic oligonucleotide; TTT chr11 5216863 5216884 5216880 5216885 +
tttcttgtaaatttgtttgagt

SEQ ID NO: 82647 - DNA, 22 bp, Artificial Sequence
  Synthetic oligonucleotide; TTT chr11 5216864 5216885 5216881 5216886 +
ttcttgtaaatttgtttgagtt

SEQ ID NO: 82648 - DNA, 22 bp, Artificial Sequence
  Synthetic oligonucleotide; TTT chr11 5216865 5216886 5216882 5216887 +
tcttgtaaatttgtttgagttc

SEQ ID NO: 82649 - DNA, 22 bp, Artificial Sequence
  Synthetic oligonucleotide; TTT chr11 5216866 5216887 5216883 5216888 +
cttgtaaatttgtttgagttca

SEQ ID NO: 82650 - DNA, 22 bp, Artificial Sequence
  Synthetic oligonucleotide; TTC chr11 5216867 5216888 5216884 5216889 +
ttgtaaatttgtttgagttcat

SEQ ID NO: 82651 - DNA, 22 bp, Artificial Sequence
  Synthetic oligonucleotide; CTT chr11 5216869 5216890 5216886 5216891 +
gtaaatttgtttgagttcattg

SEQ ID NO: 82652 - DNA, 22 bp, Artificial Sequence
  Synthetic oligonucleotide; TTG chr11 5216870 5216891 5216887 5216892 +
taaatttgtttgagttcattgt

SEQ ID NO: 82653 - DNA, 22 bp, Artificial Sequence
  Synthetic oligonucleotide; TTT chr11 5216877 5216898 5216894 5216899 +
gtttgagttcattgtagattct

SEQ ID NO: 82654 - DNA, 22 bp, Artificial Sequence
  Synthetic oligonucleotide; TTG chr11 5216878 5216899 5216895 5216900 +
tttgagttcattgtagattctg

SEQ ID NO: 82655 - DNA, 22 bp, Artificial Sequence
  Synthetic oligonucleotide; TTT chr11 5216881 5216902 5216898 5216903 +
gagttcattgtagattctggat

SEQ ID NO: 82656 - DNA, 22 bp, Artificial Sequence
  Synthetic oligonucleotide; TTG chr11 5216882 5216903 5216899 5216904 +
agttcattgtagattctggata

SEQ ID NO: 82657 - DNA, 22 bp, Artificial Sequence
  Synthetic oligonucleotide; TTC chr11 5216887 5216908 5216904 5216909 +
attgtagattctggatattagc

SEQ ID NO: 82658 - DNA, 22 bp, Artificial Sequence
  Synthetic oligonucleotide; TTG chr11 5216891 5216912 5216908 5216913 +
tagattctggatattagccctt

SEQ ID NO: 82659 - DNA, 22 bp, Artificial Sequence
  Synthetic oligonucleotide; TTC chr11 5216898 5216919 5216915 5216920 +
tggatattagccctttgtcaga

SEQ ID NO: 82660 - DNA, 22 bp, Artificial Sequence
  Synthetic oligonucleotide; CTG chr11 5216900 5216921 5216917 5216922 +
gatattagccctttgtcagatg

SEQ ID NO: 82661 - DNA, 22 bp, Artificial Sequence
  Synthetic oligonucleotide; TTA chr11 5216907 5216928 5216924 5216929 +
gccctttgtcagatgagtagat

SEQ ID NO: 82662 - DNA, 22 bp, Artificial Sequence
  Synthetic oligonucleotide; CTT chr11 5216913 5216934 5216930 5216935 +
tgtcagatgagtagattgcaaa

SEQ ID NO: 82663 - DNA, 22 bp, Artificial Sequence
  Synthetic oligonucleotide; TTT chr11 5216914 5216935 5216931 5216936 +
gtcagatgagtagattgcaaaa

SEQ ID NO: 82664 - DNA, 22 bp, Artificial Sequence
  Synthetic oligonucleotide; TTG chr11 5216915 5216936 5216932 5216937 +
tcagatgagtagattgcaaaaa

SEQ ID NO: 82665 - DNA, 22 bp, Artificial Sequence
  Synthetic oligonucleotide; TTG chr11 5216931 5216952 5216948 5216953 +
caaaaattttctcccattttgt

SEQ ID NO: 82666 - DNA, 22 bp, Artificial Sequence
  Synthetic oligonucleotide; TTT chr11 5216940 5216961 5216957 5216962 +
tctcccattttgtaggttgcct

SEQ ID NO: 82667 - DNA, 22 bp, Artificial Sequence
  Synthetic oligonucleotide; TTT chr11 5216941 5216962 5216958 5216963 +
ctcccattttgtaggttgcctg

SEQ ID NO: 82668 - DNA, 22 bp, Artificial Sequence
  Synthetic oligonucleotide; TTC chr11 5216942 5216963 5216959 5216964 +
tcccattttgtaggttgcctgt

SEQ ID NO: 82669 - DNA, 22 bp, Artificial Sequence
  Synthetic oligonucleotide; CTC chr11 5216944 5216965 5216961 5216966 +
ccattttgtaggttgcctgttc

SEQ ID NO: 82670 - DNA, 22 bp, Artificial Sequence
  Synthetic oligonucleotide; TTT chr11 5216950 5216971 5216967 5216972 +
tgtaggttgcctgttcactctg

SEQ ID NO: 82671 - DNA, 22 bp, Artificial Sequence
  Synthetic oligonucleotide; TTT chr11 5216951 5216972 5216968 5216973 +
gtaggttgcctgttcactctga

SEQ ID NO: 82672 - DNA, 22 bp, Artificial Sequence
  Synthetic oligonucleotide; TTG chr11 5216952 5216973 5216969 5216974 +
taggttgcctgttcactctgat

SEQ ID NO: 82673 - DNA, 22 bp, Artificial Sequence
  Synthetic oligonucleotide; TTG chr11 5216959 5216980 5216976 5216981 +
cctgttcactctgatggtagtt

SEQ ID NO: 82674 - DNA, 22 bp, Artificial Sequence
  Synthetic oligonucleotide; CTG chr11 5216963 5216984 5216980 5216985 +
ttcactctgatggtagtttctt

SEQ ID NO: 82675 - DNA, 22 bp, Artificial Sequence
  Synthetic oligonucleotide; TTC chr11 5216966 5216987 5216983 5216988 +
actctgatggtagtttctttag

SEQ ID NO: 82676 - DNA, 22 bp, Artificial Sequence
  Synthetic oligonucleotide; CTC chr11 5216970 5216991 5216987 5216992 +
tgatggtagtttctttagctgt

SEQ ID NO: 82677 - DNA, 22 bp, Artificial Sequence
  Synthetic oligonucleotide; CTG chr11 5216972 5216993 5216989 5216994 +
atggtagtttctttagctgtgc

SEQ ID NO: 82678 - DNA, 22 bp, Artificial Sequence
  Synthetic oligonucleotide; TTT chr11 5216982 5217003 5216999 5217004 +
ctttagctgtgcagaagctctt

SEQ ID NO: 82679 - DNA, 22 bp, Artificial Sequence
  Synthetic oligonucleotide; TTC chr11 5216983 5217004 5217000 5217005 +
tttagctgtgcagaagctcttt

SEQ ID NO: 82680 - DNA, 22 bp, Artificial Sequence
  Synthetic oligonucleotide; CTT chr11 5216985 5217006 5217002 5217007 +
tagctgtgcagaagctctttag

SEQ ID NO: 82681 - DNA, 22 bp, Artificial Sequence
  Synthetic oligonucleotide; TTT chr11 5216986 5217007 5217003 5217008 +
agctgtgcagaagctctttagt

SEQ ID NO: 82682 - DNA, 22 bp, Artificial Sequence
  Synthetic oligonucleotide; TTA chr11 5216987 5217008 5217004 5217009 +
gctgtgcagaagctctttagtt

SEQ ID NO: 82683 - DNA, 22 bp, Artificial Sequence
  Synthetic oligonucleotide; CTG chr11 5216991 5217012 5217008 5217013 +
tgcagaagctctttagtttaat

SEQ ID NO: 82684 - DNA, 22 bp, Artificial Sequence
  Synthetic oligonucleotide; CTC chr11 5217002 5217023 5217019 5217024 +
tttagtttaattagatcccgtt

SEQ ID NO: 82685 - DNA, 22 bp, Artificial Sequence
  Synthetic oligonucleotide; CTT chr11 5217004 5217025 5217021 5217026 +
tagtttaattagatcccgtttg

SEQ ID NO: 82686 - DNA, 22 bp, Artificial Sequence
  Synthetic oligonucleotide; TTT chr11 5217005 5217026 5217022 5217027 +
agtttaattagatcccgtttgt

SEQ ID NO: 82687 - DNA, 22 bp, Artificial Sequence
  Synthetic oligonucleotide; TTA chr11 5217006 5217027 5217023 5217028 +
gtttaattagatcccgtttgtc

SEQ ID NO: 82688 - DNA, 22 bp, Artificial Sequence
  Synthetic oligonucleotide; TTT chr11 5217010 5217031 5217027 5217032 +
aattagatcccgtttgtccatt

SEQ ID NO: 82689 - DNA, 22 bp, Artificial Sequence
  Synthetic oligonucleotide; TTA chr11 5217011 5217032 5217028 5217033 +
attagatcccgtttgtccattt

SEQ ID NO: 82690 - DNA, 22 bp, Artificial Sequence
  Synthetic oligonucleotide; TTA chr11 5217015 5217036 5217032 5217037 +
gatcccgtttgtccattttgtc

SEQ ID NO: 82691 - DNA, 22 bp, Artificial Sequence
  Synthetic oligonucleotide; TTT chr11 5217025 5217046 5217042 5217047 +
gtccattttgtcttttgttgcc

SEQ ID NO: 82692 - DNA, 22 bp, Artificial Sequence
  Synthetic oligonucleotide; TTG chr11 5217026 5217047 5217043 5217048 +
tccattttgtcttttgttgcca

SEQ ID NO: 82693 - DNA, 22 bp, Artificial Sequence
  Synthetic oligonucleotide; TTT chr11 5217033 5217054 5217050 5217055 +
tgtcttttgttgccattgcttt

SEQ ID NO: 82694 - DNA, 22 bp, Artificial Sequence
  Synthetic oligonucleotide; TTT chr11 5217034 5217055 5217051 5217056 +
gtcttttgttgccattgctttt

SEQ ID NO: 82695 - DNA, 22 bp, Artificial Sequence
  Synthetic oligonucleotide; TTG chr11 5217035 5217056 5217052 5217057 +
tcttttgttgccattgcttttg

SEQ ID NO: 82696 - DNA, 22 bp, Artificial Sequence
  Synthetic oligonucleotide; CTT chr11 5217039 5217060 5217056 5217061 +
ttgttgccattgcttttggtgt

SEQ ID NO: 82697 - DNA, 22 bp, Artificial Sequence
  Synthetic oligonucleotide; TTT chr11 5217040 5217061 5217057 5217062 +
tgttgccattgcttttggtgtt

SEQ ID NO: 82698 - DNA, 22 bp, Artificial Sequence
  Synthetic oligonucleotide; TTT chr11 5217041 5217062 5217058 5217063 +
gttgccattgcttttggtgttt

SEQ ID NO: 82699 - DNA, 22 bp, Artificial Sequence
  Synthetic oligonucleotide; TTG chr11 5217042 5217063 5217059 5217064 +
ttgccattgcttttggtgtttt

SEQ ID NO: 82700 - DNA, 22 bp, Artificial Sequence
  Synthetic oligonucleotide; TTG chr11 5217045 5217066 5217062 5217067 +
ccattgcttttggtgttttaga

SEQ ID NO: 82701 - DNA, 22 bp, Artificial Sequence
  Synthetic oligonucleotide; TTG chr11 5217051 5217072 5217068 5217073 +
cttttggtgttttagacatgaa

SEQ ID NO: 82702 - DNA, 22 bp, Artificial Sequence
  Synthetic oligonucleotide; CTT chr11 5217054 5217075 5217071 5217076 +
ttggtgttttagacatgaagtc

SEQ ID NO: 82703 - DNA, 22 bp, Artificial Sequence
  Synthetic oligonucleotide; TTT chr11 5217055 5217076 5217072 5217077 +
tggtgttttagacatgaagtcc

SEQ ID NO: 82704 - DNA, 22 bp, Artificial Sequence
  Synthetic oligonucleotide; TTT chr11 5217056 5217077 5217073 5217078 +
ggtgttttagacatgaagtcct

SEQ ID NO: 82705 - DNA, 22 bp, Artificial Sequence
  Synthetic oligonucleotide; TTG chr11 5217057 5217078 5217074 5217079 +
gtgttttagacatgaagtcctt

SEQ ID NO: 82706 - DNA, 22 bp, Artificial Sequence
  Synthetic oligonucleotide; TTT chr11 5217063 5217084 5217080 5217085 +
tagacatgaagtccttgcccat

SEQ ID NO: 82707 - DNA, 22 bp, Artificial Sequence
  Synthetic oligonucleotide; TTT chr11 5217064 5217085 5217081 5217086 +
agacatgaagtccttgcccatg

SEQ ID NO: 82708 - DNA, 22 bp, Artificial Sequence
  Synthetic oligonucleotide; TTA chr11 5217065 5217086 5217082 5217087 +
gacatgaagtccttgcccatgc

SEQ ID NO: 82709 - DNA, 22 bp, Artificial Sequence
  Synthetic oligonucleotide; CTT chr11 5217079 5217100 5217096 5217101 +
gcccatgcctatgtcctgaatg

SEQ ID NO: 82710 - DNA, 22 bp, Artificial Sequence
  Synthetic oligonucleotide; TTG chr11 5217080 5217101 5217097 5217102 +
cccatgcctatgtcctgaatgg

SEQ ID NO: 82711 - DNA, 22 bp, Artificial Sequence
  Synthetic oligonucleotide; CTA chr11 5217090 5217111 5217107 5217112 +
tgtcctgaatggtattgcctag

SEQ ID NO: 82712 - DNA, 22 bp, Artificial Sequence
  Synthetic oligonucleotide; CTG chr11 5217097 5217118 5217114 5217119 +
aatggtattgcctaggtttttt

SEQ ID NO: 82713 - DNA, 22 bp, Artificial Sequence
  Synthetic oligonucleotide; TTG chr11 5217107 5217128 5217124 5217129 +
cctaggtttttttctagggttt

SEQ ID NO: 82714 - DNA, 22 bp, Artificial Sequence
  Synthetic oligonucleotide; CTA chr11 5217111 5217132 5217128 5217133 +
ggtttttttctagggtttttat

SEQ ID NO: 82715 - DNA, 22 bp, Artificial Sequence
  Synthetic oligonucleotide; TTT chr11 5217116 5217137 5217133 5217138 +
ttttctagggtttttatggttt

SEQ ID NO: 82716 - DNA, 22 bp, Artificial Sequence
  Synthetic oligonucleotide; TTT chr11 5217117 5217138 5217134 5217139 +
tttctagggtttttatggtttt

SEQ ID NO: 82717 - DNA, 22 bp, Artificial Sequence
  Synthetic oligonucleotide; TTT chr11 5217118 5217139 5217135 5217140 +
ttctagggtttttatggtttta

SEQ ID NO: 82718 - DNA, 22 bp, Artificial Sequence
  Synthetic oligonucleotide; TTT chr11 5217119 5217140 5217136 5217141 +
tctagggtttttatggttttag

SEQ ID NO: 82719 - DNA, 22 bp, Artificial Sequence
  Synthetic oligonucleotide; TTT chr11 5217120 5217141 5217137 5217142 +
ctagggtttttatggttttagg

SEQ ID NO: 82720 - DNA, 22 bp, Artificial Sequence
  Synthetic oligonucleotide; TTC chr11 5217121 5217142 5217138 5217143 +
tagggtttttatggttttaggt

SEQ ID NO: 82721 - DNA, 22 bp, Artificial Sequence
  Synthetic oligonucleotide; CTA chr11 5217123 5217144 5217140 5217145 +
gggtttttatggttttaggtct

SEQ ID NO: 82722 - DNA, 22 bp, Artificial Sequence
  Synthetic oligonucleotide; TTT chr11 5217129 5217150 5217146 5217151 +
ttatggttttaggtctaacatg

SEQ ID NO: 82723 - DNA, 22 bp, Artificial Sequence
  Synthetic oligonucleotide; TTT chr11 5217130 5217151 5217147 5217152 +
tatggttttaggtctaacatgt

SEQ ID NO: 82724 - DNA, 22 bp, Artificial Sequence
  Synthetic oligonucleotide; TTT chr11 5217131 5217152 5217148 5217153 +
atggttttaggtctaacatgta

SEQ ID NO: 82725 - DNA, 22 bp, Artificial Sequence
  Synthetic oligonucleotide; TTA chr11 5217132 5217153 5217149 5217154 +
tggttttaggtctaacatgtaa

SEQ ID NO: 82726 - DNA, 22 bp, Artificial Sequence
  Synthetic oligonucleotide; TTT chr11 5217138 5217159 5217155 5217160 +
taggtctaacatgtaagtcttt

SEQ ID NO: 82727 - DNA, 22 bp, Artificial Sequence
  Synthetic oligonucleotide; TTT chr11 5217139 5217160 5217156 5217161 +
aggtctaacatgtaagtcttta

SEQ ID NO: 82728 - DNA, 22 bp, Artificial Sequence
  Synthetic oligonucleotide; TTA chr11 5217140 5217161 5217157 5217162 +
ggtctaacatgtaagtctttaa

SEQ ID NO: 82729 - DNA, 22 bp, Artificial Sequence
  Synthetic oligonucleotide; CTA chr11 5217146 5217167 5217163 5217168 +
acatgtaagtctttaatccatc

SEQ ID NO: 82730 - DNA, 22 bp, Artificial Sequence
  Synthetic oligonucleotide; CTT chr11 5217159 5217180 5217176 5217181 +
taatccatcttgaattaatttt

SEQ ID NO: 82731 - DNA, 22 bp, Artificial Sequence
  Synthetic oligonucleotide; TTT chr11 5217160 5217181 5217177 5217182 +
aatccatcttgaattaattttt

SEQ ID NO: 82732 - DNA, 22 bp, Artificial Sequence
  Synthetic oligonucleotide; TTA chr11 5217161 5217182 5217178 5217183 +
atccatcttgaattaatttttg

SEQ ID NO: 82733 - DNA, 22 bp, Artificial Sequence
  Synthetic oligonucleotide; CTT chr11 5217170 5217191 5217187 5217192 +
gaattaatttttgtataaggtg

SEQ ID NO: 82734 - DNA, 22 bp, Artificial Sequence
  Synthetic oligonucleotide; TTG chr11 5217171 5217192 5217188 5217193 +
aattaatttttgtataaggtgt

SEQ ID NO: 82735 - DNA, 22 bp, Artificial Sequence
  Synthetic oligonucleotide; TTA chr11 5217176 5217197 5217193 5217198 +
atttttgtataaggtgtaagga

SEQ ID NO: 82736 - DNA, 22 bp, Artificial Sequence
  Synthetic oligonucleotide; TTT chr11 5217180 5217201 5217197 5217202 +
ttgtataaggtgtaaggaaggg

SEQ ID NO: 82737 - DNA, 22 bp, Artificial Sequence
  Synthetic oligonucleotide; TTT chr11 5217181 5217202 5217198 5217203 +
tgtataaggtgtaaggaaggga

SEQ ID NO: 82738 - DNA, 22 bp, Artificial Sequence
  Synthetic oligonucleotide; TTT chr11 5217182 5217203 5217199 5217204 +
gtataaggtgtaaggaagggat

SEQ ID NO: 82739 - DNA, 22 bp, Artificial Sequence
  Synthetic oligonucleotide; TTG chr11 5217183 5217204 5217200 5217205 +
tataaggtgtaaggaagggatc

SEQ ID NO: 82740 - DNA, 22 bp, Artificial Sequence
  Synthetic oligonucleotide; TTT chr11 5217211 5217232 5217228 5217233 +
cagctttctacatatggctagc

SEQ ID NO: 82741 - DNA, 22 bp, Artificial Sequence
  Synthetic oligonucleotide; TTC chr11 5217212 5217233 5217229 5217234 +
agctttctacatatggctagcc

SEQ ID NO: 82742 - DNA, 22 bp, Artificial Sequence
  Synthetic oligonucleotide; CTT chr11 5217217 5217238 5217234 5217239 +
tctacatatggctagccagttt

SEQ ID NO: 82743 - DNA, 22 bp, Artificial Sequence
  Synthetic oligonucleotide; TTT chr11 5217218 5217239 5217235 5217240 +
ctacatatggctagccagtttt

SEQ ID NO: 82744 - DNA, 22 bp, Artificial Sequence
  Synthetic oligonucleotide; TTC chr11 5217219 5217240 5217236 5217241 +
tacatatggctagccagttttc

SEQ ID NO: 82745 - DNA, 22 bp, Artificial Sequence
  Synthetic oligonucleotide; CTA chr11 5217221 5217242 5217238 5217243 +
catatggctagccagttttccc

SEQ ID NO: 82746 - DNA, 22 bp, Artificial Sequence
  Synthetic oligonucleotide; CTA chr11 5217231 5217252 5217248 5217253 +
gccagttttcccagcaccattt

SEQ ID NO: 82747 - DNA, 22 bp, Artificial Sequence
  Synthetic oligonucleotide; TTT chr11 5217239 5217260 5217256 5217261 +
tcccagcaccatttattaaata

SEQ ID NO: 82748 - DNA, 22 bp, Artificial Sequence
  Synthetic oligonucleotide; TTT chr11 5217240 5217261 5217257 5217262 +
cccagcaccatttattaaatag

SEQ ID NO: 82749 - DNA, 22 bp, Artificial Sequence
  Synthetic oligonucleotide; TTC chr11 5217241 5217262 5217258 5217263 +
ccagcaccatttattaaatagg

SEQ ID NO: 82750 - DNA, 22 bp, Artificial Sequence
  Synthetic oligonucleotide; TTT chr11 5217253 5217274 5217270 5217275 +
attaaatagggaatcctttccc

SEQ ID NO: 82751 - DNA, 22 bp, Artificial Sequence
  Synthetic oligonucleotide; TTA chr11 5217254 5217275 5217271 5217276 +
ttaaatagggaatcctttcccc

SEQ ID NO: 82752 - DNA, 22 bp, Artificial Sequence
  Synthetic oligonucleotide; TTA chr11 5217257 5217278 5217274 5217279 +
aatagggaatcctttccccatt

SEQ ID NO: 82753 - DNA, 22 bp, Artificial Sequence
  Synthetic oligonucleotide; CTT chr11 5217271 5217292 5217288 5217293 +
tccccattgcttgtttctctca

SEQ ID NO: 82754 - DNA, 22 bp, Artificial Sequence
  Synthetic oligonucleotide; TTT chr11 5217272 5217293 5217289 5217294 +
ccccattgcttgtttctctcag

SEQ ID NO: 82755 - DNA, 22 bp, Artificial Sequence
  Synthetic oligonucleotide; TTC chr11 5217273 5217294 5217290 5217295 +
cccattgcttgtttctctcagg

SEQ ID NO: 82756 - DNA, 22 bp, Artificial Sequence
  Synthetic oligonucleotide; TTG chr11 5217280 5217301 5217297 5217302 +
cttgtttctctcaggtttgtca

SEQ ID NO: 82757 - DNA, 22 bp, Artificial Sequence
  Synthetic oligonucleotide; CTT chr11 5217283 5217304 5217300 5217305 +
gtttctctcaggtttgtcaaag

SEQ ID NO: 82758 - DNA, 22 bp, Artificial Sequence
  Synthetic oligonucleotide; TTG chr11 5217284 5217305 5217301 5217306 +
tttctctcaggtttgtcaaaga

SEQ ID NO: 82759 - DNA, 22 bp, Artificial Sequence
  Synthetic oligonucleotide; TTT chr11 5217287 5217308 5217304 5217309 +
ctctcaggtttgtcaaagatca

SEQ ID NO: 82760 - DNA, 22 bp, Artificial Sequence
  Synthetic oligonucleotide; TTC chr11 5217288 5217309 5217305 5217310 +
tctcaggtttgtcaaagatcag

SEQ ID NO: 82761 - DNA, 22 bp, Artificial Sequence
  Synthetic oligonucleotide; CTC chr11 5217290 5217311 5217307 5217312 +
tcaggtttgtcaaagatcagat

SEQ ID NO: 82762 - DNA, 22 bp, Artificial Sequence
  Synthetic oligonucleotide; CTC chr11 5217292 5217313 5217309 5217314 +
aggtttgtcaaagatcagatag

SEQ ID NO: 82763 - DNA, 22 bp, Artificial Sequence
  Synthetic oligonucleotide; TTT chr11 5217298 5217319 5217315 5217320 +
gtcaaagatcagatagttgtag

SEQ ID NO: 82764 - DNA, 22 bp, Artificial Sequence
  Synthetic oligonucleotide; TTG chr11 5217299 5217320 5217316 5217321 +
tcaaagatcagatagttgtaga

SEQ ID NO: 82765 - DNA, 22 bp, Artificial Sequence
  Synthetic oligonucleotide; TTG chr11 5217317 5217338 5217334 5217339 +
tagatatgcggcattatttctg

SEQ ID NO: 82766 - DNA, 22 bp, Artificial Sequence
  Synthetic oligonucleotide; TTA chr11 5217333 5217354 5217350 5217355 +
tttctgagggctctgttctgtt

SEQ ID NO: 82767 - DNA, 22 bp, Artificial Sequence
  Synthetic oligonucleotide; TTT chr11 5217336 5217357 5217353 5217358 +
ctgagggctctgttctgttcca

SEQ ID NO: 82768 - DNA, 22 bp, Artificial Sequence
  Synthetic oligonucleotide; TTC chr11 5217337 5217358 5217354 5217359 +
tgagggctctgttctgttccat

SEQ ID NO: 82769 - DNA, 22 bp, Artificial Sequence
  Synthetic oligonucleotide; CTG chr11 5217339 5217360 5217356 5217361 +
agggctctgttctgttccattg

SEQ ID NO: 82770 - DNA, 22 bp, Artificial Sequence
  Synthetic oligonucleotide; CTC chr11 5217346 5217367 5217363 5217368 +
tgttctgttccattggtctaga

SEQ ID NO: 82771 - DNA, 22 bp, Artificial Sequence
  Synthetic oligonucleotide; CTG chr11 5217348 5217369 5217365 5217370 +
ttctgttccattggtctagatc

SEQ ID NO: 82772 - DNA, 22 bp, Artificial Sequence
  Synthetic oligonucleotide; TTC chr11 5217351 5217372 5217368 5217373 +
tgttccattggtctagatctct

SEQ ID NO: 82773 - DNA, 22 bp, Artificial Sequence
  Synthetic oligonucleotide; CTG chr11 5217353 5217374 5217370 5217375 +
ttccattggtctagatctctgt

SEQ ID NO: 82774 - DNA, 22 bp, Artificial Sequence
  Synthetic oligonucleotide; TTC chr11 5217356 5217377 5217373 5217378 +
cattggtctagatctctgtttt

SEQ ID NO: 82775 - DNA, 22 bp, Artificial Sequence
  Synthetic oligonucleotide; TTG chr11 5217361 5217382 5217378 5217383 +
gtctagatctctgttttggtac

SEQ ID NO: 82776 - DNA, 22 bp, Artificial Sequence
  Synthetic oligonucleotide; CTA chr11 5217366 5217387 5217383 5217388 +
gatctctgttttggtaccagta

SEQ ID NO: 82777 - DNA, 22 bp, Artificial Sequence
  Synthetic oligonucleotide; CTC chr11 5217372 5217393 5217389 5217394 +
tgttttggtaccagtaccatgc

SEQ ID NO: 82778 - DNA, 22 bp, Artificial Sequence
  Synthetic oligonucleotide; CTG chr11 5217374 5217395 5217391 5217396 +
ttttggtaccagtaccatgctg

SEQ ID NO: 82779 - DNA, 22 bp, Artificial Sequence
  Synthetic oligonucleotide; TTT chr11 5217377 5217398 5217394 5217399 +
tggtaccagtaccatgctgttt

SEQ ID NO: 82780 - DNA, 22 bp, Artificial Sequence
  Synthetic oligonucleotide; TTT chr11 5217378 5217399 5217395 5217400 +
ggtaccagtaccatgctgtttt

SEQ ID NO: 82781 - DNA, 22 bp, Artificial Sequence
  Synthetic oligonucleotide; TTG chr11 5217379 5217400 5217396 5217401 +
gtaccagtaccatgctgttttg

SEQ ID NO: 82782 - DNA, 22 bp, Artificial Sequence
  Synthetic oligonucleotide; CTG chr11 5217396 5217417 5217413 5217418 +
ttttggttaccgtagcattgta

SEQ ID NO: 82783 - DNA, 22 bp, Artificial Sequence
  Synthetic oligonucleotide; TTT chr11 5217399 5217420 5217416 5217421 +
tggttaccgtagcattgtagta

SEQ ID NO: 82784 - DNA, 22 bp, Artificial Sequence
  Synthetic oligonucleotide; TTT chr11 5217400 5217421 5217417 5217422 +
ggttaccgtagcattgtagtat

SEQ ID NO: 82785 - DNA, 22 bp, Artificial Sequence
  Synthetic oligonucleotide; TTG chr11 5217401 5217422 5217418 5217423 +
gttaccgtagcattgtagtata

SEQ ID NO: 82786 - DNA, 22 bp, Artificial Sequence
  Synthetic oligonucleotide; TTA chr11 5217405 5217426 5217422 5217427 +
ccgtagcattgtagtatagttt

SEQ ID NO: 82787 - DNA, 22 bp, Artificial Sequence
  Synthetic oligonucleotide; TTG chr11 5217416 5217437 5217433 5217438 +
tagtatagtttgaagtcaggta

SEQ ID NO: 82788 - DNA, 22 bp, Artificial Sequence
  Synthetic oligonucleotide; TTT chr11 5217427 5217448 5217444 5217449 +
gaagtcaggtagcgtgatgcct

SEQ ID NO: 82789 - DNA, 22 bp, Artificial Sequence
  Synthetic oligonucleotide; TTG chr11 5217428 5217449 5217445 5217450 +
aagtcaggtagcgtgatgcctc

SEQ ID NO: 82790 - DNA, 22 bp, Artificial Sequence
  Synthetic oligonucleotide; CTC chr11 5217450 5217471 5217467 5217472 +
cagctttgttcttttggcttag

SEQ ID NO: 82791 - DNA, 22 bp, Artificial Sequence
  Synthetic oligonucleotide; CTT chr11 5217456 5217477 5217473 5217478 +
tgttcttttggcttaggattgc

SEQ ID NO: 82792 - DNA, 22 bp, Artificial Sequence
  Synthetic oligonucleotide; TTT chr11 5217457 5217478 5217474 5217479 +
gttcttttggcttaggattgcc

SEQ ID NO: 82793 - DNA, 22 bp, Artificial Sequence
  Synthetic oligonucleotide; TTG chr11 5217458 5217479 5217475 5217480 +
ttcttttggcttaggattgcct

SEQ ID NO: 82794 - DNA, 22 bp, Artificial Sequence
  Synthetic oligonucleotide; TTC chr11 5217461 5217482 5217478 5217483 +
ttttggcttaggattgccttgg

SEQ ID NO: 82795 - DNA, 22 bp, Artificial Sequence
  Synthetic oligonucleotide; CTT chr11 5217463 5217484 5217480 5217485 +
ttggcttaggattgccttggtg

SEQ ID NO: 82796 - DNA, 22 bp, Artificial Sequence
  Synthetic oligonucleotide; TTT chr11 5217464 5217485 5217481 5217486 +
tggcttaggattgccttggtga

SEQ ID NO: 82797 - DNA, 22 bp, Artificial Sequence
  Synthetic oligonucleotide; TTT chr11 5217465 5217486 5217482 5217487 +
ggcttaggattgccttggtgat

SEQ ID NO: 82798 - DNA, 22 bp, Artificial Sequence
  Synthetic oligonucleotide; TTG chr11 5217466 5217487 5217483 5217488 +
gcttaggattgccttggtgatg

SEQ ID NO: 82799 - DNA, 22 bp, Artificial Sequence
  Synthetic oligonucleotide; CTT chr11 5217470 5217491 5217487 5217492 +
aggattgccttggtgatgtggg

SEQ ID NO: 82800 - DNA, 22 bp, Artificial Sequence
  Synthetic oligonucleotide; TTA chr11 5217471 5217492 5217488 5217493 +
ggattgccttggtgatgtgggc

SEQ ID NO: 82801 - DNA, 22 bp, Artificial Sequence
  Synthetic oligonucleotide; TTG chr11 5217477 5217498 5217494 5217499 +
ccttggtgatgtgggctctttt

SEQ ID NO: 82802 - DNA, 22 bp, Artificial Sequence
  Synthetic oligonucleotide; CTT chr11 5217481 5217502 5217498 5217503 +
ggtgatgtgggctcttttttgg

SEQ ID NO: 82803 - DNA, 22 bp, Artificial Sequence
  Synthetic oligonucleotide; TTG chr11 5217482 5217503 5217499 5217504 +
gtgatgtgggctcttttttggt

SEQ ID NO: 82804 - DNA, 22 bp, Artificial Sequence
  Synthetic oligonucleotide; CTC chr11 5217495 5217516 5217512 5217517 +
ttttttggttccatatgaactt

SEQ ID NO: 82805 - DNA, 22 bp, Artificial Sequence
  Synthetic oligonucleotide; CTT chr11 5217497 5217518 5217514 5217519 +
ttttggttccatatgaacttta

SEQ ID NO: 82806 - DNA, 22 bp, Artificial Sequence
  Synthetic oligonucleotide; TTT chr11 5217498 5217519 5217515 5217520 +
tttggttccatatgaactttaa

SEQ ID NO: 82807 - DNA, 22 bp, Artificial Sequence
  Synthetic oligonucleotide; TTT chr11 5217499 5217520 5217516 5217521 +
ttggttccatatgaactttaaa

SEQ ID NO: 82808 - DNA, 22 bp, Artificial Sequence
  Synthetic oligonucleotide; TTT chr11 5217500 5217521 5217517 5217522 +
tggttccatatgaactttaaag

SEQ ID NO: 82809 - DNA, 22 bp, Artificial Sequence
  Synthetic oligonucleotide; TTT chr11 5217501 5217522 5217518 5217523 +
ggttccatatgaactttaaagt

SEQ ID NO: 82810 - DNA, 22 bp, Artificial Sequence
  Synthetic oligonucleotide; TTG chr11 5217502 5217523 5217519 5217524 +
gttccatatgaactttaaagta

SEQ ID NO: 82811 - DNA, 22 bp, Artificial Sequence
  Synthetic oligonucleotide; TTC chr11 5217506 5217527 5217523 5217528 +
catatgaactttaaagtagttt

SEQ ID NO: 82812 - DNA, 22 bp, Artificial Sequence
  Synthetic oligonucleotide; CTT chr11 5217517 5217538 5217534 5217539 +
taaagtagttttttccagttct

SEQ ID NO: 82813 - DNA, 22 bp, Artificial Sequence
  Synthetic oligonucleotide; TTT chr11 5217518 5217539 5217535 5217540 +
aaagtagttttttccagttctg

SEQ ID NO: 82814 - DNA, 22 bp, Artificial Sequence
  Synthetic oligonucleotide; TTA chr11 5217519 5217540 5217536 5217541 +
aagtagttttttccagttctgt

SEQ ID NO: 82815 - DNA, 22 bp, Artificial Sequence
  Synthetic oligonucleotide; TTT chr11 5217528 5217549 5217545 5217550 +
tttccagttctgtgaagaaagt

SEQ ID NO: 82816 - DNA, 22 bp, Artificial Sequence
  Synthetic oligonucleotide; TTT chr11 5217529 5217550 5217546 5217551 +
ttccagttctgtgaagaaagtc

SEQ ID NO: 82817 - DNA, 22 bp, Artificial Sequence
  Synthetic oligonucleotide; TTT chr11 5217530 5217551 5217547 5217552 +
tccagttctgtgaagaaagtca

SEQ ID NO: 82818 - DNA, 22 bp, Artificial Sequence
  Synthetic oligonucleotide; TTT chr11 5217531 5217552 5217548 5217553 +
ccagttctgtgaagaaagtcat

SEQ ID NO: 82819 - DNA, 22 bp, Artificial Sequence
  Synthetic oligonucleotide; TTC chr11 5217532 5217553 5217549 5217554 +
cagttctgtgaagaaagtcatt

SEQ ID NO: 82820 - DNA, 22 bp, Artificial Sequence
  Synthetic oligonucleotide; TTC chr11 5217538 5217559 5217555 5217560 +
tgtgaagaaagtcattggtagc

SEQ ID NO: 82821 - DNA, 22 bp, Artificial Sequence
  Synthetic oligonucleotide; CTG chr11 5217540 5217561 5217557 5217562 +
tgaagaaagtcattggtagctt

SEQ ID NO: 82822 - DNA, 22 bp, Artificial Sequence
  Synthetic oligonucleotide; TTG chr11 5217555 5217576 5217572 5217577 +
gtagcttgatggggatggcatt

SEQ ID NO: 82823 - DNA, 22 bp, Artificial Sequence
  Synthetic oligonucleotide; CTT chr11 5217562 5217583 5217579 5217584 +
gatggggatggcattgaatcta

SEQ ID NO: 82824 - DNA, 22 bp, Artificial Sequence
  Synthetic oligonucleotide; TTG chr11 5217563 5217584 5217580 5217585 +
atggggatggcattgaatctat

SEQ ID NO: 82825 - DNA, 22 bp, Artificial Sequence
  Synthetic oligonucleotide; TTG chr11 5217578 5217599 5217595 5217600 +
aatctataaattaccttgggca

SEQ ID NO: 82826 - DNA, 22 bp, Artificial Sequence
  Synthetic oligonucleotide; CTA chr11 5217584 5217605 5217601 5217606 +
taaattaccttgggcagtatga

SEQ ID NO: 82827 - DNA, 22 bp, Artificial Sequence
  Synthetic oligonucleotide; TTA chr11 5217591 5217612 5217608 5217613 +
ccttgggcagtatgaccatttt

SEQ ID NO: 82828 - DNA, 22 bp, Artificial Sequence
  Synthetic oligonucleotide; CTT chr11 5217595 5217616 5217612 5217617 +
gggcagtatgaccattttcacg

SEQ ID NO: 82829 - DNA, 22 bp, Artificial Sequence
  Synthetic oligonucleotide; TTG chr11 5217596 5217617 5217613 5217618 +
ggcagtatgaccattttcacga

SEQ ID NO: 82830 - DNA, 22 bp, Artificial Sequence
  Synthetic oligonucleotide; TTT chr11 5217612 5217633 5217629 5217634 +
tcacgatattgattcttcctac

SEQ ID NO: 82831 - DNA, 22 bp, Artificial Sequence
  Synthetic oligonucleotide; TTT chr11 5217613 5217634 5217630 5217635 +
cacgatattgattcttcctacc

SEQ ID NO: 82832 - DNA, 22 bp, Artificial Sequence
  Synthetic oligonucleotide; TTC chr11 5217614 5217635 5217631 5217636 +
acgatattgattcttcctaccc

SEQ ID NO: 82833 - DNA, 22 bp, Artificial Sequence
  Synthetic oligonucleotide; TTG chr11 5217623 5217644 5217640 5217645 +
attcttcctacccatgagcatg

SEQ ID NO: 82834 - DNA, 22 bp, Artificial Sequence
  Synthetic oligonucleotide; TTC chr11 5217627 5217648 5217644 5217649 +
ttcctacccatgagcatggaat

SEQ ID NO: 82835 - DNA, 22 bp, Artificial Sequence
  Synthetic oligonucleotide; CTT chr11 5217629 5217650 5217646 5217651 +
cctacccatgagcatggaatgt

SEQ ID NO: 82836 - DNA, 22 bp, Artificial Sequence
  Synthetic oligonucleotide; TTC chr11 5217630 5217651 5217647 5217652 +
ctacccatgagcatggaatgtt

SEQ ID NO: 82837 - DNA, 22 bp, Artificial Sequence
  Synthetic oligonucleotide; CTA chr11 5217633 5217654 5217650 5217655 +
cccatgagcatggaatgttctt

SEQ ID NO: 82838 - DNA, 22 bp, Artificial Sequence
  Synthetic oligonucleotide; TTC chr11 5217653 5217674 5217670 5217675 +
ttccatttgtttgtatcctctt

SEQ ID NO: 82839 - DNA, 22 bp, Artificial Sequence
  Synthetic oligonucleotide; CTT chr11 5217655 5217676 5217672 5217677 +
ccatttgtttgtatcctctttt

SEQ ID NO: 82840 - DNA, 22 bp, Artificial Sequence
  Synthetic oligonucleotide; TTC chr11 5217656 5217677 5217673 5217678 +
catttgtttgtatcctctttta

SEQ ID NO: 82841 - DNA, 22 bp, Artificial Sequence
  Synthetic oligonucleotide; TTT chr11 5217661 5217682 5217678 5217683 +
gtttgtatcctcttttatttca

SEQ ID NO: 82842 - DNA, 22 bp, Artificial Sequence
  Synthetic oligonucleotide; TTG chr11 5217662 5217683 5217679 5217684 +
tttgtatcctcttttatttcat

SEQ ID NO: 82843 - DNA, 22 bp, Artificial Sequence
  Synthetic oligonucleotide; TTT chr11 5217665 5217686 5217682 5217687 +
gtatcctcttttatttcattga

SEQ ID NO: 82844 - DNA, 22 bp, Artificial Sequence
  Synthetic oligonucleotide; TTG chr11 5217666 5217687 5217683 5217688 +
tatcctcttttatttcattgag

SEQ ID NO: 82845 - DNA, 22 bp, Artificial Sequence
  Synthetic oligonucleotide; CTC chr11 5217673 5217694 5217690 5217695 +
ttttatttcattgagcagtggt

SEQ ID NO: 82846 - DNA, 22 bp, Artificial Sequence
  Synthetic oligonucleotide; CTT chr11 5217675 5217696 5217692 5217697 +
ttatttcattgagcagtggttt

SEQ ID NO: 82847 - DNA, 22 bp, Artificial Sequence
  Synthetic oligonucleotide; TTT chr11 5217676 5217697 5217693 5217698 +
tatttcattgagcagtggtttg

SEQ ID NO: 82848 - DNA, 22 bp, Artificial Sequence
  Synthetic oligonucleotide; TTT chr11 5217677 5217698 5217694 5217699 +
atttcattgagcagtggtttgt

SEQ ID NO: 82849 - DNA, 22 bp, Artificial Sequence
  Synthetic oligonucleotide; TTA chr11 5217678 5217699 5217695 5217700 +
tttcattgagcagtggtttgta

SEQ ID NO: 82850 - DNA, 22 bp, Artificial Sequence
  Synthetic oligonucleotide; TTT chr11 5217681 5217702 5217698 5217703 +
cattgagcagtggtttgtagtt

SEQ ID NO: 82851 - DNA, 22 bp, Artificial Sequence
  Synthetic oligonucleotide; TTC chr11 5217682 5217703 5217699 5217704 +
attgagcagtggtttgtagttc

SEQ ID NO: 82852 - DNA, 22 bp, Artificial Sequence
  Synthetic oligonucleotide; TTG chr11 5217686 5217707 5217703 5217708 +
agcagtggtttgtagttctcct

SEQ ID NO: 82853 - DNA, 22 bp, Artificial Sequence
  Synthetic oligonucleotide; TTT chr11 5217697 5217718 5217714 5217719 +
gtagttctccttgaagaggtcc

SEQ ID NO: 82854 - DNA, 22 bp, Artificial Sequence
  Synthetic oligonucleotide; TTG chr11 5217698 5217719 5217715 5217720 +
tagttctccttgaagaggtcct

SEQ ID NO: 82855 - DNA, 22 bp, Artificial Sequence
  Synthetic oligonucleotide; TTC chr11 5217704 5217725 5217721 5217726 +
tccttgaagaggtccttcacat

SEQ ID NO: 82856 - DNA, 22 bp, Artificial Sequence
  Synthetic oligonucleotide; CTC chr11 5217706 5217727 5217723 5217728 +
cttgaagaggtccttcacatcc

SEQ ID NO: 82857 - DNA, 22 bp, Artificial Sequence
  Synthetic oligonucleotide; CTT chr11 5217709 5217730 5217726 5217731 +
gaagaggtccttcacatccctt

SEQ ID NO: 82858 - DNA, 22 bp, Artificial Sequence
  Synthetic oligonucleotide; TTG chr11 5217710 5217731 5217727 5217732 +
aagaggtccttcacatcccttg

SEQ ID NO: 82859 - DNA, 22 bp, Artificial Sequence
  Synthetic oligonucleotide; CTT chr11 5217721 5217742 5217738 5217743 +
cacatcccttgtaagttggatt

SEQ ID NO: 82860 - DNA, 22 bp, Artificial Sequence
  Synthetic oligonucleotide; TTC chr11 5217722 5217743 5217739 5217744 +
acatcccttgtaagttggattc

SEQ ID NO: 82861 - DNA, 22 bp, Artificial Sequence
  Synthetic oligonucleotide; CTT chr11 5217731 5217752 5217748 5217753 +
gtaagttggattcctaggtatt

SEQ ID NO: 82862 - DNA, 22 bp, Artificial Sequence
  Synthetic oligonucleotide; TTG chr11 5217732 5217753 5217749 5217754 +
taagttggattcctaggtattt

SEQ ID NO: 82863 - DNA, 22 bp, Artificial Sequence
  Synthetic oligonucleotide; TTG chr11 5217739 5217760 5217756 5217761 +
gattcctaggtattttattctc

SEQ ID NO: 82864 - DNA, 22 bp, Artificial Sequence
  Synthetic oligonucleotide; TTC chr11 5217744 5217765 5217761 5217766 +
ctaggtattttattctctttga

SEQ ID NO: 82865 - DNA, 22 bp, Artificial Sequence
  Synthetic oligonucleotide; CTA chr11 5217747 5217768 5217764 5217769 +
ggtattttattctctttgaagc

SEQ ID NO: 82866 - DNA, 22 bp, Artificial Sequence
  Synthetic oligonucleotide; TTT chr11 5217754 5217775 5217771 5217776 +
tattctctttgaagcaattgtg

SEQ ID NO: 82867 - DNA, 22 bp, Artificial Sequence
  Synthetic oligonucleotide; TTT chr11 5217755 5217776 5217772 5217777 +
attctctttgaagcaattgtga

SEQ ID NO: 82868 - DNA, 22 bp, Artificial Sequence
  Synthetic oligonucleotide; TTA chr11 5217756 5217777 5217773 5217778 +
ttctctttgaagcaattgtgaa

SEQ ID NO: 82869 - DNA, 22 bp, Artificial Sequence
  Synthetic oligonucleotide; TTC chr11 5217759 5217780 5217776 5217781 +
tctttgaagcaattgtgaatgg

SEQ ID NO: 82870 - DNA, 22 bp, Artificial Sequence
  Synthetic oligonucleotide; CTC chr11 5217761 5217782 5217778 5217783 +
tttgaagcaattgtgaatggga

SEQ ID NO: 82871 - DNA, 22 bp, Artificial Sequence
  Synthetic oligonucleotide; CTT chr11 5217763 5217784 5217780 5217785 +
tgaagcaattgtgaatgggagt

SEQ ID NO: 82872 - DNA, 22 bp, Artificial Sequence
  Synthetic oligonucleotide; TTT chr11 5217764 5217785 5217781 5217786 +
gaagcaattgtgaatgggagtt

SEQ ID NO: 82873 - DNA, 22 bp, Artificial Sequence
  Synthetic oligonucleotide; TTG chr11 5217765 5217786 5217782 5217787 +
aagcaattgtgaatgggagttc

SEQ ID NO: 82874 - DNA, 22 bp, Artificial Sequence
  Synthetic oligonucleotide; TTG chr11 5217774 5217795 5217791 5217796 +
tgaatgggagttcactcatgat

SEQ ID NO: 82875 - DNA, 22 bp, Artificial Sequence
  Synthetic oligonucleotide; TTC chr11 5217787 5217808 5217804 5217809 +
actcatgatttggctctctgtt

SEQ ID NO: 82876 - DNA, 22 bp, Artificial Sequence
  Synthetic oligonucleotide; CTC chr11 5217791 5217812 5217808 5217813 +
atgatttggctctctgtttgtc

SEQ ID NO: 82877 - DNA, 22 bp, Artificial Sequence
  Synthetic oligonucleotide; TTT chr11 5217798 5217819 5217815 5217820 +
ggctctctgtttgtctgttatt

SEQ ID NO: 82878 - DNA, 22 bp, Artificial Sequence
  Synthetic oligonucleotide; TTG chr11 5217799 5217820 5217816 5217821 +
gctctctgtttgtctgttattg

SEQ ID NO: 82879 - DNA, 22 bp, Artificial Sequence
  Synthetic oligonucleotide; CTC chr11 5217803 5217824 5217820 5217825 +
tctgtttgtctgttattggtgc

SEQ ID NO: 82880 - DNA, 22 bp, Artificial Sequence
  Synthetic oligonucleotide; CTC chr11 5217805 5217826 5217822 5217827 +
tgtttgtctgttattggtgcat

SEQ ID NO: 82881 - DNA, 22 bp, Artificial Sequence
  Synthetic oligonucleotide; CTG chr11 5217807 5217828 5217824 5217829 +
tttgtctgttattggtgcatag

SEQ ID NO: 82882 - DNA, 22 bp, Artificial Sequence
  Synthetic oligonucleotide; TTT chr11 5217810 5217831 5217827 5217832 +
gtctgttattggtgcataggaa

SEQ ID NO: 82883 - DNA, 22 bp, Artificial Sequence
  Synthetic oligonucleotide; TTG chr11 5217811 5217832 5217828 5217833 +
tctgttattggtgcataggaat

SEQ ID NO: 82884 - DNA, 22 bp, Artificial Sequence
  Synthetic oligonucleotide; CTG chr11 5217815 5217836 5217832 5217837 +
ttattggtgcataggaatactt

SEQ ID NO: 82885 - DNA, 22 bp, Artificial Sequence
  Synthetic oligonucleotide; TTA chr11 5217818 5217839 5217835 5217840 +
ttggtgcataggaatacttgtg

SEQ ID NO: 82886 - DNA, 22 bp, Artificial Sequence
  Synthetic oligonucleotide; TTG chr11 5217821 5217842 5217838 5217843 +
gtgcataggaatacttgtgatt

SEQ ID NO: 82887 - DNA, 22 bp, Artificial Sequence
  Synthetic oligonucleotide; CTT chr11 5217837 5217858 5217854 5217859 +
gtgatttttgcacactgatttt

SEQ ID NO: 82888 - DNA, 22 bp, Artificial Sequence
  Synthetic oligonucleotide; TTG chr11 5217838 5217859 5217855 5217860 +
tgatttttgcacactgatttta

SEQ ID NO: 82889 - DNA, 22 bp, Artificial Sequence
  Synthetic oligonucleotide; TTT chr11 5217844 5217865 5217861 5217866 +
ttgcacactgattttatatcct

SEQ ID NO: 82890 - DNA, 22 bp, Artificial Sequence
  Synthetic oligonucleotide; TTT chr11 5217845 5217866 5217862 5217867 +
tgcacactgattttatatcctg

SEQ ID NO: 82891 - DNA, 22 bp, Artificial Sequence
  Synthetic oligonucleotide; TTT chr11 5217846 5217867 5217863 5217868 +
gcacactgattttatatcctga

SEQ ID NO: 82892 - DNA, 22 bp, Artificial Sequence
  Synthetic oligonucleotide; TTG chr11 5217847 5217868 5217864 5217869 +
cacactgattttatatcctgag

SEQ ID NO: 82893 - DNA, 22 bp, Artificial Sequence
  Synthetic oligonucleotide; CTG chr11 5217854 5217875 5217871 5217876 +
attttatatcctgagactttgc

SEQ ID NO: 82894 - DNA, 22 bp, Artificial Sequence
  Synthetic oligonucleotide; TTT chr11 5217858 5217879 5217875 5217880 +
tatatcctgagactttgctgaa

SEQ ID NO: 82895 - DNA, 22 bp, Artificial Sequence
  Synthetic oligonucleotide; TTT chr11 5217859 5217880 5217876 5217881 +
atatcctgagactttgctgaag

SEQ ID NO: 82896 - DNA, 22 bp, Artificial Sequence
  Synthetic oligonucleotide; TTA chr11 5217860 5217881 5217877 5217882 +
tatcctgagactttgctgaagt

SEQ ID NO: 82897 - DNA, 22 bp, Artificial Sequence
  Synthetic oligonucleotide; CTG chr11 5217867 5217888 5217884 5217889 +
agactttgctgaagttgcttat

SEQ ID NO: 82898 - DNA, 22 bp, Artificial Sequence
  Synthetic oligonucleotide; CTT chr11 5217873 5217894 5217890 5217895 +
tgctgaagttgcttatcagctt

SEQ ID NO: 82899 - DNA, 22 bp, Artificial Sequence
  Synthetic oligonucleotide; TTT chr11 5217874 5217895 5217891 5217896 +
gctgaagttgcttatcagctta

SEQ ID NO: 82900 - DNA, 22 bp, Artificial Sequence
  Synthetic oligonucleotide; TTG chr11 5217875 5217896 5217892 5217897 +
ctgaagttgcttatcagcttaa

SEQ ID NO: 82901 - DNA, 22 bp, Artificial Sequence
  Synthetic oligonucleotide; CTG chr11 5217878 5217899 5217895 5217900 +
aagttgcttatcagcttaagga

SEQ ID NO: 82902 - DNA, 22 bp, Artificial Sequence
  Synthetic oligonucleotide; TTG chr11 5217884 5217905 5217901 5217906 +
cttatcagcttaaggagatttt

SEQ ID NO: 82903 - DNA, 22 bp, Artificial Sequence
  Synthetic oligonucleotide; CTT chr11 5217887 5217908 5217904 5217909 +
atcagcttaaggagattttggg

SEQ ID NO: 82904 - DNA, 22 bp, Artificial Sequence
  Synthetic oligonucleotide; TTA chr11 5217888 5217909 5217905 5217910 +
tcagcttaaggagattttgggc

SEQ ID NO: 82905 - DNA, 22 bp, Artificial Sequence
  Synthetic oligonucleotide; CTT chr11 5217895 5217916 5217912 5217917 +
aaggagattttgggctgagaca

SEQ ID NO: 82906 - DNA, 22 bp, Artificial Sequence
  Synthetic oligonucleotide; TTA chr11 5217896 5217917 5217913 5217918 +
aggagattttgggctgagacaa

SEQ ID NO: 82907 - DNA, 22 bp, Artificial Sequence
  Synthetic oligonucleotide; TTT chr11 5217905 5217926 5217922 5217927 +
tgggctgagacaatggggtttt

SEQ ID NO: 82908 - DNA, 22 bp, Artificial Sequence
  Synthetic oligonucleotide; TTT chr11 5217906 5217927 5217923 5217928 +
gggctgagacaatggggttttc

SEQ ID NO: 82909 - DNA, 22 bp, Artificial Sequence
  Synthetic oligonucleotide; TTG chr11 5217907 5217928 5217924 5217929 +
ggctgagacaatggggttttct

SEQ ID NO: 82910 - DNA, 22 bp, Artificial Sequence
  Synthetic oligonucleotide; CTG chr11 5217912 5217933 5217929 5217934 +
agacaatggggttttctagata

SEQ ID NO: 82911 - DNA, 22 bp, Artificial Sequence
  Synthetic oligonucleotide; TTT chr11 5217926 5217947 5217943 5217948 +
tctagatatacaatcatgtcat

SEQ ID NO: 82912 - DNA, 22 bp, Artificial Sequence
  Synthetic oligonucleotide; TTT chr11 5217927 5217948 5217944 5217949 +
ctagatatacaatcatgtcatc

SEQ ID NO: 82913 - DNA, 22 bp, Artificial Sequence
  Synthetic oligonucleotide; TTC chr11 5217928 5217949 5217945 5217950 +
tagatatacaatcatgtcatct

SEQ ID NO: 82914 - DNA, 22 bp, Artificial Sequence
  Synthetic oligonucleotide; CTA chr11 5217930 5217951 5217947 5217952 +
gatatacaatcatgtcatctgc

SEQ ID NO: 82915 - DNA, 22 bp, Artificial Sequence
  Synthetic oligonucleotide; CTG chr11 5217951 5217972 5217968 5217973 +
caaacagggacaatttcacttc

SEQ ID NO: 82916 - DNA, 22 bp, Artificial Sequence
  Synthetic oligonucleotide; TTT chr11 5217967 5217988 5217984 5217989 +
cacttcctcttttcctaattga

SEQ ID NO: 82917 - DNA, 22 bp, Artificial Sequence
  Synthetic oligonucleotide; TTC chr11 5217968 5217989 5217985 5217990 +
acttcctcttttcctaattgaa

SEQ ID NO: 82918 - DNA, 22 bp, Artificial Sequence
  Synthetic oligonucleotide; CTT chr11 5217972 5217993 5217989 5217994 +
cctcttttcctaattgaatgcc

SEQ ID NO: 82919 - DNA, 22 bp, Artificial Sequence
  Synthetic oligonucleotide; TTC chr11 5217973 5217994 5217990 5217995 +
ctcttttcctaattgaatgccc

SEQ ID NO: 82920 - DNA, 22 bp, Artificial Sequence
  Synthetic oligonucleotide; CTC chr11 5217976 5217997 5217993 5217998 +
ttttcctaattgaatgcccttt

SEQ ID NO: 82921 - DNA, 22 bp, Artificial Sequence
  Synthetic oligonucleotide; CTT chr11 5217978 5217999 5217995 5218000 +
ttcctaattgaatgccctttat

SEQ ID NO: 82922 - DNA, 22 bp, Artificial Sequence
  Synthetic oligonucleotide; TTT chr11 5217979 5218000 5217996 5218001 +
tcctaattgaatgccctttatt

SEQ ID NO: 82923 - DNA, 22 bp, Artificial Sequence
  Synthetic oligonucleotide; TTT chr11 5217980 5218001 5217997 5218002 +
cctaattgaatgccctttattt

SEQ ID NO: 82924 - DNA, 22 bp, Artificial Sequence
  Synthetic oligonucleotide; TTC chr11 5217981 5218002 5217998 5218003 +
ctaattgaatgccctttatttc

SEQ ID NO: 82925 - DNA, 22 bp, Artificial Sequence
  Synthetic oligonucleotide; CTA chr11 5217984 5218005 5218001 5218006 +
attgaatgccctttatttcctt

SEQ ID NO: 82926 - DNA, 22 bp, Artificial Sequence
  Synthetic oligonucleotide; TTG chr11 5217988 5218009 5218005 5218010 +
aatgccctttatttccttctcc

SEQ ID NO: 82927 - DNA, 22 bp, Artificial Sequence
  Synthetic oligonucleotide; CTT chr11 5217997 5218018 5218014 5218019 +
tatttccttctcctgcctgatt

SEQ ID NO: 82928 - DNA, 22 bp, Artificial Sequence
  Synthetic oligonucleotide; TTT chr11 5217998 5218019 5218015 5218020 +
atttccttctcctgcctgattg

SEQ ID NO: 82929 - DNA, 22 bp, Artificial Sequence
  Synthetic oligonucleotide; TTA chr11 5217999 5218020 5218016 5218021 +
tttccttctcctgcctgattgc

SEQ ID NO: 82930 - DNA, 22 bp, Artificial Sequence
  Synthetic oligonucleotide; TTT chr11 5218002 5218023 5218019 5218024 +
ccttctcctgcctgattgccct

SEQ ID NO: 82931 - DNA, 22 bp, Artificial Sequence
  Synthetic oligonucleotide; TTC chr11 5218003 5218024 5218020 5218025 +
cttctcctgcctgattgccctg

SEQ ID NO: 82932 - DNA, 22 bp, Artificial Sequence
  Synthetic oligonucleotide; CTT chr11 5218006 5218027 5218023 5218028 +
ctcctgcctgattgccctggcc

SEQ ID NO: 82933 - DNA, 22 bp, Artificial Sequence
  Synthetic oligonucleotide; TTC chr11 5218007 5218028 5218024 5218029 +
tcctgcctgattgccctggcca

SEQ ID NO: 82934 - DNA, 22 bp, Artificial Sequence
  Synthetic oligonucleotide; CTC chr11 5218009 5218030 5218026 5218031 +
ctgcctgattgccctggccaga

SEQ ID NO: 82935 - DNA, 22 bp, Artificial Sequence
  Synthetic oligonucleotide; CTG chr11 5218012 5218033 5218029 5218034 +
cctgattgccctggccagaact

SEQ ID NO: 82936 - DNA, 22 bp, Artificial Sequence
  Synthetic oligonucleotide; CTG chr11 5218016 5218037 5218033 5218038 +
attgccctggccagaacttaca

SEQ ID NO: 82937 - DNA, 22 bp, Artificial Sequence
  Synthetic oligonucleotide; TTG chr11 5218020 5218041 5218037 5218042 +
ccctggccagaacttacaacac

SEQ ID NO: 82938 - DNA, 22 bp, Artificial Sequence
  Synthetic oligonucleotide; CTG chr11 5218025 5218046 5218042 5218047 +
gccagaacttacaacactatgt

SEQ ID NO: 82939 - DNA, 22 bp, Artificial Sequence
  Synthetic oligonucleotide; CTT chr11 5218035 5218056 5218052 5218057 +
acaacactatgttgaataggag

SEQ ID NO: 82940 - DNA, 22 bp, Artificial Sequence
  Synthetic oligonucleotide; TTA chr11 5218036 5218057 5218053 5218058 +
caacactatgttgaataggagt

SEQ ID NO: 82941 - DNA, 22 bp, Artificial Sequence
  Synthetic oligonucleotide; CTA chr11 5218044 5218065 5218061 5218066 +
tgttgaataggagtggtgagag

SEQ ID NO: 82942 - DNA, 22 bp, Artificial Sequence
  Synthetic oligonucleotide; TTG chr11 5218049 5218070 5218066 5218071 +
aataggagtggtgagagagggc

SEQ ID NO: 82943 - DNA, 22 bp, Artificial Sequence
  Synthetic oligonucleotide; CTG chr11 5218078 5218099 5218095 5218100 +
ccttgtgccagttttcaaaggg

SEQ ID NO: 82944 - DNA, 22 bp, Artificial Sequence
  Synthetic oligonucleotide; CTT chr11 5218082 5218103 5218099 5218104 +
gtgccagttttcaaagggaatg

SEQ ID NO: 82945 - DNA, 22 bp, Artificial Sequence
  Synthetic oligonucleotide; TTG chr11 5218083 5218104 5218100 5218105 +
tgccagttttcaaagggaatgc

SEQ ID NO: 82946 - DNA, 22 bp, Artificial Sequence
  Synthetic oligonucleotide; TTT chr11 5218092 5218113 5218109 5218114 +
tcaaagggaatgcttccagttt

SEQ ID NO: 82947 - DNA, 22 bp, Artificial Sequence
  Synthetic oligonucleotide; TTT chr11 5218093 5218114 5218110 5218115 +
caaagggaatgcttccagtttt

SEQ ID NO: 82948 - DNA, 22 bp, Artificial Sequence
  Synthetic oligonucleotide; TTC chr11 5218094 5218115 5218111 5218116 +
aaagggaatgcttccagttttt

SEQ ID NO: 82949 - DNA, 22 bp, Artificial Sequence
  Synthetic oligonucleotide; CTT chr11 5218107 5218128 5218124 5218129 +
ccagtttttgtccactcagtat

SEQ ID NO: 82950 - DNA, 22 bp, Artificial Sequence
  Synthetic oligonucleotide; TTC chr11 5218108 5218129 5218125 5218130 +
cagtttttgtccactcagtatg

SEQ ID NO: 82951 - DNA, 22 bp, Artificial Sequence
  Synthetic oligonucleotide; TTT chr11 5218114 5218135 5218131 5218136 +
ttgtccactcagtatgatattg

SEQ ID NO: 82952 - DNA, 22 bp, Artificial Sequence
  Synthetic oligonucleotide; TTT chr11 5218115 5218136 5218132 5218137 +
tgtccactcagtatgatattgg

SEQ ID NO: 82953 - DNA, 22 bp, Artificial Sequence
  Synthetic oligonucleotide; TTT chr11 5218116 5218137 5218133 5218138 +
gtccactcagtatgatattggc

SEQ ID NO: 82954 - DNA, 22 bp, Artificial Sequence
  Synthetic oligonucleotide; TTG chr11 5218117 5218138 5218134 5218139 +
tccactcagtatgatattggct

SEQ ID NO: 82955 - DNA, 22 bp, Artificial Sequence
  Synthetic oligonucleotide; CTC chr11 5218124 5218145 5218141 5218146 +
agtatgatattggctgtgggtt

SEQ ID NO: 82956 - DNA, 22 bp, Artificial Sequence
  Synthetic oligonucleotide; TTG chr11 5218136 5218157 5218153 5218158 +
gctgtgggtttgtcatagatag

SEQ ID NO: 82957 - DNA, 22 bp, Artificial Sequence
  Synthetic oligonucleotide; CTG chr11 5218140 5218161 5218157 5218162 +
tgggtttgtcatagatagctct

SEQ ID NO: 82958 - DNA, 22 bp, Artificial Sequence
  Synthetic oligonucleotide; TTT chr11 5218147 5218168 5218164 5218169 +
gtcatagatagctcttattatt

SEQ ID NO: 82959 - DNA, 22 bp, Artificial Sequence
  Synthetic oligonucleotide; TTG chr11 5218148 5218169 5218165 5218170 +
tcatagatagctcttattattt

SEQ ID NO: 82960 - DNA, 22 bp, Artificial Sequence
  Synthetic oligonucleotide; CTC chr11 5218161 5218182 5218178 5218183 +
ttattattttgagatatgtccc

SEQ ID NO: 82961 - DNA, 22 bp, Artificial Sequence
  Synthetic oligonucleotide; CTT chr11 5218163 5218184 5218180 5218185 +
attattttgagatatgtcccat

SEQ ID NO: 82962 - DNA, 22 bp, Artificial Sequence
  Synthetic oligonucleotide; TTA chr11 5218164 5218185 5218181 5218186 +
ttattttgagatatgtcccatc

SEQ ID NO: 82963 - DNA, 22 bp, Artificial Sequence
  Synthetic oligonucleotide; TTA chr11 5218167 5218188 5218184 5218189 +
ttttgagatatgtcccatcaat

SEQ ID NO: 82964 - DNA, 22 bp, Artificial Sequence
  Synthetic oligonucleotide; TTT chr11 5218170 5218191 5218187 5218192 +
tgagatatgtcccatcaatacc

SEQ ID NO: 82965 - DNA, 22 bp, Artificial Sequence
  Synthetic oligonucleotide; TTT chr11 5218171 5218192 5218188 5218193 +
gagatatgtcccatcaatacct

SEQ ID NO: 82966 - DNA, 22 bp, Artificial Sequence
  Synthetic oligonucleotide; TTG chr11 5218172 5218193 5218189 5218194 +
agatatgtcccatcaataccta

SEQ ID NO: 82967 - DNA, 22 bp, Artificial Sequence
  Synthetic oligonucleotide; CTA chr11 5218194 5218215 5218211 5218216 +
atttattgagagtttttagcat

SEQ ID NO: 82968 - DNA, 22 bp, Artificial Sequence
  Synthetic oligonucleotide; TTT chr11 5218198 5218219 5218215 5218220 +
attgagagtttttagcatgaag

SEQ ID NO: 82969 - DNA, 22 bp, Artificial Sequence
  Synthetic oligonucleotide; TTA chr11 5218199 5218220 5218216 5218221 +
ttgagagtttttagcatgaagc

SEQ ID NO: 82970 - DNA, 22 bp, Artificial Sequence
  Synthetic oligonucleotide; TTG chr11 5218202 5218223 5218219 5218224 +
agagtttttagcatgaagcgtt

SEQ ID NO: 82971 - DNA, 22 bp, Artificial Sequence
  Synthetic oligonucleotide; TTT chr11 5218209 5218230 5218226 5218231 +
ttagcatgaagcgttgttgaat

SEQ ID NO: 82972 - DNA, 22 bp, Artificial Sequence
  Synthetic oligonucleotide; TTT chr11 5218210 5218231 5218227 5218232 +
tagcatgaagcgttgttgaatt

SEQ ID NO: 82973 - DNA, 22 bp, Artificial Sequence
  Synthetic oligonucleotide; TTT chr11 5218211 5218232 5218228 5218233 +
agcatgaagcgttgttgaattt

SEQ ID NO: 82974 - DNA, 22 bp, Artificial Sequence
  Synthetic oligonucleotide; TTA chr11 5218212 5218233 5218229 5218234 +
gcatgaagcgttgttgaatttt

SEQ ID NO: 82975 - DNA, 22 bp, Artificial Sequence
  Synthetic oligonucleotide; TTG chr11 5218225 5218246 5218242 5218247 +
ttgaattttgtcaaaggccttt

SEQ ID NO: 82976 - DNA, 22 bp, Artificial Sequence
  Synthetic oligonucleotide; TTG chr11 5218228 5218249 5218245 5218250 +
aattttgtcaaaggccttttct

SEQ ID NO: 82977 - DNA, 22 bp, Artificial Sequence
  Synthetic oligonucleotide; TTT chr11 5218233 5218254 5218250 5218255 +
tgtcaaaggccttttctgcatc

SEQ ID NO: 82978 - DNA, 22 bp, Artificial Sequence
  Synthetic oligonucleotide; TTT chr11 5218234 5218255 5218251 5218256 +
gtcaaaggccttttctgcatct

SEQ ID NO: 82979 - DNA, 22 bp, Artificial Sequence
  Synthetic oligonucleotide; TTG chr11 5218235 5218256 5218252 5218257 +
tcaaaggccttttctgcatcta

SEQ ID NO: 82980 - DNA, 22 bp, Artificial Sequence
  Synthetic oligonucleotide; CTT chr11 5218246 5218267 5218263 5218268 +
ttctgcatctattgagataatc

SEQ ID NO: 82981 - DNA, 22 bp, Artificial Sequence
  Synthetic oligonucleotide; TTT chr11 5218247 5218268 5218264 5218269 +
tctgcatctattgagataatca

SEQ ID NO: 82982 - DNA, 22 bp, Artificial Sequence
  Synthetic oligonucleotide; TTT chr11 5218248 5218269 5218265 5218270 +
ctgcatctattgagataatcat

SEQ ID NO: 82983 - DNA, 22 bp, Artificial Sequence
  Synthetic oligonucleotide; TTC chr11 5218249 5218270 5218266 5218271 +
tgcatctattgagataatcata

SEQ ID NO: 82984 - DNA, 22 bp, Artificial Sequence
  Synthetic oligonucleotide; CTG chr11 5218251 5218272 5218268 5218273 +
catctattgagataatcatatg

SEQ ID NO: 82985 - DNA, 22 bp, Artificial Sequence
  Synthetic oligonucleotide; CTA chr11 5218257 5218278 5218274 5218279 +
ttgagataatcatatggtttgt

SEQ ID NO: 82986 - DNA, 22 bp, Artificial Sequence
  Synthetic oligonucleotide; TTG chr11 5218260 5218281 5218277 5218282 +
agataatcatatggtttgtgtc

SEQ ID NO: 82987 - DNA, 22 bp, Artificial Sequence
  Synthetic oligonucleotide; TTT chr11 5218277 5218298 5218294 5218299 +
gtgtctttggttctgtttatat

SEQ ID NO: 82988 - DNA, 22 bp, Artificial Sequence
  Synthetic oligonucleotide; TTG chr11 5218278 5218299 5218295 5218300 +
tgtctttggttctgtttatatg

SEQ ID NO: 82989 - DNA, 22 bp, Artificial Sequence
  Synthetic oligonucleotide; CTT chr11 5218284 5218305 5218301 5218306 +
tggttctgtttatatgctggat

SEQ ID NO: 82990 - DNA, 22 bp, Artificial Sequence
  Synthetic oligonucleotide; TTT chr11 5218285 5218306 5218302 5218307 +
ggttctgtttatatgctggatt

SEQ ID NO: 82991 - DNA, 22 bp, Artificial Sequence
  Synthetic oligonucleotide; TTG chr11 5218286 5218307 5218303 5218308 +
gttctgtttatatgctggatta

SEQ ID NO: 82992 - DNA, 22 bp, Artificial Sequence
  Synthetic oligonucleotide; TTC chr11 5218290 5218311 5218307 5218312 +
tgtttatatgctggattatgtt

SEQ ID NO: 82993 - DNA, 22 bp, Artificial Sequence
  Synthetic oligonucleotide; CTG chr11 5218292 5218313 5218309 5218314 +
tttatatgctggattatgttta

SEQ ID NO: 82994 - DNA, 22 bp, Artificial Sequence
  Synthetic oligonucleotide; TTT chr11 5218295 5218316 5218312 5218317 +
atatgctggattatgtttattg

SEQ ID NO: 82995 - DNA, 22 bp, Artificial Sequence
  Synthetic oligonucleotide; TTA chr11 5218296 5218317 5218313 5218318 +
tatgctggattatgtttattga

SEQ ID NO: 82996 - DNA, 22 bp, Artificial Sequence
  Synthetic oligonucleotide; CTG chr11 5218303 5218324 5218320 5218325 +
gattatgtttattgattttcgt

SEQ ID NO: 82997 - DNA, 22 bp, Artificial Sequence
  Synthetic oligonucleotide; TTA chr11 5218308 5218329 5218325 5218330 +
tgtttattgattttcgtatgtt

SEQ ID NO: 82998 - DNA, 22 bp, Artificial Sequence
  Synthetic oligonucleotide; TTT chr11 5218313 5218334 5218330 5218335 +
attgattttcgtatgttgaacc

SEQ ID NO: 82999 - DNA, 22 bp, Artificial Sequence
  Synthetic oligonucleotide; TTA chr11 5218314 5218335 5218331 5218336 +
ttgattttcgtatgttgaacca

SEQ ID NO: 83000 - DNA, 22 bp, Artificial Sequence
  Synthetic oligonucleotide; TTG chr11 5218317 5218338 5218334 5218339 +
attttcgtatgttgaaccagcc

SEQ ID NO: 83001 - DNA, 22 bp, Artificial Sequence
  Synthetic oligonucleotide; TTT chr11 5218321 5218342 5218338 5218343 +
tcgtatgttgaaccagccttgc

SEQ ID NO: 83002 - DNA, 22 bp, Artificial Sequence
  Synthetic oligonucleotide; TTT chr11 5218322 5218343 5218339 5218344 +
cgtatgttgaaccagccttgca

SEQ ID NO: 83003 - DNA, 22 bp, Artificial Sequence
  Synthetic oligonucleotide; TTC chr11 5218323 5218344 5218340 5218345 +
gtatgttgaaccagccttgcat

SEQ ID NO: 83004 - DNA, 22 bp, Artificial Sequence
  Synthetic oligonucleotide; TTG chr11 5218331 5218352 5218348 5218353 +
aaccagccttgcatggcaggga

SEQ ID NO: 83005 - DNA, 22 bp, Artificial Sequence
  Synthetic oligonucleotide; CTT chr11 5218341 5218362 5218358 5218363 +
gcatggcagggatgaagcccac

SEQ ID NO: 83006 - DNA, 22 bp, Artificial Sequence
  Synthetic oligonucleotide; TTG chr11 5218342 5218363 5218359 5218364 +
catggcagggatgaagcccact

SEQ ID NO: 83007 - DNA, 22 bp, Artificial Sequence
  Synthetic oligonucleotide; CTT chr11 5218365 5218386 5218382 5218387 +
gatcatggtggatcagtttgcc

SEQ ID NO: 83008 - DNA, 22 bp, Artificial Sequence
  Synthetic oligonucleotide; TTG chr11 5218366 5218387 5218383 5218388 +
atcatggtggatcagtttgcca

SEQ ID NO: 83009 - DNA, 22 bp, Artificial Sequence
  Synthetic oligonucleotide; TTT chr11 5218384 5218405 5218401 5218406 +
gccagtattttattgaggattt

SEQ ID NO: 83010 - DNA, 22 bp, Artificial Sequence
  Synthetic oligonucleotide; TTG chr11 5218385 5218406 5218402 5218407 +
ccagtattttattgaggatttt

SEQ ID NO: 83011 - DNA, 22 bp, Artificial Sequence
  Synthetic oligonucleotide; TTT chr11 5218394 5218415 5218411 5218416 +
tattgaggatttttgcatcaat

SEQ ID NO: 83012 - DNA, 22 bp, Artificial Sequence
  Synthetic oligonucleotide; TTT chr11 5218395 5218416 5218412 5218417 +
attgaggatttttgcatcaatg

SEQ ID NO: 83013 - DNA, 22 bp, Artificial Sequence
  Synthetic oligonucleotide; TTA chr11 5218396 5218417 5218413 5218418 +
ttgaggatttttgcatcaatgt

SEQ ID NO: 83014 - DNA, 22 bp, Artificial Sequence
  Synthetic oligonucleotide; TTG chr11 5218399 5218420 5218416 5218421 +
aggatttttgcatcaatgttca

SEQ ID NO: 83015 - DNA, 22 bp, Artificial Sequence
  Synthetic oligonucleotide; TTT chr11 5218406 5218427 5218423 5218428 +
ttgcatcaatgttcatcaagga

SEQ ID NO: 83016 - DNA, 22 bp, Artificial Sequence
  Synthetic oligonucleotide; TTT chr11 5218407 5218428 5218424 5218429 +
tgcatcaatgttcatcaaggat

SEQ ID NO: 83017 - DNA, 22 bp, Artificial Sequence
  Synthetic oligonucleotide; TTT chr11 5218408 5218429 5218425 5218430 +
gcatcaatgttcatcaaggata

SEQ ID NO: 83018 - DNA, 22 bp, Artificial Sequence
  Synthetic oligonucleotide; TTG chr11 5218409 5218430 5218426 5218431 +
catcaatgttcatcaaggatat

SEQ ID NO: 83019 - DNA, 22 bp, Artificial Sequence
  Synthetic oligonucleotide; TTC chr11 5218420 5218441 5218437 5218442 +
atcaaggatattggtgtaacat

SEQ ID NO: 83020 - DNA, 22 bp, Artificial Sequence
  Synthetic oligonucleotide; TTG chr11 5218433 5218454 5218450 5218455 +
gtgtaacattctctttttttgt

SEQ ID NO: 83021 - DNA, 22 bp, Artificial Sequence
  Synthetic oligonucleotide; TTC chr11 5218444 5218465 5218461 5218466 +
tctttttttgttgtgtctctgt

SEQ ID NO: 83022 - DNA, 22 bp, Artificial Sequence
  Synthetic oligonucleotide; CTC chr11 5218446 5218467 5218463 5218468 +
tttttttgttgtgtctctgtca

SEQ ID NO: 83023 - DNA, 22 bp, Artificial Sequence
  Synthetic oligonucleotide; CTT chr11 5218448 5218469 5218465 5218470 +
tttttgttgtgtctctgtcagg

SEQ ID NO: 83024 - DNA, 22 bp, Artificial Sequence
  Synthetic oligonucleotide; TTT chr11 5218449 5218470 5218466 5218471 +
ttttgttgtgtctctgtcaggc

SEQ ID NO: 83025 - DNA, 22 bp, Artificial Sequence
  Synthetic oligonucleotide; TTT chr11 5218450 5218471 5218467 5218472 +
tttgttgtgtctctgtcaggct

SEQ ID NO: 83026 - DNA, 22 bp, Artificial Sequence
  Synthetic oligonucleotide; TTT chr11 5218451 5218472 5218468 5218473 +
ttgttgtgtctctgtcaggctt

SEQ ID NO: 83027 - DNA, 22 bp, Artificial Sequence
  Synthetic oligonucleotide; TTT chr11 5218452 5218473 5218469 5218474 +
tgttgtgtctctgtcaggcttt

SEQ ID NO: 83028 - DNA, 22 bp, Artificial Sequence
  Synthetic oligonucleotide; TTT chr11 5218453 5218474 5218470 5218475 +
gttgtgtctctgtcaggctttg

SEQ ID NO: 83029 - DNA, 22 bp, Artificial Sequence
  Synthetic oligonucleotide; TTG chr11 5218454 5218475 5218471 5218476 +
ttgtgtctctgtcaggctttgg

SEQ ID NO: 83030 - DNA, 22 bp, Artificial Sequence
  Synthetic oligonucleotide; TTG chr11 5218457 5218478 5218474 5218479 +
tgtctctgtcaggctttggtat

SEQ ID NO: 83031 - DNA, 22 bp, Artificial Sequence
  Synthetic oligonucleotide; CTC chr11 5218463 5218484 5218480 5218485 +
tgtcaggctttggtatcaggat

SEQ ID NO: 83032 - DNA, 22 bp, Artificial Sequence
  Synthetic oligonucleotide; CTG chr11 5218465 5218486 5218482 5218487 +
tcaggctttggtatcaggatga

SEQ ID NO: 83033 - DNA, 22 bp, Artificial Sequence
  Synthetic oligonucleotide; CTT chr11 5218473 5218494 5218490 5218495 +
tggtatcaggatgatgctggcc

SEQ ID NO: 83034 - DNA, 22 bp, Artificial Sequence
  Synthetic oligonucleotide; TTT chr11 5218474 5218495 5218491 5218496 +
ggtatcaggatgatgctggcct

SEQ ID NO: 83035 - DNA, 22 bp, Artificial Sequence
  Synthetic oligonucleotide; TTG chr11 5218475 5218496 5218492 5218497 +
gtatcaggatgatgctggcctc

SEQ ID NO: 83036 - DNA, 22 bp, Artificial Sequence
  Synthetic oligonucleotide; CTG chr11 5218492 5218513 5218509 5218514 +
gcctcataaaatgagttaggga

SEQ ID NO: 83037 - DNA, 22 bp, Artificial Sequence
  Synthetic oligonucleotide; CTC chr11 5218497 5218518 5218514 5218519 +
ataaaatgagttagggaggatt

SEQ ID NO: 83038 - DNA, 22 bp, Artificial Sequence
  Synthetic oligonucleotide; TTA chr11 5218510 5218531 5218527 5218532 +
gggaggattccctctttttcta

SEQ ID NO: 83039 - DNA, 22 bp, Artificial Sequence
  Synthetic oligonucleotide; TTC chr11 5218520 5218541 5218537 5218542 +
cctctttttctattgattggaa

SEQ ID NO: 83040 - DNA, 22 bp, Artificial Sequence
  Synthetic oligonucleotide; CTC chr11 5218524 5218545 5218541 5218546 +
tttttctattgattggaatagt

SEQ ID NO: 83041 - DNA, 22 bp, Artificial Sequence
  Synthetic oligonucleotide; CTT chr11 5218526 5218547 5218543 5218548 +
tttctattgattggaatagttt

SEQ ID NO: 83042 - DNA, 22 bp, Artificial Sequence
  Synthetic oligonucleotide; TTT chr11 5218527 5218548 5218544 5218549 +
ttctattgattggaatagtttc

SEQ ID NO: 83043 - DNA, 22 bp, Artificial Sequence
  Synthetic oligonucleotide; TTT chr11 5218528 5218549 5218545 5218550 +
tctattgattggaatagtttca

SEQ ID NO: 83044 - DNA, 22 bp, Artificial Sequence
  Synthetic oligonucleotide; TTT chr11 5218529 5218550 5218546 5218551 +
ctattgattggaatagtttcag

SEQ ID NO: 83045 - DNA, 22 bp, Artificial Sequence
  Synthetic oligonucleotide; TTC chr11 5218530 5218551 5218547 5218552 +
tattgattggaatagtttcaga

SEQ ID NO: 83046 - DNA, 22 bp, Artificial Sequence
  Synthetic oligonucleotide; CTA chr11 5218532 5218553 5218549 5218554 +
ttgattggaatagtttcagaag

SEQ ID NO: 83047 - DNA, 22 bp, Artificial Sequence
  Synthetic oligonucleotide; TTG chr11 5218535 5218556 5218552 5218557 +
attggaatagtttcagaaggaa

SEQ ID NO: 83048 - DNA, 22 bp, Artificial Sequence
  Synthetic oligonucleotide; TTG chr11 5218539 5218560 5218556 5218561 +
gaatagtttcagaaggaatggt

SEQ ID NO: 83049 - DNA, 22 bp, Artificial Sequence
  Synthetic oligonucleotide; TTT chr11 5218548 5218569 5218565 5218570 +
cagaaggaatggtaccagctcc

SEQ ID NO: 83050 - DNA, 22 bp, Artificial Sequence
  Synthetic oligonucleotide; TTC chr11 5218549 5218570 5218566 5218571 +
agaaggaatggtaccagctcct

SEQ ID NO: 83051 - DNA, 22 bp, Artificial Sequence
  Synthetic oligonucleotide; CTC chr11 5218569 5218590 5218586 5218591 +
ctccttgtacctctggtagaat

SEQ ID NO: 83052 - DNA, 22 bp, Artificial Sequence
  Synthetic oligonucleotide; CTC chr11 5218572 5218593 5218589 5218594 +
cttgtacctctggtagaattcg

SEQ ID NO: 83053 - DNA, 22 bp, Artificial Sequence
  Synthetic oligonucleotide; CTT chr11 5218575 5218596 5218592 5218597 +
gtacctctggtagaattcggct

SEQ ID NO: 83054 - DNA, 22 bp, Artificial Sequence
  Synthetic oligonucleotide; TTG chr11 5218576 5218597 5218593 5218598 +
tacctctggtagaattcggcta

SEQ ID NO: 83055 - DNA, 22 bp, Artificial Sequence
  Synthetic oligonucleotide; CTC chr11 5218582 5218603 5218599 5218604 +
tggtagaattcggctatgaatc

SEQ ID NO: 83056 - DNA, 22 bp, Artificial Sequence
  Synthetic oligonucleotide; CTG chr11 5218584 5218605 5218601 5218606 +
gtagaattcggctatgaatcct

SEQ ID NO: 83057 - DNA, 22 bp, Artificial Sequence
  Synthetic oligonucleotide; TTC chr11 5218593 5218614 5218610 5218615 +
ggctatgaatcctactggtccc

SEQ ID NO: 83058 - DNA, 22 bp, Artificial Sequence
  Synthetic oligonucleotide; CTA chr11 5218598 5218619 5218615 5218620 +
tgaatcctactggtcccggact

SEQ ID NO: 83059 - DNA, 22 bp, Artificial Sequence
  Synthetic oligonucleotide; CTA chr11 5218607 5218628 5218624 5218629 +
ctggtcccggactttttttggt

SEQ ID NO: 83060 - DNA, 22 bp, Artificial Sequence
  Synthetic oligonucleotide; CTG chr11 5218610 5218631 5218627 5218632 +
gtcccggactttttttggttga

SEQ ID NO: 83061 - DNA, 22 bp, Artificial Sequence
  Synthetic oligonucleotide; CTT chr11 5218621 5218642 5218638 5218643 +
tttttggttgataagctattaa

SEQ ID NO: 83062 - DNA, 22 bp, Artificial Sequence
  Synthetic oligonucleotide; TTT chr11 5218622 5218643 5218639 5218644 +
ttttggttgataagctattaat

SEQ ID NO: 83063 - DNA, 22 bp, Artificial Sequence
  Synthetic oligonucleotide; TTT chr11 5218623 5218644 5218640 5218645 +
tttggttgataagctattaatt

SEQ ID NO: 83064 - DNA, 22 bp, Artificial Sequence
  Synthetic oligonucleotide; TTT chr11 5218624 5218645 5218641 5218646 +
ttggttgataagctattaatta

SEQ ID NO: 83065 - DNA, 22 bp, Artificial Sequence
  Synthetic oligonucleotide; TTT chr11 5218625 5218646 5218642 5218647 +
tggttgataagctattaattat

SEQ ID NO: 83066 - DNA, 22 bp, Artificial Sequence
  Synthetic oligonucleotide; TTT chr11 5218626 5218647 5218643 5218648 +
ggttgataagctattaattatt

SEQ ID NO: 83067 - DNA, 22 bp, Artificial Sequence
  Synthetic oligonucleotide; TTG chr11 5218627 5218648 5218644 5218649 +
gttgataagctattaattattg

SEQ ID NO: 83068 - DNA, 22 bp, Artificial Sequence
  Synthetic oligonucleotide; TTG chr11 5218631 5218652 5218648 5218653 +
ataagctattaattattgcctc

SEQ ID NO: 83069 - DNA, 22 bp, Artificial Sequence
  Synthetic oligonucleotide; CTA chr11 5218639 5218660 5218656 5218661 +
ttaattattgcctcaatttcag

SEQ ID NO: 83070 - DNA, 22 bp, Artificial Sequence
  Synthetic oligonucleotide; TTA chr11 5218642 5218663 5218659 5218664 +
attattgcctcaatttcagagc

SEQ ID NO: 83071 - DNA, 22 bp, Artificial Sequence
  Synthetic oligonucleotide; TTA chr11 5218646 5218667 5218663 5218668 +
ttgcctcaatttcagagcctgt

SEQ ID NO: 83072 - DNA, 22 bp, Artificial Sequence
  Synthetic oligonucleotide; TTG chr11 5218649 5218670 5218666 5218671 +
cctcaatttcagagcctgttat

SEQ ID NO: 83073 - DNA, 22 bp, Artificial Sequence
  Synthetic oligonucleotide; CTC chr11 5218653 5218674 5218670 5218675 +
aatttcagagcctgttattggt

SEQ ID NO: 83074 - DNA, 22 bp, Artificial Sequence
  Synthetic oligonucleotide; TTT chr11 5218658 5218679 5218675 5218680 +
cagagcctgttattggtctatt

SEQ ID NO: 83075 - DNA, 22 bp, Artificial Sequence
  Synthetic oligonucleotide; TTC chr11 5218659 5218680 5218676 5218681 +
agagcctgttattggtctattc

SEQ ID NO: 83076 - DNA, 22 bp, Artificial Sequence
  Synthetic oligonucleotide; CTG chr11 5218667 5218688 5218684 5218689 +
ttattggtctattcagagatac

SEQ ID NO: 83077 - DNA, 22 bp, Artificial Sequence
  Synthetic oligonucleotide; TTA chr11 5218670 5218691 5218687 5218692 +
ttggtctattcagagatacaac

SEQ ID NO: 83078 - DNA, 22 bp, Artificial Sequence
  Synthetic oligonucleotide; TTG chr11 5218673 5218694 5218690 5218695 +
gtctattcagagatacaacttc

SEQ ID NO: 83079 - DNA, 22 bp, Artificial Sequence
  Synthetic oligonucleotide; CTA chr11 5218678 5218699 5218695 5218700 +
ttcagagatacaacttcttcct

SEQ ID NO: 83080 - DNA, 22 bp, Artificial Sequence
  Synthetic oligonucleotide; TTC chr11 5218681 5218702 5218698 5218703 +
agagatacaacttcttcctggt

SEQ ID NO: 83081 - DNA, 22 bp, Artificial Sequence
  Synthetic oligonucleotide; CTT chr11 5218694 5218715 5218711 5218716 +
cttcctggtttagtcttggcag

SEQ ID NO: 83082 - DNA, 22 bp, Artificial Sequence
  Synthetic oligonucleotide; TTC chr11 5218695 5218716 5218712 5218717 +
ttcctggtttagtcttggcaga

SEQ ID NO: 83083 - DNA, 22 bp, Artificial Sequence
  Synthetic oligonucleotide; CTT chr11 5218697 5218718 5218714 5218719 +
cctggtttagtcttggcagagt

SEQ ID NO: 83084 - DNA, 22 bp, Artificial Sequence
  Synthetic oligonucleotide; TTC chr11 5218698 5218719 5218715 5218720 +
ctggtttagtcttggcagagtg

SEQ ID NO: 83085 - DNA, 22 bp, Artificial Sequence
  Synthetic oligonucleotide; CTG chr11 5218701 5218722 5218718 5218723 +
gtttagtcttggcagagtgtat

SEQ ID NO: 83086 - DNA, 22 bp, Artificial Sequence
  Synthetic oligonucleotide; TTT chr11 5218705 5218726 5218722 5218727 +
agtcttggcagagtgtatgtgt

SEQ ID NO: 83087 - DNA, 22 bp, Artificial Sequence
  Synthetic oligonucleotide; TTA chr11 5218706 5218727 5218723 5218728 +
gtcttggcagagtgtatgtgtc

SEQ ID NO: 83088 - DNA, 22 bp, Artificial Sequence
  Synthetic oligonucleotide; CTT chr11 5218711 5218732 5218728 5218733 +
ggcagagtgtatgtgtcgagga

SEQ ID NO: 83089 - DNA, 22 bp, Artificial Sequence
  Synthetic oligonucleotide; TTG chr11 5218712 5218733 5218729 5218734 +
gcagagtgtatgtgtcgaggaa

SEQ ID NO: 83090 - DNA, 22 bp, Artificial Sequence
  Synthetic oligonucleotide; TTT chr11 5218737 5218758 5218754 5218759 +
atccatttcttctagattttct

SEQ ID NO: 83091 - DNA, 22 bp, Artificial Sequence
  Synthetic oligonucleotide; TTA chr11 5218738 5218759 5218755 5218760 +
tccatttcttctagattttcta

SEQ ID NO: 83092 - DNA, 22 bp, Artificial Sequence
  Synthetic oligonucleotide; TTT chr11 5218745 5218766 5218762 5218767 +
cttctagattttctagtttatt

SEQ ID NO: 83093 - DNA, 22 bp, Artificial Sequence
  Synthetic oligonucleotide; TTC chr11 5218746 5218767 5218763 5218768 +
ttctagattttctagtttattt

SEQ ID NO: 83094 - DNA, 22 bp, Artificial Sequence
  Synthetic oligonucleotide; CTT chr11 5218748 5218769 5218765 5218770 +
ctagattttctagtttatttgc

SEQ ID NO: 83095 - DNA, 22 bp, Artificial Sequence
  Synthetic oligonucleotide; TTC chr11 5218749 5218770 5218766 5218771 +
tagattttctagtttatttgcg

SEQ ID NO: 83096 - DNA, 22 bp, Artificial Sequence
  Synthetic oligonucleotide; CTA chr11 5218751 5218772 5218768 5218773 +
gattttctagtttatttgcgta

SEQ ID NO: 83097 - DNA, 22 bp, Artificial Sequence
  Synthetic oligonucleotide; TTT chr11 5218756 5218777 5218773 5218778 +
tctagtttatttgcgtagaggt

SEQ ID NO: 83098 - DNA, 22 bp, Artificial Sequence
  Synthetic oligonucleotide; TTT chr11 5218757 5218778 5218774 5218779 +
ctagtttatttgcgtagaggtg

SEQ ID NO: 83099 - DNA, 22 bp, Artificial Sequence
  Synthetic oligonucleotide; TTC chr11 5218758 5218779 5218775 5218780 +
tagtttatttgcgtagaggtgt

SEQ ID NO: 83100 - DNA, 22 bp, Artificial Sequence
  Synthetic oligonucleotide; CTA chr11 5218760 5218781 5218777 5218782 +
gtttatttgcgtagaggtgttt

SEQ ID NO: 83101 - DNA, 22 bp, Artificial Sequence
  Synthetic oligonucleotide; TTT chr11 5218764 5218785 5218781 5218786 +
atttgcgtagaggtgtttatag

SEQ ID NO: 83102 - DNA, 22 bp, Artificial Sequence
  Synthetic oligonucleotide; TTA chr11 5218765 5218786 5218782 5218787 +
tttgcgtagaggtgtttatagt

SEQ ID NO: 83103 - DNA, 22 bp, Artificial Sequence
  Synthetic oligonucleotide; TTT chr11 5218768 5218789 5218785 5218790 +
gcgtagaggtgtttatagtatt

SEQ ID NO: 83104 - DNA, 22 bp, Artificial Sequence
  Synthetic oligonucleotide; TTG chr11 5218769 5218790 5218786 5218791 +
cgtagaggtgtttatagtattc

SEQ ID NO: 83105 - DNA, 22 bp, Artificial Sequence
  Synthetic oligonucleotide; TTT chr11 5218782 5218803 5218799 5218804 +
atagtattctctgacggtagtt

SEQ ID NO: 83106 - DNA, 22 bp, Artificial Sequence
  Synthetic oligonucleotide; TTA chr11 5218783 5218804 5218800 5218805 +
tagtattctctgacggtagttt

SEQ ID NO: 83107 - DNA, 22 bp, Artificial Sequence
  Synthetic oligonucleotide; TTC chr11 5218791 5218812 5218808 5218813 +
tctgacggtagtttgtatttct

SEQ ID NO: 83108 - DNA, 22 bp, Artificial Sequence
  Synthetic oligonucleotide; CTC chr11 5218793 5218814 5218810 5218815 +
tgacggtagtttgtatttctgt

SEQ ID NO: 83109 - DNA, 22 bp, Artificial Sequence
  Synthetic oligonucleotide; CTG chr11 5218795 5218816 5218812 5218817 +
acggtagtttgtatttctgtgg

SEQ ID NO: 83110 - DNA, 22 bp, Artificial Sequence
  Synthetic oligonucleotide; TTT chr11 5218805 5218826 5218822 5218827 +
gtatttctgtgggatcagtggt

SEQ ID NO: 83111 - DNA, 22 bp, Artificial Sequence
  Synthetic oligonucleotide; TTG chr11 5218806 5218827 5218823 5218828 +
tatttctgtgggatcagtggtg

SEQ ID NO: 83112 - DNA, 22 bp, Artificial Sequence
  Synthetic oligonucleotide; TTT chr11 5218811 5218832 5218828 5218833 +
ctgtgggatcagtggtgatacc

SEQ ID NO: 83113 - DNA, 22 bp, Artificial Sequence
  Synthetic oligonucleotide; TTC chr11 5218812 5218833 5218829 5218834 +
tgtgggatcagtggtgataccc

SEQ ID NO: 83114 - DNA, 22 bp, Artificial Sequence
  Synthetic oligonucleotide; CTG chr11 5218814 5218835 5218831 5218836 +
tgggatcagtggtgataccccg

SEQ ID NO: 83115 - DNA, 22 bp, Artificial Sequence
  Synthetic oligonucleotide; TTT chr11 5218844 5218865 5218861 5218866 +
tttattgcgtctatttgattct

SEQ ID NO: 83116 - DNA, 22 bp, Artificial Sequence
  Synthetic oligonucleotide; TTT chr11 5218845 5218866 5218862 5218867 +
ttattgcgtctatttgattctt

SEQ ID NO: 83117 - DNA, 22 bp, Artificial Sequence
  Synthetic oligonucleotide; TTT chr11 5218846 5218867 5218863 5218868 +
tattgcgtctatttgattcttc

SEQ ID NO: 83118 - DNA, 22 bp, Artificial Sequence
  Synthetic oligonucleotide; TTT chr11 5218847 5218868 5218864 5218869 +
attgcgtctatttgattcttct

SEQ ID NO: 83119 - DNA, 22 bp, Artificial Sequence
  Synthetic oligonucleotide; TTA chr11 5218848 5218869 5218865 5218870 +
ttgcgtctatttgattcttctc

SEQ ID NO: 83120 - DNA, 22 bp, Artificial Sequence
  Synthetic oligonucleotide; TTG chr11 5218851 5218872 5218868 5218873 +
cgtctatttgattcttctctct

SEQ ID NO: 83121 - DNA, 22 bp, Artificial Sequence
  Synthetic oligonucleotide; CTA chr11 5218857 5218878 5218874 5218879 +
tttgattcttctctcttttctt

SEQ ID NO: 83122 - DNA, 22 bp, Artificial Sequence
  Synthetic oligonucleotide; TTT chr11 5218860 5218881 5218877 5218882 +
gattcttctctcttttcttctt

SEQ ID NO: 83123 - DNA, 22 bp, Artificial Sequence
  Synthetic oligonucleotide; TTG chr11 5218861 5218882 5218878 5218883 +
attcttctctcttttcttcttt

SEQ ID NO: 83124 - DNA, 22 bp, Artificial Sequence
  Synthetic oligonucleotide; TTC chr11 5218865 5218886 5218882 5218887 +
ttctctcttttcttctttatta

SEQ ID NO: 83125 - DNA, 22 bp, Artificial Sequence
  Synthetic oligonucleotide; CTT chr11 5218867 5218888 5218884 5218889 +
ctctcttttcttctttattagt

SEQ ID NO: 83126 - DNA, 22 bp, Artificial Sequence
  Synthetic oligonucleotide; TTC chr11 5218868 5218889 5218885 5218890 +
tctcttttcttctttattagtc

SEQ ID NO: 83127 - DNA, 22 bp, Artificial Sequence
  Synthetic oligonucleotide; CTC chr11 5218870 5218891 5218887 5218892 +
tcttttcttctttattagtctt

SEQ ID NO: 83128 - DNA, 22 bp, Artificial Sequence
  Synthetic oligonucleotide; CTC chr11 5218872 5218893 5218889 5218894 +
ttttcttctttattagtcttgc

SEQ ID NO: 83129 - DNA, 22 bp, Artificial Sequence
  Synthetic oligonucleotide; CTT chr11 5218874 5218895 5218891 5218896 +
ttcttctttattagtcttgcta

SEQ ID NO: 83130 - DNA, 22 bp, Artificial Sequence
  Synthetic oligonucleotide; TTT chr11 5218875 5218896 5218892 5218897 +
tcttctttattagtcttgctag

SEQ ID NO: 83131 - DNA, 22 bp, Artificial Sequence
  Synthetic oligonucleotide; TTT chr11 5218876 5218897 5218893 5218898 +
cttctttattagtcttgctagc

SEQ ID NO: 83132 - DNA, 22 bp, Artificial Sequence
  Synthetic oligonucleotide; TTC chr11 5218877 5218898 5218894 5218899 +
ttctttattagtcttgctagca

SEQ ID NO: 83133 - DNA, 22 bp, Artificial Sequence
  Synthetic oligonucleotide; CTT chr11 5218879 5218900 5218896 5218901 +
ctttattagtcttgctagcagt

SEQ ID NO: 83134 - DNA, 22 bp, Artificial Sequence
  Synthetic oligonucleotide; TTC chr11 5218880 5218901 5218897 5218902 +
tttattagtcttgctagcagtc

SEQ ID NO: 83135 - DNA, 22 bp, Artificial Sequence
  Synthetic oligonucleotide; CTT chr11 5218882 5218903 5218899 5218904 +
tattagtcttgctagcagtcta

SEQ ID NO: 83136 - DNA, 22 bp, Artificial Sequence
  Synthetic oligonucleotide; TTT chr11 5218883 5218904 5218900 5218905 +
attagtcttgctagcagtctat

SEQ ID NO: 83137 - DNA, 22 bp, Artificial Sequence
  Synthetic oligonucleotide; TTA chr11 5218884 5218905 5218901 5218906 +
ttagtcttgctagcagtctatc

SEQ ID NO: 83138 - DNA, 22 bp, Artificial Sequence
  Synthetic oligonucleotide; TTA chr11 5218887 5218908 5218904 5218909 +
gtcttgctagcagtctatcaat

SEQ ID NO: 83139 - DNA, 22 bp, Artificial Sequence
  Synthetic oligonucleotide; CTT chr11 5218892 5218913 5218909 5218914 +
gctagcagtctatcaattttgt

SEQ ID NO: 83140 - DNA, 22 bp, Artificial Sequence
  Synthetic oligonucleotide; TTG chr11 5218893 5218914 5218910 5218915 +
ctagcagtctatcaattttgtt

SEQ ID NO: 83141 - DNA, 22 bp, Artificial Sequence
  Synthetic oligonucleotide; CTA chr11 5218896 5218917 5218913 5218918 +
gcagtctatcaattttgttgat

SEQ ID NO: 83142 - DNA, 22 bp, Artificial Sequence
  Synthetic oligonucleotide; CTA chr11 5218904 5218925 5218921 5218926 +
tcaattttgttgatcttttcaa

SEQ ID NO: 83143 - DNA, 22 bp, Artificial Sequence
  Synthetic oligonucleotide; TTT chr11 5218911 5218932 5218928 5218933 +
tgttgatcttttcaaaaaaaca

SEQ ID NO: 83144 - DNA, 22 bp, Artificial Sequence
  Synthetic oligonucleotide; TTT chr11 5218912 5218933 5218929 5218934 +
gttgatcttttcaaaaaaacag

SEQ ID NO: 83145 - DNA, 22 bp, Artificial Sequence
  Synthetic oligonucleotide; TTG chr11 5218913 5218934 5218930 5218935 +
ttgatcttttcaaaaaaacagc

SEQ ID NO: 83146 - DNA, 22 bp, Artificial Sequence
  Synthetic oligonucleotide; TTG chr11 5218916 5218937 5218933 5218938 +
atcttttcaaaaaaacagcttc

SEQ ID NO: 83147 - DNA, 22 bp, Artificial Sequence
  Synthetic oligonucleotide; CTT chr11 5218921 5218942 5218938 5218943 +
ttcaaaaaaacagcttctggat

SEQ ID NO: 83148 - DNA, 22 bp, Artificial Sequence
  Synthetic oligonucleotide; TTT chr11 5218922 5218943 5218939 5218944 +
tcaaaaaaacagcttctggatt

SEQ ID NO: 83149 - DNA, 22 bp, Artificial Sequence
  Synthetic oligonucleotide; TTT chr11 5218923 5218944 5218940 5218945 +
caaaaaaacagcttctggattc

SEQ ID NO: 83150 - DNA, 22 bp, Artificial Sequence
  Synthetic oligonucleotide; TTC chr11 5218924 5218945 5218941 5218946 +
aaaaaaacagcttctggattca

SEQ ID NO: 83151 - DNA, 22 bp, Artificial Sequence
  Synthetic oligonucleotide; CTT chr11 5218937 5218958 5218954 5218959 +
ctggattcattgatttttttga

SEQ ID NO: 83152 - DNA, 22 bp, Artificial Sequence
  Synthetic oligonucleotide; TTC chr11 5218938 5218959 5218955 5218960 +
tggattcattgatttttttgaa

SEQ ID NO: 83153 - DNA, 22 bp, Artificial Sequence
  Synthetic oligonucleotide; CTG chr11 5218940 5218961 5218957 5218962 +
gattcattgatttttttgaagg

SEQ ID NO: 83154 - DNA, 22 bp, Artificial Sequence
  Synthetic oligonucleotide; TTC chr11 5218945 5218966 5218962 5218967 +
attgatttttttgaagggtttt

SEQ ID NO: 83155 - DNA, 22 bp, Artificial Sequence
  Synthetic oligonucleotide; TTG chr11 5218949 5218970 5218966 5218971 +
atttttttgaagggtttttttg

SEQ ID NO: 83156 - DNA, 22 bp, Artificial Sequence
  Synthetic oligonucleotide; TTT chr11 5218953 5218974 5218970 5218975 +
ttttgaagggtttttttgtgtc

SEQ ID NO: 83157 - DNA, 22 bp, Artificial Sequence
  Synthetic oligonucleotide; TTT chr11 5218954 5218975 5218971 5218976 +
tttgaagggtttttttgtgtct

SEQ ID NO: 83158 - DNA, 22 bp, Artificial Sequence
  Synthetic oligonucleotide; TTT chr11 5218955 5218976 5218972 5218977 +
ttgaagggtttttttgtgtctc

SEQ ID NO: 83159 - DNA, 22 bp, Artificial Sequence
  Synthetic oligonucleotide; TTT chr11 5218956 5218977 5218973 5218978 +
tgaagggtttttttgtgtctct

SEQ ID NO: 83160 - DNA, 22 bp, Artificial Sequence
  Synthetic oligonucleotide; TTT chr11 5218957 5218978 5218974 5218979 +
gaagggtttttttgtgtctcta

SEQ ID NO: 83161 - DNA, 22 bp, Artificial Sequence
  Synthetic oligonucleotide; TTG chr11 5218958 5218979 5218975 5218980 +
aagggtttttttgtgtctctat

SEQ ID NO: 83162 - DNA, 22 bp, Artificial Sequence
  Synthetic oligonucleotide; TTT chr11 5218966 5218987 5218983 5218988 +
ttttgtgtctctatgtccttca

SEQ ID NO: 83163 - DNA, 22 bp, Artificial Sequence
  Synthetic oligonucleotide; TTT chr11 5218967 5218988 5218984 5218989 +
tttgtgtctctatgtccttcac

SEQ ID NO: 83164 - DNA, 22 bp, Artificial Sequence
  Synthetic oligonucleotide; TTT chr11 5218968 5218989 5218985 5218990 +
ttgtgtctctatgtccttcact

SEQ ID NO: 83165 - DNA, 22 bp, Artificial Sequence
  Synthetic oligonucleotide; TTT chr11 5218969 5218990 5218986 5218991 +
tgtgtctctatgtccttcactt

SEQ ID NO: 83166 - DNA, 22 bp, Artificial Sequence
  Synthetic oligonucleotide; TTT chr11 5218970 5218991 5218987 5218992 +
gtgtctctatgtccttcacttc

SEQ ID NO: 83167 - DNA, 22 bp, Artificial Sequence
  Synthetic oligonucleotide; TTG chr11 5218971 5218992 5218988 5218993 +
tgtctctatgtccttcacttct

SEQ ID NO: 83168 - DNA, 22 bp, Artificial Sequence
  Synthetic oligonucleotide; CTC chr11 5218977 5218998 5218994 5218999 +
tatgtccttcacttctgctctg

SEQ ID NO: 83169 - DNA, 22 bp, Artificial Sequence
  Synthetic oligonucleotide; CTA chr11 5218979 5219000 5218996 5219001 +
tgtccttcacttctgctctgat

SEQ ID NO: 83170 - DNA, 22 bp, Artificial Sequence
  Synthetic oligonucleotide; CTT chr11 5218986 5219007 5219003 5219008 +
cacttctgctctgatcttagtt

SEQ ID NO: 83171 - DNA, 22 bp, Artificial Sequence
  Synthetic oligonucleotide; TTC chr11 5218987 5219008 5219004 5219009 +
acttctgctctgatcttagtta

SEQ ID NO: 83172 - DNA, 22 bp, Artificial Sequence
  Synthetic oligonucleotide; CTT chr11 5218991 5219012 5219008 5219013 +
ctgctctgatcttagttatttc

SEQ ID NO: 83173 - DNA, 22 bp, Artificial Sequence
  Synthetic oligonucleotide; TTC chr11 5218992 5219013 5219009 5219014 +
tgctctgatcttagttatttct

SEQ ID NO: 83174 - DNA, 22 bp, Artificial Sequence
  Synthetic oligonucleotide; CTG chr11 5218994 5219015 5219011 5219016 +
ctctgatcttagttatttcttg

SEQ ID NO: 83175 - DNA, 22 bp, Artificial Sequence
  Synthetic oligonucleotide; CTC chr11 5218997 5219018 5219014 5219019 +
tgatcttagttatttcttgtct

SEQ ID NO: 83176 - DNA, 22 bp, Artificial Sequence
  Synthetic oligonucleotide; CTG chr11 5218999 5219020 5219016 5219021 +
atcttagttatttcttgtcttc

SEQ ID NO: 83177 - DNA, 22 bp, Artificial Sequence
  Synthetic oligonucleotide; CTT chr11 5219004 5219025 5219021 5219026 +
agttatttcttgtcttctgtta

SEQ ID NO: 83178 - DNA, 22 bp, Artificial Sequence
  Synthetic oligonucleotide; TTA chr11 5219005 5219026 5219022 5219027 +
gttatttcttgtcttctgttag

SEQ ID NO: 83179 - DNA, 22 bp, Artificial Sequence
  Synthetic oligonucleotide; TTA chr11 5219009 5219030 5219026 5219031 +
tttcttgtcttctgttagcttt

SEQ ID NO: 83180 - DNA, 22 bp, Artificial Sequence
  Synthetic oligonucleotide; TTT chr11 5219012 5219033 5219029 5219034 +
cttgtcttctgttagcttttga

SEQ ID NO: 83181 - DNA, 22 bp, Artificial Sequence
  Synthetic oligonucleotide; TTC chr11 5219013 5219034 5219030 5219035 +
ttgtcttctgttagcttttgaa

SEQ ID NO: 83182 - DNA, 22 bp, Artificial Sequence
  Synthetic oligonucleotide; CTT chr11 5219015 5219036 5219032 5219037 +
gtcttctgttagcttttgaatg

SEQ ID NO: 83183 - DNA, 22 bp, Artificial Sequence
  Synthetic oligonucleotide; TTG chr11 5219016 5219037 5219033 5219038 +
tcttctgttagcttttgaatgt

SEQ ID NO: 83184 - DNA, 22 bp, Artificial Sequence
  Synthetic oligonucleotide; CTT chr11 5219020 5219041 5219037 5219042 +
ctgttagcttttgaatgtgttt

SEQ ID NO: 83185 - DNA, 22 bp, Artificial Sequence
  Synthetic oligonucleotide; TTC chr11 5219021 5219042 5219038 5219043 +
tgttagcttttgaatgtgtttg

SEQ ID NO: 83186 - DNA, 22 bp, Artificial Sequence
  Synthetic oligonucleotide; CTG chr11 5219023 5219044 5219040 5219045 +
ttagcttttgaatgtgtttgct

SEQ ID NO: 83187 - DNA, 22 bp, Artificial Sequence
  Synthetic oligonucleotide; TTA chr11 5219026 5219047 5219043 5219048 +
gcttttgaatgtgtttgctcct

SEQ ID NO: 83188 - DNA, 22 bp, Artificial Sequence
  Synthetic oligonucleotide; CTT chr11 5219030 5219051 5219047 5219052 +
ttgaatgtgtttgctcctgctt

SEQ ID NO: 83189 - DNA, 22 bp, Artificial Sequence
  Synthetic oligonucleotide; TTT chr11 5219031 5219052 5219048 5219053 +
tgaatgtgtttgctcctgcttc

SEQ ID NO: 83190 - DNA, 22 bp, Artificial Sequence
  Synthetic oligonucleotide; TTT chr11 5219032 5219053 5219049 5219054 +
gaatgtgtttgctcctgcttct

SEQ ID NO: 83191 - DNA, 22 bp, Artificial Sequence
  Synthetic oligonucleotide; TTG chr11 5219033 5219054 5219050 5219055 +
aatgtgtttgctcctgcttctc

SEQ ID NO: 83192 - DNA, 22 bp, Artificial Sequence
  Synthetic oligonucleotide; TTT chr11 5219042 5219063 5219059 5219064 +
gctcctgcttctctagtttttt

SEQ ID NO: 83193 - DNA, 22 bp, Artificial Sequence
  Synthetic oligonucleotide; TTG chr11 5219043 5219064 5219060 5219065 +
ctcctgcttctctagtttttta

SEQ ID NO: 83194 - DNA, 22 bp, Artificial Sequence
  Synthetic oligonucleotide; CTC chr11 5219046 5219067 5219063 5219068 +
ctgcttctctagttttttaatt

SEQ ID NO: 83195 - DNA, 22 bp, Artificial Sequence
  Synthetic oligonucleotide; CTG chr11 5219049 5219070 5219066 5219071 +
cttctctagttttttaattgtg

SEQ ID NO: 83196 - DNA, 22 bp, Artificial Sequence
  Synthetic oligonucleotide; CTT chr11 5219052 5219073 5219069 5219074 +
ctctagttttttaattgtgatg

SEQ ID NO: 83197 - DNA, 22 bp, Artificial Sequence
  Synthetic oligonucleotide; TTC chr11 5219053 5219074 5219070 5219075 +
tctagttttttaattgtgatgt

SEQ ID NO: 83198 - DNA, 22 bp, Artificial Sequence
  Synthetic oligonucleotide; CTC chr11 5219055 5219076 5219072 5219077 +
tagttttttaattgtgatgtta

SEQ ID NO: 83199 - DNA, 22 bp, Artificial Sequence
  Synthetic oligonucleotide; CTA chr11 5219057 5219078 5219074 5219079 +
gttttttaattgtgatgttagg

SEQ ID NO: 83200 - DNA, 22 bp, Artificial Sequence
  Synthetic oligonucleotide; TTT chr11 5219061 5219082 5219078 5219083 +
tttaattgtgatgttagggtgt

SEQ ID NO: 83201 - DNA, 22 bp, Artificial Sequence
  Synthetic oligonucleotide; TTT chr11 5219062 5219083 5219079 5219084 +
ttaattgtgatgttagggtgtc

SEQ ID NO: 83202 - DNA, 22 bp, Artificial Sequence
  Synthetic oligonucleotide; TTT chr11 5219063 5219084 5219080 5219085 +
taattgtgatgttagggtgtca

SEQ ID NO: 83203 - DNA, 22 bp, Artificial Sequence
  Synthetic oligonucleotide; TTT chr11 5219064 5219085 5219081 5219086 +
aattgtgatgttagggtgtcaa

SEQ ID NO: 83204 - DNA, 22 bp, Artificial Sequence
  Synthetic oligonucleotide; TTA chr11 5219065 5219086 5219082 5219087 +
attgtgatgttagggtgtcaat

SEQ ID NO: 83205 - DNA, 22 bp, Artificial Sequence
  Synthetic oligonucleotide; TTG chr11 5219069 5219090 5219086 5219091 +
tgatgttagggtgtcaatttta

SEQ ID NO: 83206 - DNA, 22 bp, Artificial Sequence
  Synthetic oligonucleotide; TTA chr11 5219077 5219098 5219094 5219099 +
gggtgtcaattttagatctttc

SEQ ID NO: 83207 - DNA, 22 bp, Artificial Sequence
  Synthetic oligonucleotide; TTT chr11 5219089 5219110 5219106 5219111 +
tagatctttcctgctttccctt

SEQ ID NO: 83208 - DNA, 22 bp, Artificial Sequence
  Synthetic oligonucleotide; TTT chr11 5219090 5219111 5219107 5219112 +
agatctttcctgctttcccttg

SEQ ID NO: 83209 - DNA, 22 bp, Artificial Sequence
  Synthetic oligonucleotide; TTA chr11 5219091 5219112 5219108 5219113 +
gatctttcctgctttcccttgt

SEQ ID NO: 83210 - DNA, 22 bp, Artificial Sequence
  Synthetic oligonucleotide; CTT chr11 5219097 5219118 5219114 5219119 +
tcctgctttcccttgtgggcat

SEQ ID NO: 83211 - DNA, 22 bp, Artificial Sequence
  Synthetic oligonucleotide; TTT chr11 5219098 5219119 5219115 5219120 +
cctgctttcccttgtgggcatt

SEQ ID NO: 83212 - DNA, 22 bp, Artificial Sequence
  Synthetic oligonucleotide; TTC chr11 5219099 5219120 5219116 5219121 +
ctgctttcccttgtgggcattt

SEQ ID NO: 83213 - DNA, 22 bp, Artificial Sequence
  Synthetic oligonucleotide; CTG chr11 5219102 5219123 5219119 5219124 +
ctttcccttgtgggcatttagt

SEQ ID NO: 83214 - DNA, 22 bp, Artificial Sequence
  Synthetic oligonucleotide; CTT chr11 5219105 5219126 5219122 5219127 +
tcccttgtgggcatttagtgct

SEQ ID NO: 83215 - DNA, 22 bp, Artificial Sequence
  Synthetic oligonucleotide; TTT chr11 5219106 5219127 5219123 5219128 +
cccttgtgggcatttagtgcta

SEQ ID NO: 83216 - DNA, 22 bp, Artificial Sequence
  Synthetic oligonucleotide; TTC chr11 5219107 5219128 5219124 5219129 +
ccttgtgggcatttagtgctat

SEQ ID NO: 83217 - DNA, 22 bp, Artificial Sequence
  Synthetic oligonucleotide; CTT chr11 5219111 5219132 5219128 5219133 +
gtgggcatttagtgctataaat

SEQ ID NO: 83218 - DNA, 22 bp, Artificial Sequence
  Synthetic oligonucleotide; TTG chr11 5219112 5219133 5219129 5219134 +
tgggcatttagtgctataaatt

SEQ ID NO: 83219 - DNA, 22 bp, Artificial Sequence
  Synthetic oligonucleotide; TTT chr11 5219121 5219142 5219138 5219143 +
agtgctataaatttccctctac

SEQ ID NO: 83220 - DNA, 22 bp, Artificial Sequence
  Synthetic oligonucleotide; TTA chr11 5219122 5219143 5219139 5219144 +
gtgctataaatttccctctaca

SEQ ID NO: 83221 - DNA, 22 bp, Artificial Sequence
  Synthetic oligonucleotide; CTA chr11 5219128 5219149 5219145 5219150 +
taaatttccctctacacactgc

SEQ ID NO: 83222 - DNA, 22 bp, Artificial Sequence
  Synthetic oligonucleotide; TTT chr11 5219135 5219156 5219152 5219157 +
ccctctacacactgctttgaat

SEQ ID NO: 83223 - DNA, 22 bp, Artificial Sequence
  Synthetic oligonucleotide; TTC chr11 5219136 5219157 5219153 5219158 +
cctctacacactgctttgaatg

SEQ ID NO: 83224 - DNA, 22 bp, Artificial Sequence
  Synthetic oligonucleotide; CTC chr11 5219140 5219161 5219157 5219162 +
tacacactgctttgaatgtgtc

SEQ ID NO: 83225 - DNA, 22 bp, Artificial Sequence
  Synthetic oligonucleotide; CTA chr11 5219142 5219163 5219159 5219164 +
cacactgctttgaatgtgtctc

SEQ ID NO: 83226 - DNA, 22 bp, Artificial Sequence
  Synthetic oligonucleotide; CTG chr11 5219149 5219170 5219166 5219171 +
ctttgaatgtgtctcagagatt

SEQ ID NO: 83227 - DNA, 22 bp, Artificial Sequence
  Synthetic oligonucleotide; CTT chr11 5219152 5219173 5219169 5219174 +
tgaatgtgtctcagagattctg

SEQ ID NO: 83228 - DNA, 22 bp, Artificial Sequence
  Synthetic oligonucleotide; TTT chr11 5219153 5219174 5219170 5219175 +
gaatgtgtctcagagattctgg

SEQ ID NO: 83229 - DNA, 22 bp, Artificial Sequence
  Synthetic oligonucleotide; TTG chr11 5219154 5219175 5219171 5219176 +
aatgtgtctcagagattctggt

SEQ ID NO: 83230 - DNA, 22 bp, Artificial Sequence
  Synthetic oligonucleotide; CTC chr11 5219164 5219185 5219181 5219186 +
agagattctggtgtgttgtgtc

SEQ ID NO: 83231 - DNA, 22 bp, Artificial Sequence
  Synthetic oligonucleotide; TTC chr11 5219172 5219193 5219189 5219194 +
tggtgtgttgtgtctttgttct

SEQ ID NO: 83232 - DNA, 22 bp, Artificial Sequence
  Synthetic oligonucleotide; CTG chr11 5219174 5219195 5219191 5219196 +
gtgtgttgtgtctttgttctcg

SEQ ID NO: 83233 - DNA, 22 bp, Artificial Sequence
  Synthetic oligonucleotide; TTG chr11 5219182 5219203 5219199 5219204 +
tgtctttgttctcgttggtttc

SEQ ID NO: 83234 - DNA, 22 bp, Artificial Sequence
  Synthetic oligonucleotide; CTT chr11 5219188 5219209 5219205 5219210 +
tgttctcgttggtttcaaagaa

SEQ ID NO: 83235 - DNA, 22 bp, Artificial Sequence
  Synthetic oligonucleotide; TTT chr11 5219189 5219210 5219206 5219211 +
gttctcgttggtttcaaagaac

SEQ ID NO: 83236 - DNA, 22 bp, Artificial Sequence
  Synthetic oligonucleotide; TTG chr11 5219190 5219211 5219207 5219212 +
ttctcgttggtttcaaagaaca

SEQ ID NO: 83237 - DNA, 22 bp, Artificial Sequence
  Synthetic oligonucleotide; TTC chr11 5219193 5219214 5219210 5219215 +
tcgttggtttcaaagaacatct

SEQ ID NO: 83238 - DNA, 22 bp, Artificial Sequence
  Synthetic oligonucleotide; CTC chr11 5219195 5219216 5219212 5219217 +
gttggtttcaaagaacatcttt

SEQ ID NO: 83239 - DNA, 22 bp, Artificial Sequence
  Synthetic oligonucleotide; TTG chr11 5219199 5219220 5219216 5219221 +
gtttcaaagaacatctttattt

SEQ ID NO: 83240 - DNA, 22 bp, Artificial Sequence
  Synthetic oligonucleotide; TTT chr11 5219203 5219224 5219220 5219225 +
caaagaacatctttatttctgc

SEQ ID NO: 83241 - DNA, 22 bp, Artificial Sequence
  Synthetic oligonucleotide; TTC chr11 5219204 5219225 5219221 5219226 +
aaagaacatctttatttctgcc

SEQ ID NO: 83242 - DNA, 22 bp, Artificial Sequence
  Synthetic oligonucleotide; CTT chr11 5219216 5219237 5219233 5219238 +
tatttctgccttcattttgtta

SEQ ID NO: 83243 - DNA, 22 bp, Artificial Sequence
  Synthetic oligonucleotide; TTT chr11 5219217 5219238 5219234 5219239 +
atttctgccttcattttgttat

SEQ ID NO: 83244 - DNA, 22 bp, Artificial Sequence
  Synthetic oligonucleotide; TTA chr11 5219218 5219239 5219235 5219240 +
tttctgccttcattttgttatg

SEQ ID NO: 83245 - DNA, 22 bp, Artificial Sequence
  Synthetic oligonucleotide; TTT chr11 5219221 5219242 5219238 5219243 +
ctgccttcattttgttatgtac

SEQ ID NO: 83246 - DNA, 22 bp, Artificial Sequence
  Synthetic oligonucleotide; TTC chr11 5219222 5219243 5219239 5219244 +
tgccttcattttgttatgtacc

SEQ ID NO: 83247 - DNA, 22 bp, Artificial Sequence
  Synthetic oligonucleotide; CTG chr11 5219224 5219245 5219241 5219246 +
ccttcattttgttatgtaccca

SEQ ID NO: 83248 - DNA, 22 bp, Artificial Sequence
  Synthetic oligonucleotide; CTT chr11 5219228 5219249 5219245 5219250 +
cattttgttatgtacccagtag

SEQ ID NO: 83249 - DNA, 22 bp, Artificial Sequence
  Synthetic oligonucleotide; TTC chr11 5219229 5219250 5219246 5219251 +
attttgttatgtacccagtagt

SEQ ID NO: 83250 - DNA, 22 bp, Artificial Sequence
  Synthetic oligonucleotide; TTT chr11 5219233 5219254 5219250 5219255 +
tgttatgtacccagtagtcatt

SEQ ID NO: 83251 - DNA, 22 bp, Artificial Sequence
  Synthetic oligonucleotide; TTT chr11 5219234 5219255 5219251 5219256 +
gttatgtacccagtagtcattc

SEQ ID NO: 83252 - DNA, 22 bp, Artificial Sequence
  Synthetic oligonucleotide; TTG chr11 5219235 5219256 5219252 5219257 +
ttatgtacccagtagtcattca

SEQ ID NO: 83253 - DNA, 22 bp, Artificial Sequence
  Synthetic oligonucleotide; TTA chr11 5219238 5219259 5219255 5219260 +
tgtacccagtagtcattcagga

SEQ ID NO: 83254 - DNA, 22 bp, Artificial Sequence
  Synthetic oligonucleotide; TTC chr11 5219256 5219277 5219273 5219278 +
aggagcaggctgttcagtttcc

SEQ ID NO: 83255 - DNA, 22 bp, Artificial Sequence
  Synthetic oligonucleotide; CTG chr11 5219268 5219289 5219285 5219290 +
ttcagtttccatgtagctgagt

SEQ ID NO: 83256 - DNA, 22 bp, Artificial Sequence
  Synthetic oligonucleotide; TTC chr11 5219271 5219292 5219288 5219293 +
agtttccatgtagctgagtggt

SEQ ID NO: 83257 - DNA, 22 bp, Artificial Sequence
  Synthetic oligonucleotide; TTT chr11 5219276 5219297 5219293 5219298 +
ccatgtagctgagtggttttga

SEQ ID NO: 83258 - DNA, 22 bp, Artificial Sequence
  Synthetic oligonucleotide; TTC chr11 5219277 5219298 5219294 5219299 +
catgtagctgagtggttttgag

SEQ ID NO: 83259 - DNA, 22 bp, Artificial Sequence
  Synthetic oligonucleotide; CTG chr11 5219287 5219308 5219304 5219309 +
agtggttttgagtgagtttctt

SEQ ID NO: 83260 - DNA, 22 bp, Artificial Sequence
  Synthetic oligonucleotide; TTT chr11 5219295 5219316 5219312 5219317 +
tgagtgagtttcttaatcctga

SEQ ID NO: 83261 - DNA, 22 bp, Artificial Sequence
  Synthetic oligonucleotide; TTT chr11 5219296 5219317 5219313 5219318 +
gagtgagtttcttaatcctgag

SEQ ID NO: 83262 - DNA, 22 bp, Artificial Sequence
  Synthetic oligonucleotide; TTG chr11 5219297 5219318 5219314 5219319 +
agtgagtttcttaatcctgagt

SEQ ID NO: 83263 - DNA, 22 bp, Artificial Sequence
  Synthetic oligonucleotide; TTT chr11 5219306 5219327 5219323 5219328 +
cttaatcctgagttctagtttg

SEQ ID NO: 83264 - DNA, 22 bp, Artificial Sequence
  Synthetic oligonucleotide; TTC chr11 5219307 5219328 5219324 5219329 +
ttaatcctgagttctagtttga

SEQ ID NO: 83265 - DNA, 22 bp, Artificial Sequence
  Synthetic oligonucleotide; CTT chr11 5219309 5219330 5219326 5219331 +
aatcctgagttctagtttgatt

SEQ ID NO: 83266 - DNA, 22 bp, Artificial Sequence
  Synthetic oligonucleotide; TTA chr11 5219310 5219331 5219327 5219332 +
atcctgagttctagtttgattg

SEQ ID NO: 83267 - DNA, 22 bp, Artificial Sequence
  Synthetic oligonucleotide; CTG chr11 5219316 5219337 5219333 5219338 +
agttctagtttgattgcactgt

SEQ ID NO: 83268 - DNA, 22 bp, Artificial Sequence
  Synthetic oligonucleotide; TTC chr11 5219321 5219342 5219338 5219343 +
tagtttgattgcactgtggtct

SEQ ID NO: 83269 - DNA, 22 bp, Artificial Sequence
  Synthetic oligonucleotide; CTA chr11 5219323 5219344 5219340 5219345 +
gtttgattgcactgtggtctga

SEQ ID NO: 83270 - DNA, 22 bp, Artificial Sequence
  Synthetic oligonucleotide; TTT chr11 5219327 5219348 5219344 5219349 +
gattgcactgtggtctgagaga

SEQ ID NO: 83271 - DNA, 22 bp, Artificial Sequence
  Synthetic oligonucleotide; TTG chr11 5219328 5219349 5219345 5219350 +
attgcactgtggtctgagagac

SEQ ID NO: 83272 - DNA, 22 bp, Artificial Sequence
  Synthetic oligonucleotide; TTG chr11 5219332 5219353 5219349 5219354 +
cactgtggtctgagagacagtt

SEQ ID NO: 83273 - DNA, 22 bp, Artificial Sequence
  Synthetic oligonucleotide; CTG chr11 5219337 5219358 5219354 5219359 +
tggtctgagagacagtttgtta

SEQ ID NO: 83274 - DNA, 22 bp, Artificial Sequence
  Synthetic oligonucleotide; CTG chr11 5219344 5219365 5219361 5219366 +
agagacagtttgttatagtttc

SEQ ID NO: 83275 - DNA, 22 bp, Artificial Sequence
  Synthetic oligonucleotide; TTT chr11 5219355 5219376 5219372 5219377 +
gttatagtttctgttcttttac

SEQ ID NO: 83276 - DNA, 22 bp, Artificial Sequence
  Synthetic oligonucleotide; TTG chr11 5219356 5219377 5219373 5219378 +
ttatagtttctgttcttttaca

SEQ ID NO: 83277 - DNA, 22 bp, Artificial Sequence
  Synthetic oligonucleotide; TTA chr11 5219359 5219380 5219376 5219381 +
tagtttctgttcttttacattt

SEQ ID NO: 83278 - DNA, 22 bp, Artificial Sequence
  Synthetic oligonucleotide; TTT chr11 5219365 5219386 5219382 5219387 +
ctgttcttttacatttgctgag

SEQ ID NO: 83279 - DNA, 22 bp, Artificial Sequence
  Synthetic oligonucleotide; TTC chr11 5219366 5219387 5219383 5219388 +
tgttcttttacatttgctgagg

SEQ ID NO: 83280 - DNA, 22 bp, Artificial Sequence
  Synthetic oligonucleotide; CTG chr11 5219368 5219389 5219385 5219390 +
ttcttttacatttgctgaggag

SEQ ID NO: 83281 - DNA, 22 bp, Artificial Sequence
  Synthetic oligonucleotide; TTC chr11 5219371 5219392 5219388 5219393 +
ttttacatttgctgaggagagc

SEQ ID NO: 83282 - DNA, 22 bp, Artificial Sequence
  Synthetic oligonucleotide; CTT chr11 5219373 5219394 5219390 5219395 +
ttacatttgctgaggagagctt

SEQ ID NO: 83283 - DNA, 22 bp, Artificial Sequence
  Synthetic oligonucleotide; TTT chr11 5219374 5219395 5219391 5219396 +
tacatttgctgaggagagcttt

SEQ ID NO: 83284 - DNA, 22 bp, Artificial Sequence
  Synthetic oligonucleotide; TTT chr11 5219375 5219396 5219392 5219397 +
acatttgctgaggagagcttta

SEQ ID NO: 83285 - DNA, 22 bp, Artificial Sequence
  Synthetic oligonucleotide; TTA chr11 5219376 5219397 5219393 5219398 +
catttgctgaggagagctttac

SEQ ID NO: 83286 - DNA, 22 bp, Artificial Sequence
  Synthetic oligonucleotide; TTT chr11 5219381 5219402 5219398 5219403 +
gctgaggagagctttacttcca

SEQ ID NO: 83287 - DNA, 22 bp, Artificial Sequence
  Synthetic oligonucleotide; TTG chr11 5219382 5219403 5219399 5219404 +
ctgaggagagctttacttccaa

SEQ ID NO: 83288 - DNA, 22 bp, Artificial Sequence
  Synthetic oligonucleotide; CTG chr11 5219385 5219406 5219402 5219407 +
aggagagctttacttccaacta

SEQ ID NO: 83289 - DNA, 22 bp, Artificial Sequence
  Synthetic oligonucleotide; CTT chr11 5219395 5219416 5219412 5219417 +
tacttccaactatgtggtcagt

SEQ ID NO: 83290 - DNA, 22 bp, Artificial Sequence
  Synthetic oligonucleotide; TTT chr11 5219396 5219417 5219413 5219418 +
acttccaactatgtggtcagtt

SEQ ID NO: 83291 - DNA, 22 bp, Artificial Sequence
  Synthetic oligonucleotide; TTA chr11 5219397 5219418 5219414 5219419 +
cttccaactatgtggtcagttt

SEQ ID NO: 83292 - DNA, 22 bp, Artificial Sequence
  Synthetic oligonucleotide; CTT chr11 5219400 5219421 5219417 5219422 +
ccaactatgtggtcagttttgg

SEQ ID NO: 83293 - DNA, 22 bp, Artificial Sequence
  Synthetic oligonucleotide; TTC chr11 5219401 5219422 5219418 5219423 +
caactatgtggtcagttttgga

SEQ ID NO: 83294 - DNA, 22 bp, Artificial Sequence
  Synthetic oligonucleotide; CTA chr11 5219407 5219428 5219424 5219429 +
tgtggtcagttttggaataggt

SEQ ID NO: 83295 - DNA, 22 bp, Artificial Sequence
  Synthetic oligonucleotide; TTT chr11 5219419 5219440 5219436 5219441 +
tggaataggtgtggtgtggtgc

SEQ ID NO: 83296 - DNA, 22 bp, Artificial Sequence
  Synthetic oligonucleotide; TTT chr11 5219420 5219441 5219437 5219442 +
ggaataggtgtggtgtggtgct

SEQ ID NO: 83297 - DNA, 22 bp, Artificial Sequence
  Synthetic oligonucleotide; TTG chr11 5219421 5219442 5219438 5219443 +
gaataggtgtggtgtggtgctg

SEQ ID NO: 83298 - DNA, 22 bp, Artificial Sequence
  Synthetic oligonucleotide; CTG chr11 5219443 5219464 5219460 5219465 +
aaaagaatgtatattctgttga

SEQ ID NO: 83299 - DNA, 22 bp, Artificial Sequence
  Synthetic oligonucleotide; TTC chr11 5219459 5219480 5219476 5219481 +
tgttgatttggggtggagagtt

SEQ ID NO: 83300 - DNA, 22 bp, Artificial Sequence
  Synthetic oligonucleotide; CTG chr11 5219461 5219482 5219478 5219483 +
ttgatttggggtggagagttct

SEQ ID NO: 83301 - DNA, 22 bp, Artificial Sequence
  Synthetic oligonucleotide; TTG chr11 5219464 5219485 5219481 5219486 +
atttggggtggagagttctgta

SEQ ID NO: 83302 - DNA, 22 bp, Artificial Sequence
  Synthetic oligonucleotide; TTT chr11 5219468 5219489 5219485 5219490 +
ggggtggagagttctgtagatg

SEQ ID NO: 83303 - DNA, 22 bp, Artificial Sequence
  Synthetic oligonucleotide; TTG chr11 5219469 5219490 5219486 5219491 +
gggtggagagttctgtagatgt

SEQ ID NO: 83304 - DNA, 22 bp, Artificial Sequence
  Synthetic oligonucleotide; TTC chr11 5219482 5219503 5219499 5219504 +
tgtagatgtctattaggtctgc

SEQ ID NO: 83305 - DNA, 22 bp, Artificial Sequence
  Synthetic oligonucleotide; CTG chr11 5219484 5219505 5219501 5219506 +
tagatgtctattaggtctgctt

SEQ ID NO: 83306 - DNA, 22 bp, Artificial Sequence
  Synthetic oligonucleotide; CTA chr11 5219494 5219515 5219511 5219516 +
ttaggtctgcttggtgcagagc

SEQ ID NO: 83307 - DNA, 22 bp, Artificial Sequence
  Synthetic oligonucleotide; TTA chr11 5219497 5219518 5219514 5219519 +
ggtctgcttggtgcagagctga

SEQ ID NO: 83308 - DNA, 22 bp, Artificial Sequence
  Synthetic oligonucleotide; CTG chr11 5219503 5219524 5219520 5219525 +
cttggtgcagagctgagtccaa

SEQ ID NO: 83309 - DNA, 22 bp, Artificial Sequence
  Synthetic oligonucleotide; CTT chr11 5219506 5219527 5219523 5219528 +
ggtgcagagctgagtccaattc

SEQ ID NO: 83310 - DNA, 22 bp, Artificial Sequence
  Synthetic oligonucleotide; TTG chr11 5219507 5219528 5219524 5219529 +
gtgcagagctgagtccaattcc

SEQ ID NO: 83311 - DNA, 22 bp, Artificial Sequence
  Synthetic oligonucleotide; CTG chr11 5219518 5219539 5219535 5219540 +
agtccaattcctggatatcctt

SEQ ID NO: 83312 - DNA, 22 bp, Artificial Sequence
  Synthetic oligonucleotide; TTC chr11 5219528 5219549 5219545 5219550 +
ctggatatccttgttaactttc

SEQ ID NO: 83313 - DNA, 22 bp, Artificial Sequence
  Synthetic oligonucleotide; CTG chr11 5219531 5219552 5219548 5219553 +
gatatccttgttaactttctgt

SEQ ID NO: 83314 - DNA, 22 bp, Artificial Sequence
  Synthetic oligonucleotide; CTT chr11 5219540 5219561 5219557 5219562 +
gttaactttctgtctcgttgat

SEQ ID NO: 83315 - DNA, 22 bp, Artificial Sequence
  Synthetic oligonucleotide; TTG chr11 5219541 5219562 5219558 5219563 +
ttaactttctgtctcgttgatc

SEQ ID NO: 83316 - DNA, 22 bp, Artificial Sequence
  Synthetic oligonucleotide; TTA chr11 5219544 5219565 5219561 5219566 +
actttctgtctcgttgatctgt

SEQ ID NO: 83317 - DNA, 22 bp, Artificial Sequence
  Synthetic oligonucleotide; CTT chr11 5219548 5219569 5219565 5219570 +
tctgtctcgttgatctgtctaa

SEQ ID NO: 83318 - DNA, 22 bp, Artificial Sequence
  Synthetic oligonucleotide; TTT chr11 5219549 5219570 5219566 5219571 +
ctgtctcgttgatctgtctaat

SEQ ID NO: 83319 - DNA, 22 bp, Artificial Sequence
  Synthetic oligonucleotide; TTC chr11 5219550 5219571 5219567 5219572 +
tgtctcgttgatctgtctaatg

SEQ ID NO: 83320 - DNA, 22 bp, Artificial Sequence
  Synthetic oligonucleotide; CTG chr11 5219552 5219573 5219569 5219574 +
tctcgttgatctgtctaatgtt

SEQ ID NO: 83321 - DNA, 22 bp, Artificial Sequence
  Synthetic oligonucleotide; CTC chr11 5219556 5219577 5219573 5219578 +
gttgatctgtctaatgttgaca

SEQ ID NO: 83322 - DNA, 22 bp, Artificial Sequence
  Synthetic oligonucleotide; TTG chr11 5219560 5219581 5219577 5219582 +
atctgtctaatgttgacagtgg

SEQ ID NO: 83323 - DNA, 22 bp, Artificial Sequence
  Synthetic oligonucleotide; CTG chr11 5219565 5219586 5219582 5219587 +
tctaatgttgacagtggggtgt

SEQ ID NO: 83324 - DNA, 22 bp, Artificial Sequence
  Synthetic oligonucleotide; CTA chr11 5219569 5219590 5219586 5219591 +
atgttgacagtggggtgttaaa

SEQ ID NO: 83325 - DNA, 22 bp, Artificial Sequence
  Synthetic oligonucleotide; TTG chr11 5219575 5219596 5219592 5219597 +
acagtggggtgttaaagtctcc

SEQ ID NO: 83326 - DNA, 22 bp, Artificial Sequence
  Synthetic oligonucleotide; TTA chr11 5219589 5219610 5219606 5219611 +
aagtctcccattattattgtgt

SEQ ID NO: 83327 - DNA, 22 bp, Artificial Sequence
  Synthetic oligonucleotide; CTC chr11 5219596 5219617 5219613 5219618 +
ccattattattgtgtgggcatc

SEQ ID NO: 83328 - DNA, 22 bp, Artificial Sequence
  Synthetic oligonucleotide; TTA chr11 5219602 5219623 5219619 5219624 +
ttattgtgtgggcatctaagtc

SEQ ID NO: 83329 - DNA, 22 bp, Artificial Sequence
  Synthetic oligonucleotide; TTA chr11 5219605 5219626 5219622 5219627 +
ttgtgtgggcatctaagtctct

SEQ ID NO: 83330 - DNA, 22 bp, Artificial Sequence
  Synthetic oligonucleotide; TTG chr11 5219608 5219629 5219625 5219630 +
tgtgggcatctaagtctctttg

SEQ ID NO: 83331 - DNA, 22 bp, Artificial Sequence
  Synthetic oligonucleotide; CTA chr11 5219620 5219641 5219637 5219642 +
agtctctttgtaggtcactcag

SEQ ID NO: 83332 - DNA, 22 bp, Artificial Sequence
  Synthetic oligonucleotide; CTC chr11 5219626 5219647 5219643 5219648 +
tttgtaggtcactcaggacttg

SEQ ID NO: 83333 - DNA, 22 bp, Artificial Sequence
  Synthetic oligonucleotide; CTT chr11 5219628 5219649 5219645 5219650 +
tgtaggtcactcaggacttgtt

SEQ ID NO: 83334 - DNA, 22 bp, Artificial Sequence
  Synthetic oligonucleotide; TTT chr11 5219629 5219650 5219646 5219651 +
gtaggtcactcaggacttgttt

SEQ ID NO: 83335 - DNA, 22 bp, Artificial Sequence
  Synthetic oligonucleotide; TTG chr11 5219630 5219651 5219647 5219652 +
taggtcactcaggacttgtttt

SEQ ID NO: 83336 - DNA, 22 bp, Artificial Sequence
  Synthetic oligonucleotide; CTC chr11 5219640 5219661 5219657 5219662 +
aggacttgttttatgaatctgg

SEQ ID NO: 83337 - DNA, 22 bp, Artificial Sequence
  Synthetic oligonucleotide; CTT chr11 5219647 5219668 5219664 5219669 +
gttttatgaatctgggtgctcc

SEQ ID NO: 83338 - DNA, 22 bp, Artificial Sequence
  Synthetic oligonucleotide; TTG chr11 5219648 5219669 5219665 5219670 +
ttttatgaatctgggtgctcct

SEQ ID NO: 83339 - DNA, 22 bp, Artificial Sequence
  Synthetic oligonucleotide; TTT chr11 5219651 5219672 5219668 5219673 +
tatgaatctgggtgctcctgta

SEQ ID NO: 83340 - DNA, 22 bp, Artificial Sequence
  Synthetic oligonucleotide; TTT chr11 5219652 5219673 5219669 5219674 +
atgaatctgggtgctcctgtat

SEQ ID NO: 83341 - DNA, 22 bp, Artificial Sequence
  Synthetic oligonucleotide; TTA chr11 5219653 5219674 5219670 5219675 +
tgaatctgggtgctcctgtatt

SEQ ID NO: 83342 - DNA, 22 bp, Artificial Sequence
  Synthetic oligonucleotide; CTG chr11 5219661 5219682 5219678 5219683 +
ggtgctcctgtattgggtgcat

SEQ ID NO: 83343 - DNA, 22 bp, Artificial Sequence
  Synthetic oligonucleotide; CTC chr11 5219668 5219689 5219685 5219690 +
ctgtattgggtgcatatatatt

SEQ ID NO: 83344 - DNA, 22 bp, Artificial Sequence
  Synthetic oligonucleotide; CTG chr11 5219671 5219692 5219688 5219693 +
tattgggtgcatatatatttag

SEQ ID NO: 83345 - DNA, 22 bp, Artificial Sequence
  Synthetic oligonucleotide; TTG chr11 5219676 5219697 5219693 5219698 +
ggtgcatatatatttagtatag

SEQ ID NO: 83346 - DNA, 22 bp, Artificial Sequence
  Synthetic oligonucleotide; TTT chr11 5219691 5219712 5219708 5219713 +
agtatagttagttcttcttctt

SEQ ID NO: 83347 - DNA, 22 bp, Artificial Sequence
  Synthetic oligonucleotide; TTA chr11 5219692 5219713 5219709 5219714 +
gtatagttagttcttcttcttg

SEQ ID NO: 83348 - DNA, 22 bp, Artificial Sequence
  Synthetic oligonucleotide; TTA chr11 5219701 5219722 5219718 5219723 +
gttcttcttcttgaatagatcc

SEQ ID NO: 83349 - DNA, 22 bp, Artificial Sequence
  Synthetic oligonucleotide; TTC chr11 5219705 5219726 5219722 5219727 +
ttcttcttgaatagatcccttt

SEQ ID NO: 83350 - DNA, 22 bp, Artificial Sequence
  Synthetic oligonucleotide; CTT chr11 5219707 5219728 5219724 5219729 +
cttcttgaatagatccctttgc

SEQ ID NO: 83351 - DNA, 22 bp, Artificial Sequence
  Synthetic oligonucleotide; TTC chr11 5219708 5219729 5219725 5219730 +
ttcttgaatagatccctttgcc

SEQ ID NO: 83352 - DNA, 22 bp, Artificial Sequence
  Synthetic oligonucleotide; CTT chr11 5219710 5219731 5219727 5219732 +
cttgaatagatccctttgccat

SEQ ID NO: 83353 - DNA, 22 bp, Artificial Sequence
  Synthetic oligonucleotide; TTC chr11 5219711 5219732 5219728 5219733 +
ttgaatagatccctttgccatt

SEQ ID NO: 83354 - DNA, 22 bp, Artificial Sequence
  Synthetic oligonucleotide; CTT chr11 5219713 5219734 5219730 5219735 +
gaatagatccctttgccattat

SEQ ID NO: 83355 - DNA, 22 bp, Artificial Sequence
  Synthetic oligonucleotide; TTG chr11 5219714 5219735 5219731 5219736 +
aatagatccctttgccattatg

SEQ ID NO: 83356 - DNA, 22 bp, Artificial Sequence
  Synthetic oligonucleotide; CTT chr11 5219726 5219747 5219743 5219748 +
tgccattatgtaatggccttct

SEQ ID NO: 83357 - DNA, 22 bp, Artificial Sequence
  Synthetic oligonucleotide; TTT chr11 5219727 5219748 5219744 5219749 +
gccattatgtaatggccttctt

SEQ ID NO: 83358 - DNA, 22 bp, Artificial Sequence
  Synthetic oligonucleotide; TTG chr11 5219728 5219749 5219745 5219750 +
ccattatgtaatggccttcttt

SEQ ID NO: 83359 - DNA, 22 bp, Artificial Sequence
  Synthetic oligonucleotide; TTA chr11 5219734 5219755 5219751 5219756 +
tgtaatggccttctttgtctct

SEQ ID NO: 83360 - DNA, 22 bp, Artificial Sequence
  Synthetic oligonucleotide; CTT chr11 5219746 5219767 5219763 5219768 +
ctttgtctcttttgatctttgt

SEQ ID NO: 83361 - DNA, 22 bp, Artificial Sequence
  Synthetic oligonucleotide; TTC chr11 5219747 5219768 5219764 5219769 +
tttgtctcttttgatctttgtt

SEQ ID NO: 83362 - DNA, 22 bp, Artificial Sequence
  Synthetic oligonucleotide; CTT chr11 5219749 5219770 5219766 5219771 +
tgtctcttttgatctttgttgg

SEQ ID NO: 83363 - DNA, 22 bp, Artificial Sequence
  Synthetic oligonucleotide; TTT chr11 5219750 5219771 5219767 5219772 +
gtctcttttgatctttgttggt

SEQ ID NO: 83364 - DNA, 22 bp, Artificial Sequence
  Synthetic oligonucleotide; TTG chr11 5219751 5219772 5219768 5219773 +
tctcttttgatctttgttggtt

SEQ ID NO: 83365 - DNA, 22 bp, Artificial Sequence
  Synthetic oligonucleotide; CTC chr11 5219755 5219776 5219772 5219777 +
ttttgatctttgttggtttaaa

SEQ ID NO: 83366 - DNA, 22 bp, Artificial Sequence
  Synthetic oligonucleotide; CTT chr11 5219757 5219778 5219774 5219779 +
ttgatctttgttggtttaaaat

SEQ ID NO: 83367 - DNA, 22 bp, Artificial Sequence
  Synthetic oligonucleotide; TTT chr11 5219758 5219779 5219775 5219780 +
tgatctttgttggtttaaaatc

SEQ ID NO: 83368 - DNA, 22 bp, Artificial Sequence
  Synthetic oligonucleotide; TTT chr11 5219759 5219780 5219776 5219781 +
gatctttgttggtttaaaatct

SEQ ID NO: 83369 - DNA, 22 bp, Artificial Sequence
  Synthetic oligonucleotide; TTG chr11 5219760 5219781 5219777 5219782 +
atctttgttggtttaaaatctg

SEQ ID NO: 83370 - DNA, 22 bp, Artificial Sequence
  Synthetic oligonucleotide; CTT chr11 5219765 5219786 5219782 5219787 +
tgttggtttaaaatctgtttta

SEQ ID NO: 83371 - DNA, 22 bp, Artificial Sequence
  Synthetic oligonucleotide; TTT chr11 5219766 5219787 5219783 5219788 +
gttggtttaaaatctgttttat

SEQ ID NO: 83372 - DNA, 22 bp, Artificial Sequence
  Synthetic oligonucleotide; TTG chr11 5219767 5219788 5219784 5219789 +
ttggtttaaaatctgttttatc

SEQ ID NO: 83373 - DNA, 22 bp, Artificial Sequence
  Synthetic oligonucleotide; TTG chr11 5219770 5219791 5219787 5219792 +
gtttaaaatctgttttatcaga

SEQ ID NO: 83374 - DNA, 22 bp, Artificial Sequence
  Synthetic oligonucleotide; TTT chr11 5219774 5219795 5219791 5219796 +
aaaatctgttttatcagagact

SEQ ID NO: 83375 - DNA, 22 bp, Artificial Sequence
  Synthetic oligonucleotide; TTA chr11 5219775 5219796 5219792 5219797 +
aaatctgttttatcagagacta

SEQ ID NO: 83376 - DNA, 22 bp, Artificial Sequence
  Synthetic oligonucleotide; CTG chr11 5219782 5219803 5219799 5219804 +
ttttatcagagactaggattgc

SEQ ID NO: 83377 - DNA, 22 bp, Artificial Sequence
  Synthetic oligonucleotide; TTT chr11 5219785 5219806 5219802 5219807 +
tatcagagactaggattgcaac

SEQ ID NO: 83378 - DNA, 22 bp, Artificial Sequence
  Synthetic oligonucleotide; TTT chr11 5219786 5219807 5219803 5219808 +
atcagagactaggattgcaacc

SEQ ID NO: 83379 - DNA, 22 bp, Artificial Sequence
  Synthetic oligonucleotide; TTA chr11 5219787 5219808 5219804 5219809 +
tcagagactaggattgcaaccc

SEQ ID NO: 83380 - DNA, 22 bp, Artificial Sequence
  Synthetic oligonucleotide; CTA chr11 5219797 5219818 5219814 5219819 +
ggattgcaacccctgccttttt

SEQ ID NO: 83381 - DNA, 22 bp, Artificial Sequence
  Synthetic oligonucleotide; TTG chr11 5219803 5219824 5219820 5219825 +
caacccctgcctttttttgttt

SEQ ID NO: 83382 - DNA, 22 bp, Artificial Sequence
  Synthetic oligonucleotide; CTG chr11 5219812 5219833 5219829 5219834 +
cctttttttgttttccatttgc

SEQ ID NO: 83383 - DNA, 22 bp, Artificial Sequence
  Synthetic oligonucleotide; CTT chr11 5219816 5219837 5219833 5219838 +
tttttgttttccatttgcttgg

SEQ ID NO: 83384 - DNA, 22 bp, Artificial Sequence
  Synthetic oligonucleotide; TTT chr11 5219817 5219838 5219834 5219839 +
ttttgttttccatttgcttggt

SEQ ID NO: 83385 - DNA, 22 bp, Artificial Sequence
  Synthetic oligonucleotide; TTT chr11 5219818 5219839 5219835 5219840 +
tttgttttccatttgcttggta

SEQ ID NO: 83386 - DNA, 22 bp, Artificial Sequence
  Synthetic oligonucleotide; TTT chr11 5219819 5219840 5219836 5219841 +
ttgttttccatttgcttggtag

SEQ ID NO: 83387 - DNA, 22 bp, Artificial Sequence
  Synthetic oligonucleotide; TTT chr11 5219820 5219841 5219837 5219842 +
tgttttccatttgcttggtaga

SEQ ID NO: 83388 - DNA, 22 bp, Artificial Sequence
  Synthetic oligonucleotide; TTT chr11 5219821 5219842 5219838 5219843 +
gttttccatttgcttggtagat

SEQ ID NO: 83389 - DNA, 22 bp, Artificial Sequence
  Synthetic oligonucleotide; TTG chr11 5219822 5219843 5219839 5219844 +
ttttccatttgcttggtagata

SEQ ID NO: 83390 - DNA, 22 bp, Artificial Sequence
  Synthetic oligonucleotide; TTT chr11 5219825 5219846 5219842 5219847 +
tccatttgcttggtagatattc

SEQ ID NO: 83391 - DNA, 22 bp, Artificial Sequence
  Synthetic oligonucleotide; TTT chr11 5219826 5219847 5219843 5219848 +
ccatttgcttggtagatattcc

SEQ ID NO: 83392 - DNA, 22 bp, Artificial Sequence
  Synthetic oligonucleotide; TTC chr11 5219827 5219848 5219844 5219849 +
catttgcttggtagatattcct

SEQ ID NO: 83393 - DNA, 22 bp, Artificial Sequence
  Synthetic oligonucleotide; TTT chr11 5219832 5219853 5219849 5219854 +
gcttggtagatattcctccatc

SEQ ID NO: 83394 - DNA, 22 bp, Artificial Sequence
  Synthetic oligonucleotide; TTG chr11 5219833 5219854 5219850 5219855 +
cttggtagatattcctccatcc

SEQ ID NO: 83395 - DNA, 22 bp, Artificial Sequence
  Synthetic oligonucleotide; CTT chr11 5219836 5219857 5219853 5219858 +
ggtagatattcctccatccttt

SEQ ID NO: 83396 - DNA, 22 bp, Artificial Sequence
  Synthetic oligonucleotide; TTG chr11 5219837 5219858 5219854 5219859 +
gtagatattcctccatcctttt

SEQ ID NO: 83397 - DNA, 22 bp, Artificial Sequence
  Synthetic oligonucleotide; TTC chr11 5219847 5219868 5219864 5219869 +
ctccatccttttatttcgagcc

SEQ ID NO: 83398 - DNA, 22 bp, Artificial Sequence
  Synthetic oligonucleotide; CTC chr11 5219850 5219871 5219867 5219872 +
catccttttatttcgagcctat

SEQ ID NO: 83399 - DNA, 22 bp, Artificial Sequence
  Synthetic oligonucleotide; CTT chr11 5219857 5219878 5219874 5219879 +
ttatttcgagcctatgtgtgtc

SEQ ID NO: 83400 - DNA, 22 bp, Artificial Sequence
  Synthetic oligonucleotide; TTT chr11 5219858 5219879 5219875 5219880 +
tatttcgagcctatgtgtgtct

SEQ ID NO: 83401 - DNA, 22 bp, Artificial Sequence
  Synthetic oligonucleotide; TTT chr11 5219859 5219880 5219876 5219881 +
atttcgagcctatgtgtgtctc

SEQ ID NO: 83402 - DNA, 22 bp, Artificial Sequence
  Synthetic oligonucleotide; TTA chr11 5219860 5219881 5219877 5219882 +
tttcgagcctatgtgtgtctct

SEQ ID NO: 83403 - DNA, 22 bp, Artificial Sequence
  Synthetic oligonucleotide; TTT chr11 5219863 5219884 5219880 5219885 +
cgagcctatgtgtgtctctgca

SEQ ID NO: 83404 - DNA, 22 bp, Artificial Sequence
  Synthetic oligonucleotide; TTC chr11 5219864 5219885 5219881 5219886 +
gagcctatgtgtgtctctgcac

SEQ ID NO: 83405 - DNA, 22 bp, Artificial Sequence
  Synthetic oligonucleotide; CTA chr11 5219871 5219892 5219888 5219893 +
tgtgtgtctctgcacgtgagat

SEQ ID NO: 83406 - DNA, 22 bp, Artificial Sequence
  Synthetic oligonucleotide; CTC chr11 5219881 5219902 5219898 5219903 +
tgcacgtgagatgggtttcctg

SEQ ID NO: 83407 - DNA, 22 bp, Artificial Sequence
  Synthetic oligonucleotide; CTG chr11 5219883 5219904 5219900 5219905 +
cacgtgagatgggtttcctgaa

SEQ ID NO: 83408 - DNA, 22 bp, Artificial Sequence
  Synthetic oligonucleotide; TTT chr11 5219899 5219920 5219916 5219921 +
cctgaatacagaacacagatgg

SEQ ID NO: 83409 - DNA, 22 bp, Artificial Sequence
  Synthetic oligonucleotide; TTC chr11 5219900 5219921 5219917 5219922 +
ctgaatacagaacacagatggg

SEQ ID NO: 83410 - DNA, 22 bp, Artificial Sequence
  Synthetic oligonucleotide; CTG chr11 5219903 5219924 5219920 5219925 +
aatacagaacacagatgggtct

SEQ ID NO: 83411 - DNA, 22 bp, Artificial Sequence
  Synthetic oligonucleotide; CTT chr11 5219926 5219947 5219943 5219948 +
gactccttatccaatttgccag

SEQ ID NO: 83412 - DNA, 22 bp, Artificial Sequence
  Synthetic oligonucleotide; TTG chr11 5219927 5219948 5219944 5219949 +
actccttatccaatttgccagt

SEQ ID NO: 83413 - DNA, 22 bp, Artificial Sequence
  Synthetic oligonucleotide; CTC chr11 5219931 5219952 5219948 5219953 +
cttatccaatttgccagtctgt

SEQ ID NO: 83414 - DNA, 22 bp, Artificial Sequence
  Synthetic oligonucleotide; CTT chr11 5219934 5219955 5219951 5219956 +
atccaatttgccagtctgtgtc

SEQ ID NO: 83415 - DNA, 22 bp, Artificial Sequence
  Synthetic oligonucleotide; TTA chr11 5219935 5219956 5219952 5219957 +
tccaatttgccagtctgtgtct

SEQ ID NO: 83416 - DNA, 22 bp, Artificial Sequence
  Synthetic oligonucleotide; TTT chr11 5219943 5219964 5219960 5219965 +
gccagtctgtgtcttttaattg

SEQ ID NO: 83417 - DNA, 22 bp, Artificial Sequence
  Synthetic oligonucleotide; TTG chr11 5219944 5219965 5219961 5219966 +
ccagtctgtgtcttttaattgg

SEQ ID NO: 83418 - DNA, 22 bp, Artificial Sequence
  Synthetic oligonucleotide; CTG chr11 5219952 5219973 5219969 5219974 +
tgtcttttaattggagcattta

SEQ ID NO: 83419 - DNA, 22 bp, Artificial Sequence
  Synthetic oligonucleotide; CTT chr11 5219958 5219979 5219975 5219980 +
ttaattggagcatttagcctat

SEQ ID NO: 83420 - DNA, 22 bp, Artificial Sequence
  Synthetic oligonucleotide; TTT chr11 5219959 5219980 5219976 5219981 +
taattggagcatttagcctatt

SEQ ID NO: 83421 - DNA, 22 bp, Artificial Sequence
  Synthetic oligonucleotide; TTT chr11 5219960 5219981 5219977 5219982 +
aattggagcatttagcctattt

SEQ ID NO: 83422 - DNA, 22 bp, Artificial Sequence
  Synthetic oligonucleotide; TTA chr11 5219961 5219982 5219978 5219983 +
attggagcatttagcctattta

SEQ ID NO: 83423 - DNA, 22 bp, Artificial Sequence
  Synthetic oligonucleotide; TTG chr11 5219965 5219986 5219982 5219987 +
gagcatttagcctatttacatt

SEQ ID NO: 83424 - DNA, 22 bp, Artificial Sequence
  Synthetic oligonucleotide; TTT chr11 5219973 5219994 5219990 5219995 +
agcctatttacatttaaggtga

SEQ ID NO: 83425 - DNA, 22 bp, Artificial Sequence
  Synthetic oligonucleotide; TTA chr11 5219974 5219995 5219991 5219996 +
gcctatttacatttaaggtgag

SEQ ID NO: 83426 - DNA, 22 bp, Artificial Sequence
  Synthetic oligonucleotide; CTA chr11 5219979 5220000 5219996 5220001 +
tttacatttaaggtgagtattg

SEQ ID NO: 83427 - DNA, 22 bp, Artificial Sequence
  Synthetic oligonucleotide; TTT chr11 5219982 5220003 5219999 5220004 +
acatttaaggtgagtattgtta

SEQ ID NO: 83428 - DNA, 22 bp, Artificial Sequence
  Synthetic oligonucleotide; TTA chr11 5219983 5220004 5220000 5220005 +
catttaaggtgagtattgttat

SEQ ID NO: 83429 - DNA, 22 bp, Artificial Sequence
  Synthetic oligonucleotide; TTT chr11 5219988 5220009 5220005 5220010 +
aaggtgagtattgttatgtatg

SEQ ID NO: 83430 - DNA, 22 bp, Artificial Sequence
  Synthetic oligonucleotide; TTA chr11 5219989 5220010 5220006 5220011 +
aggtgagtattgttatgtatga

SEQ ID NO: 83431 - DNA, 22 bp, Artificial Sequence
  Synthetic oligonucleotide; TTG chr11 5220001 5220022 5220018 5220023 +
ttatgtatgaatttgatcctgt

SEQ ID NO: 83432 - DNA, 22 bp, Artificial Sequence
  Synthetic oligonucleotide; TTA chr11 5220004 5220025 5220021 5220026 +
tgtatgaatttgatcctgtcat

SEQ ID NO: 83433 - DNA, 22 bp, Artificial Sequence
  Synthetic oligonucleotide; TTT chr11 5220015 5220036 5220032 5220037 +
gatcctgtcattatgatgttag

SEQ ID NO: 83434 - DNA, 22 bp, Artificial Sequence
  Synthetic oligonucleotide; TTG chr11 5220016 5220037 5220033 5220038 +
atcctgtcattatgatgttagc

SEQ ID NO: 83435 - DNA, 22 bp, Artificial Sequence
  Synthetic oligonucleotide; CTG chr11 5220022 5220043 5220039 5220044 +
tcattatgatgttagctggtta

SEQ ID NO: 83436 - DNA, 22 bp, Artificial Sequence
  Synthetic oligonucleotide; TTA chr11 5220028 5220049 5220045 5220050 +
tgatgttagctggttattttgc

SEQ ID NO: 83437 - DNA, 22 bp, Artificial Sequence
  Synthetic oligonucleotide; TTA chr11 5220036 5220057 5220053 5220058 +
gctggttattttgctcgttgat

SEQ ID NO: 83438 - DNA, 22 bp, Artificial Sequence
  Synthetic oligonucleotide; CTG chr11 5220040 5220061 5220057 5220062 +
gttattttgctcgttgatgcag

SEQ ID NO: 83439 - DNA, 22 bp, Artificial Sequence
  Synthetic oligonucleotide; TTA chr11 5220044 5220065 5220061 5220066 +
ttttgctcgttgatgcagtttc

SEQ ID NO: 83440 - DNA, 22 bp, Artificial Sequence
  Synthetic oligonucleotide; TTT chr11 5220047 5220068 5220064 5220069 +
tgctcgttgatgcagtttcttc

SEQ ID NO: 83441 - DNA, 22 bp, Artificial Sequence
  Synthetic oligonucleotide; TTT chr11 5220048 5220069 5220065 5220070 +
gctcgttgatgcagtttcttcc

SEQ ID NO: 83442 - DNA, 22 bp, Artificial Sequence
  Synthetic oligonucleotide; TTG chr11 5220049 5220070 5220066 5220071 +
ctcgttgatgcagtttcttcct

SEQ ID NO: 83443 - DNA, 22 bp, Artificial Sequence
  Synthetic oligonucleotide; CTC chr11 5220052 5220073 5220069 5220074 +
gttgatgcagtttcttcctagc

SEQ ID NO: 83444 - DNA, 22 bp, Artificial Sequence
  Synthetic oligonucleotide; TTG chr11 5220056 5220077 5220073 5220078 +
atgcagtttcttcctagccttg

SEQ ID NO: 83445 - DNA, 22 bp, Artificial Sequence
  Synthetic oligonucleotide; TTT chr11 5220065 5220086 5220082 5220087 +
cttcctagccttgatggtcttt

SEQ ID NO: 83446 - DNA, 22 bp, Artificial Sequence
  Synthetic oligonucleotide; TTC chr11 5220066 5220087 5220083 5220088 +
ttcctagccttgatggtcttta

SEQ ID NO: 83447 - DNA, 22 bp, Artificial Sequence
  Synthetic oligonucleotide; CTT chr11 5220068 5220089 5220085 5220090 +
cctagccttgatggtctttaca

SEQ ID NO: 83448 - DNA, 22 bp, Artificial Sequence
  Synthetic oligonucleotide; TTC chr11 5220069 5220090 5220086 5220091 +
ctagccttgatggtctttacaa

SEQ ID NO: 83449 - DNA, 22 bp, Artificial Sequence
  Synthetic oligonucleotide; CTA chr11 5220072 5220093 5220089 5220094 +
gccttgatggtctttacaattt

SEQ ID NO: 83450 - DNA, 22 bp, Artificial Sequence
  Synthetic oligonucleotide; CTT chr11 5220077 5220098 5220094 5220099 +
gatggtctttacaatttggcat

SEQ ID NO: 83451 - DNA, 22 bp, Artificial Sequence
  Synthetic oligonucleotide; TTG chr11 5220078 5220099 5220095 5220100 +
atggtctttacaatttggcatg

SEQ ID NO: 83452 - DNA, 22 bp, Artificial Sequence
  Synthetic oligonucleotide; CTT chr11 5220086 5220107 5220103 5220108 +
tacaatttggcatgtttttgca

SEQ ID NO: 83453 - DNA, 22 bp, Artificial Sequence
  Synthetic oligonucleotide; TTT chr11 5220087 5220108 5220104 5220109 +
acaatttggcatgtttttgcag

SEQ ID NO: 83454 - DNA, 22 bp, Artificial Sequence
  Synthetic oligonucleotide; TTA chr11 5220088 5220109 5220105 5220110 +
caatttggcatgtttttgcagt

SEQ ID NO: 83455 - DNA, 22 bp, Artificial Sequence
  Synthetic oligonucleotide; TTT chr11 5220094 5220115 5220111 5220116 +
ggcatgtttttgcagtggctga

SEQ ID NO: 83456 - DNA, 22 bp, Artificial Sequence
  Synthetic oligonucleotide; TTG chr11 5220095 5220116 5220112 5220117 +
gcatgtttttgcagtggctgat

SEQ ID NO: 83457 - DNA, 22 bp, Artificial Sequence
  Synthetic oligonucleotide; TTT chr11 5220103 5220124 5220120 5220125 +
ttgcagtggctgatactagttg

SEQ ID NO: 83458 - DNA, 22 bp, Artificial Sequence
  Synthetic oligonucleotide; TTT chr11 5220104 5220125 5220121 5220126 +
tgcagtggctgatactagttgt

SEQ ID NO: 83459 - DNA, 22 bp, Artificial Sequence
  Synthetic oligonucleotide; TTT chr11 5220105 5220126 5220122 5220127 +
gcagtggctgatactagttgtt

SEQ ID NO: 83460 - DNA, 22 bp, Artificial Sequence
  Synthetic oligonucleotide; TTG chr11 5220106 5220127 5220123 5220128 +
cagtggctgatactagttgttc

SEQ ID NO: 83461 - DNA, 22 bp, Artificial Sequence
  Synthetic oligonucleotide; CTG chr11 5220115 5220136 5220132 5220137 +
atactagttgttcctttccatg

SEQ ID NO: 83462 - DNA, 22 bp, Artificial Sequence
  Synthetic oligonucleotide; CTA chr11 5220121 5220142 5220138 5220143 +
gttgttcctttccatgtttagt

SEQ ID NO: 83463 - DNA, 22 bp, Artificial Sequence
  Synthetic oligonucleotide; TTG chr11 5220125 5220146 5220142 5220147 +
ttcctttccatgtttagtgctt

SEQ ID NO: 83464 - DNA, 22 bp, Artificial Sequence
  Synthetic oligonucleotide; TTC chr11 5220128 5220149 5220145 5220150 +
ctttccatgtttagtgcttcct

SEQ ID NO: 83465 - DNA, 22 bp, Artificial Sequence
  Synthetic oligonucleotide; CTT chr11 5220131 5220152 5220148 5220153 +
tccatgtttagtgcttccttca

SEQ ID NO: 83466 - DNA, 22 bp, Artificial Sequence
  Synthetic oligonucleotide; TTT chr11 5220132 5220153 5220149 5220154 +
ccatgtttagtgcttccttcag

SEQ ID NO: 83467 - DNA, 22 bp, Artificial Sequence
  Synthetic oligonucleotide; TTC chr11 5220133 5220154 5220150 5220155 +
catgtttagtgcttccttcagg

SEQ ID NO: 83468 - DNA, 22 bp, Artificial Sequence
  Synthetic oligonucleotide; TTT chr11 5220140 5220161 5220157 5220162 +
agtgcttccttcaggagctctt

SEQ ID NO: 83469 - DNA, 22 bp, Artificial Sequence
  Synthetic oligonucleotide; TTA chr11 5220141 5220162 5220158 5220163 +
gtgcttccttcaggagctcttg

SEQ ID NO: 83470 - DNA, 22 bp, Artificial Sequence
  Synthetic oligonucleotide; CTT chr11 5220147 5220168 5220164 5220169 +
ccttcaggagctcttgtagggc

SEQ ID NO: 83471 - DNA, 22 bp, Artificial Sequence
  Synthetic oligonucleotide; TTC chr11 5220148 5220169 5220165 5220170 +
cttcaggagctcttgtagggca

SEQ ID NO: 83472 - DNA, 22 bp, Artificial Sequence
  Synthetic oligonucleotide; CTT chr11 5220151 5220172 5220168 5220173 +
caggagctcttgtagggcaggc

SEQ ID NO: 83473 - DNA, 22 bp, Artificial Sequence
  Synthetic oligonucleotide; TTC chr11 5220152 5220173 5220169 5220174 +
aggagctcttgtagggcaggcc

SEQ ID NO: 83474 - DNA, 22 bp, Artificial Sequence
  Synthetic oligonucleotide; CTC chr11 5220160 5220181 5220177 5220182 +
ttgtagggcaggcctggtggtg

SEQ ID NO: 83475 - DNA, 22 bp, Artificial Sequence
  Synthetic oligonucleotide; CTT chr11 5220162 5220183 5220179 5220184 +
gtagggcaggcctggtggtgac

SEQ ID NO: 83476 - DNA, 22 bp, Artificial Sequence
  Synthetic oligonucleotide; TTG chr11 5220163 5220184 5220180 5220185 +
tagggcaggcctggtggtgaca

SEQ ID NO: 83477 - DNA, 22 bp, Artificial Sequence
  Synthetic oligonucleotide; CTG chr11 5220176 5220197 5220193 5220198 +
gtggtgacaaaatctctcagca

SEQ ID NO: 83478 - DNA, 22 bp, Artificial Sequence
  Synthetic oligonucleotide; CTC chr11 5220192 5220213 5220209 5220214 +
tcagcatttgcttgtctgtaaa

SEQ ID NO: 83479 - DNA, 22 bp, Artificial Sequence
  Synthetic oligonucleotide; CTC chr11 5220194 5220215 5220211 5220216 +
agcatttgcttgtctgtaaagg

SEQ ID NO: 83480 - DNA, 22 bp, Artificial Sequence
  Synthetic oligonucleotide; TTT chr11 5220201 5220222 5220218 5220223 +
gcttgtctgtaaaggattttat

SEQ ID NO: 83481 - DNA, 22 bp, Artificial Sequence
  Synthetic oligonucleotide; TTG chr11 5220202 5220223 5220219 5220224 +
cttgtctgtaaaggattttatt

SEQ ID NO: 83482 - DNA, 22 bp, Artificial Sequence
  Synthetic oligonucleotide; CTT chr11 5220205 5220226 5220222 5220227 +
gtctgtaaaggattttatttct

SEQ ID NO: 83483 - DNA, 22 bp, Artificial Sequence
  Synthetic oligonucleotide; TTG chr11 5220206 5220227 5220223 5220228 +
tctgtaaaggattttatttctc

SEQ ID NO: 83484 - DNA, 22 bp, Artificial Sequence
  Synthetic oligonucleotide; CTG chr11 5220210 5220231 5220227 5220232 +
taaaggattttatttctccttc

SEQ ID NO: 83485 - DNA, 22 bp, Artificial Sequence
  Synthetic oligonucleotide; TTT chr11 5220220 5220241 5220237 5220242 +
tatttctccttcacttatgaag

SEQ ID NO: 83486 - DNA, 22 bp, Artificial Sequence
  Synthetic oligonucleotide; TTT chr11 5220221 5220242 5220238 5220243 +
atttctccttcacttatgaagc

SEQ ID NO: 83487 - DNA, 22 bp, Artificial Sequence
  Synthetic oligonucleotide; TTA chr11 5220222 5220243 5220239 5220244 +
tttctccttcacttatgaagct

SEQ ID NO: 83488 - DNA, 22 bp, Artificial Sequence
  Synthetic oligonucleotide; TTT chr11 5220225 5220246 5220242 5220247 +
ctccttcacttatgaagcttag

SEQ ID NO: 83489 - DNA, 22 bp, Artificial Sequence
  Synthetic oligonucleotide; TTC chr11 5220226 5220247 5220243 5220248 +
tccttcacttatgaagcttagt

SEQ ID NO: 83490 - DNA, 22 bp, Artificial Sequence
  Synthetic oligonucleotide; CTC chr11 5220228 5220249 5220245 5220250 +
cttcacttatgaagcttagttt

SEQ ID NO: 83491 - DNA, 22 bp, Artificial Sequence
  Synthetic oligonucleotide; CTT chr11 5220231 5220252 5220248 5220253 +
cacttatgaagcttagtttggc

SEQ ID NO: 83492 - DNA, 22 bp, Artificial Sequence
  Synthetic oligonucleotide; TTC chr11 5220232 5220253 5220249 5220254 +
acttatgaagcttagtttggct

SEQ ID NO: 83493 - DNA, 22 bp, Artificial Sequence
  Synthetic oligonucleotide; CTT chr11 5220236 5220257 5220253 5220258 +
atgaagcttagtttggctggat

SEQ ID NO: 83494 - DNA, 22 bp, Artificial Sequence
  Synthetic oligonucleotide; TTA chr11 5220237 5220258 5220254 5220259 +
tgaagcttagtttggctggata

SEQ ID NO: 83495 - DNA, 22 bp, Artificial Sequence
  Synthetic oligonucleotide; CTT chr11 5220245 5220266 5220262 5220267 +
agtttggctggatatgaaattc

SEQ ID NO: 83496 - DNA, 22 bp, Artificial Sequence
  Synthetic oligonucleotide; TTA chr11 5220246 5220267 5220263 5220268 +
gtttggctggatatgaaattct

SEQ ID NO: 83497 - DNA, 22 bp, Artificial Sequence
  Synthetic oligonucleotide; TTT chr11 5220250 5220271 5220267 5220272 +
ggctggatatgaaattctgggt

SEQ ID NO: 83498 - DNA, 22 bp, Artificial Sequence
  Synthetic oligonucleotide; TTG chr11 5220251 5220272 5220268 5220273 +
gctggatatgaaattctgggtt

SEQ ID NO: 83499 - DNA, 22 bp, Artificial Sequence
  Synthetic oligonucleotide; CTG chr11 5220255 5220276 5220272 5220277 +
gatatgaaattctgggttgaaa

SEQ ID NO: 83500 - DNA, 22 bp, Artificial Sequence
  Synthetic oligonucleotide; TTC chr11 5220267 5220288 5220284 5220289 +
tgggttgaaaattcttttcttt

SEQ ID NO: 83501 - DNA, 22 bp, Artificial Sequence
  Synthetic oligonucleotide; CTG chr11 5220269 5220290 5220286 5220291 +
ggttgaaaattcttttctttaa

SEQ ID NO: 83502 - DNA, 22 bp, Artificial Sequence
  Synthetic oligonucleotide; TTG chr11 5220274 5220295 5220291 5220296 +
aaaattcttttctttaacaatg

SEQ ID NO: 83503 - DNA, 22 bp, Artificial Sequence
  Synthetic oligonucleotide; TTC chr11 5220281 5220302 5220298 5220303 +
ttttctttaacaatgttgaata

SEQ ID NO: 83504 - DNA, 22 bp, Artificial Sequence
  Synthetic oligonucleotide; CTT chr11 5220283 5220304 5220300 5220305 +
ttctttaacaatgttgaatatt

SEQ ID NO: 83505 - DNA, 22 bp, Artificial Sequence
  Synthetic oligonucleotide; TTT chr11 5220284 5220305 5220301 5220306 +
tctttaacaatgttgaatattg

SEQ ID NO: 83506 - DNA, 22 bp, Artificial Sequence
  Synthetic oligonucleotide; TTT chr11 5220285 5220306 5220302 5220307 +
ctttaacaatgttgaatattgg

SEQ ID NO: 83507 - DNA, 22 bp, Artificial Sequence
  Synthetic oligonucleotide; TTC chr11 5220286 5220307 5220303 5220308 +
tttaacaatgttgaatattggc

SEQ ID NO: 83508 - DNA, 22 bp, Artificial Sequence
  Synthetic oligonucleotide; CTT chr11 5220288 5220309 5220305 5220310 +
taacaatgttgaatattggccc

SEQ ID NO: 83509 - DNA, 22 bp, Artificial Sequence
  Synthetic oligonucleotide; TTT chr11 5220289 5220310 5220306 5220311 +
aacaatgttgaatattggcccc

SEQ ID NO: 83510 - DNA, 22 bp, Artificial Sequence
  Synthetic oligonucleotide; TTA chr11 5220290 5220311 5220307 5220312 +
acaatgttgaatattggccccc

SEQ ID NO: 83511 - DNA, 22 bp, Artificial Sequence
  Synthetic oligonucleotide; TTG chr11 5220299 5220320 5220316 5220321 +
aatattggcccccactttcttc

SEQ ID NO: 83512 - DNA, 22 bp, Artificial Sequence
  Synthetic oligonucleotide; TTG chr11 5220306 5220327 5220323 5220328 +
gcccccactttcttctggcttg

SEQ ID NO: 83513 - DNA, 22 bp, Artificial Sequence
  Synthetic oligonucleotide; CTT chr11 5220316 5220337 5220333 5220338 +
tcttctggcttgtagagtttct

SEQ ID NO: 83514 - DNA, 22 bp, Artificial Sequence
  Synthetic oligonucleotide; TTT chr11 5220317 5220338 5220334 5220339 +
cttctggcttgtagagtttctg

SEQ ID NO: 83515 - DNA, 22 bp, Artificial Sequence
  Synthetic oligonucleotide; TTC chr11 5220318 5220339 5220335 5220340 +
ttctggcttgtagagtttctgc

SEQ ID NO: 83516 - DNA, 22 bp, Artificial Sequence
  Synthetic oligonucleotide; CTT chr11 5220320 5220341 5220337 5220342 +
ctggcttgtagagtttctgccg

SEQ ID NO: 83517 - DNA, 22 bp, Artificial Sequence
  Synthetic oligonucleotide; TTC chr11 5220321 5220342 5220338 5220343 +
tggcttgtagagtttctgccga

SEQ ID NO: 83518 - DNA, 22 bp, Artificial Sequence
  Synthetic oligonucleotide; CTG chr11 5220323 5220344 5220340 5220345 +
gcttgtagagtttctgccgata

SEQ ID NO: 83519 - DNA, 22 bp, Artificial Sequence
  Synthetic oligonucleotide; CTT chr11 5220327 5220348 5220344 5220349 +
gtagagtttctgccgatagatc

SEQ ID NO: 83520 - DNA, 22 bp, Artificial Sequence
  Synthetic oligonucleotide; TTG chr11 5220328 5220349 5220345 5220350 +
tagagtttctgccgatagatca

SEQ ID NO: 83521 - DNA, 22 bp, Artificial Sequence
  Synthetic oligonucleotide; TTT chr11 5220336 5220357 5220353 5220358 +
ctgccgatagatcagctgttag

SEQ ID NO: 83522 - DNA, 22 bp, Artificial Sequence
  Synthetic oligonucleotide; TTC chr11 5220337 5220358 5220354 5220359 +
tgccgatagatcagctgttagt

SEQ ID NO: 83523 - DNA, 22 bp, Artificial Sequence
  Synthetic oligonucleotide; CTG chr11 5220339 5220360 5220356 5220361 +
ccgatagatcagctgttagtct

SEQ ID NO: 83524 - DNA, 22 bp, Artificial Sequence
  Synthetic oligonucleotide; CTG chr11 5220354 5220375 5220371 5220376 +
ttagtctgatgggcttcccttt

SEQ ID NO: 83525 - DNA, 22 bp, Artificial Sequence
  Synthetic oligonucleotide; TTA chr11 5220357 5220378 5220374 5220379 +
gtctgatgggcttccctttgtg

SEQ ID NO: 83526 - DNA, 22 bp, Artificial Sequence
  Synthetic oligonucleotide; CTG chr11 5220362 5220383 5220379 5220384 +
atgggcttccctttgtgggtaa

SEQ ID NO: 83527 - DNA, 22 bp, Artificial Sequence
  Synthetic oligonucleotide; CTT chr11 5220370 5220391 5220387 5220392 +
ccctttgtgggtaacccgacct

SEQ ID NO: 83528 - DNA, 22 bp, Artificial Sequence
  Synthetic oligonucleotide; TTC chr11 5220371 5220392 5220388 5220393 +
cctttgtgggtaacccgacctt

SEQ ID NO: 83529 - DNA, 22 bp, Artificial Sequence
  Synthetic oligonucleotide; CTT chr11 5220375 5220396 5220392 5220397 +
tgtgggtaacccgacctttctc

SEQ ID NO: 83530 - DNA, 22 bp, Artificial Sequence
  Synthetic oligonucleotide; TTT chr11 5220376 5220397 5220393 5220398 +
gtgggtaacccgacctttctct

SEQ ID NO: 83531 - DNA, 22 bp, Artificial Sequence
  Synthetic oligonucleotide; TTG chr11 5220377 5220398 5220394 5220399 +
tgggtaacccgacctttctctc

SEQ ID NO: 83532 - DNA, 22 bp, Artificial Sequence
  Synthetic oligonucleotide; CTT chr11 5220393 5220414 5220410 5220415 +
tctctctggctgcccttaacat

SEQ ID NO: 83533 - DNA, 22 bp, Artificial Sequence
  Synthetic oligonucleotide; TTT chr11 5220394 5220415 5220411 5220416 +
ctctctggctgcccttaacatt

SEQ ID NO: 83534 - DNA, 22 bp, Artificial Sequence
  Synthetic oligonucleotide; TTC chr11 5220395 5220416 5220412 5220417 +
tctctggctgcccttaacattt

SEQ ID NO: 83535 - DNA, 22 bp, Artificial Sequence
  Synthetic oligonucleotide; CTC chr11 5220397 5220418 5220414 5220419 +
tctggctgcccttaacattttt

SEQ ID NO: 83536 - DNA, 22 bp, Artificial Sequence
  Synthetic oligonucleotide; CTC chr11 5220399 5220420 5220416 5220421 +
tggctgcccttaacattttttc

SEQ ID NO: 83537 - DNA, 22 bp, Artificial Sequence
  Synthetic oligonucleotide; CTG chr11 5220401 5220422 5220418 5220423 +
gctgcccttaacattttttcct

SEQ ID NO: 83538 - DNA, 22 bp, Artificial Sequence
  Synthetic oligonucleotide; CTG chr11 5220405 5220426 5220422 5220427 +
cccttaacattttttccttcat

SEQ ID NO: 83539 - DNA, 22 bp, Artificial Sequence
  Synthetic oligonucleotide; CTT chr11 5220410 5220431 5220427 5220432 +
aacattttttccttcatttcaa

SEQ ID NO: 83540 - DNA, 22 bp, Artificial Sequence
  Synthetic oligonucleotide; TTA chr11 5220411 5220432 5220428 5220433 +
acattttttccttcatttcaac

SEQ ID NO: 83541 - DNA, 22 bp, Artificial Sequence
  Synthetic oligonucleotide; TTT chr11 5220417 5220438 5220434 5220439 +
tttccttcatttcaactttggt

SEQ ID NO: 83542 - DNA, 22 bp, Artificial Sequence
  Synthetic oligonucleotide; TTT chr11 5220418 5220439 5220435 5220440 +
ttccttcatttcaactttggtg

SEQ ID NO: 83543 - DNA, 22 bp, Artificial Sequence
  Synthetic oligonucleotide; TTT chr11 5220419 5220440 5220436 5220441 +
tccttcatttcaactttggtga

SEQ ID NO: 83544 - DNA, 22 bp, Artificial Sequence
  Synthetic oligonucleotide; TTT chr11 5220420 5220441 5220437 5220442 +
ccttcatttcaactttggtgaa

SEQ ID NO: 83545 - DNA, 22 bp, Artificial Sequence
  Synthetic oligonucleotide; TTC chr11 5220421 5220442 5220438 5220443 +
cttcatttcaactttggtgaat

SEQ ID NO: 83546 - DNA, 22 bp, Artificial Sequence
  Synthetic oligonucleotide; CTT chr11 5220424 5220445 5220441 5220446 +
catttcaactttggtgaatctg

SEQ ID NO: 83547 - DNA, 22 bp, Artificial Sequence
  Synthetic oligonucleotide; TTC chr11 5220425 5220446 5220442 5220447 +
atttcaactttggtgaatctga

SEQ ID NO: 83548 - DNA, 22 bp, Artificial Sequence
  Synthetic oligonucleotide; TTT chr11 5220429 5220450 5220446 5220451 +
caactttggtgaatctgacagt

SEQ ID NO: 83549 - DNA, 22 bp, Artificial Sequence
  Synthetic oligonucleotide; TTC chr11 5220430 5220451 5220447 5220452 +
aactttggtgaatctgacagtt

SEQ ID NO: 83550 - DNA, 22 bp, Artificial Sequence
  Synthetic oligonucleotide; CTT chr11 5220435 5220456 5220452 5220457 +
tggtgaatctgacagttatgtg

SEQ ID NO: 83551 - DNA, 22 bp, Artificial Sequence
  Synthetic oligonucleotide; TTT chr11 5220436 5220457 5220453 5220458 +
ggtgaatctgacagttatgtgt

SEQ ID NO: 83552 - DNA, 22 bp, Artificial Sequence
  Synthetic oligonucleotide; TTG chr11 5220437 5220458 5220454 5220459 +
gtgaatctgacagttatgtgtc

SEQ ID NO: 83553 - DNA, 22 bp, Artificial Sequence
  Synthetic oligonucleotide; CTG chr11 5220446 5220467 5220463 5220468 +
acagttatgtgtcttggagttg

SEQ ID NO: 83554 - DNA, 22 bp, Artificial Sequence
  Synthetic oligonucleotide; TTA chr11 5220453 5220474 5220470 5220475 +
tgtgtcttggagttgcttttct

SEQ ID NO: 83555 - DNA, 22 bp, Artificial Sequence
  Synthetic oligonucleotide; CTT chr11 5220461 5220482 5220478 5220483 +
ggagttgcttttctctaggagt

SEQ ID NO: 83556 - DNA, 22 bp, Artificial Sequence
  Synthetic oligonucleotide; TTG chr11 5220462 5220483 5220479 5220484 +
gagttgcttttctctaggagta

SEQ ID NO: 83557 - DNA, 22 bp, Artificial Sequence
  Synthetic oligonucleotide; TTG chr11 5220468 5220489 5220485 5220490 +
cttttctctaggagtatctttg

SEQ ID NO: 83558 - DNA, 22 bp, Artificial Sequence
  Synthetic oligonucleotide; CTT chr11 5220471 5220492 5220488 5220493 +
ttctctaggagtatctttgtgg

SEQ ID NO: 83559 - DNA, 22 bp, Artificial Sequence
  Synthetic oligonucleotide; TTT chr11 5220472 5220493 5220489 5220494 +
tctctaggagtatctttgtggc

SEQ ID NO: 83560 - DNA, 22 bp, Artificial Sequence
  Synthetic oligonucleotide; TTT chr11 5220473 5220494 5220490 5220495 +
ctctaggagtatctttgtggcg

SEQ ID NO: 83561 - DNA, 22 bp, Artificial Sequence
  Synthetic oligonucleotide; TTC chr11 5220474 5220495 5220491 5220496 +
tctaggagtatctttgtggcgt

SEQ ID NO: 83562 - DNA, 22 bp, Artificial Sequence
  Synthetic oligonucleotide; CTC chr11 5220476 5220497 5220493 5220498 +
taggagtatctttgtggcgttc

SEQ ID NO: 83563 - DNA, 22 bp, Artificial Sequence
  Synthetic oligonucleotide; CTA chr11 5220478 5220499 5220495 5220500 +
ggagtatctttgtggcgttctc

SEQ ID NO: 83564 - DNA, 22 bp, Artificial Sequence
  Synthetic oligonucleotide; CTT chr11 5220488 5220509 5220505 5220510 +
tgtggcgttctctgtatttcct

SEQ ID NO: 83565 - DNA, 22 bp, Artificial Sequence
  Synthetic oligonucleotide; TTT chr11 5220489 5220510 5220506 5220511 +
gtggcgttctctgtatttcctg

SEQ ID NO: 83566 - DNA, 22 bp, Artificial Sequence
  Synthetic oligonucleotide; TTG chr11 5220490 5220511 5220507 5220512 +
tggcgttctctgtatttcctga

SEQ ID NO: 83567 - DNA, 22 bp, Artificial Sequence
  Synthetic oligonucleotide; TTC chr11 5220498 5220519 5220515 5220520 +
tctgtatttcctgaatgtgaat

SEQ ID NO: 83568 - DNA, 22 bp, Artificial Sequence
  Synthetic oligonucleotide; CTC chr11 5220500 5220521 5220517 5220522 +
tgtatttcctgaatgtgaattt

SEQ ID NO: 83569 - DNA, 22 bp, Artificial Sequence
  Synthetic oligonucleotide; CTG chr11 5220502 5220523 5220519 5220524 +
tatttcctgaatgtgaatttgg

SEQ ID NO: 83570 - DNA, 22 bp, Artificial Sequence
  Synthetic oligonucleotide; TTT chr11 5220507 5220528 5220524 5220529 +
cctgaatgtgaatttgggcttg

SEQ ID NO: 83571 - DNA, 22 bp, Artificial Sequence
  Synthetic oligonucleotide; TTC chr11 5220508 5220529 5220525 5220530 +
ctgaatgtgaatttgggcttgc

SEQ ID NO: 83572 - DNA, 22 bp, Artificial Sequence
  Synthetic oligonucleotide; CTG chr11 5220511 5220532 5220528 5220533 +
aatgtgaatttgggcttgcctt

SEQ ID NO: 83573 - DNA, 22 bp, Artificial Sequence
  Synthetic oligonucleotide; TTT chr11 5220522 5220543 5220539 5220544 +
gggcttgccttgctagattggg

SEQ ID NO: 83574 - DNA, 22 bp, Artificial Sequence
  Synthetic oligonucleotide; TTG chr11 5220523 5220544 5220540 5220545 +
ggcttgccttgctagattgggg

SEQ ID NO: 83575 - DNA, 22 bp, Artificial Sequence
  Synthetic oligonucleotide; CTT chr11 5220528 5220549 5220545 5220550 +
gccttgctagattggggaagtt

SEQ ID NO: 83576 - DNA, 22 bp, Artificial Sequence
  Synthetic oligonucleotide; TTG chr11 5220529 5220550 5220546 5220551 +
ccttgctagattggggaagttc

SEQ ID NO: 83577 - DNA, 22 bp, Artificial Sequence
  Synthetic oligonucleotide; CTT chr11 5220533 5220554 5220550 5220555 +
gctagattggggaagttctcct

SEQ ID NO: 83578 - DNA, 22 bp, Artificial Sequence
  Synthetic oligonucleotide; TTG chr11 5220534 5220555 5220551 5220556 +
ctagattggggaagttctcctg

SEQ ID NO: 83579 - DNA, 22 bp, Artificial Sequence
  Synthetic oligonucleotide; CTA chr11 5220537 5220558 5220554 5220559 +
gattggggaagttctcctggat

SEQ ID NO: 83580 - DNA, 22 bp, Artificial Sequence
  Synthetic oligonucleotide; TTG chr11 5220542 5220563 5220559 5220564 +
gggaagttctcctggataatat

SEQ ID NO: 83581 - DNA, 22 bp, Artificial Sequence
  Synthetic oligonucleotide; TTC chr11 5220551 5220572 5220568 5220573 +
tcctggataatatcctgcagag

SEQ ID NO: 83582 - DNA, 22 bp, Artificial Sequence
  Synthetic oligonucleotide; CTC chr11 5220553 5220574 5220570 5220575 +
ctggataatatcctgcagagtg

SEQ ID NO: 83583 - DNA, 22 bp, Artificial Sequence
  Synthetic oligonucleotide; CTG chr11 5220556 5220577 5220573 5220578 +
gataatatcctgcagagtgttt

SEQ ID NO: 83584 - DNA, 22 bp, Artificial Sequence
  Synthetic oligonucleotide; CTG chr11 5220568 5220589 5220585 5220590 +
cagagtgttttccaacttggtt

SEQ ID NO: 83585 - DNA, 22 bp, Artificial Sequence
  Synthetic oligonucleotide; TTT chr11 5220578 5220599 5220595 5220600 +
tccaacttggttccattctccc

SEQ ID NO: 83586 - DNA, 22 bp, Artificial Sequence
  Synthetic oligonucleotide; TTT chr11 5220579 5220600 5220596 5220601 +
ccaacttggttccattctcccc

SEQ ID NO: 83587 - DNA, 22 bp, Artificial Sequence
  Synthetic oligonucleotide; TTC chr11 5220580 5220601 5220597 5220602 +
caacttggttccattctcccca

SEQ ID NO: 83588 - DNA, 22 bp, Artificial Sequence
  Synthetic oligonucleotide; CTT chr11 5220586 5220607 5220603 5220608 +
ggttccattctccccatcactt

SEQ ID NO: 83589 - DNA, 22 bp, Artificial Sequence
  Synthetic oligonucleotide; TTG chr11 5220587 5220608 5220604 5220609 +
gttccattctccccatcacttt

SEQ ID NO: 83590 - DNA, 22 bp, Artificial Sequence
  Synthetic oligonucleotide; TTC chr11 5220591 5220612 5220608 5220613 +
cattctccccatcactttcagc

SEQ ID NO: 83591 - DNA, 22 bp, Artificial Sequence
  Synthetic oligonucleotide; TTC chr11 5220596 5220617 5220613 5220618 +
tccccatcactttcagctacac

SEQ ID NO: 83592 - DNA, 22 bp, Artificial Sequence
  Synthetic oligonucleotide; CTC chr11 5220598 5220619 5220615 5220620 +
cccatcactttcagctacacca

SEQ ID NO: 83593 - DNA, 22 bp, Artificial Sequence
  Synthetic oligonucleotide; CTT chr11 5220608 5220629 5220625 5220630 +
tcagctacaccaattagatgta

SEQ ID NO: 83594 - DNA, 22 bp, Artificial Sequence
  Synthetic oligonucleotide; TTT chr11 5220609 5220630 5220626 5220631 +
cagctacaccaattagatgtag

SEQ ID NO: 83595 - DNA, 22 bp, Artificial Sequence
  Synthetic oligonucleotide; TTC chr11 5220610 5220631 5220627 5220632 +
agctacaccaattagatgtaga

SEQ ID NO: 83596 - DNA, 22 bp, Artificial Sequence
  Synthetic oligonucleotide; CTA chr11 5220615 5220636 5220632 5220637 +
caccaattagatgtagatttgg

SEQ ID NO: 83597 - DNA, 22 bp, Artificial Sequence
  Synthetic oligonucleotide; TTA chr11 5220624 5220645 5220641 5220646 +
gatgtagatttggtcttttcac

SEQ ID NO: 83598 - DNA, 22 bp, Artificial Sequence
  Synthetic oligonucleotide; TTT chr11 5220635 5220656 5220652 5220657 +
ggtcttttcacatagtcccata

SEQ ID NO: 83599 - DNA, 22 bp, Artificial Sequence
  Synthetic oligonucleotide; TTG chr11 5220636 5220657 5220653 5220658 +
gtcttttcacatagtcccatat

SEQ ID NO: 83600 - DNA, 22 bp, Artificial Sequence
  Synthetic oligonucleotide; CTT chr11 5220641 5220662 5220658 5220663 +
ttcacatagtcccatatttctt

SEQ ID NO: 83601 - DNA, 22 bp, Artificial Sequence
  Synthetic oligonucleotide; TTT chr11 5220642 5220663 5220659 5220664 +
tcacatagtcccatatttcttg

SEQ ID NO: 83602 - DNA, 22 bp, Artificial Sequence
  Synthetic oligonucleotide; TTT chr11 5220643 5220664 5220660 5220665 +
cacatagtcccatatttcttgg

SEQ ID NO: 83603 - DNA, 22 bp, Artificial Sequence
  Synthetic oligonucleotide; TTC chr11 5220644 5220665 5220661 5220666 +
acatagtcccatatttcttgga

SEQ ID NO: 83604 - DNA, 22 bp, Artificial Sequence
  Synthetic oligonucleotide; TTT chr11 5220660 5220681 5220677 5220682 +
cttggaggctttgttcgtttct

SEQ ID NO: 83605 - DNA, 22 bp, Artificial Sequence
  Synthetic oligonucleotide; TTC chr11 5220661 5220682 5220678 5220683 +
ttggaggctttgttcgtttctt

SEQ ID NO: 83606 - DNA, 22 bp, Artificial Sequence
  Synthetic oligonucleotide; CTT chr11 5220663 5220684 5220680 5220685 +
ggaggctttgttcgtttctttt

SEQ ID NO: 83607 - DNA, 22 bp, Artificial Sequence
  Synthetic oligonucleotide; TTG chr11 5220664 5220685 5220681 5220686 +
gaggctttgttcgtttcttttt

SEQ ID NO: 83608 - DNA, 22 bp, Artificial Sequence
  Synthetic oligonucleotide; CTT chr11 5220671 5220692 5220688 5220693 +
tgttcgtttctttttattcttt

SEQ ID NO: 83609 - DNA, 22 bp, Artificial Sequence
  Synthetic oligonucleotide; TTT chr11 5220672 5220693 5220689 5220694 +
gttcgtttctttttattctttt

SEQ ID NO: 83610 - DNA, 22 bp, Artificial Sequence
  Synthetic oligonucleotide; TTG chr11 5220673 5220694 5220690 5220695 +
ttcgtttctttttattcttttt

SEQ ID NO: 83611 - DNA, 22 bp, Artificial Sequence
  Synthetic oligonucleotide; TTC chr11 5220676 5220697 5220693 5220698 +
gtttctttttattcttttttct

SEQ ID NO: 83612 - DNA, 22 bp, Artificial Sequence
  Synthetic oligonucleotide; TTT chr11 5220680 5220701 5220697 5220702 +
ctttttattcttttttctctaa

SEQ ID NO: 83613 - DNA, 22 bp, Artificial Sequence
  Synthetic oligonucleotide; TTC chr11 5220681 5220702 5220698 5220703 +
tttttattcttttttctctaaa

SEQ ID NO: 83614 - DNA, 22 bp, Artificial Sequence
  Synthetic oligonucleotide; CTT chr11 5220683 5220704 5220700 5220705 +
tttattcttttttctctaaact

SEQ ID NO: 83615 - DNA, 22 bp, Artificial Sequence
  Synthetic oligonucleotide; TTT chr11 5220684 5220705 5220701 5220706 +
ttattcttttttctctaaactt

SEQ ID NO: 83616 - DNA, 22 bp, Artificial Sequence
  Synthetic oligonucleotide; TTT chr11 5220685 5220706 5220702 5220707 +
tattcttttttctctaaacttc

SEQ ID NO: 83617 - DNA, 22 bp, Artificial Sequence
  Synthetic oligonucleotide; TTT chr11 5220686 5220707 5220703 5220708 +
attcttttttctctaaacttct

SEQ ID NO: 83618 - DNA, 22 bp, Artificial Sequence
  Synthetic oligonucleotide; TTA chr11 5220687 5220708 5220704 5220709 +
ttcttttttctctaaacttctc

SEQ ID NO: 83619 - DNA, 22 bp, Artificial Sequence
  Synthetic oligonucleotide; TTC chr11 5220690 5220711 5220707 5220712 +
ttttttctctaaacttctcttc

SEQ ID NO: 83620 - DNA, 22 bp, Artificial Sequence
  Synthetic oligonucleotide; CTT chr11 5220692 5220713 5220709 5220714 +
ttttctctaaacttctcttcat

SEQ ID NO: 83621 - DNA, 22 bp, Artificial Sequence
  Synthetic oligonucleotide; TTT chr11 5220693 5220714 5220710 5220715 +
tttctctaaacttctcttcatg

SEQ ID NO: 83622 - DNA, 22 bp, Artificial Sequence
  Synthetic oligonucleotide; TTT chr11 5220694 5220715 5220711 5220716 +
ttctctaaacttctcttcatgc

SEQ ID NO: 83623 - DNA, 22 bp, Artificial Sequence
  Synthetic oligonucleotide; TTT chr11 5220695 5220716 5220712 5220717 +
tctctaaacttctcttcatgct

SEQ ID NO: 83624 - DNA, 22 bp, Artificial Sequence
  Synthetic oligonucleotide; TTT chr11 5220696 5220717 5220713 5220718 +
ctctaaacttctcttcatgctt

SEQ ID NO: 83625 - DNA, 22 bp, Artificial Sequence
  Synthetic oligonucleotide; TTC chr11 5220697 5220718 5220714 5220719 +
tctaaacttctcttcatgcttc

SEQ ID NO: 83626 - DNA, 22 bp, Artificial Sequence
  Synthetic oligonucleotide; CTC chr11 5220699 5220720 5220716 5220721 +
taaacttctcttcatgcttcat

SEQ ID NO: 83627 - DNA, 22 bp, Artificial Sequence
  Synthetic oligonucleotide; CTA chr11 5220701 5220722 5220718 5220723 +
aacttctcttcatgcttcattt

SEQ ID NO: 83628 - DNA, 22 bp, Artificial Sequence
  Synthetic oligonucleotide; CTT chr11 5220706 5220727 5220723 5220728 +
ctcttcatgcttcatttcattc

SEQ ID NO: 83629 - DNA, 22 bp, Artificial Sequence
  Synthetic oligonucleotide; TTC chr11 5220707 5220728 5220724 5220729 +
tcttcatgcttcatttcattca

SEQ ID NO: 83630 - DNA, 22 bp, Artificial Sequence
  Synthetic oligonucleotide; CTC chr11 5220709 5220730 5220726 5220731 +
ttcatgcttcatttcattcatt

SEQ ID NO: 83631 - DNA, 22 bp, Artificial Sequence
  Synthetic oligonucleotide; CTT chr11 5220711 5220732 5220728 5220733 +
catgcttcatttcattcatttc

SEQ ID NO: 83632 - DNA, 22 bp, Artificial Sequence
  Synthetic oligonucleotide; TTC chr11 5220712 5220733 5220729 5220734 +
atgcttcatttcattcatttca

SEQ ID NO: 83633 - DNA, 22 bp, Artificial Sequence
  Synthetic oligonucleotide; CTT chr11 5220718 5220739 5220735 5220740 +
catttcattcatttcatctttc

SEQ ID NO: 83634 - DNA, 22 bp, Artificial Sequence
  Synthetic oligonucleotide; TTC chr11 5220719 5220740 5220736 5220741 +
atttcattcatttcatctttcg

SEQ ID NO: 83635 - DNA, 22 bp, Artificial Sequence
  Synthetic oligonucleotide; TTT chr11 5220723 5220744 5220740 5220745 +
cattcatttcatctttcgtcat

SEQ ID NO: 83636 - DNA, 22 bp, Artificial Sequence
  Synthetic oligonucleotide; TTC chr11 5220724 5220745 5220741 5220746 +
attcatttcatctttcgtcatt

SEQ ID NO: 83637 - DNA, 22 bp, Artificial Sequence
  Synthetic oligonucleotide; TTC chr11 5220728 5220749 5220745 5220750 +
atttcatctttcgtcattgata

SEQ ID NO: 83638 - DNA, 22 bp, Artificial Sequence
  Synthetic oligonucleotide; TTT chr11 5220732 5220753 5220749 5220754 +
catctttcgtcattgataccct

SEQ ID NO: 83639 - DNA, 22 bp, Artificial Sequence
  Synthetic oligonucleotide; TTC chr11 5220733 5220754 5220750 5220755 +
atctttcgtcattgataccctt

SEQ ID NO: 83640 - DNA, 22 bp, Artificial Sequence
  Synthetic oligonucleotide; CTT chr11 5220738 5220759 5220755 5220760 +
tcgtcattgataccctttcttc

SEQ ID NO: 83641 - DNA, 22 bp, Artificial Sequence
  Synthetic oligonucleotide; TTT chr11 5220739 5220760 5220756 5220761 +
cgtcattgataccctttcttcc

SEQ ID NO: 83642 - DNA, 22 bp, Artificial Sequence
  Synthetic oligonucleotide; TTC chr11 5220740 5220761 5220757 5220762 +
gtcattgataccctttcttcca

SEQ ID NO: 83643 - DNA, 22 bp, Artificial Sequence
  Synthetic oligonucleotide; TTG chr11 5220747 5220768 5220764 5220769 +
ataccctttcttccagttgatc

SEQ ID NO: 83644 - DNA, 22 bp, Artificial Sequence
  Synthetic oligonucleotide; CTT chr11 5220755 5220776 5220772 5220777 +
tcttccagttgatctcatcggt

SEQ ID NO: 83645 - DNA, 22 bp, Artificial Sequence
  Synthetic oligonucleotide; TTT chr11 5220756 5220777 5220773 5220778 +
cttccagttgatctcatcggtt

SEQ ID NO: 83646 - DNA, 22 bp, Artificial Sequence
  Synthetic oligonucleotide; TTC chr11 5220757 5220778 5220774 5220779 +
ttccagttgatctcatcggtta

SEQ ID NO: 83647 - DNA, 22 bp, Artificial Sequence
  Synthetic oligonucleotide; CTT chr11 5220759 5220780 5220776 5220781 +
ccagttgatctcatcggttact

SEQ ID NO: 83648 - DNA, 22 bp, Artificial Sequence
  Synthetic oligonucleotide; TTC chr11 5220760 5220781 5220777 5220782 +
cagttgatctcatcggttactg

SEQ ID NO: 83649 - DNA, 22 bp, Artificial Sequence
  Synthetic oligonucleotide; TTG chr11 5220766 5220787 5220783 5220788 +
atctcatcggttactgaggctt

SEQ ID NO: 83650 - DNA, 22 bp, Artificial Sequence
  Synthetic oligonucleotide; CTC chr11 5220771 5220792 5220788 5220793 +
atcggttactgaggcttgtgta

SEQ ID NO: 83651 - DNA, 22 bp, Artificial Sequence
  Synthetic oligonucleotide; TTA chr11 5220779 5220800 5220796 5220801 +
ctgaggcttgtgtatttgtcac

SEQ ID NO: 83652 - DNA, 22 bp, Artificial Sequence
  Synthetic oligonucleotide; CTG chr11 5220782 5220803 5220799 5220804 +
aggcttgtgtatttgtcacgta

SEQ ID NO: 83653 - DNA, 22 bp, Artificial Sequence
  Synthetic oligonucleotide; CTT chr11 5220788 5220809 5220805 5220810 +
gtgtatttgtcacgtagttctc

SEQ ID NO: 83654 - DNA, 22 bp, Artificial Sequence
  Synthetic oligonucleotide; TTG chr11 5220789 5220810 5220806 5220811 +
tgtatttgtcacgtagttctcc

SEQ ID NO: 83655 - DNA, 22 bp, Artificial Sequence
  Synthetic oligonucleotide; TTT chr11 5220796 5220817 5220813 5220818 +
gtcacgtagttctcctgccttg

SEQ ID NO: 83656 - DNA, 22 bp, Artificial Sequence
  Synthetic oligonucleotide; TTG chr11 5220797 5220818 5220814 5220819 +
tcacgtagttctcctgccttgg

SEQ ID NO: 83657 - DNA, 22 bp, Artificial Sequence
  Synthetic oligonucleotide; TTC chr11 5220808 5220829 5220825 5220830 +
tcctgccttggttttcagctcc

SEQ ID NO: 83658 - DNA, 22 bp, Artificial Sequence
  Synthetic oligonucleotide; CTC chr11 5220810 5220831 5220827 5220832 +
ctgccttggttttcagctccat

SEQ ID NO: 83659 - DNA, 22 bp, Artificial Sequence
  Synthetic oligonucleotide; CTG chr11 5220813 5220834 5220830 5220835 +
ccttggttttcagctccatcag

SEQ ID NO: 83660 - DNA, 22 bp, Artificial Sequence
  Synthetic oligonucleotide; CTT chr11 5220817 5220838 5220834 5220839 +
ggttttcagctccatcaggtcc

SEQ ID NO: 83661 - DNA, 22 bp, Artificial Sequence
  Synthetic oligonucleotide; TTG chr11 5220818 5220839 5220835 5220840 +
gttttcagctccatcaggtcct

SEQ ID NO: 83662 - DNA, 22 bp, Artificial Sequence
  Synthetic oligonucleotide; TTT chr11 5220822 5220843 5220839 5220844 +
tcagctccatcaggtcctttaa

SEQ ID NO: 83663 - DNA, 22 bp, Artificial Sequence
  Synthetic oligonucleotide; TTT chr11 5220823 5220844 5220840 5220845 +
cagctccatcaggtcctttaag

SEQ ID NO: 83664 - DNA, 22 bp, Artificial Sequence
  Synthetic oligonucleotide; TTC chr11 5220824 5220845 5220841 5220846 +
agctccatcaggtcctttaagg

SEQ ID NO: 83665 - DNA, 22 bp, Artificial Sequence
  Synthetic oligonucleotide; CTC chr11 5220829 5220850 5220846 5220851 +
catcaggtcctttaaggacttc

SEQ ID NO: 83666 - DNA, 22 bp, Artificial Sequence
  Synthetic oligonucleotide; CTT chr11 5220841 5220862 5220858 5220863 +
taaggacttctgtgcattggtt

SEQ ID NO: 83667 - DNA, 22 bp, Artificial Sequence
  Synthetic oligonucleotide; TTT chr11 5220842 5220863 5220859 5220864 +
aaggacttctgtgcattggtta

SEQ ID NO: 83668 - DNA, 22 bp, Artificial Sequence
  Synthetic oligonucleotide; TTA chr11 5220843 5220864 5220860 5220865 +
aggacttctgtgcattggttat

SEQ ID NO: 83669 - DNA, 22 bp, Artificial Sequence
  Synthetic oligonucleotide; CTT chr11 5220850 5220871 5220867 5220872 +
ctgtgcattggttattctagtt

SEQ ID NO: 83670 - DNA, 22 bp, Artificial Sequence
  Synthetic oligonucleotide; TTC chr11 5220851 5220872 5220868 5220873 +
tgtgcattggttattctagtta

SEQ ID NO: 83671 - DNA, 22 bp, Artificial Sequence
  Synthetic oligonucleotide; CTG chr11 5220853 5220874 5220870 5220875 +
tgcattggttattctagttatc

SEQ ID NO: 83672 - DNA, 22 bp, Artificial Sequence
  Synthetic oligonucleotide; TTG chr11 5220860 5220881 5220877 5220882 +
gttattctagttatccattcat

SEQ ID NO: 83673 - DNA, 22 bp, Artificial Sequence
  Synthetic oligonucleotide; TTA chr11 5220864 5220885 5220881 5220886 +
ttctagttatccattcatctaa

SEQ ID NO: 83674 - DNA, 22 bp, Artificial Sequence
  Synthetic oligonucleotide; TTC chr11 5220867 5220888 5220884 5220889 +
tagttatccattcatctaattt

SEQ ID NO: 83675 - DNA, 22 bp, Artificial Sequence
  Synthetic oligonucleotide; CTA chr11 5220869 5220890 5220886 5220891 +
gttatccattcatctaattttt

SEQ ID NO: 83676 - DNA, 22 bp, Artificial Sequence
  Synthetic oligonucleotide; TTA chr11 5220873 5220894 5220890 5220895 +
tccattcatctaattttttttc

SEQ ID NO: 83677 - DNA, 22 bp, Artificial Sequence
  Synthetic oligonucleotide; TTC chr11 5220880 5220901 5220897 5220902 +
atctaattttttttcaaagttt

SEQ ID NO: 83678 - DNA, 22 bp, Artificial Sequence
  Synthetic oligonucleotide; CTA chr11 5220885 5220906 5220902 5220907 +
attttttttcaaagttttttac

SEQ ID NO: 83679 - DNA, 22 bp, Artificial Sequence
  Synthetic oligonucleotide; TTT chr11 5220889 5220910 5220906 5220911 +
tttttcaaagttttttacttct

SEQ ID NO: 83680 - DNA, 22 bp, Artificial Sequence
  Synthetic oligonucleotide; TTT chr11 5220890 5220911 5220907 5220912 +
ttttcaaagttttttacttctt

SEQ ID NO: 83681 - DNA, 22 bp, Artificial Sequence
  Synthetic oligonucleotide; TTT chr11 5220891 5220912 5220908 5220913 +
tttcaaagttttttacttcttt

SEQ ID NO: 83682 - DNA, 22 bp, Artificial Sequence
  Synthetic oligonucleotide; TTT chr11 5220892 5220913 5220909 5220914 +
ttcaaagttttttacttctttg

SEQ ID NO: 83683 - DNA, 22 bp, Artificial Sequence
  Synthetic oligonucleotide; TTT chr11 5220893 5220914 5220910 5220915 +
tcaaagttttttacttctttgc

SEQ ID NO: 83684 - DNA, 22 bp, Artificial Sequence
  Synthetic oligonucleotide; TTT chr11 5220894 5220915 5220911 5220916 +
caaagttttttacttctttgcc

SEQ ID NO: 83685 - DNA, 22 bp, Artificial Sequence
  Synthetic oligonucleotide; TTC chr11 5220895 5220916 5220912 5220917 +
aaagttttttacttctttgccg

SEQ ID NO: 83686 - DNA, 22 bp, Artificial Sequence
  Synthetic oligonucleotide; TTT chr11 5220902 5220923 5220919 5220924 +
tttacttctttgccgtttgttc

SEQ ID NO: 83687 - DNA, 22 bp, Artificial Sequence
  Synthetic oligonucleotide; TTT chr11 5220903 5220924 5220920 5220925 +
ttacttctttgccgtttgttcg

SEQ ID NO: 83688 - DNA, 22 bp, Artificial Sequence
  Synthetic oligonucleotide; TTT chr11 5220904 5220925 5220921 5220926 +
tacttctttgccgtttgttcga

SEQ ID NO: 83689 - DNA, 22 bp, Artificial Sequence
  Synthetic oligonucleotide; TTT chr11 5220905 5220926 5220922 5220927 +
acttctttgccgtttgttcgaa

SEQ ID NO: 83690 - DNA, 22 bp, Artificial Sequence
  Synthetic oligonucleotide; TTA chr11 5220906 5220927 5220923 5220928 +
cttctttgccgtttgttcgaac

SEQ ID NO: 83691 - DNA, 22 bp, Artificial Sequence
  Synthetic oligonucleotide; CTT chr11 5220909 5220930 5220926 5220931 +
ctttgccgtttgttcgaacttc

SEQ ID NO: 83692 - DNA, 22 bp, Artificial Sequence
  Synthetic oligonucleotide; TTC chr11 5220910 5220931 5220927 5220932 +
tttgccgtttgttcgaacttcc

SEQ ID NO: 83693 - DNA, 22 bp, Artificial Sequence
  Synthetic oligonucleotide; CTT chr11 5220912 5220933 5220929 5220934 +
tgccgtttgttcgaacttcctc

SEQ ID NO: 83694 - DNA, 22 bp, Artificial Sequence
  Synthetic oligonucleotide; TTT chr11 5220913 5220934 5220930 5220935 +
gccgtttgttcgaacttcctcc

SEQ ID NO: 83695 - DNA, 22 bp, Artificial Sequence
  Synthetic oligonucleotide; TTG chr11 5220914 5220935 5220931 5220936 +
ccgtttgttcgaacttcctcct

SEQ ID NO: 83696 - DNA, 22 bp, Artificial Sequence
  Synthetic oligonucleotide; TTT chr11 5220920 5220941 5220937 5220942 +
gttcgaacttcctcctttagct

SEQ ID NO: 83697 - DNA, 22 bp, Artificial Sequence
  Synthetic oligonucleotide; TTG chr11 5220921 5220942 5220938 5220943 +
ttcgaacttcctcctttagctt

SEQ ID NO: 83698 - DNA, 22 bp, Artificial Sequence
  Synthetic oligonucleotide; TTC chr11 5220924 5220945 5220941 5220946 +
gaacttcctcctttagcttgga

SEQ ID NO: 83699 - DNA, 22 bp, Artificial Sequence
  Synthetic oligonucleotide; CTT chr11 5220930 5220951 5220947 5220952 +
cctcctttagcttggagtagtt

SEQ ID NO: 83700 - DNA, 22 bp, Artificial Sequence
  Synthetic oligonucleotide; TTC chr11 5220931 5220952 5220948 5220953 +
ctcctttagcttggagtagttt

SEQ ID NO: 83701 - DNA, 22 bp, Artificial Sequence
  Synthetic oligonucleotide; CTC chr11 5220934 5220955 5220951 5220956 +
ctttagcttggagtagtttgat

SEQ ID NO: 83702 - DNA, 22 bp, Artificial Sequence
  Synthetic oligonucleotide; CTT chr11 5220937 5220958 5220954 5220959 +
tagcttggagtagtttgatctt

SEQ ID NO: 83703 - DNA, 22 bp, Artificial Sequence
  Synthetic oligonucleotide; TTT chr11 5220938 5220959 5220955 5220960 +
agcttggagtagtttgatcttc

SEQ ID NO: 83704 - DNA, 22 bp, Artificial Sequence
  Synthetic oligonucleotide; TTA chr11 5220939 5220960 5220956 5220961 +
gcttggagtagtttgatcttct

SEQ ID NO: 83705 - DNA, 22 bp, Artificial Sequence
  Synthetic oligonucleotide; CTT chr11 5220943 5220964 5220960 5220965 +
ggagtagtttgatcttctgaag

SEQ ID NO: 83706 - DNA, 22 bp, Artificial Sequence
  Synthetic oligonucleotide; TTG chr11 5220944 5220965 5220961 5220966 +
gagtagtttgatcttctgaagc

SEQ ID NO: 83707 - DNA, 22 bp, Artificial Sequence
  Synthetic oligonucleotide; TTT chr11 5220953 5220974 5220970 5220975 +
gatcttctgaagccttcctctc

SEQ ID NO: 83708 - DNA, 22 bp, Artificial Sequence
  Synthetic oligonucleotide; TTG chr11 5220954 5220975 5220971 5220976 +
atcttctgaagccttcctctct

SEQ ID NO: 83709 - DNA, 22 bp, Artificial Sequence
  Synthetic oligonucleotide; CTT chr11 5220959 5220980 5220976 5220981 +
ctgaagccttcctctctcaact

SEQ ID NO: 83710 - DNA, 22 bp, Artificial Sequence
  Synthetic oligonucleotide; TTC chr11 5220960 5220981 5220977 5220982 +
tgaagccttcctctctcaactc

SEQ ID NO: 83711 - DNA, 22 bp, Artificial Sequence
  Synthetic oligonucleotide; CTG chr11 5220962 5220983 5220979 5220984 +
aagccttcctctctcaactcgt

SEQ ID NO: 83712 - DNA, 22 bp, Artificial Sequence
  Synthetic oligonucleotide; CTT chr11 5220969 5220990 5220986 5220991 +
cctctctcaactcgtcaaagtc

SEQ ID NO: 83713 - DNA, 22 bp, Artificial Sequence
  Synthetic oligonucleotide; TTC chr11 5220970 5220991 5220987 5220992 +
ctctctcaactcgtcaaagtca

SEQ ID NO: 83714 - DNA, 22 bp, Artificial Sequence
  Synthetic oligonucleotide; CTC chr11 5220973 5220994 5220990 5220995 +
tctcaactcgtcaaagtcattc

SEQ ID NO: 83715 - DNA, 22 bp, Artificial Sequence
  Synthetic oligonucleotide; CTC chr11 5220975 5220996 5220992 5220997 +
tcaactcgtcaaagtcattctc

SEQ ID NO: 83716 - DNA, 22 bp, Artificial Sequence
  Synthetic oligonucleotide; CTC chr11 5220977 5220998 5220994 5220999 +
aactcgtcaaagtcattctctg

SEQ ID NO: 83717 - DNA, 22 bp, Artificial Sequence
  Synthetic oligonucleotide; CTC chr11 5220982 5221003 5220999 5221004 +
gtcaaagtcattctctgcccag

SEQ ID NO: 83718 - DNA, 22 bp, Artificial Sequence
  Synthetic oligonucleotide; TTC chr11 5220995 5221016 5221012 5221017 +
tctgcccagctttgttccattg

SEQ ID NO: 83719 - DNA, 22 bp, Artificial Sequence
  Synthetic oligonucleotide; CTC chr11 5220997 5221018 5221014 5221019 +
tgcccagctttgttccattgct

SEQ ID NO: 83720 - DNA, 22 bp, Artificial Sequence
  Synthetic oligonucleotide; CTG chr11 5220999 5221020 5221016 5221021 +
cccagctttgttccattgctgg

SEQ ID NO: 83721 - DNA, 22 bp, Artificial Sequence
  Synthetic oligonucleotide; CTT chr11 5221007 5221028 5221024 5221029 +
tgttccattgctggtgaggagc

SEQ ID NO: 83722 - DNA, 22 bp, Artificial Sequence
  Synthetic oligonucleotide; TTT chr11 5221008 5221029 5221025 5221030 +
gttccattgctggtgaggagct

SEQ ID NO: 83723 - DNA, 22 bp, Artificial Sequence
  Synthetic oligonucleotide; TTG chr11 5221009 5221030 5221026 5221031 +
ttccattgctggtgaggagctg

SEQ ID NO: 83724 - DNA, 22 bp, Artificial Sequence
  Synthetic oligonucleotide; TTC chr11 5221012 5221033 5221029 5221034 +
cattgctggtgaggagctgcgt

SEQ ID NO: 83725 - DNA, 22 bp, Artificial Sequence
  Synthetic oligonucleotide; TTG chr11 5221017 5221038 5221034 5221039 +
ctggtgaggagctgcgttactt

SEQ ID NO: 83726 - DNA, 22 bp, Artificial Sequence
  Synthetic oligonucleotide; CTG chr11 5221020 5221041 5221037 5221042 +
gtgaggagctgcgttactttgg

SEQ ID NO: 83727 - DNA, 22 bp, Artificial Sequence
  Synthetic oligonucleotide; CTG chr11 5221031 5221052 5221048 5221053 +
cgttactttggaggaggagagg

SEQ ID NO: 83728 - DNA, 22 bp, Artificial Sequence
  Synthetic oligonucleotide; TTA chr11 5221036 5221057 5221053 5221058 +
ctttggaggaggagaggcactc

SEQ ID NO: 83729 - DNA, 22 bp, Artificial Sequence
  Synthetic oligonucleotide; CTT chr11 5221039 5221060 5221056 5221061 +
tggaggaggagaggcactctca

SEQ ID NO: 83730 - DNA, 22 bp, Artificial Sequence
  Synthetic oligonucleotide; TTT chr11 5221040 5221061 5221057 5221062 +
ggaggaggagaggcactctcat

SEQ ID NO: 83731 - DNA, 22 bp, Artificial Sequence
  Synthetic oligonucleotide; TTG chr11 5221041 5221062 5221058 5221063 +
gaggaggagaggcactctcatt

SEQ ID NO: 83732 - DNA, 22 bp, Artificial Sequence
  Synthetic oligonucleotide; CTC chr11 5221058 5221079 5221075 5221080 +
tcatttttagagtgtccagttt

SEQ ID NO: 83733 - DNA, 22 bp, Artificial Sequence
  Synthetic oligonucleotide; CTC chr11 5221060 5221081 5221077 5221082 +
atttttagagtgtccagttttt

SEQ ID NO: 83734 - DNA, 22 bp, Artificial Sequence
  Synthetic oligonucleotide; TTT chr11 5221064 5221085 5221081 5221086 +
ttagagtgtccagtttttctgc

SEQ ID NO: 83735 - DNA, 22 bp, Artificial Sequence
  Synthetic oligonucleotide; TTT chr11 5221065 5221086 5221082 5221087 +
tagagtgtccagtttttctgct

SEQ ID NO: 83736 - DNA, 22 bp, Artificial Sequence
  Synthetic oligonucleotide; TTT chr11 5221066 5221087 5221083 5221088 +
agagtgtccagtttttctgctc

SEQ ID NO: 83737 - DNA, 22 bp, Artificial Sequence
  Synthetic oligonucleotide; TTA chr11 5221067 5221088 5221084 5221089 +
gagtgtccagtttttctgctct

SEQ ID NO: 83738 - DNA, 22 bp, Artificial Sequence
  Synthetic oligonucleotide; TTT chr11 5221080 5221101 5221097 5221102 +
ttctgctctgctttttccccat

SEQ ID NO: 83739 - DNA, 22 bp, Artificial Sequence
  Synthetic oligonucleotide; TTT chr11 5221081 5221102 5221098 5221103 +
tctgctctgctttttccccatc

SEQ ID NO: 83740 - DNA, 22 bp, Artificial Sequence
  Synthetic oligonucleotide; TTT chr11 5221082 5221103 5221099 5221104 +
ctgctctgctttttccccatct

SEQ ID NO: 83741 - DNA, 22 bp, Artificial Sequence
  Synthetic oligonucleotide; TTC chr11 5221083 5221104 5221100 5221105 +
tgctctgctttttccccatctt

SEQ ID NO: 83742 - DNA, 22 bp, Artificial Sequence
  Synthetic oligonucleotide; CTG chr11 5221085 5221106 5221102 5221107 +
ctctgctttttccccatcttta

SEQ ID NO: 83743 - DNA, 22 bp, Artificial Sequence
  Synthetic oligonucleotide; CTC chr11 5221088 5221109 5221105 5221110 +
tgctttttccccatctttatgg

SEQ ID NO: 83744 - DNA, 22 bp, Artificial Sequence
  Synthetic oligonucleotide; CTG chr11 5221090 5221111 5221107 5221112 +
ctttttccccatctttatggtt

SEQ ID NO: 83745 - DNA, 22 bp, Artificial Sequence
  Synthetic oligonucleotide; CTT chr11 5221093 5221114 5221110 5221115 +
tttccccatctttatggtttta

SEQ ID NO: 83746 - DNA, 22 bp, Artificial Sequence
  Synthetic oligonucleotide; TTT chr11 5221094 5221115 5221111 5221116 +
ttccccatctttatggttttat

SEQ ID NO: 83747 - DNA, 22 bp, Artificial Sequence
  Synthetic oligonucleotide; TTT chr11 5221095 5221116 5221112 5221117 +
tccccatctttatggttttatc

SEQ ID NO: 83748 - DNA, 22 bp, Artificial Sequence
  Synthetic oligonucleotide; TTT chr11 5221096 5221117 5221113 5221118 +
ccccatctttatggttttatct

SEQ ID NO: 83749 - DNA, 22 bp, Artificial Sequence
  Synthetic oligonucleotide; TTC chr11 5221097 5221118 5221114 5221119 +
cccatctttatggttttatcta

SEQ ID NO: 83750 - DNA, 22 bp, Artificial Sequence
  Synthetic oligonucleotide; CTT chr11 5221105 5221126 5221122 5221127 +
tatggttttatctacctttggt

SEQ ID NO: 83751 - DNA, 22 bp, Artificial Sequence
  Synthetic oligonucleotide; TTT chr11 5221106 5221127 5221123 5221128 +
atggttttatctacctttggtc

SEQ ID NO: 83752 - DNA, 22 bp, Artificial Sequence
  Synthetic oligonucleotide; TTA chr11 5221107 5221128 5221124 5221129 +
tggttttatctacctttggtct

SEQ ID NO: 83753 - DNA, 22 bp, Artificial Sequence
  Synthetic oligonucleotide; TTT chr11 5221113 5221134 5221130 5221135 +
tatctacctttggtctttgatg

SEQ ID NO: 83754 - DNA, 22 bp, Artificial Sequence
  Synthetic oligonucleotide; TTT chr11 5221114 5221135 5221131 5221136 +
atctacctttggtctttgatga

SEQ ID NO: 83755 - DNA, 22 bp, Artificial Sequence
  Synthetic oligonucleotide; TTA chr11 5221115 5221136 5221132 5221137 +
tctacctttggtctttgatgat

SEQ ID NO: 83756 - DNA, 22 bp, Artificial Sequence
  Synthetic oligonucleotide; CTA chr11 5221119 5221140 5221136 5221141 +
cctttggtctttgatgatggcg

SEQ ID NO: 83757 - DNA, 22 bp, Artificial Sequence
  Synthetic oligonucleotide; CTT chr11 5221123 5221144 5221140 5221145 +
tggtctttgatgatggcgatgt

SEQ ID NO: 83758 - DNA, 22 bp, Artificial Sequence
  Synthetic oligonucleotide; TTT chr11 5221124 5221145 5221141 5221146 +
ggtctttgatgatggcgatgta

SEQ ID NO: 83759 - DNA, 22 bp, Artificial Sequence
  Synthetic oligonucleotide; TTG chr11 5221125 5221146 5221142 5221147 +
gtctttgatgatggcgatgtac

SEQ ID NO: 83760 - DNA, 22 bp, Artificial Sequence
  Synthetic oligonucleotide; CTT chr11 5221130 5221151 5221147 5221152 +
tgatgatggcgatgtacagatg

SEQ ID NO: 83761 - DNA, 22 bp, Artificial Sequence
  Synthetic oligonucleotide; TTT chr11 5221131 5221152 5221148 5221153 +
gatgatggcgatgtacagatgg

SEQ ID NO: 83762 - DNA, 22 bp, Artificial Sequence
  Synthetic oligonucleotide; TTG chr11 5221132 5221153 5221149 5221154 +
atgatggcgatgtacagatggg

SEQ ID NO: 83763 - DNA, 22 bp, Artificial Sequence
  Synthetic oligonucleotide; TTT chr11 5221157 5221178 5221174 5221179 +
ttggtgtggatgtcctttctgt

SEQ ID NO: 83764 - DNA, 22 bp, Artificial Sequence
  Synthetic oligonucleotide; TTT chr11 5221158 5221179 5221175 5221180 +
tggtgtggatgtcctttctgtt

SEQ ID NO: 83765 - DNA, 22 bp, Artificial Sequence
  Synthetic oligonucleotide; TTT chr11 5221159 5221180 5221176 5221181 +
ggtgtggatgtcctttctgttt

SEQ ID NO: 83766 - DNA, 22 bp, Artificial Sequence
  Synthetic oligonucleotide; TTG chr11 5221160 5221181 5221177 5221182 +
gtgtggatgtcctttctgtttg

SEQ ID NO: 83767 - DNA, 22 bp, Artificial Sequence
  Synthetic oligonucleotide; CTT chr11 5221174 5221195 5221191 5221196 +
tctgtttgttagttttccttct

SEQ ID NO: 83768 - DNA, 22 bp, Artificial Sequence
  Synthetic oligonucleotide; TTT chr11 5221175 5221196 5221192 5221197 +
ctgtttgttagttttccttcta

SEQ ID NO: 83769 - DNA, 22 bp, Artificial Sequence
  Synthetic oligonucleotide; TTC chr11 5221176 5221197 5221193 5221198 +
tgtttgttagttttccttctaa

SEQ ID NO: 83770 - DNA, 22 bp, Artificial Sequence
  Synthetic oligonucleotide; CTG chr11 5221178 5221199 5221195 5221200 +
tttgttagttttccttctaaca

SEQ ID NO: 83771 - DNA, 22 bp, Artificial Sequence
  Synthetic oligonucleotide; TTT chr11 5221181 5221202 5221198 5221203 +
gttagttttccttctaacagtc

SEQ ID NO: 83772 - DNA, 22 bp, Artificial Sequence
  Synthetic oligonucleotide; TTG chr11 5221182 5221203 5221199 5221204 +
ttagttttccttctaacagtca

SEQ ID NO: 83773 - DNA, 22 bp, Artificial Sequence
  Synthetic oligonucleotide; TTA chr11 5221185 5221206 5221202 5221207 +
gttttccttctaacagtcagga

SEQ ID NO: 83774 - DNA, 22 bp, Artificial Sequence
  Synthetic oligonucleotide; TTT chr11 5221189 5221210 5221206 5221211 +
tccttctaacagtcaggaccct

SEQ ID NO: 83775 - DNA, 22 bp, Artificial Sequence
  Synthetic oligonucleotide; TTT chr11 5221190 5221211 5221207 5221212 +
ccttctaacagtcaggaccctc

SEQ ID NO: 83776 - DNA, 22 bp, Artificial Sequence
  Synthetic oligonucleotide; TTC chr11 5221191 5221212 5221208 5221213 +
cttctaacagtcaggaccctca

SEQ ID NO: 83777 - DNA, 22 bp, Artificial Sequence
  Synthetic oligonucleotide; CTT chr11 5221194 5221215 5221211 5221216 +
ctaacagtcaggaccctcagct

SEQ ID NO: 83778 - DNA, 22 bp, Artificial Sequence
  Synthetic oligonucleotide; TTC chr11 5221195 5221216 5221212 5221217 +
taacagtcaggaccctcagctg

SEQ ID NO: 83779 - DNA, 22 bp, Artificial Sequence
  Synthetic oligonucleotide; CTA chr11 5221197 5221218 5221214 5221219 +
acagtcaggaccctcagctgca

SEQ ID NO: 83780 - DNA, 22 bp, Artificial Sequence
  Synthetic oligonucleotide; CTC chr11 5221212 5221233 5221229 5221234 +
agctgcaggtctgttggagttt

SEQ ID NO: 83781 - DNA, 22 bp, Artificial Sequence
  Synthetic oligonucleotide; CTG chr11 5221217 5221238 5221234 5221239 +
caggtctgttggagtttactgg

SEQ ID NO: 83782 - DNA, 22 bp, Artificial Sequence
  Synthetic oligonucleotide; CTG chr11 5221225 5221246 5221242 5221247 +
ttggagtttactggaggtccac

SEQ ID NO: 83783 - DNA, 22 bp, Artificial Sequence
  Synthetic oligonucleotide; TTG chr11 5221228 5221249 5221245 5221250 +
gagtttactggaggtccactcc

SEQ ID NO: 83784 - DNA, 22 bp, Artificial Sequence
  Synthetic oligonucleotide; TTT chr11 5221234 5221255 5221251 5221256 +
actggaggtccactccagaagc

SEQ ID NO: 83785 - DNA, 22 bp, Artificial Sequence
  Synthetic oligonucleotide; TTA chr11 5221235 5221256 5221252 5221257 +
ctggaggtccactccagaagct

SEQ ID NO: 83786 - DNA, 22 bp, Artificial Sequence
  Synthetic oligonucleotide; CTG chr11 5221238 5221259 5221255 5221260 +
gaggtccactccagaagctgtt

SEQ ID NO: 83787 - DNA, 22 bp, Artificial Sequence
  Synthetic oligonucleotide; CTC chr11 5221249 5221270 5221266 5221271 +
cagaagctgttttcctgggtat

SEQ ID NO: 83788 - DNA, 22 bp, Artificial Sequence
  Synthetic oligonucleotide; CTG chr11 5221258 5221279 5221275 5221280 +
ttttcctgggtatcaacagcgg

SEQ ID NO: 83789 - DNA, 22 bp, Artificial Sequence
  Synthetic oligonucleotide; TTT chr11 5221261 5221282 5221278 5221283 +
tcctgggtatcaacagcggtgg

SEQ ID NO: 83790 - DNA, 22 bp, Artificial Sequence
  Synthetic oligonucleotide; TTT chr11 5221262 5221283 5221279 5221284 +
cctgggtatcaacagcggtggc

SEQ ID NO: 83791 - DNA, 22 bp, Artificial Sequence
  Synthetic oligonucleotide; TTC chr11 5221263 5221284 5221280 5221285 +
ctgggtatcaacagcggtggct

SEQ ID NO: 83792 - DNA, 22 bp, Artificial Sequence
  Synthetic oligonucleotide; CTG chr11 5221266 5221287 5221283 5221288 +
ggtatcaacagcggtggctgca

SEQ ID NO: 83793 - DNA, 22 bp, Artificial Sequence
  Synthetic oligonucleotide; CTG chr11 5221286 5221307 5221303 5221308 +
cagaacagtggatattggtgaa

SEQ ID NO: 83794 - DNA, 22 bp, Artificial Sequence
  Synthetic oligonucleotide; TTG chr11 5221303 5221324 5221320 5221325 +
gtgaaccgcaaatgctgctgcc

SEQ ID NO: 83795 - DNA, 22 bp, Artificial Sequence
  Synthetic oligonucleotide; CTG chr11 5221320 5221341 5221337 5221342 +
ctgcctgatcattcctctggaa

SEQ ID NO: 83796 - DNA, 22 bp, Artificial Sequence
  Synthetic oligonucleotide; CTG chr11 5221323 5221344 5221340 5221345 +
cctgatcattcctctggaagtt

SEQ ID NO: 83797 - DNA, 22 bp, Artificial Sequence
  Synthetic oligonucleotide; CTG chr11 5221327 5221348 5221344 5221349 +
atcattcctctggaagttttgt

SEQ ID NO: 83798 - DNA, 22 bp, Artificial Sequence
  Synthetic oligonucleotide; TTC chr11 5221334 5221355 5221351 5221356 +
ctctggaagttttgtcttagag

SEQ ID NO: 83799 - DNA, 22 bp, Artificial Sequence
  Synthetic oligonucleotide; CTC chr11 5221337 5221358 5221354 5221359 +
tggaagttttgtcttagaggag

SEQ ID NO: 83800 - DNA, 22 bp, Artificial Sequence
  Synthetic oligonucleotide; CTG chr11 5221339 5221360 5221356 5221361 +
gaagttttgtcttagaggagta

SEQ ID NO: 83801 - DNA, 22 bp, Artificial Sequence
  Synthetic oligonucleotide; TTT chr11 5221346 5221367 5221363 5221368 +
tgtcttagaggagtaccagcca

SEQ ID NO: 83802 - DNA, 22 bp, Artificial Sequence
  Synthetic oligonucleotide; TTT chr11 5221347 5221368 5221364 5221369 +
gtcttagaggagtaccagccat

SEQ ID NO: 83803 - DNA, 22 bp, Artificial Sequence
  Synthetic oligonucleotide; TTG chr11 5221348 5221369 5221365 5221370 +
tcttagaggagtaccagccatg

SEQ ID NO: 83804 - DNA, 22 bp, Artificial Sequence
  Synthetic oligonucleotide; CTT chr11 5221352 5221373 5221369 5221374 +
agaggagtaccagccatgtgag

SEQ ID NO: 83805 - DNA, 22 bp, Artificial Sequence
  Synthetic oligonucleotide; TTA chr11 5221353 5221374 5221370 5221375 +
gaggagtaccagccatgtgagg

SEQ ID NO: 83806 - DNA, 22 bp, Artificial Sequence
  Synthetic oligonucleotide; CTG chr11 5221385 5221406 5221402 5221407 +
cccctactgggggatgcctccc

SEQ ID NO: 83807 - DNA, 22 bp, Artificial Sequence
  Synthetic oligonucleotide; CTA chr11 5221391 5221412 5221408 5221413 +
ctgggggatgcctcccagttag

SEQ ID NO: 83808 - DNA, 22 bp, Artificial Sequence
  Synthetic oligonucleotide; CTG chr11 5221394 5221415 5221411 5221416 +
ggggatgcctcccagttaggct

SEQ ID NO: 83809 - DNA, 22 bp, Artificial Sequence
  Synthetic oligonucleotide; CTC chr11 5221405 5221426 5221422 5221427 +
ccagttaggctactcgggggtc

SEQ ID NO: 83810 - DNA, 22 bp, Artificial Sequence
  Synthetic oligonucleotide; TTA chr11 5221412 5221433 5221429 5221434 +
ggctactcgggggtcagggacc

SEQ ID NO: 83811 - DNA, 22 bp, Artificial Sequence
  Synthetic oligonucleotide; CTA chr11 5221417 5221438 5221434 5221439 +
ctcgggggtcagggacccactt

SEQ ID NO: 83812 - DNA, 22 bp, Artificial Sequence
  Synthetic oligonucleotide; CTC chr11 5221420 5221441 5221437 5221442 +
gggggtcagggacccacttgag

SEQ ID NO: 83813 - DNA, 22 bp, Artificial Sequence
  Synthetic oligonucleotide; CTT chr11 5221439 5221460 5221456 5221461 +
gaggaggcagtctgcctgttct

SEQ ID NO: 83814 - DNA, 22 bp, Artificial Sequence
  Synthetic oligonucleotide; TTG chr11 5221440 5221461 5221457 5221462 +
aggaggcagtctgcctgttctc

SEQ ID NO: 83815 - DNA, 22 bp, Artificial Sequence
  Synthetic oligonucleotide; CTG chr11 5221453 5221474 5221470 5221475 +
cctgttctcagatctgaagcta

SEQ ID NO: 83816 - DNA, 22 bp, Artificial Sequence
  Synthetic oligonucleotide; CTG chr11 5221457 5221478 5221474 5221479 +
ttctcagatctgaagctatgtg

SEQ ID NO: 83817 - DNA, 22 bp, Artificial Sequence
  Synthetic oligonucleotide; TTC chr11 5221460 5221481 5221477 5221482 +
tcagatctgaagctatgtgctg

SEQ ID NO: 83818 - DNA, 22 bp, Artificial Sequence
  Synthetic oligonucleotide; CTC chr11 5221462 5221483 5221479 5221484 +
agatctgaagctatgtgctggg

SEQ ID NO: 83819 - DNA, 22 bp, Artificial Sequence
  Synthetic oligonucleotide; CTG chr11 5221469 5221490 5221486 5221491 +
aagctatgtgctgggagaacca

SEQ ID NO: 83820 - DNA, 22 bp, Artificial Sequence
  Synthetic oligonucleotide; CTA chr11 5221475 5221496 5221492 5221497 +
tgtgctgggagaaccactactc

SEQ ID NO: 83821 - DNA, 22 bp, Artificial Sequence
  Synthetic oligonucleotide; CTG chr11 5221482 5221503 5221499 5221504 +
ggagaaccactactctcttcaa

SEQ ID NO: 83822 - DNA, 22 bp, Artificial Sequence
  Synthetic oligonucleotide; CTA chr11 5221494 5221515 5221511 5221516 +
ctctcttcaaagctgtcagaca

SEQ ID NO: 83823 - DNA, 22 bp, Artificial Sequence
  Synthetic oligonucleotide; CTC chr11 5221497 5221518 5221514 5221519 +
tcttcaaagctgtcagacaggg

SEQ ID NO: 83824 - DNA, 22 bp, Artificial Sequence
  Synthetic oligonucleotide; CTC chr11 5221499 5221520 5221516 5221521 +
ttcaaagctgtcagacagggac

SEQ ID NO: 83825 - DNA, 22 bp, Artificial Sequence
  Synthetic oligonucleotide; CTT chr11 5221501 5221522 5221518 5221523 +
caaagctgtcagacagggacat

SEQ ID NO: 83826 - DNA, 22 bp, Artificial Sequence
  Synthetic oligonucleotide; TTC chr11 5221502 5221523 5221519 5221524 +
aaagctgtcagacagggacatt

SEQ ID NO: 83827 - DNA, 22 bp, Artificial Sequence
  Synthetic oligonucleotide; CTG chr11 5221509 5221530 5221526 5221531 +
tcagacagggacatttaagtct

SEQ ID NO: 83828 - DNA, 22 bp, Artificial Sequence
  Synthetic oligonucleotide; TTT chr11 5221525 5221546 5221542 5221547 +
aagtctgcagaggttcttgttg

SEQ ID NO: 83829 - DNA, 22 bp, Artificial Sequence
  Synthetic oligonucleotide; TTA chr11 5221526 5221547 5221543 5221548 +
agtctgcagaggttcttgttgt

SEQ ID NO: 83830 - DNA, 22 bp, Artificial Sequence
  Synthetic oligonucleotide; CTG chr11 5221532 5221553 5221549 5221554 +
cagaggttcttgttgtcttttg

SEQ ID NO: 83831 - DNA, 22 bp, Artificial Sequence
  Synthetic oligonucleotide; TTC chr11 5221541 5221562 5221558 5221563 +
ttgttgtcttttgtttgtctgt

SEQ ID NO: 83832 - DNA, 22 bp, Artificial Sequence
  Synthetic oligonucleotide; CTT chr11 5221543 5221564 5221560 5221565 +
gttgtcttttgtttgtctgtgc

SEQ ID NO: 83833 - DNA, 22 bp, Artificial Sequence
  Synthetic oligonucleotide; TTG chr11 5221544 5221565 5221561 5221566 +
ttgtcttttgtttgtctgtgcc

SEQ ID NO: 83834 - DNA, 22 bp, Artificial Sequence
  Synthetic oligonucleotide; TTG chr11 5221547 5221568 5221564 5221569 +
tcttttgtttgtctgtgccctg

SEQ ID NO: 83835 - DNA, 22 bp, Artificial Sequence
  Synthetic oligonucleotide; CTT chr11 5221551 5221572 5221568 5221573 +
ttgtttgtctgtgccctgcccc

SEQ ID NO: 83836 - DNA, 22 bp, Artificial Sequence
  Synthetic oligonucleotide; TTT chr11 5221552 5221573 5221569 5221574 +
tgtttgtctgtgccctgcccct

SEQ ID NO: 83837 - DNA, 22 bp, Artificial Sequence
  Synthetic oligonucleotide; TTT chr11 5221553 5221574 5221570 5221575 +
gtttgtctgtgccctgccccta

SEQ ID NO: 83838 - DNA, 22 bp, Artificial Sequence
  Synthetic oligonucleotide; TTG chr11 5221554 5221575 5221571 5221576 +
tttgtctgtgccctgcccctag

SEQ ID NO: 83839 - DNA, 22 bp, Artificial Sequence
  Synthetic oligonucleotide; TTT chr11 5221557 5221578 5221574 5221579 +
gtctgtgccctgcccctagagg

SEQ ID NO: 83840 - DNA, 22 bp, Artificial Sequence
  Synthetic oligonucleotide; TTG chr11 5221558 5221579 5221575 5221580 +
tctgtgccctgcccctagaggt

SEQ ID NO: 83841 - DNA, 22 bp, Artificial Sequence
  Synthetic oligonucleotide; CTG chr11 5221562 5221583 5221579 5221584 +
tgccctgcccctagaggtggag

SEQ ID NO: 83842 - DNA, 22 bp, Artificial Sequence
  Synthetic oligonucleotide; CTG chr11 5221569 5221590 5221586 5221591 +
cccctagaggtggagcctacag

SEQ ID NO: 83843 - DNA, 22 bp, Artificial Sequence
  Synthetic oligonucleotide; CTA chr11 5221575 5221596 5221592 5221597 +
gaggtggagcctacagaggcag

SEQ ID NO: 83844 - DNA, 22 bp, Artificial Sequence
  Synthetic oligonucleotide; CTA chr11 5221588 5221609 5221605 5221610 +
cagaggcaggcaggcctccttg

SEQ ID NO: 83845 - DNA, 22 bp, Artificial Sequence
  Synthetic oligonucleotide; CTC chr11 5221606 5221627 5221623 5221628 +
cttgagctgtggtgggctccac

SEQ ID NO: 83846 - DNA, 22 bp, Artificial Sequence
  Synthetic oligonucleotide; CTT chr11 5221609 5221630 5221626 5221631 +
gagctgtggtgggctccaccca

SEQ ID NO: 83847 - DNA, 22 bp, Artificial Sequence
  Synthetic oligonucleotide; TTG chr11 5221610 5221631 5221627 5221632 +
agctgtggtgggctccacccag

SEQ ID NO: 83848 - DNA, 22 bp, Artificial Sequence
  Synthetic oligonucleotide; CTG chr11 5221615 5221636 5221632 5221637 +
tggtgggctccacccagttcga

SEQ ID NO: 83849 - DNA, 22 bp, Artificial Sequence
  Synthetic oligonucleotide; CTC chr11 5221625 5221646 5221642 5221647 +
cacccagttcgagcttccaggc

SEQ ID NO: 83850 - DNA, 22 bp, Artificial Sequence
  Synthetic oligonucleotide; TTC chr11 5221635 5221656 5221652 5221657 +
gagcttccaggcggctttgttt

SEQ ID NO: 83851 - DNA, 22 bp, Artificial Sequence
  Synthetic oligonucleotide; CTT chr11 5221641 5221662 5221658 5221663 +
ccaggcggctttgtttacctgc

SEQ ID NO: 83852 - DNA, 22 bp, Artificial Sequence
  Synthetic oligonucleotide; TTC chr11 5221642 5221663 5221659 5221664 +
caggcggctttgtttacctgct

SEQ ID NO: 83853 - DNA, 22 bp, Artificial Sequence
  Synthetic oligonucleotide; CTT chr11 5221652 5221673 5221669 5221674 +
tgtttacctgctcaagcctgga

SEQ ID NO: 83854 - DNA, 22 bp, Artificial Sequence
  Synthetic oligonucleotide; TTT chr11 5221653 5221674 5221670 5221675 +
gtttacctgctcaagcctggac

SEQ ID NO: 83855 - DNA, 22 bp, Artificial Sequence
  Synthetic oligonucleotide; TTG chr11 5221654 5221675 5221671 5221676 +
tttacctgctcaagcctggaca

SEQ ID NO: 83856 - DNA, 22 bp, Artificial Sequence
  Synthetic oligonucleotide; TTT chr11 5221657 5221678 5221674 5221679 +
acctgctcaagcctggacaatg

SEQ ID NO: 83857 - DNA, 22 bp, Artificial Sequence
  Synthetic oligonucleotide; TTA chr11 5221658 5221679 5221675 5221680 +
cctgctcaagcctggacaatgg

SEQ ID NO: 83858 - DNA, 22 bp, Artificial Sequence
  Synthetic oligonucleotide; CTG chr11 5221662 5221683 5221679 5221684 +
ctcaagcctggacaatggtggg

SEQ ID NO: 83859 - DNA, 22 bp, Artificial Sequence
  Synthetic oligonucleotide; CTC chr11 5221665 5221686 5221682 5221687 +
aagcctggacaatggtgggcac

SEQ ID NO: 83860 - DNA, 22 bp, Artificial Sequence
  Synthetic oligonucleotide; CTG chr11 5221672 5221693 5221689 5221694 +
gacaatggtgggcacccctccc

SEQ ID NO: 83861 - DNA, 22 bp, Artificial Sequence
  Synthetic oligonucleotide; CTC chr11 5221692 5221713 5221709 5221714 +
ccccagcctcactgccaccttg

SEQ ID NO: 83862 - DNA, 22 bp, Artificial Sequence
  Synthetic oligonucleotide; CTC chr11 5221702 5221723 5221719 5221724 +
actgccaccttgcagtttgacc

SEQ ID NO: 83863 - DNA, 22 bp, Artificial Sequence
  Synthetic oligonucleotide; CTG chr11 5221706 5221727 5221723 5221728 +
ccaccttgcagtttgacctcag

SEQ ID NO: 83864 - DNA, 22 bp, Artificial Sequence
  Synthetic oligonucleotide; CTT chr11 5221713 5221734 5221730 5221735 +
gcagtttgacctcagactgctg

SEQ ID NO: 83865 - DNA, 22 bp, Artificial Sequence
  Synthetic oligonucleotide; TTG chr11 5221714 5221735 5221731 5221736 +
cagtttgacctcagactgctgt

SEQ ID NO: 83866 - DNA, 22 bp, Artificial Sequence
  Synthetic oligonucleotide; TTT chr11 5221720 5221741 5221737 5221742 +
gacctcagactgctgtgctagc

SEQ ID NO: 83867 - DNA, 22 bp, Artificial Sequence
  Synthetic oligonucleotide; TTG chr11 5221721 5221742 5221738 5221743 +
acctcagactgctgtgctagca

SEQ ID NO: 83868 - DNA, 22 bp, Artificial Sequence
  Synthetic oligonucleotide; CTC chr11 5221726 5221747 5221743 5221748 +
agactgctgtgctagcaatgag

SEQ ID NO: 83869 - DNA, 22 bp, Artificial Sequence
  Synthetic oligonucleotide; CTG chr11 5221732 5221753 5221749 5221754 +
ctgtgctagcaatgagcgaggc

SEQ ID NO: 83870 - DNA, 22 bp, Artificial Sequence
  Synthetic oligonucleotide; CTG chr11 5221735 5221756 5221752 5221757 +
tgctagcaatgagcgaggctcc

SEQ ID NO: 83871 - DNA, 22 bp, Artificial Sequence
  Synthetic oligonucleotide; CTA chr11 5221740 5221761 5221757 5221762 +
gcaatgagcgaggctccatggg

SEQ ID NO: 83872 - DNA, 22 bp, Artificial Sequence
  Synthetic oligonucleotide; CTC chr11 5221756 5221777 5221773 5221778 +
catgggcgtaggaccctctgag

SEQ ID NO: 83873 - DNA, 22 bp, Artificial Sequence
  Synthetic oligonucleotide; CTC chr11 5221774 5221795 5221791 5221796 +
tgagccaggcatgggatataat

SEQ ID NO: 83874 - DNA, 22 bp, Artificial Sequence
  Synthetic oligonucleotide; CTG chr11 5221776 5221797 5221793 5221798 +
agccaggcatgggatataatct

SEQ ID NO: 83875 - DNA, 22 bp, Artificial Sequence
  Synthetic oligonucleotide; CTC chr11 5221799 5221820 5221816 5221821 +
ctggtgtgccatttgttaagct

SEQ ID NO: 83876 - DNA, 22 bp, Artificial Sequence
  Synthetic oligonucleotide; CTG chr11 5221802 5221823 5221819 5221824 +
gtgtgccatttgttaagcttgt

SEQ ID NO: 83877 - DNA, 22 bp, Artificial Sequence
  Synthetic oligonucleotide; TTT chr11 5221813 5221834 5221830 5221835 +
gttaagcttgttggaagagcgc

SEQ ID NO: 83878 - DNA, 22 bp, Artificial Sequence
  Synthetic oligonucleotide; TTG chr11 5221814 5221835 5221831 5221836 +
ttaagcttgttggaagagcgca

SEQ ID NO: 83879 - DNA, 22 bp, Artificial Sequence
  Synthetic oligonucleotide; TTA chr11 5221817 5221838 5221834 5221839 +
agcttgttggaagagcgcagta

SEQ ID NO: 83880 - DNA, 22 bp, Artificial Sequence
  Synthetic oligonucleotide; CTT chr11 5221822 5221843 5221839 5221844 +
gttggaagagcgcagtattagg

SEQ ID NO: 83881 - DNA, 22 bp, Artificial Sequence
  Synthetic oligonucleotide; TTG chr11 5221823 5221844 5221840 5221845 +
ttggaagagcgcagtattaggg

SEQ ID NO: 83882 - DNA, 22 bp, Artificial Sequence
  Synthetic oligonucleotide; TTG chr11 5221826 5221847 5221843 5221848 +
gaagagcgcagtattagggcgg

SEQ ID NO: 83883 - DNA, 22 bp, Artificial Sequence
  Synthetic oligonucleotide; TTA chr11 5221842 5221863 5221859 5221864 +
gggcgggagtgacccgattttc

SEQ ID NO: 83884 - DNA, 22 bp, Artificial Sequence
  Synthetic oligonucleotide; TTT chr11 5221862 5221883 5221879 5221884 +
tccaggtgccatctgtcaccct

SEQ ID NO: 83885 - DNA, 22 bp, Artificial Sequence
  Synthetic oligonucleotide; TTT chr11 5221863 5221884 5221880 5221885 +
ccaggtgccatctgtcaccctt

SEQ ID NO: 83886 - DNA, 22 bp, Artificial Sequence
  Synthetic oligonucleotide; TTC chr11 5221864 5221885 5221881 5221886 +
caggtgccatctgtcacccttt

SEQ ID NO: 83887 - DNA, 22 bp, Artificial Sequence
  Synthetic oligonucleotide; CTG chr11 5221877 5221898 5221894 5221899 +
tcacccttttctttgactagga

SEQ ID NO: 83888 - DNA, 22 bp, Artificial Sequence
  Synthetic oligonucleotide; CTT chr11 5221885 5221906 5221902 5221907 +
ttctttgactaggaaagggaat

SEQ ID NO: 83889 - DNA, 22 bp, Artificial Sequence
  Synthetic oligonucleotide; TTT chr11 5221886 5221907 5221903 5221908 +
tctttgactaggaaagggaatt

SEQ ID NO: 83890 - DNA, 22 bp, Artificial Sequence
  Synthetic oligonucleotide; TTT chr11 5221887 5221908 5221904 5221909 +
ctttgactaggaaagggaattc

SEQ ID NO: 83891 - DNA, 22 bp, Artificial Sequence
  Synthetic oligonucleotide; TTC chr11 5221888 5221909 5221905 5221910 +
tttgactaggaaagggaattcc

SEQ ID NO: 83892 - DNA, 22 bp, Artificial Sequence
  Synthetic oligonucleotide; CTT chr11 5221890 5221911 5221907 5221912 +
tgactaggaaagggaattccct

SEQ ID NO: 83893 - DNA, 22 bp, Artificial Sequence
  Synthetic oligonucleotide; TTT chr11 5221891 5221912 5221908 5221913 +
gactaggaaagggaattccctg

SEQ ID NO: 83894 - DNA, 22 bp, Artificial Sequence
  Synthetic oligonucleotide; TTG chr11 5221892 5221913 5221909 5221914 +
actaggaaagggaattccctga

SEQ ID NO: 83895 - DNA, 22 bp, Artificial Sequence
  Synthetic oligonucleotide; CTA chr11 5221896 5221917 5221913 5221918 +
ggaaagggaattccctgacccc

SEQ ID NO: 83896 - DNA, 22 bp, Artificial Sequence
  Synthetic oligonucleotide; TTC chr11 5221909 5221930 5221926 5221931 +
cctgaccccttgtgcttcccgg

SEQ ID NO: 83897 - DNA, 22 bp, Artificial Sequence
  Synthetic oligonucleotide; CTG chr11 5221913 5221934 5221930 5221935 +
accccttgtgcttcccgggtga

SEQ ID NO: 83898 - DNA, 22 bp, Artificial Sequence
  Synthetic oligonucleotide; CTT chr11 5221920 5221941 5221937 5221942 +
gtgcttcccgggtgaggtgatg

SEQ ID NO: 83899 - DNA, 22 bp, Artificial Sequence
  Synthetic oligonucleotide; TTG chr11 5221921 5221942 5221938 5221943 +
tgcttcccgggtgaggtgatgc

SEQ ID NO: 83900 - DNA, 22 bp, Artificial Sequence
  Synthetic oligonucleotide; CTT chr11 5221926 5221947 5221943 5221948 +
cccgggtgaggtgatgcctcgc

SEQ ID NO: 83901 - DNA, 22 bp, Artificial Sequence
  Synthetic oligonucleotide; TTC chr11 5221927 5221948 5221944 5221949 +
ccgggtgaggtgatgcctcgcc

SEQ ID NO: 83902 - DNA, 22 bp, Artificial Sequence
  Synthetic oligonucleotide; CTC chr11 5221946 5221967 5221963 5221968 +
gccctgctttggctcatgcaca

SEQ ID NO: 83903 - DNA, 22 bp, Artificial Sequence
  Synthetic oligonucleotide; CTG chr11 5221952 5221973 5221969 5221974 +
ctttggctcatgcacagtgcac

SEQ ID NO: 83904 - DNA, 22 bp, Artificial Sequence
  Synthetic oligonucleotide; CTT chr11 5221955 5221976 5221972 5221977 +
tggctcatgcacagtgcactgc

SEQ ID NO: 83905 - DNA, 22 bp, Artificial Sequence
  Synthetic oligonucleotide; TTT chr11 5221956 5221977 5221973 5221978 +
ggctcatgcacagtgcactgca

SEQ ID NO: 83906 - DNA, 22 bp, Artificial Sequence
  Synthetic oligonucleotide; TTG chr11 5221957 5221978 5221974 5221979 +
gctcatgcacagtgcactgcac

SEQ ID NO: 83907 - DNA, 22 bp, Artificial Sequence
  Synthetic oligonucleotide; CTC chr11 5221961 5221982 5221978 5221983 +
atgcacagtgcactgcacctac

SEQ ID NO: 83908 - DNA, 22 bp, Artificial Sequence
  Synthetic oligonucleotide; CTG chr11 5221976 5221997 5221993 5221998 +
cacctactgtcctgcacccact

SEQ ID NO: 83909 - DNA, 22 bp, Artificial Sequence
  Synthetic oligonucleotide; CTA chr11 5221982 5222003 5221999 5222004 +
ctgtcctgcacccactgcctgg

SEQ ID NO: 83910 - DNA, 22 bp, Artificial Sequence
  Synthetic oligonucleotide; CTG chr11 5221985 5222006 5222002 5222007 +
tcctgcacccactgcctggcac

SEQ ID NO: 83911 - DNA, 22 bp, Artificial Sequence
  Synthetic oligonucleotide; CTG chr11 5221990 5222011 5222007 5222012 +
cacccactgcctggcacttccc

SEQ ID NO: 83912 - DNA, 22 bp, Artificial Sequence
  Synthetic oligonucleotide; CTG chr11 5221999 5222020 5222016 5222021 +
cctggcacttccctgtgagatg

SEQ ID NO: 83913 - DNA, 22 bp, Artificial Sequence
  Synthetic oligonucleotide; CTG chr11 5222003 5222024 5222020 5222025 +
gcacttccctgtgagatgaacc

SEQ ID NO: 83914 - DNA, 22 bp, Artificial Sequence
  Synthetic oligonucleotide; CTT chr11 5222009 5222030 5222026 5222031 +
ccctgtgagatgaacctggtac

SEQ ID NO: 83915 - DNA, 22 bp, Artificial Sequence
  Synthetic oligonucleotide; TTC chr11 5222010 5222031 5222027 5222032 +
cctgtgagatgaacctggtacc

SEQ ID NO: 83916 - DNA, 22 bp, Artificial Sequence
  Synthetic oligonucleotide; CTG chr11 5222014 5222035 5222031 5222036 +
tgagatgaacctggtacctcag

SEQ ID NO: 83917 - DNA, 22 bp, Artificial Sequence
  Synthetic oligonucleotide; CTG chr11 5222027 5222048 5222044 5222049 +
gtacctcagttggaaatgcaga

SEQ ID NO: 83918 - DNA, 22 bp, Artificial Sequence
  Synthetic oligonucleotide; CTC chr11 5222034 5222055 5222051 5222056 +
agttggaaatgcagaaatcacc

SEQ ID NO: 83919 - DNA, 22 bp, Artificial Sequence
  Synthetic oligonucleotide; TTG chr11 5222039 5222060 5222056 5222061 +
gaaatgcagaaatcacccgtct

SEQ ID NO: 83920 - DNA, 22 bp, Artificial Sequence
  Synthetic oligonucleotide; CTT chr11 5222062 5222083 5222079 5222084 +
ctgcgtcactcacgatgggagc

SEQ ID NO: 83921 - DNA, 22 bp, Artificial Sequence
  Synthetic oligonucleotide; TTC chr11 5222063 5222084 5222080 5222085 +
tgcgtcactcacgatgggagct

SEQ ID NO: 83922 - DNA, 22 bp, Artificial Sequence
  Synthetic oligonucleotide; CTG chr11 5222065 5222086 5222082 5222087 +
cgtcactcacgatgggagctat

SEQ ID NO: 83923 - DNA, 22 bp, Artificial Sequence
  Synthetic oligonucleotide; CTC chr11 5222073 5222094 5222090 5222095 +
acgatgggagctatagactgga

SEQ ID NO: 83924 - DNA, 22 bp, Artificial Sequence
  Synthetic oligonucleotide; CTA chr11 5222086 5222107 5222103 5222108 +
tagactggagctgttcctattc

SEQ ID NO: 83925 - DNA, 22 bp, Artificial Sequence
  Synthetic oligonucleotide; CTG chr11 5222093 5222114 5222110 5222115 +
gagctgttcctattcggtcatc

SEQ ID NO: 83926 - DNA, 22 bp, Artificial Sequence
  Synthetic oligonucleotide; CTG chr11 5222099 5222120 5222116 5222121 +
ttcctattcggtcatcttggct

SEQ ID NO: 83927 - DNA, 22 bp, Artificial Sequence
  Synthetic oligonucleotide; TTC chr11 5222102 5222123 5222119 5222124 +
ctattcggtcatcttggctcca

SEQ ID NO: 83928 - DNA, 22 bp, Artificial Sequence
  Synthetic oligonucleotide; CTA chr11 5222105 5222126 5222122 5222127 +
ttcggtcatcttggctccaccg

SEQ ID NO: 83929 - DNA, 22 bp, Artificial Sequence
  Synthetic oligonucleotide; TTC chr11 5222108 5222129 5222125 5222130 +
ggtcatcttggctccaccgctc

SEQ ID NO: 83930 - DNA, 22 bp, Artificial Sequence
  Synthetic oligonucleotide; CTT chr11 5222117 5222138 5222134 5222139 +
ggctccaccgctcccccccccc

SEQ ID NO: 83931 - DNA, 22 bp, Artificial Sequence
  Synthetic oligonucleotide; TTG chr11 5222118 5222139 5222135 5222140 +
gctccaccgctcccccccccct

SEQ ID NO: 83932 - DNA, 22 bp, Artificial Sequence
  Synthetic oligonucleotide; CTC chr11 5222122 5222143 5222139 5222144 +
caccgctccccccccccttttt

SEQ ID NO: 83933 - DNA, 22 bp, Artificial Sequence
  Synthetic oligonucleotide; CTC chr11 5222130 5222151 5222147 5222152 +
cccccccccttttttttttctt

SEQ ID NO: 83934 - DNA, 22 bp, Artificial Sequence
  Synthetic oligonucleotide; CTT chr11 5222141 5222162 5222158 5222163 +
ttttttttcttttttttttgtg

SEQ ID NO: 83935 - DNA, 22 bp, Artificial Sequence
  Synthetic oligonucleotide; TTT chr11 5222142 5222163 5222159 5222164 +
tttttttcttttttttttgtga

SEQ ID NO: 83936 - DNA, 22 bp, Artificial Sequence
  Synthetic oligonucleotide; TTT chr11 5222143 5222164 5222160 5222165 +
ttttttcttttttttttgtgac

SEQ ID NO: 83937 - DNA, 22 bp, Artificial Sequence
  Synthetic oligonucleotide; TTT chr11 5222144 5222165 5222161 5222166 +
tttttcttttttttttgtgacg

SEQ ID NO: 83938 - DNA, 22 bp, Artificial Sequence
  Synthetic oligonucleotide; TTT chr11 5222145 5222166 5222162 5222167 +
ttttcttttttttttgtgacgg

SEQ ID NO: 83939 - DNA, 22 bp, Artificial Sequence
  Synthetic oligonucleotide; TTT chr11 5222146 5222167 5222163 5222168 +
tttcttttttttttgtgacgga

SEQ ID NO: 83940 - DNA, 22 bp, Artificial Sequence
  Synthetic oligonucleotide; TTT chr11 5222147 5222168 5222164 5222169 +
ttcttttttttttgtgacggag

SEQ ID NO: 83941 - DNA, 22 bp, Artificial Sequence
  Synthetic oligonucleotide; TTT chr11 5222148 5222169 5222165 5222170 +
tcttttttttttgtgacggagt

SEQ ID NO: 83942 - DNA, 22 bp, Artificial Sequence
  Synthetic oligonucleotide; TTT chr11 5222149 5222170 5222166 5222171 +
cttttttttttgtgacggagtc

SEQ ID NO: 83943 - DNA, 22 bp, Artificial Sequence
  Synthetic oligonucleotide; TTC chr11 5222150 5222171 5222167 5222172 +
ttttttttttgtgacggagtct

SEQ ID NO: 83944 - DNA, 22 bp, Artificial Sequence
  Synthetic oligonucleotide; CTT chr11 5222152 5222173 5222169 5222174 +
ttttttttgtgacggagtctca

SEQ ID NO: 83945 - DNA, 22 bp, Artificial Sequence
  Synthetic oligonucleotide; TTT chr11 5222153 5222174 5222170 5222175 +
tttttttgtgacggagtctcat

SEQ ID NO: 83946 - DNA, 22 bp, Artificial Sequence
  Synthetic oligonucleotide; TTT chr11 5222154 5222175 5222171 5222176 +
ttttttgtgacggagtctcatg

SEQ ID NO: 83947 - DNA, 22 bp, Artificial Sequence
  Synthetic oligonucleotide; TTT chr11 5222155 5222176 5222172 5222177 +
tttttgtgacggagtctcatgc

SEQ ID NO: 83948 - DNA, 22 bp, Artificial Sequence
  Synthetic oligonucleotide; TTT chr11 5222156 5222177 5222173 5222178 +
ttttgtgacggagtctcatgct

SEQ ID NO: 83949 - DNA, 22 bp, Artificial Sequence
  Synthetic oligonucleotide; TTT chr11 5222157 5222178 5222174 5222179 +
tttgtgacggagtctcatgctg

SEQ ID NO: 83950 - DNA, 22 bp, Artificial Sequence
  Synthetic oligonucleotide; TTT chr11 5222158 5222179 5222175 5222180 +
ttgtgacggagtctcatgctgt

SEQ ID NO: 83951 - DNA, 22 bp, Artificial Sequence
  Synthetic oligonucleotide; TTT chr11 5222159 5222180 5222176 5222181 +
tgtgacggagtctcatgctgtc

SEQ ID NO: 83952 - DNA, 22 bp, Artificial Sequence
  Synthetic oligonucleotide; TTT chr11 5222160 5222181 5222177 5222182 +
gtgacggagtctcatgctgtca

SEQ ID NO: 83953 - DNA, 22 bp, Artificial Sequence
  Synthetic oligonucleotide; TTG chr11 5222161 5222182 5222178 5222183 +
tgacggagtctcatgctgtcac

SEQ ID NO: 83954 - DNA, 22 bp, Artificial Sequence
  Synthetic oligonucleotide; CTC chr11 5222173 5222194 5222190 5222195 +
atgctgtcacctgggctggaat

SEQ ID NO: 83955 - DNA, 22 bp, Artificial Sequence
  Synthetic oligonucleotide; CTG chr11 5222179 5222200 5222196 5222201 +
tcacctgggctggaatgcagtg

SEQ ID NO: 83956 - DNA, 22 bp, Artificial Sequence
  Synthetic oligonucleotide; CTG chr11 5222186 5222207 5222203 5222208 +
ggctggaatgcagtggcacaat

SEQ ID NO: 83957 - DNA, 22 bp, Artificial Sequence
  Synthetic oligonucleotide; CTG chr11 5222191 5222212 5222208 5222213 +
gaatgcagtggcacaatcttgg

SEQ ID NO: 83958 - DNA, 22 bp, Artificial Sequence
  Synthetic oligonucleotide; CTT chr11 5222211 5222232 5222228 5222233 +
ggctcactgcaacctctgcctc

SEQ ID NO: 83959 - DNA, 22 bp, Artificial Sequence
  Synthetic oligonucleotide; TTG chr11 5222212 5222233 5222229 5222234 +
gctcactgcaacctctgcctcc

SEQ ID NO: 83960 - DNA, 22 bp, Artificial Sequence
  Synthetic oligonucleotide; CTC chr11 5222216 5222237 5222233 5222238 +
actgcaacctctgcctcccagg

SEQ ID NO: 83961 - DNA, 22 bp, Artificial Sequence
  Synthetic oligonucleotide; CTG chr11 5222220 5222241 5222237 5222242 +
caacctctgcctcccaggatca

SEQ ID NO: 83962 - DNA, 22 bp, Artificial Sequence
  Synthetic oligonucleotide; CTC chr11 5222227 5222248 5222244 5222249 +
tgcctcccaggatcaagcgatt

SEQ ID NO: 83963 - DNA, 22 bp, Artificial Sequence
  Synthetic oligonucleotide; CTG chr11 5222229 5222250 5222246 5222251 +
cctcccaggatcaagcgattct

SEQ ID NO: 83964 - DNA, 22 bp, Artificial Sequence
  Synthetic oligonucleotide; CTC chr11 5222233 5222254 5222250 5222255 +
ccaggatcaagcgattctcctg

SEQ ID NO: 83965 - DNA, 22 bp, Artificial Sequence
  Synthetic oligonucleotide; TTC chr11 5222250 5222271 5222267 5222272 +
tcctgcctcagcctcccaaatt

SEQ ID NO: 83966 - DNA, 22 bp, Artificial Sequence
  Synthetic oligonucleotide; CTC chr11 5222252 5222273 5222269 5222274 +
ctgcctcagcctcccaaattgc

SEQ ID NO: 83967 - DNA, 22 bp, Artificial Sequence
  Synthetic oligonucleotide; CTG chr11 5222255 5222276 5222272 5222277 +
cctcagcctcccaaattgctgg

SEQ ID NO: 83968 - DNA, 22 bp, Artificial Sequence
  Synthetic oligonucleotide; CTC chr11 5222259 5222280 5222276 5222281 +
agcctcccaaattgctgggatt

SEQ ID NO: 83969 - DNA, 22 bp, Artificial Sequence
  Synthetic oligonucleotide; CTC chr11 5222265 5222286 5222282 5222287 +
ccaaattgctgggattacacat

SEQ ID NO: 83970 - DNA, 22 bp, Artificial Sequence
  Synthetic oligonucleotide; TTG chr11 5222273 5222294 5222290 5222295 +
ctgggattacacatgcctgcca

SEQ ID NO: 83971 - DNA, 22 bp, Artificial Sequence
  Synthetic oligonucleotide; CTG chr11 5222276 5222297 5222293 5222298 +
ggattacacatgcctgccacca

SEQ ID NO: 83972 - DNA, 22 bp, Artificial Sequence
  Synthetic oligonucleotide; TTA chr11 5222282 5222303 5222299 5222304 +
cacatgcctgccaccacgccag

SEQ ID NO: 83973 - DNA, 22 bp, Artificial Sequence
  Synthetic oligonucleotide; CTG chr11 5222292 5222313 5222309 5222314 +
ccaccacgccaggctaagtttt

SEQ ID NO: 83974 - DNA, 22 bp, Artificial Sequence
  Synthetic oligonucleotide; CTA chr11 5222308 5222329 5222325 5222330 +
agtttttatatttttagtagcg

SEQ ID NO: 83975 - DNA, 22 bp, Artificial Sequence
  Synthetic oligonucleotide; TTT chr11 5222313 5222334 5222330 5222335 +
ttatatttttagtagcgatgag

SEQ ID NO: 83976 - DNA, 22 bp, Artificial Sequence
  Synthetic oligonucleotide; TTT chr11 5222314 5222335 5222331 5222336 +
tatatttttagtagcgatgagg

SEQ ID NO: 83977 - DNA, 22 bp, Artificial Sequence
  Synthetic oligonucleotide; TTT chr11 5222315 5222336 5222332 5222337 +
atatttttagtagcgatgaggt

SEQ ID NO: 83978 - DNA, 22 bp, Artificial Sequence
  Synthetic oligonucleotide; TTA chr11 5222316 5222337 5222333 5222338 +
tatttttagtagcgatgaggtt

SEQ ID NO: 83979 - DNA, 22 bp, Artificial Sequence
  Synthetic oligonucleotide; TTT chr11 5222321 5222342 5222338 5222343 +
ttagtagcgatgaggtttcact

SEQ ID NO: 83980 - DNA, 22 bp, Artificial Sequence
  Synthetic oligonucleotide; TTT chr11 5222322 5222343 5222339 5222344 +
tagtagcgatgaggtttcacta

SEQ ID NO: 83981 - DNA, 22 bp, Artificial Sequence
  Synthetic oligonucleotide; TTT chr11 5222323 5222344 5222340 5222345 +
agtagcgatgaggtttcactat

SEQ ID NO: 83982 - DNA, 22 bp, Artificial Sequence
  Synthetic oligonucleotide; TTA chr11 5222324 5222345 5222341 5222346 +
gtagcgatgaggtttcactatg

SEQ ID NO: 83983 - DNA, 22 bp, Artificial Sequence
  Synthetic oligonucleotide; TTT chr11 5222339 5222360 5222356 5222361 +
cactatgttggccaggctgatc

SEQ ID NO: 83984 - DNA, 22 bp, Artificial Sequence
  Synthetic oligonucleotide; TTC chr11 5222340 5222361 5222357 5222362 +
actatgttggccaggctgatct

SEQ ID NO: 83985 - DNA, 22 bp, Artificial Sequence
  Synthetic oligonucleotide; CTA chr11 5222344 5222365 5222361 5222366 +
tgttggccaggctgatcttgaa

SEQ ID NO: 83986 - DNA, 22 bp, Artificial Sequence
  Synthetic oligonucleotide; TTG chr11 5222349 5222370 5222366 5222371 +
gccaggctgatcttgaactcct

SEQ ID NO: 83987 - DNA, 22 bp, Artificial Sequence
  Synthetic oligonucleotide; CTG chr11 5222358 5222379 5222375 5222380 +
atcttgaactcctgacgtcgtg

SEQ ID NO: 83988 - DNA, 22 bp, Artificial Sequence
  Synthetic oligonucleotide; CTT chr11 5222363 5222384 5222380 5222385 +
gaactcctgacgtcgtgatccg

SEQ ID NO: 83989 - DNA, 22 bp, Artificial Sequence
  Synthetic oligonucleotide; TTG chr11 5222364 5222385 5222381 5222386 +
aactcctgacgtcgtgatccgc

SEQ ID NO: 83990 - DNA, 22 bp, Artificial Sequence
  Synthetic oligonucleotide; CTC chr11 5222369 5222390 5222386 5222391 +
ctgacgtcgtgatccgcctgtc

SEQ ID NO: 83991 - DNA, 22 bp, Artificial Sequence
  Synthetic oligonucleotide; CTG chr11 5222372 5222393 5222389 5222394 +
acgtcgtgatccgcctgtctag

SEQ ID NO: 83992 - DNA, 22 bp, Artificial Sequence
  Synthetic oligonucleotide; CTG chr11 5222389 5222410 5222406 5222411 +
tctaggcctcccaaagtgctgc

SEQ ID NO: 83993 - DNA, 22 bp, Artificial Sequence
  Synthetic oligonucleotide; CTA chr11 5222393 5222414 5222410 5222415 +
ggcctcccaaagtgctgcaatt

SEQ ID NO: 83994 - DNA, 22 bp, Artificial Sequence
  Synthetic oligonucleotide; CTC chr11 5222399 5222420 5222416 5222421 +
ccaaagtgctgcaattgcaggt

SEQ ID NO: 83995 - DNA, 22 bp, Artificial Sequence
  Synthetic oligonucleotide; CTG chr11 5222410 5222431 5222427 5222432 +
caattgcaggtgtgagccaccg

SEQ ID NO: 83996 - DNA, 22 bp, Artificial Sequence
  Synthetic oligonucleotide; TTG chr11 5222416 5222437 5222433 5222438 +
caggtgtgagccaccgctccca

SEQ ID NO: 83997 - DNA, 22 bp, Artificial Sequence
  Synthetic oligonucleotide; CTC chr11 5222435 5222456 5222452 5222457 +
ccagcctagaataacttcttaa

SEQ ID NO: 83998 - DNA, 22 bp, Artificial Sequence
  Synthetic oligonucleotide; CTA chr11 5222443 5222464 5222460 5222465 +
gaataacttcttaaatgctttt

SEQ ID NO: 83999 - DNA, 22 bp, Artificial Sequence
  Synthetic oligonucleotide; CTT chr11 5222452 5222473 5222469 5222474 +
cttaaatgcttttattgttgac

SEQ ID NO: 84000 - DNA, 22 bp, Artificial Sequence
  Synthetic oligonucleotide; TTC chr11 5222453 5222474 5222470 5222475 +
ttaaatgcttttattgttgact

SEQ ID NO: 84001 - DNA, 22 bp, Artificial Sequence
  Synthetic oligonucleotide; CTT chr11 5222455 5222476 5222472 5222477 +
aaatgcttttattgttgactga

SEQ ID NO: 84002 - DNA, 22 bp, Artificial Sequence
  Synthetic oligonucleotide; TTA chr11 5222456 5222477 5222473 5222478 +
aatgcttttattgttgactgaa

SEQ ID NO: 84003 - DNA, 22 bp, Artificial Sequence
  Synthetic oligonucleotide; CTT chr11 5222463 5222484 5222480 5222485 +
ttattgttgactgaatttattt

SEQ ID NO: 84004 - DNA, 22 bp, Artificial Sequence
  Synthetic oligonucleotide; TTT chr11 5222464 5222485 5222481 5222486 +
tattgttgactgaatttatttc

SEQ ID NO: 84005 - DNA, 22 bp, Artificial Sequence
  Synthetic oligonucleotide; TTT chr11 5222465 5222486 5222482 5222487 +
attgttgactgaatttatttct

SEQ ID NO: 84006 - DNA, 22 bp, Artificial Sequence
  Synthetic oligonucleotide; TTA chr11 5222466 5222487 5222483 5222488 +
ttgttgactgaatttatttctc

SEQ ID NO: 84007 - DNA, 22 bp, Artificial Sequence
  Synthetic oligonucleotide; TTG chr11 5222469 5222490 5222486 5222491 +
ttgactgaatttatttctccct

SEQ ID NO: 84008 - DNA, 22 bp, Artificial Sequence
  Synthetic oligonucleotide; TTG chr11 5222472 5222493 5222489 5222494 +
actgaatttatttctcccttga

SEQ ID NO: 84009 - DNA, 22 bp, Artificial Sequence
  Synthetic oligonucleotide; CTG chr11 5222476 5222497 5222493 5222498 +
aatttatttctcccttgatagt

SEQ ID NO: 84010 - DNA, 22 bp, Artificial Sequence
  Synthetic oligonucleotide; TTT chr11 5222481 5222502 5222498 5222503 +
atttctcccttgatagtttcta

SEQ ID NO: 84011 - DNA, 22 bp, Artificial Sequence
  Synthetic oligonucleotide; TTA chr11 5222482 5222503 5222499 5222504 +
tttctcccttgatagtttctac

SEQ ID NO: 84012 - DNA, 22 bp, Artificial Sequence
  Synthetic oligonucleotide; TTT chr11 5222485 5222506 5222502 5222507 +
ctcccttgatagtttctacttt

SEQ ID NO: 84013 - DNA, 22 bp, Artificial Sequence
  Synthetic oligonucleotide; TTC chr11 5222486 5222507 5222503 5222508 +
tcccttgatagtttctactttg

SEQ ID NO: 84014 - DNA, 22 bp, Artificial Sequence
  Synthetic oligonucleotide; CTC chr11 5222488 5222509 5222505 5222510 +
ccttgatagtttctactttggg

SEQ ID NO: 84015 - DNA, 22 bp, Artificial Sequence
  Synthetic oligonucleotide; CTT chr11 5222492 5222513 5222509 5222514 +
gatagtttctactttgggttga

SEQ ID NO: 84016 - DNA, 22 bp, Artificial Sequence
  Synthetic oligonucleotide; TTG chr11 5222493 5222514 5222510 5222515 +
atagtttctactttgggttgat

SEQ ID NO: 84017 - DNA, 22 bp, Artificial Sequence
  Synthetic oligonucleotide; TTT chr11 5222500 5222521 5222517 5222522 +
ctactttgggttgataattaaa

SEQ ID NO: 84018 - DNA, 22 bp, Artificial Sequence
  Synthetic oligonucleotide; TTC chr11 5222501 5222522 5222518 5222523 +
tactttgggttgataattaaat

SEQ ID NO: 84019 - DNA, 22 bp, Artificial Sequence
  Synthetic oligonucleotide; CTA chr11 5222503 5222524 5222520 5222525 +
ctttgggttgataattaaataa

SEQ ID NO: 84020 - DNA, 22 bp, Artificial Sequence
  Synthetic oligonucleotide; CTT chr11 5222506 5222527 5222523 5222528 +
tgggttgataattaaataacag

SEQ ID NO: 84021 - DNA, 22 bp, Artificial Sequence
  Synthetic oligonucleotide; TTT chr11 5222507 5222528 5222524 5222529 +
gggttgataattaaataacagt

SEQ ID NO: 84022 - DNA, 22 bp, Artificial Sequence
  Synthetic oligonucleotide; TTG chr11 5222508 5222529 5222525 5222530 +
ggttgataattaaataacagtg

SEQ ID NO: 84023 - DNA, 22 bp, Artificial Sequence
  Synthetic oligonucleotide; TTG chr11 5222513 5222534 5222530 5222535 +
ataattaaataacagtgttatc

SEQ ID NO: 84024 - DNA, 22 bp, Artificial Sequence
  Synthetic oligonucleotide; TTA chr11 5222520 5222541 5222537 5222542 +
aataacagtgttatctctaaga

SEQ ID NO: 84025 - DNA, 22 bp, Artificial Sequence
  Synthetic oligonucleotide; TTA chr11 5222533 5222554 5222550 5222555 +
tctctaagattatatacatgtc

SEQ ID NO: 84026 - DNA, 22 bp, Artificial Sequence
  Synthetic oligonucleotide; CTC chr11 5222537 5222558 5222554 5222559 +
taagattatatacatgtcttcc

SEQ ID NO: 84027 - DNA, 22 bp, Artificial Sequence
  Synthetic oligonucleotide; CTA chr11 5222539 5222560 5222556 5222561 +
agattatatacatgtcttccca

SEQ ID NO: 84028 - DNA, 22 bp, Artificial Sequence
  Synthetic oligonucleotide; TTA chr11 5222545 5222566 5222562 5222567 +
tatacatgtcttcccatatttt

SEQ ID NO: 84029 - DNA, 22 bp, Artificial Sequence
  Synthetic oligonucleotide; CTT chr11 5222557 5222578 5222574 5222579 +
cccatatttttattctagtttt

SEQ ID NO: 84030 - DNA, 22 bp, Artificial Sequence
  Synthetic oligonucleotide; TTC chr11 5222558 5222579 5222575 5222580 +
ccatatttttattctagttttt

SEQ ID NO: 84031 - DNA, 22 bp, Artificial Sequence
  Synthetic oligonucleotide; TTT chr11 5222566 5222587 5222583 5222588 +
ttattctagttttttcgtgact

SEQ ID NO: 84032 - DNA, 22 bp, Artificial Sequence
  Synthetic oligonucleotide; TTT chr11 5222567 5222588 5222584 5222589 +
tattctagttttttcgtgactg

SEQ ID NO: 84033 - DNA, 22 bp, Artificial Sequence
  Synthetic oligonucleotide; TTT chr11 5222568 5222589 5222585 5222590 +
attctagttttttcgtgactga

SEQ ID NO: 84034 - DNA, 22 bp, Artificial Sequence
  Synthetic oligonucleotide; TTA chr11 5222569 5222590 5222586 5222591 +
ttctagttttttcgtgactgaa

SEQ ID NO: 84035 - DNA, 22 bp, Artificial Sequence
  Synthetic oligonucleotide; TTC chr11 5222572 5222593 5222589 5222594 +
tagttttttcgtgactgaattt

SEQ ID NO: 84036 - DNA, 22 bp, Artificial Sequence
  Synthetic oligonucleotide; CTA chr11 5222574 5222595 5222591 5222596 +
gttttttcgtgactgaatttta

SEQ ID NO: 84037 - DNA, 22 bp, Artificial Sequence
  Synthetic oligonucleotide; TTT chr11 5222578 5222599 5222595 5222600 +
tttcgtgactgaattttacctt

SEQ ID NO: 84038 - DNA, 22 bp, Artificial Sequence
  Synthetic oligonucleotide; TTT chr11 5222579 5222600 5222596 5222601 +
ttcgtgactgaattttaccttc

SEQ ID NO: 84039 - DNA, 22 bp, Artificial Sequence
  Synthetic oligonucleotide; TTT chr11 5222580 5222601 5222597 5222602 +
tcgtgactgaattttaccttca

SEQ ID NO: 84040 - DNA, 22 bp, Artificial Sequence
  Synthetic oligonucleotide; TTT chr11 5222581 5222602 5222598 5222603 +
cgtgactgaattttaccttcac

SEQ ID NO: 84041 - DNA, 22 bp, Artificial Sequence
  Synthetic oligonucleotide; TTC chr11 5222582 5222603 5222599 5222604 +
gtgactgaattttaccttcaca

SEQ ID NO: 84042 - DNA, 22 bp, Artificial Sequence
  Synthetic oligonucleotide; CTG chr11 5222589 5222610 5222606 5222611 +
aattttaccttcacacctaatt

SEQ ID NO: 84043 - DNA, 22 bp, Artificial Sequence
  Synthetic oligonucleotide; TTT chr11 5222594 5222615 5222611 5222616 +
taccttcacacctaattgtgta

SEQ ID NO: 84044 - DNA, 22 bp, Artificial Sequence
  Synthetic oligonucleotide; TTT chr11 5222595 5222616 5222612 5222617 +
accttcacacctaattgtgtaa

SEQ ID NO: 84045 - DNA, 22 bp, Artificial Sequence
  Synthetic oligonucleotide; TTA chr11 5222596 5222617 5222613 5222618 +
ccttcacacctaattgtgtaat

SEQ ID NO: 84046 - DNA, 22 bp, Artificial Sequence
  Synthetic oligonucleotide; CTT chr11 5222600 5222621 5222617 5222622 +
cacacctaattgtgtaatcgat

SEQ ID NO: 84047 - DNA, 22 bp, Artificial Sequence
  Synthetic oligonucleotide; TTC chr11 5222601 5222622 5222618 5222623 +
acacctaattgtgtaatcgatt

SEQ ID NO: 84048 - DNA, 22 bp, Artificial Sequence
  Synthetic oligonucleotide; CTA chr11 5222608 5222629 5222625 5222630 +
attgtgtaatcgattgtggtat

SEQ ID NO: 84049 - DNA, 22 bp, Artificial Sequence
  Synthetic oligonucleotide; TTG chr11 5222612 5222633 5222629 5222634 +
tgtaatcgattgtggtatatgc

SEQ ID NO: 84050 - DNA, 22 bp, Artificial Sequence
  Synthetic oligonucleotide; TTG chr11 5222624 5222645 5222641 5222646 +
tggtatatgcagttaagcattt

SEQ ID NO: 84051 - DNA, 22 bp, Artificial Sequence
  Synthetic oligonucleotide; TTA chr11 5222639 5222660 5222656 5222661 +
agcatttcactttactcttttc

SEQ ID NO: 84052 - DNA, 22 bp, Artificial Sequence
  Synthetic oligonucleotide; TTT chr11 5222646 5222667 5222663 5222668 +
cactttactcttttcaaaaagt

SEQ ID NO: 84053 - DNA, 22 bp, Artificial Sequence
  Synthetic oligonucleotide; TTC chr11 5222647 5222668 5222664 5222669 +
actttactcttttcaaaaagta

SEQ ID NO: 84054 - DNA, 22 bp, Artificial Sequence
  Synthetic oligonucleotide; CTT chr11 5222651 5222672 5222668 5222673 +
tactcttttcaaaaagtatagt

SEQ ID NO: 84055 - DNA, 22 bp, Artificial Sequence
  Synthetic oligonucleotide; TTT chr11 5222652 5222673 5222669 5222674 +
actcttttcaaaaagtatagtt

SEQ ID NO: 84056 - DNA, 22 bp, Artificial Sequence
  Synthetic oligonucleotide; TTA chr11 5222653 5222674 5222670 5222675 +
ctcttttcaaaaagtatagttg

SEQ ID NO: 84057 - DNA, 22 bp, Artificial Sequence
  Synthetic oligonucleotide; CTC chr11 5222656 5222677 5222673 5222678 +
ttttcaaaaagtatagttgttc

SEQ ID NO: 84058 - DNA, 22 bp, Artificial Sequence
  Synthetic oligonucleotide; CTT chr11 5222658 5222679 5222675 5222680 +
ttcaaaaagtatagttgttcaa

SEQ ID NO: 84059 - DNA, 22 bp, Artificial Sequence
  Synthetic oligonucleotide; TTT chr11 5222659 5222680 5222676 5222681 +
tcaaaaagtatagttgttcaat

SEQ ID NO: 84060 - DNA, 22 bp, Artificial Sequence
  Synthetic oligonucleotide; TTT chr11 5222660 5222681 5222677 5222682 +
caaaaagtatagttgttcaatt

SEQ ID NO: 84061 - DNA, 22 bp, Artificial Sequence
  Synthetic oligonucleotide; TTC chr11 5222661 5222682 5222678 5222683 +
aaaaagtatagttgttcaatta

SEQ ID NO: 84062 - DNA, 22 bp, Artificial Sequence
  Synthetic oligonucleotide; TTG chr11 5222675 5222696 5222692 5222697 +
ttcaattactgtttgtttttta

SEQ ID NO: 84063 - DNA, 22 bp, Artificial Sequence
  Synthetic oligonucleotide; TTC chr11 5222678 5222699 5222695 5222700 +
aattactgtttgttttttattt

SEQ ID NO: 84064 - DNA, 22 bp, Artificial Sequence
  Synthetic oligonucleotide; TTA chr11 5222683 5222704 5222700 5222705 +
ctgtttgttttttatttccaag

SEQ ID NO: 84065 - DNA, 22 bp, Artificial Sequence
  Synthetic oligonucleotide; CTG chr11 5222686 5222707 5222703 5222708 +
tttgttttttatttccaagcta

SEQ ID NO: 84066 - DNA, 22 bp, Artificial Sequence
  Synthetic oligonucleotide; TTT chr11 5222689 5222710 5222706 5222711 +
gttttttatttccaagctaaat

SEQ ID NO: 84067 - DNA, 22 bp, Artificial Sequence
  Synthetic oligonucleotide; TTG chr11 5222690 5222711 5222707 5222712 +
ttttttatttccaagctaaatt

SEQ ID NO: 84068 - DNA, 22 bp, Artificial Sequence
  Synthetic oligonucleotide; TTT chr11 5222693 5222714 5222710 5222715 +
tttatttccaagctaaatttaa

SEQ ID NO: 84069 - DNA, 22 bp, Artificial Sequence
  Synthetic oligonucleotide; TTT chr11 5222694 5222715 5222711 5222716 +
ttatttccaagctaaatttaaa

SEQ ID NO: 84070 - DNA, 22 bp, Artificial Sequence
  Synthetic oligonucleotide; TTT chr11 5222695 5222716 5222712 5222717 +
tatttccaagctaaatttaaaa

SEQ ID NO: 84071 - DNA, 22 bp, Artificial Sequence
  Synthetic oligonucleotide; TTT chr11 5222696 5222717 5222713 5222718 +
atttccaagctaaatttaaaag

SEQ ID NO: 84072 - DNA, 22 bp, Artificial Sequence
  Synthetic oligonucleotide; TTA chr11 5222697 5222718 5222714 5222719 +
tttccaagctaaatttaaaagc

SEQ ID NO: 84073 - DNA, 22 bp, Artificial Sequence
  Synthetic oligonucleotide; TTT chr11 5222700 5222721 5222717 5222722 +
ccaagctaaatttaaaagctat

SEQ ID NO: 84074 - DNA, 22 bp, Artificial Sequence
  Synthetic oligonucleotide; TTC chr11 5222701 5222722 5222718 5222723 +
caagctaaatttaaaagctata

SEQ ID NO: 84075 - DNA, 22 bp, Artificial Sequence
  Synthetic oligonucleotide; CTA chr11 5222708 5222729 5222725 5222730 +
aatttaaaagctatatttttat

SEQ ID NO: 84076 - DNA, 22 bp, Artificial Sequence
  Synthetic oligonucleotide; TTT chr11 5222713 5222734 5222730 5222735 +
aaaagctatatttttatatatc

SEQ ID NO: 84077 - DNA, 22 bp, Artificial Sequence
  Synthetic oligonucleotide; TTA chr11 5222714 5222735 5222731 5222736 +
aaagctatatttttatatatca

SEQ ID NO: 84078 - DNA, 22 bp, Artificial Sequence
  Synthetic oligonucleotide; CTA chr11 5222721 5222742 5222738 5222743 +
tatttttatatatcacattatt

SEQ ID NO: 84079 - DNA, 22 bp, Artificial Sequence
  Synthetic oligonucleotide; TTT chr11 5222726 5222747 5222743 5222748 +
ttatatatcacattattatatt

SEQ ID NO: 84080 - DNA, 22 bp, Artificial Sequence
  Synthetic oligonucleotide; TTT chr11 5222727 5222748 5222744 5222749 +
tatatatcacattattatattt

SEQ ID NO: 84081 - DNA, 22 bp, Artificial Sequence
  Synthetic oligonucleotide; TTT chr11 5222728 5222749 5222745 5222750 +
atatatcacattattatatttt

SEQ ID NO: 84082 - DNA, 22 bp, Artificial Sequence
  Synthetic oligonucleotide; TTA chr11 5222729 5222750 5222746 5222751 +
tatatcacattattatatttta

SEQ ID NO: 84083 - DNA, 22 bp, Artificial Sequence
  Synthetic oligonucleotide; TTA chr11 5222741 5222762 5222758 5222763 +
ttatattttagtgagatttagt

SEQ ID NO: 84084 - DNA, 22 bp, Artificial Sequence
  Synthetic oligonucleotide; TTA chr11 5222744 5222765 5222761 5222766 +
tattttagtgagatttagtttt

SEQ ID NO: 84085 - DNA, 22 bp, Artificial Sequence
  Synthetic oligonucleotide; TTT chr11 5222749 5222770 5222766 5222771 +
tagtgagatttagtttttggat

SEQ ID NO: 84086 - DNA, 22 bp, Artificial Sequence
  Synthetic oligonucleotide; TTT chr11 5222750 5222771 5222767 5222772 +
agtgagatttagtttttggatt

SEQ ID NO: 84087 - DNA, 22 bp, Artificial Sequence
  Synthetic oligonucleotide; TTA chr11 5222751 5222772 5222768 5222773 +
gtgagatttagtttttggattt

SEQ ID NO: 84088 - DNA, 22 bp, Artificial Sequence
  Synthetic oligonucleotide; TTT chr11 5222760 5222781 5222777 5222782 +
agtttttggatttctatttatt

SEQ ID NO: 84089 - DNA, 22 bp, Artificial Sequence
  Synthetic oligonucleotide; TTA chr11 5222761 5222782 5222778 5222783 +
gtttttggatttctatttattc

SEQ ID NO: 84090 - DNA, 22 bp, Artificial Sequence
  Synthetic oligonucleotide; TTT chr11 5222765 5222786 5222782 5222787 +
ttggatttctatttattccact

SEQ ID NO: 84091 - DNA, 22 bp, Artificial Sequence
  Synthetic oligonucleotide; TTT chr11 5222766 5222787 5222783 5222788 +
tggatttctatttattccacta

SEQ ID NO: 84092 - DNA, 22 bp, Artificial Sequence
  Synthetic oligonucleotide; TTT chr11 5222767 5222788 5222784 5222789 +
ggatttctatttattccactat

SEQ ID NO: 84093 - DNA, 22 bp, Artificial Sequence
  Synthetic oligonucleotide; TTG chr11 5222768 5222789 5222785 5222790 +
gatttctatttattccactatc

SEQ ID NO: 84094 - DNA, 22 bp, Artificial Sequence
  Synthetic oligonucleotide; TTT chr11 5222773 5222794 5222790 5222795 +
ctatttattccactatcttact

SEQ ID NO: 84095 - DNA, 22 bp, Artificial Sequence
  Synthetic oligonucleotide; TTC chr11 5222774 5222795 5222791 5222796 +
tatttattccactatcttactt

SEQ ID NO: 84096 - DNA, 22 bp, Artificial Sequence
  Synthetic oligonucleotide; CTA chr11 5222776 5222797 5222793 5222798 +
tttattccactatcttacttac

SEQ ID NO: 84097 - DNA, 22 bp, Artificial Sequence
  Synthetic oligonucleotide; TTT chr11 5222779 5222800 5222796 5222801 +
attccactatcttacttacaca

SEQ ID NO: 84098 - DNA, 22 bp, Artificial Sequence
  Synthetic oligonucleotide; TTA chr11 5222780 5222801 5222797 5222802 +
ttccactatcttacttacacat

SEQ ID NO: 84099 - DNA, 22 bp, Artificial Sequence
  Synthetic oligonucleotide; TTC chr11 5222783 5222804 5222800 5222805 +
cactatcttacttacacatgag

SEQ ID NO: 84100 - DNA, 22 bp, Artificial Sequence
  Synthetic oligonucleotide; CTA chr11 5222788 5222809 5222805 5222810 +
tcttacttacacatgagtggta

SEQ ID NO: 84101 - DNA, 22 bp, Artificial Sequence
  Synthetic oligonucleotide; CTT chr11 5222792 5222813 5222809 5222814 +
acttacacatgagtggtattaa

SEQ ID NO: 84102 - DNA, 22 bp, Artificial Sequence
  Synthetic oligonucleotide; TTA chr11 5222793 5222814 5222810 5222815 +
cttacacatgagtggtattaat

SEQ ID NO: 84103 - DNA, 22 bp, Artificial Sequence
  Synthetic oligonucleotide; CTT chr11 5222796 5222817 5222813 5222818 +
acacatgagtggtattaattta

SEQ ID NO: 84104 - DNA, 22 bp, Artificial Sequence
  Synthetic oligonucleotide; TTA chr11 5222797 5222818 5222814 5222819 +
cacatgagtggtattaatttaa

SEQ ID NO: 84105 - DNA, 22 bp, Artificial Sequence
  Synthetic oligonucleotide; TTA chr11 5222813 5222834 5222830 5222835 +
atttaacatgattttagaatga

SEQ ID NO: 84106 - DNA, 22 bp, Artificial Sequence
  Synthetic oligonucleotide; TTT chr11 5222817 5222838 5222834 5222839 +
aacatgattttagaatgaagaa

SEQ ID NO: 84107 - DNA, 22 bp, Artificial Sequence
  Synthetic oligonucleotide; TTA chr11 5222818 5222839 5222835 5222840 +
acatgattttagaatgaagaaa

SEQ ID NO: 84108 - DNA, 22 bp, Artificial Sequence
  Synthetic oligonucleotide; TTT chr11 5222827 5222848 5222844 5222849 +
tagaatgaagaaaatgaagcca

SEQ ID NO: 84109 - DNA, 22 bp, Artificial Sequence
  Synthetic oligonucleotide; TTT chr11 5222828 5222849 5222845 5222850 +
agaatgaagaaaatgaagccat

SEQ ID NO: 84110 - DNA, 22 bp, Artificial Sequence
  Synthetic oligonucleotide; TTA chr11 5222829 5222850 5222846 5222851 +
gaatgaagaaaatgaagccatt

SEQ ID NO: 84111 - DNA, 22 bp, Artificial Sequence
  Synthetic oligonucleotide; TTT chr11 5222852 5222873 5222869 5222874 +
ttagataaaccaaaagtaacaa

SEQ ID NO: 84112 - DNA, 22 bp, Artificial Sequence
  Synthetic oligonucleotide; TTT chr11 5222853 5222874 5222870 5222875 +
tagataaaccaaaagtaacaat

SEQ ID NO: 84113 - DNA, 22 bp, Artificial Sequence
  Synthetic oligonucleotide; TTT chr11 5222854 5222875 5222871 5222876 +
agataaaccaaaagtaacaatg

SEQ ID NO: 84114 - DNA, 22 bp, Artificial Sequence
  Synthetic oligonucleotide; TTA chr11 5222855 5222876 5222872 5222877 +
gataaaccaaaagtaacaatgt

SEQ ID NO: 84115 - DNA, 22 bp, Artificial Sequence
  Synthetic oligonucleotide; TTT chr11 5222881 5222902 5222898 5222903 +
ccagcagaaagagataatatta

SEQ ID NO: 84116 - DNA, 22 bp, Artificial Sequence
  Synthetic oligonucleotide; TTC chr11 5222882 5222903 5222899 5222904 +
cagcagaaagagataatattaa

SEQ ID NO: 84117 - DNA, 22 bp, Artificial Sequence
  Synthetic oligonucleotide; TTA chr11 5222903 5222924 5222920 5222925 +
aggataatcagaaaaaaataga

SEQ ID NO: 84118 - DNA, 22 bp, Artificial Sequence
  Synthetic oligonucleotide; CTT chr11 5222933 5222954 5222950 5222955 +
agagagaatgttagaaatgaag

SEQ ID NO: 84119 - DNA, 22 bp, Artificial Sequence
  Synthetic oligonucleotide; TTA chr11 5222934 5222955 5222951 5222956 +
gagagaatgttagaaatgaaga

SEQ ID NO: 84120 - DNA, 22 bp, Artificial Sequence
  Synthetic oligonucleotide; TTA chr11 5222946 5222967 5222963 5222968 +
gaaatgaagaaaagcatgcaaa

SEQ ID NO: 84121 - DNA, 22 bp, Artificial Sequence
  Synthetic oligonucleotide; TTT chr11 5222974 5222995 5222991 5222996 +
tgtacataagtgtaaacatttc

SEQ ID NO: 84122 - DNA, 22 bp, Artificial Sequence
  Synthetic oligonucleotide; TTT chr11 5222975 5222996 5222992 5222997 +
gtacataagtgtaaacatttct

SEQ ID NO: 84123 - DNA, 22 bp, Artificial Sequence
  Synthetic oligonucleotide; TTG chr11 5222976 5222997 5222993 5222998 +
tacataagtgtaaacatttctt

SEQ ID NO: 84124 - DNA, 22 bp, Artificial Sequence
  Synthetic oligonucleotide; TTT chr11 5222995 5223016 5223012 5223017 +
cttcactatttaataataacac

SEQ ID NO: 84125 - DNA, 22 bp, Artificial Sequence
  Synthetic oligonucleotide; TTC chr11 5222996 5223017 5223013 5223018 +
ttcactatttaataataacact

SEQ ID NO: 84126 - DNA, 22 bp, Artificial Sequence
  Synthetic oligonucleotide; CTT chr11 5222998 5223019 5223015 5223020 +
cactatttaataataacactag

SEQ ID NO: 84127 - DNA, 22 bp, Artificial Sequence
  Synthetic oligonucleotide; TTC chr11 5222999 5223020 5223016 5223021 +
actatttaataataacactaga

SEQ ID NO: 84128 - DNA, 22 bp, Artificial Sequence
  Synthetic oligonucleotide; CTA chr11 5223003 5223024 5223020 5223025 +
tttaataataacactagaaaat

SEQ ID NO: 84129 - DNA, 22 bp, Artificial Sequence
  Synthetic oligonucleotide; TTT chr11 5223006 5223027 5223023 5223028 +
aataataacactagaaaatcta

SEQ ID NO: 84130 - DNA, 22 bp, Artificial Sequence
  Synthetic oligonucleotide; TTA chr11 5223007 5223028 5223024 5223029 +
ataataacactagaaaatctag

SEQ ID NO: 84131 - DNA, 22 bp, Artificial Sequence
  Synthetic oligonucleotide; CTA chr11 5223019 5223040 5223036 5223041 +
gaaaatctagggagtaaaacta

SEQ ID NO: 84132 - DNA, 22 bp, Artificial Sequence
  Synthetic oligonucleotide; CTA chr11 5223028 5223049 5223045 5223050 +
gggagtaaaactatacaaaata

SEQ ID NO: 84133 - DNA, 22 bp, Artificial Sequence
  Synthetic oligonucleotide; CTA chr11 5223041 5223062 5223058 5223063 +
tacaaaatatctaaaatatata

SEQ ID NO: 84134 - DNA, 22 bp, Artificial Sequence
  Synthetic oligonucleotide; CTA chr11 5223054 5223075 5223071 5223076 +
aaatatatatatatataattat

SEQ ID NO: 84135 - DNA, 22 bp, Artificial Sequence
  Synthetic oligonucleotide; TTA chr11 5223075 5223096 5223092 5223097 +
tagattgggaaggggaaaatga

SEQ ID NO: 84136 - DNA, 22 bp, Artificial Sequence
  Synthetic oligonucleotide; TTG chr11 5223082 5223103 5223099 5223104 +
ggaaggggaaaatgaagataaa

SEQ ID NO: 84137 - DNA, 22 bp, Artificial Sequence
  Synthetic oligonucleotide; CTA chr11 5223110 5223131 5223127 5223132 +
aaatttattgtattgttttgga

SEQ ID NO: 84138 - DNA, 22 bp, Artificial Sequence
  Synthetic oligonucleotide; TTT chr11 5223116 5223137 5223133 5223138 +
attgtattgttttggaaaagag

SEQ ID NO: 84139 - DNA, 22 bp, Artificial Sequence
  Synthetic oligonucleotide; TTA chr11 5223117 5223138 5223134 5223139 +
ttgtattgttttggaaaagagt

SEQ ID NO: 84140 - DNA, 22 bp, Artificial Sequence
  Synthetic oligonucleotide; TTG chr11 5223120 5223141 5223137 5223142 +
tattgttttggaaaagagtaaa

SEQ ID NO: 84141 - DNA, 22 bp, Artificial Sequence
  Synthetic oligonucleotide; TTG chr11 5223125 5223146 5223142 5223147 +
ttttggaaaagagtaaacagtc

SEQ ID NO: 84142 - DNA, 22 bp, Artificial Sequence
  Synthetic oligonucleotide; TTT chr11 5223128 5223149 5223145 5223150 +
tggaaaagagtaaacagtcaaa

SEQ ID NO: 84143 - DNA, 22 bp, Artificial Sequence
  Synthetic oligonucleotide; TTT chr11 5223129 5223150 5223146 5223151 +
ggaaaagagtaaacagtcaaat

SEQ ID NO: 84144 - DNA, 22 bp, Artificial Sequence
  Synthetic oligonucleotide; TTG chr11 5223130 5223151 5223147 5223152 +
gaaaagagtaaacagtcaaatg

SEQ ID NO: 84145 - DNA, 22 bp, Artificial Sequence
  Synthetic oligonucleotide; TTT chr11 5223159 5223180 5223176 5223181 +
gtatctgaaaaatcaagaatgc

SEQ ID NO: 84146 - DNA, 22 bp, Artificial Sequence
  Synthetic oligonucleotide; TTG chr11 5223160 5223181 5223177 5223182 +
tatctgaaaaatcaagaatgca

SEQ ID NO: 84147 - DNA, 22 bp, Artificial Sequence
  Synthetic oligonucleotide; CTG chr11 5223166 5223187 5223183 5223188 +
aaaaatcaagaatgcaattcta

SEQ ID NO: 84148 - DNA, 22 bp, Artificial Sequence
  Synthetic oligonucleotide; TTC chr11 5223186 5223207 5223203 5223208 +
taatcatcaagatgcatttttt

SEQ ID NO: 84149 - DNA, 22 bp, Artificial Sequence
  Synthetic oligonucleotide; CTA chr11 5223188 5223209 5223205 5223210 +
atcatcaagatgcattttttta

SEQ ID NO: 84150 - DNA, 22 bp, Artificial Sequence
  Synthetic oligonucleotide; TTT chr11 5223205 5223226 5223222 5223227 +
ttttattttttagttttttaat

SEQ ID NO: 84151 - DNA, 22 bp, Artificial Sequence
  Synthetic oligonucleotide; TTT chr11 5223206 5223227 5223223 5223228 +
tttattttttagttttttaatt

SEQ ID NO: 84152 - DNA, 22 bp, Artificial Sequence
  Synthetic oligonucleotide; TTT chr11 5223207 5223228 5223224 5223229 +
ttattttttagttttttaattc

SEQ ID NO: 84153 - DNA, 22 bp, Artificial Sequence
  Synthetic oligonucleotide; TTT chr11 5223208 5223229 5223225 5223230 +
tattttttagttttttaattca

SEQ ID NO: 84154 - DNA, 22 bp, Artificial Sequence
  Synthetic oligonucleotide; TTT chr11 5223209 5223230 5223226 5223231 +
attttttagttttttaattcat

SEQ ID NO: 84155 - DNA, 22 bp, Artificial Sequence
  Synthetic oligonucleotide; TTA chr11 5223210 5223231 5223227 5223232 +
ttttttagttttttaattcatg

SEQ ID NO: 84156 - DNA, 22 bp, Artificial Sequence
  Synthetic oligonucleotide; TTT chr11 5223213 5223234 5223230 5223235 +
tttagttttttaattcatgtga

SEQ ID NO: 84157 - DNA, 22 bp, Artificial Sequence
  Synthetic oligonucleotide; TTT chr11 5223214 5223235 5223231 5223236 +
ttagttttttaattcatgtgat

SEQ ID NO: 84158 - DNA, 22 bp, Artificial Sequence
  Synthetic oligonucleotide; TTT chr11 5223215 5223236 5223232 5223237 +
tagttttttaattcatgtgatg

SEQ ID NO: 84159 - DNA, 22 bp, Artificial Sequence
  Synthetic oligonucleotide; TTT chr11 5223216 5223237 5223233 5223238 +
agttttttaattcatgtgatgt

SEQ ID NO: 84160 - DNA, 22 bp, Artificial Sequence
  Synthetic oligonucleotide; TTA chr11 5223217 5223238 5223234 5223239 +
gttttttaattcatgtgatgtc

SEQ ID NO: 84161 - DNA, 22 bp, Artificial Sequence
  Synthetic oligonucleotide; TTT chr11 5223221 5223242 5223238 5223243 +
tttaattcatgtgatgtctatt

SEQ ID NO: 84162 - DNA, 22 bp, Artificial Sequence
  Synthetic oligonucleotide; TTT chr11 5223222 5223243 5223239 5223244 +
ttaattcatgtgatgtctattc

SEQ ID NO: 84163 - DNA, 22 bp, Artificial Sequence
  Synthetic oligonucleotide; TTT chr11 5223223 5223244 5223240 5223245 +
taattcatgtgatgtctattct

SEQ ID NO: 84164 - DNA, 22 bp, Artificial Sequence
  Synthetic oligonucleotide; TTT chr11 5223224 5223245 5223241 5223246 +
aattcatgtgatgtctattctt

SEQ ID NO: 84165 - DNA, 22 bp, Artificial Sequence
  Synthetic oligonucleotide; TTA chr11 5223225 5223246 5223242 5223247 +
attcatgtgatgtctattcttt

SEQ ID NO: 84166 - DNA, 22 bp, Artificial Sequence
  Synthetic oligonucleotide; TTC chr11 5223229 5223250 5223246 5223251 +
atgtgatgtctattctttttta

SEQ ID NO: 84167 - DNA, 22 bp, Artificial Sequence
  Synthetic oligonucleotide; CTA chr11 5223241 5223262 5223258 5223263 +
ttcttttttattattcttcaac

SEQ ID NO: 84168 - DNA, 22 bp, Artificial Sequence
  Synthetic oligonucleotide; TTC chr11 5223244 5223265 5223261 5223266 +
ttttttattattcttcaacttt

SEQ ID NO: 84169 - DNA, 22 bp, Artificial Sequence
  Synthetic oligonucleotide; CTT chr11 5223246 5223267 5223263 5223268 +
ttttattattcttcaactttat

SEQ ID NO: 84170 - DNA, 22 bp, Artificial Sequence
  Synthetic oligonucleotide; TTT chr11 5223247 5223268 5223264 5223269 +
tttattattcttcaactttatt

SEQ ID NO: 84171 - DNA, 22 bp, Artificial Sequence
  Synthetic oligonucleotide; TTT chr11 5223248 5223269 5223265 5223270 +
ttattattcttcaactttattg

SEQ ID NO: 84172 - DNA, 22 bp, Artificial Sequence
  Synthetic oligonucleotide; TTT chr11 5223249 5223270 5223266 5223271 +
tattattcttcaactttattga

SEQ ID NO: 84173 - DNA, 22 bp, Artificial Sequence
  Synthetic oligonucleotide; TTT chr11 5223250 5223271 5223267 5223272 +
attattcttcaactttattgag

SEQ ID NO: 84174 - DNA, 22 bp, Artificial Sequence
  Synthetic oligonucleotide; TTA chr11 5223251 5223272 5223268 5223273 +
ttattcttcaactttattgagg

SEQ ID NO: 84175 - DNA, 22 bp, Artificial Sequence
  Synthetic oligonucleotide; TTA chr11 5223254 5223275 5223271 5223276 +
ttcttcaactttattgaggtat

SEQ ID NO: 84176 - DNA, 22 bp, Artificial Sequence
  Synthetic oligonucleotide; TTC chr11 5223257 5223278 5223274 5223279 +
ttcaactttattgaggtatcat

SEQ ID NO: 84177 - DNA, 22 bp, Artificial Sequence
  Synthetic oligonucleotide; CTT chr11 5223259 5223280 5223276 5223281 +
caactttattgaggtatcattc

SEQ ID NO: 84178 - DNA, 22 bp, Artificial Sequence
  Synthetic oligonucleotide; TTC chr11 5223260 5223281 5223277 5223282 +
aactttattgaggtatcattca

SEQ ID NO: 84179 - DNA, 22 bp, Artificial Sequence
  Synthetic oligonucleotide; CTT chr11 5223265 5223286 5223282 5223287 +
tattgaggtatcattcacaaat

SEQ ID NO: 84180 - DNA, 22 bp, Artificial Sequence
  Synthetic oligonucleotide; TTT chr11 5223266 5223287 5223283 5223288 +
attgaggtatcattcacaaata

SEQ ID NO: 84181 - DNA, 22 bp, Artificial Sequence
  Synthetic oligonucleotide; TTA chr11 5223267 5223288 5223284 5223289 +
ttgaggtatcattcacaaataa

SEQ ID NO: 84182 - DNA, 22 bp, Artificial Sequence
  Synthetic oligonucleotide; TTG chr11 5223270 5223291 5223287 5223292 +
aggtatcattcacaaataaaaa

SEQ ID NO: 84183 - DNA, 22 bp, Artificial Sequence
  Synthetic oligonucleotide; TTC chr11 5223281 5223302 5223298 5223303 +
acaaataaaaattgtatatatt

SEQ ID NO: 84184 - DNA, 22 bp, Artificial Sequence
  Synthetic oligonucleotide; TTG chr11 5223295 5223316 5223312 5223317 +
tatatatttaaggtgtacaaca

SEQ ID NO: 84185 - DNA, 22 bp, Artificial Sequence
  Synthetic oligonucleotide; TTT chr11 5223304 5223325 5223321 5223326 +
aaggtgtacaacatgatgtttt

SEQ ID NO: 84186 - DNA, 22 bp, Artificial Sequence
  Synthetic oligonucleotide; TTA chr11 5223305 5223326 5223322 5223327 +
aggtgtacaacatgatgtttta

SEQ ID NO: 84187 - DNA, 22 bp, Artificial Sequence
  Synthetic oligonucleotide; TTT chr11 5223325 5223346 5223342 5223347 +
taatatatgtataccttgtgaa

SEQ ID NO: 84188 - DNA, 22 bp, Artificial Sequence
  Synthetic oligonucleotide; TTT chr11 5223326 5223347 5223343 5223348 +
aatatatgtataccttgtgaaa

SEQ ID NO: 84189 - DNA, 22 bp, Artificial Sequence
  Synthetic oligonucleotide; TTA chr11 5223327 5223348 5223344 5223349 +
atatatgtataccttgtgaaat

SEQ ID NO: 84190 - DNA, 22 bp, Artificial Sequence
  Synthetic oligonucleotide; CTT chr11 5223342 5223363 5223359 5223364 +
gtgaaatgattaccacaatcaa

SEQ ID NO: 84191 - DNA, 22 bp, Artificial Sequence
  Synthetic oligonucleotide; TTG chr11 5223343 5223364 5223360 5223365 +
tgaaatgattaccacaatcaag

SEQ ID NO: 84192 - DNA, 22 bp, Artificial Sequence
  Synthetic oligonucleotide; TTA chr11 5223354 5223375 5223371 5223376 +
ccacaatcaagctaattaacat

SEQ ID NO: 84193 - DNA, 22 bp, Artificial Sequence
  Synthetic oligonucleotide; CTA chr11 5223368 5223389 5223385 5223390 +
attaacatacccattatctcac

SEQ ID NO: 84194 - DNA, 22 bp, Artificial Sequence
  Synthetic oligonucleotide; TTA chr11 5223372 5223393 5223389 5223394 +
acatacccattatctcacatag

SEQ ID NO: 84195 - DNA, 22 bp, Artificial Sequence
  Synthetic oligonucleotide; TTA chr11 5223384 5223405 5223401 5223406 +
tctcacatagttacctttttct

SEQ ID NO: 84196 - DNA, 22 bp, Artificial Sequence
  Synthetic oligonucleotide; CTC chr11 5223388 5223409 5223405 5223410 +
acatagttacctttttcttgtg

SEQ ID NO: 84197 - DNA, 22 bp, Artificial Sequence
  Synthetic oligonucleotide; TTA chr11 5223397 5223418 5223414 5223419 +
cctttttcttgtggtaaatgct

SEQ ID NO: 84198 - DNA, 22 bp, Artificial Sequence
  Synthetic oligonucleotide; CTT chr11 5223401 5223422 5223418 5223423 +
tttcttgtggtaaatgctttta

SEQ ID NO: 84199 - DNA, 22 bp, Artificial Sequence
  Synthetic oligonucleotide; TTT chr11 5223402 5223423 5223419 5223424 +
ttcttgtggtaaatgcttttaa

SEQ ID NO: 84200 - DNA, 22 bp, Artificial Sequence
  Synthetic oligonucleotide; TTT chr11 5223403 5223424 5223420 5223425 +
tcttgtggtaaatgcttttaag

SEQ ID NO: 84201 - DNA, 22 bp, Artificial Sequence
  Synthetic oligonucleotide; TTT chr11 5223404 5223425 5223421 5223426 +
cttgtggtaaatgcttttaaga

SEQ ID NO: 84202 - DNA, 22 bp, Artificial Sequence
  Synthetic oligonucleotide; TTC chr11 5223405 5223426 5223422 5223427 +
ttgtggtaaatgcttttaagat

SEQ ID NO: 84203 - DNA, 22 bp, Artificial Sequence
  Synthetic oligonucleotide; CTT chr11 5223407 5223428 5223424 5223429 +
gtggtaaatgcttttaagatct

SEQ ID NO: 84204 - DNA, 22 bp, Artificial Sequence
  Synthetic oligonucleotide; TTG chr11 5223408 5223429 5223425 5223430 +
tggtaaatgcttttaagatcta

SEQ ID NO: 84205 - DNA, 22 bp, Artificial Sequence
  Synthetic oligonucleotide; CTT chr11 5223420 5223441 5223437 5223442 +
ttaagatctactctcggccagg

SEQ ID NO: 84206 - DNA, 22 bp, Artificial Sequence
  Synthetic oligonucleotide; TTT chr11 5223421 5223442 5223438 5223443 +
taagatctactctcggccaggc

SEQ ID NO: 84207 - DNA, 22 bp, Artificial Sequence
  Synthetic oligonucleotide; TTT chr11 5223422 5223443 5223439 5223444 +
aagatctactctcggccaggcc

SEQ ID NO: 84208 - DNA, 22 bp, Artificial Sequence
  Synthetic oligonucleotide; TTA chr11 5223423 5223444 5223440 5223445 +
agatctactctcggccaggccc

SEQ ID NO: 84209 - DNA, 22 bp, Artificial Sequence
  Synthetic oligonucleotide; CTA chr11 5223430 5223451 5223447 5223452 +
ctctcggccaggcccggtggct

SEQ ID NO: 84210 - DNA, 22 bp, Artificial Sequence
  Synthetic oligonucleotide; CTC chr11 5223433 5223454 5223450 5223455 +
tcggccaggcccggtggctcac

SEQ ID NO: 84211 - DNA, 22 bp, Artificial Sequence
  Synthetic oligonucleotide; CTC chr11 5223435 5223456 5223452 5223457 +
ggccaggcccggtggctcacgc

SEQ ID NO: 84212 - DNA, 22 bp, Artificial Sequence
  Synthetic oligonucleotide; CTC chr11 5223453 5223474 5223470 5223475 +
acgcctgtaatcccagcccttt

SEQ ID NO: 84213 - DNA, 22 bp, Artificial Sequence
  Synthetic oligonucleotide; CTG chr11 5223460 5223481 5223477 5223482 +
taatcccagccctttgggtggc

SEQ ID NO: 84214 - DNA, 22 bp, Artificial Sequence
  Synthetic oligonucleotide; CTT chr11 5223474 5223495 5223491 5223496 +
tgggtggccgaggcaggcggat

SEQ ID NO: 84215 - DNA, 22 bp, Artificial Sequence
  Synthetic oligonucleotide; TTT chr11 5223475 5223496 5223492 5223497 +
gggtggccgaggcaggcggatc

SEQ ID NO: 84216 - DNA, 22 bp, Artificial Sequence
  Synthetic oligonucleotide; TTG chr11 5223476 5223497 5223493 5223498 +
ggtggccgaggcaggcggatca

SEQ ID NO: 84217 - DNA, 22 bp, Artificial Sequence
  Synthetic oligonucleotide; CTG chr11 5223503 5223524 5223520 5223525 +
accaacatggagaaaccccgtc

SEQ ID NO: 84218 - DNA, 22 bp, Artificial Sequence
  Synthetic oligonucleotide; CTC chr11 5223527 5223548 5223544 5223549 +
tactaaaaatacaaaattagct

SEQ ID NO: 84219 - DNA, 22 bp, Artificial Sequence
  Synthetic oligonucleotide; CTA chr11 5223529 5223550 5223546 5223551 +
ctaaaaatacaaaattagctgg

SEQ ID NO: 84220 - DNA, 22 bp, Artificial Sequence
  Synthetic oligonucleotide; CTA chr11 5223532 5223553 5223549 5223554 +
aaaatacaaaattagctgggca

SEQ ID NO: 84221 - DNA, 22 bp, Artificial Sequence
  Synthetic oligonucleotide; TTA chr11 5223546 5223567 5223563 5223568 +
gctgggcatggtgtcgcatgcc

SEQ ID NO: 84222 - DNA, 22 bp, Artificial Sequence
  Synthetic oligonucleotide; CTG chr11 5223550 5223571 5223567 5223572 +
ggcatggtgtcgcatgcctgta

SEQ ID NO: 84223 - DNA, 22 bp, Artificial Sequence
  Synthetic oligonucleotide; CTG chr11 5223570 5223591 5223587 5223592 +
taatcccagctactcgggaggc

SEQ ID NO: 84224 - DNA, 22 bp, Artificial Sequence
  Synthetic oligonucleotide; CTA chr11 5223582 5223603 5223599 5223604 +
ctcgggaggctgaggcaggaga

SEQ ID NO: 84225 - DNA, 22 bp, Artificial Sequence
  Synthetic oligonucleotide; CTC chr11 5223585 5223606 5223602 5223607 +
gggaggctgaggcaggagattt

SEQ ID NO: 84226 - DNA, 22 bp, Artificial Sequence
  Synthetic oligonucleotide; CTG chr11 5223594 5223615 5223611 5223616 +
aggcaggagatttgcttgaacc

SEQ ID NO: 84227 - DNA, 22 bp, Artificial Sequence
  Synthetic oligonucleotide; TTT chr11 5223607 5223628 5223624 5223629 +
gcttgaacccaggaggcggagg

SEQ ID NO: 84228 - DNA, 22 bp, Artificial Sequence
  Synthetic oligonucleotide; TTG chr11 5223608 5223629 5223625 5223630 +
cttgaacccaggaggcggaggt

SEQ ID NO: 84229 - DNA, 22 bp, Artificial Sequence
  Synthetic oligonucleotide; CTT chr11 5223611 5223632 5223628 5223633 +
gaacccaggaggcggaggttgc

SEQ ID NO: 84230 - DNA, 22 bp, Artificial Sequence
  Synthetic oligonucleotide; TTG chr11 5223612 5223633 5223629 5223634 +
aacccaggaggcggaggttgca

SEQ ID NO: 84231 - DNA, 22 bp, Artificial Sequence
  Synthetic oligonucleotide; TTG chr11 5223632 5223653 5223649 5223654 +
cagtgagccaagatcttgccat

SEQ ID NO: 84232 - DNA, 22 bp, Artificial Sequence
  Synthetic oligonucleotide; CTT chr11 5223649 5223670 5223666 5223671 +
gccattgcactccagcctggac

SEQ ID NO: 84233 - DNA, 22 bp, Artificial Sequence
  Synthetic oligonucleotide; TTG chr11 5223650 5223671 5223667 5223672 +
ccattgcactccagcctggaca

SEQ ID NO: 84234 - DNA, 22 bp, Artificial Sequence
  Synthetic oligonucleotide; TTG chr11 5223656 5223677 5223673 5223678 +
cactccagcctggacaacaaga

SEQ ID NO: 84235 - DNA, 22 bp, Artificial Sequence
  Synthetic oligonucleotide; CTC chr11 5223661 5223682 5223678 5223683 +
cagcctggacaacaagagcaaa

SEQ ID NO: 84236 - DNA, 22 bp, Artificial Sequence
  Synthetic oligonucleotide; CTG chr11 5223668 5223689 5223685 5223690 +
gacaacaagagcaaaactccat

SEQ ID NO: 84237 - DNA, 22 bp, Artificial Sequence
  Synthetic oligonucleotide; CTC chr11 5223687 5223708 5223704 5223709 +
catctaaaaaaaaaaaaaaatc

SEQ ID NO: 84238 - DNA, 22 bp, Artificial Sequence
  Synthetic oligonucleotide; CTA chr11 5223693 5223714 5223710 5223715 +
aaaaaaaaaaaaaatctactct

SEQ ID NO: 84239 - DNA, 22 bp, Artificial Sequence
  Synthetic oligonucleotide; CTA chr11 5223711 5223732 5223728 5223733 +
ctctctttgcaaattttaaata

SEQ ID NO: 84240 - DNA, 22 bp, Artificial Sequence
  Synthetic oligonucleotide; CTC chr11 5223714 5223735 5223731 5223736 +
tctttgcaaattttaaatatac

SEQ ID NO: 84241 - DNA, 22 bp, Artificial Sequence
  Synthetic oligonucleotide; CTC chr11 5223716 5223737 5223733 5223738 +
tttgcaaattttaaatatactt

SEQ ID NO: 84242 - DNA, 22 bp, Artificial Sequence
  Synthetic oligonucleotide; CTT chr11 5223718 5223739 5223735 5223740 +
tgcaaattttaaatatacttac

SEQ ID NO: 84243 - DNA, 22 bp, Artificial Sequence
  Synthetic oligonucleotide; TTT chr11 5223719 5223740 5223736 5223741 +
gcaaattttaaatatacttaca

SEQ ID NO: 84244 - DNA, 22 bp, Artificial Sequence
  Synthetic oligonucleotide; TTG chr11 5223720 5223741 5223737 5223742 +
caaattttaaatatacttacag

SEQ ID NO: 84245 - DNA, 22 bp, Artificial Sequence
  Synthetic oligonucleotide; TTT chr11 5223727 5223748 5223744 5223749 +
taaatatacttacagtacaatt

SEQ ID NO: 84246 - DNA, 22 bp, Artificial Sequence
  Synthetic oligonucleotide; TTT chr11 5223728 5223749 5223745 5223750 +
aaatatacttacagtacaatta

SEQ ID NO: 84247 - DNA, 22 bp, Artificial Sequence
  Synthetic oligonucleotide; TTA chr11 5223729 5223750 5223746 5223751 +
aatatacttacagtacaattaa

SEQ ID NO: 84248 - DNA, 22 bp, Artificial Sequence
  Synthetic oligonucleotide; CTT chr11 5223738 5223759 5223755 5223760 +
acagtacaattaactacagtca

SEQ ID NO: 84249 - DNA, 22 bp, Artificial Sequence
  Synthetic oligonucleotide; TTA chr11 5223739 5223760 5223756 5223761 +
cagtacaattaactacagtcac

SEQ ID NO: 84250 - DNA, 22 bp, Artificial Sequence
  Synthetic oligonucleotide; TTA chr11 5223750 5223771 5223767 5223772 +
actacagtcacgatgctgtaca

SEQ ID NO: 84251 - DNA, 22 bp, Artificial Sequence
  Synthetic oligonucleotide; CTA chr11 5223754 5223775 5223771 5223776 +
cagtcacgatgctgtacattag

SEQ ID NO: 84252 - DNA, 22 bp, Artificial Sequence
  Synthetic oligonucleotide; CTG chr11 5223768 5223789 5223785 5223790 +
tacattagatatctagaattta

SEQ ID NO: 84253 - DNA, 22 bp, Artificial Sequence
  Synthetic oligonucleotide; TTA chr11 5223775 5223796 5223792 5223797 +
gatatctagaatttattcatcc

SEQ ID NO: 84254 - DNA, 22 bp, Artificial Sequence
  Synthetic oligonucleotide; CTA chr11 5223783 5223804 5223800 5223805 +
gaatttattcatcccacataac

SEQ ID NO: 84255 - DNA, 22 bp, Artificial Sequence
  Synthetic oligonucleotide; TTT chr11 5223789 5223810 5223806 5223811 +
attcatcccacataactgaaat

SEQ ID NO: 84256 - DNA, 22 bp, Artificial Sequence
  Synthetic oligonucleotide; TTA chr11 5223790 5223811 5223807 5223812 +
ttcatcccacataactgaaatt

SEQ ID NO: 84257 - DNA, 22 bp, Artificial Sequence
  Synthetic oligonucleotide; TTC chr11 5223793 5223814 5223810 5223815 +
atcccacataactgaaatttta

SEQ ID NO: 84258 - DNA, 22 bp, Artificial Sequence
  Synthetic oligonucleotide; CTG chr11 5223807 5223828 5223824 5223829 +
aaattttataccctttgagtaa

SEQ ID NO: 84259 - DNA, 22 bp, Artificial Sequence
  Synthetic oligonucleotide; TTT chr11 5223813 5223834 5223830 5223835 +
tataccctttgagtaatagttt

SEQ ID NO: 84260 - DNA, 22 bp, Artificial Sequence
  Synthetic oligonucleotide; TTT chr11 5223814 5223835 5223831 5223836 +
ataccctttgagtaatagtttc

SEQ ID NO: 84261 - DNA, 22 bp, Artificial Sequence
  Synthetic oligonucleotide; TTA chr11 5223815 5223836 5223832 5223837 +
taccctttgagtaatagtttcc

SEQ ID NO: 84262 - DNA, 22 bp, Artificial Sequence
  Synthetic oligonucleotide; CTT chr11 5223822 5223843 5223839 5223844 +
tgagtaatagtttcctgattct

SEQ ID NO: 84263 - DNA, 22 bp, Artificial Sequence
  Synthetic oligonucleotide; TTT chr11 5223823 5223844 5223840 5223845 +
gagtaatagtttcctgattctc

SEQ ID NO: 84264 - DNA, 22 bp, Artificial Sequence
  Synthetic oligonucleotide; TTG chr11 5223824 5223845 5223841 5223846 +
agtaatagtttcctgattctcc

SEQ ID NO: 84265 - DNA, 22 bp, Artificial Sequence
  Synthetic oligonucleotide; TTT chr11 5223835 5223856 5223852 5223857 +
cctgattctcccacccccaacc

SEQ ID NO: 84266 - DNA, 22 bp, Artificial Sequence
  Synthetic oligonucleotide; TTC chr11 5223836 5223857 5223853 5223858 +
ctgattctcccacccccaaccc

SEQ ID NO: 84267 - DNA, 22 bp, Artificial Sequence
  Synthetic oligonucleotide; CTG chr11 5223839 5223860 5223856 5223861 +
attctcccacccccaacccctg

SEQ ID NO: 84268 - DNA, 22 bp, Artificial Sequence
  Synthetic oligonucleotide; TTC chr11 5223843 5223864 5223860 5223865 +
tcccacccccaacccctggaaa

SEQ ID NO: 84269 - DNA, 22 bp, Artificial Sequence
  Synthetic oligonucleotide; CTC chr11 5223845 5223866 5223862 5223867 +
ccacccccaacccctggaaacc

SEQ ID NO: 84270 - DNA, 22 bp, Artificial Sequence
  Synthetic oligonucleotide; CTG chr11 5223861 5223882 5223878 5223883 +
gaaaccatacctctactgtctg

SEQ ID NO: 84271 - DNA, 22 bp, Artificial Sequence
  Synthetic oligonucleotide; CTC chr11 5223874 5223895 5223891 5223896 +
tactgtctgtttccatgagagt

SEQ ID NO: 84272 - DNA, 22 bp, Artificial Sequence
  Synthetic oligonucleotide; CTA chr11 5223876 5223897 5223893 5223898 +
ctgtctgtttccatgagagtga

SEQ ID NO: 84273 - DNA, 22 bp, Artificial Sequence
  Synthetic oligonucleotide; CTG chr11 5223879 5223900 5223896 5223901 +
tctgtttccatgagagtgactt

SEQ ID NO: 84274 - DNA, 22 bp, Artificial Sequence
  Synthetic oligonucleotide; CTG chr11 5223883 5223904 5223900 5223905 +
tttccatgagagtgactttttt

SEQ ID NO: 84275 - DNA, 22 bp, Artificial Sequence
  Synthetic oligonucleotide; TTT chr11 5223886 5223907 5223903 5223908 +
ccatgagagtgacttttttatg

SEQ ID NO: 84276 - DNA, 22 bp, Artificial Sequence
  Synthetic oligonucleotide; TTC chr11 5223887 5223908 5223904 5223909 +
catgagagtgacttttttatgt

SEQ ID NO: 84277 - DNA, 22 bp, Artificial Sequence
  Synthetic oligonucleotide; CTT chr11 5223901 5223922 5223918 5223923 +
ttttatgtttcacatatgagca

SEQ ID NO: 84278 - DNA, 22 bp, Artificial Sequence
  Synthetic oligonucleotide; TTT chr11 5223902 5223923 5223919 5223924 +
tttatgtttcacatatgagcaa

SEQ ID NO: 84279 - DNA, 22 bp, Artificial Sequence
  Synthetic oligonucleotide; TTT chr11 5223903 5223924 5223920 5223925 +
ttatgtttcacatatgagcaag

SEQ ID NO: 84280 - DNA, 22 bp, Artificial Sequence
  Synthetic oligonucleotide; TTT chr11 5223904 5223925 5223921 5223926 +
tatgtttcacatatgagcaagg

SEQ ID NO: 84281 - DNA, 22 bp, Artificial Sequence
  Synthetic oligonucleotide; TTT chr11 5223905 5223926 5223922 5223927 +
atgtttcacatatgagcaaggt

SEQ ID NO: 84282 - DNA, 22 bp, Artificial Sequence
  Synthetic oligonucleotide; TTA chr11 5223906 5223927 5223923 5223928 +
tgtttcacatatgagcaaggtt

SEQ ID NO: 84283 - DNA, 22 bp, Artificial Sequence
  Synthetic oligonucleotide; TTT chr11 5223911 5223932 5223928 5223933 +
cacatatgagcaaggttgtgta

SEQ ID NO: 84284 - DNA, 22 bp, Artificial Sequence
  Synthetic oligonucleotide; TTC chr11 5223912 5223933 5223929 5223934 +
acatatgagcaaggttgtgtag

SEQ ID NO: 84285 - DNA, 22 bp, Artificial Sequence
  Synthetic oligonucleotide; TTG chr11 5223929 5223950 5223946 5223951 +
tgtagtatttgtctttttgtgt

SEQ ID NO: 84286 - DNA, 22 bp, Artificial Sequence
  Synthetic oligonucleotide; TTT chr11 5223939 5223960 5223956 5223961 +
gtctttttgtgtcaggcttatt

SEQ ID NO: 84287 - DNA, 22 bp, Artificial Sequence
  Synthetic oligonucleotide; TTG chr11 5223940 5223961 5223957 5223962 +
tctttttgtgtcaggcttattt

SEQ ID NO: 84288 - DNA, 22 bp, Artificial Sequence
  Synthetic oligonucleotide; CTT chr11 5223944 5223965 5223961 5223966 +
tttgtgtcaggcttatttttct

SEQ ID NO: 84289 - DNA, 22 bp, Artificial Sequence
  Synthetic oligonucleotide; TTT chr11 5223945 5223966 5223962 5223967 +
ttgtgtcaggcttatttttctt

SEQ ID NO: 84290 - DNA, 22 bp, Artificial Sequence
  Synthetic oligonucleotide; TTT chr11 5223946 5223967 5223963 5223968 +
tgtgtcaggcttatttttctta

SEQ ID NO: 84291 - DNA, 22 bp, Artificial Sequence
  Synthetic oligonucleotide; TTT chr11 5223947 5223968 5223964 5223969 +
gtgtcaggcttatttttcttag

SEQ ID NO: 84292 - DNA, 22 bp, Artificial Sequence
  Synthetic oligonucleotide; TTG chr11 5223948 5223969 5223965 5223970 +
tgtcaggcttatttttcttagt

SEQ ID NO: 84293 - DNA, 22 bp, Artificial Sequence
  Synthetic oligonucleotide; CTT chr11 5223958 5223979 5223975 5223980 +
atttttcttagttttacatcct

SEQ ID NO: 84294 - DNA, 22 bp, Artificial Sequence
  Synthetic oligonucleotide; TTA chr11 5223959 5223980 5223976 5223981 +
tttttcttagttttacatcctc

SEQ ID NO: 84295 - DNA, 22 bp, Artificial Sequence
  Synthetic oligonucleotide; TTT chr11 5223962 5223983 5223979 5223984 +
ttcttagttttacatcctccag

SEQ ID NO: 84296 - DNA, 22 bp, Artificial Sequence
  Synthetic oligonucleotide; TTT chr11 5223963 5223984 5223980 5223985 +
tcttagttttacatcctccagg

SEQ ID NO: 84297 - DNA, 22 bp, Artificial Sequence
  Synthetic oligonucleotide; TTT chr11 5223964 5223985 5223981 5223986 +
cttagttttacatcctccaggt

SEQ ID NO: 84298 - DNA, 22 bp, Artificial Sequence
  Synthetic oligonucleotide; TTC chr11 5223965 5223986 5223982 5223987 +
ttagttttacatcctccaggtt

SEQ ID NO: 84299 - DNA, 22 bp, Artificial Sequence
  Synthetic oligonucleotide; CTT chr11 5223967 5223988 5223984 5223989 +
agttttacatcctccaggttca

SEQ ID NO: 84300 - DNA, 22 bp, Artificial Sequence
  Synthetic oligonucleotide; TTA chr11 5223968 5223989 5223985 5223990 +
gttttacatcctccaggttcat

SEQ ID NO: 84301 - DNA, 22 bp, Artificial Sequence
  Synthetic oligonucleotide; TTT chr11 5223972 5223993 5223989 5223994 +
tacatcctccaggttcatcaat

SEQ ID NO: 84302 - DNA, 22 bp, Artificial Sequence
  Synthetic oligonucleotide; TTT chr11 5223973 5223994 5223990 5223995 +
acatcctccaggttcatcaatt

SEQ ID NO: 84303 - DNA, 22 bp, Artificial Sequence
  Synthetic oligonucleotide; TTA chr11 5223974 5223995 5223991 5223996 +
catcctccaggttcatcaattc

SEQ ID NO: 84304 - DNA, 22 bp, Artificial Sequence
  Synthetic oligonucleotide; CTC chr11 5223981 5224002 5223998 5224003 +
caggttcatcaattctgccata

SEQ ID NO: 84305 - DNA, 22 bp, Artificial Sequence
  Synthetic oligonucleotide; TTC chr11 5223988 5224009 5224005 5224010 +
atcaattctgccataaatggca

SEQ ID NO: 84306 - DNA, 22 bp, Artificial Sequence
  Synthetic oligonucleotide; TTC chr11 5223996 5224017 5224013 5224018 +
tgccataaatggcaggattttc

SEQ ID NO: 84307 - DNA, 22 bp, Artificial Sequence
  Synthetic oligonucleotide; CTG chr11 5223998 5224019 5224015 5224020 +
ccataaatggcaggattttctt

SEQ ID NO: 84308 - DNA, 22 bp, Artificial Sequence
  Synthetic oligonucleotide; TTT chr11 5224016 5224037 5224033 5224038 +
tcttctttttaatttttttatt

SEQ ID NO: 84309 - DNA, 22 bp, Artificial Sequence
  Synthetic oligonucleotide; TTT chr11 5224017 5224038 5224034 5224039 +
cttctttttaatttttttattt

SEQ ID NO: 84310 - DNA, 22 bp, Artificial Sequence
  Synthetic oligonucleotide; TTC chr11 5224018 5224039 5224035 5224040 +
ttctttttaatttttttatttt

SEQ ID NO: 84311 - DNA, 22 bp, Artificial Sequence
  Synthetic oligonucleotide; CTT chr11 5224020 5224041 5224037 5224042 +
ctttttaatttttttattttcc

SEQ ID NO: 84312 - DNA, 22 bp, Artificial Sequence
  Synthetic oligonucleotide; TTC chr11 5224021 5224042 5224038 5224043 +
tttttaatttttttattttcct

SEQ ID NO: 84313 - DNA, 22 bp, Artificial Sequence
  Synthetic oligonucleotide; CTT chr11 5224023 5224044 5224040 5224045 +
tttaatttttttattttcctat

SEQ ID NO: 84314 - DNA, 22 bp, Artificial Sequence
  Synthetic oligonucleotide; TTT chr11 5224024 5224045 5224041 5224046 +
ttaatttttttattttcctatt

SEQ ID NO: 84315 - DNA, 22 bp, Artificial Sequence
  Synthetic oligonucleotide; TTT chr11 5224025 5224046 5224042 5224047 +
taatttttttattttcctattt

SEQ ID NO: 84316 - DNA, 22 bp, Artificial Sequence
  Synthetic oligonucleotide; TTT chr11 5224026 5224047 5224043 5224048 +
aatttttttattttcctatttt

SEQ ID NO: 84317 - DNA, 22 bp, Artificial Sequence
  Synthetic oligonucleotide; TTA chr11 5224027 5224048 5224044 5224049 +
atttttttattttcctattttt

SEQ ID NO: 84318 - DNA, 22 bp, Artificial Sequence
  Synthetic oligonucleotide; TTT chr11 5224031 5224052 5224048 5224053 +
ttttattttcctatttttaatt

SEQ ID NO: 84319 - DNA, 22 bp, Artificial Sequence
  Synthetic oligonucleotide; TTT chr11 5224032 5224053 5224049 5224054 +
tttattttcctatttttaattt

SEQ ID NO: 84320 - DNA, 22 bp, Artificial Sequence
  Synthetic oligonucleotide; TTT chr11 5224033 5224054 5224050 5224055 +
ttattttcctatttttaatttt

SEQ ID NO: 84321 - DNA, 22 bp, Artificial Sequence
  Synthetic oligonucleotide; TTT chr11 5224034 5224055 5224051 5224056 +
tattttcctatttttaattttt

SEQ ID NO: 84322 - DNA, 22 bp, Artificial Sequence
  Synthetic oligonucleotide; TTT chr11 5224035 5224056 5224052 5224057 +
attttcctatttttaatttttt

SEQ ID NO: 84323 - DNA, 22 bp, Artificial Sequence
  Synthetic oligonucleotide; TTA chr11 5224036 5224057 5224053 5224058 +
ttttcctatttttaattttttg

SEQ ID NO: 84324 - DNA, 22 bp, Artificial Sequence
  Synthetic oligonucleotide; TTT chr11 5224039 5224060 5224056 5224061 +
tcctatttttaattttttgttt

SEQ ID NO: 84325 - DNA, 22 bp, Artificial Sequence
  Synthetic oligonucleotide; TTT chr11 5224040 5224061 5224057 5224062 +
cctatttttaattttttgtttg

SEQ ID NO: 84326 - DNA, 22 bp, Artificial Sequence
  Synthetic oligonucleotide; TTC chr11 5224041 5224062 5224058 5224063 +
ctatttttaattttttgtttgt

SEQ ID NO: 84327 - DNA, 22 bp, Artificial Sequence
  Synthetic oligonucleotide; CTA chr11 5224044 5224065 5224061 5224066 +
tttttaattttttgtttgttat

SEQ ID NO: 84328 - DNA, 22 bp, Artificial Sequence
  Synthetic oligonucleotide; TTT chr11 5224047 5224068 5224064 5224069 +
ttaattttttgtttgttattga

SEQ ID NO: 84329 - DNA, 22 bp, Artificial Sequence
  Synthetic oligonucleotide; TTT chr11 5224048 5224069 5224065 5224070 +
taattttttgtttgttattgaa

SEQ ID NO: 84330 - DNA, 22 bp, Artificial Sequence
  Synthetic oligonucleotide; TTT chr11 5224049 5224070 5224066 5224071 +
aattttttgtttgttattgaat

SEQ ID NO: 84331 - DNA, 22 bp, Artificial Sequence
  Synthetic oligonucleotide; TTA chr11 5224050 5224071 5224067 5224072 +
attttttgtttgttattgaatc

SEQ ID NO: 84332 - DNA, 22 bp, Artificial Sequence
  Synthetic oligonucleotide; TTT chr11 5224054 5224075 5224071 5224076 +
tttgtttgttattgaatcatct

SEQ ID NO: 84333 - DNA, 22 bp, Artificial Sequence
  Synthetic oligonucleotide; TTT chr11 5224055 5224076 5224072 5224077 +
ttgtttgttattgaatcatctg

SEQ ID NO: 84334 - DNA, 22 bp, Artificial Sequence
  Synthetic oligonucleotide; TTT chr11 5224056 5224077 5224073 5224078 +
tgtttgttattgaatcatctgt

SEQ ID NO: 84335 - DNA, 22 bp, Artificial Sequence
  Synthetic oligonucleotide; TTT chr11 5224057 5224078 5224074 5224079 +
gtttgttattgaatcatctgtg

SEQ ID NO: 84336 - DNA, 22 bp, Artificial Sequence
  Synthetic oligonucleotide; TTG chr11 5224058 5224079 5224075 5224080 +
tttgttattgaatcatctgtgt

SEQ ID NO: 84337 - DNA, 22 bp, Artificial Sequence
  Synthetic oligonucleotide; TTT chr11 5224061 5224082 5224078 5224083 +
gttattgaatcatctgtgtttc

SEQ ID NO: 84338 - DNA, 22 bp, Artificial Sequence
  Synthetic oligonucleotide; TTG chr11 5224062 5224083 5224079 5224084 +
ttattgaatcatctgtgtttct

SEQ ID NO: 84339 - DNA, 22 bp, Artificial Sequence
  Synthetic oligonucleotide; TTA chr11 5224065 5224086 5224082 5224087 +
ttgaatcatctgtgtttcttat

SEQ ID NO: 84340 - DNA, 22 bp, Artificial Sequence
  Synthetic oligonucleotide; TTG chr11 5224068 5224089 5224085 5224090 +
aatcatctgtgtttcttatata

SEQ ID NO: 84341 - DNA, 22 bp, Artificial Sequence
  Synthetic oligonucleotide; CTG chr11 5224077 5224098 5224094 5224099 +
tgtttcttatatattttggata

SEQ ID NO: 84342 - DNA, 22 bp, Artificial Sequence
  Synthetic oligonucleotide; TTT chr11 5224082 5224103 5224099 5224104 +
cttatatattttggatattaac

SEQ ID NO: 84343 - DNA, 22 bp, Artificial Sequence
  Synthetic oligonucleotide; TTC chr11 5224083 5224104 5224100 5224105 +
ttatatattttggatattaacc

SEQ ID NO: 84344 - DNA, 22 bp, Artificial Sequence
  Synthetic oligonucleotide; CTT chr11 5224085 5224106 5224102 5224107 +
atatattttggatattaaccaa

SEQ ID NO: 84345 - DNA, 22 bp, Artificial Sequence
  Synthetic oligonucleotide; TTA chr11 5224086 5224107 5224103 5224108 +
tatattttggatattaaccaaa

SEQ ID NO: 84346 - DNA, 22 bp, Artificial Sequence
  Synthetic oligonucleotide; TTT chr11 5224093 5224114 5224110 5224115 +
tggatattaaccaaaatattta

SEQ ID NO: 84347 - DNA, 22 bp, Artificial Sequence
  Synthetic oligonucleotide; TTT chr11 5224094 5224115 5224111 5224116 +
ggatattaaccaaaatatttaa

SEQ ID NO: 84348 - DNA, 22 bp, Artificial Sequence
  Synthetic oligonucleotide; TTG chr11 5224095 5224116 5224112 5224117 +
gatattaaccaaaatatttaag

SEQ ID NO: 84349 - DNA, 22 bp, Artificial Sequence
  Synthetic oligonucleotide; TTA chr11 5224102 5224123 5224119 5224124 +
accaaaatatttaagaaatatt

SEQ ID NO: 84350 - DNA, 22 bp, Artificial Sequence
  Synthetic oligonucleotide; TTT chr11 5224114 5224135 5224131 5224136 +
aagaaatatttggtttgcaaat

SEQ ID NO: 84351 - DNA, 22 bp, Artificial Sequence
  Synthetic oligonucleotide; TTA chr11 5224115 5224136 5224132 5224137 +
agaaatatttggtttgcaaata

SEQ ID NO: 84352 - DNA, 22 bp, Artificial Sequence
  Synthetic oligonucleotide; TTT chr11 5224125 5224146 5224142 5224147 +
ggtttgcaaatatgccatttca

SEQ ID NO: 84353 - DNA, 22 bp, Artificial Sequence
  Synthetic oligonucleotide; TTG chr11 5224126 5224147 5224143 5224148 +
gtttgcaaatatgccatttcat

SEQ ID NO: 84354 - DNA, 22 bp, Artificial Sequence
  Synthetic oligonucleotide; TTT chr11 5224130 5224151 5224147 5224152 +
gcaaatatgccatttcatggtt

SEQ ID NO: 84355 - DNA, 22 bp, Artificial Sequence
  Synthetic oligonucleotide; TTG chr11 5224131 5224152 5224148 5224153 +
caaatatgccatttcatggttc

SEQ ID NO: 84356 - DNA, 22 bp, Artificial Sequence
  Synthetic oligonucleotide; TTT chr11 5224145 5224166 5224162 5224167 +
catggttcacctttcatttgtt

SEQ ID NO: 84357 - DNA, 22 bp, Artificial Sequence
  Synthetic oligonucleotide; TTC chr11 5224146 5224167 5224163 5224168 +
atggttcacctttcatttgttc

SEQ ID NO: 84358 - DNA, 22 bp, Artificial Sequence
  Synthetic oligonucleotide; TTC chr11 5224153 5224174 5224170 5224175 +
acctttcatttgttcattgttt

SEQ ID NO: 84359 - DNA, 22 bp, Artificial Sequence
  Synthetic oligonucleotide; CTT chr11 5224158 5224179 5224175 5224180 +
tcatttgttcattgttttgttt

SEQ ID NO: 84360 - DNA, 22 bp, Artificial Sequence
  Synthetic oligonucleotide; TTT chr11 5224159 5224180 5224176 5224181 +
catttgttcattgttttgtttt

SEQ ID NO: 84361 - DNA, 22 bp, Artificial Sequence
  Synthetic oligonucleotide; TTC chr11 5224160 5224181 5224177 5224182 +
atttgttcattgttttgttttt

SEQ ID NO: 84362 - DNA, 22 bp, Artificial Sequence
  Synthetic oligonucleotide; TTT chr11 5224164 5224185 5224181 5224186 +
gttcattgttttgttttttgtg

SEQ ID NO: 84363 - DNA, 22 bp, Artificial Sequence
  Synthetic oligonucleotide; TTG chr11 5224165 5224186 5224182 5224187 +
ttcattgttttgttttttgtgt

SEQ ID NO: 84364 - DNA, 22 bp, Artificial Sequence
  Synthetic oligonucleotide; TTC chr11 5224168 5224189 5224185 5224190 +
attgttttgttttttgtgtgga

SEQ ID NO: 84365 - DNA, 22 bp, Artificial Sequence
  Synthetic oligonucleotide; TTG chr11 5224172 5224193 5224189 5224194 +
ttttgttttttgtgtggaaatt

SEQ ID NO: 84366 - DNA, 22 bp, Artificial Sequence
  Synthetic oligonucleotide; TTT chr11 5224175 5224196 5224192 5224197 +
tgttttttgtgtggaaattttt

SEQ ID NO: 84367 - DNA, 22 bp, Artificial Sequence
  Synthetic oligonucleotide; TTT chr11 5224176 5224197 5224193 5224198 +
gttttttgtgtggaaatttttt

SEQ ID NO: 84368 - DNA, 22 bp, Artificial Sequence
  Synthetic oligonucleotide; TTG chr11 5224177 5224198 5224194 5224199 +
ttttttgtgtggaaatttttta

SEQ ID NO: 84369 - DNA, 22 bp, Artificial Sequence
  Synthetic oligonucleotide; TTT chr11 5224180 5224201 5224197 5224202 +
tttgtgtggaaattttttagtt

SEQ ID NO: 84370 - DNA, 22 bp, Artificial Sequence
  Synthetic oligonucleotide; TTT chr11 5224181 5224202 5224198 5224203 +
ttgtgtggaaattttttagttt

SEQ ID NO: 84371 - DNA, 22 bp, Artificial Sequence
  Synthetic oligonucleotide; TTT chr11 5224182 5224203 5224199 5224204 +
tgtgtggaaattttttagtttg

SEQ ID NO: 84372 - DNA, 22 bp, Artificial Sequence
  Synthetic oligonucleotide; TTT chr11 5224183 5224204 5224200 5224205 +
gtgtggaaattttttagtttga

SEQ ID NO: 84373 - DNA, 22 bp, Artificial Sequence
  Synthetic oligonucleotide; TTG chr11 5224184 5224205 5224201 5224206 +
tgtggaaattttttagtttgat

SEQ ID NO: 84374 - DNA, 22 bp, Artificial Sequence
  Synthetic oligonucleotide; TTT chr11 5224195 5224216 5224212 5224217 +
tttagtttgatgtagcctcact

SEQ ID NO: 84375 - DNA, 22 bp, Artificial Sequence
  Synthetic oligonucleotide; TTT chr11 5224196 5224217 5224213 5224218 +
ttagtttgatgtagcctcactt

SEQ ID NO: 84376 - DNA, 22 bp, Artificial Sequence
  Synthetic oligonucleotide; TTT chr11 5224197 5224218 5224214 5224219 +
tagtttgatgtagcctcacttc

SEQ ID NO: 84377 - DNA, 22 bp, Artificial Sequence
  Synthetic oligonucleotide; TTT chr11 5224198 5224219 5224215 5224220 +
agtttgatgtagcctcacttct

SEQ ID NO: 84378 - DNA, 22 bp, Artificial Sequence
  Synthetic oligonucleotide; TTA chr11 5224199 5224220 5224216 5224221 +
gtttgatgtagcctcacttctt

SEQ ID NO: 84379 - DNA, 22 bp, Artificial Sequence
  Synthetic oligonucleotide; TTT chr11 5224203 5224224 5224220 5224225 +
gatgtagcctcacttctttatt

SEQ ID NO: 84380 - DNA, 22 bp, Artificial Sequence
  Synthetic oligonucleotide; TTG chr11 5224204 5224225 5224221 5224226 +
atgtagcctcacttctttattt

SEQ ID NO: 84381 - DNA, 22 bp, Artificial Sequence
  Synthetic oligonucleotide; CTC chr11 5224214 5224235 5224231 5224236 +
acttctttatttttccttttgt

SEQ ID NO: 84382 - DNA, 22 bp, Artificial Sequence
  Synthetic oligonucleotide; CTT chr11 5224218 5224239 5224235 5224240 +
ctttatttttccttttgttgcc

SEQ ID NO: 84383 - DNA, 22 bp, Artificial Sequence
  Synthetic oligonucleotide; TTC chr11 5224219 5224240 5224236 5224241 +
tttatttttccttttgttgcct

SEQ ID NO: 84384 - DNA, 22 bp, Artificial Sequence
  Synthetic oligonucleotide; CTT chr11 5224221 5224242 5224238 5224243 +
tatttttccttttgttgccttt

SEQ ID NO: 84385 - DNA, 22 bp, Artificial Sequence
  Synthetic oligonucleotide; TTT chr11 5224222 5224243 5224239 5224244 +
atttttccttttgttgcctttg

SEQ ID NO: 84386 - DNA, 22 bp, Artificial Sequence
  Synthetic oligonucleotide; TTA chr11 5224223 5224244 5224240 5224245 +
tttttccttttgttgcctttgc

SEQ ID NO: 84387 - DNA, 22 bp, Artificial Sequence
  Synthetic oligonucleotide; TTT chr11 5224226 5224247 5224243 5224248 +
ttccttttgttgcctttgcttc

SEQ ID NO: 84388 - DNA, 22 bp, Artificial Sequence
  Synthetic oligonucleotide; TTT chr11 5224227 5224248 5224244 5224249 +
tccttttgttgcctttgcttct

SEQ ID NO: 84389 - DNA, 22 bp, Artificial Sequence
  Synthetic oligonucleotide; TTT chr11 5224228 5224249 5224245 5224250 +
ccttttgttgcctttgcttctc

SEQ ID NO: 84390 - DNA, 22 bp, Artificial Sequence
  Synthetic oligonucleotide; TTC chr11 5224229 5224250 5224246 5224251 +
cttttgttgcctttgcttctca

SEQ ID NO: 84391 - DNA, 22 bp, Artificial Sequence
  Synthetic oligonucleotide; CTT chr11 5224232 5224253 5224249 5224254 +
ttgttgcctttgcttctcatat

SEQ ID NO: 84392 - DNA, 22 bp, Artificial Sequence
  Synthetic oligonucleotide; TTT chr11 5224233 5224254 5224250 5224255 +
tgttgcctttgcttctcatatc

SEQ ID NO: 84393 - DNA, 22 bp, Artificial Sequence
  Synthetic oligonucleotide; TTT chr11 5224234 5224255 5224251 5224256 +
gttgcctttgcttctcatatca

SEQ ID NO: 84394 - DNA, 22 bp, Artificial Sequence
  Synthetic oligonucleotide; TTG chr11 5224235 5224256 5224252 5224257 +
ttgcctttgcttctcatatcaa

SEQ ID NO: 84395 - DNA, 22 bp, Artificial Sequence
  Synthetic oligonucleotide; TTG chr11 5224238 5224259 5224255 5224260 +
cctttgcttctcatatcaaatt

SEQ ID NO: 84396 - DNA, 22 bp, Artificial Sequence
  Synthetic oligonucleotide; CTT chr11 5224242 5224263 5224259 5224264 +
tgcttctcatatcaaattcaaa

SEQ ID NO: 84397 - DNA, 22 bp, Artificial Sequence
  Synthetic oligonucleotide; TTT chr11 5224243 5224264 5224260 5224265 +
gcttctcatatcaaattcaaaa

SEQ ID NO: 84398 - DNA, 22 bp, Artificial Sequence
  Synthetic oligonucleotide; TTG chr11 5224244 5224265 5224261 5224266 +
cttctcatatcaaattcaaaaa

SEQ ID NO: 84399 - DNA, 22 bp, Artificial Sequence
  Synthetic oligonucleotide; CTT chr11 5224247 5224268 5224264 5224269 +
ctcatatcaaattcaaaaaacg

SEQ ID NO: 84400 - DNA, 22 bp, Artificial Sequence
  Synthetic oligonucleotide; TTC chr11 5224248 5224269 5224265 5224270 +
tcatatcaaattcaaaaaacgg

SEQ ID NO: 84401 - DNA, 22 bp, Artificial Sequence
  Synthetic oligonucleotide; CTC chr11 5224250 5224271 5224267 5224272 +
atatcaaattcaaaaaacggct

SEQ ID NO: 84402 - DNA, 22 bp, Artificial Sequence
  Synthetic oligonucleotide; TTC chr11 5224261 5224282 5224278 5224283 +
aaaaaacggctgcaacgtgaat

SEQ ID NO: 84403 - DNA, 22 bp, Artificial Sequence
  Synthetic oligonucleotide; CTG chr11 5224273 5224294 5224290 5224295 +
caacgtgaatattagaattttc

SEQ ID NO: 84404 - DNA, 22 bp, Artificial Sequence
  Synthetic oligonucleotide; TTA chr11 5224287 5224308 5224304 5224309 +
gaattttcttcttttgatttct

SEQ ID NO: 84405 - DNA, 22 bp, Artificial Sequence
  Synthetic oligonucleotide; TTT chr11 5224293 5224314 5224310 5224315 +
tcttcttttgatttctttaaaa

SEQ ID NO: 84406 - DNA, 22 bp, Artificial Sequence
  Synthetic oligonucleotide; TTT chr11 5224294 5224315 5224311 5224316 +
cttcttttgatttctttaaaaa

SEQ ID NO: 84407 - DNA, 22 bp, Artificial Sequence
  Synthetic oligonucleotide; TTC chr11 5224295 5224316 5224312 5224317 +
ttcttttgatttctttaaaaat

SEQ ID NO: 84408 - DNA, 22 bp, Artificial Sequence
  Synthetic oligonucleotide; CTT chr11 5224297 5224318 5224314 5224319 +
cttttgatttctttaaaaattt

SEQ ID NO: 84409 - DNA, 22 bp, Artificial Sequence
  Synthetic oligonucleotide; TTC chr11 5224298 5224319 5224315 5224320 +
ttttgatttctttaaaaatttt

SEQ ID NO: 84410 - DNA, 22 bp, Artificial Sequence
  Synthetic oligonucleotide; CTT chr11 5224300 5224321 5224317 5224322 +
ttgatttctttaaaaattttta

SEQ ID NO: 84411 - DNA, 22 bp, Artificial Sequence
  Synthetic oligonucleotide; TTT chr11 5224301 5224322 5224318 5224323 +
tgatttctttaaaaatttttat

SEQ ID NO: 84412 - DNA, 22 bp, Artificial Sequence
  Synthetic oligonucleotide; TTT chr11 5224302 5224323 5224319 5224324 +
gatttctttaaaaatttttatg

SEQ ID NO: 84413 - DNA, 22 bp, Artificial Sequence
  Synthetic oligonucleotide; TTG chr11 5224303 5224324 5224320 5224325 +
atttctttaaaaatttttatgg

SEQ ID NO: 84414 - DNA, 22 bp, Artificial Sequence
  Synthetic oligonucleotide; TTT chr11 5224307 5224328 5224324 5224329 +
ctttaaaaatttttatggtttt

SEQ ID NO: 84415 - DNA, 22 bp, Artificial Sequence
  Synthetic oligonucleotide; TTC chr11 5224308 5224329 5224325 5224330 +
tttaaaaatttttatggtttta

SEQ ID NO: 84416 - DNA, 22 bp, Artificial Sequence
  Synthetic oligonucleotide; CTT chr11 5224310 5224331 5224327 5224332 +
taaaaatttttatggttttagg

SEQ ID NO: 84417 - DNA, 22 bp, Artificial Sequence
  Synthetic oligonucleotide; TTT chr11 5224311 5224332 5224328 5224333 +
aaaaatttttatggttttaggt

SEQ ID NO: 84418 - DNA, 22 bp, Artificial Sequence
  Synthetic oligonucleotide; TTA chr11 5224312 5224333 5224329 5224334 +
aaaatttttatggttttaggtc

SEQ ID NO: 84419 - DNA, 22 bp, Artificial Sequence
  Synthetic oligonucleotide; TTT chr11 5224319 5224340 5224336 5224341 +
ttatggttttaggtcttagttt

SEQ ID NO: 84420 - DNA, 22 bp, Artificial Sequence
  Synthetic oligonucleotide; TTT chr11 5224320 5224341 5224337 5224342 +
tatggttttaggtcttagttta

SEQ ID NO: 84421 - DNA, 22 bp, Artificial Sequence
  Synthetic oligonucleotide; TTT chr11 5224321 5224342 5224338 5224343 +
atggttttaggtcttagtttaa

SEQ ID NO: 84422 - DNA, 22 bp, Artificial Sequence
  Synthetic oligonucleotide; TTA chr11 5224322 5224343 5224339 5224344 +
tggttttaggtcttagtttaat

SEQ ID NO: 84423 - DNA, 22 bp, Artificial Sequence
  Synthetic oligonucleotide; TTT chr11 5224328 5224349 5224345 5224350 +
taggtcttagtttaattcttta

SEQ ID NO: 84424 - DNA, 22 bp, Artificial Sequence
  Synthetic oligonucleotide; TTT chr11 5224329 5224350 5224346 5224351 +
aggtcttagtttaattctttaa

SEQ ID NO: 84425 - DNA, 22 bp, Artificial Sequence
  Synthetic oligonucleotide; TTA chr11 5224330 5224351 5224347 5224352 +
ggtcttagtttaattctttaac

SEQ ID NO: 84426 - DNA, 22 bp, Artificial Sequence
  Synthetic oligonucleotide; CTT chr11 5224336 5224357 5224353 5224358 +
agtttaattctttaacccattc

SEQ ID NO: 84427 - DNA, 22 bp, Artificial Sequence
  Synthetic oligonucleotide; TTA chr11 5224337 5224358 5224354 5224359 +
gtttaattctttaacccattca

SEQ ID NO: 84428 - DNA, 22 bp, Artificial Sequence
  Synthetic oligonucleotide; TTT chr11 5224341 5224362 5224358 5224363 +
aattctttaacccattcaaatt

SEQ ID NO: 84429 - DNA, 22 bp, Artificial Sequence
  Synthetic oligonucleotide; TTA chr11 5224342 5224363 5224359 5224364 +
attctttaacccattcaaattt

SEQ ID NO: 84430 - DNA, 22 bp, Artificial Sequence
  Synthetic oligonucleotide; TTC chr11 5224346 5224367 5224363 5224368 +
tttaacccattcaaatttattt

SEQ ID NO: 84431 - DNA, 22 bp, Artificial Sequence
  Synthetic oligonucleotide; CTT chr11 5224348 5224369 5224365 5224370 +
taacccattcaaatttattttt

SEQ ID NO: 84432 - DNA, 22 bp, Artificial Sequence
  Synthetic oligonucleotide; TTT chr11 5224349 5224370 5224366 5224371 +
aacccattcaaatttatttttg

SEQ ID NO: 84433 - DNA, 22 bp, Artificial Sequence
  Synthetic oligonucleotide; TTA chr11 5224350 5224371 5224367 5224372 +
acccattcaaatttatttttgt

SEQ ID NO: 84434 - DNA, 22 bp, Artificial Sequence
  Synthetic oligonucleotide; TTC chr11 5224358 5224379 5224375 5224380 +
aaatttatttttgtttatggtg

SEQ ID NO: 84435 - DNA, 22 bp, Artificial Sequence
  Synthetic oligonucleotide; TTT chr11 5224364 5224385 5224381 5224386 +
atttttgtttatggtgtaagac

SEQ ID NO: 84436 - DNA, 22 bp, Artificial Sequence
  Synthetic oligonucleotide; TTA chr11 5224365 5224386 5224382 5224387 +
tttttgtttatggtgtaagaca

SEQ ID NO: 84437 - DNA, 22 bp, Artificial Sequence
  Synthetic oligonucleotide; TTT chr11 5224368 5224389 5224385 5224390 +
ttgtttatggtgtaagacaagg

SEQ ID NO: 84438 - DNA, 22 bp, Artificial Sequence
  Synthetic oligonucleotide; TTT chr11 5224369 5224390 5224386 5224391 +
tgtttatggtgtaagacaaggg

SEQ ID NO: 84439 - DNA, 22 bp, Artificial Sequence
  Synthetic oligonucleotide; TTT chr11 5224370 5224391 5224387 5224392 +
gtttatggtgtaagacaagggt

SEQ ID NO: 84440 - DNA, 22 bp, Artificial Sequence
  Synthetic oligonucleotide; TTG chr11 5224371 5224392 5224388 5224393 +
tttatggtgtaagacaagggtc

SEQ ID NO: 84441 - DNA, 22 bp, Artificial Sequence
  Synthetic oligonucleotide; TTT chr11 5224374 5224395 5224391 5224396 +
atggtgtaagacaagggtctga

SEQ ID NO: 84442 - DNA, 22 bp, Artificial Sequence
  Synthetic oligonucleotide; TTA chr11 5224375 5224396 5224392 5224397 +
tggtgtaagacaagggtctgat

SEQ ID NO: 84443 - DNA, 22 bp, Artificial Sequence
  Synthetic oligonucleotide; CTG chr11 5224395 5224416 5224412 5224417 +
atttcatttcattttgagggtt

SEQ ID NO: 84444 - DNA, 22 bp, Artificial Sequence
  Synthetic oligonucleotide; TTT chr11 5224399 5224420 5224416 5224421 +
catttcattttgagggtttcac

SEQ ID NO: 84445 - DNA, 22 bp, Artificial Sequence
  Synthetic oligonucleotide; TTC chr11 5224400 5224421 5224417 5224422 +
atttcattttgagggtttcacc

SEQ ID NO: 84446 - DNA, 22 bp, Artificial Sequence
  Synthetic oligonucleotide; TTT chr11 5224404 5224425 5224421 5224426 +
cattttgagggtttcaccctct

SEQ ID NO: 84447 - DNA, 22 bp, Artificial Sequence
  Synthetic oligonucleotide; TTC chr11 5224405 5224426 5224422 5224427 +
attttgagggtttcaccctctc

SEQ ID NO: 84448 - DNA, 22 bp, Artificial Sequence
  Synthetic oligonucleotide; TTT chr11 5224409 5224430 5224426 5224431 +
tgagggtttcaccctctcatat

SEQ ID NO: 84449 - DNA, 22 bp, Artificial Sequence
  Synthetic oligonucleotide; TTT chr11 5224410 5224431 5224427 5224432 +
gagggtttcaccctctcatata

SEQ ID NO: 84450 - DNA, 22 bp, Artificial Sequence
  Synthetic oligonucleotide; TTG chr11 5224411 5224432 5224428 5224433 +
agggtttcaccctctcatataa

SEQ ID NO: 84451 - DNA, 22 bp, Artificial Sequence
  Synthetic oligonucleotide; TTT chr11 5224418 5224439 5224435 5224440 +
caccctctcatataataaaatt

SEQ ID NO: 84452 - DNA, 22 bp, Artificial Sequence
  Synthetic oligonucleotide; TTC chr11 5224419 5224440 5224436 5224441 +
accctctcatataataaaattc

SEQ ID NO: 84453 - DNA, 22 bp, Artificial Sequence
  Synthetic oligonucleotide; CTC chr11 5224425 5224446 5224442 5224447 +
tcatataataaaattcttctat

SEQ ID NO: 84454 - DNA, 22 bp, Artificial Sequence
  Synthetic oligonucleotide; CTC chr11 5224427 5224448 5224444 5224449 +
atataataaaattcttctatat

SEQ ID NO: 84455 - DNA, 22 bp, Artificial Sequence
  Synthetic oligonucleotide; TTC chr11 5224441 5224462 5224458 5224463 +
ttctatatacccttctatcatc

SEQ ID NO: 84456 - DNA, 22 bp, Artificial Sequence
  Synthetic oligonucleotide; CTT chr11 5224443 5224464 5224460 5224465 +
ctatatacccttctatcatcac

SEQ ID NO: 84457 - DNA, 22 bp, Artificial Sequence
  Synthetic oligonucleotide; TTC chr11 5224444 5224465 5224461 5224466 +
tatatacccttctatcatcact

SEQ ID NO: 84458 - DNA, 22 bp, Artificial Sequence
  Synthetic oligonucleotide; CTA chr11 5224446 5224467 5224463 5224468 +
tatacccttctatcatcactta

SEQ ID NO: 84459 - DNA, 22 bp, Artificial Sequence
  Synthetic oligonucleotide; CTT chr11 5224455 5224476 5224472 5224477 +
ctatcatcacttattactgatt

SEQ ID NO: 84460 - DNA, 22 bp, Artificial Sequence
  Synthetic oligonucleotide; TTC chr11 5224456 5224477 5224473 5224478 +
tatcatcacttattactgatta

SEQ ID NO: 84461 - DNA, 22 bp, Artificial Sequence
  Synthetic oligonucleotide; CTA chr11 5224458 5224479 5224475 5224480 +
tcatcacttattactgattata

SEQ ID NO: 84462 - DNA, 22 bp, Artificial Sequence
  Synthetic oligonucleotide; CTT chr11 5224467 5224488 5224484 5224489 +
attactgattatatgccttgat

SEQ ID NO: 84463 - DNA, 22 bp, Artificial Sequence
  Synthetic oligonucleotide; TTA chr11 5224468 5224489 5224485 5224490 +
ttactgattatatgccttgatt

SEQ ID NO: 84464 - DNA, 22 bp, Artificial Sequence
  Synthetic oligonucleotide; TTA chr11 5224471 5224492 5224488 5224493 +
ctgattatatgccttgatttca

SEQ ID NO: 84465 - DNA, 22 bp, Artificial Sequence
  Synthetic oligonucleotide; CTG chr11 5224474 5224495 5224491 5224496 +
attatatgccttgatttcagaa

SEQ ID NO: 84466 - DNA, 22 bp, Artificial Sequence
  Synthetic oligonucleotide; TTA chr11 5224478 5224499 5224495 5224500 +
tatgccttgatttcagaatctt

SEQ ID NO: 84467 - DNA, 22 bp, Artificial Sequence
  Synthetic oligonucleotide; CTT chr11 5224486 5224507 5224503 5224508 +
gatttcagaatcttgccaacta

SEQ ID NO: 84468 - DNA, 22 bp, Artificial Sequence
  Synthetic oligonucleotide; TTG chr11 5224487 5224508 5224504 5224509 +
atttcagaatcttgccaactag

SEQ ID NO: 84469 - DNA, 22 bp, Artificial Sequence
  Synthetic oligonucleotide; TTT chr11 5224491 5224512 5224508 5224513 +
cagaatcttgccaactagattc

SEQ ID NO: 84470 - DNA, 22 bp, Artificial Sequence
  Synthetic oligonucleotide; TTC chr11 5224492 5224513 5224509 5224514 +
agaatcttgccaactagattca

SEQ ID NO: 84471 - DNA, 22 bp, Artificial Sequence
  Synthetic oligonucleotide; CTT chr11 5224500 5224521 5224517 5224522 +
gccaactagattcagaatttga

SEQ ID NO: 84472 - DNA, 22 bp, Artificial Sequence
  Synthetic oligonucleotide; TTG chr11 5224501 5224522 5224518 5224523 +
ccaactagattcagaatttgac

SEQ ID NO: 84473 - DNA, 22 bp, Artificial Sequence
  Synthetic oligonucleotide; CTA chr11 5224508 5224529 5224525 5224530 +
gattcagaatttgactgggaga

SEQ ID NO: 84474 - DNA, 22 bp, Artificial Sequence
  Synthetic oligonucleotide; TTC chr11 5224513 5224534 5224530 5224535 +
agaatttgactgggagagagga

SEQ ID NO: 84475 - DNA, 22 bp, Artificial Sequence
  Synthetic oligonucleotide; TTT chr11 5224520 5224541 5224537 5224542 +
gactgggagagaggacaaggac

SEQ ID NO: 84476 - DNA, 22 bp, Artificial Sequence
  Synthetic oligonucleotide; TTG chr11 5224521 5224542 5224538 5224543 +
actgggagagaggacaaggacc

SEQ ID NO: 84477 - DNA, 22 bp, Artificial Sequence
  Synthetic oligonucleotide; CTG chr11 5224525 5224546 5224542 5224547 +
ggagagaggacaaggaccactt

SEQ ID NO: 84478 - DNA, 22 bp, Artificial Sequence
  Synthetic oligonucleotide; CTT chr11 5224547 5224568 5224564 5224569 +
gagactcatattttatttccag

SEQ ID NO: 84479 - DNA, 22 bp, Artificial Sequence
  Synthetic oligonucleotide; TTG chr11 5224548 5224569 5224565 5224570 +
agactcatattttatttccaga

SEQ ID NO: 84480 - DNA, 22 bp, Artificial Sequence
  Synthetic oligonucleotide; CTC chr11 5224554 5224575 5224571 5224576 +
atattttatttccagaatctag

SEQ ID NO: 84481 - DNA, 22 bp, Artificial Sequence
  Synthetic oligonucleotide; TTT chr11 5224560 5224581 5224577 5224582 +
tatttccagaatctagcatcta

SEQ ID NO: 84482 - DNA, 22 bp, Artificial Sequence
  Synthetic oligonucleotide; TTT chr11 5224561 5224582 5224578 5224583 +
atttccagaatctagcatctac

SEQ ID NO: 84483 - DNA, 22 bp, Artificial Sequence
  Synthetic oligonucleotide; TTA chr11 5224562 5224583 5224579 5224584 +
tttccagaatctagcatctacc

SEQ ID NO: 84484 - DNA, 22 bp, Artificial Sequence
  Synthetic oligonucleotide; TTT chr11 5224565 5224586 5224582 5224587 +
ccagaatctagcatctacctac

SEQ ID NO: 84485 - DNA, 22 bp, Artificial Sequence
  Synthetic oligonucleotide; TTC chr11 5224566 5224587 5224583 5224588 +
cagaatctagcatctacctacc

SEQ ID NO: 84486 - DNA, 22 bp, Artificial Sequence
  Synthetic oligonucleotide; CTA chr11 5224575 5224596 5224592 5224597 +
gcatctacctacctaggtattg

SEQ ID NO: 84487 - DNA, 22 bp, Artificial Sequence
  Synthetic oligonucleotide; CTA chr11 5224582 5224603 5224599 5224604 +
cctacctaggtattgaataaga

SEQ ID NO: 84488 - DNA, 22 bp, Artificial Sequence
  Synthetic oligonucleotide; CTA chr11 5224586 5224607 5224603 5224608 +
cctaggtattgaataagaaaaa

SEQ ID NO: 84489 - DNA, 22 bp, Artificial Sequence
  Synthetic oligonucleotide; CTA chr11 5224590 5224611 5224607 5224612 +
ggtattgaataagaaaaatgaa

SEQ ID NO: 84490 - DNA, 22 bp, Artificial Sequence
  Synthetic oligonucleotide; TTG chr11 5224597 5224618 5224614 5224619 +
aataagaaaaatgaagttaagg

SEQ ID NO: 84491 - DNA, 22 bp, Artificial Sequence
  Synthetic oligonucleotide; TTA chr11 5224616 5224637 5224633 5224638 +
aggtggttgatggtaacactat

SEQ ID NO: 84492 - DNA, 22 bp, Artificial Sequence
  Synthetic oligonucleotide; TTG chr11 5224625 5224646 5224642 5224647 +
atggtaacactatgctaataac

SEQ ID NO: 84493 - DNA, 22 bp, Artificial Sequence
  Synthetic oligonucleotide; CTA chr11 5224637 5224658 5224654 5224659 +
tgctaataactgcagagccaga

SEQ ID NO: 84494 - DNA, 22 bp, Artificial Sequence
  Synthetic oligonucleotide; CTA chr11 5224642 5224663 5224659 5224664 +
ataactgcagagccagaagcac

SEQ ID NO: 84495 - DNA, 22 bp, Artificial Sequence
  Synthetic oligonucleotide; CTG chr11 5224649 5224670 5224666 5224671 +
cagagccagaagcaccataagg

SEQ ID NO: 84496 - DNA, 22 bp, Artificial Sequence
  Synthetic oligonucleotide; CTC chr11 5224698 5224719 5224715 5224720 +
tgatctcttcctgaatgctaat

SEQ ID NO: 84497 - DNA, 22 bp, Artificial Sequence
  Synthetic oligonucleotide; CTG chr11 5224700 5224721 5224717 5224722 +
atctcttcctgaatgctaatct

SEQ ID NO: 84498 - DNA, 22 bp, Artificial Sequence
  Synthetic oligonucleotide; CTC chr11 5224705 5224726 5224722 5224727 +
ttcctgaatgctaatcttaaac

SEQ ID NO: 84499 - DNA, 22 bp, Artificial Sequence
  Synthetic oligonucleotide; CTT chr11 5224707 5224728 5224724 5224729 +
cctgaatgctaatcttaaacat

SEQ ID NO: 84500 - DNA, 22 bp, Artificial Sequence
  Synthetic oligonucleotide; TTC chr11 5224708 5224729 5224725 5224730 +
ctgaatgctaatcttaaacatc

SEQ ID NO: 84501 - DNA, 22 bp, Artificial Sequence
  Synthetic oligonucleotide; CTG chr11 5224711 5224732 5224728 5224733 +
aatgctaatcttaaacatcctg

SEQ ID NO: 84502 - DNA, 22 bp, Artificial Sequence
  Synthetic oligonucleotide; CTA chr11 5224718 5224739 5224735 5224740 +
atcttaaacatcctgaggaaga

SEQ ID NO: 84503 - DNA, 22 bp, Artificial Sequence
  Synthetic oligonucleotide; CTT chr11 5224723 5224744 5224740 5224745 +
aaacatcctgaggaagaatggg

SEQ ID NO: 84504 - DNA, 22 bp, Artificial Sequence
  Synthetic oligonucleotide; TTA chr11 5224724 5224745 5224741 5224746 +
aacatcctgaggaagaatggga

SEQ ID NO: 84505 - DNA, 22 bp, Artificial Sequence
  Synthetic oligonucleotide; CTG chr11 5224733 5224754 5224750 5224755 +
aggaagaatgggacttccattt

SEQ ID NO: 84506 - DNA, 22 bp, Artificial Sequence
  Synthetic oligonucleotide; CTT chr11 5224749 5224770 5224766 5224771 +
ccatttggggtgggcctatgac

SEQ ID NO: 84507 - DNA, 22 bp, Artificial Sequence
  Synthetic oligonucleotide; TTC chr11 5224750 5224771 5224767 5224772 +
catttggggtgggcctatgaca

SEQ ID NO: 84508 - DNA, 22 bp, Artificial Sequence
  Synthetic oligonucleotide; TTT chr11 5224755 5224776 5224772 5224777 +
ggggtgggcctatgacagggta

SEQ ID NO: 84509 - DNA, 22 bp, Artificial Sequence
  Synthetic oligonucleotide; TTG chr11 5224756 5224777 5224773 5224778 +
gggtgggcctatgacagggtaa

SEQ ID NO: 84510 - DNA, 22 bp, Artificial Sequence
  Synthetic oligonucleotide; CTA chr11 5224767 5224788 5224784 5224789 +
tgacagggtaataagacagtag

SEQ ID NO: 84511 - DNA, 22 bp, Artificial Sequence
  Synthetic oligonucleotide; CTA chr11 5224803 5224824 5224820 5224825 +
caaaaagccgcctttcaaattc

SEQ ID NO: 84512 - DNA, 22 bp, Artificial Sequence
  Synthetic oligonucleotide; CTT chr11 5224817 5224838 5224834 5224839 +
tcaaattcttctcagtcctaac

SEQ ID NO: 84513 - DNA, 22 bp, Artificial Sequence
  Synthetic oligonucleotide; TTT chr11 5224818 5224839 5224835 5224840 +
caaattcttctcagtcctaact

SEQ ID NO: 84514 - DNA, 22 bp, Artificial Sequence
  Synthetic oligonucleotide; TTC chr11 5224819 5224840 5224836 5224841 +
aaattcttctcagtcctaactt

SEQ ID NO: 84515 - DNA, 22 bp, Artificial Sequence
  Synthetic oligonucleotide; TTC chr11 5224825 5224846 5224842 5224847 +
ttctcagtcctaacttttcata

SEQ ID NO: 84516 - DNA, 22 bp, Artificial Sequence
  Synthetic oligonucleotide; CTT chr11 5224827 5224848 5224844 5224849 +
ctcagtcctaacttttcatact

SEQ ID NO: 84517 - DNA, 22 bp, Artificial Sequence
  Synthetic oligonucleotide; TTC chr11 5224828 5224849 5224845 5224850 +
tcagtcctaacttttcatacta

SEQ ID NO: 84518 - DNA, 22 bp, Artificial Sequence
  Synthetic oligonucleotide; CTC chr11 5224830 5224851 5224847 5224852 +
agtcctaacttttcatactaag

SEQ ID NO: 84519 - DNA, 22 bp, Artificial Sequence
  Synthetic oligonucleotide; CTA chr11 5224837 5224858 5224854 5224859 +
acttttcatactaagcccagtc

SEQ ID NO: 84520 - DNA, 22 bp, Artificial Sequence
  Synthetic oligonucleotide; CTT chr11 5224841 5224862 5224858 5224863 +
ttcatactaagcccagtccttc

SEQ ID NO: 84521 - DNA, 22 bp, Artificial Sequence
  Synthetic oligonucleotide; TTT chr11 5224842 5224863 5224859 5224864 +
tcatactaagcccagtccttcc

SEQ ID NO: 84522 - DNA, 22 bp, Artificial Sequence
  Synthetic oligonucleotide; TTT chr11 5224843 5224864 5224860 5224865 +
catactaagcccagtccttcca

SEQ ID NO: 84523 - DNA, 22 bp, Artificial Sequence
  Synthetic oligonucleotide; TTC chr11 5224844 5224865 5224861 5224866 +
atactaagcccagtccttccaa

SEQ ID NO: 84524 - DNA, 22 bp, Artificial Sequence
  Synthetic oligonucleotide; CTA chr11 5224850 5224871 5224867 5224872 +
agcccagtccttccaaagcaga

SEQ ID NO: 84525 - DNA, 22 bp, Artificial Sequence
  Synthetic oligonucleotide; CTT chr11 5224862 5224883 5224879 5224884 +
ccaaagcagactgtgaaagagt

SEQ ID NO: 84526 - DNA, 22 bp, Artificial Sequence
  Synthetic oligonucleotide; TTC chr11 5224863 5224884 5224880 5224885 +
caaagcagactgtgaaagagtg

SEQ ID NO: 84527 - DNA, 22 bp, Artificial Sequence
  Synthetic oligonucleotide; CTG chr11 5224875 5224896 5224892 5224897 +
tgaaagagtgatagttccggga

SEQ ID NO: 84528 - DNA, 22 bp, Artificial Sequence
  Synthetic oligonucleotide; TTC chr11 5224892 5224913 5224909 5224914 +
cgggagactagcactgcagatt

SEQ ID NO: 84529 - DNA, 22 bp, Artificial Sequence
  Synthetic oligonucleotide; CTA chr11 5224902 5224923 5224919 5224924 +
gcactgcagattccgggtcact

SEQ ID NO: 84530 - DNA, 22 bp, Artificial Sequence
  Synthetic oligonucleotide; CTG chr11 5224908 5224929 5224925 5224930 +
cagattccgggtcactgtgagt

SEQ ID NO: 84531 - DNA, 22 bp, Artificial Sequence
  Synthetic oligonucleotide; TTC chr11 5224915 5224936 5224932 5224937 +
cgggtcactgtgagtgggggag

SEQ ID NO: 84532 - DNA, 22 bp, Artificial Sequence
  Synthetic oligonucleotide; CTG chr11 5224925 5224946 5224942 5224947 +
tgagtgggggaggcagggaaga

SEQ ID NO: 84533 - DNA, 22 bp, Artificial Sequence
  Synthetic oligonucleotide; CTC chr11 5224954 5224975 5224971 5224976 +
acaggacagtcaaaccatgacc

SEQ ID NO: 84534 - DNA, 22 bp, Artificial Sequence
  Synthetic oligonucleotide; CTG chr11 5224980 5225001 5224997 5225002 +
tttttccttcttcaagtagacc

SEQ ID NO: 84535 - DNA, 22 bp, Artificial Sequence
  Synthetic oligonucleotide; TTT chr11 5224983 5225004 5225000 5225005 +
ttccttcttcaagtagacctct

SEQ ID NO: 84536 - DNA, 22 bp, Artificial Sequence
  Synthetic oligonucleotide; TTT chr11 5224984 5225005 5225001 5225006 +
tccttcttcaagtagacctcta

SEQ ID NO: 84537 - DNA, 22 bp, Artificial Sequence
  Synthetic oligonucleotide; TTT chr11 5224985 5225006 5225002 5225007 +
ccttcttcaagtagacctctat

SEQ ID NO: 84538 - DNA, 22 bp, Artificial Sequence
  Synthetic oligonucleotide; TTC chr11 5224986 5225007 5225003 5225008 +
cttcttcaagtagacctctata

SEQ ID NO: 84539 - DNA, 22 bp, Artificial Sequence
  Synthetic oligonucleotide; CTT chr11 5224989 5225010 5225006 5225011 +
cttcaagtagacctctataaga

SEQ ID NO: 84540 - DNA, 22 bp, Artificial Sequence
  Synthetic oligonucleotide; TTC chr11 5224990 5225011 5225007 5225012 +
ttcaagtagacctctataagac

SEQ ID NO: 84541 - DNA, 22 bp, Artificial Sequence
  Synthetic oligonucleotide; CTT chr11 5224992 5225013 5225009 5225014 +
caagtagacctctataagacaa

SEQ ID NO: 84542 - DNA, 22 bp, Artificial Sequence
  Synthetic oligonucleotide; TTC chr11 5224993 5225014 5225010 5225015 +
aagtagacctctataagacaac

SEQ ID NO: 84543 - DNA, 22 bp, Artificial Sequence
  Synthetic oligonucleotide; CTC chr11 5225004 5225025 5225021 5225026 +
tataagacaacagagacaacta

SEQ ID NO: 84544 - DNA, 22 bp, Artificial Sequence
  Synthetic oligonucleotide; CTA chr11 5225006 5225027 5225023 5225028 +
taagacaacagagacaactaag

SEQ ID NO: 84545 - DNA, 22 bp, Artificial Sequence
  Synthetic oligonucleotide; CTA chr11 5225026 5225047 5225043 5225048 +
aggctgagtggccaggcgagga

SEQ ID NO: 84546 - DNA, 22 bp, Artificial Sequence
  Synthetic oligonucleotide; CTG chr11 5225032 5225053 5225049 5225054 +
agtggccaggcgaggagaaacc

SEQ ID NO: 84547 - DNA, 22 bp, Artificial Sequence
  Synthetic oligonucleotide; CTC chr11 5225059 5225080 5225076 5225081 +
gccgtaaaacatggaaggaaca

SEQ ID NO: 84548 - DNA, 22 bp, Artificial Sequence
  Synthetic oligonucleotide; CTT chr11 5225084 5225105 5225101 5225106 +
caggggaaaggtggtatctcta

SEQ ID NO: 84549 - DNA, 22 bp, Artificial Sequence
  Synthetic oligonucleotide; TTC chr11 5225085 5225106 5225102 5225107 +
aggggaaaggtggtatctctaa

SEQ ID NO: 84550 - DNA, 22 bp, Artificial Sequence
  Synthetic oligonucleotide; CTC chr11 5225104 5225125 5225121 5225126 +
taagcaagagaactgagtggag

SEQ ID NO: 84551 - DNA, 22 bp, Artificial Sequence
  Synthetic oligonucleotide; CTA chr11 5225106 5225127 5225123 5225128 +
agcaagagaactgagtggagtc

SEQ ID NO: 84552 - DNA, 22 bp, Artificial Sequence
  Synthetic oligonucleotide; CTG chr11 5225119 5225140 5225136 5225141 +
agtggagtcaaggctgagagat

SEQ ID NO: 84553 - DNA, 22 bp, Artificial Sequence
  Synthetic oligonucleotide; CTG chr11 5225135 5225156 5225152 5225157 +
agagatgcaggataagcaaatg

SEQ ID NO: 84554 - DNA, 22 bp, Artificial Sequence
  Synthetic oligonucleotide; TTC chr11 5225175 5225196 5225192 5225197 +
atgaggacagctaaaacaataa

SEQ ID NO: 84555 - DNA, 22 bp, Artificial Sequence
  Synthetic oligonucleotide; CTA chr11 5225188 5225209 5225205 5225210 +
aaacaataagtaatgtaaaata

SEQ ID NO: 84556 - DNA, 22 bp, Artificial Sequence
  Synthetic oligonucleotide; CTT chr11 5225226 5225247 5225243 5225248 +
taacctccaaatcaagcctcta

SEQ ID NO: 84557 - DNA, 22 bp, Artificial Sequence
  Synthetic oligonucleotide; TTT chr11 5225227 5225248 5225244 5225249 +
aacctccaaatcaagcctctac

SEQ ID NO: 84558 - DNA, 22 bp, Artificial Sequence
  Synthetic oligonucleotide; TTA chr11 5225228 5225249 5225245 5225250 +
acctccaaatcaagcctctact

SEQ ID NO: 84559 - DNA, 22 bp, Artificial Sequence
  Synthetic oligonucleotide; CTC chr11 5225233 5225254 5225250 5225255 +
caaatcaagcctctacttgaat

SEQ ID NO: 84560 - DNA, 22 bp, Artificial Sequence
  Synthetic oligonucleotide; CTC chr11 5225246 5225267 5225263 5225268 +
tacttgaatccttttctgaggg

SEQ ID NO: 84561 - DNA, 22 bp, Artificial Sequence
  Synthetic oligonucleotide; CTA chr11 5225248 5225269 5225265 5225270 +
cttgaatccttttctgagggat

SEQ ID NO: 84562 - DNA, 22 bp, Artificial Sequence
  Synthetic oligonucleotide; CTT chr11 5225251 5225272 5225268 5225273 +
gaatccttttctgagggatgaa

SEQ ID NO: 84563 - DNA, 22 bp, Artificial Sequence
  Synthetic oligonucleotide; TTG chr11 5225252 5225273 5225269 5225274 +
aatccttttctgagggatgaat

SEQ ID NO: 84564 - DNA, 22 bp, Artificial Sequence
  Synthetic oligonucleotide; CTT chr11 5225259 5225280 5225276 5225281 +
ttctgagggatgaataaggcat

SEQ ID NO: 84565 - DNA, 22 bp, Artificial Sequence
  Synthetic oligonucleotide; TTT chr11 5225260 5225281 5225277 5225282 +
tctgagggatgaataaggcata

SEQ ID NO: 84566 - DNA, 22 bp, Artificial Sequence
  Synthetic oligonucleotide; TTT chr11 5225261 5225282 5225278 5225283 +
ctgagggatgaataaggcatat

SEQ ID NO: 84567 - DNA, 22 bp, Artificial Sequence
  Synthetic oligonucleotide; TTC chr11 5225262 5225283 5225279 5225284 +
tgagggatgaataaggcatatg

SEQ ID NO: 84568 - DNA, 22 bp, Artificial Sequence
  Synthetic oligonucleotide; CTG chr11 5225264 5225285 5225281 5225286 +
agggatgaataaggcatatgca

SEQ ID NO: 84569 - DNA, 22 bp, Artificial Sequence
  Synthetic oligonucleotide; CTG chr11 5225296 5225317 5225313 5225318 +
ttgccaatgtgcattagctgtt

SEQ ID NO: 84570 - DNA, 22 bp, Artificial Sequence
  Synthetic oligonucleotide; TTG chr11 5225299 5225320 5225316 5225321 +
ccaatgtgcattagctgtttgc

SEQ ID NO: 84571 - DNA, 22 bp, Artificial Sequence
  Synthetic oligonucleotide; TTA chr11 5225312 5225333 5225329 5225334 +
gctgtttgcagcctcaccttct

SEQ ID NO: 84572 - DNA, 22 bp, Artificial Sequence
  Synthetic oligonucleotide; CTG chr11 5225316 5225337 5225333 5225338 +
tttgcagcctcaccttctttca

SEQ ID NO: 84573 - DNA, 22 bp, Artificial Sequence
  Synthetic oligonucleotide; TTT chr11 5225319 5225340 5225336 5225341 +
gcagcctcaccttctttcatgg

SEQ ID NO: 84574 - DNA, 22 bp, Artificial Sequence
  Synthetic oligonucleotide; TTG chr11 5225320 5225341 5225337 5225342 +
cagcctcaccttctttcatgga

SEQ ID NO: 84575 - DNA, 22 bp, Artificial Sequence
  Synthetic oligonucleotide; CTC chr11 5225327 5225348 5225344 5225349 +
accttctttcatggagtttaag

SEQ ID NO: 84576 - DNA, 22 bp, Artificial Sequence
  Synthetic oligonucleotide; CTT chr11 5225332 5225353 5225349 5225354 +
ctttcatggagtttaagatata

SEQ ID NO: 84577 - DNA, 22 bp, Artificial Sequence
  Synthetic oligonucleotide; TTC chr11 5225333 5225354 5225350 5225355 +
tttcatggagtttaagatatag

SEQ ID NO: 84578 - DNA, 22 bp, Artificial Sequence
  Synthetic oligonucleotide; CTT chr11 5225335 5225356 5225352 5225357 +
tcatggagtttaagatatagtg

SEQ ID NO: 84579 - DNA, 22 bp, Artificial Sequence
  Synthetic oligonucleotide; TTT chr11 5225336 5225357 5225353 5225358 +
catggagtttaagatatagtgt

SEQ ID NO: 84580 - DNA, 22 bp, Artificial Sequence
  Synthetic oligonucleotide; TTC chr11 5225337 5225358 5225354 5225359 +
atggagtttaagatatagtgta

SEQ ID NO: 84581 - DNA, 22 bp, Artificial Sequence
  Synthetic oligonucleotide; TTT chr11 5225346 5225367 5225363 5225368 +
aagatatagtgtattttcccaa

SEQ ID NO: 84582 - DNA, 22 bp, Artificial Sequence
  Synthetic oligonucleotide; TTA chr11 5225347 5225368 5225364 5225369 +
agatatagtgtattttcccaag

SEQ ID NO: 84583 - DNA, 22 bp, Artificial Sequence
  Synthetic oligonucleotide; TTT chr11 5225362 5225383 5225379 5225384 +
tcccaaggtttgaactagctct

SEQ ID NO: 84584 - DNA, 22 bp, Artificial Sequence
  Synthetic oligonucleotide; TTT chr11 5225363 5225384 5225380 5225385 +
cccaaggtttgaactagctctt

SEQ ID NO: 84585 - DNA, 22 bp, Artificial Sequence
  Synthetic oligonucleotide; TTC chr11 5225364 5225385 5225381 5225386 +
ccaaggtttgaactagctcttc

SEQ ID NO: 84586 - DNA, 22 bp, Artificial Sequence
  Synthetic oligonucleotide; TTT chr11 5225373 5225394 5225390 5225395 +
gaactagctcttcatttcttta

SEQ ID NO: 84587 - DNA, 22 bp, Artificial Sequence
  Synthetic oligonucleotide; TTG chr11 5225374 5225395 5225391 5225396 +
aactagctcttcatttctttat

SEQ ID NO: 84588 - DNA, 22 bp, Artificial Sequence
  Synthetic oligonucleotide; CTA chr11 5225379 5225400 5225396 5225401 +
gctcttcatttctttatgtttt

SEQ ID NO: 84589 - DNA, 22 bp, Artificial Sequence
  Synthetic oligonucleotide; CTC chr11 5225383 5225404 5225400 5225405 +
ttcatttctttatgttttaaat

SEQ ID NO: 84590 - DNA, 22 bp, Artificial Sequence
  Synthetic oligonucleotide; CTT chr11 5225385 5225406 5225402 5225407 +
catttctttatgttttaaatgc

SEQ ID NO: 84591 - DNA, 22 bp, Artificial Sequence
  Synthetic oligonucleotide; TTC chr11 5225386 5225407 5225403 5225408 +
atttctttatgttttaaatgca

SEQ ID NO: 84592 - DNA, 22 bp, Artificial Sequence
  Synthetic oligonucleotide; TTT chr11 5225390 5225411 5225407 5225412 +
ctttatgttttaaatgcactga

SEQ ID NO: 84593 - DNA, 22 bp, Artificial Sequence
  Synthetic oligonucleotide; TTC chr11 5225391 5225412 5225408 5225413 +
tttatgttttaaatgcactgac

SEQ ID NO: 84594 - DNA, 22 bp, Artificial Sequence
  Synthetic oligonucleotide; CTT chr11 5225393 5225414 5225410 5225415 +
tatgttttaaatgcactgacct

SEQ ID NO: 84595 - DNA, 22 bp, Artificial Sequence
  Synthetic oligonucleotide; TTT chr11 5225394 5225415 5225411 5225416 +
atgttttaaatgcactgacctc

SEQ ID NO: 84596 - DNA, 22 bp, Artificial Sequence
  Synthetic oligonucleotide; TTA chr11 5225395 5225416 5225412 5225417 +
tgttttaaatgcactgacctcc

SEQ ID NO: 84597 - DNA, 22 bp, Artificial Sequence
  Synthetic oligonucleotide; TTT chr11 5225400 5225421 5225417 5225422 +
taaatgcactgacctcccacat

SEQ ID NO: 84598 - DNA, 22 bp, Artificial Sequence
  Synthetic oligonucleotide; TTT chr11 5225401 5225422 5225418 5225423 +
aaatgcactgacctcccacatt

SEQ ID NO: 84599 - DNA, 22 bp, Artificial Sequence
  Synthetic oligonucleotide; TTA chr11 5225402 5225423 5225419 5225424 +
aatgcactgacctcccacattc

SEQ ID NO: 84600 - DNA, 22 bp, Artificial Sequence
  Synthetic oligonucleotide; CTG chr11 5225411 5225432 5225428 5225433 +
acctcccacattccctttttag

SEQ ID NO: 84601 - DNA, 22 bp, Artificial Sequence
  Synthetic oligonucleotide; CTC chr11 5225416 5225437 5225433 5225438 +
ccacattccctttttagtaaaa

SEQ ID NO: 84602 - DNA, 22 bp, Artificial Sequence
  Synthetic oligonucleotide; TTC chr11 5225424 5225445 5225441 5225446 +
cctttttagtaaaatattcaga

SEQ ID NO: 84603 - DNA, 22 bp, Artificial Sequence
  Synthetic oligonucleotide; CTT chr11 5225428 5225449 5225445 5225450 +
tttagtaaaatattcagaaata

SEQ ID NO: 84604 - DNA, 22 bp, Artificial Sequence
  Synthetic oligonucleotide; TTT chr11 5225429 5225450 5225446 5225451 +
ttagtaaaatattcagaaataa

SEQ ID NO: 84605 - DNA, 22 bp, Artificial Sequence
  Synthetic oligonucleotide; TTT chr11 5225430 5225451 5225447 5225452 +
tagtaaaatattcagaaataat

SEQ ID NO: 84606 - DNA, 22 bp, Artificial Sequence
  Synthetic oligonucleotide; TTT chr11 5225431 5225452 5225448 5225453 +
agtaaaatattcagaaataatt

SEQ ID NO: 84607 - DNA, 22 bp, Artificial Sequence
  Synthetic oligonucleotide; TTA chr11 5225432 5225453 5225449 5225454 +
gtaaaatattcagaaataattt

SEQ ID NO: 84608 - DNA, 22 bp, Artificial Sequence
  Synthetic oligonucleotide; TTC chr11 5225443 5225464 5225460 5225465 +
agaaataatttaaatacatcat

SEQ ID NO: 84609 - DNA, 22 bp, Artificial Sequence
  Synthetic oligonucleotide; TTT chr11 5225454 5225475 5225471 5225476 +
aaatacatcattgcaatgaaaa

SEQ ID NO: 84610 - DNA, 22 bp, Artificial Sequence
  Synthetic oligonucleotide; TTA chr11 5225455 5225476 5225472 5225477 +
aatacatcattgcaatgaaaat

SEQ ID NO: 84611 - DNA, 22 bp, Artificial Sequence
  Synthetic oligonucleotide; TTG chr11 5225467 5225488 5225484 5225489 +
caatgaaaataaatgtttttta

SEQ ID NO: 84612 - DNA, 22 bp, Artificial Sequence
  Synthetic oligonucleotide; TTT chr11 5225485 5225506 5225502 5225507 +
tttattaggcagaatccagatg

SEQ ID NO: 84613 - DNA, 22 bp, Artificial Sequence
  Synthetic oligonucleotide; TTT chr11 5225486 5225507 5225503 5225508 +
ttattaggcagaatccagatgc

SEQ ID NO: 84614 - DNA, 22 bp, Artificial Sequence
  Synthetic oligonucleotide; TTT chr11 5225487 5225508 5225504 5225509 +
tattaggcagaatccagatgct

SEQ ID NO: 84615 - DNA, 22 bp, Artificial Sequence
  Synthetic oligonucleotide; TTT chr11 5225488 5225509 5225505 5225510 +
attaggcagaatccagatgctc

SEQ ID NO: 84616 - DNA, 22 bp, Artificial Sequence
  Synthetic oligonucleotide; TTA chr11 5225489 5225510 5225506 5225511 +
ttaggcagaatccagatgctca

SEQ ID NO: 84617 - DNA, 22 bp, Artificial Sequence
  Synthetic oligonucleotide; TTA chr11 5225492 5225513 5225509 5225514 +
ggcagaatccagatgctcaagg

SEQ ID NO: 84618 - DNA, 22 bp, Artificial Sequence
  Synthetic oligonucleotide; CTC chr11 5225510 5225531 5225527 5225532 +
aaggcccttcataatatccccc

SEQ ID NO: 84619 - DNA, 22 bp, Artificial Sequence
  Synthetic oligonucleotide; CTT chr11 5225519 5225540 5225536 5225541 +
cataatatcccccagtttagta

SEQ ID NO: 84620 - DNA, 22 bp, Artificial Sequence
  Synthetic oligonucleotide; TTC chr11 5225520 5225541 5225537 5225542 +
ataatatcccccagtttagtag

SEQ ID NO: 84621 - DNA, 22 bp, Artificial Sequence
  Synthetic oligonucleotide; TTT chr11 5225537 5225558 5225554 5225559 +
agtagttggacttagggaacaa

SEQ ID NO: 84622 - DNA, 22 bp, Artificial Sequence
  Synthetic oligonucleotide; TTA chr11 5225538 5225559 5225555 5225560 +
gtagttggacttagggaacaaa

SEQ ID NO: 84623 - DNA, 22 bp, Artificial Sequence
  Synthetic oligonucleotide; TTG chr11 5225545 5225566 5225562 5225567 +
gacttagggaacaaaggaacct

SEQ ID NO: 84624 - DNA, 22 bp, Artificial Sequence
  Synthetic oligonucleotide; CTT chr11 5225550 5225571 5225567 5225572 +
agggaacaaaggaacctttaat

SEQ ID NO: 84625 - DNA, 22 bp, Artificial Sequence
  Synthetic oligonucleotide; TTA chr11 5225551 5225572 5225568 5225573 +
gggaacaaaggaacctttaata

SEQ ID NO: 84626 - DNA, 22 bp, Artificial Sequence
  Synthetic oligonucleotide; CTT chr11 5225568 5225589 5225585 5225590 +
taatagaaattggacagcaaga

SEQ ID NO: 84627 - DNA, 22 bp, Artificial Sequence
  Synthetic oligonucleotide; TTT chr11 5225569 5225590 5225586 5225591 +
aatagaaattggacagcaagaa

SEQ ID NO: 84628 - DNA, 22 bp, Artificial Sequence
  Synthetic oligonucleotide; TTA chr11 5225570 5225591 5225587 5225592 +
atagaaattggacagcaagaaa

SEQ ID NO: 84629 - DNA, 22 bp, Artificial Sequence
  Synthetic oligonucleotide; TTG chr11 5225580 5225601 5225597 5225602 +
gacagcaagaaagcgagcttag

SEQ ID NO: 84630 - DNA, 22 bp, Artificial Sequence
  Synthetic oligonucleotide; CTT chr11 5225600 5225621 5225617 5225622 +
agtgatacttgtgggccagggc

SEQ ID NO: 84631 - DNA, 22 bp, Artificial Sequence
  Synthetic oligonucleotide; TTA chr11 5225601 5225622 5225618 5225623 +
gtgatacttgtgggccagggca

SEQ ID NO: 84632 - DNA, 22 bp, Artificial Sequence
  Synthetic oligonucleotide; CTT chr11 5225610 5225631 5225627 5225632 +
gtgggccagggcattagccaca

SEQ ID NO: 84633 - DNA, 22 bp, Artificial Sequence
  Synthetic oligonucleotide; TTG chr11 5225611 5225632 5225628 5225633 +
tgggccagggcattagccacac

SEQ ID NO: 84634 - DNA, 22 bp, Artificial Sequence
  Synthetic oligonucleotide; TTA chr11 5225626 5225647 5225643 5225648 +
gccacaccagccaccactttct

SEQ ID NO: 84635 - DNA, 22 bp, Artificial Sequence
  Synthetic oligonucleotide; CTT chr11 5225645 5225666 5225662 5225667 +
tctgataggcagcctgcactgg

SEQ ID NO: 84636 - DNA, 22 bp, Artificial Sequence
  Synthetic oligonucleotide; TTT chr11 5225646 5225667 5225663 5225668 +
ctgataggcagcctgcactggt

SEQ ID NO: 84637 - DNA, 22 bp, Artificial Sequence
  Synthetic oligonucleotide; TTC chr11 5225647 5225668 5225664 5225669 +
tgataggcagcctgcactggtg

SEQ ID NO: 84638 - DNA, 22 bp, Artificial Sequence
  Synthetic oligonucleotide; CTG chr11 5225649 5225670 5225666 5225671 +
ataggcagcctgcactggtggg

SEQ ID NO: 84639 - DNA, 22 bp, Artificial Sequence
  Synthetic oligonucleotide; CTG chr11 5225661 5225682 5225678 5225683 +
cactggtggggtgaattctttg

SEQ ID NO: 84640 - DNA, 22 bp, Artificial Sequence
  Synthetic oligonucleotide; CTG chr11 5225666 5225687 5225683 5225688 +
gtggggtgaattctttgccaaa

SEQ ID NO: 84641 - DNA, 22 bp, Artificial Sequence
  Synthetic oligonucleotide; TTC chr11 5225679 5225700 5225696 5225701 +
tttgccaaagtgatgggccagc

SEQ ID NO: 84642 - DNA, 22 bp, Artificial Sequence
  Synthetic oligonucleotide; CTT chr11 5225681 5225702 5225698 5225703 +
tgccaaagtgatgggccagcac

SEQ ID NO: 84643 - DNA, 22 bp, Artificial Sequence
  Synthetic oligonucleotide; TTT chr11 5225682 5225703 5225699 5225704 +
gccaaagtgatgggccagcaca

SEQ ID NO: 84644 - DNA, 22 bp, Artificial Sequence
  Synthetic oligonucleotide; TTG chr11 5225683 5225704 5225700 5225705 +
ccaaagtgatgggccagcacac

SEQ ID NO: 84645 - DNA, 22 bp, Artificial Sequence
  Synthetic oligonucleotide; TTG chr11 5225719 5225740 5225736 5225741 +
cccaggagctgtgggaggaaga

SEQ ID NO: 84646 - DNA, 22 bp, Artificial Sequence
  Synthetic oligonucleotide; CTG chr11 5225730 5225751 5225747 5225752 +
tgggaggaagataagaggtatg

SEQ ID NO: 84647 - DNA, 22 bp, Artificial Sequence
  Synthetic oligonucleotide; TTA chr11 5225762 5225783 5225779 5225784 +
gcaaaagggcctagcttggact

SEQ ID NO: 84648 - DNA, 22 bp, Artificial Sequence
  Synthetic oligonucleotide; CTA chr11 5225775 5225796 5225792 5225797 +
gcttggactcagaataatccag

SEQ ID NO: 84649 - DNA, 22 bp, Artificial Sequence
  Synthetic oligonucleotide; CTT chr11 5225779 5225800 5225796 5225801 +
ggactcagaataatccagcctt

SEQ ID NO: 84650 - DNA, 22 bp, Artificial Sequence
  Synthetic oligonucleotide; TTG chr11 5225780 5225801 5225797 5225802 +
gactcagaataatccagcctta

SEQ ID NO: 84651 - DNA, 22 bp, Artificial Sequence
  Synthetic oligonucleotide; CTC chr11 5225785 5225806 5225802 5225807 +
agaataatccagccttatccca

SEQ ID NO: 84652 - DNA, 22 bp, Artificial Sequence
  Synthetic oligonucleotide; CTT chr11 5225801 5225822 5225818 5225823 +
atcccaaccataaaataaaagc

SEQ ID NO: 84653 - DNA, 22 bp, Artificial Sequence
  Synthetic oligonucleotide; TTA chr11 5225802 5225823 5225819 5225824 +
tcccaaccataaaataaaagca

SEQ ID NO: 84654 - DNA, 22 bp, Artificial Sequence
  Synthetic oligonucleotide; CTG chr11 5225836 5225857 5225853 5225858 +
gattgtagctgctattagcaat

SEQ ID NO: 84655 - DNA, 22 bp, Artificial Sequence
  Synthetic oligonucleotide; TTG chr11 5225841 5225862 5225858 5225863 +
tagctgctattagcaatatgaa

SEQ ID NO: 84656 - DNA, 22 bp, Artificial Sequence
  Synthetic oligonucleotide; CTG chr11 5225847 5225868 5225864 5225869 +
ctattagcaatatgaaacctct

SEQ ID NO: 84657 - DNA, 22 bp, Artificial Sequence
  Synthetic oligonucleotide; CTA chr11 5225850 5225871 5225867 5225872 +
ttagcaatatgaaacctcttac

SEQ ID NO: 84658 - DNA, 22 bp, Artificial Sequence
  Synthetic oligonucleotide; TTA chr11 5225853 5225874 5225870 5225875 +
gcaatatgaaacctcttacatc

SEQ ID NO: 84659 - DNA, 22 bp, Artificial Sequence
  Synthetic oligonucleotide; CTC chr11 5225868 5225889 5225885 5225890 +
ttacatcagttacaatttatat

SEQ ID NO: 84660 - DNA, 22 bp, Artificial Sequence
  Synthetic oligonucleotide; CTT chr11 5225870 5225891 5225887 5225892 +
acatcagttacaatttatatgc

SEQ ID NO: 84661 - DNA, 22 bp, Artificial Sequence
  Synthetic oligonucleotide; TTA chr11 5225871 5225892 5225888 5225893 +
catcagttacaatttatatgca

SEQ ID NO: 84662 - DNA, 22 bp, Artificial Sequence
  Synthetic oligonucleotide; TTA chr11 5225880 5225901 5225897 5225902 +
caatttatatgcagaaatattt

SEQ ID NO: 84663 - DNA, 22 bp, Artificial Sequence
  Synthetic oligonucleotide; TTT chr11 5225886 5225907 5225903 5225908 +
atatgcagaaatatttatatgc

SEQ ID NO: 84664 - DNA, 22 bp, Artificial Sequence
  Synthetic oligonucleotide; TTA chr11 5225887 5225908 5225904 5225909 +
tatgcagaaatatttatatgca

SEQ ID NO: 84665 - DNA, 22 bp, Artificial Sequence
  Synthetic oligonucleotide; TTT chr11 5225902 5225923 5225919 5225924 +
atatgcagagatattgctattg

SEQ ID NO: 84666 - DNA, 22 bp, Artificial Sequence
  Synthetic oligonucleotide; TTA chr11 5225903 5225924 5225920 5225925 +
tatgcagagatattgctattgc

SEQ ID NO: 84667 - DNA, 22 bp, Artificial Sequence
  Synthetic oligonucleotide; TTG chr11 5225918 5225939 5225935 5225940 +
ctattgccttaacccagaaatt

SEQ ID NO: 84668 - DNA, 22 bp, Artificial Sequence
  Synthetic oligonucleotide; CTA chr11 5225921 5225942 5225938 5225943 +
ttgccttaacccagaaattatc

SEQ ID NO: 84669 - DNA, 22 bp, Artificial Sequence
  Synthetic oligonucleotide; TTG chr11 5225924 5225945 5225941 5225946 +
ccttaacccagaaattatcact

SEQ ID NO: 84670 - DNA, 22 bp, Artificial Sequence
  Synthetic oligonucleotide; CTT chr11 5225928 5225949 5225945 5225950 +
aacccagaaattatcactgtta

SEQ ID NO: 84671 - DNA, 22 bp, Artificial Sequence
  Synthetic oligonucleotide; TTA chr11 5225929 5225950 5225946 5225951 +
acccagaaattatcactgttat

SEQ ID NO: 84672 - DNA, 22 bp, Artificial Sequence
  Synthetic oligonucleotide; TTA chr11 5225941 5225962 5225958 5225963 +
tcactgttattctttagaatgg

SEQ ID NO: 84673 - DNA, 22 bp, Artificial Sequence
  Synthetic oligonucleotide; CTG chr11 5225947 5225968 5225964 5225969 +
ttattctttagaatggtgcaaa

SEQ ID NO: 84674 - DNA, 22 bp, Artificial Sequence
  Synthetic oligonucleotide; TTA chr11 5225950 5225971 5225967 5225972 +
ttctttagaatggtgcaaagag

SEQ ID NO: 84675 - DNA, 22 bp, Artificial Sequence
  Synthetic oligonucleotide; TTC chr11 5225953 5225974 5225970 5225975 +
tttagaatggtgcaaagaggca

SEQ ID NO: 84676 - DNA, 22 bp, Artificial Sequence
  Synthetic oligonucleotide; CTT chr11 5225955 5225976 5225972 5225977 +
tagaatggtgcaaagaggcatg

SEQ ID NO: 84677 - DNA, 22 bp, Artificial Sequence
  Synthetic oligonucleotide; TTT chr11 5225956 5225977 5225973 5225978 +
agaatggtgcaaagaggcatga

SEQ ID NO: 84678 - DNA, 22 bp, Artificial Sequence
  Synthetic oligonucleotide; TTA chr11 5225957 5225978 5225974 5225979 +
gaatggtgcaaagaggcatgat

SEQ ID NO: 84679 - DNA, 22 bp, Artificial Sequence
  Synthetic oligonucleotide; TTG chr11 5225985 5226006 5226002 5226007 +
tatcattattgccctgaaagaa

SEQ ID NO: 84680 - DNA, 22 bp, Artificial Sequence
  Synthetic oligonucleotide; TTA chr11 5225993 5226014 5226010 5226015 +
ttgccctgaaagaaagagatta

SEQ ID NO: 84681 - DNA, 22 bp, Artificial Sequence
  Synthetic oligonucleotide; TTG chr11 5225996 5226017 5226013 5226018 +
ccctgaaagaaagagattaggg

SEQ ID NO: 84682 - DNA, 22 bp, Artificial Sequence
  Synthetic oligonucleotide; CTG chr11 5226001 5226022 5226018 5226023 +
aaagaaagagattagggaaagt

SEQ ID NO: 84683 - DNA, 22 bp, Artificial Sequence
  Synthetic oligonucleotide; TTA chr11 5226015 5226036 5226032 5226037 +
gggaaagtattagaaataagat

SEQ ID NO: 84684 - DNA, 22 bp, Artificial Sequence
  Synthetic oligonucleotide; TTA chr11 5226027 5226048 5226044 5226049 +
gaaataagataaacaaaaaagt

SEQ ID NO: 84685 - DNA, 22 bp, Artificial Sequence
  Synthetic oligonucleotide; TTA chr11 5226055 5226076 5226072 5226077 +
aaagaagaaagcattttttaaa

SEQ ID NO: 84686 - DNA, 22 bp, Artificial Sequence
  Synthetic oligonucleotide; TTT chr11 5226071 5226092 5226088 5226093 +
tttaaaattacaaatgcaaaat

SEQ ID NO: 84687 - DNA, 22 bp, Artificial Sequence
  Synthetic oligonucleotide; TTT chr11 5226072 5226093 5226089 5226094 +
ttaaaattacaaatgcaaaatt

SEQ ID NO: 84688 - DNA, 22 bp, Artificial Sequence
  Synthetic oligonucleotide; TTT chr11 5226073 5226094 5226090 5226095 +
taaaattacaaatgcaaaatta

SEQ ID NO: 84689 - DNA, 22 bp, Artificial Sequence
  Synthetic oligonucleotide; TTT chr11 5226074 5226095 5226091 5226096 +
aaaattacaaatgcaaaattac

SEQ ID NO: 84690 - DNA, 22 bp, Artificial Sequence
  Synthetic oligonucleotide; TTA chr11 5226075 5226096 5226092 5226097 +
aaattacaaatgcaaaattacc

SEQ ID NO: 84691 - DNA, 22 bp, Artificial Sequence
  Synthetic oligonucleotide; TTA chr11 5226081 5226102 5226098 5226103 +
caaatgcaaaattaccctgatt

SEQ ID NO: 84692 - DNA, 22 bp, Artificial Sequence
  Synthetic oligonucleotide; TTA chr11 5226095 5226116 5226112 5226117 +
ccctgatttggtcaatatgtgt

SEQ ID NO: 84693 - DNA, 22 bp, Artificial Sequence
  Synthetic oligonucleotide; CTG chr11 5226100 5226121 5226117 5226122 +
atttggtcaatatgtgtacaca

SEQ ID NO: 84694 - DNA, 22 bp, Artificial Sequence
  Synthetic oligonucleotide; TTT chr11 5226104 5226125 5226121 5226126 +
ggtcaatatgtgtacacatatt

SEQ ID NO: 84695 - DNA, 22 bp, Artificial Sequence
  Synthetic oligonucleotide; TTG chr11 5226105 5226126 5226122 5226127 +
gtcaatatgtgtacacatatta

SEQ ID NO: 84696 - DNA, 22 bp, Artificial Sequence
  Synthetic oligonucleotide; TTA chr11 5226127 5226148 5226144 5226149 +
aaacattacactttaacccata

SEQ ID NO: 84697 - DNA, 22 bp, Artificial Sequence
  Synthetic oligonucleotide; TTA chr11 5226135 5226156 5226152 5226157 +
cactttaacccataaatatgta

SEQ ID NO: 84698 - DNA, 22 bp, Artificial Sequence
  Synthetic oligonucleotide; CTT chr11 5226140 5226161 5226157 5226162 +
taacccataaatatgtataatg

SEQ ID NO: 84699 - DNA, 22 bp, Artificial Sequence
  Synthetic oligonucleotide; TTT chr11 5226141 5226162 5226158 5226163 +
aacccataaatatgtataatga

SEQ ID NO: 84700 - DNA, 22 bp, Artificial Sequence
  Synthetic oligonucleotide; TTA chr11 5226142 5226163 5226159 5226164 +
acccataaatatgtataatgat

SEQ ID NO: 84701 - DNA, 22 bp, Artificial Sequence
  Synthetic oligonucleotide; TTA chr11 5226166 5226187 5226183 5226188 +
tgtatcaattaaaaataaaaga

SEQ ID NO: 84702 - DNA, 22 bp, Artificial Sequence
  Synthetic oligonucleotide; TTA chr11 5226177 5226198 5226194 5226199 +
aaaataaaagaaaataaagtag

SEQ ID NO: 84703 - DNA, 22 bp, Artificial Sequence
  Synthetic oligonucleotide; TTA chr11 5226207 5226228 5226224 5226229 +
tgaatatgcaaataagcacaca

SEQ ID NO: 84704 - DNA, 22 bp, Artificial Sequence
  Synthetic oligonucleotide; TTC chr11 5226236 5226257 5226253 5226258 +
caaatagtaatgtactaggcag

SEQ ID NO: 84705 - DNA, 22 bp, Artificial Sequence
  Synthetic oligonucleotide; CTA chr11 5226253 5226274 5226270 5226275 +
ggcagactgtgtaaagtttttt

SEQ ID NO: 84706 - DNA, 22 bp, Artificial Sequence
  Synthetic oligonucleotide; CTG chr11 5226262 5226283 5226279 5226284 +
tgtaaagtttttttttaagtta

SEQ ID NO: 84707 - DNA, 22 bp, Artificial Sequence
  Synthetic oligonucleotide; TTT chr11 5226272 5226293 5226289 5226294 +
ttttttaagttacttaatgtat

SEQ ID NO: 84708 - DNA, 22 bp, Artificial Sequence
  Synthetic oligonucleotide; TTT chr11 5226273 5226294 5226290 5226295 +
tttttaagttacttaatgtatc

SEQ ID NO: 84709 - DNA, 22 bp, Artificial Sequence
  Synthetic oligonucleotide; TTT chr11 5226274 5226295 5226291 5226296 +
ttttaagttacttaatgtatct

SEQ ID NO: 84710 - DNA, 22 bp, Artificial Sequence
  Synthetic oligonucleotide; TTT chr11 5226275 5226296 5226292 5226297 +
tttaagttacttaatgtatctc

SEQ ID NO: 84711 - DNA, 22 bp, Artificial Sequence
  Synthetic oligonucleotide; TTT chr11 5226276 5226297 5226293 5226298 +
ttaagttacttaatgtatctca

SEQ ID NO: 84712 - DNA, 22 bp, Artificial Sequence
  Synthetic oligonucleotide; TTT chr11 5226277 5226298 5226294 5226299 +
taagttacttaatgtatctcag

SEQ ID NO: 84713 - DNA, 22 bp, Artificial Sequence
  Synthetic oligonucleotide; TTT chr11 5226278 5226299 5226295 5226300 +
aagttacttaatgtatctcaga

SEQ ID NO: 84714 - DNA, 22 bp, Artificial Sequence
  Synthetic oligonucleotide; TTA chr11 5226279 5226300 5226296 5226301 +
agttacttaatgtatctcagag

SEQ ID NO: 84715 - DNA, 22 bp, Artificial Sequence
  Synthetic oligonucleotide; TTA chr11 5226284 5226305 5226301 5226306 +
cttaatgtatctcagagatatt

SEQ ID NO: 84716 - DNA, 22 bp, Artificial Sequence
  Synthetic oligonucleotide; CTT chr11 5226287 5226308 5226304 5226309 +
aatgtatctcagagatatttcc

SEQ ID NO: 84717 - DNA, 22 bp, Artificial Sequence
  Synthetic oligonucleotide; TTA chr11 5226288 5226309 5226305 5226310 +
atgtatctcagagatatttcct

SEQ ID NO: 84718 - DNA, 22 bp, Artificial Sequence
  Synthetic oligonucleotide; CTC chr11 5226297 5226318 5226314 5226319 +
agagatatttccttttgttata

SEQ ID NO: 84719 - DNA, 22 bp, Artificial Sequence
  Synthetic oligonucleotide; TTT chr11 5226307 5226328 5226324 5226329 +
ccttttgttatacacaatgtta

SEQ ID NO: 84720 - DNA, 22 bp, Artificial Sequence
  Synthetic oligonucleotide; TTC chr11 5226308 5226329 5226325 5226330 +
cttttgttatacacaatgttaa

SEQ ID NO: 84721 - DNA, 22 bp, Artificial Sequence
  Synthetic oligonucleotide; CTT chr11 5226311 5226332 5226328 5226333 +
ttgttatacacaatgttaaggc

SEQ ID NO: 84722 - DNA, 22 bp, Artificial Sequence
  Synthetic oligonucleotide; TTT chr11 5226312 5226333 5226329 5226334 +
tgttatacacaatgttaaggca

SEQ ID NO: 84723 - DNA, 22 bp, Artificial Sequence
  Synthetic oligonucleotide; TTT chr11 5226313 5226334 5226330 5226335 +
gttatacacaatgttaaggcat

SEQ ID NO: 84724 - DNA, 22 bp, Artificial Sequence
  Synthetic oligonucleotide; TTG chr11 5226314 5226335 5226331 5226336 +
ttatacacaatgttaaggcatt

SEQ ID NO: 84725 - DNA, 22 bp, Artificial Sequence
  Synthetic oligonucleotide; TTA chr11 5226317 5226338 5226334 5226339 +
tacacaatgttaaggcattaag

SEQ ID NO: 84726 - DNA, 22 bp, Artificial Sequence
  Synthetic oligonucleotide; TTA chr11 5226329 5226350 5226346 5226351 +
aggcattaagtataatagtaaa

SEQ ID NO: 84727 - DNA, 22 bp, Artificial Sequence
  Synthetic oligonucleotide; TTA chr11 5226337 5226358 5226354 5226359 +
agtataatagtaaaaattgcgg

SEQ ID NO: 84728 - DNA, 22 bp, Artificial Sequence
  Synthetic oligonucleotide; TTG chr11 5226356 5226377 5226373 5226378 +
cggagaagaaaaaaaaagaaag

SEQ ID NO: 84729 - DNA, 22 bp, Artificial Sequence
  Synthetic oligonucleotide; TTA chr11 5226387 5226408 5226404 5226409 +
aacaaaagaaaacaattgttat

SEQ ID NO: 84730 - DNA, 22 bp, Artificial Sequence
  Synthetic oligonucleotide; TTG chr11 5226405 5226426 5226422 5226427 +
ttatgaacagcaaataaaagaa

SEQ ID NO: 84731 - DNA, 22 bp, Artificial Sequence
  Synthetic oligonucleotide; TTA chr11 5226408 5226429 5226425 5226430 +
tgaacagcaaataaaagaaact

SEQ ID NO: 84732 - DNA, 22 bp, Artificial Sequence
  Synthetic oligonucleotide; CTA chr11 5226431 5226452 5226448 5226453 +
aaacgatcctgagacttccaca

SEQ ID NO: 84733 - DNA, 22 bp, Artificial Sequence
  Synthetic oligonucleotide; CTG chr11 5226442 5226463 5226459 5226464 +
agacttccacactgatgcaatc

SEQ ID NO: 84734 - DNA, 22 bp, Artificial Sequence
  Synthetic oligonucleotide; CTT chr11 5226448 5226469 5226465 5226470 +
ccacactgatgcaatcattcgt

SEQ ID NO: 84735 - DNA, 22 bp, Artificial Sequence
  Synthetic oligonucleotide; TTC chr11 5226449 5226470 5226466 5226471 +
cacactgatgcaatcattcgtc

SEQ ID NO: 84736 - DNA, 22 bp, Artificial Sequence
  Synthetic oligonucleotide; CTG chr11 5226456 5226477 5226473 5226478 +
atgcaatcattcgtctgtttcc

SEQ ID NO: 84737 - DNA, 22 bp, Artificial Sequence
  Synthetic oligonucleotide; TTC chr11 5226468 5226489 5226485 5226490 +
gtctgtttcccattctaaactg

SEQ ID NO: 84738 - DNA, 22 bp, Artificial Sequence
  Synthetic oligonucleotide; CTG chr11 5226473 5226494 5226490 5226495 +
tttcccattctaaactgtaccc

SEQ ID NO: 84739 - DNA, 22 bp, Artificial Sequence
  Synthetic oligonucleotide; TTT chr11 5226476 5226497 5226493 5226498 +
cccattctaaactgtaccctgt

SEQ ID NO: 84740 - DNA, 22 bp, Artificial Sequence
  Synthetic oligonucleotide; TTC chr11 5226477 5226498 5226494 5226499 +
ccattctaaactgtaccctgtt

SEQ ID NO: 84741 - DNA, 22 bp, Artificial Sequence
  Synthetic oligonucleotide; TTC chr11 5226483 5226504 5226500 5226505 +
taaactgtaccctgttacttat

SEQ ID NO: 84742 - DNA, 22 bp, Artificial Sequence
  Synthetic oligonucleotide; CTA chr11 5226485 5226506 5226502 5226507 +
aactgtaccctgttacttatcc

SEQ ID NO: 84743 - DNA, 22 bp, Artificial Sequence
  Synthetic oligonucleotide; CTG chr11 5226490 5226511 5226507 5226512 +
taccctgttacttatccccttc

SEQ ID NO: 84744 - DNA, 22 bp, Artificial Sequence
  Synthetic oligonucleotide; CTG chr11 5226497 5226518 5226514 5226519 +
ttacttatccccttcctatgac

SEQ ID NO: 84745 - DNA, 22 bp, Artificial Sequence
  Synthetic oligonucleotide; TTA chr11 5226500 5226521 5226517 5226522 +
cttatccccttcctatgacatg

SEQ ID NO: 84746 - DNA, 22 bp, Artificial Sequence
  Synthetic oligonucleotide; CTT chr11 5226503 5226524 5226520 5226525 +
atccccttcctatgacatgaac

SEQ ID NO: 84747 - DNA, 22 bp, Artificial Sequence
  Synthetic oligonucleotide; TTA chr11 5226504 5226525 5226521 5226526 +
tccccttcctatgacatgaact

SEQ ID NO: 84748 - DNA, 22 bp, Artificial Sequence
  Synthetic oligonucleotide; CTT chr11 5226511 5226532 5226528 5226533 +
cctatgacatgaacttaaccat

SEQ ID NO: 84749 - DNA, 22 bp, Artificial Sequence
  Synthetic oligonucleotide; TTC chr11 5226512 5226533 5226529 5226534 +
ctatgacatgaacttaaccata

SEQ ID NO: 84750 - DNA, 22 bp, Artificial Sequence
  Synthetic oligonucleotide; CTA chr11 5226515 5226536 5226532 5226537 +
tgacatgaacttaaccatagaa

SEQ ID NO: 84751 - DNA, 22 bp, Artificial Sequence
  Synthetic oligonucleotide; CTT chr11 5226527 5226548 5226544 5226549 +
aaccatagaaaagaaggggaaa

SEQ ID NO: 84752 - DNA, 22 bp, Artificial Sequence
  Synthetic oligonucleotide; TTA chr11 5226528 5226549 5226545 5226550 +
accatagaaaagaaggggaaag

SEQ ID NO: 84753 - DNA, 22 bp, Artificial Sequence
  Synthetic oligonucleotide; CTC chr11 5226575 5226596 5226592 5226597 +
accctgaagttctcaggatcca

SEQ ID NO: 84754 - DNA, 22 bp, Artificial Sequence
  Synthetic oligonucleotide; CTG chr11 5226581 5226602 5226598 5226603 +
aagttctcaggatccacgtgca

SEQ ID NO: 84755 - DNA, 22 bp, Artificial Sequence
  Synthetic oligonucleotide; TTC chr11 5226587 5226608 5226604 5226609 +
tcaggatccacgtgcagcttgt

SEQ ID NO: 84756 - DNA, 22 bp, Artificial Sequence
  Synthetic oligonucleotide; CTC chr11 5226589 5226610 5226606 5226611 +
aggatccacgtgcagcttgtca

SEQ ID NO: 84757 - DNA, 22 bp, Artificial Sequence
  Synthetic oligonucleotide; CTT chr11 5226607 5226628 5226624 5226629 +
gtcacagtgcagctcactcagt

SEQ ID NO: 84758 - DNA, 22 bp, Artificial Sequence
  Synthetic oligonucleotide; TTG chr11 5226608 5226629 5226625 5226630 +
tcacagtgcagctcactcagtg

SEQ ID NO: 84759 - DNA, 22 bp, Artificial Sequence
  Synthetic oligonucleotide; CTC chr11 5226622 5226643 5226639 5226644 +
actcagtgtggcaaaggtgccc

SEQ ID NO: 84760 - DNA, 22 bp, Artificial Sequence
  Synthetic oligonucleotide; CTC chr11 5226626 5226647 5226643 5226648 +
agtgtggcaaaggtgcccttga

SEQ ID NO: 84761 - DNA, 22 bp, Artificial Sequence
  Synthetic oligonucleotide; CTT chr11 5226646 5226667 5226663 5226668 +
gaggttgtccaggtgagccagg

SEQ ID NO: 84762 - DNA, 22 bp, Artificial Sequence
  Synthetic oligonucleotide; TTG chr11 5226647 5226668 5226664 5226669 +
aggttgtccaggtgagccaggc

SEQ ID NO: 84763 - DNA, 22 bp, Artificial Sequence
  Synthetic oligonucleotide; TTG chr11 5226653 5226674 5226670 5226675 +
tccaggtgagccaggccatcac

SEQ ID NO: 84764 - DNA, 22 bp, Artificial Sequence
  Synthetic oligonucleotide; CTA chr11 5226677 5226698 5226694 5226699 +
aaggcaccgagcactttcttgc

SEQ ID NO: 84765 - DNA, 22 bp, Artificial Sequence
  Synthetic oligonucleotide; CTT chr11 5226693 5226714 5226710 5226715 +
tcttgccatgagccttcacctt

SEQ ID NO: 84766 - DNA, 22 bp, Artificial Sequence
  Synthetic oligonucleotide; TTT chr11 5226694 5226715 5226711 5226716 +
cttgccatgagccttcacctta

SEQ ID NO: 84767 - DNA, 22 bp, Artificial Sequence
  Synthetic oligonucleotide; TTC chr11 5226695 5226716 5226712 5226717 +
ttgccatgagccttcaccttag

SEQ ID NO: 84768 - DNA, 22 bp, Artificial Sequence
  Synthetic oligonucleotide; CTT chr11 5226697 5226718 5226714 5226719 +
gccatgagccttcaccttaggg

SEQ ID NO: 84769 - DNA, 22 bp, Artificial Sequence
  Synthetic oligonucleotide; TTG chr11 5226698 5226719 5226715 5226720 +
ccatgagccttcaccttagggt

SEQ ID NO: 84770 - DNA, 22 bp, Artificial Sequence
  Synthetic oligonucleotide; CTT chr11 5226709 5226730 5226726 5226731 +
caccttagggttgcccataaca

SEQ ID NO: 84771 - DNA, 22 bp, Artificial Sequence
  Synthetic oligonucleotide; TTC chr11 5226710 5226731 5226727 5226732 +
accttagggttgcccataacag

SEQ ID NO: 84772 - DNA, 22 bp, Artificial Sequence
  Synthetic oligonucleotide; CTT chr11 5226715 5226736 5226732 5226737 +
agggttgcccataacagcatca

SEQ ID NO: 84773 - DNA, 22 bp, Artificial Sequence
  Synthetic oligonucleotide; TTA chr11 5226716 5226737 5226733 5226738 +
gggttgcccataacagcatcag

SEQ ID NO: 84774 - DNA, 22 bp, Artificial Sequence
  Synthetic oligonucleotide; TTG chr11 5226722 5226743 5226739 5226744 +
cccataacagcatcaggagtgg

SEQ ID NO: 84775 - DNA, 22 bp, Artificial Sequence
  Synthetic oligonucleotide; CTC chr11 5226763 5226784 5226780 5226785 +
aaagaacctctgggtccaaggg

SEQ ID NO: 84776 - DNA, 22 bp, Artificial Sequence
  Synthetic oligonucleotide; CTC chr11 5226773 5226794 5226790 5226795 +
tgggtccaagggtagaccacca

SEQ ID NO: 84777 - DNA, 22 bp, Artificial Sequence
  Synthetic oligonucleotide; CTG chr11 5226775 5226796 5226792 5226797 +
ggtccaagggtagaccaccagc

SEQ ID NO: 84778 - DNA, 22 bp, Artificial Sequence
  Synthetic oligonucleotide; CTA chr11 5226803 5226824 5226820 5226825 +
agggtgggaaaatagaccaata

SEQ ID NO: 84779 - DNA, 22 bp, Artificial Sequence
  Synthetic oligonucleotide; CTA chr11 5226846 5226867 5226863 5226868 +
tcagaaacccaagagtcttctc

SEQ ID NO: 84780 - DNA, 22 bp, Artificial Sequence
  Synthetic oligonucleotide; CTT chr11 5226865 5226886 5226882 5226887 +
ctctgtctccacatgcccagtt

SEQ ID NO: 84781 - DNA, 22 bp, Artificial Sequence
  Synthetic oligonucleotide; TTC chr11 5226866 5226887 5226883 5226888 +
tctgtctccacatgcccagttt

SEQ ID NO: 84782 - DNA, 22 bp, Artificial Sequence
  Synthetic oligonucleotide; CTC chr11 5226868 5226889 5226885 5226890 +
tgtctccacatgcccagtttct

SEQ ID NO: 84783 - DNA, 22 bp, Artificial Sequence
  Synthetic oligonucleotide; CTG chr11 5226870 5226891 5226887 5226892 +
tctccacatgcccagtttctat

SEQ ID NO: 84784 - DNA, 22 bp, Artificial Sequence
  Synthetic oligonucleotide; CTC chr11 5226874 5226895 5226891 5226896 +
cacatgcccagtttctattggt

SEQ ID NO: 84785 - DNA, 22 bp, Artificial Sequence
  Synthetic oligonucleotide; TTT chr11 5226888 5226909 5226905 5226910 +
ctattggtctccttaaacctgt

SEQ ID NO: 84786 - DNA, 22 bp, Artificial Sequence
  Synthetic oligonucleotide; TTC chr11 5226889 5226910 5226906 5226911 +
tattggtctccttaaacctgtc

SEQ ID NO: 84787 - DNA, 22 bp, Artificial Sequence
  Synthetic oligonucleotide; CTA chr11 5226891 5226912 5226908 5226913 +
ttggtctccttaaacctgtctt

SEQ ID NO: 84788 - DNA, 22 bp, Artificial Sequence
  Synthetic oligonucleotide; TTG chr11 5226894 5226915 5226911 5226916 +
gtctccttaaacctgtcttgta

SEQ ID NO: 84789 - DNA, 22 bp, Artificial Sequence
  Synthetic oligonucleotide; CTC chr11 5226899 5226920 5226916 5226921 +
cttaaacctgtcttgtaacctt

SEQ ID NO: 84790 - DNA, 22 bp, Artificial Sequence
  Synthetic oligonucleotide; CTT chr11 5226902 5226923 5226919 5226924 +
aaacctgtcttgtaaccttgat

SEQ ID NO: 84791 - DNA, 22 bp, Artificial Sequence
  Synthetic oligonucleotide; TTA chr11 5226903 5226924 5226920 5226925 +
aacctgtcttgtaaccttgata

SEQ ID NO: 84792 - DNA, 22 bp, Artificial Sequence
  Synthetic oligonucleotide; CTG chr11 5226909 5226930 5226926 5226931 +
tcttgtaaccttgataccaacc

SEQ ID NO: 84793 - DNA, 22 bp, Artificial Sequence
  Synthetic oligonucleotide; CTT chr11 5226913 5226934 5226930 5226935 +
gtaaccttgataccaacctgcc

SEQ ID NO: 84794 - DNA, 22 bp, Artificial Sequence
  Synthetic oligonucleotide; TTG chr11 5226914 5226935 5226931 5226936 +
taaccttgataccaacctgccc

SEQ ID NO: 84795 - DNA, 22 bp, Artificial Sequence
  Synthetic oligonucleotide; CTT chr11 5226921 5226942 5226938 5226943 +
gataccaacctgcccagggcct

SEQ ID NO: 84796 - DNA, 22 bp, Artificial Sequence
  Synthetic oligonucleotide; TTG chr11 5226922 5226943 5226939 5226944 +
ataccaacctgcccagggcctc

SEQ ID NO: 84797 - DNA, 22 bp, Artificial Sequence
  Synthetic oligonucleotide; CTG chr11 5226933 5226954 5226950 5226955 +
cccagggcctcaccaccaactt

SEQ ID NO: 84798 - DNA, 22 bp, Artificial Sequence
  Synthetic oligonucleotide; CTC chr11 5226944 5226965 5226961 5226966 +
accaccaacttcatccacgttc

SEQ ID NO: 84799 - DNA, 22 bp, Artificial Sequence
  Synthetic oligonucleotide; CTT chr11 5226955 5226976 5226972 5226977 +
catccacgttcaccttgcccca

SEQ ID NO: 84800 - DNA, 22 bp, Artificial Sequence
  Synthetic oligonucleotide; TTC chr11 5226956 5226977 5226973 5226978 +
atccacgttcaccttgccccac

SEQ ID NO: 84801 - DNA, 22 bp, Artificial Sequence
  Synthetic oligonucleotide; TTC chr11 5226966 5226987 5226983 5226988 +
accttgccccacagggcagtaa

SEQ ID NO: 84802 - DNA, 22 bp, Artificial Sequence
  Synthetic oligonucleotide; CTT chr11 5226971 5226992 5226988 5226993 +
gccccacagggcagtaacggca

SEQ ID NO: 84803 - DNA, 22 bp, Artificial Sequence
  Synthetic oligonucleotide; TTG chr11 5226972 5226993 5226989 5226994 +
ccccacagggcagtaacggcag

SEQ ID NO: 84804 - DNA, 22 bp, Artificial Sequence
  Synthetic oligonucleotide; CTT chr11 5226998 5227019 5227015 5227020 +
ctcctcaggagtcagatgcacc

SEQ ID NO: 84805 - DNA, 22 bp, Artificial Sequence
  Synthetic oligonucleotide; TTC chr11 5226999 5227020 5227016 5227021 +
tcctcaggagtcagatgcacca

SEQ ID NO: 84806 - DNA, 22 bp, Artificial Sequence
  Synthetic oligonucleotide; CTC chr11 5227001 5227022 5227018 5227023 +
ctcaggagtcagatgcaccatg

SEQ ID NO: 84807 - DNA, 22 bp, Artificial Sequence
  Synthetic oligonucleotide; CTC chr11 5227004 5227025 5227021 5227026 +
aggagtcagatgcaccatggtg

SEQ ID NO: 84808 - DNA, 22 bp, Artificial Sequence
  Synthetic oligonucleotide; CTG chr11 5227030 5227051 5227047 5227052 +
tttgaggttgctagtgaacaca

SEQ ID NO: 84809 - DNA, 22 bp, Artificial Sequence
  Synthetic oligonucleotide; TTT chr11 5227033 5227054 5227050 5227055 +
gaggttgctagtgaacacagtt

SEQ ID NO: 84810 - DNA, 22 bp, Artificial Sequence
  Synthetic oligonucleotide; TTG chr11 5227034 5227055 5227051 5227056 +
aggttgctagtgaacacagttg

SEQ ID NO: 84811 - DNA, 22 bp, Artificial Sequence
  Synthetic oligonucleotide; TTG chr11 5227040 5227061 5227057 5227062 +
ctagtgaacacagttgtgtcag

SEQ ID NO: 84812 - DNA, 22 bp, Artificial Sequence
  Synthetic oligonucleotide; CTA chr11 5227043 5227064 5227060 5227065 +
gtgaacacagttgtgtcagaag

SEQ ID NO: 84813 - DNA, 22 bp, Artificial Sequence
  Synthetic oligonucleotide; TTG chr11 5227056 5227077 5227073 5227078 +
tgtcagaagcaaatgtaagcaa

SEQ ID NO: 84814 - DNA, 22 bp, Artificial Sequence
  Synthetic oligonucleotide; CTC chr11 5227088 5227109 5227105 5227110 +
tgccctgacttttatgcccagc

SEQ ID NO: 84815 - DNA, 22 bp, Artificial Sequence
  Synthetic oligonucleotide; CTG chr11 5227090 5227111 5227107 5227112 +
ccctgacttttatgcccagccc

SEQ ID NO: 84816 - DNA, 22 bp, Artificial Sequence
  Synthetic oligonucleotide; CTG chr11 5227095 5227116 5227112 5227117 +
acttttatgcccagccctggct

SEQ ID NO: 84817 - DNA, 22 bp, Artificial Sequence
  Synthetic oligonucleotide; CTT chr11 5227099 5227120 5227116 5227121 +
ttatgcccagccctggctcctg

SEQ ID NO: 84818 - DNA, 22 bp, Artificial Sequence
  Synthetic oligonucleotide; TTT chr11 5227100 5227121 5227117 5227122 +
tatgcccagccctggctcctgc

SEQ ID NO: 84819 - DNA, 22 bp, Artificial Sequence
  Synthetic oligonucleotide; TTT chr11 5227101 5227122 5227118 5227123 +
atgcccagccctggctcctgcc

SEQ ID NO: 84820 - DNA, 22 bp, Artificial Sequence
  Synthetic oligonucleotide; TTA chr11 5227102 5227123 5227119 5227124 +
tgcccagccctggctcctgccc

SEQ ID NO: 84821 - DNA, 22 bp, Artificial Sequence
  Synthetic oligonucleotide; CTG chr11 5227114 5227135 5227131 5227136 +
gctcctgccctccctgctcctg

SEQ ID NO: 84822 - DNA, 22 bp, Artificial Sequence
  Synthetic oligonucleotide; CTC chr11 5227118 5227139 5227135 5227140 +
ctgccctccctgctcctgggag

SEQ ID NO: 84823 - DNA, 22 bp, Artificial Sequence
  Synthetic oligonucleotide; CTG chr11 5227121 5227142 5227138 5227143 +
ccctccctgctcctgggagtag

SEQ ID NO: 84824 - DNA, 22 bp, Artificial Sequence
  Synthetic oligonucleotide; CTC chr11 5227126 5227147 5227143 5227148 +
cctgctcctgggagtagattgg

SEQ ID NO: 84825 - DNA, 22 bp, Artificial Sequence
  Synthetic oligonucleotide; CTG chr11 5227130 5227151 5227147 5227152 +
ctcctgggagtagattggccaa

SEQ ID NO: 84826 - DNA, 22 bp, Artificial Sequence
  Synthetic oligonucleotide; CTC chr11 5227133 5227154 5227150 5227155 +
ctgggagtagattggccaaccc

SEQ ID NO: 84827 - DNA, 22 bp, Artificial Sequence
  Synthetic oligonucleotide; CTG chr11 5227136 5227157 5227153 5227158 +
ggagtagattggccaaccctag

SEQ ID NO: 84828 - DNA, 22 bp, Artificial Sequence
  Synthetic oligonucleotide; TTG chr11 5227147 5227168 5227164 5227169 +
gccaaccctagggtgtggctcc

SEQ ID NO: 84829 - DNA, 22 bp, Artificial Sequence
  Synthetic oligonucleotide; CTA chr11 5227157 5227178 5227174 5227179 +
gggtgtggctccacagggtgag

SEQ ID NO: 84830 - DNA, 22 bp, Artificial Sequence
  Synthetic oligonucleotide; CTC chr11 5227168 5227189 5227185 5227190 +
cacagggtgaggtctaagtgat

SEQ ID NO: 84831 - DNA, 22 bp, Artificial Sequence
  Synthetic oligonucleotide; CTA chr11 5227184 5227205 5227201 5227206 +
agtgatgacagccgtacctgtc

SEQ ID NO: 84832 - DNA, 22 bp, Artificial Sequence
  Synthetic oligonucleotide; CTG chr11 5227204 5227225 5227221 5227226 +
tccttggctcttctggcactgg

SEQ ID NO: 84833 - DNA, 22 bp, Artificial Sequence
  Synthetic oligonucleotide; CTT chr11 5227209 5227230 5227226 5227231 +
ggctcttctggcactggcttag

SEQ ID NO: 84834 - DNA, 22 bp, Artificial Sequence
  Synthetic oligonucleotide; TTG chr11 5227210 5227231 5227227 5227232 +
gctcttctggcactggcttagg

SEQ ID NO: 84835 - DNA, 22 bp, Artificial Sequence
  Synthetic oligonucleotide; CTC chr11 5227214 5227235 5227231 5227236 +
ttctggcactggcttaggagtt

SEQ ID NO: 84836 - DNA, 22 bp, Artificial Sequence
  Synthetic oligonucleotide; CTT chr11 5227216 5227237 5227233 5227238 +
ctggcactggcttaggagttgg

SEQ ID NO: 84837 - DNA, 22 bp, Artificial Sequence
  Synthetic oligonucleotide; TTC chr11 5227217 5227238 5227234 5227239 +
tggcactggcttaggagttgga

SEQ ID NO: 84838 - DNA, 22 bp, Artificial Sequence
  Synthetic oligonucleotide; CTG chr11 5227219 5227240 5227236 5227241 +
gcactggcttaggagttggact

SEQ ID NO: 84839 - DNA, 22 bp, Artificial Sequence
  Synthetic oligonucleotide; CTG chr11 5227225 5227246 5227242 5227247 +
gcttaggagttggacttcaaac

SEQ ID NO: 84840 - DNA, 22 bp, Artificial Sequence
  Synthetic oligonucleotide; CTT chr11 5227229 5227250 5227246 5227251 +
aggagttggacttcaaaccctc

SEQ ID NO: 84841 - DNA, 22 bp, Artificial Sequence
  Synthetic oligonucleotide; TTA chr11 5227230 5227251 5227247 5227252 +
ggagttggacttcaaaccctca

SEQ ID NO: 84842 - DNA, 22 bp, Artificial Sequence
  Synthetic oligonucleotide; TTG chr11 5227237 5227258 5227254 5227259 +
gacttcaaaccctcagccctcc

SEQ ID NO: 84843 - DNA, 22 bp, Artificial Sequence
  Synthetic oligonucleotide; CTT chr11 5227242 5227263 5227259 5227264 +
caaaccctcagccctccctcta

SEQ ID NO: 84844 - DNA, 22 bp, Artificial Sequence
  Synthetic oligonucleotide; TTC chr11 5227243 5227264 5227260 5227265 +
aaaccctcagccctccctctaa

SEQ ID NO: 84845 - DNA, 22 bp, Artificial Sequence
  Synthetic oligonucleotide; CTC chr11 5227251 5227272 5227268 5227273 +
agccctccctctaagatatatc

SEQ ID NO: 84846 - DNA, 22 bp, Artificial Sequence
  Synthetic oligonucleotide; CTC chr11 5227258 5227279 5227275 5227280 +
cctctaagatatatctcttggc

SEQ ID NO: 84847 - DNA, 22 bp, Artificial Sequence
  Synthetic oligonucleotide; CTC chr11 5227262 5227283 5227279 5227284 +
taagatatatctcttggcccca

SEQ ID NO: 84848 - DNA, 22 bp, Artificial Sequence
  Synthetic oligonucleotide; CTA chr11 5227264 5227285 5227281 5227286 +
agatatatctcttggccccata

SEQ ID NO: 84849 - DNA, 22 bp, Artificial Sequence
  Synthetic oligonucleotide; CTC chr11 5227275 5227296 5227292 5227297 +
ttggccccataccatcagtaca

SEQ ID NO: 84850 - DNA, 22 bp, Artificial Sequence
  Synthetic oligonucleotide; CTT chr11 5227277 5227298 5227294 5227299 +
ggccccataccatcagtacaaa

SEQ ID NO: 84851 - DNA, 22 bp, Artificial Sequence
  Synthetic oligonucleotide; TTG chr11 5227278 5227299 5227295 5227300 +
gccccataccatcagtacaaat

SEQ ID NO: 84852 - DNA, 22 bp, Artificial Sequence
  Synthetic oligonucleotide; TTG chr11 5227302 5227323 5227319 5227324 +
ctactaaaaacatcctcctttg

SEQ ID NO: 84853 - DNA, 22 bp, Artificial Sequence
  Synthetic oligonucleotide; CTA chr11 5227305 5227326 5227322 5227327 +
ctaaaaacatcctcctttgcaa

SEQ ID NO: 84854 - DNA, 22 bp, Artificial Sequence
  Synthetic oligonucleotide; CTA chr11 5227308 5227329 5227325 5227330 +
aaaacatcctcctttgcaagtg

SEQ ID NO: 84855 - DNA, 22 bp, Artificial Sequence
  Synthetic oligonucleotide; CTC chr11 5227319 5227340 5227336 5227341 +
ctttgcaagtgtatttacgtaa

SEQ ID NO: 84856 - DNA, 22 bp, Artificial Sequence
  Synthetic oligonucleotide; CTT chr11 5227322 5227343 5227339 5227344 +
tgcaagtgtatttacgtaatat

SEQ ID NO: 84857 - DNA, 22 bp, Artificial Sequence
  Synthetic oligonucleotide; TTT chr11 5227323 5227344 5227340 5227345 +
gcaagtgtatttacgtaatatt

SEQ ID NO: 84858 - DNA, 22 bp, Artificial Sequence
  Synthetic oligonucleotide; TTG chr11 5227324 5227345 5227341 5227346 +
caagtgtatttacgtaatattt

SEQ ID NO: 84859 - DNA, 22 bp, Artificial Sequence
  Synthetic oligonucleotide; TTT chr11 5227335 5227356 5227352 5227357 +
acgtaatatttggaatcacagc

SEQ ID NO: 84860 - DNA, 22 bp, Artificial Sequence
  Synthetic oligonucleotide; TTA chr11 5227336 5227357 5227353 5227358 +
cgtaatatttggaatcacagct

SEQ ID NO: 84861 - DNA, 22 bp, Artificial Sequence
  Synthetic oligonucleotide; TTT chr11 5227346 5227367 5227363 5227368 +
ggaatcacagcttggtaagcat

SEQ ID NO: 84862 - DNA, 22 bp, Artificial Sequence
  Synthetic oligonucleotide; TTG chr11 5227347 5227368 5227364 5227369 +
gaatcacagcttggtaagcata

SEQ ID NO: 84863 - DNA, 22 bp, Artificial Sequence
  Synthetic oligonucleotide; CTT chr11 5227359 5227380 5227376 5227381 +
ggtaagcatattgaagatcgtt

SEQ ID NO: 84864 - DNA, 22 bp, Artificial Sequence
  Synthetic oligonucleotide; TTG chr11 5227360 5227381 5227377 5227382 +
gtaagcatattgaagatcgttt

SEQ ID NO: 84865 - DNA, 22 bp, Artificial Sequence
  Synthetic oligonucleotide; TTG chr11 5227372 5227393 5227389 5227394 +
aagatcgttttcccaattttct

SEQ ID NO: 84866 - DNA, 22 bp, Artificial Sequence
  Synthetic oligonucleotide; TTT chr11 5227382 5227403 5227399 5227404 +
tcccaattttcttattacacaa

SEQ ID NO: 84867 - DNA, 22 bp, Artificial Sequence
  Synthetic oligonucleotide; TTT chr11 5227383 5227404 5227400 5227405 +
cccaattttcttattacacaaa

SEQ ID NO: 84868 - DNA, 22 bp, Artificial Sequence
  Synthetic oligonucleotide; TTC chr11 5227384 5227405 5227401 5227406 +
ccaattttcttattacacaaat

SEQ ID NO: 84869 - DNA, 22 bp, Artificial Sequence
  Synthetic oligonucleotide; TTT chr11 5227391 5227412 5227408 5227413 +
tcttattacacaaataagaagt

SEQ ID NO: 84870 - DNA, 22 bp, Artificial Sequence
  Synthetic oligonucleotide; TTT chr11 5227392 5227413 5227409 5227414 +
cttattacacaaataagaagtt

SEQ ID NO: 84871 - DNA, 22 bp, Artificial Sequence
  Synthetic oligonucleotide; TTC chr11 5227393 5227414 5227410 5227415 +
ttattacacaaataagaagttg

SEQ ID NO: 84872 - DNA, 22 bp, Artificial Sequence
  Synthetic oligonucleotide; CTT chr11 5227395 5227416 5227412 5227417 +
attacacaaataagaagttgat

SEQ ID NO: 84873 - DNA, 22 bp, Artificial Sequence
  Synthetic oligonucleotide; TTA chr11 5227396 5227417 5227413 5227418 +
ttacacaaataagaagttgatg

SEQ ID NO: 84874 - DNA, 22 bp, Artificial Sequence
  Synthetic oligonucleotide; TTA chr11 5227399 5227420 5227416 5227421 +
cacaaataagaagttgatgcac

SEQ ID NO: 84875 - DNA, 22 bp, Artificial Sequence
  Synthetic oligonucleotide; TTG chr11 5227415 5227436 5227432 5227437 +
atgcactaaaagtggaagagtt

SEQ ID NO: 84876 - DNA, 22 bp, Artificial Sequence
  Synthetic oligonucleotide; CTA chr11 5227423 5227444 5227440 5227445 +
aaagtggaagagttttgtctac

SEQ ID NO: 84877 - DNA, 22 bp, Artificial Sequence
  Synthetic oligonucleotide; TTT chr11 5227438 5227459 5227455 5227460 +
tgtctaccataattcagctttg

SEQ ID NO: 84878 - DNA, 22 bp, Artificial Sequence
  Synthetic oligonucleotide; TTT chr11 5227439 5227460 5227456 5227461 +
gtctaccataattcagctttgg

SEQ ID NO: 84879 - DNA, 22 bp, Artificial Sequence
  Synthetic oligonucleotide; TTG chr11 5227440 5227461 5227457 5227462 +
tctaccataattcagctttggg

SEQ ID NO: 84880 - DNA, 22 bp, Artificial Sequence
  Synthetic oligonucleotide; CTA chr11 5227444 5227465 5227461 5227466 +
ccataattcagctttgggatat

SEQ ID NO: 84881 - DNA, 22 bp, Artificial Sequence
  Synthetic oligonucleotide; TTC chr11 5227453 5227474 5227470 5227475 +
agctttgggatatgtagatgga

SEQ ID NO: 84882 - DNA, 22 bp, Artificial Sequence
  Synthetic oligonucleotide; CTT chr11 5227458 5227479 5227475 5227480 +
tgggatatgtagatggatctct

SEQ ID NO: 84883 - DNA, 22 bp, Artificial Sequence
  Synthetic oligonucleotide; TTT chr11 5227459 5227480 5227476 5227481 +
gggatatgtagatggatctctt

SEQ ID NO: 84884 - DNA, 22 bp, Artificial Sequence
  Synthetic oligonucleotide; TTG chr11 5227460 5227481 5227477 5227482 +
ggatatgtagatggatctcttc

SEQ ID NO: 84885 - DNA, 22 bp, Artificial Sequence
  Synthetic oligonucleotide; CTC chr11 5227479 5227500 5227496 5227501 +
ttcctgcgtctccagaatatgc

SEQ ID NO: 84886 - DNA, 22 bp, Artificial Sequence
  Synthetic oligonucleotide; CTT chr11 5227481 5227502 5227498 5227503 +
cctgcgtctccagaatatgcaa

SEQ ID NO: 84887 - DNA, 22 bp, Artificial Sequence
  Synthetic oligonucleotide; TTC chr11 5227482 5227503 5227499 5227504 +
ctgcgtctccagaatatgcaaa

SEQ ID NO: 84888 - DNA, 22 bp, Artificial Sequence
  Synthetic oligonucleotide; CTG chr11 5227485 5227506 5227502 5227507 +
cgtctccagaatatgcaaaata

SEQ ID NO: 84889 - DNA, 22 bp, Artificial Sequence
  Synthetic oligonucleotide; CTC chr11 5227491 5227512 5227508 5227513 +
cagaatatgcaaaatacttaca

SEQ ID NO: 84890 - DNA, 22 bp, Artificial Sequence
  Synthetic oligonucleotide; CTT chr11 5227510 5227531 5227527 5227532 +
acaggacagaatggatgaaaac

SEQ ID NO: 84891 - DNA, 22 bp, Artificial Sequence
  Synthetic oligonucleotide; TTA chr11 5227511 5227532 5227528 5227533 +
caggacagaatggatgaaaact

SEQ ID NO: 84892 - DNA, 22 bp, Artificial Sequence
  Synthetic oligonucleotide; CTC chr11 5227534 5227555 5227551 5227556 +
tacctcggttctaagcatatct

SEQ ID NO: 84893 - DNA, 22 bp, Artificial Sequence
  Synthetic oligonucleotide; CTA chr11 5227536 5227557 5227553 5227558 +
cctcggttctaagcatatcttc

SEQ ID NO: 84894 - DNA, 22 bp, Artificial Sequence
  Synthetic oligonucleotide; CTC chr11 5227540 5227561 5227557 5227562 +
ggttctaagcatatcttctcct

SEQ ID NO: 84895 - DNA, 22 bp, Artificial Sequence
  Synthetic oligonucleotide; TTC chr11 5227545 5227566 5227562 5227567 +
taagcatatcttctccttattt

SEQ ID NO: 84896 - DNA, 22 bp, Artificial Sequence
  Synthetic oligonucleotide; CTA chr11 5227547 5227568 5227564 5227569 +
agcatatcttctccttatttgg

SEQ ID NO: 84897 - DNA, 22 bp, Artificial Sequence
  Synthetic oligonucleotide; CTT chr11 5227557 5227578 5227574 5227579 +
ctccttatttggattaaaacct

SEQ ID NO: 84898 - DNA, 22 bp, Artificial Sequence
  Synthetic oligonucleotide; TTC chr11 5227558 5227579 5227575 5227580 +
tccttatttggattaaaacctt

SEQ ID NO: 84899 - DNA, 22 bp, Artificial Sequence
  Synthetic oligonucleotide; CTC chr11 5227560 5227581 5227577 5227582 +
cttatttggattaaaaccttct

SEQ ID NO: 84900 - DNA, 22 bp, Artificial Sequence
  Synthetic oligonucleotide; CTT chr11 5227563 5227584 5227580 5227585 +
atttggattaaaaccttctggt

SEQ ID NO: 84901 - DNA, 22 bp, Artificial Sequence
  Synthetic oligonucleotide; TTA chr11 5227564 5227585 5227581 5227586 +
tttggattaaaaccttctggta

SEQ ID NO: 84902 - DNA, 22 bp, Artificial Sequence
  Synthetic oligonucleotide; TTT chr11 5227567 5227588 5227584 5227589 +
ggattaaaaccttctggtaaga

SEQ ID NO: 84903 - DNA, 22 bp, Artificial Sequence
  Synthetic oligonucleotide; TTG chr11 5227568 5227589 5227585 5227590 +
gattaaaaccttctggtaagaa

SEQ ID NO: 84904 - DNA, 22 bp, Artificial Sequence
  Synthetic oligonucleotide; TTA chr11 5227573 5227594 5227590 5227595 +
aaaccttctggtaagaaaagaa

SEQ ID NO: 84905 - DNA, 22 bp, Artificial Sequence
  Synthetic oligonucleotide; CTT chr11 5227580 5227601 5227597 5227602 +
ctggtaagaaaagaaaaaatat

SEQ ID NO: 84906 - DNA, 22 bp, Artificial Sequence
  Synthetic oligonucleotide; TTC chr11 5227581 5227602 5227598 5227603 +
tggtaagaaaagaaaaaatata

SEQ ID NO: 84907 - DNA, 22 bp, Artificial Sequence
  Synthetic oligonucleotide; CTG chr11 5227583 5227604 5227600 5227605 +
gtaagaaaagaaaaaatatata

SEQ ID NO: 84908 - DNA, 22 bp, Artificial Sequence
  Synthetic oligonucleotide; TTC chr11 5227654 5227675 5227671 5227676 +
atttgttgttgtttttcttaat

SEQ ID NO: 84909 - DNA, 22 bp, Artificial Sequence
  Synthetic oligonucleotide; TTT chr11 5227658 5227679 5227675 5227680 +
gttgttgtttttcttaatttgc

SEQ ID NO: 84910 - DNA, 22 bp, Artificial Sequence
  Synthetic oligonucleotide; TTG chr11 5227659 5227680 5227676 5227681 +
ttgttgtttttcttaatttgct

SEQ ID NO: 84911 - DNA, 22 bp, Artificial Sequence
  Synthetic oligonucleotide; TTG chr11 5227662 5227683 5227679 5227684 +
ttgtttttcttaatttgctcat

SEQ ID NO: 84912 - DNA, 22 bp, Artificial Sequence
  Synthetic oligonucleotide; TTG chr11 5227665 5227686 5227682 5227687 +
tttttcttaatttgctcatgca

SEQ ID NO: 84913 - DNA, 22 bp, Artificial Sequence
  Synthetic oligonucleotide; TTT chr11 5227668 5227689 5227685 5227690 +
ttcttaatttgctcatgcatgc

SEQ ID NO: 84914 - DNA, 22 bp, Artificial Sequence
  Synthetic oligonucleotide; TTT chr11 5227669 5227690 5227686 5227691 +
tcttaatttgctcatgcatgct

SEQ ID NO: 84915 - DNA, 22 bp, Artificial Sequence
  Synthetic oligonucleotide; TTT chr11 5227670 5227691 5227687 5227692 +
cttaatttgctcatgcatgcta

SEQ ID NO: 84916 - DNA, 22 bp, Artificial Sequence
  Synthetic oligonucleotide; TTC chr11 5227671 5227692 5227688 5227693 +
ttaatttgctcatgcatgctaa

SEQ ID NO: 84917 - DNA, 22 bp, Artificial Sequence
  Synthetic oligonucleotide; CTT chr11 5227673 5227694 5227690 5227695 +
aatttgctcatgcatgctaata

SEQ ID NO: 84918 - DNA, 22 bp, Artificial Sequence
  Synthetic oligonucleotide; TTA chr11 5227674 5227695 5227691 5227696 +
atttgctcatgcatgctaataa

SEQ ID NO: 84919 - DNA, 22 bp, Artificial Sequence
  Synthetic oligonucleotide; TTT chr11 5227678 5227699 5227695 5227700 +
gctcatgcatgctaataaatta

SEQ ID NO: 84920 - DNA, 22 bp, Artificial Sequence
  Synthetic oligonucleotide; TTG chr11 5227679 5227700 5227696 5227701 +
ctcatgcatgctaataaattat

SEQ ID NO: 84921 - DNA, 22 bp, Artificial Sequence
  Synthetic oligonucleotide; CTC chr11 5227682 5227703 5227699 5227704 +
atgcatgctaataaattatgtc

SEQ ID NO: 84922 - DNA, 22 bp, Artificial Sequence
  Synthetic oligonucleotide; CTA chr11 5227692 5227713 5227709 5227714 +
ataaattatgtctaaaaataga

SEQ ID NO: 84923 - DNA, 22 bp, Artificial Sequence
  Synthetic oligonucleotide; TTA chr11 5227700 5227721 5227717 5227722 +
tgtctaaaaatagaataaatac

SEQ ID NO: 84924 - DNA, 22 bp, Artificial Sequence
  Synthetic oligonucleotide; CTA chr11 5227706 5227727 5227723 5227728 +
aaaatagaataaatacaaatca

SEQ ID NO: 84925 - DNA, 22 bp, Artificial Sequence
  Synthetic oligonucleotide; CTC chr11 5227736 5227757 5227753 5227758 +
tgtgcattagttacttattagg

SEQ ID NO: 84926 - DNA, 22 bp, Artificial Sequence
  Synthetic oligonucleotide; CTG chr11 5227738 5227759 5227755 5227760 +
tgcattagttacttattaggtt

SEQ ID NO: 84927 - DNA, 22 bp, Artificial Sequence
  Synthetic oligonucleotide; TTA chr11 5227745 5227766 5227762 5227767 +
gttacttattaggttttgggaa

SEQ ID NO: 84928 - DNA, 22 bp, Artificial Sequence
  Synthetic oligonucleotide; TTA chr11 5227749 5227770 5227766 5227771 +
cttattaggttttgggaaacaa

SEQ ID NO: 84929 - DNA, 22 bp, Artificial Sequence
  Synthetic oligonucleotide; CTT chr11 5227752 5227773 5227769 5227774 +
attaggttttgggaaacaagag

SEQ ID NO: 84930 - DNA, 22 bp, Artificial Sequence
  Synthetic oligonucleotide; TTA chr11 5227753 5227774 5227770 5227775 +
ttaggttttgggaaacaagaga

SEQ ID NO: 84931 - DNA, 22 bp, Artificial Sequence
  Synthetic oligonucleotide; TTA chr11 5227756 5227777 5227773 5227778 +
ggttttgggaaacaagagataa

SEQ ID NO: 84932 - DNA, 22 bp, Artificial Sequence
  Synthetic oligonucleotide; TTT chr11 5227761 5227782 5227778 5227783 +
tgggaaacaagagataaaaaac

SEQ ID NO: 84933 - DNA, 22 bp, Artificial Sequence
  Synthetic oligonucleotide; TTT chr11 5227762 5227783 5227779 5227784 +
gggaaacaagagataaaaaact

SEQ ID NO: 84934 - DNA, 22 bp, Artificial Sequence
  Synthetic oligonucleotide; TTG chr11 5227763 5227784 5227780 5227785 +
ggaaacaagagataaaaaacta

SEQ ID NO: 84935 - DNA, 22 bp, Artificial Sequence
  Synthetic oligonucleotide; CTA chr11 5227785 5227806 5227802 5227807 +
gagacctcttaatgcagtcaaa

SEQ ID NO: 84936 - DNA, 22 bp, Artificial Sequence
  Synthetic oligonucleotide; CTC chr11 5227793 5227814 5227810 5227815 +
ttaatgcagtcaaaaatacaaa

SEQ ID NO: 84937 - DNA, 22 bp, Artificial Sequence
  Synthetic oligonucleotide; CTT chr11 5227795 5227816 5227812 5227817 +
aatgcagtcaaaaatacaaata

SEQ ID NO: 84938 - DNA, 22 bp, Artificial Sequence
  Synthetic oligonucleotide; TTA chr11 5227796 5227817 5227813 5227818 +
atgcagtcaaaaatacaaataa

SEQ ID NO: 84939 - DNA, 22 bp, Artificial Sequence
  Synthetic oligonucleotide; CTT chr11 5227832 5227853 5227849 5227854 +
acaacccaaagtgtgactatca

SEQ ID NO: 84940 - DNA, 22 bp, Artificial Sequence
  Synthetic oligonucleotide; TTA chr11 5227833 5227854 5227850 5227855 +
caacccaaagtgtgactatcaa

SEQ ID NO: 84941 - DNA, 22 bp, Artificial Sequence
  Synthetic oligonucleotide; CTA chr11 5227851 5227872 5227868 5227873 +
tcaatggggtaatcagtggtgt

SEQ ID NO: 84942 - DNA, 22 bp, Artificial Sequence
  Synthetic oligonucleotide; TTA chr11 5227887 5227908 5227904 5227909 +
actggggacatctaactgtttc

SEQ ID NO: 84943 - DNA, 22 bp, Artificial Sequence
  Synthetic oligonucleotide; CTG chr11 5227891 5227912 5227908 5227913 +
gggacatctaactgtttctgcc

SEQ ID NO: 84944 - DNA, 22 bp, Artificial Sequence
  Synthetic oligonucleotide; CTA chr11 5227901 5227922 5227918 5227923 +
actgtttctgcctggactaatc

SEQ ID NO: 84945 - DNA, 22 bp, Artificial Sequence
  Synthetic oligonucleotide; CTG chr11 5227905 5227926 5227922 5227927 +
tttctgcctggactaatctgca

SEQ ID NO: 84946 - DNA, 22 bp, Artificial Sequence
  Synthetic oligonucleotide; TTT chr11 5227908 5227929 5227925 5227930 +
ctgcctggactaatctgcaaga

SEQ ID NO: 84947 - DNA, 22 bp, Artificial Sequence
  Synthetic oligonucleotide; TTC chr11 5227909 5227930 5227926 5227931 +
tgcctggactaatctgcaagag

SEQ ID NO: 84948 - DNA, 22 bp, Artificial Sequence
  Synthetic oligonucleotide; CTG chr11 5227911 5227932 5227928 5227933 +
cctggactaatctgcaagagtg

SEQ ID NO: 84949 - DNA, 22 bp, Artificial Sequence
  Synthetic oligonucleotide; CTG chr11 5227915 5227936 5227932 5227937 +
gactaatctgcaagagtgtctg

SEQ ID NO: 84950 - DNA, 22 bp, Artificial Sequence
  Synthetic oligonucleotide; CTA chr11 5227920 5227941 5227937 5227942 +
atctgcaagagtgtctggggga

SEQ ID NO: 84951 - DNA, 22 bp, Artificial Sequence
  Synthetic oligonucleotide; CTG chr11 5227925 5227946 5227942 5227947 +
caagagtgtctgggggaacaaa

SEQ ID NO: 84952 - DNA, 22 bp, Artificial Sequence
  Synthetic oligonucleotide; CTG chr11 5227937 5227958 5227954 5227959 +
ggggaacaaaaagcctctgtga

SEQ ID NO: 84953 - DNA, 22 bp, Artificial Sequence
  Synthetic oligonucleotide; CTC chr11 5227954 5227975 5227971 5227976 +
tgtgacttagaaagtaggggta

SEQ ID NO: 84954 - DNA, 22 bp, Artificial Sequence
  Synthetic oligonucleotide; CTG chr11 5227956 5227977 5227973 5227978 +
tgacttagaaagtaggggtagg

SEQ ID NO: 84955 - DNA, 22 bp, Artificial Sequence
  Synthetic oligonucleotide; CTT chr11 5227962 5227983 5227979 5227984 +
agaaagtaggggtaggagggga

SEQ ID NO: 84956 - DNA, 22 bp, Artificial Sequence
  Synthetic oligonucleotide; TTA chr11 5227963 5227984 5227980 5227985 +
gaaagtaggggtaggaggggaa

SEQ ID NO: 84957 - DNA, 22 bp, Artificial Sequence
  Synthetic oligonucleotide; CTT chr11 5227993 5228014 5228010 5228015 +
ctacttggctcagattattttt

SEQ ID NO: 84958 - DNA, 22 bp, Artificial Sequence
  Synthetic oligonucleotide; TTC chr11 5227994 5228015 5228011 5228016 +
tacttggctcagattatttttt

SEQ ID NO: 84959 - DNA, 22 bp, Artificial Sequence
  Synthetic oligonucleotide; CTA chr11 5227996 5228017 5228013 5228018 +
cttggctcagattatttttttc

SEQ ID NO: 84960 - DNA, 22 bp, Artificial Sequence
  Synthetic oligonucleotide; CTT chr11 5227999 5228020 5228016 5228021 +
ggctcagattatttttttcctc

SEQ ID NO: 84961 - DNA, 22 bp, Artificial Sequence
  Synthetic oligonucleotide; TTG chr11 5228000 5228021 5228017 5228022 +
gctcagattatttttttcctct

SEQ ID NO: 84962 - DNA, 22 bp, Artificial Sequence
  Synthetic oligonucleotide; CTC chr11 5228004 5228025 5228021 5228026 +
agattatttttttcctctagtc

SEQ ID NO: 84963 - DNA, 22 bp, Artificial Sequence
  Synthetic oligonucleotide; TTA chr11 5228010 5228031 5228027 5228032 +
tttttttcctctagtccactaa

SEQ ID NO: 84964 - DNA, 22 bp, Artificial Sequence
  Synthetic oligonucleotide; TTT chr11 5228013 5228034 5228030 5228035 +
ttttcctctagtccactaagaa

SEQ ID NO: 84965 - DNA, 22 bp, Artificial Sequence
  Synthetic oligonucleotide; TTT chr11 5228014 5228035 5228031 5228036 +
tttcctctagtccactaagaat

SEQ ID NO: 84966 - DNA, 22 bp, Artificial Sequence
  Synthetic oligonucleotide; TTT chr11 5228015 5228036 5228032 5228037 +
ttcctctagtccactaagaata

SEQ ID NO: 84967 - DNA, 22 bp, Artificial Sequence
  Synthetic oligonucleotide; TTT chr11 5228016 5228037 5228033 5228038 +
tcctctagtccactaagaatac

SEQ ID NO: 84968 - DNA, 22 bp, Artificial Sequence
  Synthetic oligonucleotide; TTT chr11 5228017 5228038 5228034 5228039 +
cctctagtccactaagaatact

SEQ ID NO: 84969 - DNA, 22 bp, Artificial Sequence
  Synthetic oligonucleotide; TTC chr11 5228018 5228039 5228035 5228040 +
ctctagtccactaagaatactg

SEQ ID NO: 84970 - DNA, 22 bp, Artificial Sequence
  Synthetic oligonucleotide; CTC chr11 5228021 5228042 5228038 5228043 +
tagtccactaagaatactgcgt

SEQ ID NO: 84971 - DNA, 22 bp, Artificial Sequence
  Synthetic oligonucleotide; CTA chr11 5228023 5228044 5228040 5228045 +
gtccactaagaatactgcgttt

SEQ ID NO: 84972 - DNA, 22 bp, Artificial Sequence
  Synthetic oligonucleotide; CTA chr11 5228031 5228052 5228048 5228053 +
agaatactgcgttttaaaatca

SEQ ID NO: 84973 - DNA, 22 bp, Artificial Sequence
  Synthetic oligonucleotide; CTG chr11 5228040 5228061 5228057 5228062 +
cgttttaaaatcatttccttga

SEQ ID NO: 84974 - DNA, 22 bp, Artificial Sequence
  Synthetic oligonucleotide; TTT chr11 5228045 5228066 5228062 5228067 +
taaaatcatttccttgattcaa

SEQ ID NO: 84975 - DNA, 22 bp, Artificial Sequence
  Synthetic oligonucleotide; TTT chr11 5228046 5228067 5228063 5228068 +
aaaatcatttccttgattcaag

SEQ ID NO: 84976 - DNA, 22 bp, Artificial Sequence
  Synthetic oligonucleotide; TTA chr11 5228047 5228068 5228064 5228069 +
aaatcatttccttgattcaagt

SEQ ID NO: 84977 - DNA, 22 bp, Artificial Sequence
  Synthetic oligonucleotide; TTT chr11 5228056 5228077 5228073 5228078 +
ccttgattcaagttcctatttc

SEQ ID NO: 84978 - DNA, 22 bp, Artificial Sequence
  Synthetic oligonucleotide; TTC chr11 5228057 5228078 5228074 5228079 +
cttgattcaagttcctatttct

SEQ ID NO: 84979 - DNA, 22 bp, Artificial Sequence
  Synthetic oligonucleotide; CTT chr11 5228060 5228081 5228077 5228082 +
gattcaagttcctatttctctt

SEQ ID NO: 84980 - DNA, 22 bp, Artificial Sequence
  Synthetic oligonucleotide; TTG chr11 5228061 5228082 5228078 5228083 +
attcaagttcctatttctcttt

SEQ ID NO: 84981 - DNA, 22 bp, Artificial Sequence
  Synthetic oligonucleotide; TTC chr11 5228065 5228086 5228082 5228087 +
aagttcctatttctctttatat

SEQ ID NO: 84982 - DNA, 22 bp, Artificial Sequence
  Synthetic oligonucleotide; TTC chr11 5228071 5228092 5228088 5228093 +
ctatttctctttatattttgtt

SEQ ID NO: 84983 - DNA, 22 bp, Artificial Sequence
  Synthetic oligonucleotide; CTA chr11 5228074 5228095 5228091 5228096 +
tttctctttatattttgtttgt

SEQ ID NO: 84984 - DNA, 22 bp, Artificial Sequence
  Synthetic oligonucleotide; TTT chr11 5228077 5228098 5228094 5228099 +
ctctttatattttgtttgttta

SEQ ID NO: 84985 - DNA, 22 bp, Artificial Sequence
  Synthetic oligonucleotide; TTC chr11 5228078 5228099 5228095 5228100 +
tctttatattttgtttgtttaa

SEQ ID NO: 84986 - DNA, 22 bp, Artificial Sequence
  Synthetic oligonucleotide; CTC chr11 5228080 5228101 5228097 5228102 +
tttatattttgtttgtttaaac

SEQ ID NO: 84987 - DNA, 22 bp, Artificial Sequence
  Synthetic oligonucleotide; CTT chr11 5228082 5228103 5228099 5228104 +
tatattttgtttgtttaaacct

SEQ ID NO: 84988 - DNA, 22 bp, Artificial Sequence
  Synthetic oligonucleotide; TTT chr11 5228083 5228104 5228100 5228105 +
atattttgtttgtttaaacctc

SEQ ID NO: 84989 - DNA, 22 bp, Artificial Sequence
  Synthetic oligonucleotide; TTA chr11 5228084 5228105 5228101 5228106 +
tattttgtttgtttaaacctcc

SEQ ID NO: 84990 - DNA, 22 bp, Artificial Sequence
  Synthetic oligonucleotide; TTT chr11 5228089 5228110 5228106 5228111 +
tgtttgtttaaacctcctttac

SEQ ID NO: 84991 - DNA, 22 bp, Artificial Sequence
  Synthetic oligonucleotide; TTT chr11 5228090 5228111 5228107 5228112 +
gtttgtttaaacctcctttact

SEQ ID NO: 84992 - DNA, 22 bp, Artificial Sequence
  Synthetic oligonucleotide; TTG chr11 5228091 5228112 5228108 5228113 +
tttgtttaaacctcctttacta

SEQ ID NO: 84993 - DNA, 22 bp, Artificial Sequence
  Synthetic oligonucleotide; TTT chr11 5228094 5228115 5228111 5228116 +
gtttaaacctcctttactaaaa

SEQ ID NO: 84994 - DNA, 22 bp, Artificial Sequence
  Synthetic oligonucleotide; TTG chr11 5228095 5228116 5228112 5228117 +
tttaaacctcctttactaaaat

SEQ ID NO: 84995 - DNA, 22 bp, Artificial Sequence
  Synthetic oligonucleotide; TTT chr11 5228098 5228119 5228115 5228120 +
aaacctcctttactaaaattta

SEQ ID NO: 84996 - DNA, 22 bp, Artificial Sequence
  Synthetic oligonucleotide; TTA chr11 5228099 5228120 5228116 5228121 +
aacctcctttactaaaatttac

SEQ ID NO: 84997 - DNA, 22 bp, Artificial Sequence
  Synthetic oligonucleotide; CTC chr11 5228105 5228126 5228122 5228127 +
ctttactaaaatttactcttct

SEQ ID NO: 84998 - DNA, 22 bp, Artificial Sequence
  Synthetic oligonucleotide; CTT chr11 5228108 5228129 5228125 5228130 +
tactaaaatttactcttctttc

SEQ ID NO: 84999 - DNA, 22 bp, Artificial Sequence
  Synthetic oligonucleotide; TTT chr11 5228109 5228130 5228126 5228131 +
actaaaatttactcttctttct

SEQ ID NO: 85000 - DNA, 22 bp, Artificial Sequence
  Synthetic oligonucleotide; TTA chr11 5228110 5228131 5228127 5228132 +
ctaaaatttactcttctttctc

SEQ ID NO: 85001 - DNA, 22 bp, Artificial Sequence
  Synthetic oligonucleotide; CTA chr11 5228113 5228134 5228130 5228135 +
aaatttactcttctttctctat

SEQ ID NO: 85002 - DNA, 22 bp, Artificial Sequence
  Synthetic oligonucleotide; TTT chr11 5228119 5228140 5228136 5228141 +
actcttctttctctatagcttc

SEQ ID NO: 85003 - DNA, 22 bp, Artificial Sequence
  Synthetic oligonucleotide; TTA chr11 5228120 5228141 5228137 5228142 +
ctcttctttctctatagcttcc

SEQ ID NO: 85004 - DNA, 22 bp, Artificial Sequence
  Synthetic oligonucleotide; CTC chr11 5228123 5228144 5228140 5228145 +
ttctttctctatagcttcccaa

SEQ ID NO: 85005 - DNA, 22 bp, Artificial Sequence
  Synthetic oligonucleotide; CTT chr11 5228125 5228146 5228142 5228147 +
ctttctctatagcttcccaacg

SEQ ID NO: 85006 - DNA, 22 bp, Artificial Sequence
  Synthetic oligonucleotide; TTC chr11 5228126 5228147 5228143 5228148 +
tttctctatagcttcccaacgt

SEQ ID NO: 85007 - DNA, 22 bp, Artificial Sequence
  Synthetic oligonucleotide; CTT chr11 5228128 5228149 5228145 5228150 +
tctctatagcttcccaacgtga

SEQ ID NO: 85008 - DNA, 22 bp, Artificial Sequence
  Synthetic oligonucleotide; TTT chr11 5228129 5228150 5228146 5228151 +
ctctatagcttcccaacgtgat

SEQ ID NO: 85009 - DNA, 22 bp, Artificial Sequence
  Synthetic oligonucleotide; TTC chr11 5228130 5228151 5228147 5228152 +
tctatagcttcccaacgtgatc

SEQ ID NO: 85010 - DNA, 22 bp, Artificial Sequence
  Synthetic oligonucleotide; CTC chr11 5228132 5228153 5228149 5228154 +
tatagcttcccaacgtgatcgc

SEQ ID NO: 85011 - DNA, 22 bp, Artificial Sequence
  Synthetic oligonucleotide; CTA chr11 5228134 5228155 5228151 5228156 +
tagcttcccaacgtgatcgcct

SEQ ID NO: 85012 - DNA, 22 bp, Artificial Sequence
  Synthetic oligonucleotide; CTT chr11 5228140 5228161 5228157 5228162 +
cccaacgtgatcgcctttctcc

SEQ ID NO: 85013 - DNA, 22 bp, Artificial Sequence
  Synthetic oligonucleotide; TTC chr11 5228141 5228162 5228158 5228163 +
ccaacgtgatcgcctttctccc

SEQ ID NO: 85014 - DNA, 22 bp, Artificial Sequence
  Synthetic oligonucleotide; CTT chr11 5228157 5228178 5228174 5228179 +
tctcccatccccctgtactttt

SEQ ID NO: 85015 - DNA, 22 bp, Artificial Sequence
  Synthetic oligonucleotide; TTT chr11 5228158 5228179 5228175 5228180 +
ctcccatccccctgtacttttt

SEQ ID NO: 85016 - DNA, 22 bp, Artificial Sequence
  Synthetic oligonucleotide; TTC chr11 5228159 5228180 5228176 5228181 +
tcccatccccctgtactttttc

SEQ ID NO: 85017 - DNA, 22 bp, Artificial Sequence
  Synthetic oligonucleotide; CTC chr11 5228161 5228182 5228178 5228183 +
ccatccccctgtactttttccc

SEQ ID NO: 85018 - DNA, 22 bp, Artificial Sequence
  Synthetic oligonucleotide; CTG chr11 5228172 5228193 5228189 5228194 +
tactttttccccttgtactaaa

SEQ ID NO: 85019 - DNA, 22 bp, Artificial Sequence
  Synthetic oligonucleotide; CTT chr11 5228177 5228198 5228194 5228199 +
tttccccttgtactaaattaac

SEQ ID NO: 85020 - DNA, 22 bp, Artificial Sequence
  Synthetic oligonucleotide; TTT chr11 5228178 5228199 5228195 5228200 +
ttccccttgtactaaattaact

SEQ ID NO: 85021 - DNA, 22 bp, Artificial Sequence
  Synthetic oligonucleotide; TTT chr11 5228179 5228200 5228196 5228201 +
tccccttgtactaaattaactc

SEQ ID NO: 85022 - DNA, 22 bp, Artificial Sequence
  Synthetic oligonucleotide; TTT chr11 5228180 5228201 5228197 5228202 +
ccccttgtactaaattaactcc

SEQ ID NO: 85023 - DNA, 22 bp, Artificial Sequence
  Synthetic oligonucleotide; TTC chr11 5228181 5228202 5228198 5228203 +
cccttgtactaaattaactcct

SEQ ID NO: 85024 - DNA, 22 bp, Artificial Sequence
  Synthetic oligonucleotide; CTT chr11 5228186 5228207 5228203 5228208 +
gtactaaattaactcctcaggt

SEQ ID NO: 85025 - DNA, 22 bp, Artificial Sequence
  Synthetic oligonucleotide; TTG chr11 5228187 5228208 5228204 5228209 +
tactaaattaactcctcaggtg

SEQ ID NO: 85026 - DNA, 22 bp, Artificial Sequence
  Synthetic oligonucleotide; CTA chr11 5228192 5228213 5228209 5228214 +
aattaactcctcaggtgaggaa

SEQ ID NO: 85027 - DNA, 22 bp, Artificial Sequence
  Synthetic oligonucleotide; TTA chr11 5228197 5228218 5228214 5228219 +
actcctcaggtgaggaaaaact

SEQ ID NO: 85028 - DNA, 22 bp, Artificial Sequence
  Synthetic oligonucleotide; CTC chr11 5228201 5228222 5228218 5228223 +
ctcaggtgaggaaaaacttttg

SEQ ID NO: 85029 - DNA, 22 bp, Artificial Sequence
  Synthetic oligonucleotide; CTC chr11 5228204 5228225 5228221 5228226 +
aggtgaggaaaaacttttgaag

SEQ ID NO: 85030 - DNA, 22 bp, Artificial Sequence
  Synthetic oligonucleotide; CTT chr11 5228220 5228241 5228237 5228242 +
ttgaagtgcagagttctgcttc

SEQ ID NO: 85031 - DNA, 22 bp, Artificial Sequence
  Synthetic oligonucleotide; TTT chr11 5228221 5228242 5228238 5228243 +
tgaagtgcagagttctgcttcc

SEQ ID NO: 85032 - DNA, 22 bp, Artificial Sequence
  Synthetic oligonucleotide; TTT chr11 5228222 5228243 5228239 5228244 +
gaagtgcagagttctgcttcct

SEQ ID NO: 85033 - DNA, 22 bp, Artificial Sequence
  Synthetic oligonucleotide; TTG chr11 5228223 5228244 5228240 5228245 +
aagtgcagagttctgcttcctg

SEQ ID NO: 85034 - DNA, 22 bp, Artificial Sequence
  Synthetic oligonucleotide; TTC chr11 5228236 5228257 5228253 5228258 +
tgcttcctgctattaaaagatg

SEQ ID NO: 85035 - DNA, 22 bp, Artificial Sequence
  Synthetic oligonucleotide; CTG chr11 5228238 5228259 5228255 5228260 +
cttcctgctattaaaagatgta

SEQ ID NO: 85036 - DNA, 22 bp, Artificial Sequence
  Synthetic oligonucleotide; CTT chr11 5228241 5228262 5228258 5228263 +
cctgctattaaaagatgtaatt

SEQ ID NO: 85037 - DNA, 22 bp, Artificial Sequence
  Synthetic oligonucleotide; TTC chr11 5228242 5228263 5228259 5228264 +
ctgctattaaaagatgtaatta

SEQ ID NO: 85038 - DNA, 22 bp, Artificial Sequence
  Synthetic oligonucleotide; CTG chr11 5228245 5228266 5228262 5228267 +
ctattaaaagatgtaattaaaa

SEQ ID NO: 85039 - DNA, 22 bp, Artificial Sequence
  Synthetic oligonucleotide; CTA chr11 5228248 5228269 5228265 5228270 +
ttaaaagatgtaattaaaacag

SEQ ID NO: 85040 - DNA, 22 bp, Artificial Sequence
  Synthetic oligonucleotide; TTA chr11 5228251 5228272 5228268 5228273 +
aaagatgtaattaaaacagcaa

SEQ ID NO: 85041 - DNA, 22 bp, Artificial Sequence
  Synthetic oligonucleotide; TTA chr11 5228264 5228285 5228281 5228286 +
aaacagcaaaggtagcaagcat

SEQ ID NO: 85042 - DNA, 22 bp, Artificial Sequence
  Synthetic oligonucleotide; TTT chr11 5228288 5228309 5228305 5228310 +
atgaggtcagcgtagggtctca

SEQ ID NO: 85043 - DNA, 22 bp, Artificial Sequence
  Synthetic oligonucleotide; TTA chr11 5228289 5228310 5228306 5228311 +
tgaggtcagcgtagggtctcag

SEQ ID NO: 85044 - DNA, 22 bp, Artificial Sequence
  Synthetic oligonucleotide; CTC chr11 5228309 5228330 5228326 5228331 +
agtgttccctaagggccctgtc

SEQ ID NO: 85045 - DNA, 22 bp, Artificial Sequence
  Synthetic oligonucleotide; TTC chr11 5228316 5228337 5228333 5228338 +
cctaagggccctgtcagtcatc

SEQ ID NO: 85046 - DNA, 22 bp, Artificial Sequence
  Synthetic oligonucleotide; CTA chr11 5228320 5228341 5228337 5228342 +
agggccctgtcagtcatcctga

SEQ ID NO: 85047 - DNA, 22 bp, Artificial Sequence
  Synthetic oligonucleotide; CTG chr11 5228329 5228350 5228346 5228351 +
tcagtcatcctgaatcctgccc

SEQ ID NO: 85048 - DNA, 22 bp, Artificial Sequence
  Synthetic oligonucleotide; CTG chr11 5228341 5228362 5228358 5228363 +
aatcctgcccctacctggaaac

SEQ ID NO: 85049 - DNA, 22 bp, Artificial Sequence
  Synthetic oligonucleotide; CTG chr11 5228348 5228369 5228365 5228370 +
cccctacctggaaacccatgtc

SEQ ID NO: 85050 - DNA, 22 bp, Artificial Sequence
  Synthetic oligonucleotide; CTA chr11 5228354 5228375 5228371 5228376 +
cctggaaacccatgtcggttta

SEQ ID NO: 85051 - DNA, 22 bp, Artificial Sequence
  Synthetic oligonucleotide; CTG chr11 5228358 5228379 5228375 5228380 +
gaaacccatgtcggtttagtaa

SEQ ID NO: 85052 - DNA, 22 bp, Artificial Sequence
  Synthetic oligonucleotide; TTT chr11 5228375 5228396 5228392 5228397 +
agtaaggaaagtgttatacttt

SEQ ID NO: 85053 - DNA, 22 bp, Artificial Sequence
  Synthetic oligonucleotide; TTA chr11 5228376 5228397 5228393 5228398 +
gtaaggaaagtgttatactttt

SEQ ID NO: 85054 - DNA, 22 bp, Artificial Sequence
  Synthetic oligonucleotide; TTA chr11 5228391 5228412 5228408 5228413 +
tacttttactttgcatgtttct

SEQ ID NO: 85055 - DNA, 22 bp, Artificial Sequence
  Synthetic oligonucleotide; CTT chr11 5228396 5228417 5228413 5228418 +
ttactttgcatgtttctcctac

SEQ ID NO: 85056 - DNA, 22 bp, Artificial Sequence
  Synthetic oligonucleotide; TTT chr11 5228397 5228418 5228414 5228419 +
tactttgcatgtttctcctact

SEQ ID NO: 85057 - DNA, 22 bp, Artificial Sequence
  Synthetic oligonucleotide; TTT chr11 5228398 5228419 5228415 5228420 +
actttgcatgtttctcctactt

SEQ ID NO: 85058 - DNA, 22 bp, Artificial Sequence
  Synthetic oligonucleotide; TTA chr11 5228399 5228420 5228416 5228421 +
ctttgcatgtttctcctacttc

SEQ ID NO: 85059 - DNA, 22 bp, Artificial Sequence
  Synthetic oligonucleotide; CTT chr11 5228402 5228423 5228419 5228424 +
tgcatgtttctcctacttcttc

SEQ ID NO: 85060 - DNA, 22 bp, Artificial Sequence
  Synthetic oligonucleotide; TTT chr11 5228403 5228424 5228420 5228425 +
gcatgtttctcctacttcttcc

SEQ ID NO: 85061 - DNA, 22 bp, Artificial Sequence
  Synthetic oligonucleotide; TTG chr11 5228404 5228425 5228421 5228426 +
catgtttctcctacttcttcct

SEQ ID NO: 85062 - DNA, 22 bp, Artificial Sequence
  Synthetic oligonucleotide; TTT chr11 5228411 5228432 5228428 5228433 +
ctcctacttcttcctttcagct

SEQ ID NO: 85063 - DNA, 22 bp, Artificial Sequence
  Synthetic oligonucleotide; TTC chr11 5228412 5228433 5228429 5228434 +
tcctacttcttcctttcagctc

SEQ ID NO: 85064 - DNA, 22 bp, Artificial Sequence
  Synthetic oligonucleotide; CTC chr11 5228414 5228435 5228431 5228436 +
ctacttcttcctttcagctcta

SEQ ID NO: 85065 - DNA, 22 bp, Artificial Sequence
  Synthetic oligonucleotide; CTA chr11 5228417 5228438 5228434 5228439 +
cttcttcctttcagctctaaca

SEQ ID NO: 85066 - DNA, 22 bp, Artificial Sequence
  Synthetic oligonucleotide; CTT chr11 5228420 5228441 5228437 5228442 +
cttcctttcagctctaacactc

SEQ ID NO: 85067 - DNA, 22 bp, Artificial Sequence
  Synthetic oligonucleotide; TTC chr11 5228421 5228442 5228438 5228443 +
ttcctttcagctctaacactct

SEQ ID NO: 85068 - DNA, 22 bp, Artificial Sequence
  Synthetic oligonucleotide; CTT chr11 5228423 5228444 5228440 5228445 +
cctttcagctctaacactctga

SEQ ID NO: 85069 - DNA, 22 bp, Artificial Sequence
  Synthetic oligonucleotide; TTC chr11 5228424 5228445 5228441 5228446 +
ctttcagctctaacactctgaa

SEQ ID NO: 85070 - DNA, 22 bp, Artificial Sequence
  Synthetic oligonucleotide; CTT chr11 5228427 5228448 5228444 5228449 +
tcagctctaacactctgaaact

SEQ ID NO: 85071 - DNA, 22 bp, Artificial Sequence
  Synthetic oligonucleotide; TTT chr11 5228428 5228449 5228445 5228450 +
cagctctaacactctgaaacta

SEQ ID NO: 85072 - DNA, 22 bp, Artificial Sequence
  Synthetic oligonucleotide; TTC chr11 5228429 5228450 5228446 5228451 +
agctctaacactctgaaactac

SEQ ID NO: 85073 - DNA, 22 bp, Artificial Sequence
  Synthetic oligonucleotide; CTC chr11 5228434 5228455 5228451 5228456 +
taacactctgaaactacgatta

SEQ ID NO: 85074 - DNA, 22 bp, Artificial Sequence
  Synthetic oligonucleotide; CTA chr11 5228436 5228457 5228453 5228458 +
acactctgaaactacgattaca

SEQ ID NO: 85075 - DNA, 22 bp, Artificial Sequence
  Synthetic oligonucleotide; CTC chr11 5228442 5228463 5228459 5228464 +
tgaaactacgattacacaaaat

SEQ ID NO: 85076 - DNA, 22 bp, Artificial Sequence
  Synthetic oligonucleotide; CTG chr11 5228444 5228465 5228461 5228466 +
aaactacgattacacaaaataa

SEQ ID NO: 85077 - DNA, 22 bp, Artificial Sequence
  Synthetic oligonucleotide; CTA chr11 5228450 5228471 5228467 5228472 +
cgattacacaaaataaaataaa

SEQ ID NO: 85078 - DNA, 22 bp, Artificial Sequence
  Synthetic oligonucleotide; TTA chr11 5228456 5228477 5228473 5228478 +
cacaaaataaaataaaataaaa

SEQ ID NO: 85079 - DNA, 22 bp, Artificial Sequence
  Synthetic oligonucleotide; TTT chr11 5228509 5228530 5228526 5228531 +
aggttaaccaaaagaaactgga

SEQ ID NO: 85080 - DNA, 22 bp, Artificial Sequence
  Synthetic oligonucleotide; TTA chr11 5228510 5228531 5228527 5228532 +
ggttaaccaaaagaaactggat

SEQ ID NO: 85081 - DNA, 22 bp, Artificial Sequence
  Synthetic oligonucleotide; TTA chr11 5228515 5228536 5228532 5228537 +
accaaaagaaactggatcctct

SEQ ID NO: 85082 - DNA, 22 bp, Artificial Sequence
  Synthetic oligonucleotide; CTG chr11 5228529 5228550 5228546 5228551 +
gatcctctatttctagttatca

SEQ ID NO: 85083 - DNA, 22 bp, Artificial Sequence
  Synthetic oligonucleotide; CTC chr11 5228536 5228557 5228553 5228558 +
tatttctagttatcagaaggaa

SEQ ID NO: 85084 - DNA, 22 bp, Artificial Sequence
  Synthetic oligonucleotide; CTA chr11 5228538 5228559 5228555 5228560 +
tttctagttatcagaaggaaat

SEQ ID NO: 85085 - DNA, 22 bp, Artificial Sequence
  Synthetic oligonucleotide; TTT chr11 5228541 5228562 5228558 5228563 +
ctagttatcagaaggaaattta

SEQ ID NO: 85086 - DNA, 22 bp, Artificial Sequence
  Synthetic oligonucleotide; TTC chr11 5228542 5228563 5228559 5228564 +
tagttatcagaaggaaatttac

SEQ ID NO: 85087 - DNA, 22 bp, Artificial Sequence
  Synthetic oligonucleotide; CTA chr11 5228544 5228565 5228561 5228566 +
gttatcagaaggaaatttacaa

SEQ ID NO: 85088 - DNA, 22 bp, Artificial Sequence
  Synthetic oligonucleotide; TTA chr11 5228548 5228569 5228565 5228570 +
tcagaaggaaatttacaaattt

SEQ ID NO: 85089 - DNA, 22 bp, Artificial Sequence
  Synthetic oligonucleotide; TTT chr11 5228562 5228583 5228579 5228584 +
acaaatttcttatttccattgc

SEQ ID NO: 85090 - DNA, 22 bp, Artificial Sequence
  Synthetic oligonucleotide; TTA chr11 5228563 5228584 5228580 5228585 +
caaatttcttatttccattgct

SEQ ID NO: 85091 - DNA, 22 bp, Artificial Sequence
  Synthetic oligonucleotide; TTT chr11 5228570 5228591 5228587 5228592 +
cttatttccattgctttattct

SEQ ID NO: 85092 - DNA, 22 bp, Artificial Sequence
  Synthetic oligonucleotide; TTC chr11 5228571 5228592 5228588 5228593 +
ttatttccattgctttattctc

SEQ ID NO: 85093 - DNA, 22 bp, Artificial Sequence
  Synthetic oligonucleotide; CTT chr11 5228573 5228594 5228590 5228595 +
atttccattgctttattctctt

SEQ ID NO: 85094 - DNA, 22 bp, Artificial Sequence
  Synthetic oligonucleotide; TTA chr11 5228574 5228595 5228591 5228596 +
tttccattgctttattctctta

SEQ ID NO: 85095 - DNA, 22 bp, Artificial Sequence
  Synthetic oligonucleotide; TTT chr11 5228577 5228598 5228594 5228599 +
ccattgctttattctcttaaat

SEQ ID NO: 85096 - DNA, 22 bp, Artificial Sequence
  Synthetic oligonucleotide; TTC chr11 5228578 5228599 5228595 5228600 +
cattgctttattctcttaaatg

SEQ ID NO: 85097 - DNA, 22 bp, Artificial Sequence
  Synthetic oligonucleotide; TTG chr11 5228583 5228604 5228600 5228605 +
ctttattctcttaaatgctttc

SEQ ID NO: 85098 - DNA, 22 bp, Artificial Sequence
  Synthetic oligonucleotide; CTT chr11 5228586 5228607 5228603 5228608 +
tattctcttaaatgctttctct

SEQ ID NO: 85099 - DNA, 22 bp, Artificial Sequence
  Synthetic oligonucleotide; TTT chr11 5228587 5228608 5228604 5228609 +
attctcttaaatgctttctcta

SEQ ID NO: 85100 - DNA, 22 bp, Artificial Sequence
  Synthetic oligonucleotide; TTA chr11 5228588 5228609 5228605 5228610 +
ttctcttaaatgctttctctat

SEQ ID NO: 85101 - DNA, 22 bp, Artificial Sequence
  Synthetic oligonucleotide; TTC chr11 5228591 5228612 5228608 5228613 +
tcttaaatgctttctctattat

SEQ ID NO: 85102 - DNA, 22 bp, Artificial Sequence
  Synthetic oligonucleotide; CTC chr11 5228593 5228614 5228610 5228615 +
ttaaatgctttctctattattg

SEQ ID NO: 85103 - DNA, 22 bp, Artificial Sequence
  Synthetic oligonucleotide; CTT chr11 5228595 5228616 5228612 5228617 +
aaatgctttctctattattgct

SEQ ID NO: 85104 - DNA, 22 bp, Artificial Sequence
  Synthetic oligonucleotide; TTA chr11 5228596 5228617 5228613 5228618 +
aatgctttctctattattgcta

SEQ ID NO: 85105 - DNA, 22 bp, Artificial Sequence
  Synthetic oligonucleotide; CTT chr11 5228603 5228624 5228620 5228625 +
tctctattattgctaaataaat

SEQ ID NO: 85106 - DNA, 22 bp, Artificial Sequence
  Synthetic oligonucleotide; TTT chr11 5228604 5228625 5228621 5228626 +
ctctattattgctaaataaata

SEQ ID NO: 85107 - DNA, 22 bp, Artificial Sequence
  Synthetic oligonucleotide; TTC chr11 5228605 5228626 5228622 5228627 +
tctattattgctaaataaatag

SEQ ID NO: 85108 - DNA, 22 bp, Artificial Sequence
  Synthetic oligonucleotide; CTC chr11 5228607 5228628 5228624 5228629 +
tattattgctaaataaatagag

SEQ ID NO: 85109 - DNA, 22 bp, Artificial Sequence
  Synthetic oligonucleotide; CTA chr11 5228609 5228630 5228626 5228631 +
ttattgctaaataaatagagat

SEQ ID NO: 85110 - DNA, 22 bp, Artificial Sequence
  Synthetic oligonucleotide; TTA chr11 5228612 5228633 5228629 5228634 +
ttgctaaataaatagagatctc

SEQ ID NO: 85111 - DNA, 22 bp, Artificial Sequence
  Synthetic oligonucleotide; TTG chr11 5228615 5228636 5228632 5228637 +
ctaaataaatagagatctctca

SEQ ID NO: 85112 - DNA, 22 bp, Artificial Sequence
  Synthetic oligonucleotide; CTA chr11 5228618 5228639 5228635 5228640 +
aataaatagagatctctcactt

SEQ ID NO: 85113 - DNA, 22 bp, Artificial Sequence
  Synthetic oligonucleotide; CTC chr11 5228634 5228655 5228651 5228656 +
tcactttttctacctgtctcaa

SEQ ID NO: 85114 - DNA, 22 bp, Artificial Sequence
  Synthetic oligonucleotide; CTC chr11 5228636 5228657 5228653 5228658 +
actttttctacctgtctcaacc

SEQ ID NO: 85115 - DNA, 22 bp, Artificial Sequence
  Synthetic oligonucleotide; CTT chr11 5228640 5228661 5228657 5228662 +
tttctacctgtctcaaccctca

SEQ ID NO: 85116 - DNA, 22 bp, Artificial Sequence
  Synthetic oligonucleotide; TTT chr11 5228641 5228662 5228658 5228663 +
ttctacctgtctcaaccctcat

SEQ ID NO: 85117 - DNA, 22 bp, Artificial Sequence
  Synthetic oligonucleotide; TTT chr11 5228642 5228663 5228659 5228664 +
tctacctgtctcaaccctcatc

SEQ ID NO: 85118 - DNA, 22 bp, Artificial Sequence
  Synthetic oligonucleotide; TTT chr11 5228643 5228664 5228660 5228665 +
ctacctgtctcaaccctcatca

SEQ ID NO: 85119 - DNA, 22 bp, Artificial Sequence
  Synthetic oligonucleotide; TTC chr11 5228644 5228665 5228661 5228666 +
tacctgtctcaaccctcatcag

SEQ ID NO: 85120 - DNA, 22 bp, Artificial Sequence
  Synthetic oligonucleotide; CTA chr11 5228646 5228667 5228663 5228668 +
cctgtctcaaccctcatcaggt

SEQ ID NO: 85121 - DNA, 22 bp, Artificial Sequence
  Synthetic oligonucleotide; CTG chr11 5228650 5228671 5228667 5228672 +
tctcaaccctcatcaggtactt

SEQ ID NO: 85122 - DNA, 22 bp, Artificial Sequence
  Synthetic oligonucleotide; CTC chr11 5228654 5228675 5228671 5228676 +
aaccctcatcaggtacttgtga

SEQ ID NO: 85123 - DNA, 22 bp, Artificial Sequence
  Synthetic oligonucleotide; CTC chr11 5228661 5228682 5228678 5228683 +
atcaggtacttgtgaaaaaatc

SEQ ID NO: 85124 - DNA, 22 bp, Artificial Sequence
  Synthetic oligonucleotide; CTT chr11 5228672 5228693 5228689 5228694 +
gtgaaaaaatctcactctgatt

SEQ ID NO: 85125 - DNA, 22 bp, Artificial Sequence
  Synthetic oligonucleotide; TTG chr11 5228673 5228694 5228690 5228695 +
tgaaaaaatctcactctgatta

SEQ ID NO: 85126 - DNA, 22 bp, Artificial Sequence
  Synthetic oligonucleotide; CTC chr11 5228685 5228706 5228702 5228707 +
actctgattattctcacacacg

SEQ ID NO: 85127 - DNA, 22 bp, Artificial Sequence
  Synthetic oligonucleotide; CTC chr11 5228689 5228710 5228706 5228711 +
tgattattctcacacacgcaga

SEQ ID NO: 85128 - DNA, 22 bp, Artificial Sequence
  Synthetic oligonucleotide; CTG chr11 5228691 5228712 5228708 5228713 +
attattctcacacacgcagaaa

SEQ ID NO: 85129 - DNA, 22 bp, Artificial Sequence
  Synthetic oligonucleotide; TTA chr11 5228695 5228716 5228712 5228717 +
ttctcacacacgcagaaagtgt

SEQ ID NO: 85130 - DNA, 22 bp, Artificial Sequence
  Synthetic oligonucleotide; TTC chr11 5228698 5228719 5228715 5228720 +
tcacacacgcagaaagtgtttg

SEQ ID NO: 85131 - DNA, 22 bp, Artificial Sequence
  Synthetic oligonucleotide; CTC chr11 5228700 5228721 5228717 5228722 +
acacacgcagaaagtgtttggt

SEQ ID NO: 85132 - DNA, 22 bp, Artificial Sequence
  Synthetic oligonucleotide; TTT chr11 5228719 5228740 5228736 5228741 +
ggttcttctatggctatctgga

SEQ ID NO: 85133 - DNA, 22 bp, Artificial Sequence
  Synthetic oligonucleotide; TTG chr11 5228720 5228741 5228737 5228742 +
gttcttctatggctatctggag

SEQ ID NO: 85134 - DNA, 22 bp, Artificial Sequence
  Synthetic oligonucleotide; TTC chr11 5228724 5228745 5228741 5228746 +
ttctatggctatctggagccta

SEQ ID NO: 85135 - DNA, 22 bp, Artificial Sequence
  Synthetic oligonucleotide; CTT chr11 5228726 5228747 5228743 5228748 +
ctatggctatctggagcctagg

SEQ ID NO: 85136 - DNA, 22 bp, Artificial Sequence
  Synthetic oligonucleotide; TTC chr11 5228727 5228748 5228744 5228749 +
tatggctatctggagcctaggt

SEQ ID NO: 85137 - DNA, 22 bp, Artificial Sequence
  Synthetic oligonucleotide; CTA chr11 5228729 5228750 5228746 5228751 +
tggctatctggagcctaggtta

SEQ ID NO: 85138 - DNA, 22 bp, Artificial Sequence
  Synthetic oligonucleotide; CTA chr11 5228735 5228756 5228752 5228757 +
tctggagcctaggttaaaaaat

SEQ ID NO: 85139 - DNA, 22 bp, Artificial Sequence
  Synthetic oligonucleotide; CTG chr11 5228739 5228760 5228756 5228761 +
gagcctaggttaaaaaattatg

SEQ ID NO: 85140 - DNA, 22 bp, Artificial Sequence
  Synthetic oligonucleotide; CTA chr11 5228746 5228767 5228763 5228768 +
ggttaaaaaattatgcctatgt

SEQ ID NO: 85141 - DNA, 22 bp, Artificial Sequence
  Synthetic oligonucleotide; TTA chr11 5228751 5228772 5228768 5228773 +
aaaaattatgcctatgtatgat

SEQ ID NO: 85142 - DNA, 22 bp, Artificial Sequence
  Synthetic oligonucleotide; TTA chr11 5228759 5228780 5228776 5228781 +
tgcctatgtatgattatagagg

SEQ ID NO: 85143 - DNA, 22 bp, Artificial Sequence
  Synthetic oligonucleotide; CTA chr11 5228765 5228786 5228782 5228787 +
tgtatgattatagaggtaagag

SEQ ID NO: 85144 - DNA, 22 bp, Artificial Sequence
  Synthetic oligonucleotide; TTA chr11 5228775 5228796 5228792 5228797 +
tagaggtaagagggataaaatt

SEQ ID NO: 85145 - DNA, 22 bp, Artificial Sequence
  Synthetic oligonucleotide; TTT chr11 5228798 5228819 5228815 5228820 +
aagtattttctttttatattca

SEQ ID NO: 85146 - DNA, 22 bp, Artificial Sequence
  Synthetic oligonucleotide; TTA chr11 5228799 5228820 5228816 5228821 +
agtattttctttttatattcat

SEQ ID NO: 85147 - DNA, 22 bp, Artificial Sequence
  Synthetic oligonucleotide; TTT chr11 5228806 5228827 5228823 5228828 +
tctttttatattcattcctctg

SEQ ID NO: 85148 - DNA, 22 bp, Artificial Sequence
  Synthetic oligonucleotide; TTT chr11 5228807 5228828 5228824 5228829 +
ctttttatattcattcctctgt

SEQ ID NO: 85149 - DNA, 22 bp, Artificial Sequence
  Synthetic oligonucleotide; TTC chr11 5228808 5228829 5228825 5228830 +
tttttatattcattcctctgta

SEQ ID NO: 85150 - DNA, 22 bp, Artificial Sequence
  Synthetic oligonucleotide; CTT chr11 5228810 5228831 5228827 5228832 +
tttatattcattcctctgtaaa

SEQ ID NO: 85151 - DNA, 22 bp, Artificial Sequence
  Synthetic oligonucleotide; TTT chr11 5228811 5228832 5228828 5228833 +
ttatattcattcctctgtaaaa

SEQ ID NO: 85152 - DNA, 22 bp, Artificial Sequence
  Synthetic oligonucleotide; TTT chr11 5228812 5228833 5228829 5228834 +
tatattcattcctctgtaaaaa

SEQ ID NO: 85153 - DNA, 22 bp, Artificial Sequence
  Synthetic oligonucleotide; TTT chr11 5228813 5228834 5228830 5228835 +
atattcattcctctgtaaaaaa

SEQ ID NO: 85154 - DNA, 22 bp, Artificial Sequence
  Synthetic oligonucleotide; TTA chr11 5228814 5228835 5228831 5228836 +
tattcattcctctgtaaaaaac

SEQ ID NO: 85155 - DNA, 22 bp, Artificial Sequence
  Synthetic oligonucleotide; TTC chr11 5228819 5228840 5228836 5228841 +
attcctctgtaaaaaactaaag

SEQ ID NO: 85156 - DNA, 22 bp, Artificial Sequence
  Synthetic oligonucleotide; TTC chr11 5228823 5228844 5228840 5228845 +
ctctgtaaaaaactaaagcaat

SEQ ID NO: 85157 - DNA, 22 bp, Artificial Sequence
  Synthetic oligonucleotide; CTC chr11 5228826 5228847 5228843 5228848 +
tgtaaaaaactaaagcaatgag

SEQ ID NO: 85158 - DNA, 22 bp, Artificial Sequence
  Synthetic oligonucleotide; CTG chr11 5228828 5228849 5228845 5228850 +
taaaaaactaaagcaatgagga

SEQ ID NO: 85159 - DNA, 22 bp, Artificial Sequence
  Synthetic oligonucleotide; CTA chr11 5228838 5228859 5228855 5228860 +
aagcaatgaggatctaggcaca

SEQ ID NO: 85160 - DNA, 22 bp, Artificial Sequence
  Synthetic oligonucleotide; CTA chr11 5228854 5228875 5228871 5228876 +
ggcacacgtgtatccctgagaa

SEQ ID NO: 85161 - DNA, 22 bp, Artificial Sequence
  Synthetic oligonucleotide; CTG chr11 5228872 5228893 5228889 5228894 +
agaaaagatttcacatgttgaa

SEQ ID NO: 85162 - DNA, 22 bp, Artificial Sequence
  Synthetic oligonucleotide; TTT chr11 5228883 5228904 5228900 5228905 +
cacatgttgaatcctgggaaaa

SEQ ID NO: 85163 - DNA, 22 bp, Artificial Sequence
  Synthetic oligonucleotide; TTC chr11 5228884 5228905 5228901 5228906 +
acatgttgaatcctgggaaaag

SEQ ID NO: 85164 - DNA, 22 bp, Artificial Sequence
  Synthetic oligonucleotide; TTG chr11 5228892 5228913 5228909 5228914 +
aatcctgggaaaagacgtcttt

SEQ ID NO: 85165 - DNA, 22 bp, Artificial Sequence
  Synthetic oligonucleotide; CTG chr11 5228899 5228920 5228916 5228921 +
ggaaaagacgtctttaaaatat

SEQ ID NO: 85166 - DNA, 22 bp, Artificial Sequence
  Synthetic oligonucleotide; CTT chr11 5228913 5228934 5228930 5228935 +
taaaatattttaaatgttaaaa

SEQ ID NO: 85167 - DNA, 22 bp, Artificial Sequence
  Synthetic oligonucleotide; TTT chr11 5228914 5228935 5228931 5228936 +
aaaatattttaaatgttaaaac

SEQ ID NO: 85168 - DNA, 22 bp, Artificial Sequence
  Synthetic oligonucleotide; TTA chr11 5228915 5228936 5228932 5228937 +
aaatattttaaatgttaaaaca

SEQ ID NO: 85169 - DNA, 22 bp, Artificial Sequence
  Synthetic oligonucleotide; TTT chr11 5228923 5228944 5228940 5228945 +
taaatgttaaaacatgcagatt

SEQ ID NO: 85170 - DNA, 22 bp, Artificial Sequence
  Synthetic oligonucleotide; TTT chr11 5228924 5228945 5228941 5228946 +
aaatgttaaaacatgcagattt

SEQ ID NO: 85171 - DNA, 22 bp, Artificial Sequence
  Synthetic oligonucleotide; TTA chr11 5228925 5228946 5228942 5228947 +
aatgttaaaacatgcagatttg

SEQ ID NO: 85172 - DNA, 22 bp, Artificial Sequence
  Synthetic oligonucleotide; TTA chr11 5228932 5228953 5228949 5228954 +
aaacatgcagatttgacttggc

SEQ ID NO: 85173 - DNA, 22 bp, Artificial Sequence
  Synthetic oligonucleotide; TTT chr11 5228946 5228967 5228963 5228968 +
gacttggctgttagattttgga

SEQ ID NO: 85174 - DNA, 22 bp, Artificial Sequence
  Synthetic oligonucleotide; TTG chr11 5228947 5228968 5228964 5228969 +
acttggctgttagattttggat

SEQ ID NO: 85175 - DNA, 22 bp, Artificial Sequence
  Synthetic oligonucleotide; CTT chr11 5228951 5228972 5228968 5228973 +
ggctgttagattttggatttta

SEQ ID NO: 85176 - DNA, 22 bp, Artificial Sequence
  Synthetic oligonucleotide; TTG chr11 5228952 5228973 5228969 5228974 +
gctgttagattttggattttat

SEQ ID NO: 85177 - DNA, 22 bp, Artificial Sequence
  Synthetic oligonucleotide; CTG chr11 5228956 5228977 5228973 5228978 +
ttagattttggattttatttta

SEQ ID NO: 85178 - DNA, 22 bp, Artificial Sequence
  Synthetic oligonucleotide; TTA chr11 5228959 5228980 5228976 5228981 +
gattttggattttattttatta

SEQ ID NO: 85179 - DNA, 22 bp, Artificial Sequence
  Synthetic oligonucleotide; TTT chr11 5228964 5228985 5228981 5228986 +
tggattttattttattaaattt

SEQ ID NO: 85180 - DNA, 22 bp, Artificial Sequence
  Synthetic oligonucleotide; TTT chr11 5228965 5228986 5228982 5228987 +
ggattttattttattaaattta

SEQ ID NO: 85181 - DNA, 22 bp, Artificial Sequence
  Synthetic oligonucleotide; TTG chr11 5228966 5228987 5228983 5228988 +
gattttattttattaaatttaa

SEQ ID NO: 85182 - DNA, 22 bp, Artificial Sequence
  Synthetic oligonucleotide; TTT chr11 5228971 5228992 5228988 5228993 +
tattttattaaatttaaacctg

SEQ ID NO: 85183 - DNA, 22 bp, Artificial Sequence
  Synthetic oligonucleotide; TTT chr11 5228972 5228993 5228989 5228994 +
attttattaaatttaaacctgc

SEQ ID NO: 85184 - DNA, 22 bp, Artificial Sequence
  Synthetic oligonucleotide; TTA chr11 5228973 5228994 5228990 5228995 +
ttttattaaatttaaacctgca

SEQ ID NO: 85185 - DNA, 22 bp, Artificial Sequence
  Synthetic oligonucleotide; TTT chr11 5228976 5228997 5228993 5228998 +
tattaaatttaaacctgcatta

SEQ ID NO: 85186 - DNA, 22 bp, Artificial Sequence
  Synthetic oligonucleotide; TTT chr11 5228977 5228998 5228994 5228999 +
attaaatttaaacctgcattag

SEQ ID NO: 85187 - DNA, 22 bp, Artificial Sequence
  Synthetic oligonucleotide; TTA chr11 5228978 5228999 5228995 5229000 +
ttaaatttaaacctgcattagc

SEQ ID NO: 85188 - DNA, 22 bp, Artificial Sequence
  Synthetic oligonucleotide; TTA chr11 5228981 5229002 5228998 5229003 +
aatttaaacctgcattagcatt

SEQ ID NO: 85189 - DNA, 22 bp, Artificial Sequence
  Synthetic oligonucleotide; TTT chr11 5228986 5229007 5229003 5229008 +
aaacctgcattagcattgtttt

SEQ ID NO: 85190 - DNA, 22 bp, Artificial Sequence
  Synthetic oligonucleotide; TTA chr11 5228987 5229008 5229004 5229009 +
aacctgcattagcattgtttta

SEQ ID NO: 85191 - DNA, 22 bp, Artificial Sequence
  Synthetic oligonucleotide; CTG chr11 5228993 5229014 5229010 5229015 +
cattagcattgttttagattta

SEQ ID NO: 85192 - DNA, 22 bp, Artificial Sequence
  Synthetic oligonucleotide; TTA chr11 5228998 5229019 5229015 5229020 +
gcattgttttagatttagacag

SEQ ID NO: 85193 - DNA, 22 bp, Artificial Sequence
  Synthetic oligonucleotide; TTG chr11 5229004 5229025 5229021 5229026 +
ttttagatttagacagttttca

SEQ ID NO: 85194 - DNA, 22 bp, Artificial Sequence
  Synthetic oligonucleotide; TTT chr11 5229007 5229028 5229024 5229029 +
tagatttagacagttttcaaga

SEQ ID NO: 85195 - DNA, 22 bp, Artificial Sequence
  Synthetic oligonucleotide; TTT chr11 5229008 5229029 5229025 5229030 +
agatttagacagttttcaagac

SEQ ID NO: 85196 - DNA, 22 bp, Artificial Sequence
  Synthetic oligonucleotide; TTA chr11 5229009 5229030 5229026 5229031 +
gatttagacagttttcaagacc

SEQ ID NO: 85197 - DNA, 22 bp, Artificial Sequence
  Synthetic oligonucleotide; TTT chr11 5229014 5229035 5229031 5229036 +
agacagttttcaagaccctgtt

SEQ ID NO: 85198 - DNA, 22 bp, Artificial Sequence
  Synthetic oligonucleotide; TTA chr11 5229015 5229036 5229032 5229037 +
gacagttttcaagaccctgttt

SEQ ID NO: 85199 - DNA, 22 bp, Artificial Sequence
  Synthetic oligonucleotide; TTT chr11 5229023 5229044 5229040 5229045 +
tcaagaccctgtttcacatccc

SEQ ID NO: 85200 - DNA, 22 bp, Artificial Sequence
  Synthetic oligonucleotide; TTT chr11 5229024 5229045 5229041 5229046 +
caagaccctgtttcacatccct

SEQ ID NO: 85201 - DNA, 22 bp, Artificial Sequence
  Synthetic oligonucleotide; TTC chr11 5229025 5229046 5229042 5229047 +
aagaccctgtttcacatccctg

SEQ ID NO: 85202 - DNA, 22 bp, Artificial Sequence
  Synthetic oligonucleotide; CTG chr11 5229034 5229055 5229051 5229056 +
tttcacatccctgatataagag

SEQ ID NO: 85203 - DNA, 22 bp, Artificial Sequence
  Synthetic oligonucleotide; TTT chr11 5229037 5229058 5229054 5229059 +
cacatccctgatataagaggca

SEQ ID NO: 85204 - DNA, 22 bp, Artificial Sequence
  Synthetic oligonucleotide; TTC chr11 5229038 5229059 5229055 5229060 +
acatccctgatataagaggcat

SEQ ID NO: 85205 - DNA, 22 bp, Artificial Sequence
  Synthetic oligonucleotide; CTG chr11 5229047 5229068 5229064 5229069 +
atataagaggcatgtatatgtg

SEQ ID NO: 85206 - DNA, 22 bp, Artificial Sequence
  Synthetic oligonucleotide; TTC chr11 5229082 5229103 5229099 5229104 +
tgcggaagtttgaatatgtctt

SEQ ID NO: 85207 - DNA, 22 bp, Artificial Sequence
  Synthetic oligonucleotide; CTG chr11 5229084 5229105 5229101 5229106 +
cggaagtttgaatatgtctttt

SEQ ID NO: 85208 - DNA, 22 bp, Artificial Sequence
  Synthetic oligonucleotide; TTT chr11 5229093 5229114 5229110 5229115 +
gaatatgtcttttgcaaatatc

SEQ ID NO: 85209 - DNA, 22 bp, Artificial Sequence
  Synthetic oligonucleotide; TTG chr11 5229094 5229115 5229111 5229116 +
aatatgtcttttgcaaatatcc

SEQ ID NO: 85210 - DNA, 22 bp, Artificial Sequence
  Synthetic oligonucleotide; CTT chr11 5229104 5229125 5229121 5229126 +
ttgcaaatatcctgggtcaaag

SEQ ID NO: 85211 - DNA, 22 bp, Artificial Sequence
  Synthetic oligonucleotide; TTT chr11 5229105 5229126 5229122 5229127 +
tgcaaatatcctgggtcaaaga

SEQ ID NO: 85212 - DNA, 22 bp, Artificial Sequence
  Synthetic oligonucleotide; TTT chr11 5229106 5229127 5229123 5229128 +
gcaaatatcctgggtcaaagaa

SEQ ID NO: 85213 - DNA, 22 bp, Artificial Sequence
  Synthetic oligonucleotide; TTG chr11 5229107 5229128 5229124 5229129 +
caaatatcctgggtcaaagaaa

SEQ ID NO: 85214 - DNA, 22 bp, Artificial Sequence
  Synthetic oligonucleotide; CTG chr11 5229118 5229139 5229135 5229140 +
ggtcaaagaaaatgcacagact

SEQ ID NO: 85215 - DNA, 22 bp, Artificial Sequence
  Synthetic oligonucleotide; CTT chr11 5229141 5229162 5229158 5229163 +
tatgaaattataatataggtta

SEQ ID NO: 85216 - DNA, 22 bp, Artificial Sequence
  Synthetic oligonucleotide; TTT chr11 5229142 5229163 5229159 5229164 +
atgaaattataatataggttat

SEQ ID NO: 85217 - DNA, 22 bp, Artificial Sequence
  Synthetic oligonucleotide; TTA chr11 5229143 5229164 5229160 5229165 +
tgaaattataatataggttata

SEQ ID NO: 85218 - DNA, 22 bp, Artificial Sequence
  Synthetic oligonucleotide; TTA chr11 5229151 5229172 5229168 5229173 +
taatataggttatatttatagt

SEQ ID NO: 85219 - DNA, 22 bp, Artificial Sequence
  Synthetic oligonucleotide; TTA chr11 5229163 5229184 5229180 5229185 +
tatttatagtattctgaaagac

SEQ ID NO: 85220 - DNA, 22 bp, Artificial Sequence
  Synthetic oligonucleotide; TTT chr11 5229168 5229189 5229185 5229190 +
atagtattctgaaagaccaaaa

SEQ ID NO: 85221 - DNA, 22 bp, Artificial Sequence
  Synthetic oligonucleotide; TTA chr11 5229169 5229190 5229186 5229191 +
tagtattctgaaagaccaaaat

SEQ ID NO: 85222 - DNA, 22 bp, Artificial Sequence
  Synthetic oligonucleotide; TTC chr11 5229177 5229198 5229194 5229199 +
tgaaagaccaaaattgtcaaag

SEQ ID NO: 85223 - DNA, 22 bp, Artificial Sequence
  Synthetic oligonucleotide; CTG chr11 5229179 5229200 5229196 5229201 +
aaagaccaaaattgtcaaagca

SEQ ID NO: 85224 - DNA, 22 bp, Artificial Sequence
  Synthetic oligonucleotide; TTG chr11 5229193 5229214 5229210 5229215 +
tcaaagcaagagctttgaaatc

SEQ ID NO: 85225 - DNA, 22 bp, Artificial Sequence
  Synthetic oligonucleotide; CTT chr11 5229208 5229229 5229225 5229230 +
tgaaatcctgattggcagaaat

SEQ ID NO: 85226 - DNA, 22 bp, Artificial Sequence
  Synthetic oligonucleotide; TTT chr11 5229209 5229230 5229226 5229231 +
gaaatcctgattggcagaaatt

SEQ ID NO: 85227 - DNA, 22 bp, Artificial Sequence
  Synthetic oligonucleotide; TTG chr11 5229210 5229231 5229227 5229232 +
aaatcctgattggcagaaattg

SEQ ID NO: 85228 - DNA, 22 bp, Artificial Sequence
  Synthetic oligonucleotide; CTG chr11 5229218 5229239 5229235 5229240 +
attggcagaaattgtcaccttc

SEQ ID NO: 85229 - DNA, 22 bp, Artificial Sequence
  Synthetic oligonucleotide; TTG chr11 5229222 5229243 5229239 5229244 +
gcagaaattgtcaccttcttaa

SEQ ID NO: 85230 - DNA, 22 bp, Artificial Sequence
  Synthetic oligonucleotide; TTG chr11 5229232 5229253 5229249 5229254 +
tcaccttcttaaagacttaccc

SEQ ID NO: 85231 - DNA, 22 bp, Artificial Sequence
  Synthetic oligonucleotide; CTT chr11 5229239 5229260 5229256 5229261 +
cttaaagacttaccctacaact

SEQ ID NO: 85232 - DNA, 22 bp, Artificial Sequence
  Synthetic oligonucleotide; TTC chr11 5229240 5229261 5229257 5229262 +
ttaaagacttaccctacaactt

SEQ ID NO: 85233 - DNA, 22 bp, Artificial Sequence
  Synthetic oligonucleotide; CTT chr11 5229242 5229263 5229259 5229264 +
aaagacttaccctacaacttct

SEQ ID NO: 85234 - DNA, 22 bp, Artificial Sequence
  Synthetic oligonucleotide; TTA chr11 5229243 5229264 5229260 5229265 +
aagacttaccctacaacttctt

SEQ ID NO: 85235 - DNA, 22 bp, Artificial Sequence
  Synthetic oligonucleotide; CTT chr11 5229250 5229271 5229267 5229272 +
accctacaacttcttatgctca

SEQ ID NO: 85236 - DNA, 22 bp, Artificial Sequence
  Synthetic oligonucleotide; TTA chr11 5229251 5229272 5229268 5229273 +
ccctacaacttcttatgctcag

SEQ ID NO: 85237 - DNA, 22 bp, Artificial Sequence
  Synthetic oligonucleotide; CTA chr11 5229256 5229277 5229273 5229278 +
caacttcttatgctcagaaata

SEQ ID NO: 85238 - DNA, 22 bp, Artificial Sequence
  Synthetic oligonucleotide; CTT chr11 5229262 5229283 5229279 5229284 +
cttatgctcagaaatagttttc

SEQ ID NO: 85239 - DNA, 22 bp, Artificial Sequence
  Synthetic oligonucleotide; TTC chr11 5229263 5229284 5229280 5229285 +
ttatgctcagaaatagttttcc

SEQ ID NO: 85240 - DNA, 22 bp, Artificial Sequence
  Synthetic oligonucleotide; CTT chr11 5229265 5229286 5229282 5229287 +
atgctcagaaatagttttcctt

SEQ ID NO: 85241 - DNA, 22 bp, Artificial Sequence
  Synthetic oligonucleotide; TTA chr11 5229266 5229287 5229283 5229288 +
tgctcagaaatagttttccttt

SEQ ID NO: 85242 - DNA, 22 bp, Artificial Sequence
  Synthetic oligonucleotide; CTC chr11 5229271 5229292 5229288 5229293 +
agaaatagttttcctttttcta

SEQ ID NO: 85243 - DNA, 22 bp, Artificial Sequence
  Synthetic oligonucleotide; TTT chr11 5229282 5229303 5229299 5229304 +
tcctttttctattttgttttct

SEQ ID NO: 85244 - DNA, 22 bp, Artificial Sequence
  Synthetic oligonucleotide; TTT chr11 5229283 5229304 5229300 5229305 +
cctttttctattttgttttctt

SEQ ID NO: 85245 - DNA, 22 bp, Artificial Sequence
  Synthetic oligonucleotide; TTC chr11 5229284 5229305 5229301 5229306 +
ctttttctattttgttttcttt

SEQ ID NO: 85246 - DNA, 22 bp, Artificial Sequence
  Synthetic oligonucleotide; CTT chr11 5229287 5229308 5229304 5229309 +
tttctattttgttttctttttt

SEQ ID NO: 85247 - DNA, 22 bp, Artificial Sequence
  Synthetic oligonucleotide; TTT chr11 5229288 5229309 5229305 5229310 +
ttctattttgttttctttttta

SEQ ID NO: 85248 - DNA, 22 bp, Artificial Sequence
  Synthetic oligonucleotide; TTT chr11 5229289 5229310 5229306 5229311 +
tctattttgttttcttttttaa

SEQ ID NO: 85249 - DNA, 22 bp, Artificial Sequence
  Synthetic oligonucleotide; TTT chr11 5229290 5229311 5229307 5229312 +
ctattttgttttcttttttaaa

SEQ ID NO: 85250 - DNA, 22 bp, Artificial Sequence
  Synthetic oligonucleotide; TTC chr11 5229291 5229312 5229308 5229313 +
tattttgttttcttttttaaat

SEQ ID NO: 85251 - DNA, 22 bp, Artificial Sequence
  Synthetic oligonucleotide; CTA chr11 5229293 5229314 5229310 5229315 +
ttttgttttcttttttaaatga

SEQ ID NO: 85252 - DNA, 22 bp, Artificial Sequence
  Synthetic oligonucleotide; TTT chr11 5229296 5229317 5229313 5229318 +
tgttttcttttttaaatgatga

SEQ ID NO: 85253 - DNA, 22 bp, Artificial Sequence
  Synthetic oligonucleotide; TTT chr11 5229297 5229318 5229314 5229319 +
gttttcttttttaaatgatgaa

SEQ ID NO: 85254 - DNA, 22 bp, Artificial Sequence
  Synthetic oligonucleotide; TTG chr11 5229298 5229319 5229315 5229320 +
ttttcttttttaaatgatgaac

SEQ ID NO: 85255 - DNA, 22 bp, Artificial Sequence
  Synthetic oligonucleotide; TTT chr11 5229301 5229322 5229318 5229323 +
tcttttttaaatgatgaactat

SEQ ID NO: 85256 - DNA, 22 bp, Artificial Sequence
  Synthetic oligonucleotide; TTT chr11 5229302 5229323 5229319 5229324 +
cttttttaaatgatgaactatg

SEQ ID NO: 85257 - DNA, 22 bp, Artificial Sequence
  Synthetic oligonucleotide; TTC chr11 5229303 5229324 5229320 5229325 +
ttttttaaatgatgaactatgg

SEQ ID NO: 85258 - DNA, 22 bp, Artificial Sequence
  Synthetic oligonucleotide; CTT chr11 5229305 5229326 5229322 5229327 +
ttttaaatgatgaactatggat

SEQ ID NO: 85259 - DNA, 22 bp, Artificial Sequence
  Synthetic oligonucleotide; TTT chr11 5229306 5229327 5229323 5229328 +
tttaaatgatgaactatggatc

SEQ ID NO: 85260 - DNA, 22 bp, Artificial Sequence
  Synthetic oligonucleotide; TTT chr11 5229307 5229328 5229324 5229329 +
ttaaatgatgaactatggatcc

SEQ ID NO: 85261 - DNA, 22 bp, Artificial Sequence
  Synthetic oligonucleotide; TTT chr11 5229308 5229329 5229325 5229330 +
taaatgatgaactatggatcct

SEQ ID NO: 85262 - DNA, 22 bp, Artificial Sequence
  Synthetic oligonucleotide; TTT chr11 5229309 5229330 5229326 5229331 +
aaatgatgaactatggatcctt

SEQ ID NO: 85263 - DNA, 22 bp, Artificial Sequence
  Synthetic oligonucleotide; TTA chr11 5229310 5229331 5229327 5229332 +
aatgatgaactatggatccttc

SEQ ID NO: 85264 - DNA, 22 bp, Artificial Sequence
  Synthetic oligonucleotide; CTA chr11 5229322 5229343 5229339 5229344 +
tggatccttctcttgtgttggc

SEQ ID NO: 85265 - DNA, 22 bp, Artificial Sequence
  Synthetic oligonucleotide; CTT chr11 5229331 5229352 5229348 5229353 +
ctcttgtgttggcaactgctgc

SEQ ID NO: 85266 - DNA, 22 bp, Artificial Sequence
  Synthetic oligonucleotide; TTC chr11 5229332 5229353 5229349 5229354 +
tcttgtgttggcaactgctgca

SEQ ID NO: 85267 - DNA, 22 bp, Artificial Sequence
  Synthetic oligonucleotide; CTC chr11 5229334 5229355 5229351 5229356 +
ttgtgttggcaactgctgcaga

SEQ ID NO: 85268 - DNA, 22 bp, Artificial Sequence
  Synthetic oligonucleotide; CTT chr11 5229336 5229357 5229353 5229358 +
gtgttggcaactgctgcagata

SEQ ID NO: 85269 - DNA, 22 bp, Artificial Sequence
  Synthetic oligonucleotide; TTG chr11 5229337 5229358 5229354 5229359 +
tgttggcaactgctgcagatac

SEQ ID NO: 85270 - DNA, 22 bp, Artificial Sequence
  Synthetic oligonucleotide; TTG chr11 5229342 5229363 5229359 5229364 +
gcaactgctgcagataccatca

SEQ ID NO: 85271 - DNA, 22 bp, Artificial Sequence
  Synthetic oligonucleotide; CTG chr11 5229349 5229370 5229366 5229371 +
ctgcagataccatcatcctggc

SEQ ID NO: 85272 - DNA, 22 bp, Artificial Sequence
  Synthetic oligonucleotide; CTG chr11 5229352 5229373 5229369 5229374 +
cagataccatcatcctggcttc

SEQ ID NO: 85273 - DNA, 22 bp, Artificial Sequence
  Synthetic oligonucleotide; CTG chr11 5229369 5229390 5229386 5229391 +
gcttcaaggcaggggttgcttt

SEQ ID NO: 85274 - DNA, 22 bp, Artificial Sequence
  Synthetic oligonucleotide; CTT chr11 5229373 5229394 5229390 5229395 +
caaggcaggggttgcttttcca

SEQ ID NO: 85275 - DNA, 22 bp, Artificial Sequence
  Synthetic oligonucleotide; TTC chr11 5229374 5229395 5229391 5229396 +
aaggcaggggttgcttttccaa

SEQ ID NO: 85276 - DNA, 22 bp, Artificial Sequence
  Synthetic oligonucleotide; TTG chr11 5229387 5229408 5229404 5229409 +
cttttccaatggtagttactta

SEQ ID NO: 85277 - DNA, 22 bp, Artificial Sequence
  Synthetic oligonucleotide; CTT chr11 5229390 5229411 5229407 5229412 +
ttccaatggtagttacttagtg

SEQ ID NO: 85278 - DNA, 22 bp, Artificial Sequence
  Synthetic oligonucleotide; TTT chr11 5229391 5229412 5229408 5229413 +
tccaatggtagttacttagtgt

SEQ ID NO: 85279 - DNA, 22 bp, Artificial Sequence
  Synthetic oligonucleotide; TTT chr11 5229392 5229413 5229409 5229414 +
ccaatggtagttacttagtgtg

SEQ ID NO: 85280 - DNA, 22 bp, Artificial Sequence
  Synthetic oligonucleotide; TTC chr11 5229393 5229414 5229410 5229415 +
caatggtagttacttagtgtga

SEQ ID NO: 85281 - DNA, 22 bp, Artificial Sequence
  Synthetic oligonucleotide; TTA chr11 5229405 5229426 5229422 5229427 +
cttagtgtgactagagtgtaac

SEQ ID NO: 85282 - DNA, 22 bp, Artificial Sequence
  Synthetic oligonucleotide; CTT chr11 5229408 5229429 5229425 5229430 +
agtgtgactagagtgtaacgca

SEQ ID NO: 85283 - DNA, 22 bp, Artificial Sequence
  Synthetic oligonucleotide; TTA chr11 5229409 5229430 5229426 5229431 +
gtgtgactagagtgtaacgcag

SEQ ID NO: 85284 - DNA, 22 bp, Artificial Sequence
  Synthetic oligonucleotide; CTA chr11 5229418 5229439 5229435 5229440 +
gagtgtaacgcagacttttctt

SEQ ID NO: 85285 - DNA, 22 bp, Artificial Sequence
  Synthetic oligonucleotide; CTT chr11 5229435 5229456 5229452 5229457 +
ttctttctattacccataatac

SEQ ID NO: 85286 - DNA, 22 bp, Artificial Sequence
  Synthetic oligonucleotide; TTT chr11 5229436 5229457 5229453 5229458 +
tctttctattacccataatacc

SEQ ID NO: 85287 - DNA, 22 bp, Artificial Sequence
  Synthetic oligonucleotide; TTT chr11 5229437 5229458 5229454 5229459 +
ctttctattacccataataccc

SEQ ID NO: 85288 - DNA, 22 bp, Artificial Sequence
  Synthetic oligonucleotide; TTC chr11 5229438 5229459 5229455 5229460 +
tttctattacccataataccct

SEQ ID NO: 85289 - DNA, 22 bp, Artificial Sequence
  Synthetic oligonucleotide; CTT chr11 5229440 5229461 5229457 5229462 +
tctattacccataataccctgc

SEQ ID NO: 85290 - DNA, 22 bp, Artificial Sequence
  Synthetic oligonucleotide; TTT chr11 5229441 5229462 5229458 5229463 +
ctattacccataataccctgca

SEQ ID NO: 85291 - DNA, 22 bp, Artificial Sequence
  Synthetic oligonucleotide; TTC chr11 5229442 5229463 5229459 5229464 +
tattacccataataccctgcag

SEQ ID NO: 85292 - DNA, 22 bp, Artificial Sequence
  Synthetic oligonucleotide; CTA chr11 5229444 5229465 5229461 5229466 +
ttacccataataccctgcaggg

SEQ ID NO: 85293 - DNA, 22 bp, Artificial Sequence
  Synthetic oligonucleotide; TTA chr11 5229447 5229468 5229464 5229469 +
cccataataccctgcagggaca

SEQ ID NO: 85294 - DNA, 22 bp, Artificial Sequence
  Synthetic oligonucleotide; CTG chr11 5229461 5229482 5229478 5229483 +
cagggacaaggctgcaagctat

SEQ ID NO: 85295 - DNA, 22 bp, Artificial Sequence
  Synthetic oligonucleotide; CTG chr11 5229475 5229496 5229492 5229497 +
caagctatactaagaccatcaa

SEQ ID NO: 85296 - DNA, 22 bp, Artificial Sequence
  Synthetic oligonucleotide; CTA chr11 5229482 5229503 5229499 5229504 +
tactaagaccatcaaaagccca

SEQ ID NO: 85297 - DNA, 22 bp, Artificial Sequence
  Synthetic oligonucleotide; CTA chr11 5229487 5229508 5229504 5229509 +
agaccatcaaaagcccaggcat

SEQ ID NO: 85298 - DNA, 22 bp, Artificial Sequence
  Synthetic oligonucleotide; TTT chr11 5229526 5229547 5229543 5229548 +
caagaagcaataaatagtgcaa

SEQ ID NO: 85299 - DNA, 22 bp, Artificial Sequence
  Synthetic oligonucleotide; TTC chr11 5229527 5229548 5229544 5229549 +
aagaagcaataaatagtgcaaa

SEQ ID NO: 85300 - DNA, 22 bp, Artificial Sequence
  Synthetic oligonucleotide; TTT chr11 5229552 5229573 5229569 5229574 +
ggttatggtcagagcctcagtt

SEQ ID NO: 85301 - DNA, 22 bp, Artificial Sequence
  Synthetic oligonucleotide; TTG chr11 5229553 5229574 5229570 5229575 +
gttatggtcagagcctcagttt

SEQ ID NO: 85302 - DNA, 22 bp, Artificial Sequence
  Synthetic oligonucleotide; TTA chr11 5229557 5229578 5229574 5229579 +
tggtcagagcctcagtttcaaa

SEQ ID NO: 85303 - DNA, 22 bp, Artificial Sequence
  Synthetic oligonucleotide; CTC chr11 5229570 5229591 5229587 5229592 +
agtttcaaatctaaatcagcat

SEQ ID NO: 85304 - DNA, 22 bp, Artificial Sequence
  Synthetic oligonucleotide; TTT chr11 5229575 5229596 5229592 5229597 +
caaatctaaatcagcattcaaa

SEQ ID NO: 85305 - DNA, 22 bp, Artificial Sequence
  Synthetic oligonucleotide; TTC chr11 5229576 5229597 5229593 5229598 +
aaatctaaatcagcattcaaag

SEQ ID NO: 85306 - DNA, 22 bp, Artificial Sequence
  Synthetic oligonucleotide; CTA chr11 5229583 5229604 5229600 5229605 +
aatcagcattcaaagttcctga

SEQ ID NO: 85307 - DNA, 22 bp, Artificial Sequence
  Synthetic oligonucleotide; TTC chr11 5229594 5229615 5229611 5229616 +
aaagttcctgaaaaactattca

SEQ ID NO: 85308 - DNA, 22 bp, Artificial Sequence
  Synthetic oligonucleotide; TTC chr11 5229601 5229622 5229618 5229623 +
ctgaaaaactattcaagcttac

SEQ ID NO: 85309 - DNA, 22 bp, Artificial Sequence
  Synthetic oligonucleotide; CTG chr11 5229604 5229625 5229621 5229626 +
aaaaactattcaagcttactga

SEQ ID NO: 85310 - DNA, 22 bp, Artificial Sequence
  Synthetic oligonucleotide; CTA chr11 5229612 5229633 5229629 5229634 +
ttcaagcttactgacatcttca

SEQ ID NO: 85311 - DNA, 22 bp, Artificial Sequence
  Synthetic oligonucleotide; TTC chr11 5229615 5229636 5229632 5229637 +
aagcttactgacatcttcacta

SEQ ID NO: 85312 - DNA, 22 bp, Artificial Sequence
  Synthetic oligonucleotide; CTT chr11 5229621 5229642 5229638 5229643 +
actgacatcttcactattgtga

SEQ ID NO: 85313 - DNA, 22 bp, Artificial Sequence
  Synthetic oligonucleotide; TTA chr11 5229622 5229643 5229639 5229644 +
ctgacatcttcactattgtgag

SEQ ID NO: 85314 - DNA, 22 bp, Artificial Sequence
  Synthetic oligonucleotide; CTG chr11 5229625 5229646 5229642 5229647 +
acatcttcactattgtgagctt

SEQ ID NO: 85315 - DNA, 22 bp, Artificial Sequence
  Synthetic oligonucleotide; CTT chr11 5229632 5229653 5229649 5229654 +
cactattgtgagcttgcttcta

SEQ ID NO: 85316 - DNA, 22 bp, Artificial Sequence
  Synthetic oligonucleotide; TTC chr11 5229633 5229654 5229650 5229655 +
actattgtgagcttgcttctac

SEQ ID NO: 85317 - DNA, 22 bp, Artificial Sequence
  Synthetic oligonucleotide; CTA chr11 5229637 5229658 5229654 5229659 +
ttgtgagcttgcttctactctg

SEQ ID NO: 85318 - DNA, 22 bp, Artificial Sequence
  Synthetic oligonucleotide; TTG chr11 5229640 5229661 5229657 5229662 +
tgagcttgcttctactctgtga

SEQ ID NO: 85319 - DNA, 22 bp, Artificial Sequence
  Synthetic oligonucleotide; CTT chr11 5229647 5229668 5229664 5229669 +
gcttctactctgtgaatggatg

SEQ ID NO: 85320 - DNA, 22 bp, Artificial Sequence
  Synthetic oligonucleotide; TTG chr11 5229648 5229669 5229665 5229670 +
cttctactctgtgaatggatgc

SEQ ID NO: 85321 - DNA, 22 bp, Artificial Sequence
  Synthetic oligonucleotide; CTT chr11 5229651 5229672 5229668 5229673 +
ctactctgtgaatggatgccac

SEQ ID NO: 85322 - DNA, 22 bp, Artificial Sequence
  Synthetic oligonucleotide; TTC chr11 5229652 5229673 5229669 5229674 +
tactctgtgaatggatgccaca

SEQ ID NO: 85323 - DNA, 22 bp, Artificial Sequence
  Synthetic oligonucleotide; CTA chr11 5229654 5229675 5229671 5229676 +
ctctgtgaatggatgccacagc

SEQ ID NO: 85324 - DNA, 22 bp, Artificial Sequence
  Synthetic oligonucleotide; CTC chr11 5229657 5229678 5229674 5229679 +
tgtgaatggatgccacagcagg

SEQ ID NO: 85325 - DNA, 22 bp, Artificial Sequence
  Synthetic oligonucleotide; CTG chr11 5229659 5229680 5229676 5229681 +
tgaatggatgccacagcaggtg

SEQ ID NO: 85326 - DNA, 22 bp, Artificial Sequence
  Synthetic oligonucleotide; CTA chr11 5229689 5229710 5229706 5229711 +
ttctacttttattccagcccca

SEQ ID NO: 85327 - DNA, 22 bp, Artificial Sequence
  Synthetic oligonucleotide; TTC chr11 5229692 5229713 5229709 5229714 +
tacttttattccagccccactg

SEQ ID NO: 85328 - DNA, 22 bp, Artificial Sequence
  Synthetic oligonucleotide; CTA chr11 5229694 5229715 5229711 5229716 +
cttttattccagccccactgac

SEQ ID NO: 85329 - DNA, 22 bp, Artificial Sequence
  Synthetic oligonucleotide; CTT chr11 5229697 5229718 5229714 5229719 +
ttattccagccccactgaccac

SEQ ID NO: 85330 - DNA, 22 bp, Artificial Sequence
  Synthetic oligonucleotide; TTT chr11 5229698 5229719 5229715 5229720 +
tattccagccccactgaccaca

SEQ ID NO: 85331 - DNA, 22 bp, Artificial Sequence
  Synthetic oligonucleotide; TTT chr11 5229699 5229720 5229716 5229721 +
attccagccccactgaccacaa

SEQ ID NO: 85332 - DNA, 22 bp, Artificial Sequence
  Synthetic oligonucleotide; TTA chr11 5229700 5229721 5229717 5229722 +
ttccagccccactgaccacaac

SEQ ID NO: 85333 - DNA, 22 bp, Artificial Sequence
  Synthetic oligonucleotide; TTC chr11 5229703 5229724 5229720 5229725 +
cagccccactgaccacaacaca

SEQ ID NO: 85334 - DNA, 22 bp, Artificial Sequence
  Synthetic oligonucleotide; CTG chr11 5229714 5229735 5229731 5229736 +
accacaacacacacacacacac

SEQ ID NO: 85335 - DNA, 22 bp, Artificial Sequence
  Synthetic oligonucleotide; CTC chr11 5229762 5229783 5229779 5229784 +
aaaaaagagacagcgagagaga

SEQ ID NO: 85336 - DNA, 22 bp, Artificial Sequence
  Synthetic oligonucleotide; TTT chr11 5229797 5229818 5229814 5229819 +
cctttactccagtctattaatc

SEQ ID NO: 85337 - DNA, 22 bp, Artificial Sequence
  Synthetic oligonucleotide; TTC chr11 5229798 5229819 5229815 5229820 +
ctttactccagtctattaatct

SEQ ID NO: 85338 - DNA, 22 bp, Artificial Sequence
  Synthetic oligonucleotide; CTT chr11 5229801 5229822 5229818 5229823 +
tactccagtctattaatctttc

SEQ ID NO: 85339 - DNA, 22 bp, Artificial Sequence
  Synthetic oligonucleotide; TTT chr11 5229802 5229823 5229819 5229824 +
actccagtctattaatctttct

SEQ ID NO: 85340 - DNA, 22 bp, Artificial Sequence
  Synthetic oligonucleotide; TTA chr11 5229803 5229824 5229820 5229825 +
ctccagtctattaatctttctt

SEQ ID NO: 85341 - DNA, 22 bp, Artificial Sequence
  Synthetic oligonucleotide; CTC chr11 5229806 5229827 5229823 5229828 +
cagtctattaatctttcttaag

SEQ ID NO: 85342 - DNA, 22 bp, Artificial Sequence
  Synthetic oligonucleotide; CTA chr11 5229813 5229834 5229830 5229835 +
ttaatctttcttaagtcctaat

SEQ ID NO: 85343 - DNA, 22 bp, Artificial Sequence
  Synthetic oligonucleotide; TTA chr11 5229816 5229837 5229833 5229838 +
atctttcttaagtcctaatgtt

SEQ ID NO: 85344 - DNA, 22 bp, Artificial Sequence
  Synthetic oligonucleotide; CTT chr11 5229821 5229842 5229838 5229843 +
tcttaagtcctaatgttttata

SEQ ID NO: 85345 - DNA, 22 bp, Artificial Sequence
  Synthetic oligonucleotide; TTT chr11 5229822 5229843 5229839 5229844 +
cttaagtcctaatgttttatat

SEQ ID NO: 85346 - DNA, 22 bp, Artificial Sequence
  Synthetic oligonucleotide; TTC chr11 5229823 5229844 5229840 5229845 +
ttaagtcctaatgttttatatc

SEQ ID NO: 85347 - DNA, 22 bp, Artificial Sequence
  Synthetic oligonucleotide; CTT chr11 5229825 5229846 5229842 5229847 +
aagtcctaatgttttatatcag

SEQ ID NO: 85348 - DNA, 22 bp, Artificial Sequence
  Synthetic oligonucleotide; TTA chr11 5229826 5229847 5229843 5229848 +
agtcctaatgttttatatcaga

SEQ ID NO: 85349 - DNA, 22 bp, Artificial Sequence
  Synthetic oligonucleotide; CTA chr11 5229833 5229854 5229850 5229855 +
atgttttatatcagaatggccc

SEQ ID NO: 85350 - DNA, 22 bp, Artificial Sequence
  Synthetic oligonucleotide; TTT chr11 5229839 5229860 5229856 5229861 +
tatatcagaatggccctagtct

SEQ ID NO: 85351 - DNA, 22 bp, Artificial Sequence
  Synthetic oligonucleotide; TTT chr11 5229840 5229861 5229857 5229862 +
atatcagaatggccctagtctg

SEQ ID NO: 85352 - DNA, 22 bp, Artificial Sequence
  Synthetic oligonucleotide; TTA chr11 5229841 5229862 5229858 5229863 +
tatcagaatggccctagtctgg

SEQ ID NO: 85353 - DNA, 22 bp, Artificial Sequence
  Synthetic oligonucleotide; CTA chr11 5229857 5229878 5229874 5229879 +
gtctgggtatacttagaggatg

SEQ ID NO: 85354 - DNA, 22 bp, Artificial Sequence
  Synthetic oligonucleotide; CTG chr11 5229862 5229883 5229879 5229884 +
ggtatacttagaggatgaatat

SEQ ID NO: 85355 - DNA, 22 bp, Artificial Sequence
  Synthetic oligonucleotide; CTT chr11 5229871 5229892 5229888 5229893 +
agaggatgaatattaacttcct

SEQ ID NO: 85356 - DNA, 22 bp, Artificial Sequence
  Synthetic oligonucleotide; TTA chr11 5229872 5229893 5229889 5229894 +
gaggatgaatattaacttcctc

SEQ ID NO: 85357 - DNA, 22 bp, Artificial Sequence
  Synthetic oligonucleotide; TTA chr11 5229886 5229907 5229903 5229908 +
acttcctccatgaaaatcatga

SEQ ID NO: 85358 - DNA, 22 bp, Artificial Sequence
  Synthetic oligonucleotide; CTT chr11 5229890 5229911 5229907 5229912 +
cctccatgaaaatcatgacact

SEQ ID NO: 85359 - DNA, 22 bp, Artificial Sequence
  Synthetic oligonucleotide; TTC chr11 5229891 5229912 5229908 5229913 +
ctccatgaaaatcatgacactc

SEQ ID NO: 85360 - DNA, 22 bp, Artificial Sequence
  Synthetic oligonucleotide; CTC chr11 5229894 5229915 5229911 5229916 +
catgaaaatcatgacactcatc

SEQ ID NO: 85361 - DNA, 22 bp, Artificial Sequence
  Synthetic oligonucleotide; CTC chr11 5229913 5229934 5229930 5229935 +
atctatgggagtgtggttttat

SEQ ID NO: 85362 - DNA, 22 bp, Artificial Sequence
  Synthetic oligonucleotide; CTA chr11 5229918 5229939 5229935 5229940 +
tgggagtgtggttttatcattt

SEQ ID NO: 85363 - DNA, 22 bp, Artificial Sequence
  Synthetic oligonucleotide; TTT chr11 5229932 5229953 5229949 5229954 +
tatcatttgtttcaaaagcagc

SEQ ID NO: 85364 - DNA, 22 bp, Artificial Sequence
  Synthetic oligonucleotide; TTT chr11 5229933 5229954 5229950 5229955 +
atcatttgtttcaaaagcagca

SEQ ID NO: 85365 - DNA, 22 bp, Artificial Sequence
  Synthetic oligonucleotide; TTA chr11 5229934 5229955 5229951 5229956 +
tcatttgtttcaaaagcagcac

SEQ ID NO: 85366 - DNA, 22 bp, Artificial Sequence
  Synthetic oligonucleotide; TTT chr11 5229940 5229961 5229957 5229962 +
gtttcaaaagcagcacttgact

SEQ ID NO: 85367 - DNA, 22 bp, Artificial Sequence
  Synthetic oligonucleotide; TTG chr11 5229941 5229962 5229958 5229963 +
tttcaaaagcagcacttgacta

SEQ ID NO: 85368 - DNA, 22 bp, Artificial Sequence
  Synthetic oligonucleotide; TTT chr11 5229944 5229965 5229961 5229966 +
caaaagcagcacttgactagag

SEQ ID NO: 85369 - DNA, 22 bp, Artificial Sequence
  Synthetic oligonucleotide; TTC chr11 5229945 5229966 5229962 5229967 +
aaaagcagcacttgactagagt

SEQ ID NO: 85370 - DNA, 22 bp, Artificial Sequence
  Synthetic oligonucleotide; CTT chr11 5229958 5229979 5229975 5229980 +
gactagagtatttttatacatg

SEQ ID NO: 85371 - DNA, 22 bp, Artificial Sequence
  Synthetic oligonucleotide; TTG chr11 5229959 5229980 5229976 5229981 +
actagagtatttttatacatgc

SEQ ID NO: 85372 - DNA, 22 bp, Artificial Sequence
  Synthetic oligonucleotide; CTA chr11 5229963 5229984 5229980 5229985 +
gagtatttttatacatgctcta

SEQ ID NO: 85373 - DNA, 22 bp, Artificial Sequence
  Synthetic oligonucleotide; TTT chr11 5229971 5229992 5229988 5229993 +
ttatacatgctctactgtttag

SEQ ID NO: 85374 - DNA, 22 bp, Artificial Sequence
  Synthetic oligonucleotide; TTT chr11 5229972 5229993 5229989 5229994 +
tatacatgctctactgtttagt

SEQ ID NO: 85375 - DNA, 22 bp, Artificial Sequence
  Synthetic oligonucleotide; TTT chr11 5229973 5229994 5229990 5229995 +
atacatgctctactgtttagtc

SEQ ID NO: 85376 - DNA, 22 bp, Artificial Sequence
  Synthetic oligonucleotide; TTA chr11 5229974 5229995 5229991 5229996 +
tacatgctctactgtttagtct

SEQ ID NO: 85377 - DNA, 22 bp, Artificial Sequence
  Synthetic oligonucleotide; CTC chr11 5229983 5230004 5230000 5230005 +
tactgtttagtctaaaattccc

SEQ ID NO: 85378 - DNA, 22 bp, Artificial Sequence
  Synthetic oligonucleotide; CTA chr11 5229985 5230006 5230002 5230007 +
ctgtttagtctaaaattcccca

SEQ ID NO: 85379 - DNA, 22 bp, Artificial Sequence
  Synthetic oligonucleotide; CTG chr11 5229988 5230009 5230005 5230010 +
tttagtctaaaattccccaagt

SEQ ID NO: 85380 - DNA, 22 bp, Artificial Sequence
  Synthetic oligonucleotide; TTT chr11 5229991 5230012 5230008 5230013 +
agtctaaaattccccaagtgag

SEQ ID NO: 85381 - DNA, 22 bp, Artificial Sequence
  Synthetic oligonucleotide; TTA chr11 5229992 5230013 5230009 5230014 +
gtctaaaattccccaagtgaga

SEQ ID NO: 85382 - DNA, 22 bp, Artificial Sequence
  Synthetic oligonucleotide; CTA chr11 5229997 5230018 5230014 5230019 +
aaattccccaagtgagacattt

SEQ ID NO: 85383 - DNA, 22 bp, Artificial Sequence
  Synthetic oligonucleotide; TTC chr11 5230003 5230024 5230020 5230025 +
cccaagtgagacattttagcaa

SEQ ID NO: 85384 - DNA, 22 bp, Artificial Sequence
  Synthetic oligonucleotide; TTT chr11 5230019 5230040 5230036 5230041 +
tagcaatctactgtatatgttc

SEQ ID NO: 85385 - DNA, 22 bp, Artificial Sequence
  Synthetic oligonucleotide; TTT chr11 5230020 5230041 5230037 5230042 +
agcaatctactgtatatgttcc

SEQ ID NO: 85386 - DNA, 22 bp, Artificial Sequence
  Synthetic oligonucleotide; TTA chr11 5230021 5230042 5230038 5230043 +
gcaatctactgtatatgttcct

SEQ ID NO: 85387 - DNA, 22 bp, Artificial Sequence
  Synthetic oligonucleotide; CTA chr11 5230029 5230050 5230046 5230051 +
ctgtatatgttcctaggtcaag

SEQ ID NO: 85388 - DNA, 22 bp, Artificial Sequence
  Synthetic oligonucleotide; CTG chr11 5230032 5230053 5230049 5230054 +
tatatgttcctaggtcaagcac

SEQ ID NO: 85389 - DNA, 22 bp, Artificial Sequence
  Synthetic oligonucleotide; TTC chr11 5230041 5230062 5230058 5230063 +
ctaggtcaagcacagtctagct

SEQ ID NO: 85390 - DNA, 22 bp, Artificial Sequence
  Synthetic oligonucleotide; CTA chr11 5230044 5230065 5230061 5230066 +
ggtcaagcacagtctagctact

SEQ ID NO: 85391 - DNA, 22 bp, Artificial Sequence
  Synthetic oligonucleotide; CTA chr11 5230060 5230081 5230077 5230082 +
gctacttgctacagacttctct

SEQ ID NO: 85392 - DNA, 22 bp, Artificial Sequence
  Synthetic oligonucleotide; CTA chr11 5230064 5230085 5230081 5230086 +
cttgctacagacttctctcgca

SEQ ID NO: 85393 - DNA, 22 bp, Artificial Sequence
  Synthetic oligonucleotide; CTT chr11 5230067 5230088 5230084 5230089 +
gctacagacttctctcgcagat

SEQ ID NO: 85394 - DNA, 22 bp, Artificial Sequence
  Synthetic oligonucleotide; TTG chr11 5230068 5230089 5230085 5230090 +
ctacagacttctctcgcagata

SEQ ID NO: 85395 - DNA, 22 bp, Artificial Sequence
  Synthetic oligonucleotide; CTA chr11 5230071 5230092 5230088 5230093 +
cagacttctctcgcagatacac

SEQ ID NO: 85396 - DNA, 22 bp, Artificial Sequence
  Synthetic oligonucleotide; CTT chr11 5230078 5230099 5230095 5230100 +
ctctcgcagatacacaatctct

SEQ ID NO: 85397 - DNA, 22 bp, Artificial Sequence
  Synthetic oligonucleotide; TTC chr11 5230079 5230100 5230096 5230101 +
tctcgcagatacacaatctctc

SEQ ID NO: 85398 - DNA, 22 bp, Artificial Sequence
  Synthetic oligonucleotide; CTC chr11 5230081 5230102 5230098 5230103 +
tcgcagatacacaatctctcag

SEQ ID NO: 85399 - DNA, 22 bp, Artificial Sequence
  Synthetic oligonucleotide; CTC chr11 5230083 5230104 5230100 5230105 +
gcagatacacaatctctcagta

SEQ ID NO: 85400 - DNA, 22 bp, Artificial Sequence
  Synthetic oligonucleotide; CTC chr11 5230099 5230120 5230116 5230121 +
tcagtaaacacaactcagcagc

SEQ ID NO: 85401 - DNA, 22 bp, Artificial Sequence
  Synthetic oligonucleotide; CTC chr11 5230101 5230122 5230118 5230123 +
agtaaacacaactcagcagctc

SEQ ID NO: 85402 - DNA, 22 bp, Artificial Sequence
  Synthetic oligonucleotide; CTC chr11 5230115 5230136 5230132 5230137 +
agcagctctcagaattaattaa

SEQ ID NO: 85403 - DNA, 22 bp, Artificial Sequence
  Synthetic oligonucleotide; CTC chr11 5230123 5230144 5230140 5230145 +
tcagaattaattaattaaaatg

SEQ ID NO: 85404 - DNA, 22 bp, Artificial Sequence
  Synthetic oligonucleotide; CTC chr11 5230125 5230146 5230142 5230147 +
agaattaattaattaaaatgaa

SEQ ID NO: 85405 - DNA, 22 bp, Artificial Sequence
  Synthetic oligonucleotide; TTA chr11 5230132 5230153 5230149 5230154 +
attaattaaaatgaaataaaaa

SEQ ID NO: 85406 - DNA, 22 bp, Artificial Sequence
  Synthetic oligonucleotide; TTA chr11 5230136 5230157 5230153 5230158 +
attaaaatgaaataaaaatgct

SEQ ID NO: 85407 - DNA, 22 bp, Artificial Sequence
  Synthetic oligonucleotide; TTA chr11 5230140 5230161 5230157 5230162 +
aaatgaaataaaaatgctccaa

SEQ ID NO: 85408 - DNA, 22 bp, Artificial Sequence
  Synthetic oligonucleotide; CTC chr11 5230159 5230180 5230176 5230181 +
caagaaaaccagaacccataga

SEQ ID NO: 85409 - DNA, 22 bp, Artificial Sequence
  Synthetic oligonucleotide; TTT chr11 5230209 5230230 5230226 5230231 +
ggaaataggatagtttagttca

SEQ ID NO: 85410 - DNA, 22 bp, Artificial Sequence
  Synthetic oligonucleotide; TTG chr11 5230210 5230231 5230227 5230232 +
gaaataggatagtttagttcac

SEQ ID NO: 85411 - DNA, 22 bp, Artificial Sequence
  Synthetic oligonucleotide; TTT chr11 5230225 5230246 5230242 5230247 +
agttcactttaaaaagttgtat

SEQ ID NO: 85412 - DNA, 22 bp, Artificial Sequence
  Synthetic oligonucleotide; TTA chr11 5230226 5230247 5230243 5230248 +
gttcactttaaaaagttgtatt

SEQ ID NO: 85413 - DNA, 22 bp, Artificial Sequence
  Synthetic oligonucleotide; TTC chr11 5230230 5230251 5230247 5230252 +
actttaaaaagttgtatttctt

SEQ ID NO: 85414 - DNA, 22 bp, Artificial Sequence
  Synthetic oligonucleotide; CTT chr11 5230234 5230255 5230251 5230256 +
taaaaagttgtatttcttacca

SEQ ID NO: 85415 - DNA, 22 bp, Artificial Sequence
  Synthetic oligonucleotide; TTT chr11 5230235 5230256 5230252 5230257 +
aaaaagttgtatttcttaccaa

SEQ ID NO: 85416 - DNA, 22 bp, Artificial Sequence
  Synthetic oligonucleotide; TTA chr11 5230236 5230257 5230253 5230258 +
aaaagttgtatttcttaccaaa

SEQ ID NO: 85417 - DNA, 22 bp, Artificial Sequence
  Synthetic oligonucleotide; TTG chr11 5230244 5230265 5230261 5230266 +
tatttcttaccaaaaagcaata

SEQ ID NO: 85418 - DNA, 22 bp, Artificial Sequence
  Synthetic oligonucleotide; TTT chr11 5230249 5230270 5230266 5230271 +
cttaccaaaaagcaataaagtc

SEQ ID NO: 85419 - DNA, 22 bp, Artificial Sequence
  Synthetic oligonucleotide; TTC chr11 5230250 5230271 5230267 5230272 +
ttaccaaaaagcaataaagtca

SEQ ID NO: 85420 - DNA, 22 bp, Artificial Sequence
  Synthetic oligonucleotide; CTT chr11 5230252 5230273 5230269 5230274 +
accaaaaagcaataaagtcaac

SEQ ID NO: 85421 - DNA, 22 bp, Artificial Sequence
  Synthetic oligonucleotide; TTA chr11 5230253 5230274 5230270 5230275 +
ccaaaaagcaataaagtcaaca

SEQ ID NO: 85422 - DNA, 22 bp, Artificial Sequence
  Synthetic oligonucleotide; CTT chr11 5230287 5230308 5230304 5230309 +
tgctaaagtatatgcataatta

SEQ ID NO: 85423 - DNA, 22 bp, Artificial Sequence
  Synthetic oligonucleotide; TTT chr11 5230288 5230309 5230305 5230310 +
gctaaagtatatgcataattat

SEQ ID NO: 85424 - DNA, 22 bp, Artificial Sequence
  Synthetic oligonucleotide; TTG chr11 5230289 5230310 5230306 5230311 +
ctaaagtatatgcataattatt

SEQ ID NO: 85425 - DNA, 22 bp, Artificial Sequence
  Synthetic oligonucleotide; CTA chr11 5230292 5230313 5230309 5230314 +
aagtatatgcataattattaca

SEQ ID NO: 85426 - DNA, 22 bp, Artificial Sequence
  Synthetic oligonucleotide; TTA chr11 5230309 5230330 5230326 5230331 +
ttacagaaaaatttatatttca

SEQ ID NO: 85427 - DNA, 22 bp, Artificial Sequence
  Synthetic oligonucleotide; TTA chr11 5230312 5230333 5230329 5230334 +
cagaaaaatttatatttcagtc

SEQ ID NO: 85428 - DNA, 22 bp, Artificial Sequence
  Synthetic oligonucleotide; TTT chr11 5230323 5230344 5230340 5230345 +
atatttcagtctgcaccttgtt

SEQ ID NO: 85429 - DNA, 22 bp, Artificial Sequence
  Synthetic oligonucleotide; TTA chr11 5230324 5230345 5230341 5230346 +
tatttcagtctgcaccttgttc

SEQ ID NO: 85430 - DNA, 22 bp, Artificial Sequence
  Synthetic oligonucleotide; TTT chr11 5230329 5230350 5230346 5230351 +
cagtctgcaccttgttcattaa

SEQ ID NO: 85431 - DNA, 22 bp, Artificial Sequence
  Synthetic oligonucleotide; TTC chr11 5230330 5230351 5230347 5230352 +
agtctgcaccttgttcattaat

SEQ ID NO: 85432 - DNA, 22 bp, Artificial Sequence
  Synthetic oligonucleotide; CTG chr11 5230336 5230357 5230353 5230358 +
caccttgttcattaatatttcc

SEQ ID NO: 85433 - DNA, 22 bp, Artificial Sequence
  Synthetic oligonucleotide; CTT chr11 5230342 5230363 5230359 5230364 +
gttcattaatatttcctccact

SEQ ID NO: 85434 - DNA, 22 bp, Artificial Sequence
  Synthetic oligonucleotide; TTG chr11 5230343 5230364 5230360 5230365 +
ttcattaatatttcctccactg

SEQ ID NO: 85435 - DNA, 22 bp, Artificial Sequence
  Synthetic oligonucleotide; TTC chr11 5230346 5230367 5230363 5230368 +
attaatatttcctccactgggc

SEQ ID NO: 85436 - DNA, 22 bp, Artificial Sequence
  Synthetic oligonucleotide; TTA chr11 5230350 5230371 5230367 5230372 +
atatttcctccactgggctcag

SEQ ID NO: 85437 - DNA, 22 bp, Artificial Sequence
  Synthetic oligonucleotide; TTT chr11 5230356 5230377 5230373 5230378 +
cctccactgggctcagattttc

SEQ ID NO: 85438 - DNA, 22 bp, Artificial Sequence
  Synthetic oligonucleotide; TTC chr11 5230357 5230378 5230374 5230379 +
ctccactgggctcagattttca

SEQ ID NO: 85439 - DNA, 22 bp, Artificial Sequence
  Synthetic oligonucleotide; CTC chr11 5230360 5230381 5230377 5230382 +
cactgggctcagattttcattc

SEQ ID NO: 85440 - DNA, 22 bp, Artificial Sequence
  Synthetic oligonucleotide; CTG chr11 5230365 5230386 5230382 5230387 +
ggctcagattttcattcagaat

SEQ ID NO: 85441 - DNA, 22 bp, Artificial Sequence
  Synthetic oligonucleotide; CTC chr11 5230370 5230391 5230387 5230392 +
agattttcattcagaattagct

SEQ ID NO: 85442 - DNA, 22 bp, Artificial Sequence
  Synthetic oligonucleotide; TTT chr11 5230376 5230397 5230393 5230398 +
tcattcagaattagcttttttt

SEQ ID NO: 85443 - DNA, 22 bp, Artificial Sequence
  Synthetic oligonucleotide; TTT chr11 5230377 5230398 5230394 5230399 +
cattcagaattagctttttttt

SEQ ID NO: 85444 - DNA, 22 bp, Artificial Sequence
  Synthetic oligonucleotide; TTC chr11 5230378 5230399 5230395 5230400 +
attcagaattagctttttttta

SEQ ID NO: 85445 - DNA, 22 bp, Artificial Sequence
  Synthetic oligonucleotide; TTC chr11 5230382 5230403 5230399 5230404 +
agaattagcttttttttaacct

SEQ ID NO: 85446 - DNA, 22 bp, Artificial Sequence
  Synthetic oligonucleotide; TTA chr11 5230389 5230410 5230406 5230411 +
gcttttttttaacctcattaag

SEQ ID NO: 85447 - DNA, 22 bp, Artificial Sequence
  Synthetic oligonucleotide; CTT chr11 5230393 5230414 5230410 5230415 +
ttttttaacctcattaagtggg

SEQ ID NO: 85448 - DNA, 22 bp, Artificial Sequence
  Synthetic oligonucleotide; TTT chr11 5230394 5230415 5230411 5230416 +
tttttaacctcattaagtgggc

SEQ ID NO: 85449 - DNA, 22 bp, Artificial Sequence
  Synthetic oligonucleotide; TTT chr11 5230395 5230416 5230412 5230417 +
ttttaacctcattaagtgggcc

SEQ ID NO: 85450 - DNA, 22 bp, Artificial Sequence
  Synthetic oligonucleotide; TTT chr11 5230396 5230417 5230413 5230418 +
tttaacctcattaagtgggcca

SEQ ID NO: 85451 - DNA, 22 bp, Artificial Sequence
  Synthetic oligonucleotide; TTT chr11 5230397 5230418 5230414 5230419 +
ttaacctcattaagtgggccat

SEQ ID NO: 85452 - DNA, 22 bp, Artificial Sequence
  Synthetic oligonucleotide; TTT chr11 5230398 5230419 5230415 5230420 +
taacctcattaagtgggccatg

SEQ ID NO: 85453 - DNA, 22 bp, Artificial Sequence
  Synthetic oligonucleotide; TTT chr11 5230399 5230420 5230416 5230421 +
aacctcattaagtgggccatgg

SEQ ID NO: 85454 - DNA, 22 bp, Artificial Sequence
  Synthetic oligonucleotide; TTA chr11 5230400 5230421 5230417 5230422 +
acctcattaagtgggccatggt

SEQ ID NO: 85455 - DNA, 22 bp, Artificial Sequence
  Synthetic oligonucleotide; CTC chr11 5230405 5230426 5230422 5230427 +
attaagtgggccatggtgtcaa

SEQ ID NO: 85456 - DNA, 22 bp, Artificial Sequence
  Synthetic oligonucleotide; TTA chr11 5230409 5230430 5230426 5230431 +
agtgggccatggtgtcaattta

SEQ ID NO: 85457 - DNA, 22 bp, Artificial Sequence
  Synthetic oligonucleotide; TTT chr11 5230430 5230451 5230447 5230452 +
atggagagcagaggtacagtct

SEQ ID NO: 85458 - DNA, 22 bp, Artificial Sequence
  Synthetic oligonucleotide; TTA chr11 5230431 5230452 5230448 5230453 +
tggagagcagaggtacagtctt

SEQ ID NO: 85459 - DNA, 22 bp, Artificial Sequence
  Synthetic oligonucleotide; CTT chr11 5230453 5230474 5230470 5230475 +
cagataaatttgagattgcatc

SEQ ID NO: 85460 - DNA, 22 bp, Artificial Sequence
  Synthetic oligonucleotide; TTC chr11 5230454 5230475 5230471 5230476 +
agataaatttgagattgcatct

SEQ ID NO: 85461 - DNA, 22 bp, Artificial Sequence
  Synthetic oligonucleotide; TTT chr11 5230464 5230485 5230481 5230486 +
gagattgcatctctttagaggt

SEQ ID NO: 85462 - DNA, 22 bp, Artificial Sequence
  Synthetic oligonucleotide; TTG chr11 5230465 5230486 5230482 5230487 +
agattgcatctctttagaggta

SEQ ID NO: 85463 - DNA, 22 bp, Artificial Sequence
  Synthetic oligonucleotide; TTG chr11 5230471 5230492 5230488 5230493 +
catctctttagaggtagaatct

SEQ ID NO: 85464 - DNA, 22 bp, Artificial Sequence
  Synthetic oligonucleotide; CTC chr11 5230477 5230498 5230494 5230499 +
tttagaggtagaatcttggctt

SEQ ID NO: 85465 - DNA, 22 bp, Artificial Sequence
  Synthetic oligonucleotide; CTT chr11 5230479 5230500 5230496 5230501 +
tagaggtagaatcttggcttca

SEQ ID NO: 85466 - DNA, 22 bp, Artificial Sequence
  Synthetic oligonucleotide; TTT chr11 5230480 5230501 5230497 5230502 +
agaggtagaatcttggcttcag

SEQ ID NO: 85467 - DNA, 22 bp, Artificial Sequence
  Synthetic oligonucleotide; TTA chr11 5230481 5230502 5230498 5230503 +
gaggtagaatcttggcttcagt

SEQ ID NO: 85468 - DNA, 22 bp, Artificial Sequence
  Synthetic oligonucleotide; CTT chr11 5230494 5230515 5230511 5230516 +
ggcttcagtctgaacacccttt

SEQ ID NO: 85469 - DNA, 22 bp, Artificial Sequence
  Synthetic oligonucleotide; TTG chr11 5230495 5230516 5230512 5230517 +
gcttcagtctgaacacccttta

SEQ ID NO: 85470 - DNA, 22 bp, Artificial Sequence
  Synthetic oligonucleotide; CTT chr11 5230499 5230520 5230516 5230521 +
cagtctgaacaccctttacaaa

SEQ ID NO: 85471 - DNA, 22 bp, Artificial Sequence
  Synthetic oligonucleotide; TTC chr11 5230500 5230521 5230517 5230522 +
agtctgaacaccctttacaaac

SEQ ID NO: 85472 - DNA, 22 bp, Artificial Sequence
  Synthetic oligonucleotide; CTG chr11 5230506 5230527 5230523 5230528 +
aacaccctttacaaacatgtag

SEQ ID NO: 85473 - DNA, 22 bp, Artificial Sequence
  Synthetic oligonucleotide; CTT chr11 5230515 5230536 5230532 5230537 +
tacaaacatgtaggcattaatt

SEQ ID NO: 85474 - DNA, 22 bp, Artificial Sequence
  Synthetic oligonucleotide; TTT chr11 5230516 5230537 5230533 5230538 +
acaaacatgtaggcattaattc

SEQ ID NO: 85475 - DNA, 22 bp, Artificial Sequence
  Synthetic oligonucleotide; TTA chr11 5230517 5230538 5230534 5230539 +
caaacatgtaggcattaattca

SEQ ID NO: 85476 - DNA, 22 bp, Artificial Sequence
  Synthetic oligonucleotide; TTA chr11 5230534 5230555 5230551 5230556 +
attcagaggactgctctgaagc

SEQ ID NO: 85477 - DNA, 22 bp, Artificial Sequence
  Synthetic oligonucleotide; TTC chr11 5230538 5230559 5230555 5230560 +
agaggactgctctgaagctcaa

SEQ ID NO: 85478 - DNA, 22 bp, Artificial Sequence
  Synthetic oligonucleotide; CTG chr11 5230547 5230568 5230564 5230569 +
ctctgaagctcaagagatggat

SEQ ID NO: 85479 - DNA, 22 bp, Artificial Sequence
  Synthetic oligonucleotide; CTC chr11 5230550 5230571 5230567 5230572 +
tgaagctcaagagatggatgat

SEQ ID NO: 85480 - DNA, 22 bp, Artificial Sequence
  Synthetic oligonucleotide; CTG chr11 5230552 5230573 5230569 5230574 +
aagctcaagagatggatgattt

SEQ ID NO: 85481 - DNA, 22 bp, Artificial Sequence
  Synthetic oligonucleotide; CTC chr11 5230558 5230579 5230575 5230580 +
aagagatggatgatttaggaga

SEQ ID NO: 85482 - DNA, 22 bp, Artificial Sequence
  Synthetic oligonucleotide; TTT chr11 5230574 5230595 5230591 5230596 +
aggagactattaggcttaattc

SEQ ID NO: 85483 - DNA, 22 bp, Artificial Sequence
  Synthetic oligonucleotide; TTA chr11 5230575 5230596 5230592 5230597 +
ggagactattaggcttaattct

SEQ ID NO: 85484 - DNA, 22 bp, Artificial Sequence
  Synthetic oligonucleotide; CTA chr11 5230583 5230604 5230600 5230605 +
ttaggcttaattctcctgacat

SEQ ID NO: 85485 - DNA, 22 bp, Artificial Sequence
  Synthetic oligonucleotide; TTA chr11 5230586 5230607 5230603 5230608 +
ggcttaattctcctgacattaa

SEQ ID NO: 85486 - DNA, 22 bp, Artificial Sequence
  Synthetic oligonucleotide; CTT chr11 5230591 5230612 5230608 5230613 +
aattctcctgacattaaattat

SEQ ID NO: 85487 - DNA, 22 bp, Artificial Sequence
  Synthetic oligonucleotide; TTA chr11 5230592 5230613 5230609 5230614 +
attctcctgacattaaattatt

SEQ ID NO: 85488 - DNA, 22 bp, Artificial Sequence
  Synthetic oligonucleotide; TTC chr11 5230596 5230617 5230613 5230618 +
tcctgacattaaattattttat

SEQ ID NO: 85489 - DNA, 22 bp, Artificial Sequence
  Synthetic oligonucleotide; CTC chr11 5230598 5230619 5230615 5230620 +
ctgacattaaattattttattg

SEQ ID NO: 85490 - DNA, 22 bp, Artificial Sequence
  Synthetic oligonucleotide; CTG chr11 5230601 5230622 5230618 5230623 +
acattaaattattttattgaaa

SEQ ID NO: 85491 - DNA, 22 bp, Artificial Sequence
  Synthetic oligonucleotide; TTA chr11 5230607 5230628 5230624 5230629 +
aattattttattgaaaaatttt

SEQ ID NO: 85492 - DNA, 22 bp, Artificial Sequence
  Synthetic oligonucleotide; TTA chr11 5230612 5230633 5230629 5230634 +
ttttattgaaaaattttcatga

SEQ ID NO: 85493 - DNA, 22 bp, Artificial Sequence
  Synthetic oligonucleotide; TTT chr11 5230615 5230636 5230632 5230637 +
tattgaaaaattttcatgaact

SEQ ID NO: 85494 - DNA, 22 bp, Artificial Sequence
  Synthetic oligonucleotide; TTT chr11 5230616 5230637 5230633 5230638 +
attgaaaaattttcatgaactc

SEQ ID NO: 85495 - DNA, 22 bp, Artificial Sequence
  Synthetic oligonucleotide; TTA chr11 5230617 5230638 5230634 5230639 +
ttgaaaaattttcatgaactca

SEQ ID NO: 85496 - DNA, 22 bp, Artificial Sequence
  Synthetic oligonucleotide; TTG chr11 5230620 5230641 5230637 5230642 +
aaaaattttcatgaactcaaat

SEQ ID NO: 85497 - DNA, 22 bp, Artificial Sequence
  Synthetic oligonucleotide; TTT chr11 5230628 5230649 5230645 5230650 +
tcatgaactcaaattcacatta

SEQ ID NO: 85498 - DNA, 22 bp, Artificial Sequence
  Synthetic oligonucleotide; TTT chr11 5230629 5230650 5230646 5230651 +
catgaactcaaattcacattat

SEQ ID NO: 85499 - DNA, 22 bp, Artificial Sequence
  Synthetic oligonucleotide; TTC chr11 5230630 5230651 5230647 5230652 +
atgaactcaaattcacattatt

SEQ ID NO: 85500 - DNA, 22 bp, Artificial Sequence
  Synthetic oligonucleotide; CTC chr11 5230638 5230659 5230655 5230660 +
aaattcacattattacgtcctc

SEQ ID NO: 85501 - DNA, 22 bp, Artificial Sequence
  Synthetic oligonucleotide; TTC chr11 5230644 5230665 5230661 5230666 +
acattattacgtcctctcttcc

SEQ ID NO: 85502 - DNA, 22 bp, Artificial Sequence
  Synthetic oligonucleotide; TTA chr11 5230650 5230671 5230667 5230672 +
ttacgtcctctcttcccttcct

SEQ ID NO: 85503 - DNA, 22 bp, Artificial Sequence
  Synthetic oligonucleotide; TTA chr11 5230653 5230674 5230670 5230675 +
cgtcctctcttcccttcctctc

SEQ ID NO: 85504 - DNA, 22 bp, Artificial Sequence
  Synthetic oligonucleotide; CTC chr11 5230660 5230681 5230677 5230682 +
tcttcccttcctctctccctct

SEQ ID NO: 85505 - DNA, 22 bp, Artificial Sequence
  Synthetic oligonucleotide; CTC chr11 5230662 5230683 5230679 5230684 +
ttcccttcctctctccctctct

SEQ ID NO: 85506 - DNA, 22 bp, Artificial Sequence
  Synthetic oligonucleotide; CTT chr11 5230664 5230685 5230681 5230686 +
cccttcctctctccctctcttt

SEQ ID NO: 85507 - DNA, 22 bp, Artificial Sequence
  Synthetic oligonucleotide; TTC chr11 5230665 5230686 5230682 5230687 +
ccttcctctctccctctctttc

SEQ ID NO: 85508 - DNA, 22 bp, Artificial Sequence
  Synthetic oligonucleotide; CTT chr11 5230669 5230690 5230686 5230691 +
cctctctccctctctttcacac

SEQ ID NO: 85509 - DNA, 22 bp, Artificial Sequence
  Synthetic oligonucleotide; TTC chr11 5230670 5230691 5230687 5230692 +
ctctctccctctctttcacaca

SEQ ID NO: 85510 - DNA, 22 bp, Artificial Sequence
  Synthetic oligonucleotide; CTC chr11 5230673 5230694 5230690 5230695 +
tctccctctctttcacacacac

SEQ ID NO: 85511 - DNA, 22 bp, Artificial Sequence
  Synthetic oligonucleotide; CTC chr11 5230675 5230696 5230692 5230697 +
tccctctctttcacacacacac

SEQ ID NO: 85512 - DNA, 22 bp, Artificial Sequence
  Synthetic oligonucleotide; CTC chr11 5230677 5230698 5230694 5230699 +
cctctctttcacacacacacac

SEQ ID NO: 85513 - DNA, 22 bp, Artificial Sequence
  Synthetic oligonucleotide; CTC chr11 5230681 5230702 5230698 5230703 +
tctttcacacacacacacaccc

SEQ ID NO: 85514 - DNA, 22 bp, Artificial Sequence
  Synthetic oligonucleotide; CTC chr11 5230683 5230704 5230700 5230705 +
tttcacacacacacacaccctt

SEQ ID NO: 85515 - DNA, 22 bp, Artificial Sequence
  Synthetic oligonucleotide; CTT chr11 5230685 5230706 5230702 5230707 +
tcacacacacacacaccctttc

SEQ ID NO: 85516 - DNA, 22 bp, Artificial Sequence
  Synthetic oligonucleotide; TTT chr11 5230686 5230707 5230703 5230708 +
cacacacacacacaccctttca

SEQ ID NO: 85517 - DNA, 22 bp, Artificial Sequence
  Synthetic oligonucleotide; TTC chr11 5230687 5230708 5230704 5230709 +
acacacacacacaccctttcat

SEQ ID NO: 85518 - DNA, 22 bp, Artificial Sequence
  Synthetic oligonucleotide; CTT chr11 5230705 5230726 5230722 5230727 +
tcattcagacatactgaacata

SEQ ID NO: 85519 - DNA, 22 bp, Artificial Sequence
  Synthetic oligonucleotide; TTT chr11 5230706 5230727 5230723 5230728 +
cattcagacatactgaacatag

SEQ ID NO: 85520 - DNA, 22 bp, Artificial Sequence
  Synthetic oligonucleotide; TTC chr11 5230707 5230728 5230724 5230729 +
attcagacatactgaacatagt

SEQ ID NO: 85521 - DNA, 22 bp, Artificial Sequence
  Synthetic oligonucleotide; TTC chr11 5230711 5230732 5230728 5230733 +
agacatactgaacatagtttat

SEQ ID NO: 85522 - DNA, 22 bp, Artificial Sequence
  Synthetic oligonucleotide; CTG chr11 5230721 5230742 5230738 5230743 +
aacatagtttataaagcaacgc

SEQ ID NO: 85523 - DNA, 22 bp, Artificial Sequence
  Synthetic oligonucleotide; TTT chr11 5230731 5230752 5230748 5230753 +
ataaagcaacgccatagtgaga

SEQ ID NO: 85524 - DNA, 22 bp, Artificial Sequence
  Synthetic oligonucleotide; TTA chr11 5230732 5230753 5230749 5230754 +
taaagcaacgccatagtgagaa

SEQ ID NO: 85525 - DNA, 22 bp, Artificial Sequence
  Synthetic oligonucleotide; TTT chr11 5230771 5230792 5230788 5230793 +
gataaattatcaaataaaatta

SEQ ID NO: 85526 - DNA, 22 bp, Artificial Sequence
  Synthetic oligonucleotide; TTG chr11 5230772 5230793 5230789 5230794 +
ataaattatcaaataaaattaa

SEQ ID NO: 85527 - DNA, 22 bp, Artificial Sequence
  Synthetic oligonucleotide; TTA chr11 5230780 5230801 5230797 5230802 +
tcaaataaaattaaagccaaat

SEQ ID NO: 85528 - DNA, 22 bp, Artificial Sequence
  Synthetic oligonucleotide; TTA chr11 5230793 5230814 5230810 5230815 +
aagccaaatcttgaggaattaa

SEQ ID NO: 85529 - DNA, 22 bp, Artificial Sequence
  Synthetic oligonucleotide; CTT chr11 5230805 5230826 5230822 5230827 +
gaggaattaattccattcctat

SEQ ID NO: 85530 - DNA, 22 bp, Artificial Sequence
  Synthetic oligonucleotide; TTG chr11 5230806 5230827 5230823 5230828 +
aggaattaattccattcctata

SEQ ID NO: 85531 - DNA, 22 bp, Artificial Sequence
  Synthetic oligonucleotide; TTA chr11 5230814 5230835 5230831 5230836 +
attccattcctatactttgttt

SEQ ID NO: 85532 - DNA, 22 bp, Artificial Sequence
  Synthetic oligonucleotide; TTC chr11 5230818 5230839 5230835 5230840 +
cattcctatactttgttttaac

SEQ ID NO: 85533 - DNA, 22 bp, Artificial Sequence
  Synthetic oligonucleotide; TTC chr11 5230823 5230844 5230840 5230845 +
ctatactttgttttaactttca

SEQ ID NO: 85534 - DNA, 22 bp, Artificial Sequence
  Synthetic oligonucleotide; CTA chr11 5230826 5230847 5230843 5230848 +
tactttgttttaactttcattt

SEQ ID NO: 85535 - DNA, 22 bp, Artificial Sequence
  Synthetic oligonucleotide; CTT chr11 5230831 5230852 5230848 5230853 +
tgttttaactttcattttaaat

SEQ ID NO: 85536 - DNA, 22 bp, Artificial Sequence
  Synthetic oligonucleotide; TTT chr11 5230832 5230853 5230849 5230854 +
gttttaactttcattttaaatt

SEQ ID NO: 85537 - DNA, 22 bp, Artificial Sequence
  Synthetic oligonucleotide; TTG chr11 5230833 5230854 5230850 5230855 +
ttttaactttcattttaaattt

SEQ ID NO: 85538 - DNA, 22 bp, Artificial Sequence
  Synthetic oligonucleotide; TTT chr11 5230836 5230857 5230853 5230858 +
taactttcattttaaatttggg

SEQ ID NO: 85539 - DNA, 22 bp, Artificial Sequence
  Synthetic oligonucleotide; TTT chr11 5230837 5230858 5230854 5230859 +
aactttcattttaaatttgggg

SEQ ID NO: 85540 - DNA, 22 bp, Artificial Sequence
  Synthetic oligonucleotide; TTA chr11 5230838 5230859 5230855 5230860 +
actttcattttaaatttggggg

SEQ ID NO: 85541 - DNA, 22 bp, Artificial Sequence
  Synthetic oligonucleotide; CTT chr11 5230842 5230863 5230859 5230864 +
tcattttaaatttgggggtaca

SEQ ID NO: 85542 - DNA, 22 bp, Artificial Sequence
  Synthetic oligonucleotide; TTT chr11 5230843 5230864 5230860 5230865 +
cattttaaatttgggggtacat

SEQ ID NO: 85543 - DNA, 22 bp, Artificial Sequence
  Synthetic oligonucleotide; TTC chr11 5230844 5230865 5230861 5230866 +
attttaaatttgggggtacatg

SEQ ID NO: 85544 - DNA, 22 bp, Artificial Sequence
  Synthetic oligonucleotide; TTT chr11 5230848 5230869 5230865 5230870 +
taaatttgggggtacatgtaca

SEQ ID NO: 85545 - DNA, 22 bp, Artificial Sequence
  Synthetic oligonucleotide; TTT chr11 5230849 5230870 5230866 5230871 +
aaatttgggggtacatgtacaa

SEQ ID NO: 85546 - DNA, 22 bp, Artificial Sequence
  Synthetic oligonucleotide; TTA chr11 5230850 5230871 5230867 5230872 +
aatttgggggtacatgtacaag

SEQ ID NO: 85547 - DNA, 22 bp, Artificial Sequence
  Synthetic oligonucleotide; TTT chr11 5230855 5230876 5230872 5230877 +
gggggtacatgtacaagttata

SEQ ID NO: 85548 - DNA, 22 bp, Artificial Sequence
  Synthetic oligonucleotide; TTG chr11 5230856 5230877 5230873 5230878 +
ggggtacatgtacaagttatat

SEQ ID NO: 85549 - DNA, 22 bp, Artificial Sequence
  Synthetic oligonucleotide; TTA chr11 5230875 5230896 5230892 5230897 +
tataggtaaattgcatatcact

SEQ ID NO: 85550 - DNA, 22 bp, Artificial Sequence
  Synthetic oligonucleotide; TTG chr11 5230888 5230909 5230905 5230910 +
catatcactgggtcttgatgta

SEQ ID NO: 85551 - DNA, 22 bp, Artificial Sequence
  Synthetic oligonucleotide; CTG chr11 5230898 5230919 5230915 5230920 +
ggtcttgatgtacagattattt

SEQ ID NO: 85552 - DNA, 22 bp, Artificial Sequence
  Synthetic oligonucleotide; CTT chr11 5230904 5230925 5230921 5230926 +
gatgtacagattatttcatcac

SEQ ID NO: 85553 - DNA, 22 bp, Artificial Sequence
  Synthetic oligonucleotide; TTG chr11 5230905 5230926 5230922 5230927 +
atgtacagattatttcatcact

SEQ ID NO: 85554 - DNA, 22 bp, Artificial Sequence
  Synthetic oligonucleotide; TTA chr11 5230917 5230938 5230934 5230939 +
tttcatcactcagtgatgaact

SEQ ID NO: 85555 - DNA, 22 bp, Artificial Sequence
  Synthetic oligonucleotide; TTT chr11 5230920 5230941 5230937 5230942 +
catcactcagtgatgaacttaa

SEQ ID NO: 85556 - DNA, 22 bp, Artificial Sequence
  Synthetic oligonucleotide; TTC chr11 5230921 5230942 5230938 5230943 +
atcactcagtgatgaacttaat

SEQ ID NO: 85557 - DNA, 22 bp, Artificial Sequence
  Synthetic oligonucleotide; CTC chr11 5230928 5230949 5230945 5230950 +
agtgatgaacttaatacccaat

SEQ ID NO: 85558 - DNA, 22 bp, Artificial Sequence
  Synthetic oligonucleotide; CTT chr11 5230940 5230961 5230957 5230962 +
aatacccaataggttctttttc

SEQ ID NO: 85559 - DNA, 22 bp, Artificial Sequence
  Synthetic oligonucleotide; TTA chr11 5230941 5230962 5230958 5230963 +
atacccaataggttctttttca

SEQ ID NO: 85560 - DNA, 22 bp, Artificial Sequence
  Synthetic oligonucleotide; TTC chr11 5230956 5230977 5230973 5230978 +
tttttcatcgtctccctcttcc

SEQ ID NO: 85561 - DNA, 22 bp, Artificial Sequence
  Synthetic oligonucleotide; CTT chr11 5230958 5230979 5230975 5230980 +
tttcatcgtctccctcttccca

SEQ ID NO: 85562 - DNA, 22 bp, Artificial Sequence
  Synthetic oligonucleotide; TTT chr11 5230959 5230980 5230976 5230981 +
ttcatcgtctccctcttcccac

SEQ ID NO: 85563 - DNA, 22 bp, Artificial Sequence
  Synthetic oligonucleotide; TTT chr11 5230960 5230981 5230977 5230982 +
tcatcgtctccctcttcccacc

SEQ ID NO: 85564 - DNA, 22 bp, Artificial Sequence
  Synthetic oligonucleotide; TTT chr11 5230961 5230982 5230978 5230983 +
catcgtctccctcttcccaccc

SEQ ID NO: 85565 - DNA, 22 bp, Artificial Sequence
  Synthetic oligonucleotide; TTC chr11 5230962 5230983 5230979 5230984 +
atcgtctccctcttcccaccct

SEQ ID NO: 85566 - DNA, 22 bp, Artificial Sequence
  Synthetic oligonucleotide; CTC chr11 5230970 5230991 5230987 5230992 +
cctcttcccaccctcaaccctc

SEQ ID NO: 85567 - DNA, 22 bp, Artificial Sequence
  Synthetic oligonucleotide; CTC chr11 5230974 5230995 5230991 5230996 +
ttcccaccctcaaccctcaagt

SEQ ID NO: 85568 - DNA, 22 bp, Artificial Sequence
  Synthetic oligonucleotide; CTT chr11 5230976 5230997 5230993 5230998 +
cccaccctcaaccctcaagtag

SEQ ID NO: 85569 - DNA, 22 bp, Artificial Sequence
  Synthetic oligonucleotide; TTC chr11 5230977 5230998 5230994 5230999 +
ccaccctcaaccctcaagtagg

SEQ ID NO: 85570 - DNA, 22 bp, Artificial Sequence
  Synthetic oligonucleotide; CTC chr11 5230985 5231006 5231002 5231007 +
aaccctcaagtaggcctgggtg

SEQ ID NO: 85571 - DNA, 22 bp, Artificial Sequence
  Synthetic oligonucleotide; CTC chr11 5230992 5231013 5231009 5231014 +
aagtaggcctgggtgtctgttg

SEQ ID NO: 85572 - DNA, 22 bp, Artificial Sequence
  Synthetic oligonucleotide; CTG chr11 5231003 5231024 5231020 5231025 +
ggtgtctgttgatctatttttt

SEQ ID NO: 85573 - DNA, 22 bp, Artificial Sequence
  Synthetic oligonucleotide; CTG chr11 5231011 5231032 5231028 5231033 +
ttgatctattttttgtgtccat

SEQ ID NO: 85574 - DNA, 22 bp, Artificial Sequence
  Synthetic oligonucleotide; TTG chr11 5231014 5231035 5231031 5231036 +
atctattttttgtgtccatgtg

SEQ ID NO: 85575 - DNA, 22 bp, Artificial Sequence
  Synthetic oligonucleotide; CTA chr11 5231019 5231040 5231036 5231041 +
ttttttgtgtccatgtgtatca

SEQ ID NO: 85576 - DNA, 22 bp, Artificial Sequence
  Synthetic oligonucleotide; TTT chr11 5231022 5231043 5231039 5231044 +
tttgtgtccatgtgtatcatca

SEQ ID NO: 85577 - DNA, 22 bp, Artificial Sequence
  Synthetic oligonucleotide; TTT chr11 5231023 5231044 5231040 5231045 +
ttgtgtccatgtgtatcatcat

SEQ ID NO: 85578 - DNA, 22 bp, Artificial Sequence
  Synthetic oligonucleotide; TTT chr11 5231024 5231045 5231041 5231046 +
tgtgtccatgtgtatcatcatt

SEQ ID NO: 85579 - DNA, 22 bp, Artificial Sequence
  Synthetic oligonucleotide; TTT chr11 5231025 5231046 5231042 5231047 +
gtgtccatgtgtatcatcattt

SEQ ID NO: 85580 - DNA, 22 bp, Artificial Sequence
  Synthetic oligonucleotide; TTG chr11 5231026 5231047 5231043 5231048 +
tgtccatgtgtatcatcattta

SEQ ID NO: 85581 - DNA, 22 bp, Artificial Sequence
  Synthetic oligonucleotide; TTT chr11 5231047 5231068 5231064 5231069 +
agctcccacactcctagactct

SEQ ID NO: 85582 - DNA, 22 bp, Artificial Sequence
  Synthetic oligonucleotide; TTA chr11 5231048 5231069 5231065 5231070 +
gctcccacactcctagactctt

SEQ ID NO: 85583 - DNA, 22 bp, Artificial Sequence
  Synthetic oligonucleotide; CTC chr11 5231052 5231073 5231069 5231074 +
ccacactcctagactcttacaa

SEQ ID NO: 85584 - DNA, 22 bp, Artificial Sequence
  Synthetic oligonucleotide; CTC chr11 5231060 5231081 5231077 5231082 +
ctagactcttacaaaagctcta

SEQ ID NO: 85585 - DNA, 22 bp, Artificial Sequence
  Synthetic oligonucleotide; CTA chr11 5231063 5231084 5231080 5231085 +
gactcttacaaaagctctactc

SEQ ID NO: 85586 - DNA, 22 bp, Artificial Sequence
  Synthetic oligonucleotide; CTC chr11 5231068 5231089 5231085 5231090 +
ttacaaaagctctactctaaca

SEQ ID NO: 85587 - DNA, 22 bp, Artificial Sequence
  Synthetic oligonucleotide; CTT chr11 5231070 5231091 5231087 5231092 +
acaaaagctctactctaacaaa

SEQ ID NO: 85588 - DNA, 22 bp, Artificial Sequence
  Synthetic oligonucleotide; TTA chr11 5231071 5231092 5231088 5231093 +
caaaagctctactctaacaaat

SEQ ID NO: 85589 - DNA, 22 bp, Artificial Sequence
  Synthetic oligonucleotide; CTC chr11 5231080 5231101 5231097 5231102 +
tactctaacaaataattttaat

SEQ ID NO: 85590 - DNA, 22 bp, Artificial Sequence
  Synthetic oligonucleotide; CTA chr11 5231082 5231103 5231099 5231104 +
ctctaacaaataattttaatat

SEQ ID NO: 85591 - DNA, 22 bp, Artificial Sequence
  Synthetic oligonucleotide; CTC chr11 5231085 5231106 5231102 5231107 +
taacaaataattttaatataac

SEQ ID NO: 85592 - DNA, 22 bp, Artificial Sequence
  Synthetic oligonucleotide; CTA chr11 5231087 5231108 5231104 5231109 +
acaaataattttaatataacaa

SEQ ID NO: 85593 - DNA, 22 bp, Artificial Sequence
  Synthetic oligonucleotide; TTT chr11 5231098 5231119 5231115 5231120 +
taatataacaacaaggtgccaa

SEQ ID NO: 85594 - DNA, 22 bp, Artificial Sequence
  Synthetic oligonucleotide; TTT chr11 5231099 5231120 5231116 5231121 +
aatataacaacaaggtgccaag

SEQ ID NO: 85595 - DNA, 22 bp, Artificial Sequence
  Synthetic oligonucleotide; TTA chr11 5231100 5231121 5231117 5231122 +
atataacaacaaggtgccaagt

SEQ ID NO: 85596 - DNA, 22 bp, Artificial Sequence
  Synthetic oligonucleotide; CTT chr11 5231125 5231146 5231142 5231147 +
ttttcatctcttgacctcctca

SEQ ID NO: 85597 - DNA, 22 bp, Artificial Sequence
  Synthetic oligonucleotide; TTT chr11 5231126 5231147 5231143 5231148 +
tttcatctcttgacctcctcat

SEQ ID NO: 85598 - DNA, 22 bp, Artificial Sequence
  Synthetic oligonucleotide; TTT chr11 5231127 5231148 5231144 5231149 +
ttcatctcttgacctcctcatc

SEQ ID NO: 85599 - DNA, 22 bp, Artificial Sequence
  Synthetic oligonucleotide; TTT chr11 5231128 5231149 5231145 5231150 +
tcatctcttgacctcctcatct

SEQ ID NO: 85600 - DNA, 22 bp, Artificial Sequence
  Synthetic oligonucleotide; TTT chr11 5231129 5231150 5231146 5231151 +
catctcttgacctcctcatctt

SEQ ID NO: 85601 - DNA, 22 bp, Artificial Sequence
  Synthetic oligonucleotide; TTC chr11 5231130 5231151 5231147 5231152 +
atctcttgacctcctcatcttc

SEQ ID NO: 85602 - DNA, 22 bp, Artificial Sequence
  Synthetic oligonucleotide; CTC chr11 5231135 5231156 5231152 5231157 +
ttgacctcctcatcttcaatat

SEQ ID NO: 85603 - DNA, 22 bp, Artificial Sequence
  Synthetic oligonucleotide; CTT chr11 5231137 5231158 5231154 5231159 +
gacctcctcatcttcaatatga

SEQ ID NO: 85604 - DNA, 22 bp, Artificial Sequence
  Synthetic oligonucleotide; TTG chr11 5231138 5231159 5231155 5231160 +
acctcctcatcttcaatatgaa

SEQ ID NO: 85605 - DNA, 22 bp, Artificial Sequence
  Synthetic oligonucleotide; CTC chr11 5231143 5231164 5231160 5231165 +
ctcatcttcaatatgaagatag

SEQ ID NO: 85606 - DNA, 22 bp, Artificial Sequence
  Synthetic oligonucleotide; CTC chr11 5231146 5231167 5231163 5231168 +
atcttcaatatgaagatagcaa

SEQ ID NO: 85607 - DNA, 22 bp, Artificial Sequence
  Synthetic oligonucleotide; CTT chr11 5231151 5231172 5231168 5231173 +
caatatgaagatagcaatgcct

SEQ ID NO: 85608 - DNA, 22 bp, Artificial Sequence
  Synthetic oligonucleotide; TTC chr11 5231152 5231173 5231169 5231174 +
aatatgaagatagcaatgccta

SEQ ID NO: 85609 - DNA, 22 bp, Artificial Sequence
  Synthetic oligonucleotide; CTA chr11 5231174 5231195 5231191 5231196 +
gcatatagtaattgtgtgtgct

SEQ ID NO: 85610 - DNA, 22 bp, Artificial Sequence
  Synthetic oligonucleotide; TTG chr11 5231188 5231209 5231205 5231210 +
tgtgtgctcggcacatgtccca

SEQ ID NO: 85611 - DNA, 22 bp, Artificial Sequence
  Synthetic oligonucleotide; CTC chr11 5231197 5231218 5231214 5231219 +
ggcacatgtcccatccaggtga

SEQ ID NO: 85612 - DNA, 22 bp, Artificial Sequence
  Synthetic oligonucleotide; TTC chr11 5231224 5231245 5231241 5231246 +
tcatgaattctctggtatttgg

SEQ ID NO: 85613 - DNA, 22 bp, Artificial Sequence
  Synthetic oligonucleotide; CTC chr11 5231226 5231247 5231243 5231248 +
atgaattctctggtatttggat

SEQ ID NO: 85614 - DNA, 22 bp, Artificial Sequence
  Synthetic oligonucleotide; TTC chr11 5231234 5231255 5231251 5231256 +
tctggtatttggatttttaggg

SEQ ID NO: 85615 - DNA, 22 bp, Artificial Sequence
  Synthetic oligonucleotide; CTC chr11 5231236 5231257 5231253 5231258 +
tggtatttggatttttagggcc

SEQ ID NO: 85616 - DNA, 22 bp, Artificial Sequence
  Synthetic oligonucleotide; CTG chr11 5231238 5231259 5231255 5231260 +
gtatttggatttttagggccaa

SEQ ID NO: 85617 - DNA, 22 bp, Artificial Sequence
  Synthetic oligonucleotide; TTT chr11 5231244 5231265 5231261 5231266 +
ggatttttagggccaacatctt

SEQ ID NO: 85618 - DNA, 22 bp, Artificial Sequence
  Synthetic oligonucleotide; TTG chr11 5231245 5231266 5231262 5231267 +
gatttttagggccaacatcttg

SEQ ID NO: 85619 - DNA, 22 bp, Artificial Sequence
  Synthetic oligonucleotide; TTT chr11 5231250 5231271 5231267 5231272 +
ttagggccaacatcttgcctag

SEQ ID NO: 85620 - DNA, 22 bp, Artificial Sequence
  Synthetic oligonucleotide; TTT chr11 5231251 5231272 5231268 5231273 +
tagggccaacatcttgcctaga

SEQ ID NO: 85621 - DNA, 22 bp, Artificial Sequence
  Synthetic oligonucleotide; TTT chr11 5231252 5231273 5231269 5231274 +
agggccaacatcttgcctagac

SEQ ID NO: 85622 - DNA, 22 bp, Artificial Sequence
  Synthetic oligonucleotide; TTA chr11 5231253 5231274 5231270 5231275 +
gggccaacatcttgcctagact

SEQ ID NO: 85623 - DNA, 22 bp, Artificial Sequence
  Synthetic oligonucleotide; CTT chr11 5231266 5231287 5231283 5231288 +
gcctagactcactgactacttc

SEQ ID NO: 85624 - DNA, 22 bp, Artificial Sequence
  Synthetic oligonucleotide; TTG chr11 5231267 5231288 5231284 5231289 +
cctagactcactgactacttct

SEQ ID NO: 85625 - DNA, 22 bp, Artificial Sequence
  Synthetic oligonucleotide; CTA chr11 5231271 5231292 5231288 5231293 +
gactcactgactacttctaatg

SEQ ID NO: 85626 - DNA, 22 bp, Artificial Sequence
  Synthetic oligonucleotide; CTC chr11 5231276 5231297 5231293 5231298 +
actgactacttctaatggtgta

SEQ ID NO: 85627 - DNA, 22 bp, Artificial Sequence
  Synthetic oligonucleotide; CTG chr11 5231280 5231301 5231297 5231302 +
actacttctaatggtgtaggaa

SEQ ID NO: 85628 - DNA, 22 bp, Artificial Sequence
  Synthetic oligonucleotide; CTA chr11 5231284 5231305 5231301 5231306 +
cttctaatggtgtaggaataga

SEQ ID NO: 85629 - DNA, 22 bp, Artificial Sequence
  Synthetic oligonucleotide; CTT chr11 5231287 5231308 5231304 5231309 +
ctaatggtgtaggaatagaagg

SEQ ID NO: 85630 - DNA, 22 bp, Artificial Sequence
  Synthetic oligonucleotide; TTC chr11 5231288 5231309 5231305 5231310 +
taatggtgtaggaatagaaggt

SEQ ID NO: 85631 - DNA, 22 bp, Artificial Sequence
  Synthetic oligonucleotide; CTA chr11 5231290 5231311 5231307 5231312 +
atggtgtaggaatagaaggtat

SEQ ID NO: 85632 - DNA, 22 bp, Artificial Sequence
  Synthetic oligonucleotide; CTA chr11 5231321 5231342 5231338 5231343 +
tatttgctctttttttttgact

SEQ ID NO: 85633 - DNA, 22 bp, Artificial Sequence
  Synthetic oligonucleotide; TTT chr11 5231326 5231347 5231343 5231348 +
gctctttttttttgacttttgg

SEQ ID NO: 85634 - DNA, 22 bp, Artificial Sequence
  Synthetic oligonucleotide; TTG chr11 5231327 5231348 5231344 5231349 +
ctctttttttttgacttttgga

SEQ ID NO: 85635 - DNA, 22 bp, Artificial Sequence
  Synthetic oligonucleotide; CTC chr11 5231330 5231351 5231347 5231352 +
tttttttttgacttttggagaa

SEQ ID NO: 85636 - DNA, 22 bp, Artificial Sequence
  Synthetic oligonucleotide; CTT chr11 5231332 5231353 5231349 5231354 +
tttttttgacttttggagaaag

SEQ ID NO: 85637 - DNA, 22 bp, Artificial Sequence
  Synthetic oligonucleotide; TTT chr11 5231333 5231354 5231350 5231355 +
ttttttgacttttggagaaagg

SEQ ID NO: 85638 - DNA, 22 bp, Artificial Sequence
  Synthetic oligonucleotide; TTT chr11 5231334 5231355 5231351 5231356 +
tttttgacttttggagaaagga

SEQ ID NO: 85639 - DNA, 22 bp, Artificial Sequence
  Synthetic oligonucleotide; TTT chr11 5231335 5231356 5231352 5231357 +
ttttgacttttggagaaaggaa

SEQ ID NO: 85640 - DNA, 22 bp, Artificial Sequence
  Synthetic oligonucleotide; TTT chr11 5231336 5231357 5231353 5231358 +
tttgacttttggagaaaggaat

SEQ ID NO: 85641 - DNA, 22 bp, Artificial Sequence
  Synthetic oligonucleotide; TTT chr11 5231337 5231358 5231354 5231359 +
ttgacttttggagaaaggaatg

SEQ ID NO: 85642 - DNA, 22 bp, Artificial Sequence
  Synthetic oligonucleotide; TTT chr11 5231338 5231359 5231355 5231360 +
tgacttttggagaaaggaatgt

SEQ ID NO: 85643 - DNA, 22 bp, Artificial Sequence
  Synthetic oligonucleotide; TTT chr11 5231339 5231360 5231356 5231361 +
gacttttggagaaaggaatgta

SEQ ID NO: 85644 - DNA, 22 bp, Artificial Sequence
  Synthetic oligonucleotide; TTG chr11 5231340 5231361 5231357 5231362 +
acttttggagaaaggaatgtag

SEQ ID NO: 85645 - DNA, 22 bp, Artificial Sequence
  Synthetic oligonucleotide; CTT chr11 5231344 5231365 5231361 5231366 +
ttggagaaaggaatgtagtttg

SEQ ID NO: 85646 - DNA, 22 bp, Artificial Sequence
  Synthetic oligonucleotide; TTT chr11 5231345 5231366 5231362 5231367 +
tggagaaaggaatgtagtttgt

SEQ ID NO: 85647 - DNA, 22 bp, Artificial Sequence
  Synthetic oligonucleotide; TTT chr11 5231346 5231367 5231363 5231368 +
ggagaaaggaatgtagtttgtt

SEQ ID NO: 85648 - DNA, 22 bp, Artificial Sequence
  Synthetic oligonucleotide; TTG chr11 5231347 5231368 5231364 5231369 +
gagaaaggaatgtagtttgttt

SEQ ID NO: 85649 - DNA, 22 bp, Artificial Sequence
  Synthetic oligonucleotide; TTT chr11 5231365 5231386 5231382 5231387 +
gttttccctatcaagatcataa

SEQ ID NO: 85650 - DNA, 22 bp, Artificial Sequence
  Synthetic oligonucleotide; TTG chr11 5231366 5231387 5231383 5231388 +
ttttccctatcaagatcataag

SEQ ID NO: 85651 - DNA, 22 bp, Artificial Sequence
  Synthetic oligonucleotide; TTT chr11 5231369 5231390 5231386 5231391 +
tccctatcaagatcataaggtc

SEQ ID NO: 85652 - DNA, 22 bp, Artificial Sequence
  Synthetic oligonucleotide; TTT chr11 5231370 5231391 5231387 5231392 +
ccctatcaagatcataaggtct

SEQ ID NO: 85653 - DNA, 22 bp, Artificial Sequence
  Synthetic oligonucleotide; TTC chr11 5231371 5231392 5231388 5231393 +
cctatcaagatcataaggtcta

SEQ ID NO: 85654 - DNA, 22 bp, Artificial Sequence
  Synthetic oligonucleotide; CTA chr11 5231375 5231396 5231392 5231397 +
tcaagatcataaggtctacaat

SEQ ID NO: 85655 - DNA, 22 bp, Artificial Sequence
  Synthetic oligonucleotide; CTA chr11 5231393 5231414 5231410 5231415 +
caatctctcttactgtctttcg

SEQ ID NO: 85656 - DNA, 22 bp, Artificial Sequence
  Synthetic oligonucleotide; CTC chr11 5231400 5231421 5231417 5231422 +
tcttactgtctttcgaatacca

SEQ ID NO: 85657 - DNA, 22 bp, Artificial Sequence
  Synthetic oligonucleotide; CTC chr11 5231402 5231423 5231419 5231424 +
ttactgtctttcgaataccaca

SEQ ID NO: 85658 - DNA, 22 bp, Artificial Sequence
  Synthetic oligonucleotide; CTT chr11 5231404 5231425 5231421 5231426 +
actgtctttcgaataccacaca

SEQ ID NO: 85659 - DNA, 22 bp, Artificial Sequence
  Synthetic oligonucleotide; TTA chr11 5231405 5231426 5231422 5231427 +
ctgtctttcgaataccacacaa

SEQ ID NO: 85660 - DNA, 22 bp, Artificial Sequence
  Synthetic oligonucleotide; CTG chr11 5231408 5231429 5231425 5231430 +
tctttcgaataccacacaagta

SEQ ID NO: 85661 - DNA, 22 bp, Artificial Sequence
  Synthetic oligonucleotide; CTT chr11 5231412 5231433 5231429 5231434 +
tcgaataccacacaagtatctc

SEQ ID NO: 85662 - DNA, 22 bp, Artificial Sequence
  Synthetic oligonucleotide; TTT chr11 5231413 5231434 5231430 5231435 +
cgaataccacacaagtatctcc

SEQ ID NO: 85663 - DNA, 22 bp, Artificial Sequence
  Synthetic oligonucleotide; TTC chr11 5231414 5231435 5231431 5231436 +
gaataccacacaagtatctcct

SEQ ID NO: 85664 - DNA, 22 bp, Artificial Sequence
  Synthetic oligonucleotide; CTC chr11 5231434 5231455 5231451 5231456 +
cttttaatatcttactcttatg

SEQ ID NO: 85665 - DNA, 22 bp, Artificial Sequence
  Synthetic oligonucleotide; CTT chr11 5231437 5231458 5231454 5231459 +
ttaatatcttactcttatgaga

SEQ ID NO: 85666 - DNA, 22 bp, Artificial Sequence
  Synthetic oligonucleotide; TTT chr11 5231438 5231459 5231455 5231460 +
taatatcttactcttatgagaa

SEQ ID NO: 85667 - DNA, 22 bp, Artificial Sequence
  Synthetic oligonucleotide; TTT chr11 5231439 5231460 5231456 5231461 +
aatatcttactcttatgagaac

SEQ ID NO: 85668 - DNA, 22 bp, Artificial Sequence
  Synthetic oligonucleotide; TTA chr11 5231440 5231461 5231457 5231462 +
atatcttactcttatgagaact

SEQ ID NO: 85669 - DNA, 22 bp, Artificial Sequence
  Synthetic oligonucleotide; CTT chr11 5231447 5231468 5231464 5231469 +
actcttatgagaacttccctat

SEQ ID NO: 85670 - DNA, 22 bp, Artificial Sequence
  Synthetic oligonucleotide; TTA chr11 5231448 5231469 5231465 5231470 +
ctcttatgagaacttccctatg

SEQ ID NO: 85671 - DNA, 22 bp, Artificial Sequence
  Synthetic oligonucleotide; CTC chr11 5231451 5231472 5231468 5231473 +
ttatgagaacttccctatgctc

SEQ ID NO: 85672 - DNA, 22 bp, Artificial Sequence
  Synthetic oligonucleotide; CTT chr11 5231453 5231474 5231470 5231475 +
atgagaacttccctatgctcag

SEQ ID NO: 85673 - DNA, 22 bp, Artificial Sequence
  Synthetic oligonucleotide; TTA chr11 5231454 5231475 5231471 5231476 +
tgagaacttccctatgctcagg

SEQ ID NO: 85674 - DNA, 22 bp, Artificial Sequence
  Synthetic oligonucleotide; CTT chr11 5231463 5231484 5231480 5231485 +
ccctatgctcaggaatgtgaaa

SEQ ID NO: 85675 - DNA, 22 bp, Artificial Sequence
  Synthetic oligonucleotide; TTC chr11 5231464 5231485 5231481 5231486 +
cctatgctcaggaatgtgaaag

SEQ ID NO: 85676 - DNA, 22 bp, Artificial Sequence
  Synthetic oligonucleotide; CTA chr11 5231468 5231489 5231485 5231490 +
tgctcaggaatgtgaaagtgat

SEQ ID NO: 85677 - DNA, 22 bp, Artificial Sequence
  Synthetic oligonucleotide; CTC chr11 5231473 5231494 5231490 5231495 +
aggaatgtgaaagtgatcttcc

SEQ ID NO: 85678 - DNA, 22 bp, Artificial Sequence
  Synthetic oligonucleotide; CTT chr11 5231493 5231514 5231510 5231515 +
ccccaaaatgccctgagtagct

SEQ ID NO: 85679 - DNA, 22 bp, Artificial Sequence
  Synthetic oligonucleotide; TTC chr11 5231494 5231515 5231511 5231516 +
cccaaaatgccctgagtagctc

SEQ ID NO: 85680 - DNA, 22 bp, Artificial Sequence
  Synthetic oligonucleotide; CTG chr11 5231508 5231529 5231525 5231530 +
agtagctctgcttctgatatgt

SEQ ID NO: 85681 - DNA, 22 bp, Artificial Sequence
  Synthetic oligonucleotide; CTC chr11 5231516 5231537 5231533 5231538 +
tgcttctgatatgtaaaccagt

SEQ ID NO: 85682 - DNA, 22 bp, Artificial Sequence
  Synthetic oligonucleotide; CTG chr11 5231518 5231539 5231535 5231540 +
cttctgatatgtaaaccagtgg

SEQ ID NO: 85683 - DNA, 22 bp, Artificial Sequence
  Synthetic oligonucleotide; CTT chr11 5231521 5231542 5231538 5231543 +
ctgatatgtaaaccagtggttc

SEQ ID NO: 85684 - DNA, 22 bp, Artificial Sequence
  Synthetic oligonucleotide; TTC chr11 5231522 5231543 5231539 5231544 +
tgatatgtaaaccagtggttcc

SEQ ID NO: 85685 - DNA, 22 bp, Artificial Sequence
  Synthetic oligonucleotide; CTG chr11 5231524 5231545 5231541 5231546 +
atatgtaaaccagtggttccta

SEQ ID NO: 85686 - DNA, 22 bp, Artificial Sequence
  Synthetic oligonucleotide; TTC chr11 5231543 5231564 5231560 5231565 +
ctaaatatcttattcagatata

SEQ ID NO: 85687 - DNA, 22 bp, Artificial Sequence
  Synthetic oligonucleotide; CTA chr11 5231546 5231567 5231563 5231568 +
aatatcttattcagatataaag

SEQ ID NO: 85688 - DNA, 22 bp, Artificial Sequence
  Synthetic oligonucleotide; CTT chr11 5231554 5231575 5231571 5231576 +
attcagatataaagagttctca

SEQ ID NO: 85689 - DNA, 22 bp, Artificial Sequence
  Synthetic oligonucleotide; TTA chr11 5231555 5231576 5231572 5231577 +
ttcagatataaagagttctcag

SEQ ID NO: 85690 - DNA, 22 bp, Artificial Sequence
  Synthetic oligonucleotide; TTC chr11 5231558 5231579 5231575 5231580 +
agatataaagagttctcagtgc

SEQ ID NO: 85691 - DNA, 22 bp, Artificial Sequence
  Synthetic oligonucleotide; TTC chr11 5231573 5231594 5231590 5231595 +
tcagtgcctactatgtataatg

SEQ ID NO: 85692 - DNA, 22 bp, Artificial Sequence
  Synthetic oligonucleotide; CTC chr11 5231575 5231596 5231592 5231597 +
agtgcctactatgtataatgac

SEQ ID NO: 85693 - DNA, 22 bp, Artificial Sequence
  Synthetic oligonucleotide; CTA chr11 5231583 5231604 5231600 5231605 +
ctatgtataatgacttaaggaa

SEQ ID NO: 85694 - DNA, 22 bp, Artificial Sequence
  Synthetic oligonucleotide; CTA chr11 5231586 5231607 5231603 5231608 +
tgtataatgacttaaggaaaac

SEQ ID NO: 85695 - DNA, 22 bp, Artificial Sequence
  Synthetic oligonucleotide; CTT chr11 5231599 5231620 5231616 5231621 +
aaggaaaacacatggatataaa

SEQ ID NO: 85696 - DNA, 22 bp, Artificial Sequence
  Synthetic oligonucleotide; TTA chr11 5231600 5231621 5231617 5231622 +
aggaaaacacatggatataaaa

SEQ ID NO: 85697 - DNA, 22 bp, Artificial Sequence
  Synthetic oligonucleotide; CTT chr11 5231628 5231649 5231645 5231650 +
ctgctgccagtcaattcaaaat

SEQ ID NO: 85698 - DNA, 22 bp, Artificial Sequence
  Synthetic oligonucleotide; TTC chr11 5231629 5231650 5231646 5231651 +
tgctgccagtcaattcaaaatg

SEQ ID NO: 85699 - DNA, 22 bp, Artificial Sequence
  Synthetic oligonucleotide; CTG chr11 5231631 5231652 5231648 5231653 +
ctgccagtcaattcaaaatgtt

SEQ ID NO: 85700 - DNA, 22 bp, Artificial Sequence
  Synthetic oligonucleotide; CTG chr11 5231634 5231655 5231651 5231656 +
ccagtcaattcaaaatgttgtg

SEQ ID NO: 85701 - DNA, 22 bp, Artificial Sequence
  Synthetic oligonucleotide; TTC chr11 5231645 5231666 5231662 5231667 +
aaaatgttgtgatcaaaacagt

SEQ ID NO: 85702 - DNA, 22 bp, Artificial Sequence
  Synthetic oligonucleotide; TTG chr11 5231654 5231675 5231671 5231676 +
tgatcaaaacagttaactataa

SEQ ID NO: 85703 - DNA, 22 bp, Artificial Sequence
  Synthetic oligonucleotide; TTA chr11 5231669 5231690 5231686 5231691 +
actataacacattgtcagtata

SEQ ID NO: 85704 - DNA, 22 bp, Artificial Sequence
  Synthetic oligonucleotide; CTA chr11 5231673 5231694 5231690 5231695 +
taacacattgtcagtatattct

SEQ ID NO: 85705 - DNA, 22 bp, Artificial Sequence
  Synthetic oligonucleotide; TTG chr11 5231683 5231704 5231700 5231705 +
tcagtatattctggcagtacag

SEQ ID NO: 85706 - DNA, 22 bp, Artificial Sequence
  Synthetic oligonucleotide; TTC chr11 5231694 5231715 5231711 5231716 +
tggcagtacagacagagttact

SEQ ID NO: 85707 - DNA, 22 bp, Artificial Sequence
  Synthetic oligonucleotide; CTG chr11 5231696 5231717 5231713 5231718 +
gcagtacagacagagttactgt

SEQ ID NO: 85708 - DNA, 22 bp, Artificial Sequence
  Synthetic oligonucleotide; TTA chr11 5231714 5231735 5231731 5231736 +
ctgtgaaagcactttcaaacac

SEQ ID NO: 85709 - DNA, 22 bp, Artificial Sequence
  Synthetic oligonucleotide; CTG chr11 5231717 5231738 5231734 5231739 +
tgaaagcactttcaaacacaag

SEQ ID NO: 85710 - DNA, 22 bp, Artificial Sequence
  Synthetic oligonucleotide; CTT chr11 5231728 5231749 5231745 5231750 +
tcaaacacaaggaaacaacaga

SEQ ID NO: 85711 - DNA, 22 bp, Artificial Sequence
  Synthetic oligonucleotide; TTT chr11 5231729 5231750 5231746 5231751 +
caaacacaaggaaacaacagat

SEQ ID NO: 85712 - DNA, 22 bp, Artificial Sequence
  Synthetic oligonucleotide; TTC chr11 5231730 5231751 5231747 5231752 +
aaacacaaggaaacaacagatt

SEQ ID NO: 85713 - DNA, 22 bp, Artificial Sequence
  Synthetic oligonucleotide; TTC chr11 5231753 5231774 5231770 5231775 +
tgtttaggtattcaagtaagtt

SEQ ID NO: 85714 - DNA, 22 bp, Artificial Sequence
  Synthetic oligonucleotide; CTG chr11 5231755 5231776 5231772 5231777 +
tttaggtattcaagtaagttta

SEQ ID NO: 85715 - DNA, 22 bp, Artificial Sequence
  Synthetic oligonucleotide; TTT chr11 5231758 5231779 5231775 5231780 +
aggtattcaagtaagtttaaaa

SEQ ID NO: 85716 - DNA, 22 bp, Artificial Sequence
  Synthetic oligonucleotide; TTA chr11 5231759 5231780 5231776 5231781 +
ggtattcaagtaagtttaaaat

SEQ ID NO: 85717 - DNA, 22 bp, Artificial Sequence
  Synthetic oligonucleotide; TTC chr11 5231766 5231787 5231783 5231788 +
aagtaagtttaaaattaatcaa

SEQ ID NO: 85718 - DNA, 22 bp, Artificial Sequence
  Synthetic oligonucleotide; TTT chr11 5231776 5231797 5231793 5231798 +
aaaattaatcaacatgcatata

SEQ ID NO: 85719 - DNA, 22 bp, Artificial Sequence
  Synthetic oligonucleotide; TTA chr11 5231777 5231798 5231794 5231799 +
aaattaatcaacatgcatataa

SEQ ID NO: 85720 - DNA, 22 bp, Artificial Sequence
  Synthetic oligonucleotide; TTA chr11 5231783 5231804 5231800 5231805 +
atcaacatgcatataatacaga

SEQ ID NO: 85721 - DNA, 22 bp, Artificial Sequence
  Synthetic oligonucleotide; TTT chr11 5231808 5231829 5231825 5231830 +
ttaaaaatgtatacaactgaga

SEQ ID NO: 85722 - DNA, 22 bp, Artificial Sequence
  Synthetic oligonucleotide; TTT chr11 5231809 5231830 5231826 5231831 +
taaaaatgtatacaactgagaa

SEQ ID NO: 85723 - DNA, 22 bp, Artificial Sequence
  Synthetic oligonucleotide; TTT chr11 5231810 5231831 5231827 5231832 +
aaaaatgtatacaactgagaaa

SEQ ID NO: 85724 - DNA, 22 bp, Artificial Sequence
  Synthetic oligonucleotide; TTA chr11 5231811 5231832 5231828 5231833 +
aaaatgtatacaactgagaaag

SEQ ID NO: 85725 - DNA, 22 bp, Artificial Sequence
  Synthetic oligonucleotide; CTG chr11 5231827 5231848 5231844 5231849 +
agaaagttctaaaaatccttct

SEQ ID NO: 85726 - DNA, 22 bp, Artificial Sequence
  Synthetic oligonucleotide; TTC chr11 5231836 5231857 5231853 5231858 +
taaaaatccttctaattttacc

SEQ ID NO: 85727 - DNA, 22 bp, Artificial Sequence
  Synthetic oligonucleotide; CTA chr11 5231838 5231859 5231855 5231860 +
aaaatccttctaattttaccta

SEQ ID NO: 85728 - DNA, 22 bp, Artificial Sequence
  Synthetic oligonucleotide; CTT chr11 5231847 5231868 5231864 5231869 +
ctaattttacctatggcaaaaa

SEQ ID NO: 85729 - DNA, 22 bp, Artificial Sequence
  Synthetic oligonucleotide; TTC chr11 5231848 5231869 5231865 5231870 +
taattttacctatggcaaaaat

SEQ ID NO: 85730 - DNA, 22 bp, Artificial Sequence
  Synthetic oligonucleotide; CTA chr11 5231850 5231871 5231867 5231872 +
attttacctatggcaaaaatgg

SEQ ID NO: 85731 - DNA, 22 bp, Artificial Sequence
  Synthetic oligonucleotide; TTT chr11 5231854 5231875 5231871 5231876 +
tacctatggcaaaaatggtgct

SEQ ID NO: 85732 - DNA, 22 bp, Artificial Sequence
  Synthetic oligonucleotide; TTT chr11 5231855 5231876 5231872 5231877 +
acctatggcaaaaatggtgctc

SEQ ID NO: 85733 - DNA, 22 bp, Artificial Sequence
  Synthetic oligonucleotide; TTA chr11 5231856 5231877 5231873 5231878 +
cctatggcaaaaatggtgctca

SEQ ID NO: 85734 - DNA, 22 bp, Artificial Sequence
  Synthetic oligonucleotide; CTA chr11 5231860 5231881 5231877 5231882 +
tggcaaaaatggtgctcaagga

SEQ ID NO: 85735 - DNA, 22 bp, Artificial Sequence
  Synthetic oligonucleotide; CTC chr11 5231877 5231898 5231894 5231899 +
aaggaaaaaaatattactccta

SEQ ID NO: 85736 - DNA, 22 bp, Artificial Sequence
  Synthetic oligonucleotide; TTA chr11 5231893 5231914 5231910 5231915 +
ctcctatgatcagaaaggaaat

SEQ ID NO: 85737 - DNA, 22 bp, Artificial Sequence
  Synthetic oligonucleotide; CTC chr11 5231896 5231917 5231913 5231918 +
ctatgatcagaaaggaaataac

SEQ ID NO: 85738 - DNA, 22 bp, Artificial Sequence
  Synthetic oligonucleotide; CTA chr11 5231899 5231920 5231916 5231921 +
tgatcagaaaggaaataactgt

SEQ ID NO: 85739 - DNA, 22 bp, Artificial Sequence
  Synthetic oligonucleotide; CTG chr11 5231920 5231941 5231937 5231942 +
ttcggttgtttactgcatgctt

SEQ ID NO: 85740 - DNA, 22 bp, Artificial Sequence
  Synthetic oligonucleotide; TTC chr11 5231923 5231944 5231940 5231945 +
ggttgtttactgcatgcttcct

SEQ ID NO: 85741 - DNA, 22 bp, Artificial Sequence
  Synthetic oligonucleotide; TTG chr11 5231928 5231949 5231945 5231950 +
tttactgcatgcttcctctttg

SEQ ID NO: 85742 - DNA, 22 bp, Artificial Sequence
  Synthetic oligonucleotide; TTT chr11 5231931 5231952 5231948 5231953 +
actgcatgcttcctctttgtat

SEQ ID NO: 85743 - DNA, 22 bp, Artificial Sequence
  Synthetic oligonucleotide; TTA chr11 5231932 5231953 5231949 5231954 +
ctgcatgcttcctctttgtatg

SEQ ID NO: 85744 - DNA, 22 bp, Artificial Sequence
  Synthetic oligonucleotide; CTG chr11 5231935 5231956 5231952 5231957 +
catgcttcctctttgtatgttg

SEQ ID NO: 85745 - DNA, 22 bp, Artificial Sequence
  Synthetic oligonucleotide; CTT chr11 5231942 5231963 5231959 5231964 +
cctctttgtatgttgtagcatt

SEQ ID NO: 85746 - DNA, 22 bp, Artificial Sequence
  Synthetic oligonucleotide; TTC chr11 5231943 5231964 5231960 5231965 +
ctctttgtatgttgtagcatta

SEQ ID NO: 85747 - DNA, 22 bp, Artificial Sequence
  Synthetic oligonucleotide; CTC chr11 5231946 5231967 5231963 5231968 +
tttgtatgttgtagcattaaca

SEQ ID NO: 85748 - DNA, 22 bp, Artificial Sequence
  Synthetic oligonucleotide; CTT chr11 5231948 5231969 5231965 5231970 +
tgtatgttgtagcattaacaac

SEQ ID NO: 85749 - DNA, 22 bp, Artificial Sequence
  Synthetic oligonucleotide; TTT chr11 5231949 5231970 5231966 5231971 +
gtatgttgtagcattaacaaca

SEQ ID NO: 85750 - DNA, 22 bp, Artificial Sequence
  Synthetic oligonucleotide; TTG chr11 5231950 5231971 5231967 5231972 +
tatgttgtagcattaacaacaa

SEQ ID NO: 85751 - DNA, 22 bp, Artificial Sequence
  Synthetic oligonucleotide; TTG chr11 5231957 5231978 5231974 5231979 +
tagcattaacaacaaagaaaca

SEQ ID NO: 85752 - DNA, 22 bp, Artificial Sequence
  Synthetic oligonucleotide; TTA chr11 5231965 5231986 5231982 5231987 +
acaacaaagaaacactgtgcga

SEQ ID NO: 85753 - DNA, 22 bp, Artificial Sequence
  Synthetic oligonucleotide; CTG chr11 5231982 5232003 5231999 5232004 +
tgcgatggtattattaatattg

SEQ ID NO: 85754 - DNA, 22 bp, Artificial Sequence
  Synthetic oligonucleotide; TTA chr11 5231995 5232016 5232012 5232017 +
ttaatattgtcctctaattcca

SEQ ID NO: 85755 - DNA, 22 bp, Artificial Sequence
  Synthetic oligonucleotide; TTA chr11 5231998 5232019 5232015 5232020 +
atattgtcctctaattccagaa

SEQ ID NO: 85756 - DNA, 22 bp, Artificial Sequence
  Synthetic oligonucleotide; TTG chr11 5232004 5232025 5232021 5232026 +
tcctctaattccagaagttcta

SEQ ID NO: 85757 - DNA, 22 bp, Artificial Sequence
  Synthetic oligonucleotide; CTC chr11 5232009 5232030 5232026 5232031 +
taattccagaagttctaaagca

SEQ ID NO: 85758 - DNA, 22 bp, Artificial Sequence
  Synthetic oligonucleotide; CTA chr11 5232011 5232032 5232028 5232033 +
attccagaagttctaaagcaag

SEQ ID NO: 85759 - DNA, 22 bp, Artificial Sequence
  Synthetic oligonucleotide; TTC chr11 5232015 5232036 5232032 5232037 +
cagaagttctaaagcaaggaat

SEQ ID NO: 85760 - DNA, 22 bp, Artificial Sequence
  Synthetic oligonucleotide; TTC chr11 5232024 5232045 5232041 5232046 +
taaagcaaggaataatcattcc

SEQ ID NO: 85761 - DNA, 22 bp, Artificial Sequence
  Synthetic oligonucleotide; CTA chr11 5232026 5232047 5232043 5232048 +
aagcaaggaataatcattcctt

SEQ ID NO: 85762 - DNA, 22 bp, Artificial Sequence
  Synthetic oligonucleotide; TTC chr11 5232045 5232066 5232062 5232067 +
cttcatttactcatttactcat

SEQ ID NO: 85763 - DNA, 22 bp, Artificial Sequence
  Synthetic oligonucleotide; CTT chr11 5232048 5232069 5232065 5232070 +
catttactcatttactcattcg

SEQ ID NO: 85764 - DNA, 22 bp, Artificial Sequence
  Synthetic oligonucleotide; TTC chr11 5232049 5232070 5232066 5232071 +
atttactcatttactcattcgt

SEQ ID NO: 85765 - DNA, 22 bp, Artificial Sequence
  Synthetic oligonucleotide; TTT chr11 5232053 5232074 5232070 5232075 +
actcatttactcattcgttcat

SEQ ID NO: 85766 - DNA, 22 bp, Artificial Sequence
  Synthetic oligonucleotide; TTA chr11 5232054 5232075 5232071 5232076 +
ctcatttactcattcgttcatt

SEQ ID NO: 85767 - DNA, 22 bp, Artificial Sequence
  Synthetic oligonucleotide; CTC chr11 5232057 5232078 5232074 5232079 +
atttactcattcgttcattcat

SEQ ID NO: 85768 - DNA, 22 bp, Artificial Sequence
  Synthetic oligonucleotide; TTT chr11 5232061 5232082 5232078 5232083 +
actcattcgttcattcattcac

SEQ ID NO: 85769 - DNA, 22 bp, Artificial Sequence
  Synthetic oligonucleotide; TTA chr11 5232062 5232083 5232079 5232084 +
ctcattcgttcattcattcact

SEQ ID NO: 85770 - DNA, 22 bp, Artificial Sequence
  Synthetic oligonucleotide; CTC chr11 5232065 5232086 5232082 5232087 +
attcgttcattcattcactgtt

SEQ ID NO: 85771 - DNA, 22 bp, Artificial Sequence
  Synthetic oligonucleotide; TTC chr11 5232069 5232090 5232086 5232091 +
gttcattcattcactgttttct

SEQ ID NO: 85772 - DNA, 22 bp, Artificial Sequence
  Synthetic oligonucleotide; TTC chr11 5232073 5232094 5232090 5232095 +
attcattcactgttttcttgaa

SEQ ID NO: 85773 - DNA, 22 bp, Artificial Sequence
  Synthetic oligonucleotide; TTC chr11 5232077 5232098 5232094 5232099 +
attcactgttttcttgaataaa

SEQ ID NO: 85774 - DNA, 22 bp, Artificial Sequence
  Synthetic oligonucleotide; TTC chr11 5232081 5232102 5232098 5232103 +
actgttttcttgaataaatatt

SEQ ID NO: 85775 - DNA, 22 bp, Artificial Sequence
  Synthetic oligonucleotide; CTG chr11 5232085 5232106 5232102 5232107 +
ttttcttgaataaatattttct

SEQ ID NO: 85776 - DNA, 22 bp, Artificial Sequence
  Synthetic oligonucleotide; TTT chr11 5232088 5232109 5232105 5232110 +
tcttgaataaatattttctttc

SEQ ID NO: 85777 - DNA, 22 bp, Artificial Sequence
  Synthetic oligonucleotide; TTT chr11 5232089 5232110 5232106 5232111 +
cttgaataaatattttctttct

SEQ ID NO: 85778 - DNA, 22 bp, Artificial Sequence
  Synthetic oligonucleotide; TTC chr11 5232090 5232111 5232107 5232112 +
ttgaataaatattttctttctg

SEQ ID NO: 85779 - DNA, 22 bp, Artificial Sequence
  Synthetic oligonucleotide; CTT chr11 5232092 5232113 5232109 5232114 +
gaataaatattttctttctgcc

SEQ ID NO: 85780 - DNA, 22 bp, Artificial Sequence
  Synthetic oligonucleotide; TTG chr11 5232093 5232114 5232110 5232115 +
aataaatattttctttctgccc

SEQ ID NO: 85781 - DNA, 22 bp, Artificial Sequence
  Synthetic oligonucleotide; TTT chr11 5232104 5232125 5232121 5232126 +
tctttctgcccattgatgaatt

SEQ ID NO: 85782 - DNA, 22 bp, Artificial Sequence
  Synthetic oligonucleotide; TTT chr11 5232105 5232126 5232122 5232127 +
ctttctgcccattgatgaattt

SEQ ID NO: 85783 - DNA, 22 bp, Artificial Sequence
  Synthetic oligonucleotide; TTC chr11 5232106 5232127 5232123 5232128 +
tttctgcccattgatgaattta

SEQ ID NO: 85784 - DNA, 22 bp, Artificial Sequence
  Synthetic oligonucleotide; CTT chr11 5232108 5232129 5232125 5232130 +
tctgcccattgatgaatttaat

SEQ ID NO: 85785 - DNA, 22 bp, Artificial Sequence
  Synthetic oligonucleotide; TTT chr11 5232109 5232130 5232126 5232131 +
ctgcccattgatgaatttaata

SEQ ID NO: 85786 - DNA, 22 bp, Artificial Sequence
  Synthetic oligonucleotide; TTC chr11 5232110 5232131 5232127 5232132 +
tgcccattgatgaatttaatat

SEQ ID NO: 85787 - DNA, 22 bp, Artificial Sequence
  Synthetic oligonucleotide; CTG chr11 5232112 5232133 5232129 5232134 +
cccattgatgaatttaatatga

SEQ ID NO: 85788 - DNA, 22 bp, Artificial Sequence
  Synthetic oligonucleotide; TTG chr11 5232119 5232140 5232136 5232141 +
atgaatttaatatgaggcacag

SEQ ID NO: 85789 - DNA, 22 bp, Artificial Sequence
  Synthetic oligonucleotide; TTT chr11 5232127 5232148 5232144 5232149 +
aatatgaggcacagtaggcatg

SEQ ID NO: 85790 - DNA, 22 bp, Artificial Sequence
  Synthetic oligonucleotide; TTA chr11 5232128 5232149 5232145 5232150 +
atatgaggcacagtaggcatgt

SEQ ID NO: 85791 - DNA, 22 bp, Artificial Sequence
  Synthetic oligonucleotide; TTG chr11 5232176 5232197 5232193 5232198 +
cttataaagcacggagtgtgtg

SEQ ID NO: 85792 - DNA, 22 bp, Artificial Sequence
  Synthetic oligonucleotide; CTT chr11 5232179 5232200 5232196 5232201 +
ataaagcacggagtgtgtgtgt

SEQ ID NO: 85793 - DNA, 22 bp, Artificial Sequence
  Synthetic oligonucleotide; TTA chr11 5232180 5232201 5232197 5232202 +
taaagcacggagtgtgtgtgtg

SEQ ID NO: 85794 - DNA, 22 bp, Artificial Sequence
  Synthetic oligonucleotide; TTT chr11 5232259 5232280 5232276 5232281 +
ggaaagattttttgggtagtat

SEQ ID NO: 85795 - DNA, 22 bp, Artificial Sequence
  Synthetic oligonucleotide; TTG chr11 5232260 5232281 5232277 5232282 +
gaaagattttttgggtagtata

SEQ ID NO: 85796 - DNA, 22 bp, Artificial Sequence
  Synthetic oligonucleotide; TTT chr11 5232269 5232290 5232286 5232291 +
tttgggtagtatagagaagttt

SEQ ID NO: 85797 - DNA, 22 bp, Artificial Sequence
  Synthetic oligonucleotide; TTT chr11 5232270 5232291 5232287 5232292 +
ttgggtagtatagagaagttta

SEQ ID NO: 85798 - DNA, 22 bp, Artificial Sequence
  Synthetic oligonucleotide; TTT chr11 5232271 5232292 5232288 5232293 +
tgggtagtatagagaagtttat

SEQ ID NO: 85799 - DNA, 22 bp, Artificial Sequence
  Synthetic oligonucleotide; TTT chr11 5232272 5232293 5232289 5232294 +
gggtagtatagagaagtttatt

SEQ ID NO: 85800 - DNA, 22 bp, Artificial Sequence
  Synthetic oligonucleotide; TTG chr11 5232273 5232294 5232290 5232295 +
ggtagtatagagaagtttattg

SEQ ID NO: 85801 - DNA, 22 bp, Artificial Sequence
  Synthetic oligonucleotide; TTT chr11 5232291 5232312 5232308 5232313 +
attgtggctggggtcaagagag

SEQ ID NO: 85802 - DNA, 22 bp, Artificial Sequence
  Synthetic oligonucleotide; TTA chr11 5232292 5232313 5232309 5232314 +
ttgtggctggggtcaagagagg

SEQ ID NO: 85803 - DNA, 22 bp, Artificial Sequence
  Synthetic oligonucleotide; TTG chr11 5232295 5232316 5232312 5232317 +
tggctggggtcaagagaggtca

SEQ ID NO: 85804 - DNA, 22 bp, Artificial Sequence
  Synthetic oligonucleotide; CTG chr11 5232301 5232322 5232318 5232323 +
gggtcaagagaggtcacaagta

SEQ ID NO: 85805 - DNA, 22 bp, Artificial Sequence
  Synthetic oligonucleotide; CTT chr11 5232343 5232364 5232360 5232365 +
gactgaaatatgggaagataag

SEQ ID NO: 85806 - DNA, 22 bp, Artificial Sequence
  Synthetic oligonucleotide; TTG chr11 5232344 5232365 5232361 5232366 +
actgaaatatgggaagataaga

SEQ ID NO: 85807 - DNA, 22 bp, Artificial Sequence
  Synthetic oligonucleotide; CTG chr11 5232348 5232369 5232365 5232370 +
aaatatgggaagataagaggaa

SEQ ID NO: 85808 - DNA, 22 bp, Artificial Sequence
  Synthetic oligonucleotide; TTC chr11 5232374 5232395 5232391 5232396 +
tttacagagatgttctggggca

SEQ ID NO: 85809 - DNA, 22 bp, Artificial Sequence
  Synthetic oligonucleotide; CTT chr11 5232376 5232397 5232393 5232398 +
tacagagatgttctggggcaag

SEQ ID NO: 85810 - DNA, 22 bp, Artificial Sequence
  Synthetic oligonucleotide; TTT chr11 5232377 5232398 5232394 5232399 +
acagagatgttctggggcaagt

SEQ ID NO: 85811 - DNA, 22 bp, Artificial Sequence
  Synthetic oligonucleotide; TTA chr11 5232378 5232399 5232395 5232400 +
cagagatgttctggggcaagta

SEQ ID NO: 85812 - DNA, 22 bp, Artificial Sequence
  Synthetic oligonucleotide; TTC chr11 5232389 5232410 5232406 5232411 +
tggggcaagtaagaggaggaag

SEQ ID NO: 85813 - DNA, 22 bp, Artificial Sequence
  Synthetic oligonucleotide; CTG chr11 5232391 5232412 5232408 5232413 +
gggcaagtaagaggaggaagct

SEQ ID NO: 85814 - DNA, 22 bp, Artificial Sequence
  Synthetic oligonucleotide; CTA chr11 5232414 5232435 5232431 5232436 +
tttcttggagcaggaacacttg

SEQ ID NO: 85815 - DNA, 22 bp, Artificial Sequence
  Synthetic oligonucleotide; TTT chr11 5232417 5232438 5232434 5232439 +
cttggagcaggaacacttgatg

SEQ ID NO: 85816 - DNA, 22 bp, Artificial Sequence
  Synthetic oligonucleotide; TTC chr11 5232418 5232439 5232435 5232440 +
ttggagcaggaacacttgatgg

SEQ ID NO: 85817 - DNA, 22 bp, Artificial Sequence
  Synthetic oligonucleotide; CTT chr11 5232420 5232441 5232437 5232442 +
ggagcaggaacacttgatgggg

SEQ ID NO: 85818 - DNA, 22 bp, Artificial Sequence
  Synthetic oligonucleotide; TTG chr11 5232421 5232442 5232438 5232443 +
gagcaggaacacttgatggggt

SEQ ID NO: 85819 - DNA, 22 bp, Artificial Sequence
  Synthetic oligonucleotide; CTT chr11 5232435 5232456 5232452 5232457 +
gatggggtatagtattatgggc

SEQ ID NO: 85820 - DNA, 22 bp, Artificial Sequence
  Synthetic oligonucleotide; TTG chr11 5232436 5232457 5232453 5232458 +
atggggtatagtattatgggct

SEQ ID NO: 85821 - DNA, 22 bp, Artificial Sequence
  Synthetic oligonucleotide; TTA chr11 5232452 5232473 5232469 5232474 +
tgggctacaatgtgcaggcaaa

SEQ ID NO: 85822 - DNA, 22 bp, Artificial Sequence
  Synthetic oligonucleotide; CTA chr11 5232459 5232480 5232476 5232481 +
caatgtgcaggcaaaggaagga

SEQ ID NO: 85823 - DNA, 22 bp, Artificial Sequence
  Synthetic oligonucleotide; TTG chr11 5232504 5232525 5232521 5232526 +
tcttgagtaatcattatgcctt

SEQ ID NO: 85824 - DNA, 22 bp, Artificial Sequence
  Synthetic oligonucleotide; CTT chr11 5232508 5232529 5232525 5232530 +
gagtaatcattatgcctttaat

SEQ ID NO: 85825 - DNA, 22 bp, Artificial Sequence
  Synthetic oligonucleotide; TTG chr11 5232509 5232530 5232526 5232531 +
agtaatcattatgcctttaatt

SEQ ID NO: 85826 - DNA, 22 bp, Artificial Sequence
  Synthetic oligonucleotide; TTA chr11 5232520 5232541 5232537 5232542 +
tgcctttaattgagcacattat

SEQ ID NO: 85827 - DNA, 22 bp, Artificial Sequence
  Synthetic oligonucleotide; CTT chr11 5232526 5232547 5232543 5232548 +
taattgagcacattattttctc

SEQ ID NO: 85828 - DNA, 22 bp, Artificial Sequence
  Synthetic oligonucleotide; TTT chr11 5232527 5232548 5232544 5232549 +
aattgagcacattattttctca

SEQ ID NO: 85829 - DNA, 22 bp, Artificial Sequence
  Synthetic oligonucleotide; TTA chr11 5232528 5232549 5232545 5232550 +
attgagcacattattttctcag

SEQ ID NO: 85830 - DNA, 22 bp, Artificial Sequence
  Synthetic oligonucleotide; TTG chr11 5232532 5232553 5232549 5232554 +
agcacattattttctcagtaat

SEQ ID NO: 85831 - DNA, 22 bp, Artificial Sequence
  Synthetic oligonucleotide; TTA chr11 5232541 5232562 5232558 5232563 +
ttttctcagtaattgttggagt

SEQ ID NO: 85832 - DNA, 22 bp, Artificial Sequence
  Synthetic oligonucleotide; TTT chr11 5232544 5232565 5232561 5232566 +
tctcagtaattgttggagttta

SEQ ID NO: 85833 - DNA, 22 bp, Artificial Sequence
  Synthetic oligonucleotide; TTT chr11 5232545 5232566 5232562 5232567 +
ctcagtaattgttggagtttaa

SEQ ID NO: 85834 - DNA, 22 bp, Artificial Sequence
  Synthetic oligonucleotide; TTC chr11 5232546 5232567 5232563 5232568 +
tcagtaattgttggagtttaat

SEQ ID NO: 85835 - DNA, 22 bp, Artificial Sequence
  Synthetic oligonucleotide; CTC chr11 5232548 5232569 5232565 5232570 +
agtaattgttggagtttaatcg

SEQ ID NO: 85836 - DNA, 22 bp, Artificial Sequence
  Synthetic oligonucleotide; TTG chr11 5232556 5232577 5232573 5232578 +
ttggagtttaatcgtagcatta

SEQ ID NO: 85837 - DNA, 22 bp, Artificial Sequence
  Synthetic oligonucleotide; TTG chr11 5232559 5232580 5232576 5232581 +
gagtttaatcgtagcattaccc

SEQ ID NO: 85838 - DNA, 22 bp, Artificial Sequence
  Synthetic oligonucleotide; TTT chr11 5232565 5232586 5232582 5232587 +
aatcgtagcattacccttgagg

SEQ ID NO: 85839 - DNA, 22 bp, Artificial Sequence
  Synthetic oligonucleotide; TTA chr11 5232566 5232587 5232583 5232588 +
atcgtagcattacccttgaggc

SEQ ID NO: 85840 - DNA, 22 bp, Artificial Sequence
  Synthetic oligonucleotide; TTA chr11 5232578 5232599 5232595 5232600 +
cccttgaggctatgtcttaggg

SEQ ID NO: 85841 - DNA, 22 bp, Artificial Sequence
  Synthetic oligonucleotide; CTT chr11 5232583 5232604 5232600 5232605 +
gaggctatgtcttagggttgag

SEQ ID NO: 85842 - DNA, 22 bp, Artificial Sequence
  Synthetic oligonucleotide; TTG chr11 5232584 5232605 5232601 5232606 +
aggctatgtcttagggttgagg

SEQ ID NO: 85843 - DNA, 22 bp, Artificial Sequence
  Synthetic oligonucleotide; CTA chr11 5232590 5232611 5232607 5232612 +
tgtcttagggttgaggtcttcc

SEQ ID NO: 85844 - DNA, 22 bp, Artificial Sequence
  Synthetic oligonucleotide; CTT chr11 5232596 5232617 5232613 5232618 +
agggttgaggtcttccctagaa

SEQ ID NO: 85845 - DNA, 22 bp, Artificial Sequence
  Synthetic oligonucleotide; TTA chr11 5232597 5232618 5232614 5232619 +
gggttgaggtcttccctagaac

SEQ ID NO: 85846 - DNA, 22 bp, Artificial Sequence
  Synthetic oligonucleotide; TTG chr11 5232603 5232624 5232620 5232625 +
aggtcttccctagaacctctgc

SEQ ID NO: 85847 - DNA, 22 bp, Artificial Sequence
  Synthetic oligonucleotide; CTT chr11 5232610 5232631 5232627 5232632 +
ccctagaacctctgcagtgcca

SEQ ID NO: 85848 - DNA, 22 bp, Artificial Sequence
  Synthetic oligonucleotide; TTC chr11 5232611 5232632 5232628 5232633 +
cctagaacctctgcagtgccag

SEQ ID NO: 85849 - DNA, 22 bp, Artificial Sequence
  Synthetic oligonucleotide; CTA chr11 5232615 5232636 5232632 5232637 +
gaacctctgcagtgccagtatt

SEQ ID NO: 85850 - DNA, 22 bp, Artificial Sequence
  Synthetic oligonucleotide; CTC chr11 5232622 5232643 5232639 5232644 +
tgcagtgccagtattatctttg

SEQ ID NO: 85851 - DNA, 22 bp, Artificial Sequence
  Synthetic oligonucleotide; CTG chr11 5232624 5232645 5232641 5232646 +
cagtgccagtattatctttgta

SEQ ID NO: 85852 - DNA, 22 bp, Artificial Sequence
  Synthetic oligonucleotide; TTA chr11 5232638 5232659 5232655 5232660 +
tctttgtatcaagagttcttga

SEQ ID NO: 85853 - DNA, 22 bp, Artificial Sequence
  Synthetic oligonucleotide; CTT chr11 5232642 5232663 5232659 5232664 +
tgtatcaagagttcttgataat

SEQ ID NO: 85854 - DNA, 22 bp, Artificial Sequence
  Synthetic oligonucleotide; TTT chr11 5232643 5232664 5232660 5232665 +
gtatcaagagttcttgataatt

SEQ ID NO: 85855 - DNA, 22 bp, Artificial Sequence
  Synthetic oligonucleotide; TTG chr11 5232644 5232665 5232661 5232666 +
tatcaagagttcttgataattt

SEQ ID NO: 85856 - DNA, 22 bp, Artificial Sequence
  Synthetic oligonucleotide; TTC chr11 5232656 5232677 5232673 5232678 +
ttgataatttctgctctttgga

SEQ ID NO: 85857 - DNA, 22 bp, Artificial Sequence
  Synthetic oligonucleotide; CTT chr11 5232658 5232679 5232675 5232680 +
gataatttctgctctttggagg

SEQ ID NO: 85858 - DNA, 22 bp, Artificial Sequence
  Synthetic oligonucleotide; TTG chr11 5232659 5232680 5232676 5232681 +
ataatttctgctctttggaggt

SEQ ID NO: 85859 - DNA, 22 bp, Artificial Sequence
  Synthetic oligonucleotide; TTT chr11 5232666 5232687 5232683 5232688 +
ctgctctttggaggtagaagtg

SEQ ID NO: 85860 - DNA, 22 bp, Artificial Sequence
  Synthetic oligonucleotide; TTC chr11 5232667 5232688 5232684 5232689 +
tgctctttggaggtagaagtgt

SEQ ID NO: 85861 - DNA, 22 bp, Artificial Sequence
  Synthetic oligonucleotide; CTG chr11 5232669 5232690 5232686 5232691 +
ctctttggaggtagaagtgtca

SEQ ID NO: 85862 - DNA, 22 bp, Artificial Sequence
  Synthetic oligonucleotide; CTC chr11 5232672 5232693 5232689 5232694 +
tttggaggtagaagtgtcaccc

SEQ ID NO: 85863 - DNA, 22 bp, Artificial Sequence
  Synthetic oligonucleotide; CTT chr11 5232674 5232695 5232691 5232696 +
tggaggtagaagtgtcacccat

SEQ ID NO: 85864 - DNA, 22 bp, Artificial Sequence
  Synthetic oligonucleotide; TTT chr11 5232675 5232696 5232692 5232697 +
ggaggtagaagtgtcacccatt

SEQ ID NO: 85865 - DNA, 22 bp, Artificial Sequence
  Synthetic oligonucleotide; TTG chr11 5232676 5232697 5232693 5232698 +
gaggtagaagtgtcacccatta

SEQ ID NO: 85866 - DNA, 22 bp, Artificial Sequence
  Synthetic oligonucleotide; TTA chr11 5232698 5232719 5232715 5232720 +
atgccttgtacggttcccttgc

SEQ ID NO: 85867 - DNA, 22 bp, Artificial Sequence
  Synthetic oligonucleotide; CTT chr11 5232705 5232726 5232722 5232727 +
gtacggttcccttgcttttctc

SEQ ID NO: 85868 - DNA, 22 bp, Artificial Sequence
  Synthetic oligonucleotide; TTG chr11 5232706 5232727 5232723 5232728 +
tacggttcccttgcttttctct

SEQ ID NO: 85869 - DNA, 22 bp, Artificial Sequence
  Synthetic oligonucleotide; TTC chr11 5232714 5232735 5232731 5232736 +
ccttgcttttctcttttcccat

SEQ ID NO: 85870 - DNA, 22 bp, Artificial Sequence
  Synthetic oligonucleotide; CTT chr11 5232718 5232739 5232735 5232740 +
gcttttctcttttcccatgtac

SEQ ID NO: 85871 - DNA, 22 bp, Artificial Sequence
  Synthetic oligonucleotide; TTG chr11 5232719 5232740 5232736 5232741 +
cttttctcttttcccatgtact

SEQ ID NO: 85872 - DNA, 22 bp, Artificial Sequence
  Synthetic oligonucleotide; CTT chr11 5232722 5232743 5232739 5232744 +
ttctcttttcccatgtactctt

SEQ ID NO: 85873 - DNA, 22 bp, Artificial Sequence
  Synthetic oligonucleotide; TTT chr11 5232723 5232744 5232740 5232745 +
tctcttttcccatgtactcttt

SEQ ID NO: 85874 - DNA, 22 bp, Artificial Sequence
  Synthetic oligonucleotide; TTT chr11 5232724 5232745 5232741 5232746 +
ctcttttcccatgtactctttg

SEQ ID NO: 85875 - DNA, 22 bp, Artificial Sequence
  Synthetic oligonucleotide; TTC chr11 5232725 5232746 5232742 5232747 +
tcttttcccatgtactctttgt

SEQ ID NO: 85876 - DNA, 22 bp, Artificial Sequence
  Synthetic oligonucleotide; CTC chr11 5232727 5232748 5232744 5232749 +
ttttcccatgtactctttgtaa

SEQ ID NO: 85877 - DNA, 22 bp, Artificial Sequence
  Synthetic oligonucleotide; CTT chr11 5232729 5232750 5232746 5232751 +
ttcccatgtactctttgtaaaa

SEQ ID NO: 85878 - DNA, 22 bp, Artificial Sequence
  Synthetic oligonucleotide; TTT chr11 5232730 5232751 5232747 5232752 +
tcccatgtactctttgtaaaat

SEQ ID NO: 85879 - DNA, 22 bp, Artificial Sequence
  Synthetic oligonucleotide; TTT chr11 5232731 5232752 5232748 5232753 +
cccatgtactctttgtaaaata

SEQ ID NO: 85880 - DNA, 22 bp, Artificial Sequence
  Synthetic oligonucleotide; TTC chr11 5232732 5232753 5232749 5232754 +
ccatgtactctttgtaaaataa

SEQ ID NO: 85881 - DNA, 22 bp, Artificial Sequence
  Synthetic oligonucleotide; CTC chr11 5232742 5232763 5232759 5232764 +
tttgtaaaataaacaagtgctc

SEQ ID NO: 85882 - DNA, 22 bp, Artificial Sequence
  Synthetic oligonucleotide; CTT chr11 5232744 5232765 5232761 5232766 +
tgtaaaataaacaagtgctccc

SEQ ID NO: 85883 - DNA, 22 bp, Artificial Sequence
  Synthetic oligonucleotide; TTT chr11 5232745 5232766 5232762 5232767 +
gtaaaataaacaagtgctccct

SEQ ID NO: 85884 - DNA, 22 bp, Artificial Sequence
  Synthetic oligonucleotide; TTG chr11 5232746 5232767 5232763 5232768 +
taaaataaacaagtgctcccta

SEQ ID NO: 85885 - DNA, 22 bp, Artificial Sequence
  Synthetic oligonucleotide; CTC chr11 5232764 5232785 5232781 5232786 +
cctatctgtagagcctcaggaa

SEQ ID NO: 85886 - DNA, 22 bp, Artificial Sequence
  Synthetic oligonucleotide; CTA chr11 5232768 5232789 5232785 5232790 +
tctgtagagcctcaggaacctt

SEQ ID NO: 85887 - DNA, 22 bp, Artificial Sequence
  Synthetic oligonucleotide; CTG chr11 5232772 5232793 5232789 5232794 +
tagagcctcaggaaccttctta

SEQ ID NO: 85888 - DNA, 22 bp, Artificial Sequence
  Synthetic oligonucleotide; CTC chr11 5232781 5232802 5232798 5232803 +
aggaaccttcttacacacctgg

SEQ ID NO: 85889 - DNA, 22 bp, Artificial Sequence
  Synthetic oligonucleotide; CTT chr11 5232790 5232811 5232807 5232812 +
cttacacacctggacaaaaaaa

SEQ ID NO: 85890 - DNA, 22 bp, Artificial Sequence
  Synthetic oligonucleotide; TTC chr11 5232791 5232812 5232808 5232813 +
ttacacacctggacaaaaaaat

SEQ ID NO: 85891 - DNA, 22 bp, Artificial Sequence
  Synthetic oligonucleotide; CTT chr11 5232793 5232814 5232810 5232815 +
acacacctggacaaaaaaatga

SEQ ID NO: 85892 - DNA, 22 bp, Artificial Sequence
  Synthetic oligonucleotide; TTA chr11 5232794 5232815 5232811 5232816 +
cacacctggacaaaaaaatgaa

SEQ ID NO: 85893 - DNA, 22 bp, Artificial Sequence
  Synthetic oligonucleotide; CTG chr11 5232802 5232823 5232819 5232824 +
gacaaaaaaatgaaataagtga

SEQ ID NO: 85894 - DNA, 22 bp, Artificial Sequence
  Synthetic oligonucleotide; TTA chr11 5232829 5232850 5232846 5232851 +
atcaggaagttgagctgaacat

SEQ ID NO: 85895 - DNA, 22 bp, Artificial Sequence
  Synthetic oligonucleotide; TTG chr11 5232841 5232862 5232858 5232863 +
agctgaacattctttattaggc

SEQ ID NO: 85896 - DNA, 22 bp, Artificial Sequence
  Synthetic oligonucleotide; CTG chr11 5232846 5232867 5232863 5232868 +
aacattctttattaggcagaag

SEQ ID NO: 85897 - DNA, 22 bp, Artificial Sequence
  Synthetic oligonucleotide; TTC chr11 5232853 5232874 5232870 5232875 +
tttattaggcagaagccatacc

SEQ ID NO: 85898 - DNA, 22 bp, Artificial Sequence
  Synthetic oligonucleotide; CTT chr11 5232855 5232876 5232872 5232877 +
tattaggcagaagccataccct

SEQ ID NO: 85899 - DNA, 22 bp, Artificial Sequence
  Synthetic oligonucleotide; TTT chr11 5232856 5232877 5232873 5232878 +
attaggcagaagccataccctt

SEQ ID NO: 85900 - DNA, 22 bp, Artificial Sequence
  Synthetic oligonucleotide; TTA chr11 5232857 5232878 5232874 5232879 +
ttaggcagaagccatacccttg

SEQ ID NO: 85901 - DNA, 22 bp, Artificial Sequence
  Synthetic oligonucleotide; TTA chr11 5232860 5232881 5232877 5232882 +
ggcagaagccatacccttgaag

SEQ ID NO: 85902 - DNA, 22 bp, Artificial Sequence
  Synthetic oligonucleotide; CTT chr11 5232878 5232899 5232895 5232900 +
gaagtaggcattgtgttcccaa

SEQ ID NO: 85903 - DNA, 22 bp, Artificial Sequence
  Synthetic oligonucleotide; TTG chr11 5232879 5232900 5232896 5232901 +
aagtaggcattgtgttcccaag

SEQ ID NO: 85904 - DNA, 22 bp, Artificial Sequence
  Synthetic oligonucleotide; TTG chr11 5232891 5232912 5232908 5232913 +
tgttcccaagttcagaaaatag

SEQ ID NO: 85905 - DNA, 22 bp, Artificial Sequence
  Synthetic oligonucleotide; TTC chr11 5232896 5232917 5232913 5232918 +
ccaagttcagaaaatagaatct

SEQ ID NO: 85906 - DNA, 22 bp, Artificial Sequence
  Synthetic oligonucleotide; TTC chr11 5232904 5232925 5232921 5232926 +
agaaaatagaatctagggaaat

SEQ ID NO: 85907 - DNA, 22 bp, Artificial Sequence
  Synthetic oligonucleotide; CTA chr11 5232919 5232940 5232936 5232941 +
gggaaatagggtcttcttatgg

SEQ ID NO: 85908 - DNA, 22 bp, Artificial Sequence
  Synthetic oligonucleotide; CTT chr11 5232934 5232955 5232951 5232956 +
cttatggttatcaggaaacagt

SEQ ID NO: 85909 - DNA, 22 bp, Artificial Sequence
  Synthetic oligonucleotide; TTC chr11 5232935 5232956 5232952 5232957 +
ttatggttatcaggaaacagtc

SEQ ID NO: 85910 - DNA, 22 bp, Artificial Sequence
  Synthetic oligonucleotide; CTT chr11 5232937 5232958 5232954 5232959 +
atggttatcaggaaacagtcca

SEQ ID NO: 85911 - DNA, 22 bp, Artificial Sequence
  Synthetic oligonucleotide; TTA chr11 5232938 5232959 5232955 5232960 +
tggttatcaggaaacagtccag

SEQ ID NO: 85912 - DNA, 22 bp, Artificial Sequence
  Synthetic oligonucleotide; TTA chr11 5232944 5232965 5232961 5232966 +
tcaggaaacagtccaggatctc

SEQ ID NO: 85913 - DNA, 22 bp, Artificial Sequence
  Synthetic oligonucleotide; CTC chr11 5232966 5232987 5232983 5232988 +
aatggtacttgtgagccagggc

SEQ ID NO: 85914 - DNA, 22 bp, Artificial Sequence
  Synthetic oligonucleotide; CTT chr11 5232976 5232997 5232993 5232998 +
gtgagccagggcattagccaca

SEQ ID NO: 85915 - DNA, 22 bp, Artificial Sequence
  Synthetic oligonucleotide; TTG chr11 5232977 5232998 5232994 5232999 +
tgagccagggcattagccacac

SEQ ID NO: 85916 - DNA, 22 bp, Artificial Sequence
  Synthetic oligonucleotide; TTA chr11 5232992 5233013 5233009 5233014 +
gccacaccagccaccaccttct

SEQ ID NO: 85917 - DNA, 22 bp, Artificial Sequence
  Synthetic oligonucleotide; CTT chr11 5233012 5233033 5233029 5233034 +
ctgataggcagcctgcatttgt

SEQ ID NO: 85918 - DNA, 22 bp, Artificial Sequence
  Synthetic oligonucleotide; TTC chr11 5233013 5233034 5233030 5233035 +
tgataggcagcctgcatttgtg

SEQ ID NO: 85919 - DNA, 22 bp, Artificial Sequence
  Synthetic oligonucleotide; CTG chr11 5233015 5233036 5233032 5233037 +
ataggcagcctgcatttgtggg

SEQ ID NO: 85920 - DNA, 22 bp, Artificial Sequence
  Synthetic oligonucleotide; CTG chr11 5233027 5233048 5233044 5233049 +
catttgtggggtgaattccttg

SEQ ID NO: 85921 - DNA, 22 bp, Artificial Sequence
  Synthetic oligonucleotide; TTT chr11 5233032 5233053 5233049 5233054 +
gtggggtgaattccttgccaaa

SEQ ID NO: 85922 - DNA, 22 bp, Artificial Sequence
  Synthetic oligonucleotide; TTG chr11 5233033 5233054 5233050 5233055 +
tggggtgaattccttgccaaag

SEQ ID NO: 85923 - DNA, 22 bp, Artificial Sequence
  Synthetic oligonucleotide; TTC chr11 5233045 5233066 5233062 5233067 +
cttgccaaagttgcgggccagc

SEQ ID NO: 85924 - DNA, 22 bp, Artificial Sequence
  Synthetic oligonucleotide; CTT chr11 5233048 5233069 5233065 5233070 +
gccaaagttgcgggccagcaca

SEQ ID NO: 85925 - DNA, 22 bp, Artificial Sequence
  Synthetic oligonucleotide; TTG chr11 5233049 5233070 5233066 5233071 +
ccaaagttgcgggccagcacac

SEQ ID NO: 85926 - DNA, 22 bp, Artificial Sequence
  Synthetic oligonucleotide; TTG chr11 5233058 5233079 5233075 5233080 +
cgggccagcacacacaccagca

SEQ ID NO: 85927 - DNA, 22 bp, Artificial Sequence
  Synthetic oligonucleotide; TTG chr11 5233085 5233106 5233102 5233107 +
cccaagagctgcggagaagagg

SEQ ID NO: 85928 - DNA, 22 bp, Artificial Sequence
  Synthetic oligonucleotide; CTG chr11 5233096 5233117 5233113 5233118 +
cggagaagaggtaggcagatac

SEQ ID NO: 85929 - DNA, 22 bp, Artificial Sequence
  Synthetic oligonucleotide; TTA chr11 5233131 5233152 5233148 5233153 +
acagagaaataaagactggctt

SEQ ID NO: 85930 - DNA, 22 bp, Artificial Sequence
  Synthetic oligonucleotide; CTG chr11 5233149 5233170 5233166 5233171 +
gcttctgagaaactgagccaac

SEQ ID NO: 85931 - DNA, 22 bp, Artificial Sequence
  Synthetic oligonucleotide; CTT chr11 5233153 5233174 5233170 5233175 +
ctgagaaactgagccaacaccc

SEQ ID NO: 85932 - DNA, 22 bp, Artificial Sequence
  Synthetic oligonucleotide; TTC chr11 5233154 5233175 5233171 5233176 +
tgagaaactgagccaacaccca

SEQ ID NO: 85933 - DNA, 22 bp, Artificial Sequence
  Synthetic oligonucleotide; CTG chr11 5233156 5233177 5233173 5233178 +
agaaactgagccaacacccatt

SEQ ID NO: 85934 - DNA, 22 bp, Artificial Sequence
  Synthetic oligonucleotide; CTG chr11 5233164 5233185 5233181 5233186 +
agccaacacccatttttttctg

SEQ ID NO: 85935 - DNA, 22 bp, Artificial Sequence
  Synthetic oligonucleotide; TTT chr11 5233179 5233200 5233196 5233201 +
ttttctgcccaaatcttagaca

SEQ ID NO: 85936 - DNA, 22 bp, Artificial Sequence
  Synthetic oligonucleotide; TTT chr11 5233180 5233201 5233197 5233202 +
tttctgcccaaatcttagacaa

SEQ ID NO: 85937 - DNA, 22 bp, Artificial Sequence
  Synthetic oligonucleotide; TTT chr11 5233181 5233202 5233198 5233203 +
ttctgcccaaatcttagacaaa

SEQ ID NO: 85938 - DNA, 22 bp, Artificial Sequence
  Synthetic oligonucleotide; TTT chr11 5233182 5233203 5233199 5233204 +
tctgcccaaatcttagacaaaa

SEQ ID NO: 85939 - DNA, 22 bp, Artificial Sequence
  Synthetic oligonucleotide; TTT chr11 5233183 5233204 5233200 5233205 +
ctgcccaaatcttagacaaaac

SEQ ID NO: 85940 - DNA, 22 bp, Artificial Sequence
  Synthetic oligonucleotide; TTC chr11 5233184 5233205 5233201 5233206 +
tgcccaaatcttagacaaaact

SEQ ID NO: 85941 - DNA, 22 bp, Artificial Sequence
  Synthetic oligonucleotide; CTG chr11 5233186 5233207 5233203 5233208 +
cccaaatcttagacaaaactga

SEQ ID NO: 85942 - DNA, 22 bp, Artificial Sequence
  Synthetic oligonucleotide; CTT chr11 5233196 5233217 5233213 5233218 +
agacaaaactgatccccaggtt

SEQ ID NO: 85943 - DNA, 22 bp, Artificial Sequence
  Synthetic oligonucleotide; TTA chr11 5233197 5233218 5233214 5233219 +
gacaaaactgatccccaggtta

SEQ ID NO: 85944 - DNA, 22 bp, Artificial Sequence
  Synthetic oligonucleotide; CTG chr11 5233207 5233228 5233224 5233229 +
atccccaggttattcccatcag

SEQ ID NO: 85945 - DNA, 22 bp, Artificial Sequence
  Synthetic oligonucleotide; TTA chr11 5233219 5233240 5233236 5233241 +
ttcccatcagcataaataagta

SEQ ID NO: 85946 - DNA, 22 bp, Artificial Sequence
  Synthetic oligonucleotide; TTC chr11 5233222 5233243 5233239 5233244 +
ccatcagcataaataagtacat

SEQ ID NO: 85947 - DNA, 22 bp, Artificial Sequence
  Synthetic oligonucleotide; CTA chr11 5233274 5233295 5233291 5233296 +
tacacacacatcctctatgtac

SEQ ID NO: 85948 - DNA, 22 bp, Artificial Sequence
  Synthetic oligonucleotide; CTC chr11 5233289 5233310 5233306 5233311 +
tatgtacttaactagcatgtag

SEQ ID NO: 85949 - DNA, 22 bp, Artificial Sequence
  Synthetic oligonucleotide; CTA chr11 5233291 5233312 5233308 5233313 +
tgtacttaactagcatgtagtc

SEQ ID NO: 85950 - DNA, 22 bp, Artificial Sequence
  Synthetic oligonucleotide; CTT chr11 5233298 5233319 5233315 5233320 +
aactagcatgtagtctatatat

SEQ ID NO: 85951 - DNA, 22 bp, Artificial Sequence
  Synthetic oligonucleotide; TTA chr11 5233299 5233320 5233316 5233321 +
actagcatgtagtctatatatg

SEQ ID NO: 85952 - DNA, 22 bp, Artificial Sequence
  Synthetic oligonucleotide; CTA chr11 5233303 5233324 5233320 5233325 +
gcatgtagtctatatatgtaca

SEQ ID NO: 85953 - DNA, 22 bp, Artificial Sequence
  Synthetic oligonucleotide; CTA chr11 5233315 5233336 5233332 5233337 +
tatatgtacatatatgctatat

SEQ ID NO: 85954 - DNA, 22 bp, Artificial Sequence
  Synthetic oligonucleotide; CTA chr11 5233334 5233355 5233351 5233356 +
tatatgctgtataatactatat

SEQ ID NO: 85955 - DNA, 22 bp, Artificial Sequence
  Synthetic oligonucleotide; CTG chr11 5233343 5233364 5233360 5233365 +
tataatactatatacaaattaa

SEQ ID NO: 85956 - DNA, 22 bp, Artificial Sequence
  Synthetic oligonucleotide; CTA chr11 5233353 5233374 5233370 5233375 +
tatacaaattaattccaaatta

SEQ ID NO: 85957 - DNA, 22 bp, Artificial Sequence
  Synthetic oligonucleotide; TTA chr11 5233364 5233385 5233381 5233386 +
attccaaattagttttaatttt

SEQ ID NO: 85958 - DNA, 22 bp, Artificial Sequence
  Synthetic oligonucleotide; TTC chr11 5233368 5233389 5233385 5233390 +
caaattagttttaattttgtat

SEQ ID NO: 85959 - DNA, 22 bp, Artificial Sequence
  Synthetic oligonucleotide; TTA chr11 5233375 5233396 5233392 5233397 +
gttttaattttgtatgtgtata

SEQ ID NO: 85960 - DNA, 22 bp, Artificial Sequence
  Synthetic oligonucleotide; TTT chr11 5233379 5233400 5233396 5233401 +
taattttgtatgtgtatatagc

SEQ ID NO: 85961 - DNA, 22 bp, Artificial Sequence
  Synthetic oligonucleotide; TTT chr11 5233380 5233401 5233397 5233402 +
aattttgtatgtgtatatagca

SEQ ID NO: 85962 - DNA, 22 bp, Artificial Sequence
  Synthetic oligonucleotide; TTA chr11 5233381 5233402 5233398 5233403 +
attttgtatgtgtatatagcat

SEQ ID NO: 85963 - DNA, 22 bp, Artificial Sequence
  Synthetic oligonucleotide; TTT chr11 5233385 5233406 5233402 5233407 +
tgtatgtgtatatagcatatac

SEQ ID NO: 85964 - DNA, 22 bp, Artificial Sequence
  Synthetic oligonucleotide; TTT chr11 5233386 5233407 5233403 5233408 +
gtatgtgtatatagcatataca

SEQ ID NO: 85965 - DNA, 22 bp, Artificial Sequence
  Synthetic oligonucleotide; TTG chr11 5233387 5233408 5233404 5233409 +
tatgtgtatatagcatatacaa

SEQ ID NO: 85966 - DNA, 22 bp, Artificial Sequence
  Synthetic oligonucleotide; TTA chr11 5233413 5233434 5233430 5233435 +
attactataaacagattaatag

SEQ ID NO: 85967 - DNA, 22 bp, Artificial Sequence
  Synthetic oligonucleotide; TTA chr11 5233417 5233438 5233434 5233439 +
ctataaacagattaatagatac

SEQ ID NO: 85968 - DNA, 22 bp, Artificial Sequence
  Synthetic oligonucleotide; CTA chr11 5233420 5233441 5233437 5233442 +
taaacagattaatagatacaaa

SEQ ID NO: 85969 - DNA, 22 bp, Artificial Sequence
  Synthetic oligonucleotide; TTA chr11 5233431 5233452 5233448 5233453 +
atagatacaaattaattgatta

SEQ ID NO: 85970 - DNA, 22 bp, Artificial Sequence
  Synthetic oligonucleotide; TTA chr11 5233445 5233466 5233462 5233467 +
attgattaatcagtgtgatgat

SEQ ID NO: 85971 - DNA, 22 bp, Artificial Sequence
  Synthetic oligonucleotide; TTG chr11 5233449 5233470 5233466 5233471 +
attaatcagtgtgatgatgggc

SEQ ID NO: 85972 - DNA, 22 bp, Artificial Sequence
  Synthetic oligonucleotide; TTA chr11 5233453 5233474 5233470 5233475 +
atcagtgtgatgatgggctgtc

SEQ ID NO: 85973 - DNA, 22 bp, Artificial Sequence
  Synthetic oligonucleotide; CTG chr11 5233473 5233494 5233490 5233495 +
tctcctagcaacgacttctgcc

SEQ ID NO: 85974 - DNA, 22 bp, Artificial Sequence
  Synthetic oligonucleotide; CTC chr11 5233477 5233498 5233494 5233499 +
ctagcaacgacttctgccccac

SEQ ID NO: 85975 - DNA, 22 bp, Artificial Sequence
  Synthetic oligonucleotide; CTA chr11 5233480 5233501 5233497 5233502 +
gcaacgacttctgccccacctc

SEQ ID NO: 85976 - DNA, 22 bp, Artificial Sequence
  Synthetic oligonucleotide; CTT chr11 5233490 5233511 5233507 5233512 +
ctgccccacctccagtgtaact

SEQ ID NO: 85977 - DNA, 22 bp, Artificial Sequence
  Synthetic oligonucleotide; TTC chr11 5233491 5233512 5233508 5233513 +
tgccccacctccagtgtaactg

SEQ ID NO: 85978 - DNA, 22 bp, Artificial Sequence
  Synthetic oligonucleotide; CTG chr11 5233493 5233514 5233510 5233515 +
ccccacctccagtgtaactgcc

SEQ ID NO: 85979 - DNA, 22 bp, Artificial Sequence
  Synthetic oligonucleotide; CTC chr11 5233502 5233523 5233519 5233524 +
cagtgtaactgcctagtctttc

SEQ ID NO: 85980 - DNA, 22 bp, Artificial Sequence
  Synthetic oligonucleotide; CTG chr11 5233513 5233534 5233530 5233535 +
cctagtctttcataatcaaata

SEQ ID NO: 85981 - DNA, 22 bp, Artificial Sequence
  Synthetic oligonucleotide; CTA chr11 5233517 5233538 5233534 5233539 +
gtctttcataatcaaatattca

SEQ ID NO: 85982 - DNA, 22 bp, Artificial Sequence
  Synthetic oligonucleotide; CTT chr11 5233522 5233543 5233539 5233544 +
tcataatcaaatattcactttc

SEQ ID NO: 85983 - DNA, 22 bp, Artificial Sequence
  Synthetic oligonucleotide; TTT chr11 5233523 5233544 5233540 5233545 +
cataatcaaatattcactttcc

SEQ ID NO: 85984 - DNA, 22 bp, Artificial Sequence
  Synthetic oligonucleotide; TTC chr11 5233524 5233545 5233541 5233546 +
ataatcaaatattcactttcct

SEQ ID NO: 85985 - DNA, 22 bp, Artificial Sequence
  Synthetic oligonucleotide; TTC chr11 5233538 5233559 5233555 5233560 +
actttcctttccattccattta

SEQ ID NO: 85986 - DNA, 22 bp, Artificial Sequence
  Synthetic oligonucleotide; CTT chr11 5233542 5233563 5233559 5233564 +
tcctttccattccatttactac

SEQ ID NO: 85987 - DNA, 22 bp, Artificial Sequence
  Synthetic oligonucleotide; TTT chr11 5233543 5233564 5233560 5233565 +
cctttccattccatttactaca

SEQ ID NO: 85988 - DNA, 22 bp, Artificial Sequence
  Synthetic oligonucleotide; TTC chr11 5233544 5233565 5233561 5233566 +
ctttccattccatttactacag

SEQ ID NO: 85989 - DNA, 22 bp, Artificial Sequence
  Synthetic oligonucleotide; CTT chr11 5233547 5233568 5233564 5233569 +
tccattccatttactacagaat

SEQ ID NO: 85990 - DNA, 22 bp, Artificial Sequence
  Synthetic oligonucleotide; TTT chr11 5233548 5233569 5233565 5233570 +
ccattccatttactacagaatt

SEQ ID NO: 85991 - DNA, 22 bp, Artificial Sequence
  Synthetic oligonucleotide; TTC chr11 5233549 5233570 5233566 5233571 +
cattccatttactacagaattt

SEQ ID NO: 85992 - DNA, 22 bp, Artificial Sequence
  Synthetic oligonucleotide; TTC chr11 5233554 5233575 5233571 5233576 +
catttactacagaatttataaa

SEQ ID NO: 85993 - DNA, 22 bp, Artificial Sequence
  Synthetic oligonucleotide; TTT chr11 5233559 5233580 5233576 5233581 +
actacagaatttataaaattcc

SEQ ID NO: 85994 - DNA, 22 bp, Artificial Sequence
  Synthetic oligonucleotide; TTA chr11 5233560 5233581 5233577 5233582 +
ctacagaatttataaaattcca

SEQ ID NO: 85995 - DNA, 22 bp, Artificial Sequence
  Synthetic oligonucleotide; CTA chr11 5233563 5233584 5233580 5233585 +
cagaatttataaaattccaatt

SEQ ID NO: 85996 - DNA, 22 bp, Artificial Sequence
  Synthetic oligonucleotide; TTT chr11 5233571 5233592 5233588 5233593 +
ataaaattccaattattcctta

SEQ ID NO: 85997 - DNA, 22 bp, Artificial Sequence
  Synthetic oligonucleotide; TTA chr11 5233572 5233593 5233589 5233594 +
taaaattccaattattccttat

SEQ ID NO: 85998 - DNA, 22 bp, Artificial Sequence
  Synthetic oligonucleotide; TTC chr11 5233580 5233601 5233597 5233602 +
caattattccttattgtaaaat

SEQ ID NO: 85999 - DNA, 22 bp, Artificial Sequence
  Synthetic oligonucleotide; TTA chr11 5233586 5233607 5233603 5233608 +
ttccttattgtaaaatgattta

SEQ ID NO: 86000 - DNA, 22 bp, Artificial Sequence
  Synthetic oligonucleotide; TTC chr11 5233589 5233610 5233606 5233611 +
cttattgtaaaatgatttatag

SEQ ID NO: 86001 - DNA, 22 bp, Artificial Sequence
  Synthetic oligonucleotide; CTT chr11 5233592 5233613 5233609 5233614 +
attgtaaaatgatttatagcct

SEQ ID NO: 86002 - DNA, 22 bp, Artificial Sequence
  Synthetic oligonucleotide; TTA chr11 5233593 5233614 5233610 5233615 +
ttgtaaaatgatttatagcctc

SEQ ID NO: 86003 - DNA, 22 bp, Artificial Sequence
  Synthetic oligonucleotide; TTG chr11 5233596 5233617 5233613 5233618 +
taaaatgatttatagcctctaa

SEQ ID NO: 86004 - DNA, 22 bp, Artificial Sequence
  Synthetic oligonucleotide; TTT chr11 5233607 5233628 5233624 5233629 +
atagcctctaaaacagtattct

SEQ ID NO: 86005 - DNA, 22 bp, Artificial Sequence
  Synthetic oligonucleotide; TTA chr11 5233608 5233629 5233625 5233630 +
tagcctctaaaacagtattcta

SEQ ID NO: 86006 - DNA, 22 bp, Artificial Sequence
  Synthetic oligonucleotide; CTC chr11 5233615 5233636 5233632 5233637 +
taaaacagtattctatgcctct

SEQ ID NO: 86007 - DNA, 22 bp, Artificial Sequence
  Synthetic oligonucleotide; CTA chr11 5233617 5233638 5233634 5233639 +
aaacagtattctatgcctctca

SEQ ID NO: 86008 - DNA, 22 bp, Artificial Sequence
  Synthetic oligonucleotide; TTC chr11 5233628 5233649 5233645 5233650 +
tatgcctctcatctttgagttg

SEQ ID NO: 86009 - DNA, 22 bp, Artificial Sequence
  Synthetic oligonucleotide; CTA chr11 5233630 5233651 5233647 5233652 +
tgcctctcatctttgagttgga

SEQ ID NO: 86010 - DNA, 22 bp, Artificial Sequence
  Synthetic oligonucleotide; CTC chr11 5233636 5233657 5233653 5233658 +
tcatctttgagttggagcctct

SEQ ID NO: 86011 - DNA, 22 bp, Artificial Sequence
  Synthetic oligonucleotide; CTC chr11 5233638 5233659 5233655 5233660 +
atctttgagttggagcctctcc

SEQ ID NO: 86012 - DNA, 22 bp, Artificial Sequence
  Synthetic oligonucleotide; CTT chr11 5233643 5233664 5233660 5233665 +
tgagttggagcctctcccatac

SEQ ID NO: 86013 - DNA, 22 bp, Artificial Sequence
  Synthetic oligonucleotide; TTT chr11 5233644 5233665 5233661 5233666 +
gagttggagcctctcccatacc

SEQ ID NO: 86014 - DNA, 22 bp, Artificial Sequence
  Synthetic oligonucleotide; TTG chr11 5233645 5233666 5233662 5233667 +
agttggagcctctcccataccc

SEQ ID NO: 86015 - DNA, 22 bp, Artificial Sequence
  Synthetic oligonucleotide; TTG chr11 5233650 5233671 5233667 5233672 +
gagcctctcccatacccatgtg

SEQ ID NO: 86016 - DNA, 22 bp, Artificial Sequence
  Synthetic oligonucleotide; CTC chr11 5233657 5233678 5233674 5233679 +
tcccatacccatgtggagagac

SEQ ID NO: 86017 - DNA, 22 bp, Artificial Sequence
  Synthetic oligonucleotide; CTC chr11 5233659 5233680 5233676 5233681 +
ccatacccatgtggagagacaa

SEQ ID NO: 86018 - DNA, 22 bp, Artificial Sequence
  Synthetic oligonucleotide; TTA chr11 5233689 5233710 5233706 5233711 +
ttctaagtgcagaattagcagg

SEQ ID NO: 86019 - DNA, 22 bp, Artificial Sequence
  Synthetic oligonucleotide; TTC chr11 5233692 5233713 5233709 5233714 +
taagtgcagaattagcaggtga

SEQ ID NO: 86020 - DNA, 22 bp, Artificial Sequence
  Synthetic oligonucleotide; CTA chr11 5233694 5233715 5233711 5233716 +
agtgcagaattagcaggtgaga

SEQ ID NO: 86021 - DNA, 22 bp, Artificial Sequence
  Synthetic oligonucleotide; TTA chr11 5233706 5233727 5233723 5233728 +
gcaggtgagagctggtatgcat

SEQ ID NO: 86022 - DNA, 22 bp, Artificial Sequence
  Synthetic oligonucleotide; CTG chr11 5233720 5233741 5233737 5233742 +
gtatgcataatttgagttgttg

SEQ ID NO: 86023 - DNA, 22 bp, Artificial Sequence
  Synthetic oligonucleotide; TTT chr11 5233733 5233754 5233750 5233755 +
gagttgttgttagagaaggaaa

SEQ ID NO: 86024 - DNA, 22 bp, Artificial Sequence
  Synthetic oligonucleotide; TTG chr11 5233734 5233755 5233751 5233756 +
agttgttgttagagaaggaaaa

SEQ ID NO: 86025 - DNA, 22 bp, Artificial Sequence
  Synthetic oligonucleotide; TTG chr11 5233739 5233760 5233756 5233761 +
ttgttagagaaggaaaaatgaa

SEQ ID NO: 86026 - DNA, 22 bp, Artificial Sequence
  Synthetic oligonucleotide; TTG chr11 5233742 5233763 5233759 5233764 +
ttagagaaggaaaaatgaaggg

SEQ ID NO: 86027 - DNA, 22 bp, Artificial Sequence
  Synthetic oligonucleotide; TTA chr11 5233745 5233766 5233762 5233767 +
gagaaggaaaaatgaagggagg

SEQ ID NO: 86028 - DNA, 22 bp, Artificial Sequence
  Synthetic oligonucleotide; TTG chr11 5233773 5233794 5233790 5233795 +
ggagagaaagacaggatattaa

SEQ ID NO: 86029 - DNA, 22 bp, Artificial Sequence
  Synthetic oligonucleotide; TTA chr11 5233794 5233815 5233811 5233816 +
aataatttaaaatagcaagatt

SEQ ID NO: 86030 - DNA, 22 bp, Artificial Sequence
  Synthetic oligonucleotide; TTT chr11 5233802 5233823 5233819 5233824 +
aaaatagcaagattgtgaggaa

SEQ ID NO: 86031 - DNA, 22 bp, Artificial Sequence
  Synthetic oligonucleotide; TTA chr11 5233803 5233824 5233820 5233825 +
aaatagcaagattgtgaggaag

SEQ ID NO: 86032 - DNA, 22 bp, Artificial Sequence
  Synthetic oligonucleotide; TTG chr11 5233817 5233838 5233834 5233839 +
tgaggaaggaaaaaatgcagaa

SEQ ID NO: 86033 - DNA, 22 bp, Artificial Sequence
  Synthetic oligonucleotide; TTT chr11 5233844 5233865 5233861 5233866 +
aaataaaaaattaacaaaattt

SEQ ID NO: 86034 - DNA, 22 bp, Artificial Sequence
  Synthetic oligonucleotide; TTA chr11 5233845 5233866 5233862 5233867 +
aataaaaaattaacaaaatttt

SEQ ID NO: 86035 - DNA, 22 bp, Artificial Sequence
  Synthetic oligonucleotide; TTA chr11 5233857 5233878 5233874 5233879 +
acaaaattttagaagcattaaa

SEQ ID NO: 86036 - DNA, 22 bp, Artificial Sequence
  Synthetic oligonucleotide; TTT chr11 5233866 5233887 5233883 5233888 +
tagaagcattaaatgataaaat

SEQ ID NO: 86037 - DNA, 22 bp, Artificial Sequence
  Synthetic oligonucleotide; TTT chr11 5233867 5233888 5233884 5233889 +
agaagcattaaatgataaaata

SEQ ID NO: 86038 - DNA, 22 bp, Artificial Sequence
  Synthetic oligonucleotide; TTA chr11 5233868 5233889 5233885 5233890 +
gaagcattaaatgataaaatat

SEQ ID NO: 86039 - DNA, 22 bp, Artificial Sequence
  Synthetic oligonucleotide; TTA chr11 5233877 5233898 5233894 5233899 +
aatgataaaatatagtaaaatg

SEQ ID NO: 86040 - DNA, 22 bp, Artificial Sequence
  Synthetic oligonucleotide; TTA chr11 5233951 5233972 5233968 5233973 +
gaaagtaaaaagagaaaagtga

SEQ ID NO: 86041 - DNA, 22 bp, Artificial Sequence
  Synthetic oligonucleotide; CTC chr11 5233981 5234002 5233998 5234003 +
ctggactcaccctgaagttctc

SEQ ID NO: 86042 - DNA, 22 bp, Artificial Sequence
  Synthetic oligonucleotide; CTG chr11 5233984 5234005 5234001 5234006 +
gactcaccctgaagttctcagg

SEQ ID NO: 86043 - DNA, 22 bp, Artificial Sequence
  Synthetic oligonucleotide; CTC chr11 5233989 5234010 5234006 5234011 +
accctgaagttctcaggatcca

SEQ ID NO: 86044 - DNA, 22 bp, Artificial Sequence
  Synthetic oligonucleotide; CTG chr11 5233995 5234016 5234012 5234017 +
aagttctcaggatccacgtgca

SEQ ID NO: 86045 - DNA, 22 bp, Artificial Sequence
  Synthetic oligonucleotide; TTC chr11 5234001 5234022 5234018 5234023 +
tcaggatccacgtgcagcttgt

SEQ ID NO: 86046 - DNA, 22 bp, Artificial Sequence
  Synthetic oligonucleotide; CTC chr11 5234003 5234024 5234020 5234025 +
aggatccacgtgcagcttgtca

SEQ ID NO: 86047 - DNA, 22 bp, Artificial Sequence
  Synthetic oligonucleotide; CTT chr11 5234021 5234042 5234038 5234043 +
gtcacagtgcagctcactcagc

SEQ ID NO: 86048 - DNA, 22 bp, Artificial Sequence
  Synthetic oligonucleotide; TTG chr11 5234022 5234043 5234039 5234044 +
tcacagtgcagctcactcagct

SEQ ID NO: 86049 - DNA, 22 bp, Artificial Sequence
  Synthetic oligonucleotide; CTC chr11 5234036 5234057 5234053 5234058 +
actcagctgagaaaaagtgccc

SEQ ID NO: 86050 - DNA, 22 bp, Artificial Sequence
  Synthetic oligonucleotide; CTC chr11 5234040 5234061 5234057 5234062 +
agctgagaaaaagtgcccttga

SEQ ID NO: 86051 - DNA, 22 bp, Artificial Sequence
  Synthetic oligonucleotide; CTG chr11 5234045 5234066 5234062 5234067 +
agaaaaagtgcccttgaggttg

SEQ ID NO: 86052 - DNA, 22 bp, Artificial Sequence
  Synthetic oligonucleotide; CTT chr11 5234060 5234081 5234077 5234082 +
gaggttgtccaggtgagccagg

SEQ ID NO: 86053 - DNA, 22 bp, Artificial Sequence
  Synthetic oligonucleotide; TTG chr11 5234061 5234082 5234078 5234083 +
aggttgtccaggtgagccaggc

SEQ ID NO: 86054 - DNA, 22 bp, Artificial Sequence
  Synthetic oligonucleotide; TTG chr11 5234067 5234088 5234084 5234089 +
tccaggtgagccaggccatcac

SEQ ID NO: 86055 - DNA, 22 bp, Artificial Sequence
  Synthetic oligonucleotide; CTA chr11 5234091 5234112 5234108 5234113 +
aaggcacctagcaccttcttgc

SEQ ID NO: 86056 - DNA, 22 bp, Artificial Sequence
  Synthetic oligonucleotide; CTA chr11 5234101 5234122 5234118 5234123 +
gcaccttcttgccatgagcctt

SEQ ID NO: 86057 - DNA, 22 bp, Artificial Sequence
  Synthetic oligonucleotide; CTT chr11 5234108 5234129 5234125 5234130 +
cttgccatgagccttcacctta

SEQ ID NO: 86058 - DNA, 22 bp, Artificial Sequence
  Synthetic oligonucleotide; TTC chr11 5234109 5234130 5234126 5234131 +
ttgccatgagccttcaccttag

SEQ ID NO: 86059 - DNA, 22 bp, Artificial Sequence
  Synthetic oligonucleotide; CTT chr11 5234111 5234132 5234128 5234133 +
gccatgagccttcaccttaggg

SEQ ID NO: 86060 - DNA, 22 bp, Artificial Sequence
  Synthetic oligonucleotide; TTG chr11 5234112 5234133 5234129 5234134 +
ccatgagccttcaccttagggt

SEQ ID NO: 86061 - DNA, 22 bp, Artificial Sequence
  Synthetic oligonucleotide; CTT chr11 5234123 5234144 5234140 5234145 +
caccttagggttgcccataaca

SEQ ID NO: 86062 - DNA, 22 bp, Artificial Sequence
  Synthetic oligonucleotide; TTC chr11 5234124 5234145 5234141 5234146 +
accttagggttgcccataacag

SEQ ID NO: 86063 - DNA, 22 bp, Artificial Sequence
  Synthetic oligonucleotide; CTT chr11 5234129 5234150 5234146 5234151 +
agggttgcccataacagcatca

SEQ ID NO: 86064 - DNA, 22 bp, Artificial Sequence
  Synthetic oligonucleotide; TTA chr11 5234130 5234151 5234147 5234152 +
gggttgcccataacagcatcag

SEQ ID NO: 86065 - DNA, 22 bp, Artificial Sequence
  Synthetic oligonucleotide; TTG chr11 5234136 5234157 5234153 5234158 +
cccataacagcatcaggagagg

SEQ ID NO: 86066 - DNA, 22 bp, Artificial Sequence
  Synthetic oligonucleotide; CTC chr11 5234177 5234198 5234194 5234199 +
aaagaacctctgggtccaaggg

SEQ ID NO: 86067 - DNA, 22 bp, Artificial Sequence
  Synthetic oligonucleotide; CTC chr11 5234187 5234208 5234204 5234209 +
tgggtccaagggtagaccacca

SEQ ID NO: 86068 - DNA, 22 bp, Artificial Sequence
  Synthetic oligonucleotide; CTG chr11 5234189 5234210 5234206 5234211 +
ggtccaagggtagaccaccagt

SEQ ID NO: 86069 - DNA, 22 bp, Artificial Sequence
  Synthetic oligonucleotide; CTG chr11 5234217 5234238 5234234 5234239 +
agggtaggaaaacagcccaagg

SEQ ID NO: 86070 - DNA, 22 bp, Artificial Sequence
  Synthetic oligonucleotide; CTA chr11 5234258 5234279 5234275 5234280 +
tcagaaacccaagagtcttctc

SEQ ID NO: 86071 - DNA, 22 bp, Artificial Sequence
  Synthetic oligonucleotide; CTT chr11 5234277 5234298 5234294 5234299 +
ctctgtctacacatgcccagtt

SEQ ID NO: 86072 - DNA, 22 bp, Artificial Sequence
  Synthetic oligonucleotide; TTC chr11 5234278 5234299 5234295 5234300 +
tctgtctacacatgcccagttt

SEQ ID NO: 86073 - DNA, 22 bp, Artificial Sequence
  Synthetic oligonucleotide; CTC chr11 5234280 5234301 5234297 5234302 +
tgtctacacatgcccagtttcc

SEQ ID NO: 86074 - DNA, 22 bp, Artificial Sequence
  Synthetic oligonucleotide; CTG chr11 5234282 5234303 5234299 5234304 +
tctacacatgcccagtttccat

SEQ ID NO: 86075 - DNA, 22 bp, Artificial Sequence
  Synthetic oligonucleotide; CTA chr11 5234286 5234307 5234303 5234308 +
cacatgcccagtttccatttgc

SEQ ID NO: 86076 - DNA, 22 bp, Artificial Sequence
  Synthetic oligonucleotide; TTT chr11 5234300 5234321 5234317 5234322 +
ccatttgcctccttgagcctct

SEQ ID NO: 86077 - DNA, 22 bp, Artificial Sequence
  Synthetic oligonucleotide; TTC chr11 5234301 5234322 5234318 5234323 +
catttgcctccttgagcctctc

SEQ ID NO: 86078 - DNA, 22 bp, Artificial Sequence
  Synthetic oligonucleotide; TTT chr11 5234306 5234327 5234323 5234328 +
gcctccttgagcctctcttata

SEQ ID NO: 86079 - DNA, 22 bp, Artificial Sequence
  Synthetic oligonucleotide; TTG chr11 5234307 5234328 5234324 5234329 +
cctccttgagcctctcttataa

SEQ ID NO: 86080 - DNA, 22 bp, Artificial Sequence
  Synthetic oligonucleotide; CTC chr11 5234311 5234332 5234328 5234333 +
cttgagcctctcttataacctt

SEQ ID NO: 86081 - DNA, 22 bp, Artificial Sequence
  Synthetic oligonucleotide; CTT chr11 5234314 5234335 5234331 5234336 +
gagcctctcttataaccttgat

SEQ ID NO: 86082 - DNA, 22 bp, Artificial Sequence
  Synthetic oligonucleotide; TTG chr11 5234315 5234336 5234332 5234337 +
agcctctcttataaccttgata

SEQ ID NO: 86083 - DNA, 22 bp, Artificial Sequence
  Synthetic oligonucleotide; CTC chr11 5234321 5234342 5234338 5234343 +
tcttataaccttgataccaacc

SEQ ID NO: 86084 - DNA, 22 bp, Artificial Sequence
  Synthetic oligonucleotide; CTC chr11 5234323 5234344 5234340 5234345 +
ttataaccttgataccaacctg

SEQ ID NO: 86085 - DNA, 22 bp, Artificial Sequence
  Synthetic oligonucleotide; CTT chr11 5234325 5234346 5234342 5234347 +
ataaccttgataccaacctgcc

SEQ ID NO: 86086 - DNA, 22 bp, Artificial Sequence
  Synthetic oligonucleotide; TTA chr11 5234326 5234347 5234343 5234348 +
taaccttgataccaacctgccc

SEQ ID NO: 86087 - DNA, 22 bp, Artificial Sequence
  Synthetic oligonucleotide; CTT chr11 5234333 5234354 5234350 5234355 +
gataccaacctgcccagggcct

SEQ ID NO: 86088 - DNA, 22 bp, Artificial Sequence
  Synthetic oligonucleotide; TTG chr11 5234334 5234355 5234351 5234356 +
ataccaacctgcccagggcctc

SEQ ID NO: 86089 - DNA, 22 bp, Artificial Sequence
  Synthetic oligonucleotide; CTG chr11 5234345 5234366 5234362 5234367 +
cccagggcctcaccaccaactg

SEQ ID NO: 86090 - DNA, 22 bp, Artificial Sequence
  Synthetic oligonucleotide; CTC chr11 5234356 5234377 5234373 5234378 +
accaccaactgcatccacgttc

SEQ ID NO: 86091 - DNA, 22 bp, Artificial Sequence
  Synthetic oligonucleotide; CTG chr11 5234367 5234388 5234384 5234389 +
catccacgttcactttgcccca

SEQ ID NO: 86092 - DNA, 22 bp, Artificial Sequence
  Synthetic oligonucleotide; TTC chr11 5234378 5234399 5234395 5234400 +
actttgccccacagggcattga

SEQ ID NO: 86093 - DNA, 22 bp, Artificial Sequence
  Synthetic oligonucleotide; CTT chr11 5234382 5234403 5234399 5234404 +
tgccccacagggcattgacagc

SEQ ID NO: 86094 - DNA, 22 bp, Artificial Sequence
  Synthetic oligonucleotide; TTT chr11 5234383 5234404 5234400 5234405 +
gccccacagggcattgacagca

SEQ ID NO: 86095 - DNA, 22 bp, Artificial Sequence
  Synthetic oligonucleotide; TTG chr11 5234384 5234405 5234401 5234406 +
ccccacagggcattgacagcag

SEQ ID NO: 86096 - DNA, 22 bp, Artificial Sequence
  Synthetic oligonucleotide; TTG chr11 5234399 5234420 5234416 5234421 +
acagcagtcttctcctcaggag

SEQ ID NO: 86097 - DNA, 22 bp, Artificial Sequence
  Synthetic oligonucleotide; CTT chr11 5234410 5234431 5234427 5234432 +
ctcctcaggagtcagatgcacc

SEQ ID NO: 86098 - DNA, 22 bp, Artificial Sequence
  Synthetic oligonucleotide; TTC chr11 5234411 5234432 5234428 5234433 +
tcctcaggagtcagatgcacca

SEQ ID NO: 86099 - DNA, 22 bp, Artificial Sequence
  Synthetic oligonucleotide; CTC chr11 5234413 5234434 5234430 5234435 +
ctcaggagtcagatgcaccatg

SEQ ID NO: 86100 - DNA, 22 bp, Artificial Sequence
  Synthetic oligonucleotide; CTC chr11 5234416 5234437 5234433 5234438 +
aggagtcagatgcaccatggtg

SEQ ID NO: 86101 - DNA, 22 bp, Artificial Sequence
  Synthetic oligonucleotide; CTG chr11 5234442 5234463 5234459 5234464 +
tttgaggttgctagtgaacact

SEQ ID NO: 86102 - DNA, 22 bp, Artificial Sequence
  Synthetic oligonucleotide; TTT chr11 5234445 5234466 5234462 5234467 +
gaggttgctagtgaacactgtt

SEQ ID NO: 86103 - DNA, 22 bp, Artificial Sequence
  Synthetic oligonucleotide; TTG chr11 5234446 5234467 5234463 5234468 +
aggttgctagtgaacactgtta

SEQ ID NO: 86104 - DNA, 22 bp, Artificial Sequence
  Synthetic oligonucleotide; TTG chr11 5234452 5234473 5234469 5234474 +
ctagtgaacactgttatgtcag

SEQ ID NO: 86105 - DNA, 22 bp, Artificial Sequence
  Synthetic oligonucleotide; CTA chr11 5234455 5234476 5234472 5234477 +
gtgaacactgttatgtcagaag

SEQ ID NO: 86106 - DNA, 22 bp, Artificial Sequence
  Synthetic oligonucleotide; CTG chr11 5234465 5234486 5234482 5234487 +
ttatgtcagaagaaagtgtaag

SEQ ID NO: 86107 - DNA, 22 bp, Artificial Sequence
  Synthetic oligonucleotide; TTA chr11 5234468 5234489 5234485 5234490 +
tgtcagaagaaagtgtaagcaa

SEQ ID NO: 86108 - DNA, 22 bp, Artificial Sequence
  Synthetic oligonucleotide; CTC chr11 5234500 5234521 5234517 5234522 +
tgccctgccttttatgctggtc

SEQ ID NO: 86109 - DNA, 22 bp, Artificial Sequence
  Synthetic oligonucleotide; CTG chr11 5234502 5234523 5234519 5234524 +
ccctgccttttatgctggtcct

SEQ ID NO: 86110 - DNA, 22 bp, Artificial Sequence
  Synthetic oligonucleotide; CTG chr11 5234507 5234528 5234524 5234529 +
ccttttatgctggtcctgtcct

SEQ ID NO: 86111 - DNA, 22 bp, Artificial Sequence
  Synthetic oligonucleotide; CTT chr11 5234511 5234532 5234528 5234533 +
ttatgctggtcctgtcctccct

SEQ ID NO: 86112 - DNA, 22 bp, Artificial Sequence
  Synthetic oligonucleotide; TTT chr11 5234512 5234533 5234529 5234534 +
tatgctggtcctgtcctccctg

SEQ ID NO: 86113 - DNA, 22 bp, Artificial Sequence
  Synthetic oligonucleotide; TTT chr11 5234513 5234534 5234530 5234535 +
atgctggtcctgtcctccctgc

SEQ ID NO: 86114 - DNA, 22 bp, Artificial Sequence
  Synthetic oligonucleotide; TTA chr11 5234514 5234535 5234531 5234536 +
tgctggtcctgtcctccctgct

SEQ ID NO: 86115 - DNA, 22 bp, Artificial Sequence
  Synthetic oligonucleotide; CTG chr11 5234519 5234540 5234536 5234541 +
gtcctgtcctccctgctccagt

SEQ ID NO: 86116 - DNA, 22 bp, Artificial Sequence
  Synthetic oligonucleotide; CTG chr11 5234525 5234546 5234542 5234547 +
tcctccctgctccagtgagcag

SEQ ID NO: 86117 - DNA, 22 bp, Artificial Sequence
  Synthetic oligonucleotide; CTC chr11 5234530 5234551 5234547 5234552 +
cctgctccagtgagcaggttgg

SEQ ID NO: 86118 - DNA, 22 bp, Artificial Sequence
  Synthetic oligonucleotide; CTG chr11 5234534 5234555 5234551 5234556 +
ctccagtgagcaggttggttta

SEQ ID NO: 86119 - DNA, 22 bp, Artificial Sequence
  Synthetic oligonucleotide; CTC chr11 5234537 5234558 5234554 5234559 +
cagtgagcaggttggtttaaga

SEQ ID NO: 86120 - DNA, 22 bp, Artificial Sequence
  Synthetic oligonucleotide; TTG chr11 5234551 5234572 5234568 5234573 +
gtttaagataagcagggtttca

SEQ ID NO: 86121 - DNA, 22 bp, Artificial Sequence
  Synthetic oligonucleotide; TTT chr11 5234555 5234576 5234572 5234577 +
aagataagcagggtttcattag

SEQ ID NO: 86122 - DNA, 22 bp, Artificial Sequence
  Synthetic oligonucleotide; TTA chr11 5234556 5234577 5234573 5234578 +
agataagcagggtttcattagt

SEQ ID NO: 86123 - DNA, 22 bp, Artificial Sequence
  Synthetic oligonucleotide; TTT chr11 5234571 5234592 5234588 5234593 +
cattagtttgtgagaatgaaaa

SEQ ID NO: 86124 - DNA, 22 bp, Artificial Sequence
  Synthetic oligonucleotide; TTC chr11 5234572 5234593 5234589 5234594 +
attagtttgtgagaatgaaaaa

SEQ ID NO: 86125 - DNA, 22 bp, Artificial Sequence
  Synthetic oligonucleotide; TTA chr11 5234576 5234597 5234593 5234598 +
gtttgtgagaatgaaaaatgaa

SEQ ID NO: 86126 - DNA, 22 bp, Artificial Sequence
  Synthetic oligonucleotide; TTT chr11 5234580 5234601 5234597 5234602 +
gtgagaatgaaaaatgaacctt

SEQ ID NO: 86127 - DNA, 22 bp, Artificial Sequence
  Synthetic oligonucleotide; TTG chr11 5234581 5234602 5234598 5234603 +
tgagaatgaaaaatgaaccttc

SEQ ID NO: 86128 - DNA, 22 bp, Artificial Sequence
  Synthetic oligonucleotide; CTT chr11 5234602 5234623 5234619 5234624 +
cattccactattcccttaactt

SEQ ID NO: 86129 - DNA, 22 bp, Artificial Sequence
  Synthetic oligonucleotide; TTC chr11 5234603 5234624 5234620 5234625 +
attccactattcccttaacttg

SEQ ID NO: 86130 - DNA, 22 bp, Artificial Sequence
  Synthetic oligonucleotide; TTC chr11 5234607 5234628 5234624 5234629 +
cactattcccttaacttgccct

SEQ ID NO: 86131 - DNA, 22 bp, Artificial Sequence
  Synthetic oligonucleotide; CTA chr11 5234612 5234633 5234629 5234634 +
ttcccttaacttgccctgagat

SEQ ID NO: 86132 - DNA, 22 bp, Artificial Sequence
  Synthetic oligonucleotide; TTC chr11 5234615 5234636 5234632 5234637 +
ccttaacttgccctgagattgg

SEQ ID NO: 86133 - DNA, 22 bp, Artificial Sequence
  Synthetic oligonucleotide; CTT chr11 5234619 5234640 5234636 5234641 +
aacttgccctgagattggctgt

SEQ ID NO: 86134 - DNA, 22 bp, Artificial Sequence
  Synthetic oligonucleotide; TTA chr11 5234620 5234641 5234637 5234642 +
acttgccctgagattggctgtt

SEQ ID NO: 86135 - DNA, 22 bp, Artificial Sequence
  Synthetic oligonucleotide; CTT chr11 5234624 5234645 5234641 5234646 +
gccctgagattggctgttctgt

SEQ ID NO: 86136 - DNA, 22 bp, Artificial Sequence
  Synthetic oligonucleotide; TTG chr11 5234625 5234646 5234642 5234647 +
ccctgagattggctgttctgtc

SEQ ID NO: 86137 - DNA, 22 bp, Artificial Sequence
  Synthetic oligonucleotide; CTG chr11 5234630 5234651 5234647 5234652 +
agattggctgttctgtcatgtg

SEQ ID NO: 86138 - DNA, 22 bp, Artificial Sequence
  Synthetic oligonucleotide; TTG chr11 5234636 5234657 5234653 5234658 +
gctgttctgtcatgtgtgtctt

SEQ ID NO: 86139 - DNA, 22 bp, Artificial Sequence
  Synthetic oligonucleotide; CTG chr11 5234640 5234661 5234657 5234662 +
ttctgtcatgtgtgtcttgact

SEQ ID NO: 86140 - DNA, 22 bp, Artificial Sequence
  Synthetic oligonucleotide; TTC chr11 5234643 5234664 5234660 5234665 +
tgtcatgtgtgtcttgactcag

SEQ ID NO: 86141 - DNA, 22 bp, Artificial Sequence
  Synthetic oligonucleotide; CTG chr11 5234645 5234666 5234662 5234667 +
tcatgtgtgtcttgactcagaa

SEQ ID NO: 86142 - DNA, 22 bp, Artificial Sequence
  Synthetic oligonucleotide; CTT chr11 5234658 5234679 5234675 5234680 +
gactcagaaaccctgttctcct

SEQ ID NO: 86143 - DNA, 22 bp, Artificial Sequence
  Synthetic oligonucleotide; TTG chr11 5234659 5234680 5234676 5234681 +
actcagaaaccctgttctcctc

SEQ ID NO: 86144 - DNA, 22 bp, Artificial Sequence
  Synthetic oligonucleotide; CTC chr11 5234663 5234684 5234680 5234685 +
agaaaccctgttctcctctaca

SEQ ID NO: 86145 - DNA, 22 bp, Artificial Sequence
  Synthetic oligonucleotide; CTG chr11 5234673 5234694 5234690 5234695 +
ttctcctctacatatctcccca

SEQ ID NO: 86146 - DNA, 22 bp, Artificial Sequence
  Synthetic oligonucleotide; TTC chr11 5234676 5234697 5234693 5234698 +
tcctctacatatctccccaccg

SEQ ID NO: 86147 - DNA, 22 bp, Artificial Sequence
  Synthetic oligonucleotide; CTC chr11 5234678 5234699 5234695 5234700 +
ctctacatatctccccaccgca

SEQ ID NO: 86148 - DNA, 22 bp, Artificial Sequence
  Synthetic oligonucleotide; CTC chr11 5234681 5234702 5234698 5234703 +
tacatatctccccaccgcatct

SEQ ID NO: 86149 - DNA, 22 bp, Artificial Sequence
  Synthetic oligonucleotide; CTA chr11 5234683 5234704 5234700 5234705 +
catatctccccaccgcatctct

SEQ ID NO: 86150 - DNA, 22 bp, Artificial Sequence
  Synthetic oligonucleotide; CTC chr11 5234691 5234712 5234708 5234713 +
cccaccgcatctctttcagcag

SEQ ID NO: 86151 - DNA, 22 bp, Artificial Sequence
  Synthetic oligonucleotide; CTC chr11 5234704 5234725 5234721 5234726 +
tttcagcagttgtttctaaaaa

SEQ ID NO: 86152 - DNA, 22 bp, Artificial Sequence
  Synthetic oligonucleotide; CTT chr11 5234706 5234727 5234723 5234728 +
tcagcagttgtttctaaaaata

SEQ ID NO: 86153 - DNA, 22 bp, Artificial Sequence
  Synthetic oligonucleotide; TTT chr11 5234707 5234728 5234724 5234729 +
cagcagttgtttctaaaaatat

SEQ ID NO: 86154 - DNA, 22 bp, Artificial Sequence
  Synthetic oligonucleotide; TTC chr11 5234708 5234729 5234725 5234730 +
agcagttgtttctaaaaatatc

SEQ ID NO: 86155 - DNA, 22 bp, Artificial Sequence
  Synthetic oligonucleotide; TTG chr11 5234716 5234737 5234733 5234738 +
tttctaaaaatatcctcctagt

SEQ ID NO: 86156 - DNA, 22 bp, Artificial Sequence
  Synthetic oligonucleotide; TTT chr11 5234719 5234740 5234736 5234741 +
ctaaaaatatcctcctagtttc

SEQ ID NO: 86157 - DNA, 22 bp, Artificial Sequence
  Synthetic oligonucleotide; TTC chr11 5234720 5234741 5234737 5234742 +
taaaaatatcctcctagtttca

SEQ ID NO: 86158 - DNA, 22 bp, Artificial Sequence
  Synthetic oligonucleotide; CTA chr11 5234722 5234743 5234739 5234744 +
aaaatatcctcctagtttcatt

SEQ ID NO: 86159 - DNA, 22 bp, Artificial Sequence
  Synthetic oligonucleotide; CTC chr11 5234733 5234754 5234750 5234755 +
ctagtttcatttttgcagaagt

SEQ ID NO: 86160 - DNA, 22 bp, Artificial Sequence
  Synthetic oligonucleotide; CTA chr11 5234736 5234757 5234753 5234758 +
gtttcatttttgcagaagtgtt

SEQ ID NO: 86161 - DNA, 22 bp, Artificial Sequence
  Synthetic oligonucleotide; TTT chr11 5234740 5234761 5234757 5234762 +
catttttgcagaagtgttttag

SEQ ID NO: 86162 - DNA, 22 bp, Artificial Sequence
  Synthetic oligonucleotide; TTC chr11 5234741 5234762 5234758 5234763 +
atttttgcagaagtgttttagg

SEQ ID NO: 86163 - DNA, 22 bp, Artificial Sequence
  Synthetic oligonucleotide; TTT chr11 5234745 5234766 5234762 5234767 +
ttgcagaagtgttttaggctaa

SEQ ID NO: 86164 - DNA, 22 bp, Artificial Sequence
  Synthetic oligonucleotide; TTT chr11 5234746 5234767 5234763 5234768 +
tgcagaagtgttttaggctaat

SEQ ID NO: 86165 - DNA, 22 bp, Artificial Sequence
  Synthetic oligonucleotide; TTT chr11 5234747 5234768 5234764 5234769 +
gcagaagtgttttaggctaata

SEQ ID NO: 86166 - DNA, 22 bp, Artificial Sequence
  Synthetic oligonucleotide; TTG chr11 5234748 5234769 5234765 5234770 +
cagaagtgttttaggctaatat

SEQ ID NO: 86167 - DNA, 22 bp, Artificial Sequence
  Synthetic oligonucleotide; TTT chr11 5234759 5234780 5234776 5234781 +
taggctaatatagtggaatgta

SEQ ID NO: 86168 - DNA, 22 bp, Artificial Sequence
  Synthetic oligonucleotide; TTT chr11 5234760 5234781 5234777 5234782 +
aggctaatatagtggaatgtat

SEQ ID NO: 86169 - DNA, 22 bp, Artificial Sequence
  Synthetic oligonucleotide; TTA chr11 5234761 5234782 5234778 5234783 +
ggctaatatagtggaatgtatc

SEQ ID NO: 86170 - DNA, 22 bp, Artificial Sequence
  Synthetic oligonucleotide; CTA chr11 5234766 5234787 5234783 5234788 +
atatagtggaatgtatcttaga

SEQ ID NO: 86171 - DNA, 22 bp, Artificial Sequence
  Synthetic oligonucleotide; CTT chr11 5234785 5234806 5234802 5234807 +
agagtttaacttatttgtttct

SEQ ID NO: 86172 - DNA, 22 bp, Artificial Sequence
  Synthetic oligonucleotide; TTA chr11 5234786 5234807 5234803 5234808 +
gagtttaacttatttgtttctg

SEQ ID NO: 86173 - DNA, 22 bp, Artificial Sequence
  Synthetic oligonucleotide; TTT chr11 5234792 5234813 5234809 5234814 +
aacttatttgtttctgtcactt

SEQ ID NO: 86174 - DNA, 22 bp, Artificial Sequence
  Synthetic oligonucleotide; TTA chr11 5234793 5234814 5234810 5234815 +
acttatttgtttctgtcacttt

SEQ ID NO: 86175 - DNA, 22 bp, Artificial Sequence
  Synthetic oligonucleotide; CTT chr11 5234797 5234818 5234814 5234819 +
atttgtttctgtcactttatac

SEQ ID NO: 86176 - DNA, 22 bp, Artificial Sequence
  Synthetic oligonucleotide; TTA chr11 5234798 5234819 5234815 5234820 +
tttgtttctgtcactttatact

SEQ ID NO: 86177 - DNA, 22 bp, Artificial Sequence
  Synthetic oligonucleotide; TTT chr11 5234801 5234822 5234818 5234823 +
gtttctgtcactttatactaag

SEQ ID NO: 86178 - DNA, 22 bp, Artificial Sequence
  Synthetic oligonucleotide; TTG chr11 5234802 5234823 5234819 5234824 +
tttctgtcactttatactaaga

SEQ ID NO: 86179 - DNA, 22 bp, Artificial Sequence
  Synthetic oligonucleotide; TTT chr11 5234805 5234826 5234822 5234827 +
ctgtcactttatactaagaaaa

SEQ ID NO: 86180 - DNA, 22 bp, Artificial Sequence
  Synthetic oligonucleotide; TTC chr11 5234806 5234827 5234823 5234828 +
tgtcactttatactaagaaaac

SEQ ID NO: 86181 - DNA, 22 bp, Artificial Sequence
  Synthetic oligonucleotide; CTG chr11 5234808 5234829 5234825 5234830 +
tcactttatactaagaaaactt

SEQ ID NO: 86182 - DNA, 22 bp, Artificial Sequence
  Synthetic oligonucleotide; CTT chr11 5234814 5234835 5234831 5234836 +
tatactaagaaaacttatctaa

SEQ ID NO: 86183 - DNA, 22 bp, Artificial Sequence
  Synthetic oligonucleotide; TTT chr11 5234815 5234836 5234832 5234837 +
atactaagaaaacttatctaaa

SEQ ID NO: 86184 - DNA, 22 bp, Artificial Sequence
  Synthetic oligonucleotide; TTA chr11 5234816 5234837 5234833 5234838 +
tactaagaaaacttatctaaaa

SEQ ID NO: 86185 - DNA, 22 bp, Artificial Sequence
  Synthetic oligonucleotide; CTA chr11 5234821 5234842 5234838 5234843 +
agaaaacttatctaaaagcaga

SEQ ID NO: 86186 - DNA, 22 bp, Artificial Sequence
  Synthetic oligonucleotide; CTT chr11 5234830 5234851 5234847 5234852 +
atctaaaagcagatgttttaac

SEQ ID NO: 86187 - DNA, 22 bp, Artificial Sequence
  Synthetic oligonucleotide; TTA chr11 5234831 5234852 5234848 5234853 +
tctaaaagcagatgttttaaca

SEQ ID NO: 86188 - DNA, 22 bp, Artificial Sequence
  Synthetic oligonucleotide; CTA chr11 5234835 5234856 5234852 5234857 +
aaagcagatgttttaacaagtt

SEQ ID NO: 86189 - DNA, 22 bp, Artificial Sequence
  Synthetic oligonucleotide; TTT chr11 5234848 5234869 5234865 5234870 +
taacaagttgactcaatataaa

SEQ ID NO: 86190 - DNA, 22 bp, Artificial Sequence
  Synthetic oligonucleotide; TTT chr11 5234849 5234870 5234866 5234871 +
aacaagttgactcaatataaag

SEQ ID NO: 86191 - DNA, 22 bp, Artificial Sequence
  Synthetic oligonucleotide; TTA chr11 5234850 5234871 5234867 5234872 +
acaagttgactcaatataaagt

SEQ ID NO: 86192 - DNA, 22 bp, Artificial Sequence
  Synthetic oligonucleotide; TTG chr11 5234858 5234879 5234875 5234880 +
actcaatataaagttcttcttt

SEQ ID NO: 86193 - DNA, 22 bp, Artificial Sequence
  Synthetic oligonucleotide; CTC chr11 5234862 5234883 5234879 5234884 +
aatataaagttcttctttgcct

SEQ ID NO: 86194 - DNA, 22 bp, Artificial Sequence
  Synthetic oligonucleotide; TTC chr11 5234874 5234895 5234891 5234896 +
ttctttgcctctagagattttt

SEQ ID NO: 86195 - DNA, 22 bp, Artificial Sequence
  Synthetic oligonucleotide; CTT chr11 5234876 5234897 5234893 5234898 +
ctttgcctctagagatttttgt

SEQ ID NO: 86196 - DNA, 22 bp, Artificial Sequence
  Synthetic oligonucleotide; TTC chr11 5234877 5234898 5234894 5234899 +
tttgcctctagagatttttgtc

SEQ ID NO: 86197 - DNA, 22 bp, Artificial Sequence
  Synthetic oligonucleotide; CTT chr11 5234879 5234900 5234896 5234901 +
tgcctctagagatttttgtctc

SEQ ID NO: 86198 - DNA, 22 bp, Artificial Sequence
  Synthetic oligonucleotide; TTT chr11 5234880 5234901 5234897 5234902 +
gcctctagagatttttgtctcc

SEQ ID NO: 86199 - DNA, 22 bp, Artificial Sequence
  Synthetic oligonucleotide; TTG chr11 5234881 5234902 5234898 5234903 +
cctctagagatttttgtctcca

SEQ ID NO: 86200 - DNA, 22 bp, Artificial Sequence
  Synthetic oligonucleotide; CTC chr11 5234885 5234906 5234902 5234907 +
tagagatttttgtctccaaggg

SEQ ID NO: 86201 - DNA, 22 bp, Artificial Sequence
  Synthetic oligonucleotide; CTA chr11 5234887 5234908 5234904 5234909 +
gagatttttgtctccaagggaa

SEQ ID NO: 86202 - DNA, 22 bp, Artificial Sequence
  Synthetic oligonucleotide; TTT chr11 5234894 5234915 5234911 5234916 +
ttgtctccaagggaattttgag

SEQ ID NO: 86203 - DNA, 22 bp, Artificial Sequence
  Synthetic oligonucleotide; TTT chr11 5234895 5234916 5234912 5234917 +
tgtctccaagggaattttgaga

SEQ ID NO: 86204 - DNA, 22 bp, Artificial Sequence
  Synthetic oligonucleotide; TTT chr11 5234896 5234917 5234913 5234918 +
gtctccaagggaattttgagag

SEQ ID NO: 86205 - DNA, 22 bp, Artificial Sequence
  Synthetic oligonucleotide; TTG chr11 5234897 5234918 5234914 5234919 +
tctccaagggaattttgagagg

SEQ ID NO: 86206 - DNA, 22 bp, Artificial Sequence
  Synthetic oligonucleotide; CTC chr11 5234901 5234922 5234918 5234923 +
caagggaattttgagaggttgg

SEQ ID NO: 86207 - DNA, 22 bp, Artificial Sequence
  Synthetic oligonucleotide; TTT chr11 5234912 5234933 5234929 5234934 +
tgagaggttggaatggacaaat

SEQ ID NO: 86208 - DNA, 22 bp, Artificial Sequence
  Synthetic oligonucleotide; TTT chr11 5234913 5234934 5234930 5234935 +
gagaggttggaatggacaaatc

SEQ ID NO: 86209 - DNA, 22 bp, Artificial Sequence
  Synthetic oligonucleotide; TTG chr11 5234914 5234935 5234931 5234936 +
agaggttggaatggacaaatct

SEQ ID NO: 86210 - DNA, 22 bp, Artificial Sequence
  Synthetic oligonucleotide; TTG chr11 5234922 5234943 5234939 5234944 +
gaatggacaaatctattgctgc

SEQ ID NO: 86211 - DNA, 22 bp, Artificial Sequence
  Synthetic oligonucleotide; CTA chr11 5234937 5234958 5234954 5234959 +
ttgctgcagtttaaacttgctt

SEQ ID NO: 86212 - DNA, 22 bp, Artificial Sequence
  Synthetic oligonucleotide; TTG chr11 5234940 5234961 5234957 5234962 +
ctgcagtttaaacttgcttgct

SEQ ID NO: 86213 - DNA, 22 bp, Artificial Sequence
  Synthetic oligonucleotide; CTG chr11 5234943 5234964 5234960 5234965 +
cagtttaaacttgcttgcttcc

SEQ ID NO: 86214 - DNA, 22 bp, Artificial Sequence
  Synthetic oligonucleotide; TTT chr11 5234949 5234970 5234966 5234971 +
aaacttgcttgcttcctccttc

SEQ ID NO: 86215 - DNA, 22 bp, Artificial Sequence
  Synthetic oligonucleotide; TTA chr11 5234950 5234971 5234967 5234972 +
aacttgcttgcttcctccttct

SEQ ID NO: 86216 - DNA, 22 bp, Artificial Sequence
  Synthetic oligonucleotide; CTT chr11 5234955 5234976 5234972 5234977 +
gcttgcttcctccttcttttgg

SEQ ID NO: 86217 - DNA, 22 bp, Artificial Sequence
  Synthetic oligonucleotide; TTG chr11 5234956 5234977 5234973 5234978 +
cttgcttcctccttcttttggt

SEQ ID NO: 86218 - DNA, 22 bp, Artificial Sequence
  Synthetic oligonucleotide; CTT chr11 5234959 5234980 5234976 5234981 +
gcttcctccttcttttggtaaa

SEQ ID NO: 86219 - DNA, 22 bp, Artificial Sequence
  Synthetic oligonucleotide; TTG chr11 5234960 5234981 5234977 5234982 +
cttcctccttcttttggtaaat

SEQ ID NO: 86220 - DNA, 22 bp, Artificial Sequence
  Synthetic oligonucleotide; CTT chr11 5234963 5234984 5234980 5234985 +
cctccttcttttggtaaattct

SEQ ID NO: 86221 - DNA, 22 bp, Artificial Sequence
  Synthetic oligonucleotide; TTC chr11 5234964 5234985 5234981 5234986 +
ctccttcttttggtaaattctt

SEQ ID NO: 86222 - DNA, 22 bp, Artificial Sequence
  Synthetic oligonucleotide; CTC chr11 5234967 5234988 5234984 5234989 +
cttcttttggtaaattcttcct

SEQ ID NO: 86223 - DNA, 22 bp, Artificial Sequence
  Synthetic oligonucleotide; CTT chr11 5234970 5234991 5234987 5234992 +
cttttggtaaattcttcctata

SEQ ID NO: 86224 - DNA, 22 bp, Artificial Sequence
  Synthetic oligonucleotide; TTC chr11 5234971 5234992 5234988 5234993 +
ttttggtaaattcttcctataa

SEQ ID NO: 86225 - DNA, 22 bp, Artificial Sequence
  Synthetic oligonucleotide; CTT chr11 5234973 5234994 5234990 5234995 +
ttggtaaattcttcctataata

SEQ ID NO: 86226 - DNA, 22 bp, Artificial Sequence
  Synthetic oligonucleotide; TTT chr11 5234974 5234995 5234991 5234996 +
tggtaaattcttcctataataa

SEQ ID NO: 86227 - DNA, 22 bp, Artificial Sequence
  Synthetic oligonucleotide; TTT chr11 5234975 5234996 5234992 5234997 +
ggtaaattcttcctataataaa

SEQ ID NO: 86228 - DNA, 22 bp, Artificial Sequence
  Synthetic oligonucleotide; TTG chr11 5234976 5234997 5234993 5234998 +
gtaaattcttcctataataaaa

SEQ ID NO: 86229 - DNA, 22 bp, Artificial Sequence
  Synthetic oligonucleotide; TTC chr11 5234984 5235005 5235001 5235006 +
ttcctataataaaactctaatt

SEQ ID NO: 86230 - DNA, 22 bp, Artificial Sequence
  Synthetic oligonucleotide; CTT chr11 5234986 5235007 5235003 5235008 +
cctataataaaactctaatttt

SEQ ID NO: 86231 - DNA, 22 bp, Artificial Sequence
  Synthetic oligonucleotide; TTC chr11 5234987 5235008 5235004 5235009 +
ctataataaaactctaattttt

SEQ ID NO: 86232 - DNA, 22 bp, Artificial Sequence
  Synthetic oligonucleotide; CTA chr11 5234990 5235011 5235007 5235012 +
taataaaactctaattttttat

SEQ ID NO: 86233 - DNA, 22 bp, Artificial Sequence
  Synthetic oligonucleotide; CTC chr11 5235001 5235022 5235018 5235023 +
taattttttattatattgaaat

SEQ ID NO: 86234 - DNA, 22 bp, Artificial Sequence
  Synthetic oligonucleotide; CTA chr11 5235003 5235024 5235020 5235025 +
attttttattatattgaaataa

SEQ ID NO: 86235 - DNA, 22 bp, Artificial Sequence
  Synthetic oligonucleotide; TTT chr11 5235007 5235028 5235024 5235029 +
tttattatattgaaataaatat

SEQ ID NO: 86236 - DNA, 22 bp, Artificial Sequence
  Synthetic oligonucleotide; TTT chr11 5235008 5235029 5235025 5235030 +
ttattatattgaaataaatatc

SEQ ID NO: 86237 - DNA, 22 bp, Artificial Sequence
  Synthetic oligonucleotide; TTT chr11 5235009 5235030 5235026 5235031 +
tattatattgaaataaatatcc

SEQ ID NO: 86238 - DNA, 22 bp, Artificial Sequence
  Synthetic oligonucleotide; TTT chr11 5235010 5235031 5235027 5235032 +
attatattgaaataaatatcca

SEQ ID NO: 86239 - DNA, 22 bp, Artificial Sequence
  Synthetic oligonucleotide; TTA chr11 5235011 5235032 5235028 5235033 +
ttatattgaaataaatatccat

SEQ ID NO: 86240 - DNA, 22 bp, Artificial Sequence
  Synthetic oligonucleotide; TTA chr11 5235014 5235035 5235031 5235036 +
tattgaaataaatatccattaa

SEQ ID NO: 86241 - DNA, 22 bp, Artificial Sequence
  Synthetic oligonucleotide; TTG chr11 5235019 5235040 5235036 5235041 +
aaataaatatccattaaaagaa

SEQ ID NO: 86242 - DNA, 22 bp, Artificial Sequence
  Synthetic oligonucleotide; TTA chr11 5235035 5235056 5235052 5235057 +
aaagaatatttaaaaaatgaat

SEQ ID NO: 86243 - DNA, 22 bp, Artificial Sequence
  Synthetic oligonucleotide; TTT chr11 5235046 5235067 5235063 5235068 +
aaaaaatgaatagtgtttattt

SEQ ID NO: 86244 - DNA, 22 bp, Artificial Sequence
  Synthetic oligonucleotide; TTA chr11 5235047 5235068 5235064 5235069 +
aaaaatgaatagtgtttattta

SEQ ID NO: 86245 - DNA, 22 bp, Artificial Sequence
  Synthetic oligonucleotide; TTT chr11 5235064 5235085 5235081 5235086 +
atttaccagttattgaaatagg

SEQ ID NO: 86246 - DNA, 22 bp, Artificial Sequence
  Synthetic oligonucleotide; TTA chr11 5235065 5235086 5235082 5235087 +
tttaccagttattgaaataggt

SEQ ID NO: 86247 - DNA, 22 bp, Artificial Sequence
  Synthetic oligonucleotide; TTT chr11 5235068 5235089 5235085 5235090 +
accagttattgaaataggttct

SEQ ID NO: 86248 - DNA, 22 bp, Artificial Sequence
  Synthetic oligonucleotide; TTA chr11 5235069 5235090 5235086 5235091 +
ccagttattgaaataggttctg

SEQ ID NO: 86249 - DNA, 22 bp, Artificial Sequence
  Synthetic oligonucleotide; TTA chr11 5235076 5235097 5235093 5235098 +
ttgaaataggttctggaaacat

SEQ ID NO: 86250 - DNA, 22 bp, Artificial Sequence
  Synthetic oligonucleotide; TTG chr11 5235079 5235100 5235096 5235101 +
aaataggttctggaaacatgaa

SEQ ID NO: 86251 - DNA, 22 bp, Artificial Sequence
  Synthetic oligonucleotide; TTC chr11 5235089 5235110 5235106 5235111 +
tggaaacatgaattttaaggtt

SEQ ID NO: 86252 - DNA, 22 bp, Artificial Sequence
  Synthetic oligonucleotide; CTG chr11 5235091 5235112 5235108 5235113 +
gaaacatgaattttaaggttaa

SEQ ID NO: 86253 - DNA, 22 bp, Artificial Sequence
  Synthetic oligonucleotide; TTT chr11 5235104 5235125 5235121 5235126 +
taaggttaacattttaatgaca

SEQ ID NO: 86254 - DNA, 22 bp, Artificial Sequence
  Synthetic oligonucleotide; TTT chr11 5235105 5235126 5235122 5235127 +
aaggttaacattttaatgacag

SEQ ID NO: 86255 - DNA, 22 bp, Artificial Sequence
  Synthetic oligonucleotide; TTA chr11 5235106 5235127 5235123 5235128 +
aggttaacattttaatgacaga

SEQ ID NO: 86256 - DNA, 22 bp, Artificial Sequence
  Synthetic oligonucleotide; TTA chr11 5235112 5235133 5235129 5235134 +
acattttaatgacagataaaat

SEQ ID NO: 86257 - DNA, 22 bp, Artificial Sequence
  Synthetic oligonucleotide; TTT chr11 5235118 5235139 5235135 5235140 +
taatgacagataaaatcaaata

SEQ ID NO: 86258 - DNA, 22 bp, Artificial Sequence
  Synthetic oligonucleotide; TTT chr11 5235119 5235140 5235136 5235141 +
aatgacagataaaatcaaatat

SEQ ID NO: 86259 - DNA, 22 bp, Artificial Sequence
  Synthetic oligonucleotide; TTA chr11 5235120 5235141 5235137 5235142 +
atgacagataaaatcaaatatt

SEQ ID NO: 86260 - DNA, 22 bp, Artificial Sequence
  Synthetic oligonucleotide; TTA chr11 5235143 5235164 5235160 5235165 +
tatacaaatattttgaatgttt

SEQ ID NO: 86261 - DNA, 22 bp, Artificial Sequence
  Synthetic oligonucleotide; TTT chr11 5235156 5235177 5235173 5235178 +
tgaatgtttaaaattatggtat

SEQ ID NO: 86262 - DNA, 22 bp, Artificial Sequence
  Synthetic oligonucleotide; TTT chr11 5235157 5235178 5235174 5235179 +
gaatgtttaaaattatggtatg

SEQ ID NO: 86263 - DNA, 22 bp, Artificial Sequence
  Synthetic oligonucleotide; TTG chr11 5235158 5235179 5235175 5235180 +
aatgtttaaaattatggtatga

SEQ ID NO: 86264 - DNA, 22 bp, Artificial Sequence
  Synthetic oligonucleotide; TTT chr11 5235165 5235186 5235182 5235187 +
aaaattatggtatgactaaaga

SEQ ID NO: 86265 - DNA, 22 bp, Artificial Sequence
  Synthetic oligonucleotide; TTA chr11 5235166 5235187 5235183 5235188 +
aaattatggtatgactaaagaa

SEQ ID NO: 86266 - DNA, 22 bp, Artificial Sequence
  Synthetic oligonucleotide; TTA chr11 5235172 5235193 5235189 5235194 +
tggtatgactaaagaaagaatg

SEQ ID NO: 86267 - DNA, 22 bp, Artificial Sequence
  Synthetic oligonucleotide; CTA chr11 5235183 5235204 5235200 5235205 +
aagaaagaatgcaaagtgaaaa

SEQ ID NO: 86268 - DNA, 22 bp, Artificial Sequence
  Synthetic oligonucleotide; TTT chr11 5235213 5235234 5235230 5235235 +
accatattcagccagattaaat

SEQ ID NO: 86269 - DNA, 22 bp, Artificial Sequence
  Synthetic oligonucleotide; TTA chr11 5235214 5235235 5235231 5235236 +
ccatattcagccagattaaatt

SEQ ID NO: 86270 - DNA, 22 bp, Artificial Sequence
  Synthetic oligonucleotide; TTC chr11 5235222 5235243 5235239 5235244 +
agccagattaaatttaacgaag

SEQ ID NO: 86271 - DNA, 22 bp, Artificial Sequence
  Synthetic oligonucleotide; TTA chr11 5235232 5235253 5235249 5235254 +
aatttaacgaagttcctgggaa

SEQ ID NO: 86272 - DNA, 22 bp, Artificial Sequence
  Synthetic oligonucleotide; TTT chr11 5235237 5235258 5235254 5235259 +
aacgaagttcctgggaatatgc

SEQ ID NO: 86273 - DNA, 22 bp, Artificial Sequence
  Synthetic oligonucleotide; TTA chr11 5235238 5235259 5235255 5235260 +
acgaagttcctgggaatatgct

SEQ ID NO: 86274 - DNA, 22 bp, Artificial Sequence
  Synthetic oligonucleotide; TTC chr11 5235247 5235268 5235264 5235269 +
ctgggaatatgctagtacagaa

SEQ ID NO: 86275 - DNA, 22 bp, Artificial Sequence
  Synthetic oligonucleotide; CTG chr11 5235250 5235271 5235267 5235272 +
ggaatatgctagtacagaacat

SEQ ID NO: 86276 - DNA, 22 bp, Artificial Sequence
  Synthetic oligonucleotide; CTA chr11 5235261 5235282 5235278 5235283 +
gtacagaacatttttacagatg

SEQ ID NO: 86277 - DNA, 22 bp, Artificial Sequence
  Synthetic oligonucleotide; TTT chr11 5235274 5235295 5235291 5235296 +
ttacagatgtgttcttaaaaaa

SEQ ID NO: 86278 - DNA, 22 bp, Artificial Sequence
  Synthetic oligonucleotide; TTT chr11 5235275 5235296 5235292 5235297 +
tacagatgtgttcttaaaaaaa

SEQ ID NO: 86279 - DNA, 22 bp, Artificial Sequence
  Synthetic oligonucleotide; TTT chr11 5235276 5235297 5235293 5235298 +
acagatgtgttcttaaaaaaaa

SEQ ID NO: 86280 - DNA, 22 bp, Artificial Sequence
  Synthetic oligonucleotide; TTA chr11 5235277 5235298 5235294 5235299 +
cagatgtgttcttaaaaaaaaa

SEQ ID NO: 86281 - DNA, 22 bp, Artificial Sequence
  Synthetic oligonucleotide; TTC chr11 5235288 5235309 5235305 5235310 +
ttaaaaaaaaatgtggaattag

SEQ ID NO: 86282 - DNA, 22 bp, Artificial Sequence
  Synthetic oligonucleotide; CTT chr11 5235290 5235311 5235307 5235312 +
aaaaaaaaatgtggaattagac

SEQ ID NO: 86283 - DNA, 22 bp, Artificial Sequence
  Synthetic oligonucleotide; TTA chr11 5235291 5235312 5235308 5235313 +
aaaaaaaatgtggaattagacc

SEQ ID NO: 86284 - DNA, 22 bp, Artificial Sequence
  Synthetic oligonucleotide; TTA chr11 5235309 5235330 5235326 5235331 +
gacccaggaatgaagatcccag

SEQ ID NO: 86285 - DNA, 22 bp, Artificial Sequence
  Synthetic oligonucleotide; TTT chr11 5235337 5235358 5235354 5235359 +
ttcactcttttctgaattcaaa

SEQ ID NO: 86286 - DNA, 22 bp, Artificial Sequence
  Synthetic oligonucleotide; TTT chr11 5235338 5235359 5235355 5235360 +
tcactcttttctgaattcaaat

SEQ ID NO: 86287 - DNA, 22 bp, Artificial Sequence
  Synthetic oligonucleotide; TTT chr11 5235339 5235360 5235356 5235361 +
cactcttttctgaattcaaata

SEQ ID NO: 86288 - DNA, 22 bp, Artificial Sequence
  Synthetic oligonucleotide; TTC chr11 5235340 5235361 5235357 5235362 +
actcttttctgaattcaaataa

SEQ ID NO: 86289 - DNA, 22 bp, Artificial Sequence
  Synthetic oligonucleotide; CTC chr11 5235344 5235365 5235361 5235366 +
ttttctgaattcaaataatgcc

SEQ ID NO: 86290 - DNA, 22 bp, Artificial Sequence
  Synthetic oligonucleotide; CTT chr11 5235346 5235367 5235363 5235368 +
ttctgaattcaaataatgccac

SEQ ID NO: 86291 - DNA, 22 bp, Artificial Sequence
  Synthetic oligonucleotide; TTT chr11 5235347 5235368 5235364 5235369 +
tctgaattcaaataatgccaca

SEQ ID NO: 86292 - DNA, 22 bp, Artificial Sequence
  Synthetic oligonucleotide; TTT chr11 5235348 5235369 5235365 5235370 +
ctgaattcaaataatgccacaa

SEQ ID NO: 86293 - DNA, 22 bp, Artificial Sequence
  Synthetic oligonucleotide; TTC chr11 5235349 5235370 5235366 5235371 +
tgaattcaaataatgccacaat

SEQ ID NO: 86294 - DNA, 22 bp, Artificial Sequence
  Synthetic oligonucleotide; CTG chr11 5235351 5235372 5235368 5235373 +
aattcaaataatgccacaatgg

SEQ ID NO: 86295 - DNA, 22 bp, Artificial Sequence
  Synthetic oligonucleotide; TTC chr11 5235356 5235377 5235373 5235378 +
aaataatgccacaatggcagac

SEQ ID NO: 86296 - DNA, 22 bp, Artificial Sequence
  Synthetic oligonucleotide; TTG chr11 5235416 5235437 5235433 5235438 +
aaggaaagaggaggaagaaatg

SEQ ID NO: 86297 - DNA, 22 bp, Artificial Sequence
  Synthetic oligonucleotide; CTG chr11 5235680 5235701 5235697 5235702 +
acagttcaaattttggtggtga

SEQ ID NO: 86298 - DNA, 22 bp, Artificial Sequence
  Synthetic oligonucleotide; TTC chr11 5235687 5235708 5235704 5235709 +
aaattttggtggtgatatggat

SEQ ID NO: 86299 - DNA, 22 bp, Artificial Sequence
  Synthetic oligonucleotide; TTT chr11 5235693 5235714 5235710 5235715 +
tggtggtgatatggatcaatag

SEQ ID NO: 86300 - DNA, 22 bp, Artificial Sequence
  Synthetic oligonucleotide; TTT chr11 5235694 5235715 5235711 5235716 +
ggtggtgatatggatcaataga

SEQ ID NO: 86301 - DNA, 22 bp, Artificial Sequence
  Synthetic oligonucleotide; TTG chr11 5235695 5235716 5235712 5235717 +
gtggtgatatggatcaatagaa

SEQ ID NO: 86302 - DNA, 22 bp, Artificial Sequence
  Synthetic oligonucleotide; CTC chr11 5235721 5235742 5235738 5235743 +
aaactctgttggtgacactgta

SEQ ID NO: 86303 - DNA, 22 bp, Artificial Sequence
  Synthetic oligonucleotide; CTC chr11 5235727 5235748 5235744 5235749 +
tgttggtgacactgtacaatag

SEQ ID NO: 86304 - DNA, 22 bp, Artificial Sequence
  Synthetic oligonucleotide; CTG chr11 5235729 5235750 5235746 5235751 +
ttggtgacactgtacaatagta

SEQ ID NO: 86305 - DNA, 22 bp, Artificial Sequence
  Synthetic oligonucleotide; TTG chr11 5235732 5235753 5235749 5235754 +
gtgacactgtacaatagtataa

SEQ ID NO: 86306 - DNA, 22 bp, Artificial Sequence
  Synthetic oligonucleotide; CTG chr11 5235741 5235762 5235758 5235763 +
tacaatagtataacccctttgg

SEQ ID NO: 86307 - DNA, 22 bp, Artificial Sequence
  Synthetic oligonucleotide; CTT chr11 5235760 5235781 5235777 5235782 +
tggaaaacctttaatagtatcc

SEQ ID NO: 86308 - DNA, 22 bp, Artificial Sequence
  Synthetic oligonucleotide; TTT chr11 5235761 5235782 5235778 5235783 +
ggaaaacctttaatagtatcca

SEQ ID NO: 86309 - DNA, 22 bp, Artificial Sequence
  Synthetic oligonucleotide; TTG chr11 5235762 5235783 5235779 5235784 +
gaaaacctttaatagtatccac

SEQ ID NO: 86310 - DNA, 22 bp, Artificial Sequence
  Synthetic oligonucleotide; CTT chr11 5235771 5235792 5235788 5235793 +
taatagtatccacaaatgctgg

SEQ ID NO: 86311 - DNA, 22 bp, Artificial Sequence
  Synthetic oligonucleotide; TTT chr11 5235772 5235793 5235789 5235794 +
aatagtatccacaaatgctgga

SEQ ID NO: 86312 - DNA, 22 bp, Artificial Sequence
  Synthetic oligonucleotide; TTA chr11 5235773 5235794 5235790 5235795 +
atagtatccacaaatgctggat

SEQ ID NO: 86313 - DNA, 22 bp, Artificial Sequence
  Synthetic oligonucleotide; CTG chr11 5235792 5235813 5235809 5235814 +
gatgcttgataagtctattacc

SEQ ID NO: 86314 - DNA, 22 bp, Artificial Sequence
  Synthetic oligonucleotide; CTT chr11 5235799 5235820 5235816 5235821 +
gataagtctattacctagcaat

SEQ ID NO: 86315 - DNA, 22 bp, Artificial Sequence
  Synthetic oligonucleotide; TTG chr11 5235800 5235821 5235817 5235822 +
ataagtctattacctagcaatt

SEQ ID NO: 86316 - DNA, 22 bp, Artificial Sequence
  Synthetic oligonucleotide; CTA chr11 5235809 5235830 5235826 5235831 +
ttacctagcaattacattttta

SEQ ID NO: 86317 - DNA, 22 bp, Artificial Sequence
  Synthetic oligonucleotide; TTA chr11 5235812 5235833 5235829 5235834 +
cctagcaattacatttttagat

SEQ ID NO: 86318 - DNA, 22 bp, Artificial Sequence
  Synthetic oligonucleotide; CTA chr11 5235816 5235837 5235833 5235838 +
gcaattacatttttagatattc

SEQ ID NO: 86319 - DNA, 22 bp, Artificial Sequence
  Synthetic oligonucleotide; TTA chr11 5235823 5235844 5235840 5235845 +
catttttagatattcagaaaca

SEQ ID NO: 86320 - DNA, 22 bp, Artificial Sequence
  Synthetic oligonucleotide; TTT chr11 5235828 5235849 5235845 5235850 +
ttagatattcagaaacacatgc

SEQ ID NO: 86321 - DNA, 22 bp, Artificial Sequence
  Synthetic oligonucleotide; TTT chr11 5235829 5235850 5235846 5235851 +
tagatattcagaaacacatgca

SEQ ID NO: 86322 - DNA, 22 bp, Artificial Sequence
  Synthetic oligonucleotide; TTT chr11 5235830 5235851 5235847 5235852 +
agatattcagaaacacatgcat

SEQ ID NO: 86323 - DNA, 22 bp, Artificial Sequence
  Synthetic oligonucleotide; TTA chr11 5235831 5235852 5235848 5235853 +
gatattcagaaacacatgcatg

SEQ ID NO: 86324 - DNA, 22 bp, Artificial Sequence
  Synthetic oligonucleotide; TTC chr11 5235838 5235859 5235855 5235860 +
agaaacacatgcatgtgtgtat

SEQ ID NO: 86325 - DNA, 22 bp, Artificial Sequence
  Synthetic oligonucleotide; CTT chr11 5235884 5235905 5235901 5235906 +
atgacagcaataatcataaaaa

SEQ ID NO: 86326 - DNA, 22 bp, Artificial Sequence
  Synthetic oligonucleotide; TTA chr11 5235885 5235906 5235902 5235907 +
tgacagcaataatcataaaaac

SEQ ID NO: 86327 - DNA, 22 bp, Artificial Sequence
  Synthetic oligonucleotide; CTC chr11 5235910 5235931 5235927 5235932 +
aaaccggtagccacttaaatgc

SEQ ID NO: 86328 - DNA, 22 bp, Artificial Sequence
  Synthetic oligonucleotide; CTT chr11 5235926 5235947 5235943 5235948 +
aaatgcttaccaacagtagaat

SEQ ID NO: 86329 - DNA, 22 bp, Artificial Sequence
  Synthetic oligonucleotide; TTA chr11 5235927 5235948 5235944 5235949 +
aatgcttaccaacagtagaatt

SEQ ID NO: 86330 - DNA, 22 bp, Artificial Sequence
  Synthetic oligonucleotide; CTT chr11 5235934 5235955 5235951 5235956 +
accaacagtagaattgataaat

SEQ ID NO: 86331 - DNA, 22 bp, Artificial Sequence
  Synthetic oligonucleotide; TTA chr11 5235935 5235956 5235952 5235957 +
ccaacagtagaattgataaatt

SEQ ID NO: 86332 - DNA, 22 bp, Artificial Sequence
  Synthetic oligonucleotide; TTG chr11 5235950 5235971 5235967 5235972 +
ataaattacggtatagtcaaag

SEQ ID NO: 86333 - DNA, 22 bp, Artificial Sequence
  Synthetic oligonucleotide; TTA chr11 5235958 5235979 5235975 5235980 +
cggtatagtcaaagaatagaat

SEQ ID NO: 86334 - DNA, 22 bp, Artificial Sequence
  Synthetic oligonucleotide; TTA chr11 5235984 5236005 5236001 5236006 +
cacagaaatgaaaagaatcaac

SEQ ID NO: 86335 - DNA, 22 bp, Artificial Sequence
  Synthetic oligonucleotide; CTA chr11 5236008 5236029 5236025 5236030 +
ctgcttaacacgtagcgataca

SEQ ID NO: 86336 - DNA, 22 bp, Artificial Sequence
  Synthetic oligonucleotide; CTG chr11 5236011 5236032 5236028 5236033 +
cttaacacgtagcgatacaaat

SEQ ID NO: 86337 - DNA, 22 bp, Artificial Sequence
  Synthetic oligonucleotide; CTT chr11 5236014 5236035 5236031 5236036 +
aacacgtagcgatacaaatgca

SEQ ID NO: 86338 - DNA, 22 bp, Artificial Sequence
  Synthetic oligonucleotide; TTA chr11 5236015 5236036 5236032 5236037 +
acacgtagcgatacaaatgcat

SEQ ID NO: 86339 - DNA, 22 bp, Artificial Sequence
  Synthetic oligonucleotide; TTT chr11 5236039 5236060 5236056 5236061 +
tacagcatttggttgattaaaa

SEQ ID NO: 86340 - DNA, 22 bp, Artificial Sequence
  Synthetic oligonucleotide; TTT chr11 5236040 5236061 5236057 5236062 +
acagcatttggttgattaaaag

SEQ ID NO: 86341 - DNA, 22 bp, Artificial Sequence
  Synthetic oligonucleotide; TTA chr11 5236041 5236062 5236058 5236063 +
cagcatttggttgattaaaagt

SEQ ID NO: 86342 - DNA, 22 bp, Artificial Sequence
  Synthetic oligonucleotide; TTT chr11 5236049 5236070 5236066 5236071 +
ggttgattaaaagtaaccagag

SEQ ID NO: 86343 - DNA, 22 bp, Artificial Sequence
  Synthetic oligonucleotide; TTG chr11 5236050 5236071 5236067 5236072 +
gttgattaaaagtaaccagagg

SEQ ID NO: 86344 - DNA, 22 bp, Artificial Sequence
  Synthetic oligonucleotide; TTG chr11 5236054 5236075 5236071 5236076 +
attaaaagtaaccagaggtgag

SEQ ID NO: 86345 - DNA, 22 bp, Artificial Sequence
  Synthetic oligonucleotide; TTA chr11 5236058 5236079 5236075 5236080 +
aaagtaaccagaggtgagttca

SEQ ID NO: 86346 - DNA, 22 bp, Artificial Sequence
  Synthetic oligonucleotide; TTC chr11 5236079 5236100 5236096 5236101 +
aaactatatgactttatttgta

SEQ ID NO: 86347 - DNA, 22 bp, Artificial Sequence
  Synthetic oligonucleotide; CTA chr11 5236085 5236106 5236102 5236107 +
tatgactttatttgtatataga

SEQ ID NO: 86348 - DNA, 22 bp, Artificial Sequence
  Synthetic oligonucleotide; CTT chr11 5236093 5236114 5236110 5236115 +
tatttgtatatagaaagatgga

SEQ ID NO: 86349 - DNA, 22 bp, Artificial Sequence
  Synthetic oligonucleotide; TTT chr11 5236094 5236115 5236111 5236116 +
atttgtatatagaaagatggat

SEQ ID NO: 86350 - DNA, 22 bp, Artificial Sequence
  Synthetic oligonucleotide; TTA chr11 5236095 5236116 5236112 5236117 +
tttgtatatagaaagatggatg

SEQ ID NO: 86351 - DNA, 22 bp, Artificial Sequence
  Synthetic oligonucleotide; TTT chr11 5236098 5236119 5236115 5236120 +
gtatatagaaagatggatgatg

SEQ ID NO: 86352 - DNA, 22 bp, Artificial Sequence
  Synthetic oligonucleotide; TTG chr11 5236099 5236120 5236116 5236121 +
tatatagaaagatggatgatgt

SEQ ID NO: 86353 - DNA, 22 bp, Artificial Sequence
  Synthetic oligonucleotide; CTG chr11 5236126 5236147 5236143 5236148 +
agattctgatcacaaggggaaa

SEQ ID NO: 86354 - DNA, 22 bp, Artificial Sequence
  Synthetic oligonucleotide; TTC chr11 5236132 5236153 5236149 5236154 +
tgatcacaaggggaaatgttat

SEQ ID NO: 86355 - DNA, 22 bp, Artificial Sequence
  Synthetic oligonucleotide; CTG chr11 5236134 5236155 5236151 5236156 +
atcacaaggggaaatgttataa

SEQ ID NO: 86356 - DNA, 22 bp, Artificial Sequence
  Synthetic oligonucleotide; TTA chr11 5236153 5236174 5236170 5236175 +
taaaatagggtagagaggagcc

SEQ ID NO: 86357 - DNA, 22 bp, Artificial Sequence
  Synthetic oligonucleotide; CTT chr11 5236187 5236208 5236204 5236209 +
taaactttgttacaagttattt

SEQ ID NO: 86358 - DNA, 22 bp, Artificial Sequence
  Synthetic oligonucleotide; TTT chr11 5236188 5236209 5236205 5236210 +
aaactttgttacaagttatttt

SEQ ID NO: 86359 - DNA, 22 bp, Artificial Sequence
  Synthetic oligonucleotide; TTA chr11 5236189 5236210 5236206 5236211 +
aactttgttacaagttattttt

SEQ ID NO: 86360 - DNA, 22 bp, Artificial Sequence
  Synthetic oligonucleotide; CTT chr11 5236194 5236215 5236211 5236216 +
tgttacaagttatttttctgta

SEQ ID NO: 86361 - DNA, 22 bp, Artificial Sequence
  Synthetic oligonucleotide; TTT chr11 5236195 5236216 5236212 5236217 +
gttacaagttatttttctgtaa

SEQ ID NO: 86362 - DNA, 22 bp, Artificial Sequence
  Synthetic oligonucleotide; TTG chr11 5236196 5236217 5236213 5236218 +
ttacaagttatttttctgtaac

SEQ ID NO: 86363 - DNA, 22 bp, Artificial Sequence
  Synthetic oligonucleotide; TTA chr11 5236199 5236220 5236216 5236221 +
caagttatttttctgtaacctg

SEQ ID NO: 86364 - DNA, 22 bp, Artificial Sequence
  Synthetic oligonucleotide; TTA chr11 5236206 5236227 5236223 5236228 +
tttttctgtaacctggaagcca

SEQ ID NO: 86365 - DNA, 22 bp, Artificial Sequence
  Synthetic oligonucleotide; TTT chr11 5236209 5236230 5236226 5236231 +
ttctgtaacctggaagccaacg

SEQ ID NO: 86366 - DNA, 22 bp, Artificial Sequence
  Synthetic oligonucleotide; TTT chr11 5236210 5236231 5236227 5236232 +
tctgtaacctggaagccaacga

SEQ ID NO: 86367 - DNA, 22 bp, Artificial Sequence
  Synthetic oligonucleotide; TTT chr11 5236211 5236232 5236228 5236233 +
ctgtaacctggaagccaacgaa

SEQ ID NO: 86368 - DNA, 22 bp, Artificial Sequence
  Synthetic oligonucleotide; TTC chr11 5236212 5236233 5236229 5236234 +
tgtaacctggaagccaacgaaa

SEQ ID NO: 86369 - DNA, 22 bp, Artificial Sequence
  Synthetic oligonucleotide; CTG chr11 5236214 5236235 5236231 5236236 +
taacctggaagccaacgaaaga

SEQ ID NO: 86370 - DNA, 22 bp, Artificial Sequence
  Synthetic oligonucleotide; CTG chr11 5236221 5236242 5236238 5236243 +
gaagccaacgaaagatattgaa

SEQ ID NO: 86371 - DNA, 22 bp, Artificial Sequence
  Synthetic oligonucleotide; TTG chr11 5236241 5236262 5236258 5236263 +
aataattcaagaaaggtggtgg

SEQ ID NO: 86372 - DNA, 22 bp, Artificial Sequence
  Synthetic oligonucleotide; TTC chr11 5236249 5236270 5236266 5236271 +
aagaaaggtggtggcatggttt

SEQ ID NO: 86373 - DNA, 22 bp, Artificial Sequence
  Synthetic oligonucleotide; TTT chr11 5236271 5236292 5236288 5236293 +
gatttgtgtctttaaaagatta

SEQ ID NO: 86374 - DNA, 22 bp, Artificial Sequence
  Synthetic oligonucleotide; TTG chr11 5236272 5236293 5236289 5236294 +
atttgtgtctttaaaagattat

SEQ ID NO: 86375 - DNA, 22 bp, Artificial Sequence
  Synthetic oligonucleotide; TTT chr11 5236276 5236297 5236293 5236298 +
gtgtctttaaaagattattctc

SEQ ID NO: 86376 - DNA, 22 bp, Artificial Sequence
  Synthetic oligonucleotide; TTG chr11 5236277 5236298 5236294 5236299 +
tgtctttaaaagattattctca

SEQ ID NO: 86377 - DNA, 22 bp, Artificial Sequence
  Synthetic oligonucleotide; CTT chr11 5236283 5236304 5236300 5236305 +
taaaagattattctcacttagt

SEQ ID NO: 86378 - DNA, 22 bp, Artificial Sequence
  Synthetic oligonucleotide; TTT chr11 5236284 5236305 5236301 5236306 +
aaaagattattctcacttagtg

SEQ ID NO: 86379 - DNA, 22 bp, Artificial Sequence
  Synthetic oligonucleotide; TTA chr11 5236285 5236306 5236302 5236307 +
aaagattattctcacttagtga

SEQ ID NO: 86380 - DNA, 22 bp, Artificial Sequence
  Synthetic oligonucleotide; TTA chr11 5236293 5236314 5236310 5236315 +
ttctcacttagtgaagaaatgt

SEQ ID NO: 86381 - DNA, 22 bp, Artificial Sequence
  Synthetic oligonucleotide; TTC chr11 5236296 5236317 5236313 5236318 +
tcacttagtgaagaaatgtatt

SEQ ID NO: 86382 - DNA, 22 bp, Artificial Sequence
  Synthetic oligonucleotide; CTC chr11 5236298 5236319 5236315 5236320 +
acttagtgaagaaatgtatttt

SEQ ID NO: 86383 - DNA, 22 bp, Artificial Sequence
  Synthetic oligonucleotide; CTT chr11 5236302 5236323 5236319 5236324 +
agtgaagaaatgtattttagaa

SEQ ID NO: 86384 - DNA, 22 bp, Artificial Sequence
  Synthetic oligonucleotide; TTA chr11 5236303 5236324 5236320 5236325 +
gtgaagaaatgtattttagaag

SEQ ID NO: 86385 - DNA, 22 bp, Artificial Sequence
  Synthetic oligonucleotide; TTT chr11 5236319 5236340 5236336 5236341 +
tagaagtagagaaaatgggaga

SEQ ID NO: 86386 - DNA, 22 bp, Artificial Sequence
  Synthetic oligonucleotide; TTT chr11 5236320 5236341 5236337 5236342 +
agaagtagagaaaatgggagac

SEQ ID NO: 86387 - DNA, 22 bp, Artificial Sequence
  Synthetic oligonucleotide; TTA chr11 5236321 5236342 5236338 5236343 +
gaagtagagaaaatgggagaca

SEQ ID NO: 86388 - DNA, 22 bp, Artificial Sequence
  Synthetic oligonucleotide; CTG chr11 5236351 5236372 5236368 5236373 +
ggcttctgttgcagtagggaag

SEQ ID NO: 86389 - DNA, 22 bp, Artificial Sequence
  Synthetic oligonucleotide; CTT chr11 5236356 5236377 5236373 5236378 +
ctgttgcagtagggaagaaagt

SEQ ID NO: 86390 - DNA, 22 bp, Artificial Sequence
  Synthetic oligonucleotide; TTC chr11 5236357 5236378 5236374 5236379 +
tgttgcagtagggaagaaagtg

SEQ ID NO: 86391 - DNA, 22 bp, Artificial Sequence
  Synthetic oligonucleotide; CTG chr11 5236359 5236380 5236376 5236381 +
ttgcagtagggaagaaagtgac

SEQ ID NO: 86392 - DNA, 22 bp, Artificial Sequence
  Synthetic oligonucleotide; TTG chr11 5236362 5236383 5236379 5236384 +
cagtagggaagaaagtgacaat

SEQ ID NO: 86393 - DNA, 22 bp, Artificial Sequence
  Synthetic oligonucleotide; TTT chr11 5236391 5236412 5236408 5236413 +
ctattatcagacttggaccatg

SEQ ID NO: 86394 - DNA, 22 bp, Artificial Sequence
  Synthetic oligonucleotide; TTC chr11 5236392 5236413 5236409 5236414 +
tattatcagacttggaccatga

SEQ ID NO: 86395 - DNA, 22 bp, Artificial Sequence
  Synthetic oligonucleotide; CTA chr11 5236394 5236415 5236411 5236416 +
ttatcagacttggaccatgacg

SEQ ID NO: 86396 - DNA, 22 bp, Artificial Sequence
  Synthetic oligonucleotide; TTA chr11 5236397 5236418 5236414 5236419 +
tcagacttggaccatgacggtg

SEQ ID NO: 86397 - DNA, 22 bp, Artificial Sequence
  Synthetic oligonucleotide; CTT chr11 5236405 5236426 5236422 5236427 +
ggaccatgacggtgatgtcagt

SEQ ID NO: 86398 - DNA, 22 bp, Artificial Sequence
  Synthetic oligonucleotide; TTG chr11 5236406 5236427 5236423 5236428 +
gaccatgacggtgatgtcagtc

SEQ ID NO: 86399 - DNA, 22 bp, Artificial Sequence
  Synthetic oligonucleotide; TTT chr11 5236454 5236475 5236471 5236476 +
gtgagtttagtggtacgataaa

SEQ ID NO: 86400 - DNA, 22 bp, Artificial Sequence
  Synthetic oligonucleotide; TTG chr11 5236455 5236476 5236472 5236477 +
tgagtttagtggtacgataaaa

SEQ ID NO: 86401 - DNA, 22 bp, Artificial Sequence
  Synthetic oligonucleotide; TTT chr11 5236462 5236483 5236479 5236484 +
agtggtacgataaaatcagaaa

SEQ ID NO: 86402 - DNA, 22 bp, Artificial Sequence
  Synthetic oligonucleotide; TTA chr11 5236463 5236484 5236480 5236485 +
gtggtacgataaaatcagaaat

SEQ ID NO: 86403 - DNA, 22 bp, Artificial Sequence
  Synthetic oligonucleotide; CTT chr11 5236493 5236514 5236510 5236515 +
ggatacattgtattgtatgcac

SEQ ID NO: 86404 - DNA, 22 bp, Artificial Sequence
  Synthetic oligonucleotide; TTG chr11 5236494 5236515 5236511 5236516 +
gatacattgtattgtatgcact

SEQ ID NO: 86405 - DNA, 22 bp, Artificial Sequence
  Synthetic oligonucleotide; TTG chr11 5236503 5236524 5236520 5236525 +
tattgtatgcactcttgtaaaa

SEQ ID NO: 86406 - DNA, 22 bp, Artificial Sequence
  Synthetic oligonucleotide; TTG chr11 5236508 5236529 5236525 5236530 +
tatgcactcttgtaaaatgcaa

SEQ ID NO: 86407 - DNA, 22 bp, Artificial Sequence
  Synthetic oligonucleotide; CTC chr11 5236517 5236538 5236534 5236539 +
ttgtaaaatgcaaaaagatgta

SEQ ID NO: 86408 - DNA, 22 bp, Artificial Sequence
  Synthetic oligonucleotide; CTT chr11 5236519 5236540 5236536 5236541 +
gtaaaatgcaaaaagatgtact

SEQ ID NO: 86409 - DNA, 22 bp, Artificial Sequence
  Synthetic oligonucleotide; TTG chr11 5236520 5236541 5236537 5236542 +
taaaatgcaaaaagatgtactt

SEQ ID NO: 86410 - DNA, 22 bp, Artificial Sequence
  Synthetic oligonucleotide; CTT chr11 5236542 5236563 5236559 5236564 +
agatatgtggatctggagctca

SEQ ID NO: 86411 - DNA, 22 bp, Artificial Sequence
  Synthetic oligonucleotide; TTA chr11 5236543 5236564 5236560 5236565 +
gatatgtggatctggagctcag

SEQ ID NO: 86412 - DNA, 22 bp, Artificial Sequence
  Synthetic oligonucleotide; CTG chr11 5236557 5236578 5236574 5236579 +
gagctcagaaagaatacaacca

SEQ ID NO: 86413 - DNA, 22 bp, Artificial Sequence
  Synthetic oligonucleotide; CTC chr11 5236563 5236584 5236580 5236585 +
agaaagaatacaaccaggtcaa

SEQ ID NO: 86414 - DNA, 22 bp, Artificial Sequence
  Synthetic oligonucleotide; CTG chr11 5236632 5236653 5236649 5236654 +
tgtgaatcactaccactacctg

SEQ ID NO: 86415 - DNA, 22 bp, Artificial Sequence
  Synthetic oligonucleotide; CTA chr11 5236644 5236665 5236661 5236666 +
ccactacctgttaaaaatgaca

SEQ ID NO: 86416 - DNA, 22 bp, Artificial Sequence
  Synthetic oligonucleotide; CTA chr11 5236650 5236671 5236667 5236672 +
cctgttaaaaatgacagatgat

SEQ ID NO: 86417 - DNA, 22 bp, Artificial Sequence
  Synthetic oligonucleotide; CTG chr11 5236654 5236675 5236671 5236676 +
ttaaaaatgacagatgatgtac

SEQ ID NO: 86418 - DNA, 22 bp, Artificial Sequence
  Synthetic oligonucleotide; TTA chr11 5236657 5236678 5236674 5236679 +
aaaatgacagatgatgtacttc

SEQ ID NO: 86419 - DNA, 22 bp, Artificial Sequence
  Synthetic oligonucleotide; CTT chr11 5236678 5236699 5236695 5236700 +
catcaatatctccttaaaatct

SEQ ID NO: 86420 - DNA, 22 bp, Artificial Sequence
  Synthetic oligonucleotide; TTC chr11 5236679 5236700 5236696 5236701 +
atcaatatctccttaaaatctt

SEQ ID NO: 86421 - DNA, 22 bp, Artificial Sequence
  Synthetic oligonucleotide; CTC chr11 5236690 5236711 5236707 5236712 +
cttaaaatcttagaatgtgttt

SEQ ID NO: 86422 - DNA, 22 bp, Artificial Sequence
  Synthetic oligonucleotide; CTT chr11 5236693 5236714 5236710 5236715 +
aaaatcttagaatgtgtttgtg

SEQ ID NO: 86423 - DNA, 22 bp, Artificial Sequence
  Synthetic oligonucleotide; TTA chr11 5236694 5236715 5236711 5236716 +
aaatcttagaatgtgtttgtga

SEQ ID NO: 86424 - DNA, 22 bp, Artificial Sequence
  Synthetic oligonucleotide; CTT chr11 5236701 5236722 5236718 5236723 +
agaatgtgtttgtgagggagga

SEQ ID NO: 86425 - DNA, 22 bp, Artificial Sequence
  Synthetic oligonucleotide; TTA chr11 5236702 5236723 5236719 5236724 +
gaatgtgtttgtgagggaggaa

SEQ ID NO: 86426 - DNA, 22 bp, Artificial Sequence
  Synthetic oligonucleotide; TTT chr11 5236712 5236733 5236729 5236734 +
gtgagggaggaattatgtttcc

SEQ ID NO: 86427 - DNA, 22 bp, Artificial Sequence
  Synthetic oligonucleotide; TTG chr11 5236713 5236734 5236730 5236735 +
tgagggaggaattatgtttcca

SEQ ID NO: 86428 - DNA, 22 bp, Artificial Sequence
  Synthetic oligonucleotide; TTA chr11 5236727 5236748 5236744 5236749 +
tgtttccaattcatatataaga

SEQ ID NO: 86429 - DNA, 22 bp, Artificial Sequence
  Synthetic oligonucleotide; TTT chr11 5236732 5236753 5236749 5236754 +
ccaattcatatataagaaaatt

SEQ ID NO: 86430 - DNA, 22 bp, Artificial Sequence
  Synthetic oligonucleotide; TTC chr11 5236733 5236754 5236750 5236755 +
caattcatatataagaaaattg

SEQ ID NO: 86431 - DNA, 22 bp, Artificial Sequence
  Synthetic oligonucleotide; TTC chr11 5236739 5236760 5236756 5236761 +
atatataagaaaattgattcta

SEQ ID NO: 86432 - DNA, 22 bp, Artificial Sequence
  Synthetic oligonucleotide; TTG chr11 5236755 5236776 5236772 5236777 +
attctaaaaaaaatgttaggta

SEQ ID NO: 86433 - DNA, 22 bp, Artificial Sequence
  Synthetic oligonucleotide; TTC chr11 5236759 5236780 5236776 5236781 +
taaaaaaaatgttaggtaaatt

SEQ ID NO: 86434 - DNA, 22 bp, Artificial Sequence
  Synthetic oligonucleotide; CTA chr11 5236761 5236782 5236778 5236783 +
aaaaaaatgttaggtaaattct

SEQ ID NO: 86435 - DNA, 22 bp, Artificial Sequence
  Synthetic oligonucleotide; TTA chr11 5236773 5236794 5236790 5236795 +
ggtaaattcttaaggccatgag

SEQ ID NO: 86436 - DNA, 22 bp, Artificial Sequence
  Synthetic oligonucleotide; TTC chr11 5236782 5236803 5236799 5236804 +
ttaaggccatgaggactgttat

SEQ ID NO: 86437 - DNA, 22 bp, Artificial Sequence
  Synthetic oligonucleotide; CTT chr11 5236784 5236805 5236801 5236806 +
aaggccatgaggactgttattt

SEQ ID NO: 86438 - DNA, 22 bp, Artificial Sequence
  Synthetic oligonucleotide; TTA chr11 5236785 5236806 5236802 5236807 +
aggccatgaggactgttatttg

SEQ ID NO: 86439 - DNA, 22 bp, Artificial Sequence
  Synthetic oligonucleotide; CTG chr11 5236800 5236821 5236817 5236822 +
ttatttgatctttgtctgttaa

SEQ ID NO: 86440 - DNA, 22 bp, Artificial Sequence
  Synthetic oligonucleotide; TTA chr11 5236803 5236824 5236820 5236825 +
tttgatctttgtctgttaattc

SEQ ID NO: 86441 - DNA, 22 bp, Artificial Sequence
  Synthetic oligonucleotide; TTT chr11 5236806 5236827 5236823 5236828 +
gatctttgtctgttaattccaa

SEQ ID NO: 86442 - DNA, 22 bp, Artificial Sequence
  Synthetic oligonucleotide; TTG chr11 5236807 5236828 5236824 5236829 +
atctttgtctgttaattccaaa

SEQ ID NO: 86443 - DNA, 22 bp, Artificial Sequence
  Synthetic oligonucleotide; CTT chr11 5236812 5236833 5236829 5236834 +
tgtctgttaattccaaagactt

SEQ ID NO: 86444 - DNA, 22 bp, Artificial Sequence
  Synthetic oligonucleotide; TTT chr11 5236813 5236834 5236830 5236835 +
gtctgttaattccaaagacttg

SEQ ID NO: 86445 - DNA, 22 bp, Artificial Sequence
  Synthetic oligonucleotide; TTG chr11 5236814 5236835 5236831 5236836 +
tctgttaattccaaagacttgg

SEQ ID NO: 86446 - DNA, 22 bp, Artificial Sequence
  Synthetic oligonucleotide; CTG chr11 5236818 5236839 5236835 5236840 +
ttaattccaaagacttggcttt

SEQ ID NO: 86447 - DNA, 22 bp, Artificial Sequence
  Synthetic oligonucleotide; TTA chr11 5236821 5236842 5236838 5236843 +
attccaaagacttggcttttca

SEQ ID NO: 86448 - DNA, 22 bp, Artificial Sequence
  Synthetic oligonucleotide; TTC chr11 5236825 5236846 5236842 5236847 +
caaagacttggcttttcacttt

SEQ ID NO: 86449 - DNA, 22 bp, Artificial Sequence
  Synthetic oligonucleotide; CTT chr11 5236834 5236855 5236851 5236856 +
ggcttttcactttaattctgtt

SEQ ID NO: 86450 - DNA, 22 bp, Artificial Sequence
  Synthetic oligonucleotide; TTG chr11 5236835 5236856 5236852 5236857 +
gcttttcactttaattctgttc

SEQ ID NO: 86451 - DNA, 22 bp, Artificial Sequence
  Synthetic oligonucleotide; CTT chr11 5236839 5236860 5236856 5236861 +
ttcactttaattctgttctacc

SEQ ID NO: 86452 - DNA, 22 bp, Artificial Sequence
  Synthetic oligonucleotide; TTT chr11 5236840 5236861 5236857 5236862 +
tcactttaattctgttctacct

SEQ ID NO: 86453 - DNA, 22 bp, Artificial Sequence
  Synthetic oligonucleotide; TTT chr11 5236841 5236862 5236858 5236863 +
cactttaattctgttctacctg

SEQ ID NO: 86454 - DNA, 22 bp, Artificial Sequence
  Synthetic oligonucleotide; TTC chr11 5236842 5236863 5236859 5236864 +
actttaattctgttctacctga

SEQ ID NO: 86455 - DNA, 22 bp, Artificial Sequence
  Synthetic oligonucleotide; CTT chr11 5236846 5236867 5236863 5236868 +
taattctgttctacctgaaatg

SEQ ID NO: 86456 - DNA, 22 bp, Artificial Sequence
  Synthetic oligonucleotide; TTT chr11 5236847 5236868 5236864 5236869 +
aattctgttctacctgaaatga

SEQ ID NO: 86457 - DNA, 22 bp, Artificial Sequence
  Synthetic oligonucleotide; TTA chr11 5236848 5236869 5236865 5236870 +
attctgttctacctgaaatgat

SEQ ID NO: 86458 - DNA, 22 bp, Artificial Sequence
  Synthetic oligonucleotide; TTC chr11 5236852 5236873 5236869 5236874 +
tgttctacctgaaatgatttta

SEQ ID NO: 86459 - DNA, 22 bp, Artificial Sequence
  Synthetic oligonucleotide; CTG chr11 5236854 5236875 5236871 5236876 +
ttctacctgaaatgattttaca

SEQ ID NO: 86460 - DNA, 22 bp, Artificial Sequence
  Synthetic oligonucleotide; TTC chr11 5236857 5236878 5236874 5236879 +
tacctgaaatgattttacacat

SEQ ID NO: 86461 - DNA, 22 bp, Artificial Sequence
  Synthetic oligonucleotide; CTA chr11 5236859 5236880 5236876 5236881 +
cctgaaatgattttacacattg

SEQ ID NO: 86462 - DNA, 22 bp, Artificial Sequence
  Synthetic oligonucleotide; CTG chr11 5236863 5236884 5236880 5236885 +
aaatgattttacacattgggag

SEQ ID NO: 86463 - DNA, 22 bp, Artificial Sequence
  Synthetic oligonucleotide; TTT chr11 5236872 5236893 5236889 5236894 +
tacacattgggagatctggtta

SEQ ID NO: 86464 - DNA, 22 bp, Artificial Sequence
  Synthetic oligonucleotide; TTT chr11 5236873 5236894 5236890 5236895 +
acacattgggagatctggttac

SEQ ID NO: 86465 - DNA, 22 bp, Artificial Sequence
  Synthetic oligonucleotide; TTA chr11 5236874 5236895 5236891 5236896 +
cacattgggagatctggttaca

SEQ ID NO: 86466 - DNA, 22 bp, Artificial Sequence
  Synthetic oligonucleotide; TTG chr11 5236881 5236902 5236898 5236903 +
ggagatctggttacatgtttat

SEQ ID NO: 86467 - DNA, 22 bp, Artificial Sequence
  Synthetic oligonucleotide; CTG chr11 5236890 5236911 5236907 5236912 +
gttacatgtttattctatatgg

SEQ ID NO: 86468 - DNA, 22 bp, Artificial Sequence
  Synthetic oligonucleotide; TTA chr11 5236894 5236915 5236911 5236916 +
catgtttattctatatggattg

SEQ ID NO: 86469 - DNA, 22 bp, Artificial Sequence
  Synthetic oligonucleotide; TTT chr11 5236901 5236922 5236918 5236923 +
attctatatggattgcattgag

SEQ ID NO: 86470 - DNA, 22 bp, Artificial Sequence
  Synthetic oligonucleotide; TTA chr11 5236902 5236923 5236919 5236924 +
ttctatatggattgcattgaga

SEQ ID NO: 86471 - DNA, 22 bp, Artificial Sequence
  Synthetic oligonucleotide; TTC chr11 5236905 5236926 5236922 5236927 +
tatatggattgcattgagagga

SEQ ID NO: 86472 - DNA, 22 bp, Artificial Sequence
  Synthetic oligonucleotide; CTA chr11 5236907 5236928 5236924 5236929 +
tatggattgcattgagaggatt

SEQ ID NO: 86473 - DNA, 22 bp, Artificial Sequence
  Synthetic oligonucleotide; TTG chr11 5236916 5236937 5236933 5236938 +
cattgagaggatttgtataaca

SEQ ID NO: 86474 - DNA, 22 bp, Artificial Sequence
  Synthetic oligonucleotide; TTG chr11 5236921 5236942 5236938 5236943 +
agaggatttgtataacagaata

SEQ ID NO: 86475 - DNA, 22 bp, Artificial Sequence
  Synthetic oligonucleotide; TTT chr11 5236930 5236951 5236947 5236952 +
gtataacagaataaggtctttt

SEQ ID NO: 86476 - DNA, 22 bp, Artificial Sequence
  Synthetic oligonucleotide; TTG chr11 5236931 5236952 5236948 5236953 +
tataacagaataaggtcttttt

SEQ ID NO: 86477 - DNA, 22 bp, Artificial Sequence
  Synthetic oligonucleotide; CTT chr11 5236950 5236971 5236967 5236972 +
tttttcttttctcttctgagat

SEQ ID NO: 86478 - DNA, 22 bp, Artificial Sequence
  Synthetic oligonucleotide; TTT chr11 5236951 5236972 5236968 5236973 +
ttttcttttctcttctgagatg

SEQ ID NO: 86479 - DNA, 22 bp, Artificial Sequence
  Synthetic oligonucleotide; TTT chr11 5236952 5236973 5236969 5236974 +
tttcttttctcttctgagatgg

SEQ ID NO: 86480 - DNA, 22 bp, Artificial Sequence
  Synthetic oligonucleotide; TTT chr11 5236953 5236974 5236970 5236975 +
ttcttttctcttctgagatgga

SEQ ID NO: 86481 - DNA, 22 bp, Artificial Sequence
  Synthetic oligonucleotide; TTT chr11 5236954 5236975 5236971 5236976 +
tcttttctcttctgagatggag

SEQ ID NO: 86482 - DNA, 22 bp, Artificial Sequence
  Synthetic oligonucleotide; TTT chr11 5236955 5236976 5236972 5236977 +
cttttctcttctgagatggagt

SEQ ID NO: 86483 - DNA, 22 bp, Artificial Sequence
  Synthetic oligonucleotide; TTC chr11 5236956 5236977 5236973 5236978 +
ttttctcttctgagatggagtt

SEQ ID NO: 86484 - DNA, 22 bp, Artificial Sequence
  Synthetic oligonucleotide; CTT chr11 5236958 5236979 5236975 5236980 +
ttctcttctgagatggagtttc

SEQ ID NO: 86485 - DNA, 22 bp, Artificial Sequence
  Synthetic oligonucleotide; TTT chr11 5236959 5236980 5236976 5236981 +
tctcttctgagatggagtttca

SEQ ID NO: 86486 - DNA, 22 bp, Artificial Sequence
  Synthetic oligonucleotide; TTT chr11 5236960 5236981 5236977 5236982 +
ctcttctgagatggagtttcat

SEQ ID NO: 86487 - DNA, 22 bp, Artificial Sequence
  Synthetic oligonucleotide; TTC chr11 5236961 5236982 5236978 5236983 +
tcttctgagatggagtttcatc

SEQ ID NO: 86488 - DNA, 22 bp, Artificial Sequence
  Synthetic oligonucleotide; CTC chr11 5236963 5236984 5236980 5236985 +
ttctgagatggagtttcatccc

SEQ ID NO: 86489 - DNA, 22 bp, Artificial Sequence
  Synthetic oligonucleotide; CTT chr11 5236965 5236986 5236982 5236987 +
ctgagatggagtttcatcccta

SEQ ID NO: 86490 - DNA, 22 bp, Artificial Sequence
  Synthetic oligonucleotide; TTC chr11 5236966 5236987 5236983 5236988 +
tgagatggagtttcatccctat

SEQ ID NO: 86491 - DNA, 22 bp, Artificial Sequence
  Synthetic oligonucleotide; CTG chr11 5236968 5236989 5236985 5236990 +
agatggagtttcatccctattg

SEQ ID NO: 86492 - DNA, 22 bp, Artificial Sequence
  Synthetic oligonucleotide; TTT chr11 5236979 5237000 5236996 5237001 +
catccctattgcccaagctaga

SEQ ID NO: 86493 - DNA, 22 bp, Artificial Sequence
  Synthetic oligonucleotide; TTC chr11 5236980 5237001 5236997 5237002 +
atccctattgcccaagctagag

SEQ ID NO: 86494 - DNA, 22 bp, Artificial Sequence
  Synthetic oligonucleotide; CTA chr11 5236987 5237008 5237004 5237009 +
ttgcccaagctagagtgcaatg

SEQ ID NO: 86495 - DNA, 22 bp, Artificial Sequence
  Synthetic oligonucleotide; TTG chr11 5236990 5237011 5237007 5237012 +
cccaagctagagtgcaatggtg

SEQ ID NO: 86496 - DNA, 22 bp, Artificial Sequence
  Synthetic oligonucleotide; CTA chr11 5236999 5237020 5237016 5237021 +
gagtgcaatggtgcaatctagg

SEQ ID NO: 86497 - DNA, 22 bp, Artificial Sequence
  Synthetic oligonucleotide; CTA chr11 5237019 5237040 5237036 5237041 +
ggctcaccgcaacctctgcctc

SEQ ID NO: 86498 - DNA, 22 bp, Artificial Sequence
  Synthetic oligonucleotide; CTC chr11 5237024 5237045 5237041 5237046 +
accgcaacctctgcctcctggg

SEQ ID NO: 86499 - DNA, 22 bp, Artificial Sequence
  Synthetic oligonucleotide; CTC chr11 5237035 5237056 5237052 5237057 +
tgcctcctgggttcaagcaatt

SEQ ID NO: 86500 - DNA, 22 bp, Artificial Sequence
  Synthetic oligonucleotide; CTG chr11 5237037 5237058 5237054 5237059 +
cctcctgggttcaagcaattct

SEQ ID NO: 86501 - DNA, 22 bp, Artificial Sequence
  Synthetic oligonucleotide; CTC chr11 5237041 5237062 5237058 5237063 +
ctgggttcaagcaattctcctg

SEQ ID NO: 86502 - DNA, 22 bp, Artificial Sequence
  Synthetic oligonucleotide; CTG chr11 5237044 5237065 5237061 5237066 +
ggttcaagcaattctcctgcct

SEQ ID NO: 86503 - DNA, 22 bp, Artificial Sequence
  Synthetic oligonucleotide; TTC chr11 5237049 5237070 5237066 5237071 +
aagcaattctcctgcctcagcc

SEQ ID NO: 86504 - DNA, 22 bp, Artificial Sequence
  Synthetic oligonucleotide; TTC chr11 5237058 5237079 5237075 5237080 +
tcctgcctcagccacctgaata

SEQ ID NO: 86505 - DNA, 22 bp, Artificial Sequence
  Synthetic oligonucleotide; CTC chr11 5237060 5237081 5237077 5237082 +
ctgcctcagccacctgaatagc

SEQ ID NO: 86506 - DNA, 22 bp, Artificial Sequence
  Synthetic oligonucleotide; CTG chr11 5237063 5237084 5237080 5237085 +
cctcagccacctgaatagctgg

SEQ ID NO: 86507 - DNA, 22 bp, Artificial Sequence
  Synthetic oligonucleotide; CTC chr11 5237067 5237088 5237084 5237089 +
agccacctgaatagctgggact

SEQ ID NO: 86508 - DNA, 22 bp, Artificial Sequence
  Synthetic oligonucleotide; CTG chr11 5237076 5237097 5237093 5237098 +
aatagctgggactgcaggcatg

SEQ ID NO: 86509 - DNA, 22 bp, Artificial Sequence
  Synthetic oligonucleotide; CTG chr11 5237084 5237105 5237101 5237106 +
ggactgcaggcatgcaccacac

SEQ ID NO: 86510 - DNA, 22 bp, Artificial Sequence
  Synthetic oligonucleotide; CTG chr11 5237090 5237111 5237107 5237112 +
caggcatgcaccacacgcccgg

SEQ ID NO: 86511 - DNA, 22 bp, Artificial Sequence
  Synthetic oligonucleotide; CTG chr11 5237115 5237136 5237132 5237137 +
attttgtatttttagtagagat

SEQ ID NO: 86512 - DNA, 22 bp, Artificial Sequence
  Synthetic oligonucleotide; TTT chr11 5237119 5237140 5237136 5237141 +
tgtatttttagtagagatgggg

SEQ ID NO: 86513 - DNA, 22 bp, Artificial Sequence
  Synthetic oligonucleotide; TTT chr11 5237120 5237141 5237137 5237142 +
gtatttttagtagagatggggt

SEQ ID NO: 86514 - DNA, 22 bp, Artificial Sequence
  Synthetic oligonucleotide; TTG chr11 5237121 5237142 5237138 5237143 +
tatttttagtagagatggggtt

SEQ ID NO: 86515 - DNA, 22 bp, Artificial Sequence
  Synthetic oligonucleotide; TTT chr11 5237126 5237147 5237143 5237148 +
ttagtagagatggggtttcacc

SEQ ID NO: 86516 - DNA, 22 bp, Artificial Sequence
  Synthetic oligonucleotide; TTT chr11 5237127 5237148 5237144 5237149 +
tagtagagatggggtttcacca

SEQ ID NO: 86517 - DNA, 22 bp, Artificial Sequence
  Synthetic oligonucleotide; TTT chr11 5237128 5237149 5237145 5237150 +
agtagagatggggtttcaccat

SEQ ID NO: 86518 - DNA, 22 bp, Artificial Sequence
  Synthetic oligonucleotide; TTA chr11 5237129 5237150 5237146 5237151 +
gtagagatggggtttcaccatg

SEQ ID NO: 86519 - DNA, 22 bp, Artificial Sequence
  Synthetic oligonucleotide; TTT chr11 5237144 5237165 5237161 5237166 +
caccatgttggtcaggctggtc

SEQ ID NO: 86520 - DNA, 22 bp, Artificial Sequence
  Synthetic oligonucleotide; TTC chr11 5237145 5237166 5237162 5237167 +
accatgttggtcaggctggtct

SEQ ID NO: 86521 - DNA, 22 bp, Artificial Sequence
  Synthetic oligonucleotide; TTG chr11 5237154 5237175 5237171 5237176 +
gtcaggctggtcttgaactcct

SEQ ID NO: 86522 - DNA, 22 bp, Artificial Sequence
  Synthetic oligonucleotide; CTG chr11 5237163 5237184 5237180 5237185 +
gtcttgaactcctgacctcaag

SEQ ID NO: 86523 - DNA, 22 bp, Artificial Sequence
  Synthetic oligonucleotide; CTT chr11 5237168 5237189 5237185 5237190 +
gaactcctgacctcaagtgatc

SEQ ID NO: 86524 - DNA, 22 bp, Artificial Sequence
  Synthetic oligonucleotide; TTG chr11 5237169 5237190 5237186 5237191 +
aactcctgacctcaagtgatct

SEQ ID NO: 86525 - DNA, 22 bp, Artificial Sequence
  Synthetic oligonucleotide; CTC chr11 5237174 5237195 5237191 5237196 +
ctgacctcaagtgatctgcctg

SEQ ID NO: 86526 - DNA, 22 bp, Artificial Sequence
  Synthetic oligonucleotide; CTG chr11 5237177 5237198 5237194 5237199 +
acctcaagtgatctgcctgcct

SEQ ID NO: 86527 - DNA, 22 bp, Artificial Sequence
  Synthetic oligonucleotide; CTC chr11 5237182 5237203 5237199 5237204 +
aagtgatctgcctgccttggcc

SEQ ID NO: 86528 - DNA, 22 bp, Artificial Sequence
  Synthetic oligonucleotide; CTG chr11 5237192 5237213 5237209 5237214 +
cctgccttggcctcccaaagtg

SEQ ID NO: 86529 - DNA, 22 bp, Artificial Sequence
  Synthetic oligonucleotide; CTG chr11 5237196 5237217 5237213 5237218 +
ccttggcctcccaaagtgctgg

SEQ ID NO: 86530 - DNA, 22 bp, Artificial Sequence
  Synthetic oligonucleotide; CTT chr11 5237200 5237221 5237217 5237222 +
ggcctcccaaagtgctgggttt

SEQ ID NO: 86531 - DNA, 22 bp, Artificial Sequence
  Synthetic oligonucleotide; TTG chr11 5237201 5237222 5237218 5237223 +
gcctcccaaagtgctgggttta

SEQ ID NO: 86532 - DNA, 22 bp, Artificial Sequence
  Synthetic oligonucleotide; CTC chr11 5237206 5237227 5237223 5237228 +
ccaaagtgctgggtttacaagc

SEQ ID NO: 86533 - DNA, 22 bp, Artificial Sequence
  Synthetic oligonucleotide; CTG chr11 5237217 5237238 5237234 5237239 +
ggtttacaagcctgagccaccg

SEQ ID NO: 86534 - DNA, 22 bp, Artificial Sequence
  Synthetic oligonucleotide; TTT chr11 5237222 5237243 5237239 5237244 +
acaagcctgagccaccgcatcc

SEQ ID NO: 86535 - DNA, 22 bp, Artificial Sequence
  Synthetic oligonucleotide; TTA chr11 5237223 5237244 5237240 5237245 +
caagcctgagccaccgcatcca

SEQ ID NO: 86536 - DNA, 22 bp, Artificial Sequence
  Synthetic oligonucleotide; CTG chr11 5237231 5237252 5237248 5237253 +
agccaccgcatccagccaggat

SEQ ID NO: 86537 - DNA, 22 bp, Artificial Sequence
  Synthetic oligonucleotide; CTA chr11 5237261 5237282 5237278 5237283 +
aaagtggaaagaatagcatcta

SEQ ID NO: 86538 - DNA, 22 bp, Artificial Sequence
  Synthetic oligonucleotide; CTA chr11 5237283 5237304 5237300 5237305 +
ctcttgttcaggaaacaatgag

SEQ ID NO: 86539 - DNA, 22 bp, Artificial Sequence
  Synthetic oligonucleotide; CTC chr11 5237286 5237307 5237303 5237308 +
ttgttcaggaaacaatgaggac

SEQ ID NO: 86540 - DNA, 22 bp, Artificial Sequence
  Synthetic oligonucleotide; CTT chr11 5237288 5237309 5237305 5237310 +
gttcaggaaacaatgaggacct

SEQ ID NO: 86541 - DNA, 22 bp, Artificial Sequence
  Synthetic oligonucleotide; TTG chr11 5237289 5237310 5237306 5237311 +
ttcaggaaacaatgaggacctg

SEQ ID NO: 86542 - DNA, 22 bp, Artificial Sequence
  Synthetic oligonucleotide; TTC chr11 5237292 5237313 5237309 5237314 +
aggaaacaatgaggacctgact

SEQ ID NO: 86543 - DNA, 22 bp, Artificial Sequence
  Synthetic oligonucleotide; CTG chr11 5237311 5237332 5237328 5237333 +
actgggcagtaagagtggtgat

SEQ ID NO: 86544 - DNA, 22 bp, Artificial Sequence
  Synthetic oligonucleotide; CTG chr11 5237315 5237336 5237332 5237337 +
ggcagtaagagtggtgattaat

SEQ ID NO: 86545 - DNA, 22 bp, Artificial Sequence
  Synthetic oligonucleotide; TTA chr11 5237335 5237356 5237352 5237357 +
atagatagggacaaattgaagc

SEQ ID NO: 86546 - DNA, 22 bp, Artificial Sequence
  Synthetic oligonucleotide; TTG chr11 5237353 5237374 5237370 5237375 +
aagcagaatcgaactgttgatt

SEQ ID NO: 86547 - DNA, 22 bp, Artificial Sequence
  Synthetic oligonucleotide; CTG chr11 5237369 5237390 5237386 5237391 +
ttgattagaggtagggaaatga

SEQ ID NO: 86548 - DNA, 22 bp, Artificial Sequence
  Synthetic oligonucleotide; TTG chr11 5237372 5237393 5237389 5237394 +
attagaggtagggaaatgattt

SEQ ID NO: 86549 - DNA, 22 bp, Artificial Sequence
  Synthetic oligonucleotide; TTA chr11 5237376 5237397 5237393 5237398 +
gaggtagggaaatgattttaat

SEQ ID NO: 86550 - DNA, 22 bp, Artificial Sequence
  Synthetic oligonucleotide; TTT chr11 5237394 5237415 5237411 5237416 +
taatctgtgaccttggtgaatg

SEQ ID NO: 86551 - DNA, 22 bp, Artificial Sequence
  Synthetic oligonucleotide; TTT chr11 5237395 5237416 5237412 5237417 +
aatctgtgaccttggtgaatgg

SEQ ID NO: 86552 - DNA, 22 bp, Artificial Sequence
  Synthetic oligonucleotide; TTA chr11 5237396 5237417 5237413 5237418 +
atctgtgaccttggtgaatggg

SEQ ID NO: 86553 - DNA, 22 bp, Artificial Sequence
  Synthetic oligonucleotide; CTG chr11 5237401 5237422 5237418 5237423 +
tgaccttggtgaatgggcaagt

SEQ ID NO: 86554 - DNA, 22 bp, Artificial Sequence
  Synthetic oligonucleotide; CTT chr11 5237408 5237429 5237425 5237430 +
ggtgaatgggcaagtagctatc

SEQ ID NO: 86555 - DNA, 22 bp, Artificial Sequence
  Synthetic oligonucleotide; TTG chr11 5237409 5237430 5237426 5237431 +
gtgaatgggcaagtagctatct

SEQ ID NO: 86556 - DNA, 22 bp, Artificial Sequence
  Synthetic oligonucleotide; CTA chr11 5237428 5237449 5237445 5237450 +
tctaatgactaaaatggaaaac

SEQ ID NO: 86557 - DNA, 22 bp, Artificial Sequence
  Synthetic oligonucleotide; CTA chr11 5237432 5237453 5237449 5237454 +
atgactaaaatggaaaacactg

SEQ ID NO: 86558 - DNA, 22 bp, Artificial Sequence
  Synthetic oligonucleotide; CTA chr11 5237439 5237460 5237456 5237461 +
aaatggaaaacactggaagaga

SEQ ID NO: 86559 - DNA, 22 bp, Artificial Sequence
  Synthetic oligonucleotide; CTG chr11 5237454 5237475 5237471 5237476 +
gaagagaaacagttttagtata

SEQ ID NO: 86560 - DNA, 22 bp, Artificial Sequence
  Synthetic oligonucleotide; TTT chr11 5237469 5237490 5237486 5237491 +
tagtataacaagtgaaataccc

SEQ ID NO: 86561 - DNA, 22 bp, Artificial Sequence
  Synthetic oligonucleotide; TTT chr11 5237470 5237491 5237487 5237492 +
agtataacaagtgaaataccca

SEQ ID NO: 86562 - DNA, 22 bp, Artificial Sequence
  Synthetic oligonucleotide; TTA chr11 5237471 5237492 5237488 5237493 +
gtataacaagtgaaatacccat

SEQ ID NO: 86563 - DNA, 22 bp, Artificial Sequence
  Synthetic oligonucleotide; CTG chr11 5237497 5237518 5237514 5237519 +
agtctgaggtgcctataggaca

SEQ ID NO: 86564 - DNA, 22 bp, Artificial Sequence
  Synthetic oligonucleotide; CTG chr11 5237503 5237524 5237520 5237525 +
aggtgcctataggacatctata

SEQ ID NO: 86565 - DNA, 22 bp, Artificial Sequence
  Synthetic oligonucleotide; CTA chr11 5237512 5237533 5237529 5237534 +
taggacatctatataaataagc

SEQ ID NO: 86566 - DNA, 22 bp, Artificial Sequence
  Synthetic oligonucleotide; CTA chr11 5237523 5237544 5237540 5237545 +
tataaataagcccagtacattg

SEQ ID NO: 86567 - DNA, 22 bp, Artificial Sequence
  Synthetic oligonucleotide; TTG chr11 5237545 5237566 5237562 5237567 +
tttgatatatgggtttggcact

SEQ ID NO: 86568 - DNA, 22 bp, Artificial Sequence
  Synthetic oligonucleotide; TTT chr11 5237548 5237569 5237565 5237570 +
gatatatgggtttggcactgag

SEQ ID NO: 86569 - DNA, 22 bp, Artificial Sequence
  Synthetic oligonucleotide; TTG chr11 5237549 5237570 5237566 5237571 +
atatatgggtttggcactgagg

SEQ ID NO: 86570 - DNA, 22 bp, Artificial Sequence
  Synthetic oligonucleotide; TTT chr11 5237561 5237582 5237578 5237583 +
ggcactgaggttggaggtcaga

SEQ ID NO: 86571 - DNA, 22 bp, Artificial Sequence
  Synthetic oligonucleotide; TTG chr11 5237562 5237583 5237579 5237584 +
gcactgaggttggaggtcagag

SEQ ID NO: 86572 - DNA, 22 bp, Artificial Sequence
  Synthetic oligonucleotide; CTG chr11 5237568 5237589 5237585 5237590 +
aggttggaggtcagaggttaga

SEQ ID NO: 86573 - DNA, 22 bp, Artificial Sequence
  Synthetic oligonucleotide; TTG chr11 5237574 5237595 5237591 5237596 +
gaggtcagaggttagaaatcag

SEQ ID NO: 86574 - DNA, 22 bp, Artificial Sequence
  Synthetic oligonucleotide; TTA chr11 5237588 5237609 5237605 5237610 +
gaaatcagagttgggaattggg

SEQ ID NO: 86575 - DNA, 22 bp, Artificial Sequence
  Synthetic oligonucleotide; TTG chr11 5237601 5237622 5237618 5237623 +
ggaattgggattatacaggctg

SEQ ID NO: 86576 - DNA, 22 bp, Artificial Sequence
  Synthetic oligonucleotide; TTG chr11 5237608 5237629 5237625 5237630 +
ggattatacaggctgtatttaa

SEQ ID NO: 86577 - DNA, 22 bp, Artificial Sequence
  Synthetic oligonucleotide; TTA chr11 5237614 5237635 5237631 5237636 +
tacaggctgtatttaagagttt

SEQ ID NO: 86578 - DNA, 22 bp, Artificial Sequence
  Synthetic oligonucleotide; CTG chr11 5237623 5237644 5237640 5237645 +
tatttaagagtttagatataac

SEQ ID NO: 86579 - DNA, 22 bp, Artificial Sequence
  Synthetic oligonucleotide; TTT chr11 5237628 5237649 5237645 5237650 +
aagagtttagatataactgtga

SEQ ID NO: 86580 - DNA, 22 bp, Artificial Sequence
  Synthetic oligonucleotide; TTA chr11 5237629 5237650 5237646 5237651 +
agagtttagatataactgtgaa

SEQ ID NO: 86581 - DNA, 22 bp, Artificial Sequence
  Synthetic oligonucleotide; TTT chr11 5237636 5237657 5237653 5237658 +
agatataactgtgaatccaaga

SEQ ID NO: 86582 - DNA, 22 bp, Artificial Sequence
  Synthetic oligonucleotide; TTA chr11 5237637 5237658 5237654 5237659 +
gatataactgtgaatccaagag

SEQ ID NO: 86583 - DNA, 22 bp, Artificial Sequence
  Synthetic oligonucleotide; CTG chr11 5237647 5237668 5237664 5237669 +
tgaatccaagagtgtgatgaat

SEQ ID NO: 86584 - DNA, 22 bp, Artificial Sequence
  Synthetic oligonucleotide; TTA chr11 5237678 5237699 5237695 5237700 +
aatgaaggacctttaatgaaca

SEQ ID NO: 86585 - DNA, 22 bp, Artificial Sequence
  Synthetic oligonucleotide; CTT chr11 5237691 5237712 5237708 5237713 +
taatgaacaccaacatttaatg

SEQ ID NO: 86586 - DNA, 22 bp, Artificial Sequence
  Synthetic oligonucleotide; TTT chr11 5237692 5237713 5237709 5237714 +
aatgaacaccaacatttaatgt

SEQ ID NO: 86587 - DNA, 22 bp, Artificial Sequence
  Synthetic oligonucleotide; TTA chr11 5237693 5237714 5237710 5237715 +
atgaacaccaacatttaatgtg

SEQ ID NO: 86588 - DNA, 22 bp, Artificial Sequence
  Synthetic oligonucleotide; TTT chr11 5237709 5237730 5237726 5237731 +
aatgtgaaatctcaaggaagta

SEQ ID NO: 86589 - DNA, 22 bp, Artificial Sequence
  Synthetic oligonucleotide; TTA chr11 5237710 5237731 5237727 5237732 +
atgtgaaatctcaaggaagtat

SEQ ID NO: 86590 - DNA, 22 bp, Artificial Sequence
  Synthetic oligonucleotide; CTC chr11 5237722 5237743 5237739 5237744 +
aaggaagtatgaagtaagacat

SEQ ID NO: 86591 - DNA, 22 bp, Artificial Sequence
  Synthetic oligonucleotide; TTT chr11 5237768 5237789 5237785 5237790 +
tagaactcagtatcgattttaa

SEQ ID NO: 86592 - DNA, 22 bp, Artificial Sequence
  Synthetic oligonucleotide; TTT chr11 5237769 5237790 5237786 5237791 +
agaactcagtatcgattttaat

SEQ ID NO: 86593 - DNA, 22 bp, Artificial Sequence
  Synthetic oligonucleotide; TTA chr11 5237770 5237791 5237787 5237792 +
gaactcagtatcgattttaatt

SEQ ID NO: 86594 - DNA, 22 bp, Artificial Sequence
  Synthetic oligonucleotide; CTC chr11 5237776 5237797 5237793 5237798 +
agtatcgattttaattagtgta

SEQ ID NO: 86595 - DNA, 22 bp, Artificial Sequence
  Synthetic oligonucleotide; TTT chr11 5237787 5237808 5237804 5237809 +
taattagtgtaatgccaatgtg

SEQ ID NO: 86596 - DNA, 22 bp, Artificial Sequence
  Synthetic oligonucleotide; TTT chr11 5237788 5237809 5237805 5237810 +
aattagtgtaatgccaatgtgg

SEQ ID NO: 86597 - DNA, 22 bp, Artificial Sequence
  Synthetic oligonucleotide; TTA chr11 5237789 5237810 5237806 5237811 +
attagtgtaatgccaatgtggg

SEQ ID NO: 86598 - DNA, 22 bp, Artificial Sequence
  Synthetic oligonucleotide; TTA chr11 5237793 5237814 5237810 5237815 +
gtgtaatgccaatgtgggttag

SEQ ID NO: 86599 - DNA, 22 bp, Artificial Sequence
  Synthetic oligonucleotide; TTA chr11 5237814 5237835 5237831 5237836 +
gaatggaagtcaacttgctgtt

SEQ ID NO: 86600 - DNA, 22 bp, Artificial Sequence
  Synthetic oligonucleotide; CTT chr11 5237830 5237851 5237847 5237852 +
gctgttggtttcagagcaggta

SEQ ID NO: 86601 - DNA, 22 bp, Artificial Sequence
  Synthetic oligonucleotide; TTG chr11 5237831 5237852 5237848 5237853 +
ctgttggtttcagagcaggtag

SEQ ID NO: 86602 - DNA, 22 bp, Artificial Sequence
  Synthetic oligonucleotide; CTG chr11 5237834 5237855 5237851 5237856 +
ttggtttcagagcaggtaggag

SEQ ID NO: 86603 - DNA, 22 bp, Artificial Sequence
  Synthetic oligonucleotide; TTG chr11 5237837 5237858 5237854 5237859 +
gtttcagagcaggtaggagata

SEQ ID NO: 86604 - DNA, 22 bp, Artificial Sequence
  Synthetic oligonucleotide; TTT chr11 5237841 5237862 5237858 5237863 +
cagagcaggtaggagataaggt

SEQ ID NO: 86605 - DNA, 22 bp, Artificial Sequence
  Synthetic oligonucleotide; TTC chr11 5237842 5237863 5237859 5237864 +
agagcaggtaggagataaggtt

SEQ ID NO: 86606 - DNA, 22 bp, Artificial Sequence
  Synthetic oligonucleotide; TTC chr11 5237865 5237886 5237882 5237887 +
tagattttgacacagtgaaaag

SEQ ID NO: 86607 - DNA, 22 bp, Artificial Sequence
  Synthetic oligonucleotide; CTA chr11 5237867 5237888 5237884 5237889 +
gattttgacacagtgaaaagct

SEQ ID NO: 86608 - DNA, 22 bp, Artificial Sequence
  Synthetic oligonucleotide; TTT chr11 5237872 5237893 5237889 5237894 +
tgacacagtgaaaagctgaaac

SEQ ID NO: 86609 - DNA, 22 bp, Artificial Sequence
  Synthetic oligonucleotide; TTT chr11 5237873 5237894 5237890 5237895 +
gacacagtgaaaagctgaaaca

SEQ ID NO: 86610 - DNA, 22 bp, Artificial Sequence
  Synthetic oligonucleotide; TTG chr11 5237874 5237895 5237891 5237896 +
acacagtgaaaagctgaaacaa

SEQ ID NO: 86611 - DNA, 22 bp, Artificial Sequence
  Synthetic oligonucleotide; CTG chr11 5237890 5237911 5237907 5237912 +
aaacaaaaaggaaaaggtaggg

SEQ ID NO: 86612 - DNA, 22 bp, Artificial Sequence
  Synthetic oligonucleotide; CTA chr11 5237969 5237990 5237986 5237991 +
aggactctagggtcagagaaat

SEQ ID NO: 86613 - DNA, 22 bp, Artificial Sequence
  Synthetic oligonucleotide; CTC chr11 5237976 5237997 5237993 5237998 +
tagggtcagagaaatatgggtt

SEQ ID NO: 86614 - DNA, 22 bp, Artificial Sequence
  Synthetic oligonucleotide; CTA chr11 5237978 5237999 5237995 5238000 +
gggtcagagaaatatgggttat

SEQ ID NO: 86615 - DNA, 22 bp, Artificial Sequence
  Synthetic oligonucleotide; TTA chr11 5237999 5238020 5238016 5238021 +
tatccttctacaaaattcacat

SEQ ID NO: 86616 - DNA, 22 bp, Artificial Sequence
  Synthetic oligonucleotide; CTT chr11 5238006 5238027 5238023 5238028 +
ctacaaaattcacattcttggc

SEQ ID NO: 86617 - DNA, 22 bp, Artificial Sequence
  Synthetic oligonucleotide; TTC chr11 5238007 5238028 5238024 5238029 +
tacaaaattcacattcttggct

SEQ ID NO: 86618 - DNA, 22 bp, Artificial Sequence
  Synthetic oligonucleotide; CTA chr11 5238009 5238030 5238026 5238031 +
caaaattcacattcttggctgg

SEQ ID NO: 86619 - DNA, 22 bp, Artificial Sequence
  Synthetic oligonucleotide; TTC chr11 5238017 5238038 5238034 5238039 +
acattcttggctgggtgtggtg

SEQ ID NO: 86620 - DNA, 22 bp, Artificial Sequence
  Synthetic oligonucleotide; TTC chr11 5238023 5238044 5238040 5238045 +
ttggctgggtgtggtggctcac

SEQ ID NO: 86621 - DNA, 22 bp, Artificial Sequence
  Synthetic oligonucleotide; CTT chr11 5238025 5238046 5238042 5238047 +
ggctgggtgtggtggctcacgc

SEQ ID NO: 86622 - DNA, 22 bp, Artificial Sequence
  Synthetic oligonucleotide; TTG chr11 5238026 5238047 5238043 5238048 +
gctgggtgtggtggctcacgcc

SEQ ID NO: 86623 - DNA, 22 bp, Artificial Sequence
  Synthetic oligonucleotide; CTG chr11 5238030 5238051 5238047 5238052 +
ggtgtggtggctcacgcctgtg

SEQ ID NO: 86624 - DNA, 22 bp, Artificial Sequence
  Synthetic oligonucleotide; CTC chr11 5238043 5238064 5238060 5238065 +
acgcctgtgatcccagcacttt

SEQ ID NO: 86625 - DNA, 22 bp, Artificial Sequence
  Synthetic oligonucleotide; CTG chr11 5238050 5238071 5238067 5238072 +
tgatcccagcactttcagaggc

SEQ ID NO: 86626 - DNA, 22 bp, Artificial Sequence
  Synthetic oligonucleotide; CTT chr11 5238064 5238085 5238081 5238086 +
tcagaggccgaggagggtggat

SEQ ID NO: 86627 - DNA, 22 bp, Artificial Sequence
  Synthetic oligonucleotide; TTT chr11 5238065 5238086 5238082 5238087 +
cagaggccgaggagggtggatc

SEQ ID NO: 86628 - DNA, 22 bp, Artificial Sequence
  Synthetic oligonucleotide; TTC chr11 5238066 5238087 5238083 5238088 +
agaggccgaggagggtggatca

SEQ ID NO: 86629 - DNA, 22 bp, Artificial Sequence
  Synthetic oligonucleotide; CTG chr11 5238092 5238113 5238109 5238114 +
atgttaggagttcgagatcagc

SEQ ID NO: 86630 - DNA, 22 bp, Artificial Sequence
  Synthetic oligonucleotide; TTA chr11 5238098 5238119 5238115 5238120 +
ggagttcgagatcagcctgacc

SEQ ID NO: 86631 - DNA, 22 bp, Artificial Sequence
  Synthetic oligonucleotide; TTC chr11 5238105 5238126 5238122 5238127 +
gagatcagcctgaccaacatgg

SEQ ID NO: 86632 - DNA, 22 bp, Artificial Sequence
  Synthetic oligonucleotide; CTG chr11 5238117 5238138 5238134 5238139 +
accaacatggtgaaacccccta

SEQ ID NO: 86633 - DNA, 22 bp, Artificial Sequence
  Synthetic oligonucleotide; CTA chr11 5238139 5238160 5238156 5238161 +
tctactaaaaatagaaaattag

SEQ ID NO: 86634 - DNA, 22 bp, Artificial Sequence
  Synthetic oligonucleotide; CTA chr11 5238143 5238164 5238160 5238165 +
ctaaaaatagaaaattagccag

SEQ ID NO: 86635 - DNA, 22 bp, Artificial Sequence
  Synthetic oligonucleotide; CTA chr11 5238146 5238167 5238163 5238168 +
aaaatagaaaattagccaggca

SEQ ID NO: 86636 - DNA, 22 bp, Artificial Sequence
  Synthetic oligonucleotide; TTA chr11 5238160 5238181 5238177 5238182 +
gccaggcatggtggtggcacat

SEQ ID NO: 86637 - DNA, 22 bp, Artificial Sequence
  Synthetic oligonucleotide; CTG chr11 5238187 5238208 5238204 5238209 +
tagtgccagctacttgggaggc

SEQ ID NO: 86638 - DNA, 22 bp, Artificial Sequence
  Synthetic oligonucleotide; CTA chr11 5238199 5238220 5238216 5238221 +
cttgggaggctgaggcaggaga

SEQ ID NO: 86639 - DNA, 22 bp, Artificial Sequence
  Synthetic oligonucleotide; CTT chr11 5238202 5238223 5238219 5238224 +
gggaggctgaggcaggagaatc

SEQ ID NO: 86640 - DNA, 22 bp, Artificial Sequence
  Synthetic oligonucleotide; TTG chr11 5238203 5238224 5238220 5238225 +
ggaggctgaggcaggagaatcg

SEQ ID NO: 86641 - DNA, 22 bp, Artificial Sequence
  Synthetic oligonucleotide; CTG chr11 5238211 5238232 5238228 5238233 +
aggcaggagaatcgcttgaacc

SEQ ID NO: 86642 - DNA, 22 bp, Artificial Sequence
  Synthetic oligonucleotide; CTT chr11 5238228 5238249 5238245 5238250 +
gaacctgggaggcagatgttgc

SEQ ID NO: 86643 - DNA, 22 bp, Artificial Sequence
  Synthetic oligonucleotide; TTG chr11 5238229 5238250 5238246 5238251 +
aacctgggaggcagatgttgca

SEQ ID NO: 86644 - DNA, 22 bp, Artificial Sequence
  Synthetic oligonucleotide; CTG chr11 5238235 5238256 5238252 5238257 +
ggaggcagatgttgcagtgagc

SEQ ID NO: 86645 - DNA, 22 bp, Artificial Sequence
  Synthetic oligonucleotide; TTG chr11 5238249 5238270 5238266 5238271 +
cagtgagcctggatcatgccat

SEQ ID NO: 86646 - DNA, 22 bp, Artificial Sequence
  Synthetic oligonucleotide; CTG chr11 5238260 5238281 5238277 5238282 +
gatcatgccattgcactccagc

SEQ ID NO: 86647 - DNA, 22 bp, Artificial Sequence
  Synthetic oligonucleotide; TTG chr11 5238273 5238294 5238290 5238295 +
cactccagcctgggcaaccata

SEQ ID NO: 86648 - DNA, 22 bp, Artificial Sequence
  Synthetic oligonucleotide; CTC chr11 5238278 5238299 5238295 5238300 +
cagcctgggcaaccatagcaat

SEQ ID NO: 86649 - DNA, 22 bp, Artificial Sequence
  Synthetic oligonucleotide; CTG chr11 5238285 5238306 5238302 5238307 +
ggcaaccatagcaatgctctat

SEQ ID NO: 86650 - DNA, 22 bp, Artificial Sequence
  Synthetic oligonucleotide; CTC chr11 5238304 5238325 5238321 5238326 +
tatctcagaaaaaaaaaaaaaa

SEQ ID NO: 86651 - DNA, 22 bp, Artificial Sequence
  Synthetic oligonucleotide; CTA chr11 5238306 5238327 5238323 5238328 +
tctcagaaaaaaaaaaaaaaag

SEQ ID NO: 86652 - DNA, 22 bp, Artificial Sequence
  Synthetic oligonucleotide; CTC chr11 5238310 5238331 5238327 5238332 +
agaaaaaaaaaaaaaaagttct

SEQ ID NO: 86653 - DNA, 22 bp, Artificial Sequence
  Synthetic oligonucleotide; TTC chr11 5238331 5238352 5238348 5238353 +
ttgctaacctgaaaaaataaat

SEQ ID NO: 86654 - DNA, 22 bp, Artificial Sequence
  Synthetic oligonucleotide; CTT chr11 5238333 5238354 5238350 5238355 +
gctaacctgaaaaaataaatta

SEQ ID NO: 86655 - DNA, 22 bp, Artificial Sequence
  Synthetic oligonucleotide; TTG chr11 5238334 5238355 5238351 5238356 +
ctaacctgaaaaaataaattat

SEQ ID NO: 86656 - DNA, 22 bp, Artificial Sequence
  Synthetic oligonucleotide; CTA chr11 5238337 5238358 5238354 5238359 +
acctgaaaaaataaattatttg

SEQ ID NO: 86657 - DNA, 22 bp, Artificial Sequence
  Synthetic oligonucleotide; CTG chr11 5238342 5238363 5238359 5238364 +
aaaaaataaattatttgagctt

SEQ ID NO: 86658 - DNA, 22 bp, Artificial Sequence
  Synthetic oligonucleotide; TTA chr11 5238355 5238376 5238372 5238377 +
tttgagctttgtacctaattca

SEQ ID NO: 86659 - DNA, 22 bp, Artificial Sequence
  Synthetic oligonucleotide; TTT chr11 5238358 5238379 5238375 5238380 +
gagctttgtacctaattcataa

SEQ ID NO: 86660 - DNA, 22 bp, Artificial Sequence
  Synthetic oligonucleotide; TTG chr11 5238359 5238380 5238376 5238381 +
agctttgtacctaattcataat

SEQ ID NO: 86661 - DNA, 22 bp, Artificial Sequence
  Synthetic oligonucleotide; CTT chr11 5238364 5238385 5238381 5238386 +
tgtacctaattcataattttca

SEQ ID NO: 86662 - DNA, 22 bp, Artificial Sequence
  Synthetic oligonucleotide; TTT chr11 5238365 5238386 5238382 5238387 +
gtacctaattcataattttcag

SEQ ID NO: 86663 - DNA, 22 bp, Artificial Sequence
  Synthetic oligonucleotide; TTG chr11 5238366 5238387 5238383 5238388 +
tacctaattcataattttcaga

SEQ ID NO: 86664 - DNA, 22 bp, Artificial Sequence
  Synthetic oligonucleotide; CTA chr11 5238372 5238393 5238389 5238394 +
attcataattttcagataatga

SEQ ID NO: 86665 - DNA, 22 bp, Artificial Sequence
  Synthetic oligonucleotide; TTC chr11 5238376 5238397 5238393 5238398 +
ataattttcagataatgaatat

SEQ ID NO: 86666 - DNA, 22 bp, Artificial Sequence
  Synthetic oligonucleotide; TTT chr11 5238383 5238404 5238400 5238405 +
tcagataatgaatattgagatg

SEQ ID NO: 86667 - DNA, 22 bp, Artificial Sequence
  Synthetic oligonucleotide; TTT chr11 5238384 5238405 5238401 5238406 +
cagataatgaatattgagatga

SEQ ID NO: 86668 - DNA, 22 bp, Artificial Sequence
  Synthetic oligonucleotide; TTC chr11 5238385 5238406 5238402 5238407 +
agataatgaatattgagatgat

SEQ ID NO: 86669 - DNA, 22 bp, Artificial Sequence
  Synthetic oligonucleotide; TTG chr11 5238400 5238421 5238417 5238422 +
agatgatatatgcacagaacaa

SEQ ID NO: 86670 - DNA, 22 bp, Artificial Sequence
  Synthetic oligonucleotide; CTA chr11 5238428 5238449 5238445 5238450 +
gagacacattctaagtgtgaca

SEQ ID NO: 86671 - DNA, 22 bp, Artificial Sequence
  Synthetic oligonucleotide; TTC chr11 5238439 5238460 5238456 5238461 +
taagtgtgacattcttaaatgc

SEQ ID NO: 86672 - DNA, 22 bp, Artificial Sequence
  Synthetic oligonucleotide; CTA chr11 5238441 5238462 5238458 5238463 +
agtgtgacattcttaaatgcca

SEQ ID NO: 86673 - DNA, 22 bp, Artificial Sequence
  Synthetic oligonucleotide; TTC chr11 5238453 5238474 5238470 5238475 +
ttaaatgccagtgctctccaca

SEQ ID NO: 86674 - DNA, 22 bp, Artificial Sequence
  Synthetic oligonucleotide; CTT chr11 5238455 5238476 5238472 5238477 +
aaatgccagtgctctccacaat

SEQ ID NO: 86675 - DNA, 22 bp, Artificial Sequence
  Synthetic oligonucleotide; TTA chr11 5238456 5238477 5238473 5238478 +
aatgccagtgctctccacaatt

SEQ ID NO: 86676 - DNA, 22 bp, Artificial Sequence
  Synthetic oligonucleotide; CTC chr11 5238469 5238490 5238486 5238491 +
tccacaattctaatctcagttc

SEQ ID NO: 86677 - DNA, 22 bp, Artificial Sequence
  Synthetic oligonucleotide; CTC chr11 5238471 5238492 5238488 5238493 +
cacaattctaatctcagttcac

SEQ ID NO: 86678 - DNA, 22 bp, Artificial Sequence
  Synthetic oligonucleotide; TTC chr11 5238479 5238500 5238496 5238501 +
taatctcagttcactgctgttt

SEQ ID NO: 86679 - DNA, 22 bp, Artificial Sequence
  Synthetic oligonucleotide; CTA chr11 5238481 5238502 5238498 5238503 +
atctcagttcactgctgtttga

SEQ ID NO: 86680 - DNA, 22 bp, Artificial Sequence
  Synthetic oligonucleotide; CTC chr11 5238486 5238507 5238503 5238508 +
agttcactgctgtttgaattct

SEQ ID NO: 86681 - DNA, 22 bp, Artificial Sequence
  Synthetic oligonucleotide; TTC chr11 5238491 5238512 5238508 5238513 +
actgctgtttgaattctgtgtt

SEQ ID NO: 86682 - DNA, 22 bp, Artificial Sequence
  Synthetic oligonucleotide; CTG chr11 5238495 5238516 5238512 5238517 +
ctgtttgaattctgtgttttca

SEQ ID NO: 86683 - DNA, 22 bp, Artificial Sequence
  Synthetic oligonucleotide; CTG chr11 5238498 5238519 5238515 5238520 +
tttgaattctgtgttttcatat

SEQ ID NO: 86684 - DNA, 22 bp, Artificial Sequence
  Synthetic oligonucleotide; TTT chr11 5238501 5238522 5238518 5238523 +
gaattctgtgttttcatattat

SEQ ID NO: 86685 - DNA, 22 bp, Artificial Sequence
  Synthetic oligonucleotide; TTG chr11 5238502 5238523 5238519 5238524 +
aattctgtgttttcatattatc

SEQ ID NO: 86686 - DNA, 22 bp, Artificial Sequence
  Synthetic oligonucleotide; TTC chr11 5238507 5238528 5238524 5238529 +
tgtgttttcatattatcttatc

SEQ ID NO: 86687 - DNA, 22 bp, Artificial Sequence
  Synthetic oligonucleotide; CTG chr11 5238509 5238530 5238526 5238531 +
tgttttcatattatcttatcaa

SEQ ID NO: 86688 - DNA, 22 bp, Artificial Sequence
  Synthetic oligonucleotide; TTT chr11 5238514 5238535 5238531 5238536 +
tcatattatcttatcaatacat

SEQ ID NO: 86689 - DNA, 22 bp, Artificial Sequence
  Synthetic oligonucleotide; TTT chr11 5238515 5238536 5238532 5238537 +
catattatcttatcaatacatt

SEQ ID NO: 86690 - DNA, 22 bp, Artificial Sequence
  Synthetic oligonucleotide; TTC chr11 5238516 5238537 5238533 5238538 +
atattatcttatcaatacatta

SEQ ID NO: 86691 - DNA, 22 bp, Artificial Sequence
  Synthetic oligonucleotide; TTA chr11 5238522 5238543 5238539 5238544 +
tcttatcaatacattaatcatt

SEQ ID NO: 86692 - DNA, 22 bp, Artificial Sequence
  Synthetic oligonucleotide; CTT chr11 5238526 5238547 5238543 5238548 +
atcaatacattaatcattgcaa

SEQ ID NO: 86693 - DNA, 22 bp, Artificial Sequence
  Synthetic oligonucleotide; TTA chr11 5238527 5238548 5238544 5238549 +
tcaatacattaatcattgcaat

SEQ ID NO: 86694 - DNA, 22 bp, Artificial Sequence
  Synthetic oligonucleotide; TTA chr11 5238538 5238559 5238555 5238560 +
atcattgcaataatcactgcac

SEQ ID NO: 86695 - DNA, 22 bp, Artificial Sequence
  Synthetic oligonucleotide; TTG chr11 5238545 5238566 5238562 5238567 +
caataatcactgcacactgtaa

SEQ ID NO: 86696 - DNA, 22 bp, Artificial Sequence
  Synthetic oligonucleotide; CTG chr11 5238557 5238578 5238574 5238579 +
cacactgtaattattcatttac

SEQ ID NO: 86697 - DNA, 22 bp, Artificial Sequence
  Synthetic oligonucleotide; CTG chr11 5238564 5238585 5238581 5238586 +
taattattcatttactggacac

SEQ ID NO: 86698 - DNA, 22 bp, Artificial Sequence
  Synthetic oligonucleotide; TTA chr11 5238570 5238591 5238587 5238592 +
ttcatttactggacacatccta

SEQ ID NO: 86699 - DNA, 22 bp, Artificial Sequence
  Synthetic oligonucleotide; TTC chr11 5238573 5238594 5238590 5238595 +
atttactggacacatcctagtt

SEQ ID NO: 86700 - DNA, 22 bp, Artificial Sequence
  Synthetic oligonucleotide; TTT chr11 5238577 5238598 5238594 5238599 +
actggacacatcctagtttcct

SEQ ID NO: 86701 - DNA, 22 bp, Artificial Sequence
  Synthetic oligonucleotide; TTA chr11 5238578 5238599 5238595 5238600 +
ctggacacatcctagtttcctt

SEQ ID NO: 86702 - DNA, 22 bp, Artificial Sequence
  Synthetic oligonucleotide; CTG chr11 5238581 5238602 5238598 5238603 +
gacacatcctagtttccttctg

SEQ ID NO: 86703 - DNA, 22 bp, Artificial Sequence
  Synthetic oligonucleotide; CTA chr11 5238592 5238613 5238609 5238614 +
gtttccttctgtcaattaccat

SEQ ID NO: 86704 - DNA, 22 bp, Artificial Sequence
  Synthetic oligonucleotide; TTT chr11 5238596 5238617 5238613 5238618 +
ccttctgtcaattaccattcat

SEQ ID NO: 86705 - DNA, 22 bp, Artificial Sequence
  Synthetic oligonucleotide; TTC chr11 5238597 5238618 5238614 5238619 +
cttctgtcaattaccattcatg

SEQ ID NO: 86706 - DNA, 22 bp, Artificial Sequence
  Synthetic oligonucleotide; CTT chr11 5238600 5238621 5238617 5238622 +
ctgtcaattaccattcatgtct

SEQ ID NO: 86707 - DNA, 22 bp, Artificial Sequence
  Synthetic oligonucleotide; TTC chr11 5238601 5238622 5238618 5238623 +
tgtcaattaccattcatgtctg

SEQ ID NO: 86708 - DNA, 22 bp, Artificial Sequence
  Synthetic oligonucleotide; CTG chr11 5238603 5238624 5238620 5238625 +
tcaattaccattcatgtctgct

SEQ ID NO: 86709 - DNA, 22 bp, Artificial Sequence
  Synthetic oligonucleotide; TTA chr11 5238610 5238631 5238627 5238632 +
ccattcatgtctgctttcacat

SEQ ID NO: 86710 - DNA, 22 bp, Artificial Sequence
  Synthetic oligonucleotide; TTC chr11 5238616 5238637 5238633 5238638 +
atgtctgctttcacatttattt

SEQ ID NO: 86711 - DNA, 22 bp, Artificial Sequence
  Synthetic oligonucleotide; CTG chr11 5238623 5238644 5238640 5238645 +
ctttcacatttatttctcatcc

SEQ ID NO: 86712 - DNA, 22 bp, Artificial Sequence
  Synthetic oligonucleotide; CTT chr11 5238626 5238647 5238643 5238648 +
tcacatttatttctcatccttc

SEQ ID NO: 86713 - DNA, 22 bp, Artificial Sequence
  Synthetic oligonucleotide; TTT chr11 5238627 5238648 5238644 5238649 +
cacatttatttctcatccttcc

SEQ ID NO: 86714 - DNA, 22 bp, Artificial Sequence
  Synthetic oligonucleotide; TTC chr11 5238628 5238649 5238645 5238650 +
acatttatttctcatccttccc

SEQ ID NO: 86715 - DNA, 22 bp, Artificial Sequence
  Synthetic oligonucleotide; TTT chr11 5238634 5238655 5238651 5238656 +
atttctcatccttccctcagtg

SEQ ID NO: 86716 - DNA, 22 bp, Artificial Sequence
  Synthetic oligonucleotide; TTA chr11 5238635 5238656 5238652 5238657 +
tttctcatccttccctcagtgt

SEQ ID NO: 86717 - DNA, 22 bp, Artificial Sequence
  Synthetic oligonucleotide; TTT chr11 5238638 5238659 5238655 5238660 +
ctcatccttccctcagtgttct

SEQ ID NO: 86718 - DNA, 22 bp, Artificial Sequence
  Synthetic oligonucleotide; TTC chr11 5238639 5238660 5238656 5238661 +
tcatccttccctcagtgttctc

SEQ ID NO: 86719 - DNA, 22 bp, Artificial Sequence
  Synthetic oligonucleotide; CTC chr11 5238641 5238662 5238658 5238663 +
atccttccctcagtgttctctg

SEQ ID NO: 86720 - DNA, 22 bp, Artificial Sequence
  Synthetic oligonucleotide; CTT chr11 5238647 5238668 5238664 5238669 +
ccctcagtgttctctgtatttg

SEQ ID NO: 86721 - DNA, 22 bp, Artificial Sequence
  Synthetic oligonucleotide; TTC chr11 5238648 5238669 5238665 5238670 +
cctcagtgttctctgtatttga

SEQ ID NO: 86722 - DNA, 22 bp, Artificial Sequence
  Synthetic oligonucleotide; CTC chr11 5238652 5238673 5238669 5238674 +
agtgttctctgtatttgaggaa

SEQ ID NO: 86723 - DNA, 22 bp, Artificial Sequence
  Synthetic oligonucleotide; TTC chr11 5238659 5238680 5238676 5238681 +
tctgtatttgaggaactgacat

SEQ ID NO: 86724 - DNA, 22 bp, Artificial Sequence
  Synthetic oligonucleotide; CTC chr11 5238661 5238682 5238678 5238683 +
tgtatttgaggaactgacattt

SEQ ID NO: 86725 - DNA, 22 bp, Artificial Sequence
  Synthetic oligonucleotide; CTG chr11 5238663 5238684 5238680 5238685 +
tatttgaggaactgacatttcc

SEQ ID NO: 86726 - DNA, 22 bp, Artificial Sequence
  Synthetic oligonucleotide; TTT chr11 5238668 5238689 5238685 5238690 +
gaggaactgacatttcccaggt

SEQ ID NO: 86727 - DNA, 22 bp, Artificial Sequence
  Synthetic oligonucleotide; TTG chr11 5238669 5238690 5238686 5238691 +
aggaactgacatttcccaggtt

SEQ ID NO: 86728 - DNA, 22 bp, Artificial Sequence
  Synthetic oligonucleotide; CTG chr11 5238677 5238698 5238694 5238699 +
acatttcccaggtttcctcacc

SEQ ID NO: 86729 - DNA, 22 bp, Artificial Sequence
  Synthetic oligonucleotide; TTT chr11 5238683 5238704 5238700 5238705 +
cccaggtttcctcaccctttca

SEQ ID NO: 86730 - DNA, 22 bp, Artificial Sequence
  Synthetic oligonucleotide; TTC chr11 5238684 5238705 5238701 5238706 +
ccaggtttcctcaccctttcag

SEQ ID NO: 86731 - DNA, 22 bp, Artificial Sequence
  Synthetic oligonucleotide; TTT chr11 5238692 5238713 5238709 5238714 +
cctcaccctttcagtcgcatgt

SEQ ID NO: 86732 - DNA, 22 bp, Artificial Sequence
  Synthetic oligonucleotide; TTC chr11 5238693 5238714 5238710 5238715 +
ctcaccctttcagtcgcatgta

SEQ ID NO: 86733 - DNA, 22 bp, Artificial Sequence
  Synthetic oligonucleotide; CTC chr11 5238696 5238717 5238713 5238718 +
accctttcagtcgcatgtacat

SEQ ID NO: 86734 - DNA, 22 bp, Artificial Sequence
  Synthetic oligonucleotide; CTT chr11 5238702 5238723 5238719 5238724 +
tcagtcgcatgtacattctgca

SEQ ID NO: 86735 - DNA, 22 bp, Artificial Sequence
  Synthetic oligonucleotide; TTT chr11 5238703 5238724 5238720 5238725 +
cagtcgcatgtacattctgcaa

SEQ ID NO: 86736 - DNA, 22 bp, Artificial Sequence
  Synthetic oligonucleotide; TTC chr11 5238704 5238725 5238721 5238726 +
agtcgcatgtacattctgcaat

SEQ ID NO: 86737 - DNA, 22 bp, Artificial Sequence
  Synthetic oligonucleotide; TTC chr11 5238720 5238741 5238737 5238742 +
tgcaatggtaaacactggctga

SEQ ID NO: 86738 - DNA, 22 bp, Artificial Sequence
  Synthetic oligonucleotide; CTG chr11 5238722 5238743 5238739 5238744 +
caatggtaaacactggctgagg

SEQ ID NO: 86739 - DNA, 22 bp, Artificial Sequence
  Synthetic oligonucleotide; CTG chr11 5238737 5238758 5238754 5238759 +
gctgagggaaagcataagcaag

SEQ ID NO: 86740 - DNA, 22 bp, Artificial Sequence
  Synthetic oligonucleotide; CTG chr11 5238741 5238762 5238758 5238763 +
agggaaagcataagcaagatta

SEQ ID NO: 86741 - DNA, 22 bp, Artificial Sequence
  Synthetic oligonucleotide; TTA chr11 5238763 5238784 5238780 5238785 +
tttctggtctctctctctctct

SEQ ID NO: 86742 - DNA, 22 bp, Artificial Sequence
  Synthetic oligonucleotide; TTT chr11 5238766 5238787 5238783 5238788 +
ctggtctctctctctctctgaa

SEQ ID NO: 86743 - DNA, 22 bp, Artificial Sequence
  Synthetic oligonucleotide; TTC chr11 5238767 5238788 5238784 5238789 +
tggtctctctctctctctgaac

SEQ ID NO: 86744 - DNA, 22 bp, Artificial Sequence
  Synthetic oligonucleotide; CTG chr11 5238769 5238790 5238786 5238791 +
gtctctctctctctctgaacgg

SEQ ID NO: 86745 - DNA, 22 bp, Artificial Sequence
  Synthetic oligonucleotide; CTC chr11 5238774 5238795 5238791 5238796 +
tctctctctctgaacggatctc

SEQ ID NO: 86746 - DNA, 22 bp, Artificial Sequence
  Synthetic oligonucleotide; CTC chr11 5238776 5238797 5238793 5238798 +
tctctctctgaacggatctcct

SEQ ID NO: 86747 - DNA, 22 bp, Artificial Sequence
  Synthetic oligonucleotide; CTC chr11 5238778 5238799 5238795 5238800 +
tctctctgaacggatctcctac

SEQ ID NO: 86748 - DNA, 22 bp, Artificial Sequence
  Synthetic oligonucleotide; CTC chr11 5238780 5238801 5238797 5238802 +
tctctgaacggatctcctacag

SEQ ID NO: 86749 - DNA, 22 bp, Artificial Sequence
  Synthetic oligonucleotide; CTC chr11 5238782 5238803 5238799 5238804 +
tctgaacggatctcctacagca

SEQ ID NO: 86750 - DNA, 22 bp, Artificial Sequence
  Synthetic oligonucleotide; CTC chr11 5238784 5238805 5238801 5238806 +
tgaacggatctcctacagcaga

SEQ ID NO: 86751 - DNA, 22 bp, Artificial Sequence
  Synthetic oligonucleotide; CTG chr11 5238786 5238807 5238803 5238808 +
aacggatctcctacagcagaca

SEQ ID NO: 86752 - DNA, 22 bp, Artificial Sequence
  Synthetic oligonucleotide; CTC chr11 5238796 5238817 5238813 5238818 +
ctacagcagacagtctttttta

SEQ ID NO: 86753 - DNA, 22 bp, Artificial Sequence
  Synthetic oligonucleotide; CTA chr11 5238799 5238820 5238816 5238821 +
cagcagacagtcttttttatgg

SEQ ID NO: 86754 - DNA, 22 bp, Artificial Sequence
  Synthetic oligonucleotide; CTT chr11 5238813 5238834 5238830 5238835 +
ttttatggttttttatggctga

SEQ ID NO: 86755 - DNA, 22 bp, Artificial Sequence
  Synthetic oligonucleotide; TTT chr11 5238814 5238835 5238831 5238836 +
tttatggttttttatggctgat

SEQ ID NO: 86756 - DNA, 22 bp, Artificial Sequence
  Synthetic oligonucleotide; TTT chr11 5238815 5238836 5238832 5238837 +
ttatggttttttatggctgata

SEQ ID NO: 86757 - DNA, 22 bp, Artificial Sequence
  Synthetic oligonucleotide; TTT chr11 5238816 5238837 5238833 5238838 +
tatggttttttatggctgatac

SEQ ID NO: 86758 - DNA, 22 bp, Artificial Sequence
  Synthetic oligonucleotide; TTT chr11 5238817 5238838 5238834 5238839 +
atggttttttatggctgatact

SEQ ID NO: 86759 - DNA, 22 bp, Artificial Sequence
  Synthetic oligonucleotide; TTA chr11 5238818 5238839 5238835 5238840 +
tggttttttatggctgatactt

SEQ ID NO: 86760 - DNA, 22 bp, Artificial Sequence
  Synthetic oligonucleotide; TTT chr11 5238824 5238845 5238841 5238846 +
tttatggctgatactttgatgc

SEQ ID NO: 86761 - DNA, 22 bp, Artificial Sequence
  Synthetic oligonucleotide; TTT chr11 5238825 5238846 5238842 5238847 +
ttatggctgatactttgatgcc

SEQ ID NO: 86762 - DNA, 22 bp, Artificial Sequence
  Synthetic oligonucleotide; TTT chr11 5238826 5238847 5238843 5238848 +
tatggctgatactttgatgccc

SEQ ID NO: 86763 - DNA, 22 bp, Artificial Sequence
  Synthetic oligonucleotide; TTT chr11 5238827 5238848 5238844 5238849 +
atggctgatactttgatgcccc

SEQ ID NO: 86764 - DNA, 22 bp, Artificial Sequence
  Synthetic oligonucleotide; TTA chr11 5238828 5238849 5238845 5238850 +
tggctgatactttgatgccccc

SEQ ID NO: 86765 - DNA, 22 bp, Artificial Sequence
  Synthetic oligonucleotide; CTG chr11 5238834 5238855 5238851 5238856 +
atactttgatgcccccattaga

SEQ ID NO: 86766 - DNA, 22 bp, Artificial Sequence
  Synthetic oligonucleotide; CTT chr11 5238840 5238861 5238857 5238862 +
tgatgcccccattagacagttc

SEQ ID NO: 86767 - DNA, 22 bp, Artificial Sequence
  Synthetic oligonucleotide; TTT chr11 5238841 5238862 5238858 5238863 +
gatgcccccattagacagttct

SEQ ID NO: 86768 - DNA, 22 bp, Artificial Sequence
  Synthetic oligonucleotide; TTG chr11 5238842 5238863 5238859 5238864 +
atgcccccattagacagttctg

SEQ ID NO: 86769 - DNA, 22 bp, Artificial Sequence
  Synthetic oligonucleotide; TTA chr11 5238854 5238875 5238871 5238876 +
gacagttctggctctctccaag

SEQ ID NO: 86770 - DNA, 22 bp, Artificial Sequence
  Synthetic oligonucleotide; TTC chr11 5238862 5238883 5238879 5238884 +
tggctctctccaaggagcaccc

SEQ ID NO: 86771 - DNA, 22 bp, Artificial Sequence
  Synthetic oligonucleotide; CTG chr11 5238864 5238885 5238881 5238886 +
gctctctccaaggagcacccac

SEQ ID NO: 86772 - DNA, 22 bp, Artificial Sequence
  Synthetic oligonucleotide; CTC chr11 5238868 5238889 5238885 5238890 +
tctccaaggagcacccactagc

SEQ ID NO: 86773 - DNA, 22 bp, Artificial Sequence
  Synthetic oligonucleotide; CTC chr11 5238870 5238891 5238887 5238892 +
tccaaggagcacccactagctc

SEQ ID NO: 86774 - DNA, 22 bp, Artificial Sequence
  Synthetic oligonucleotide; CTC chr11 5238872 5238893 5238889 5238894 +
caaggagcacccactagctcac

SEQ ID NO: 86775 - DNA, 22 bp, Artificial Sequence
  Synthetic oligonucleotide; CTA chr11 5238888 5238909 5238905 5238910 +
gctcactgaatccagtggacct

SEQ ID NO: 86776 - DNA, 22 bp, Artificial Sequence
  Synthetic oligonucleotide; CTC chr11 5238892 5238913 5238909 5238914 +
actgaatccagtggacctctgg

SEQ ID NO: 86777 - DNA, 22 bp, Artificial Sequence
  Synthetic oligonucleotide; CTG chr11 5238896 5238917 5238913 5238918 +
aatccagtggacctctggttat

SEQ ID NO: 86778 - DNA, 22 bp, Artificial Sequence
  Synthetic oligonucleotide; CTC chr11 5238911 5238932 5238928 5238933 +
tggttatgggctctggttctgg

SEQ ID NO: 86779 - DNA, 22 bp, Artificial Sequence
  Synthetic oligonucleotide; CTG chr11 5238913 5238934 5238930 5238935 +
gttatgggctctggttctggac

SEQ ID NO: 86780 - DNA, 22 bp, Artificial Sequence
  Synthetic oligonucleotide; TTA chr11 5238917 5238938 5238934 5238939 +
tgggctctggttctggactctg

SEQ ID NO: 86781 - DNA, 22 bp, Artificial Sequence
  Synthetic oligonucleotide; CTC chr11 5238924 5238945 5238941 5238946 +
tggttctggactctggtggtat

SEQ ID NO: 86782 - DNA, 22 bp, Artificial Sequence
  Synthetic oligonucleotide; CTG chr11 5238926 5238947 5238943 5238948 +
gttctggactctggtggtataa

SEQ ID NO: 86783 - DNA, 22 bp, Artificial Sequence
  Synthetic oligonucleotide; TTC chr11 5238930 5238951 5238947 5238952 +
tggactctggtggtataaacat

SEQ ID NO: 86784 - DNA, 22 bp, Artificial Sequence
  Synthetic oligonucleotide; CTG chr11 5238932 5238953 5238949 5238954 +
gactctggtggtataaacattt

SEQ ID NO: 86785 - DNA, 22 bp, Artificial Sequence
  Synthetic oligonucleotide; CTC chr11 5238937 5238958 5238954 5238959 +
tggtggtataaacattttctcc

SEQ ID NO: 86786 - DNA, 22 bp, Artificial Sequence
  Synthetic oligonucleotide; CTG chr11 5238939 5238960 5238956 5238961 +
gtggtataaacattttctcctt

SEQ ID NO: 86787 - DNA, 22 bp, Artificial Sequence
  Synthetic oligonucleotide; TTT chr11 5238954 5238975 5238971 5238976 +
tctccttctgcccttctaggcc

SEQ ID NO: 86788 - DNA, 22 bp, Artificial Sequence
  Synthetic oligonucleotide; TTT chr11 5238955 5238976 5238972 5238977 +
ctccttctgcccttctaggcct

SEQ ID NO: 86789 - DNA, 22 bp, Artificial Sequence
  Synthetic oligonucleotide; TTC chr11 5238956 5238977 5238973 5238978 +
tccttctgcccttctaggccta

SEQ ID NO: 86790 - DNA, 22 bp, Artificial Sequence
  Synthetic oligonucleotide; CTC chr11 5238958 5238979 5238975 5238980 +
cttctgcccttctaggcctaat

SEQ ID NO: 86791 - DNA, 22 bp, Artificial Sequence
  Synthetic oligonucleotide; CTT chr11 5238961 5238982 5238978 5238983 +
ctgcccttctaggcctaatggc

SEQ ID NO: 86792 - DNA, 22 bp, Artificial Sequence
  Synthetic oligonucleotide; TTC chr11 5238962 5238983 5238979 5238984 +
tgcccttctaggcctaatggcg

SEQ ID NO: 86793 - DNA, 22 bp, Artificial Sequence
  Synthetic oligonucleotide; CTG chr11 5238964 5238985 5238981 5238986 +
cccttctaggcctaatggcgga

SEQ ID NO: 86794 - DNA, 22 bp, Artificial Sequence
  Synthetic oligonucleotide; CTT chr11 5238969 5238990 5238986 5238991 +
ctaggcctaatggcggaagagg

SEQ ID NO: 86795 - DNA, 22 bp, Artificial Sequence
  Synthetic oligonucleotide; TTC chr11 5238970 5238991 5238987 5238992 +
taggcctaatggcggaagaggt

SEQ ID NO: 86796 - DNA, 22 bp, Artificial Sequence
  Synthetic oligonucleotide; CTA chr11 5238972 5238993 5238989 5238994 +
ggcctaatggcggaagaggttt

SEQ ID NO: 86797 - DNA, 22 bp, Artificial Sequence
  Synthetic oligonucleotide; CTA chr11 5238978 5238999 5238995 5239000 +
atggcggaagaggttttctgat

SEQ ID NO: 86798 - DNA, 22 bp, Artificial Sequence
  Synthetic oligonucleotide; TTT chr11 5238994 5239015 5239011 5239016 +
tctgatgttactaacatctaga

SEQ ID NO: 86799 - DNA, 22 bp, Artificial Sequence
  Synthetic oligonucleotide; TTT chr11 5238995 5239016 5239012 5239017 +
ctgatgttactaacatctagat

SEQ ID NO: 86800 - DNA, 22 bp, Artificial Sequence
  Synthetic oligonucleotide; TTC chr11 5238996 5239017 5239013 5239018 +
tgatgttactaacatctagatt

SEQ ID NO: 86801 - DNA, 22 bp, Artificial Sequence
  Synthetic oligonucleotide; CTG chr11 5238998 5239019 5239015 5239020 +
atgttactaacatctagatttc

SEQ ID NO: 86802 - DNA, 22 bp, Artificial Sequence
  Synthetic oligonucleotide; TTA chr11 5239004 5239025 5239021 5239026 +
ctaacatctagatttctgcact

SEQ ID NO: 86803 - DNA, 22 bp, Artificial Sequence
  Synthetic oligonucleotide; CTA chr11 5239007 5239028 5239024 5239029 +
acatctagatttctgcactgtc

SEQ ID NO: 86804 - DNA, 22 bp, Artificial Sequence
  Synthetic oligonucleotide; CTA chr11 5239014 5239035 5239031 5239036 +
gatttctgcactgtcctttatt

SEQ ID NO: 86805 - DNA, 22 bp, Artificial Sequence
  Synthetic oligonucleotide; TTT chr11 5239019 5239040 5239036 5239041 +
ctgcactgtcctttatttgata

SEQ ID NO: 86806 - DNA, 22 bp, Artificial Sequence
  Synthetic oligonucleotide; TTC chr11 5239020 5239041 5239037 5239042 +
tgcactgtcctttatttgatat

SEQ ID NO: 86807 - DNA, 22 bp, Artificial Sequence
  Synthetic oligonucleotide; CTG chr11 5239022 5239043 5239039 5239044 +
cactgtcctttatttgatattt

SEQ ID NO: 86808 - DNA, 22 bp, Artificial Sequence
  Synthetic oligonucleotide; CTG chr11 5239027 5239048 5239044 5239049 +
tcctttatttgatattttagct

SEQ ID NO: 86809 - DNA, 22 bp, Artificial Sequence
  Synthetic oligonucleotide; CTT chr11 5239032 5239053 5239049 5239054 +
tatttgatattttagctcttcc

SEQ ID NO: 86810 - DNA, 22 bp, Artificial Sequence
  Synthetic oligonucleotide; TTT chr11 5239033 5239054 5239050 5239055 +
atttgatattttagctcttcca

SEQ ID NO: 86811 - DNA, 22 bp, Artificial Sequence
  Synthetic oligonucleotide; TTA chr11 5239034 5239055 5239051 5239056 +
tttgatattttagctcttccaa

SEQ ID NO: 86812 - DNA, 22 bp, Artificial Sequence
  Synthetic oligonucleotide; TTT chr11 5239037 5239058 5239054 5239059 +
gatattttagctcttccaatac

SEQ ID NO: 86813 - DNA, 22 bp, Artificial Sequence
  Synthetic oligonucleotide; TTG chr11 5239038 5239059 5239055 5239060 +
atattttagctcttccaataca

SEQ ID NO: 86814 - DNA, 22 bp, Artificial Sequence
  Synthetic oligonucleotide; TTT chr11 5239044 5239065 5239061 5239066 +
tagctcttccaatacaaggata

SEQ ID NO: 86815 - DNA, 22 bp, Artificial Sequence
  Synthetic oligonucleotide; TTT chr11 5239045 5239066 5239062 5239067 +
agctcttccaatacaaggataa

SEQ ID NO: 86816 - DNA, 22 bp, Artificial Sequence
  Synthetic oligonucleotide; TTA chr11 5239046 5239067 5239063 5239068 +
gctcttccaatacaaggataat

SEQ ID NO: 86817 - DNA, 22 bp, Artificial Sequence
  Synthetic oligonucleotide; CTC chr11 5239050 5239071 5239067 5239072 +
ttccaatacaaggataattaac

SEQ ID NO: 86818 - DNA, 22 bp, Artificial Sequence
  Synthetic oligonucleotide; CTT chr11 5239052 5239073 5239069 5239074 +
ccaatacaaggataattaacta

SEQ ID NO: 86819 - DNA, 22 bp, Artificial Sequence
  Synthetic oligonucleotide; TTC chr11 5239053 5239074 5239070 5239075 +
caatacaaggataattaactat

SEQ ID NO: 86820 - DNA, 22 bp, Artificial Sequence
  Synthetic oligonucleotide; TTA chr11 5239070 5239091 5239087 5239092 +
actattaagagctgtatttaat

SEQ ID NO: 86821 - DNA, 22 bp, Artificial Sequence
  Synthetic oligonucleotide; CTA chr11 5239074 5239095 5239091 5239096 +
ttaagagctgtatttaattcta

SEQ ID NO: 86822 - DNA, 22 bp, Artificial Sequence
  Synthetic oligonucleotide; TTA chr11 5239077 5239098 5239094 5239099 +
agagctgtatttaattctaggt

SEQ ID NO: 86823 - DNA, 22 bp, Artificial Sequence
  Synthetic oligonucleotide; CTG chr11 5239084 5239105 5239101 5239106 +
tatttaattctaggttgagtaa

SEQ ID NO: 86824 - DNA, 22 bp, Artificial Sequence
  Synthetic oligonucleotide; TTT chr11 5239089 5239110 5239106 5239111 +
aattctaggttgagtaactgat

SEQ ID NO: 86825 - DNA, 22 bp, Artificial Sequence
  Synthetic oligonucleotide; TTA chr11 5239090 5239111 5239107 5239112 +
attctaggttgagtaactgata

SEQ ID NO: 86826 - DNA, 22 bp, Artificial Sequence
  Synthetic oligonucleotide; TTC chr11 5239094 5239115 5239111 5239116 +
taggttgagtaactgataatgg

SEQ ID NO: 86827 - DNA, 22 bp, Artificial Sequence
  Synthetic oligonucleotide; CTA chr11 5239096 5239117 5239113 5239118 +
ggttgagtaactgataatggtt

SEQ ID NO: 86828 - DNA, 22 bp, Artificial Sequence
  Synthetic oligonucleotide; TTG chr11 5239101 5239122 5239118 5239123 +
agtaactgataatggtttgtcc

SEQ ID NO: 86829 - DNA, 22 bp, Artificial Sequence
  Synthetic oligonucleotide; CTG chr11 5239109 5239130 5239126 5239131 +
ataatggtttgtcctttccttg

SEQ ID NO: 86830 - DNA, 22 bp, Artificial Sequence
  Synthetic oligonucleotide; TTT chr11 5239119 5239140 5239136 5239141 +
gtcctttccttgatggacccta

SEQ ID NO: 86831 - DNA, 22 bp, Artificial Sequence
  Synthetic oligonucleotide; TTG chr11 5239120 5239141 5239137 5239142 +
tcctttccttgatggaccctaa

SEQ ID NO: 86832 - DNA, 22 bp, Artificial Sequence
  Synthetic oligonucleotide; CTT chr11 5239125 5239146 5239142 5239147 +
tccttgatggaccctaactgat

SEQ ID NO: 86833 - DNA, 22 bp, Artificial Sequence
  Synthetic oligonucleotide; TTT chr11 5239126 5239147 5239143 5239148 +
ccttgatggaccctaactgata

SEQ ID NO: 86834 - DNA, 22 bp, Artificial Sequence
  Synthetic oligonucleotide; TTC chr11 5239127 5239148 5239144 5239149 +
cttgatggaccctaactgatat

SEQ ID NO: 86835 - DNA, 22 bp, Artificial Sequence
  Synthetic oligonucleotide; CTT chr11 5239130 5239151 5239147 5239152 +
gatggaccctaactgatataac

SEQ ID NO: 86836 - DNA, 22 bp, Artificial Sequence
  Synthetic oligonucleotide; TTG chr11 5239131 5239152 5239148 5239153 +
atggaccctaactgatataact

SEQ ID NO: 86837 - DNA, 22 bp, Artificial Sequence
  Synthetic oligonucleotide; CTA chr11 5239141 5239162 5239158 5239163 +
actgatataactaataaactga

SEQ ID NO: 86838 - DNA, 22 bp, Artificial Sequence
  Synthetic oligonucleotide; CTG chr11 5239145 5239166 5239162 5239167 +
atataactaataaactgacttc

SEQ ID NO: 86839 - DNA, 22 bp, Artificial Sequence
  Synthetic oligonucleotide; CTA chr11 5239154 5239175 5239171 5239176 +
ataaactgacttctgatactat

SEQ ID NO: 86840 - DNA, 22 bp, Artificial Sequence
  Synthetic oligonucleotide; CTG chr11 5239162 5239183 5239179 5239184 +
acttctgatactatgtcttatt

SEQ ID NO: 86841 - DNA, 22 bp, Artificial Sequence
  Synthetic oligonucleotide; CTT chr11 5239166 5239187 5239183 5239188 +
ctgatactatgtcttattagtg

SEQ ID NO: 86842 - DNA, 22 bp, Artificial Sequence
  Synthetic oligonucleotide; TTC chr11 5239167 5239188 5239184 5239189 +
tgatactatgtcttattagtgt

SEQ ID NO: 86843 - DNA, 22 bp, Artificial Sequence
  Synthetic oligonucleotide; CTG chr11 5239169 5239190 5239186 5239191 +
atactatgtcttattagtgtat

SEQ ID NO: 86844 - DNA, 22 bp, Artificial Sequence
  Synthetic oligonucleotide; CTA chr11 5239175 5239196 5239192 5239197 +
tgtcttattagtgtatgaaatt

SEQ ID NO: 86845 - DNA, 22 bp, Artificial Sequence
  Synthetic oligonucleotide; CTT chr11 5239181 5239202 5239198 5239203 +
attagtgtatgaaattctgatg

SEQ ID NO: 86846 - DNA, 22 bp, Artificial Sequence
  Synthetic oligonucleotide; TTA chr11 5239182 5239203 5239199 5239204 +
ttagtgtatgaaattctgatgt

SEQ ID NO: 86847 - DNA, 22 bp, Artificial Sequence
  Synthetic oligonucleotide; TTA chr11 5239185 5239206 5239202 5239207 +
gtgtatgaaattctgatgtgaa

SEQ ID NO: 86848 - DNA, 22 bp, Artificial Sequence
  Synthetic oligonucleotide; TTC chr11 5239198 5239219 5239215 5239220 +
tgatgtgaataaatgcatgaca

SEQ ID NO: 86849 - DNA, 22 bp, Artificial Sequence
  Synthetic oligonucleotide; CTG chr11 5239200 5239221 5239217 5239222 +
atgtgaataaatgcatgacaca

SEQ ID NO: 86850 - DNA, 22 bp, Artificial Sequence
  Synthetic oligonucleotide; CTT chr11 5239227 5239248 5239244 5239249 +
gttgactaatcaaactatagca

SEQ ID NO: 86851 - DNA, 22 bp, Artificial Sequence
  Synthetic oligonucleotide; TTG chr11 5239228 5239249 5239245 5239250 +
ttgactaatcaaactatagcag

SEQ ID NO: 86852 - DNA, 22 bp, Artificial Sequence
  Synthetic oligonucleotide; TTG chr11 5239231 5239252 5239248 5239253 +
actaatcaaactatagcagagg

SEQ ID NO: 86853 - DNA, 22 bp, Artificial Sequence
  Synthetic oligonucleotide; CTA chr11 5239235 5239256 5239252 5239257 +
atcaaactatagcagaggcaga

SEQ ID NO: 86854 - DNA, 22 bp, Artificial Sequence
  Synthetic oligonucleotide; CTA chr11 5239244 5239265 5239261 5239266 +
tagcagaggcagaggaaggaac

SEQ ID NO: 86855 - DNA, 22 bp, Artificial Sequence
  Synthetic oligonucleotide; CTC chr11 5239269 5239290 5239286 5239291 +
atgacctataaatactaagata

SEQ ID NO: 86856 - DNA, 22 bp, Artificial Sequence
  Synthetic oligonucleotide; CTA chr11 5239277 5239298 5239294 5239299 +
taaatactaagatatcacatag

SEQ ID NO: 86857 - DNA, 22 bp, Artificial Sequence
  Synthetic oligonucleotide; CTA chr11 5239286 5239307 5239303 5239308 +
agatatcacatagtcattttag

SEQ ID NO: 86858 - DNA, 22 bp, Artificial Sequence
  Synthetic oligonucleotide; TTT chr11 5239305 5239326 5239322 5239327 +
tagaaccaaaggttcctcagtt

SEQ ID NO: 86859 - DNA, 22 bp, Artificial Sequence
  Synthetic oligonucleotide; TTT chr11 5239306 5239327 5239323 5239328 +
agaaccaaaggttcctcagttt

SEQ ID NO: 86860 - DNA, 22 bp, Artificial Sequence
  Synthetic oligonucleotide; TTA chr11 5239307 5239328 5239324 5239329 +
gaaccaaaggttcctcagttta

SEQ ID NO: 86861 - DNA, 22 bp, Artificial Sequence
  Synthetic oligonucleotide; TTC chr11 5239320 5239341 5239337 5239342 +
ctcagtttaggtctcaaacaaa

SEQ ID NO: 86862 - DNA, 22 bp, Artificial Sequence
  Synthetic oligonucleotide; CTC chr11 5239323 5239344 5239340 5239345 +
agtttaggtctcaaacaaactt

SEQ ID NO: 86863 - DNA, 22 bp, Artificial Sequence
  Synthetic oligonucleotide; TTT chr11 5239328 5239349 5239345 5239350 +
aggtctcaaacaaacttctcta

SEQ ID NO: 86864 - DNA, 22 bp, Artificial Sequence
  Synthetic oligonucleotide; TTA chr11 5239329 5239350 5239346 5239351 +
ggtctcaaacaaacttctctat

SEQ ID NO: 86865 - DNA, 22 bp, Artificial Sequence
  Synthetic oligonucleotide; CTC chr11 5239335 5239356 5239352 5239357 +
aaacaaacttctctatggatag

SEQ ID NO: 86866 - DNA, 22 bp, Artificial Sequence
  Synthetic oligonucleotide; CTT chr11 5239345 5239366 5239362 5239367 +
ctctatggatagtgtaatactc

SEQ ID NO: 86867 - DNA, 22 bp, Artificial Sequence
  Synthetic oligonucleotide; TTC chr11 5239346 5239367 5239363 5239368 +
tctatggatagtgtaatactca

SEQ ID NO: 86868 - DNA, 22 bp, Artificial Sequence
  Synthetic oligonucleotide; CTC chr11 5239348 5239369 5239365 5239370 +
tatggatagtgtaatactcata

SEQ ID NO: 86869 - DNA, 22 bp, Artificial Sequence
  Synthetic oligonucleotide; CTA chr11 5239350 5239371 5239367 5239372 +
tggatagtgtaatactcataat

SEQ ID NO: 86870 - DNA, 22 bp, Artificial Sequence
  Synthetic oligonucleotide; CTC chr11 5239367 5239388 5239384 5239389 +
ataatgtagaaaagagagatct

SEQ ID NO: 86871 - DNA, 22 bp, Artificial Sequence
  Synthetic oligonucleotide; CTA chr11 5239390 5239411 5239407 5239412 +
attttggataatttaatctttt

SEQ ID NO: 86872 - DNA, 22 bp, Artificial Sequence
  Synthetic oligonucleotide; TTT chr11 5239394 5239415 5239411 5239416 +
tggataatttaatctttttttt

SEQ ID NO: 86873 - DNA, 22 bp, Artificial Sequence
  Synthetic oligonucleotide; TTT chr11 5239395 5239416 5239412 5239417 +
ggataatttaatcttttttttc

SEQ ID NO: 86874 - DNA, 22 bp, Artificial Sequence
  Synthetic oligonucleotide; TTG chr11 5239396 5239417 5239413 5239418 +
gataatttaatcttttttttca

SEQ ID NO: 86875 - DNA, 22 bp, Artificial Sequence
  Synthetic oligonucleotide; TTT chr11 5239404 5239425 5239421 5239426 +
aatcttttttttcatctccaaa

SEQ ID NO: 86876 - DNA, 22 bp, Artificial Sequence
  Synthetic oligonucleotide; TTA chr11 5239405 5239426 5239422 5239427 +
atcttttttttcatctccaaat

SEQ ID NO: 86877 - DNA, 22 bp, Artificial Sequence
  Synthetic oligonucleotide; CTT chr11 5239410 5239431 5239427 5239432 +
ttttttcatctccaaatactag

SEQ ID NO: 86878 - DNA, 22 bp, Artificial Sequence
  Synthetic oligonucleotide; TTT chr11 5239411 5239432 5239428 5239433 +
tttttcatctccaaatactagg

SEQ ID NO: 86879 - DNA, 22 bp, Artificial Sequence
  Synthetic oligonucleotide; TTT chr11 5239412 5239433 5239429 5239434 +
ttttcatctccaaatactaggg

SEQ ID NO: 86880 - DNA, 22 bp, Artificial Sequence
  Synthetic oligonucleotide; TTT chr11 5239413 5239434 5239430 5239435 +
tttcatctccaaatactaggga

SEQ ID NO: 86881 - DNA, 22 bp, Artificial Sequence
  Synthetic oligonucleotide; TTT chr11 5239414 5239435 5239431 5239436 +
ttcatctccaaatactagggaa

SEQ ID NO: 86882 - DNA, 22 bp, Artificial Sequence
  Synthetic oligonucleotide; TTT chr11 5239415 5239436 5239432 5239437 +
tcatctccaaatactagggaaa

SEQ ID NO: 86883 - DNA, 22 bp, Artificial Sequence
  Synthetic oligonucleotide; TTT chr11 5239416 5239437 5239433 5239438 +
catctccaaatactagggaaat

SEQ ID NO: 86884 - DNA, 22 bp, Artificial Sequence
  Synthetic oligonucleotide; TTC chr11 5239417 5239438 5239434 5239439 +
atctccaaatactagggaaata

SEQ ID NO: 86885 - DNA, 22 bp, Artificial Sequence
  Synthetic oligonucleotide; CTC chr11 5239422 5239443 5239439 5239444 +
caaatactagggaaataagagt

SEQ ID NO: 86886 - DNA, 22 bp, Artificial Sequence
  Synthetic oligonucleotide; CTA chr11 5239431 5239452 5239448 5239453 +
gggaaataagagtttacaagac

SEQ ID NO: 86887 - DNA, 22 bp, Artificial Sequence
  Synthetic oligonucleotide; TTT chr11 5239446 5239467 5239463 5239468 +
acaagacaatgtctctaccata

SEQ ID NO: 86888 - DNA, 22 bp, Artificial Sequence
  Synthetic oligonucleotide; TTA chr11 5239447 5239468 5239464 5239469 +
caagacaatgtctctaccataa

SEQ ID NO: 86889 - DNA, 22 bp, Artificial Sequence
  Synthetic oligonucleotide; CTC chr11 5239461 5239482 5239478 5239483 +
taccataaaagaggttaaaatt

SEQ ID NO: 86890 - DNA, 22 bp, Artificial Sequence
  Synthetic oligonucleotide; CTA chr11 5239463 5239484 5239480 5239485 +
ccataaaagaggttaaaattta

SEQ ID NO: 86891 - DNA, 22 bp, Artificial Sequence
  Synthetic oligonucleotide; TTA chr11 5239478 5239499 5239495 5239500 +
aaatttagtggtaggaatatac

SEQ ID NO: 86892 - DNA, 22 bp, Artificial Sequence
  Synthetic oligonucleotide; TTT chr11 5239484 5239505 5239501 5239506 +
agtggtaggaatatacaatgag

SEQ ID NO: 86893 - DNA, 22 bp, Artificial Sequence
  Synthetic oligonucleotide; TTA chr11 5239485 5239506 5239502 5239507 +
gtggtaggaatatacaatgagc

SEQ ID NO: 86894 - DNA, 22 bp, Artificial Sequence
  Synthetic oligonucleotide; TTA chr11 5239513 5239534 5239530 5239535 +
agtacattagtaggaaaaacac

SEQ ID NO: 86895 - DNA, 22 bp, Artificial Sequence
  Synthetic oligonucleotide; TTA chr11 5239522 5239543 5239539 5239544 +
gtaggaaaaacactaaatatta

SEQ ID NO: 86896 - DNA, 22 bp, Artificial Sequence
  Synthetic oligonucleotide; CTA chr11 5239537 5239558 5239554 5239559 +
aatattataagaaagagcccat

SEQ ID NO: 86897 - DNA, 22 bp, Artificial Sequence
  Synthetic oligonucleotide; TTA chr11 5239544 5239565 5239561 5239566 +
taagaaagagcccataattgta

SEQ ID NO: 86898 - DNA, 22 bp, Artificial Sequence
  Synthetic oligonucleotide; TTG chr11 5239564 5239585 5239581 5239586 +
tagcagagtttatagacagggc

SEQ ID NO: 86899 - DNA, 22 bp, Artificial Sequence
  Synthetic oligonucleotide; TTT chr11 5239575 5239596 5239592 5239597 +
atagacagggctttaagcccag

SEQ ID NO: 86900 - DNA, 22 bp, Artificial Sequence
  Synthetic oligonucleotide; TTA chr11 5239576 5239597 5239593 5239598 +
tagacagggctttaagcccagt

SEQ ID NO: 86901 - DNA, 22 bp, Artificial Sequence
  Synthetic oligonucleotide; CTT chr11 5239588 5239609 5239605 5239610 +
taagcccagttaaaattaaaaa

SEQ ID NO: 86902 - DNA, 22 bp, Artificial Sequence
  Synthetic oligonucleotide; TTT chr11 5239589 5239610 5239606 5239611 +
aagcccagttaaaattaaaaaa

SEQ ID NO: 86903 - DNA, 22 bp, Artificial Sequence
  Synthetic oligonucleotide; TTA chr11 5239590 5239611 5239607 5239612 +
agcccagttaaaattaaaaaaa

SEQ ID NO: 86904 - DNA, 22 bp, Artificial Sequence
  Synthetic oligonucleotide; TTA chr11 5239600 5239621 5239617 5239622 +
aaattaaaaaaaaatagcttct

SEQ ID NO: 86905 - DNA, 22 bp, Artificial Sequence
  Synthetic oligonucleotide; TTA chr11 5239606 5239627 5239623 5239628 +
aaaaaaaatagcttcttagttg

SEQ ID NO: 86906 - DNA, 22 bp, Artificial Sequence
  Synthetic oligonucleotide; CTT chr11 5239620 5239641 5239637 5239642 +
cttagttgagataacatataag

SEQ ID NO: 86907 - DNA, 22 bp, Artificial Sequence
  Synthetic oligonucleotide; TTC chr11 5239621 5239642 5239638 5239643 +
ttagttgagataacatataagt

SEQ ID NO: 86908 - DNA, 22 bp, Artificial Sequence
  Synthetic oligonucleotide; CTT chr11 5239623 5239644 5239640 5239645 +
agttgagataacatataagtta

SEQ ID NO: 86909 - DNA, 22 bp, Artificial Sequence
  Synthetic oligonucleotide; TTA chr11 5239624 5239645 5239641 5239646 +
gttgagataacatataagttag

SEQ ID NO: 86910 - DNA, 22 bp, Artificial Sequence
  Synthetic oligonucleotide; TTG chr11 5239628 5239649 5239645 5239650 +
agataacatataagttaggact

SEQ ID NO: 86911 - DNA, 22 bp, Artificial Sequence
  Synthetic oligonucleotide; TTA chr11 5239645 5239666 5239662 5239667 +
ggacttaaagtatgagtacaag

SEQ ID NO: 86912 - DNA, 22 bp, Artificial Sequence
  Synthetic oligonucleotide; CTT chr11 5239651 5239672 5239668 5239673 +
aaagtatgagtacaagatagac

SEQ ID NO: 86913 - DNA, 22 bp, Artificial Sequence
  Synthetic oligonucleotide; TTA chr11 5239652 5239673 5239669 5239674 +
aagtatgagtacaagatagaca

SEQ ID NO: 86914 - DNA, 22 bp, Artificial Sequence
  Synthetic oligonucleotide; CTA chr11 5239730 5239751 5239747 5239752 +
acagagtcaaatgcagaaatcc

SEQ ID NO: 86915 - DNA, 22 bp, Artificial Sequence
  Synthetic oligonucleotide; TTC chr11 5239758 5239779 5239775 5239780 +
tctagattgactggggtaattt

SEQ ID NO: 86916 - DNA, 22 bp, Artificial Sequence
  Synthetic oligonucleotide; CTC chr11 5239760 5239781 5239777 5239782 +
tagattgactggggtaattttg

SEQ ID NO: 86917 - DNA, 22 bp, Artificial Sequence
  Synthetic oligonucleotide; CTA chr11 5239762 5239783 5239779 5239784 +
gattgactggggtaattttgtc

SEQ ID NO: 86918 - DNA, 22 bp, Artificial Sequence
  Synthetic oligonucleotide; TTG chr11 5239767 5239788 5239784 5239789 +
actggggtaattttgtcaatgc

SEQ ID NO: 86919 - DNA, 22 bp, Artificial Sequence
  Synthetic oligonucleotide; CTG chr11 5239771 5239792 5239788 5239793 +
gggtaattttgtcaatgcactc

SEQ ID NO: 86920 - DNA, 22 bp, Artificial Sequence
  Synthetic oligonucleotide; TTT chr11 5239780 5239801 5239797 5239802 +
tgtcaatgcactcaagtatgca

SEQ ID NO: 86921 - DNA, 22 bp, Artificial Sequence
  Synthetic oligonucleotide; TTT chr11 5239781 5239802 5239798 5239803 +
gtcaatgcactcaagtatgcat

SEQ ID NO: 86922 - DNA, 22 bp, Artificial Sequence
  Synthetic oligonucleotide; TTG chr11 5239782 5239803 5239799 5239804 +
tcaatgcactcaagtatgcatc

SEQ ID NO: 86923 - DNA, 22 bp, Artificial Sequence
  Synthetic oligonucleotide; CTC chr11 5239793 5239814 5239810 5239815 +
aagtatgcatctgtaacagtgt

SEQ ID NO: 86924 - DNA, 22 bp, Artificial Sequence
  Synthetic oligonucleotide; CTG chr11 5239806 5239827 5239823 5239828 +
taacagtgtgtgttcttatgtg

SEQ ID NO: 86925 - DNA, 22 bp, Artificial Sequence
  Synthetic oligonucleotide; TTC chr11 5239821 5239842 5239838 5239843 +
ttatgtgtgcatggaatgtttg

SEQ ID NO: 86926 - DNA, 22 bp, Artificial Sequence
  Synthetic oligonucleotide; CTT chr11 5239823 5239844 5239840 5239845 +
atgtgtgcatggaatgtttgtt

SEQ ID NO: 86927 - DNA, 22 bp, Artificial Sequence
  Synthetic oligonucleotide; TTA chr11 5239824 5239845 5239841 5239846 +
tgtgtgcatggaatgtttgttc

SEQ ID NO: 86928 - DNA, 22 bp, Artificial Sequence
  Synthetic oligonucleotide; TTT chr11 5239842 5239863 5239859 5239864 +
gttcatggagcataagaaattg

SEQ ID NO: 86929 - DNA, 22 bp, Artificial Sequence
  Synthetic oligonucleotide; TTG chr11 5239843 5239864 5239860 5239865 +
ttcatggagcataagaaattgt

SEQ ID NO: 86930 - DNA, 22 bp, Artificial Sequence
  Synthetic oligonucleotide; TTC chr11 5239846 5239867 5239863 5239868 +
atggagcataagaaattgtgta

SEQ ID NO: 86931 - DNA, 22 bp, Artificial Sequence
  Synthetic oligonucleotide; TTG chr11 5239864 5239885 5239881 5239886 +
tgtagacatatagacacatctg

SEQ ID NO: 86932 - DNA, 22 bp, Artificial Sequence
  Synthetic oligonucleotide; CTG chr11 5239886 5239907 5239903 5239908 +
tatgtgtatatcagagaatgtt

SEQ ID NO: 86933 - DNA, 22 bp, Artificial Sequence
  Synthetic oligonucleotide; TTT chr11 5239909 5239930 5239926 5239931 +
acattgctacaagattttatat

SEQ ID NO: 86934 - DNA, 22 bp, Artificial Sequence
  Synthetic oligonucleotide; TTA chr11 5239910 5239931 5239927 5239932 +
cattgctacaagattttatatg

SEQ ID NO: 86935 - DNA, 22 bp, Artificial Sequence
  Synthetic oligonucleotide; TTG chr11 5239915 5239936 5239932 5239937 +
ctacaagattttatatgactac

SEQ ID NO: 86936 - DNA, 22 bp, Artificial Sequence
  Synthetic oligonucleotide; CTA chr11 5239918 5239939 5239935 5239940 +
caagattttatatgactacatg

SEQ ID NO: 86937 - DNA, 22 bp, Artificial Sequence
  Synthetic oligonucleotide; TTT chr11 5239926 5239947 5239943 5239948 +
tatatgactacatgcacaagca

SEQ ID NO: 86938 - DNA, 22 bp, Artificial Sequence
  Synthetic oligonucleotide; TTT chr11 5239927 5239948 5239944 5239949 +
atatgactacatgcacaagcat

SEQ ID NO: 86939 - DNA, 22 bp, Artificial Sequence
  Synthetic oligonucleotide; TTA chr11 5239928 5239949 5239945 5239950 +
tatgactacatgcacaagcatt

SEQ ID NO: 86940 - DNA, 22 bp, Artificial Sequence
  Synthetic oligonucleotide; CTA chr11 5239936 5239957 5239953 5239958 +
catgcacaagcattcatgctac

SEQ ID NO: 86941 - DNA, 22 bp, Artificial Sequence
  Synthetic oligonucleotide; TTC chr11 5239951 5239972 5239968 5239973 +
atgctacatgtcagtttggtat

SEQ ID NO: 86942 - DNA, 22 bp, Artificial Sequence
  Synthetic oligonucleotide; CTA chr11 5239957 5239978 5239974 5239979 +
catgtcagtttggtatattttt

SEQ ID NO: 86943 - DNA, 22 bp, Artificial Sequence
  Synthetic oligonucleotide; TTT chr11 5239968 5239989 5239985 5239990 +
ggtatatttttcctgtaagatg

SEQ ID NO: 86944 - DNA, 22 bp, Artificial Sequence
  Synthetic oligonucleotide; TTG chr11 5239969 5239990 5239986 5239991 +
gtatatttttcctgtaagatgt

SEQ ID NO: 86945 - DNA, 22 bp, Artificial Sequence
  Synthetic oligonucleotide; TTT chr11 5239977 5239998 5239994 5239999 +
ttcctgtaagatgtgtacttat

SEQ ID NO: 86946 - DNA, 22 bp, Artificial Sequence
  Synthetic oligonucleotide; TTT chr11 5239978 5239999 5239995 5240000 +
tcctgtaagatgtgtacttatg

SEQ ID NO: 86947 - DNA, 22 bp, Artificial Sequence
  Synthetic oligonucleotide; TTT chr11 5239979 5240000 5239996 5240001 +
cctgtaagatgtgtacttatgt

SEQ ID NO: 86948 - DNA, 22 bp, Artificial Sequence
  Synthetic oligonucleotide; TTC chr11 5239980 5240001 5239997 5240002 +
ctgtaagatgtgtacttatgtg

SEQ ID NO: 86949 - DNA, 22 bp, Artificial Sequence
  Synthetic oligonucleotide; CTG chr11 5239983 5240004 5240000 5240005 +
taagatgtgtacttatgtgttt

SEQ ID NO: 86950 - DNA, 22 bp, Artificial Sequence
  Synthetic oligonucleotide; CTT chr11 5239997 5240018 5240014 5240019 +
atgtgttttccactaaaggtga

SEQ ID NO: 86951 - DNA, 22 bp, Artificial Sequence
  Synthetic oligonucleotide; TTA chr11 5239998 5240019 5240015 5240020 +
tgtgttttccactaaaggtgaa

SEQ ID NO: 86952 - DNA, 22 bp, Artificial Sequence
  Synthetic oligonucleotide; TTT chr11 5240005 5240026 5240022 5240027 +
tccactaaaggtgaatgtgaaa

SEQ ID NO: 86953 - DNA, 22 bp, Artificial Sequence
  Synthetic oligonucleotide; TTT chr11 5240006 5240027 5240023 5240028 +
ccactaaaggtgaatgtgaaaa

SEQ ID NO: 86954 - DNA, 22 bp, Artificial Sequence
  Synthetic oligonucleotide; TTC chr11 5240007 5240028 5240024 5240029 +
cactaaaggtgaatgtgaaaac

SEQ ID NO: 86955 - DNA, 22 bp, Artificial Sequence
  Synthetic oligonucleotide; CTA chr11 5240012 5240033 5240029 5240034 +
aaggtgaatgtgaaaactcctc

SEQ ID NO: 86956 - DNA, 22 bp, Artificial Sequence
  Synthetic oligonucleotide; CTC chr11 5240031 5240052 5240048 5240053 +
ctcatcgagaaatgaacaataa

SEQ ID NO: 86957 - DNA, 22 bp, Artificial Sequence
  Synthetic oligonucleotide; CTC chr11 5240034 5240055 5240051 5240056 +
atcgagaaatgaacaataagta

SEQ ID NO: 86958 - DNA, 22 bp, Artificial Sequence
  Synthetic oligonucleotide; TTC chr11 5240069 5240090 5240086 5240091 +
aaccctcatctcttcatttaaa

SEQ ID NO: 86959 - DNA, 22 bp, Artificial Sequence
  Synthetic oligonucleotide; CTC chr11 5240076 5240097 5240093 5240098 +
atctcttcatttaaaatacaga

SEQ ID NO: 86960 - DNA, 22 bp, Artificial Sequence
  Synthetic oligonucleotide; CTC chr11 5240081 5240102 5240098 5240103 +
ttcatttaaaatacagagtgac

SEQ ID NO: 86961 - DNA, 22 bp, Artificial Sequence
  Synthetic oligonucleotide; CTT chr11 5240083 5240104 5240100 5240105 +
catttaaaatacagagtgacat

SEQ ID NO: 86962 - DNA, 22 bp, Artificial Sequence
  Synthetic oligonucleotide; TTC chr11 5240084 5240105 5240101 5240106 +
atttaaaatacagagtgacatt

SEQ ID NO: 86963 - DNA, 22 bp, Artificial Sequence
  Synthetic oligonucleotide; TTT chr11 5240088 5240109 5240105 5240110 +
aaaatacagagtgacattcaga

SEQ ID NO: 86964 - DNA, 22 bp, Artificial Sequence
  Synthetic oligonucleotide; TTA chr11 5240089 5240110 5240106 5240111 +
aaatacagagtgacattcagaa

SEQ ID NO: 86965 - DNA, 22 bp, Artificial Sequence
  Synthetic oligonucleotide; TTC chr11 5240107 5240128 5240124 5240129 +
agaagggcaagggatagcacaa

SEQ ID NO: 86966 - DNA, 22 bp, Artificial Sequence
  Synthetic oligonucleotide; TTT chr11 5240140 5240161 5240157 5240162 +
taaagtgtgattgtttggacac

SEQ ID NO: 86967 - DNA, 22 bp, Artificial Sequence
  Synthetic oligonucleotide; TTT chr11 5240141 5240162 5240158 5240163 +
aaagtgtgattgtttggacaca

SEQ ID NO: 86968 - DNA, 22 bp, Artificial Sequence
  Synthetic oligonucleotide; TTA chr11 5240142 5240163 5240159 5240164 +
aagtgtgattgtttggacacag

SEQ ID NO: 86969 - DNA, 22 bp, Artificial Sequence
  Synthetic oligonucleotide; TTG chr11 5240153 5240174 5240170 5240175 +
tttggacacagtaattattcaa

SEQ ID NO: 86970 - DNA, 22 bp, Artificial Sequence
  Synthetic oligonucleotide; TTT chr11 5240156 5240177 5240173 5240178 +
ggacacagtaattattcaaaga

SEQ ID NO: 86971 - DNA, 22 bp, Artificial Sequence
  Synthetic oligonucleotide; TTG chr11 5240157 5240178 5240174 5240179 +
gacacagtaattattcaaagaa

SEQ ID NO: 86972 - DNA, 22 bp, Artificial Sequence
  Synthetic oligonucleotide; TTA chr11 5240170 5240191 5240187 5240192 +
ttcaaagaatgtgcttaattaa

SEQ ID NO: 86973 - DNA, 22 bp, Artificial Sequence
  Synthetic oligonucleotide; TTC chr11 5240173 5240194 5240190 5240195 +
aaagaatgtgcttaattaatgt

SEQ ID NO: 86974 - DNA, 22 bp, Artificial Sequence
  Synthetic oligonucleotide; CTT chr11 5240186 5240207 5240203 5240208 +
aattaatgtatgctacaagaca

SEQ ID NO: 86975 - DNA, 22 bp, Artificial Sequence
  Synthetic oligonucleotide; TTA chr11 5240187 5240208 5240204 5240209 +
attaatgtatgctacaagacag

SEQ ID NO: 86976 - DNA, 22 bp, Artificial Sequence
  Synthetic oligonucleotide; TTA chr11 5240191 5240212 5240208 5240213 +
atgtatgctacaagacagcagt

SEQ ID NO: 86977 - DNA, 22 bp, Artificial Sequence
  Synthetic oligonucleotide; CTA chr11 5240201 5240222 5240218 5240223 +
caagacagcagttgagtgatta

SEQ ID NO: 86978 - DNA, 22 bp, Artificial Sequence
  Synthetic oligonucleotide; TTG chr11 5240215 5240236 5240232 5240237 +
agtgattattgtacatgagcaa

SEQ ID NO: 86979 - DNA, 22 bp, Artificial Sequence
  Synthetic oligonucleotide; TTA chr11 5240223 5240244 5240240 5240245 +
ttgtacatgagcaactggtatt

SEQ ID NO: 86980 - DNA, 22 bp, Artificial Sequence
  Synthetic oligonucleotide; TTG chr11 5240226 5240247 5240243 5240248 +
tacatgagcaactggtatttat

SEQ ID NO: 86981 - DNA, 22 bp, Artificial Sequence
  Synthetic oligonucleotide; CTG chr11 5240240 5240261 5240257 5240262 +
gtatttattctgctttgtgggt

SEQ ID NO: 86982 - DNA, 22 bp, Artificial Sequence
  Synthetic oligonucleotide; TTT chr11 5240246 5240267 5240263 5240268 +
attctgctttgtgggttattag

SEQ ID NO: 86983 - DNA, 22 bp, Artificial Sequence
  Synthetic oligonucleotide; TTA chr11 5240247 5240268 5240264 5240269 +
ttctgctttgtgggttattagt

SEQ ID NO: 86984 - DNA, 22 bp, Artificial Sequence
  Synthetic oligonucleotide; TTC chr11 5240250 5240271 5240267 5240272 +
tgctttgtgggttattagtggg

SEQ ID NO: 86985 - DNA, 22 bp, Artificial Sequence
  Synthetic oligonucleotide; CTG chr11 5240252 5240273 5240269 5240274 +
ctttgtgggttattagtgggga

SEQ ID NO: 86986 - DNA, 22 bp, Artificial Sequence
  Synthetic oligonucleotide; CTT chr11 5240255 5240276 5240272 5240277 +
tgtgggttattagtggggactc

SEQ ID NO: 86987 - DNA, 22 bp, Artificial Sequence
  Synthetic oligonucleotide; TTT chr11 5240256 5240277 5240273 5240278 +
gtgggttattagtggggactca

SEQ ID NO: 86988 - DNA, 22 bp, Artificial Sequence
  Synthetic oligonucleotide; TTG chr11 5240257 5240278 5240274 5240279 +
tgggttattagtggggactcaa

SEQ ID NO: 86989 - DNA, 22 bp, Artificial Sequence
  Synthetic oligonucleotide; TTA chr11 5240264 5240285 5240281 5240286 +
ttagtggggactcaaaaatatg

SEQ ID NO: 86990 - DNA, 22 bp, Artificial Sequence
  Synthetic oligonucleotide; TTA chr11 5240267 5240288 5240284 5240289 +
gtggggactcaaaaatatgaca

SEQ ID NO: 86991 - DNA, 22 bp, Artificial Sequence
  Synthetic oligonucleotide; CTC chr11 5240277 5240298 5240294 5240299 +
aaaaatatgacaaaggaatttc

SEQ ID NO: 86992 - DNA, 22 bp, Artificial Sequence
  Synthetic oligonucleotide; TTT chr11 5240298 5240319 5240315 5240320 +
cagaagctgttagatggtagca

SEQ ID NO: 86993 - DNA, 22 bp, Artificial Sequence
  Synthetic oligonucleotide; TTC chr11 5240299 5240320 5240316 5240321 +
agaagctgttagatggtagcac

SEQ ID NO: 86994 - DNA, 22 bp, Artificial Sequence
  Synthetic oligonucleotide; CTG chr11 5240307 5240328 5240324 5240329 +
ttagatggtagcaccgcctatc

SEQ ID NO: 86995 - DNA, 22 bp, Artificial Sequence
  Synthetic oligonucleotide; TTA chr11 5240310 5240331 5240327 5240332 +
gatggtagcaccgcctatctat

SEQ ID NO: 86996 - DNA, 22 bp, Artificial Sequence
  Synthetic oligonucleotide; CTA chr11 5240327 5240348 5240344 5240349 +
tctatgtgctcccactcaagag

SEQ ID NO: 86997 - DNA, 22 bp, Artificial Sequence
  Synthetic oligonucleotide; CTA chr11 5240331 5240352 5240348 5240353 +
tgtgctcccactcaagagatat

SEQ ID NO: 86998 - DNA, 22 bp, Artificial Sequence
  Synthetic oligonucleotide; CTC chr11 5240338 5240359 5240355 5240360 +
ccactcaagagatatggtgagg

SEQ ID NO: 86999 - DNA, 22 bp, Artificial Sequence
  Synthetic oligonucleotide; CTC chr11 5240344 5240365 5240361 5240366 +
aagagatatggtgaggtgagct

SEQ ID NO: 87000 - DNA, 22 bp, Artificial Sequence
  Synthetic oligonucleotide; CTC chr11 5240367 5240388 5240384 5240389 +
tttggggtggacacatagagga

SEQ ID NO: 87001 - DNA, 22 bp, Artificial Sequence
  Synthetic oligonucleotide; CTT chr11 5240369 5240390 5240386 5240391 +
tggggtggacacatagaggaaa

SEQ ID NO: 87002 - DNA, 22 bp, Artificial Sequence
  Synthetic oligonucleotide; TTT chr11 5240370 5240391 5240387 5240392 +
ggggtggacacatagaggaaat

SEQ ID NO: 87003 - DNA, 22 bp, Artificial Sequence
  Synthetic oligonucleotide; TTG chr11 5240371 5240392 5240388 5240393 +
gggtggacacatagaggaaata

SEQ ID NO: 87004 - DNA, 22 bp, Artificial Sequence
  Synthetic oligonucleotide; CTT chr11 5240396 5240417 5240413 5240418 +
tgagaaagaggttttgggatta

SEQ ID NO: 87005 - DNA, 22 bp, Artificial Sequence
  Synthetic oligonucleotide; TTT chr11 5240397 5240418 5240414 5240419 +
gagaaagaggttttgggattaa

SEQ ID NO: 87006 - DNA, 22 bp, Artificial Sequence
  Synthetic oligonucleotide; TTG chr11 5240398 5240419 5240415 5240420 +
agaaagaggttttgggattaat

SEQ ID NO: 87007 - DNA, 22 bp, Artificial Sequence
  Synthetic oligonucleotide; TTT chr11 5240410 5240431 5240427 5240432 +
tgggattaatgaaactggagaa

SEQ ID NO: 87008 - DNA, 22 bp, Artificial Sequence
  Synthetic oligonucleotide; TTT chr11 5240411 5240432 5240428 5240433 +
gggattaatgaaactggagaag

SEQ ID NO: 87009 - DNA, 22 bp, Artificial Sequence
  Synthetic oligonucleotide; TTG chr11 5240412 5240433 5240429 5240434 +
ggattaatgaaactggagaaga

SEQ ID NO: 87010 - DNA, 22 bp, Artificial Sequence
  Synthetic oligonucleotide; TTA chr11 5240418 5240439 5240435 5240440 +
atgaaactggagaagaaagggt

SEQ ID NO: 87011 - DNA, 22 bp, Artificial Sequence
  Synthetic oligonucleotide; CTG chr11 5240427 5240448 5240444 5240449 +
gagaagaaagggtattatatct

SEQ ID NO: 87012 - DNA, 22 bp, Artificial Sequence
  Synthetic oligonucleotide; TTA chr11 5240444 5240465 5240461 5240466 +
tatcttctaaaacctctttctt

SEQ ID NO: 87013 - DNA, 22 bp, Artificial Sequence
  Synthetic oligonucleotide; CTT chr11 5240450 5240471 5240467 5240472 +
ctaaaacctctttctttgaggt

SEQ ID NO: 87014 - DNA, 22 bp, Artificial Sequence
  Synthetic oligonucleotide; TTC chr11 5240451 5240472 5240468 5240473 +
taaaacctctttctttgaggtt

SEQ ID NO: 87015 - DNA, 22 bp, Artificial Sequence
  Synthetic oligonucleotide; CTA chr11 5240453 5240474 5240470 5240475 +
aaacctctttctttgaggtttt

SEQ ID NO: 87016 - DNA, 22 bp, Artificial Sequence
  Synthetic oligonucleotide; CTC chr11 5240460 5240481 5240477 5240482 +
tttctttgaggttttaggtttg

SEQ ID NO: 87017 - DNA, 22 bp, Artificial Sequence
  Synthetic oligonucleotide; CTT chr11 5240462 5240483 5240479 5240484 +
tctttgaggttttaggtttgag

SEQ ID NO: 87018 - DNA, 22 bp, Artificial Sequence
  Synthetic oligonucleotide; TTT chr11 5240463 5240484 5240480 5240485 +
ctttgaggttttaggtttgagg

SEQ ID NO: 87019 - DNA, 22 bp, Artificial Sequence
  Synthetic oligonucleotide; TTC chr11 5240464 5240485 5240481 5240486 +
tttgaggttttaggtttgaggg

SEQ ID NO: 87020 - DNA, 22 bp, Artificial Sequence
  Synthetic oligonucleotide; CTT chr11 5240466 5240487 5240483 5240488 +
tgaggttttaggtttgagggtg

SEQ ID NO: 87021 - DNA, 22 bp, Artificial Sequence
  Synthetic oligonucleotide; TTT chr11 5240467 5240488 5240484 5240489 +
gaggttttaggtttgagggtgc

SEQ ID NO: 87022 - DNA, 22 bp, Artificial Sequence
  Synthetic oligonucleotide; TTG chr11 5240468 5240489 5240485 5240490 +
aggttttaggtttgagggtgct

SEQ ID NO: 87023 - DNA, 22 bp, Artificial Sequence
  Synthetic oligonucleotide; TTT chr11 5240474 5240495 5240491 5240496 +
taggtttgagggtgctacatac

SEQ ID NO: 87024 - DNA, 22 bp, Artificial Sequence
  Synthetic oligonucleotide; TTT chr11 5240475 5240496 5240492 5240497 +
aggtttgagggtgctacatact

SEQ ID NO: 87025 - DNA, 22 bp, Artificial Sequence
  Synthetic oligonucleotide; TTA chr11 5240476 5240497 5240493 5240498 +
ggtttgagggtgctacatactt

SEQ ID NO: 87026 - DNA, 22 bp, Artificial Sequence
  Synthetic oligonucleotide; TTT chr11 5240481 5240502 5240498 5240503 +
gagggtgctacatacttcctaa

SEQ ID NO: 87027 - DNA, 22 bp, Artificial Sequence
  Synthetic oligonucleotide; TTG chr11 5240482 5240503 5240499 5240504 +
agggtgctacatacttcctaag

SEQ ID NO: 87028 - DNA, 22 bp, Artificial Sequence
  Synthetic oligonucleotide; CTA chr11 5240491 5240512 5240508 5240513 +
catacttcctaagggtcttggg

SEQ ID NO: 87029 - DNA, 22 bp, Artificial Sequence
  Synthetic oligonucleotide; CTT chr11 5240498 5240519 5240515 5240520 +
cctaagggtcttgggtacagga

SEQ ID NO: 87030 - DNA, 22 bp, Artificial Sequence
  Synthetic oligonucleotide; TTC chr11 5240499 5240520 5240516 5240521 +
ctaagggtcttgggtacaggag

SEQ ID NO: 87031 - DNA, 22 bp, Artificial Sequence
  Synthetic oligonucleotide; CTA chr11 5240502 5240523 5240519 5240524 +
agggtcttgggtacaggagttt

SEQ ID NO: 87032 - DNA, 22 bp, Artificial Sequence
  Synthetic oligonucleotide; CTT chr11 5240510 5240531 5240527 5240532 +
gggtacaggagtttgaagtgat

SEQ ID NO: 87033 - DNA, 22 bp, Artificial Sequence
  Synthetic oligonucleotide; TTG chr11 5240511 5240532 5240528 5240533 +
ggtacaggagtttgaagtgatt

SEQ ID NO: 87034 - DNA, 22 bp, Artificial Sequence
  Synthetic oligonucleotide; TTT chr11 5240524 5240545 5240541 5240546 +
gaagtgattgccacagaatggc

SEQ ID NO: 87035 - DNA, 22 bp, Artificial Sequence
  Synthetic oligonucleotide; TTG chr11 5240525 5240546 5240542 5240547 +
aagtgattgccacagaatggct

SEQ ID NO: 87036 - DNA, 22 bp, Artificial Sequence
  Synthetic oligonucleotide; TTG chr11 5240534 5240555 5240551 5240556 +
ccacagaatggctacgttcatt

SEQ ID NO: 87037 - DNA, 22 bp, Artificial Sequence
  Synthetic oligonucleotide; CTA chr11 5240548 5240569 5240565 5240570 +
cgttcattgccagatccaaaca

SEQ ID NO: 87038 - DNA, 22 bp, Artificial Sequence
  Synthetic oligonucleotide; TTC chr11 5240553 5240574 5240570 5240575 +
attgccagatccaaacaggggg

SEQ ID NO: 87039 - DNA, 22 bp, Artificial Sequence
  Synthetic oligonucleotide; TTG chr11 5240557 5240578 5240574 5240579 +
ccagatccaaacagggggcttg

SEQ ID NO: 87040 - DNA, 22 bp, Artificial Sequence
  Synthetic oligonucleotide; CTT chr11 5240578 5240599 5240595 5240600 +
gtaggcatttgctgttctgtca

SEQ ID NO: 87041 - DNA, 22 bp, Artificial Sequence
  Synthetic oligonucleotide; TTG chr11 5240579 5240600 5240596 5240601 +
taggcatttgctgttctgtcaa

SEQ ID NO: 87042 - DNA, 22 bp, Artificial Sequence
  Synthetic oligonucleotide; TTT chr11 5240588 5240609 5240605 5240610 +
gctgttctgtcaataaatttcc

SEQ ID NO: 87043 - DNA, 22 bp, Artificial Sequence
  Synthetic oligonucleotide; TTG chr11 5240589 5240610 5240606 5240611 +
ctgttctgtcaataaatttcct

SEQ ID NO: 87044 - DNA, 22 bp, Artificial Sequence
  Synthetic oligonucleotide; CTG chr11 5240592 5240613 5240609 5240614 +
ttctgtcaataaatttccttct

SEQ ID NO: 87045 - DNA, 22 bp, Artificial Sequence
  Synthetic oligonucleotide; TTC chr11 5240595 5240616 5240612 5240617 +
tgtcaataaatttccttctttt

SEQ ID NO: 87046 - DNA, 22 bp, Artificial Sequence
  Synthetic oligonucleotide; CTG chr11 5240597 5240618 5240614 5240619 +
tcaataaatttccttcttttca

SEQ ID NO: 87047 - DNA, 22 bp, Artificial Sequence
  Synthetic oligonucleotide; TTT chr11 5240608 5240629 5240625 5240630 +
ccttcttttcattcacagacag

SEQ ID NO: 87048 - DNA, 22 bp, Artificial Sequence
  Synthetic oligonucleotide; TTC chr11 5240609 5240630 5240626 5240631 +
cttcttttcattcacagacagg

SEQ ID NO: 87049 - DNA, 22 bp, Artificial Sequence
  Synthetic oligonucleotide; CTT chr11 5240612 5240633 5240629 5240634 +
cttttcattcacagacagggat

SEQ ID NO: 87050 - DNA, 22 bp, Artificial Sequence
  Synthetic oligonucleotide; TTC chr11 5240613 5240634 5240630 5240635 +
ttttcattcacagacagggatt

SEQ ID NO: 87051 - DNA, 22 bp, Artificial Sequence
  Synthetic oligonucleotide; CTT chr11 5240615 5240636 5240632 5240637 +
ttcattcacagacagggatttt

SEQ ID NO: 87052 - DNA, 22 bp, Artificial Sequence
  Synthetic oligonucleotide; TTT chr11 5240616 5240637 5240633 5240638 +
tcattcacagacagggatttta

SEQ ID NO: 87053 - DNA, 22 bp, Artificial Sequence
  Synthetic oligonucleotide; TTT chr11 5240617 5240638 5240634 5240639 +
cattcacagacagggattttag

SEQ ID NO: 87054 - DNA, 22 bp, Artificial Sequence
  Synthetic oligonucleotide; TTC chr11 5240618 5240639 5240635 5240640 +
attcacagacagggattttagc

SEQ ID NO: 87055 - DNA, 22 bp, Artificial Sequence
  Synthetic oligonucleotide; TTC chr11 5240622 5240643 5240639 5240644 +
acagacagggattttagctgtc

SEQ ID NO: 87056 - DNA, 22 bp, Artificial Sequence
  Synthetic oligonucleotide; TTT chr11 5240636 5240657 5240653 5240658 +
tagctgtcatctctgactctct

SEQ ID NO: 87057 - DNA, 22 bp, Artificial Sequence
  Synthetic oligonucleotide; TTT chr11 5240637 5240658 5240654 5240659 +
agctgtcatctctgactctctg

SEQ ID NO: 87058 - DNA, 22 bp, Artificial Sequence
  Synthetic oligonucleotide; TTA chr11 5240638 5240659 5240655 5240660 +
gctgtcatctctgactctctgt

SEQ ID NO: 87059 - DNA, 22 bp, Artificial Sequence
  Synthetic oligonucleotide; CTG chr11 5240642 5240663 5240659 5240664 +
tcatctctgactctctgtttca

SEQ ID NO: 87060 - DNA, 22 bp, Artificial Sequence
  Synthetic oligonucleotide; CTC chr11 5240649 5240670 5240666 5240671 +
tgactctctgtttcacaatgtt

SEQ ID NO: 87061 - DNA, 22 bp, Artificial Sequence
  Synthetic oligonucleotide; CTG chr11 5240651 5240672 5240668 5240673 +
actctctgtttcacaatgtttt

SEQ ID NO: 87062 - DNA, 22 bp, Artificial Sequence
  Synthetic oligonucleotide; CTC chr11 5240655 5240676 5240672 5240677 +
tctgtttcacaatgttttccag

SEQ ID NO: 87063 - DNA, 22 bp, Artificial Sequence
  Synthetic oligonucleotide; CTC chr11 5240657 5240678 5240674 5240679 +
tgtttcacaatgttttccagtt

SEQ ID NO: 87064 - DNA, 22 bp, Artificial Sequence
  Synthetic oligonucleotide; CTG chr11 5240659 5240680 5240676 5240681 +
tttcacaatgttttccagttct

SEQ ID NO: 87065 - DNA, 22 bp, Artificial Sequence
  Synthetic oligonucleotide; TTT chr11 5240662 5240683 5240679 5240684 +
cacaatgttttccagttctgtg

SEQ ID NO: 87066 - DNA, 22 bp, Artificial Sequence
  Synthetic oligonucleotide; TTC chr11 5240663 5240684 5240680 5240685 +
acaatgttttccagttctgtgc

SEQ ID NO: 87067 - DNA, 22 bp, Artificial Sequence
  Synthetic oligonucleotide; TTT chr11 5240672 5240693 5240689 5240694 +
tccagttctgtgcaatcactgc

SEQ ID NO: 87068 - DNA, 22 bp, Artificial Sequence
  Synthetic oligonucleotide; TTT chr11 5240673 5240694 5240690 5240695 +
ccagttctgtgcaatcactgcc

SEQ ID NO: 87069 - DNA, 22 bp, Artificial Sequence
  Synthetic oligonucleotide; TTC chr11 5240674 5240695 5240691 5240696 +
cagttctgtgcaatcactgcca

SEQ ID NO: 87070 - DNA, 22 bp, Artificial Sequence
  Synthetic oligonucleotide; TTC chr11 5240680 5240701 5240697 5240702 +
tgtgcaatcactgccacaatgg

SEQ ID NO: 87071 - DNA, 22 bp, Artificial Sequence
  Synthetic oligonucleotide; CTG chr11 5240682 5240703 5240699 5240704 +
tgcaatcactgccacaatggtc

SEQ ID NO: 87072 - DNA, 22 bp, Artificial Sequence
  Synthetic oligonucleotide; CTG chr11 5240693 5240714 5240710 5240715 +
ccacaatggtctcttactcgat

SEQ ID NO: 87073 - DNA, 22 bp, Artificial Sequence
  Synthetic oligonucleotide; CTC chr11 5240706 5240727 5240723 5240728 +
ttactcgattttttttcttaac

SEQ ID NO: 87074 - DNA, 22 bp, Artificial Sequence
  Synthetic oligonucleotide; CTT chr11 5240708 5240729 5240725 5240730 +
actcgattttttttcttaactt

SEQ ID NO: 87075 - DNA, 22 bp, Artificial Sequence
  Synthetic oligonucleotide; TTA chr11 5240709 5240730 5240726 5240731 +
ctcgattttttttcttaacttc

SEQ ID NO: 87076 - DNA, 22 bp, Artificial Sequence
  Synthetic oligonucleotide; CTC chr11 5240712 5240733 5240729 5240734 +
gattttttttcttaacttcatt

SEQ ID NO: 87077 - DNA, 22 bp, Artificial Sequence
  Synthetic oligonucleotide; TTT chr11 5240717 5240738 5240734 5240739 +
tttttcttaacttcattgtttc

SEQ ID NO: 87078 - DNA, 22 bp, Artificial Sequence
  Synthetic oligonucleotide; TTT chr11 5240718 5240739 5240735 5240740 +
ttttcttaacttcattgtttcc

SEQ ID NO: 87079 - DNA, 22 bp, Artificial Sequence
  Synthetic oligonucleotide; TTT chr11 5240719 5240740 5240736 5240741 +
tttcttaacttcattgtttcca

SEQ ID NO: 87080 - DNA, 22 bp, Artificial Sequence
  Synthetic oligonucleotide; TTT chr11 5240720 5240741 5240737 5240742 +
ttcttaacttcattgtttccat

SEQ ID NO: 87081 - DNA, 22 bp, Artificial Sequence
  Synthetic oligonucleotide; TTT chr11 5240721 5240742 5240738 5240743 +
tcttaacttcattgtttccatc

SEQ ID NO: 87082 - DNA, 22 bp, Artificial Sequence
  Synthetic oligonucleotide; TTT chr11 5240722 5240743 5240739 5240744 +
cttaacttcattgtttccatca

SEQ ID NO: 87083 - DNA, 22 bp, Artificial Sequence
  Synthetic oligonucleotide; TTC chr11 5240723 5240744 5240740 5240745 +
ttaacttcattgtttccatcaa

SEQ ID NO: 87084 - DNA, 22 bp, Artificial Sequence
  Synthetic oligonucleotide; CTT chr11 5240725 5240746 5240742 5240747 +
aacttcattgtttccatcaact

SEQ ID NO: 87085 - DNA, 22 bp, Artificial Sequence
  Synthetic oligonucleotide; TTA chr11 5240726 5240747 5240743 5240748 +
acttcattgtttccatcaactt

SEQ ID NO: 87086 - DNA, 22 bp, Artificial Sequence
  Synthetic oligonucleotide; CTT chr11 5240730 5240751 5240747 5240752 +
cattgtttccatcaacttcagt

SEQ ID NO: 87087 - DNA, 22 bp, Artificial Sequence
  Synthetic oligonucleotide; TTC chr11 5240731 5240752 5240748 5240753 +
attgtttccatcaacttcagtt

SEQ ID NO: 87088 - DNA, 22 bp, Artificial Sequence
  Synthetic oligonucleotide; TTG chr11 5240735 5240756 5240752 5240757 +
tttccatcaacttcagttcttt

SEQ ID NO: 87089 - DNA, 22 bp, Artificial Sequence
  Synthetic oligonucleotide; TTT chr11 5240738 5240759 5240755 5240760 +
ccatcaacttcagttctttatc

SEQ ID NO: 87090 - DNA, 22 bp, Artificial Sequence
  Synthetic oligonucleotide; TTC chr11 5240739 5240760 5240756 5240761 +
catcaacttcagttctttatcc

SEQ ID NO: 87091 - DNA, 22 bp, Artificial Sequence
  Synthetic oligonucleotide; CTT chr11 5240748 5240769 5240765 5240770 +
cagttctttatccatcacctca

SEQ ID NO: 87092 - DNA, 22 bp, Artificial Sequence
  Synthetic oligonucleotide; TTC chr11 5240749 5240770 5240766 5240771 +
agttctttatccatcacctcaa

SEQ ID NO: 87093 - DNA, 22 bp, Artificial Sequence
  Synthetic oligonucleotide; TTC chr11 5240754 5240775 5240771 5240776 +
tttatccatcacctcaatataa

SEQ ID NO: 87094 - DNA, 22 bp, Artificial Sequence
  Synthetic oligonucleotide; CTT chr11 5240756 5240777 5240773 5240778 +
tatccatcacctcaatataatt

SEQ ID NO: 87095 - DNA, 22 bp, Artificial Sequence
  Synthetic oligonucleotide; TTT chr11 5240757 5240778 5240774 5240779 +
atccatcacctcaatataatta

SEQ ID NO: 87096 - DNA, 22 bp, Artificial Sequence
  Synthetic oligonucleotide; TTA chr11 5240758 5240779 5240775 5240780 +
tccatcacctcaatataattac

SEQ ID NO: 87097 - DNA, 22 bp, Artificial Sequence
  Synthetic oligonucleotide; CTC chr11 5240769 5240790 5240786 5240791 +
aatataattacagcaagctcct

SEQ ID NO: 87098 - DNA, 22 bp, Artificial Sequence
  Synthetic oligonucleotide; TTA chr11 5240779 5240800 5240796 5240801 +
cagcaagctcctctgactatac

SEQ ID NO: 87099 - DNA, 22 bp, Artificial Sequence
  Synthetic oligonucleotide; CTC chr11 5240789 5240810 5240806 5240811 +
ctctgactatacccaagttaga

SEQ ID NO: 87100 - DNA, 22 bp, Artificial Sequence
  Synthetic oligonucleotide; CTC chr11 5240792 5240813 5240809 5240814 +
tgactatacccaagttagactt

SEQ ID NO: 87101 - DNA, 22 bp, Artificial Sequence
  Synthetic oligonucleotide; CTG chr11 5240794 5240815 5240811 5240816 +
actatacccaagttagactttg

SEQ ID NO: 87102 - DNA, 22 bp, Artificial Sequence
  Synthetic oligonucleotide; CTA chr11 5240798 5240819 5240815 5240820 +
tacccaagttagactttgtcta

SEQ ID NO: 87103 - DNA, 22 bp, Artificial Sequence
  Synthetic oligonucleotide; TTA chr11 5240809 5240830 5240826 5240831 +
gactttgtctaatcagttctat

SEQ ID NO: 87104 - DNA, 22 bp, Artificial Sequence
  Synthetic oligonucleotide; CTT chr11 5240814 5240835 5240831 5240836 +
tgtctaatcagttctatatata

SEQ ID NO: 87105 - DNA, 22 bp, Artificial Sequence
  Synthetic oligonucleotide; TTT chr11 5240815 5240836 5240832 5240837 +
gtctaatcagttctatatatat

SEQ ID NO: 87106 - DNA, 22 bp, Artificial Sequence
  Synthetic oligonucleotide; TTG chr11 5240816 5240837 5240833 5240838 +
tctaatcagttctatatatata

SEQ ID NO: 87107 - DNA, 22 bp, Artificial Sequence
  Synthetic oligonucleotide; CTA chr11 5240820 5240841 5240837 5240842 +
atcagttctatatatatatata

SEQ ID NO: 87108 - DNA, 22 bp, Artificial Sequence
  Synthetic oligonucleotide; TTC chr11 5240828 5240849 5240845 5240850 +
tatatatatatatacatgtgaa

SEQ ID NO: 87109 - DNA, 22 bp, Artificial Sequence
  Synthetic oligonucleotide; CTA chr11 5240830 5240851 5240847 5240852 +
tatatatatatacatgtgaatc

SEQ ID NO: 87110 - DNA, 22 bp, Artificial Sequence
  Synthetic oligonucleotide; TTT chr11 5240857 5240878 5240874 5240879 +
tctacgtttccctatttattat

SEQ ID NO: 87111 - DNA, 22 bp, Artificial Sequence
  Synthetic oligonucleotide; TTT chr11 5240858 5240879 5240875 5240880 +
ctacgtttccctatttattatg

SEQ ID NO: 87112 - DNA, 22 bp, Artificial Sequence
  Synthetic oligonucleotide; TTC chr11 5240859 5240880 5240876 5240881 +
tacgtttccctatttattatgt

SEQ ID NO: 87113 - DNA, 22 bp, Artificial Sequence
  Synthetic oligonucleotide; CTA chr11 5240861 5240882 5240878 5240883 +
cgtttccctatttattatgtca

SEQ ID NO: 87114 - DNA, 22 bp, Artificial Sequence
  Synthetic oligonucleotide; TTT chr11 5240866 5240887 5240883 5240888 +
ccctatttattatgtcactctc

SEQ ID NO: 87115 - DNA, 22 bp, Artificial Sequence
  Synthetic oligonucleotide; TTC chr11 5240867 5240888 5240884 5240889 +
cctatttattatgtcactctca

SEQ ID NO: 87116 - DNA, 22 bp, Artificial Sequence
  Synthetic oligonucleotide; CTA chr11 5240871 5240892 5240888 5240893 +
tttattatgtcactctcatatg

SEQ ID NO: 87117 - DNA, 22 bp, Artificial Sequence
  Synthetic oligonucleotide; TTT chr11 5240874 5240895 5240891 5240896 +
attatgtcactctcatatgcaa

SEQ ID NO: 87118 - DNA, 22 bp, Artificial Sequence
  Synthetic oligonucleotide; TTA chr11 5240875 5240896 5240892 5240897 +
ttatgtcactctcatatgcaag

SEQ ID NO: 87119 - DNA, 22 bp, Artificial Sequence
  Synthetic oligonucleotide; TTA chr11 5240878 5240899 5240895 5240900 +
tgtcactctcatatgcaagaaa

SEQ ID NO: 87120 - DNA, 22 bp, Artificial Sequence
  Synthetic oligonucleotide; CTC chr11 5240886 5240907 5240903 5240908 +
tcatatgcaagaaacttcagtg

SEQ ID NO: 87121 - DNA, 22 bp, Artificial Sequence
  Synthetic oligonucleotide; CTC chr11 5240888 5240909 5240905 5240910 +
atatgcaagaaacttcagtgat

SEQ ID NO: 87122 - DNA, 22 bp, Artificial Sequence
  Synthetic oligonucleotide; CTT chr11 5240903 5240924 5240920 5240925 +
cagtgatttttgctcaaaacga

SEQ ID NO: 87123 - DNA, 22 bp, Artificial Sequence
  Synthetic oligonucleotide; TTC chr11 5240904 5240925 5240921 5240926 +
agtgatttttgctcaaaacgat

SEQ ID NO: 87124 - DNA, 22 bp, Artificial Sequence
  Synthetic oligonucleotide; TTT chr11 5240912 5240933 5240929 5240934 +
ttgctcaaaacgatagctattt

SEQ ID NO: 87125 - DNA, 22 bp, Artificial Sequence
  Synthetic oligonucleotide; TTT chr11 5240913 5240934 5240930 5240935 +
tgctcaaaacgatagctatttt

SEQ ID NO: 87126 - DNA, 22 bp, Artificial Sequence
  Synthetic oligonucleotide; TTT chr11 5240914 5240935 5240931 5240936 +
gctcaaaacgatagctattttt

SEQ ID NO: 87127 - DNA, 22 bp, Artificial Sequence
  Synthetic oligonucleotide; TTG chr11 5240915 5240936 5240932 5240937 +
ctcaaaacgatagctatttttc

SEQ ID NO: 87128 - DNA, 22 bp, Artificial Sequence
  Synthetic oligonucleotide; CTC chr11 5240918 5240939 5240935 5240940 +
aaaacgatagctatttttctta

SEQ ID NO: 87129 - DNA, 22 bp, Artificial Sequence
  Synthetic oligonucleotide; CTA chr11 5240931 5240952 5240948 5240953 +
tttttcttacttcatctggtct

SEQ ID NO: 87130 - DNA, 22 bp, Artificial Sequence
  Synthetic oligonucleotide; TTT chr11 5240934 5240955 5240951 5240956 +
ttcttacttcatctggtctctg

SEQ ID NO: 87131 - DNA, 22 bp, Artificial Sequence
  Synthetic oligonucleotide; TTT chr11 5240935 5240956 5240952 5240957 +
tcttacttcatctggtctctgc

SEQ ID NO: 87132 - DNA, 22 bp, Artificial Sequence
  Synthetic oligonucleotide; TTT chr11 5240936 5240957 5240953 5240958 +
cttacttcatctggtctctgca

SEQ ID NO: 87133 - DNA, 22 bp, Artificial Sequence
  Synthetic oligonucleotide; TTC chr11 5240937 5240958 5240954 5240959 +
ttacttcatctggtctctgcat

SEQ ID NO: 87134 - DNA, 22 bp, Artificial Sequence
  Synthetic oligonucleotide; CTT chr11 5240939 5240960 5240956 5240961 +
acttcatctggtctctgcatcc

SEQ ID NO: 87135 - DNA, 22 bp, Artificial Sequence
  Synthetic oligonucleotide; TTA chr11 5240940 5240961 5240957 5240962 +
cttcatctggtctctgcatcca

SEQ ID NO: 87136 - DNA, 22 bp, Artificial Sequence
  Synthetic oligonucleotide; CTT chr11 5240943 5240964 5240960 5240965 +
catctggtctctgcatccagtt

SEQ ID NO: 87137 - DNA, 22 bp, Artificial Sequence
  Synthetic oligonucleotide; TTC chr11 5240944 5240965 5240961 5240966 +
atctggtctctgcatccagttt

SEQ ID NO: 87138 - DNA, 22 bp, Artificial Sequence
  Synthetic oligonucleotide; CTG chr11 5240949 5240970 5240966 5240971 +
gtctctgcatccagtttcccta

SEQ ID NO: 87139 - DNA, 22 bp, Artificial Sequence
  Synthetic oligonucleotide; CTC chr11 5240954 5240975 5240971 5240976 +
tgcatccagtttccctaatttt

SEQ ID NO: 87140 - DNA, 22 bp, Artificial Sequence
  Synthetic oligonucleotide; CTG chr11 5240956 5240977 5240973 5240978 +
catccagtttccctaattttat

SEQ ID NO: 87141 - DNA, 22 bp, Artificial Sequence
  Synthetic oligonucleotide; TTT chr11 5240966 5240987 5240983 5240988 +
ccctaattttatatcatcctgc

SEQ ID NO: 87142 - DNA, 22 bp, Artificial Sequence
  Synthetic oligonucleotide; TTC chr11 5240967 5240988 5240984 5240989 +
cctaattttatatcatcctgcc

SEQ ID NO: 87143 - DNA, 22 bp, Artificial Sequence
  Synthetic oligonucleotide; CTA chr11 5240971 5240992 5240988 5240993 +
attttatatcatcctgcctctt

SEQ ID NO: 87144 - DNA, 22 bp, Artificial Sequence
  Synthetic oligonucleotide; TTT chr11 5240975 5240996 5240992 5240997 +
tatatcatcctgcctcttttaa

SEQ ID NO: 87145 - DNA, 22 bp, Artificial Sequence
  Synthetic oligonucleotide; TTT chr11 5240976 5240997 5240993 5240998 +
atatcatcctgcctcttttaaa

SEQ ID NO: 87146 - DNA, 22 bp, Artificial Sequence
  Synthetic oligonucleotide; TTA chr11 5240977 5240998 5240994 5240999 +
tatcatcctgcctcttttaaat

SEQ ID NO: 87147 - DNA, 22 bp, Artificial Sequence
  Synthetic oligonucleotide; CTG chr11 5240987 5241008 5241004 5241009 +
cctcttttaaatgtccatattc

SEQ ID NO: 87148 - DNA, 22 bp, Artificial Sequence
  Synthetic oligonucleotide; CTC chr11 5240991 5241012 5241008 5241013 +
ttttaaatgtccatattctcct

SEQ ID NO: 87149 - DNA, 22 bp, Artificial Sequence
  Synthetic oligonucleotide; CTT chr11 5240993 5241014 5241010 5241015 +
ttaaatgtccatattctcctct

SEQ ID NO: 87150 - DNA, 22 bp, Artificial Sequence
  Synthetic oligonucleotide; TTT chr11 5240994 5241015 5241011 5241016 +
taaatgtccatattctcctcta

SEQ ID NO: 87151 - DNA, 22 bp, Artificial Sequence
  Synthetic oligonucleotide; TTT chr11 5240995 5241016 5241012 5241017 +
aaatgtccatattctcctctat

SEQ ID NO: 87152 - DNA, 22 bp, Artificial Sequence
  Synthetic oligonucleotide; TTA chr11 5240996 5241017 5241013 5241018 +
aatgtccatattctcctctatc

SEQ ID NO: 87153 - DNA, 22 bp, Artificial Sequence
  Synthetic oligonucleotide; TTC chr11 5241009 5241030 5241026 5241031 +
tcctctatcaacttgacttaac

SEQ ID NO: 87154 - DNA, 22 bp, Artificial Sequence
  Synthetic oligonucleotide; CTC chr11 5241011 5241032 5241028 5241033 +
ctctatcaacttgacttaacgt

SEQ ID NO: 87155 - DNA, 22 bp, Artificial Sequence
  Synthetic oligonucleotide; CTC chr11 5241014 5241035 5241031 5241036 +
tatcaacttgacttaacgtgct

SEQ ID NO: 87156 - DNA, 22 bp, Artificial Sequence
  Synthetic oligonucleotide; CTA chr11 5241016 5241037 5241033 5241038 +
tcaacttgacttaacgtgctgt

SEQ ID NO: 87157 - DNA, 22 bp, Artificial Sequence
  Synthetic oligonucleotide; CTT chr11 5241023 5241044 5241040 5241045 +
gacttaacgtgctgtttcctaa

SEQ ID NO: 87158 - DNA, 22 bp, Artificial Sequence
  Synthetic oligonucleotide; TTG chr11 5241024 5241045 5241041 5241046 +
acttaacgtgctgtttcctaaa

SEQ ID NO: 87159 - DNA, 22 bp, Artificial Sequence
  Synthetic oligonucleotide; CTT chr11 5241028 5241049 5241045 5241050 +
aacgtgctgtttcctaaatctc

SEQ ID NO: 87160 - DNA, 22 bp, Artificial Sequence
  Synthetic oligonucleotide; TTA chr11 5241029 5241050 5241046 5241051 +
acgtgctgtttcctaaatctca

SEQ ID NO: 87161 - DNA, 22 bp, Artificial Sequence
  Synthetic oligonucleotide; CTG chr11 5241037 5241058 5241054 5241059 +
tttcctaaatctcagcctttta

SEQ ID NO: 87162 - DNA, 22 bp, Artificial Sequence
  Synthetic oligonucleotide; TTT chr11 5241040 5241061 5241057 5241062 +
cctaaatctcagccttttaatc

SEQ ID NO: 87163 - DNA, 22 bp, Artificial Sequence
  Synthetic oligonucleotide; TTC chr11 5241041 5241062 5241058 5241063 +
ctaaatctcagccttttaatct

SEQ ID NO: 87164 - DNA, 22 bp, Artificial Sequence
  Synthetic oligonucleotide; CTA chr11 5241044 5241065 5241061 5241066 +
aatctcagccttttaatctgct

SEQ ID NO: 87165 - DNA, 22 bp, Artificial Sequence
  Synthetic oligonucleotide; CTC chr11 5241050 5241071 5241067 5241072 +
agccttttaatctgctgtttgc

SEQ ID NO: 87166 - DNA, 22 bp, Artificial Sequence
  Synthetic oligonucleotide; CTT chr11 5241056 5241077 5241073 5241078 +
ttaatctgctgtttgctcacat

SEQ ID NO: 87167 - DNA, 22 bp, Artificial Sequence
  Synthetic oligonucleotide; TTT chr11 5241057 5241078 5241074 5241079 +
taatctgctgtttgctcacata

SEQ ID NO: 87168 - DNA, 22 bp, Artificial Sequence
  Synthetic oligonucleotide; TTT chr11 5241058 5241079 5241075 5241080 +
aatctgctgtttgctcacataa

SEQ ID NO: 87169 - DNA, 22 bp, Artificial Sequence
  Synthetic oligonucleotide; TTA chr11 5241059 5241080 5241076 5241081 +
atctgctgtttgctcacataaa

SEQ ID NO: 87170 - DNA, 22 bp, Artificial Sequence
  Synthetic oligonucleotide; CTG chr11 5241064 5241085 5241081 5241086 +
ctgtttgctcacataaacaaaa

SEQ ID NO: 87171 - DNA, 22 bp, Artificial Sequence
  Synthetic oligonucleotide; CTG chr11 5241067 5241088 5241084 5241089 +
tttgctcacataaacaaaaatc

SEQ ID NO: 87172 - DNA, 22 bp, Artificial Sequence
  Synthetic oligonucleotide; TTT chr11 5241070 5241091 5241087 5241092 +
gctcacataaacaaaaatcagt

SEQ ID NO: 87173 - DNA, 22 bp, Artificial Sequence
  Synthetic oligonucleotide; TTG chr11 5241071 5241092 5241088 5241093 +
ctcacataaacaaaaatcagtg

SEQ ID NO: 87174 - DNA, 22 bp, Artificial Sequence
  Synthetic oligonucleotide; CTC chr11 5241074 5241095 5241091 5241096 +
acataaacaaaaatcagtggtt

SEQ ID NO: 87175 - DNA, 22 bp, Artificial Sequence
  Synthetic oligonucleotide; TTT chr11 5241097 5241118 5241114 5241119 +
tcaatattgattgctaataatt

SEQ ID NO: 87176 - DNA, 22 bp, Artificial Sequence
  Synthetic oligonucleotide; TTT chr11 5241098 5241119 5241115 5241120 +
caatattgattgctaataattt

SEQ ID NO: 87177 - DNA, 22 bp, Artificial Sequence
  Synthetic oligonucleotide; TTC chr11 5241099 5241120 5241116 5241121 +
aatattgattgctaataatttt

SEQ ID NO: 87178 - DNA, 22 bp, Artificial Sequence
  Synthetic oligonucleotide; TTG chr11 5241106 5241127 5241123 5241128 +
attgctaataattttttattca

SEQ ID NO: 87179 - DNA, 22 bp, Artificial Sequence
  Synthetic oligonucleotide; TTG chr11 5241110 5241131 5241127 5241132 +
ctaataattttttattcataaa

SEQ ID NO: 87180 - DNA, 22 bp, Artificial Sequence
  Synthetic oligonucleotide; CTA chr11 5241113 5241134 5241130 5241135 +
ataattttttattcataaaaat

SEQ ID NO: 87181 - DNA, 22 bp, Artificial Sequence
  Synthetic oligonucleotide; TTT chr11 5241120 5241141 5241137 5241142 +
tttattcataaaaattgtatat

SEQ ID NO: 87182 - DNA, 22 bp, Artificial Sequence
  Synthetic oligonucleotide; TTT chr11 5241121 5241142 5241138 5241143 +
ttattcataaaaattgtatata

SEQ ID NO: 87183 - DNA, 22 bp, Artificial Sequence
  Synthetic oligonucleotide; TTT chr11 5241122 5241143 5241139 5241144 +
tattcataaaaattgtatatat

SEQ ID NO: 87184 - DNA, 22 bp, Artificial Sequence
  Synthetic oligonucleotide; TTT chr11 5241123 5241144 5241140 5241145 +
attcataaaaattgtatatatt

SEQ ID NO: 87185 - DNA, 22 bp, Artificial Sequence
  Synthetic oligonucleotide; TTA chr11 5241124 5241145 5241141 5241146 +
ttcataaaaattgtatatattt

SEQ ID NO: 87186 - DNA, 22 bp, Artificial Sequence
  Synthetic oligonucleotide; TTC chr11 5241127 5241148 5241144 5241149 +
ataaaaattgtatatatttatg

SEQ ID NO: 87187 - DNA, 22 bp, Artificial Sequence
  Synthetic oligonucleotide; TTG chr11 5241137 5241158 5241154 5241159 +
tatatatttatgaatgcacaca

SEQ ID NO: 87188 - DNA, 22 bp, Artificial Sequence
  Synthetic oligonucleotide; TTT chr11 5241146 5241167 5241163 5241168 +
atgaatgcacacatgtgtgtgt

SEQ ID NO: 87189 - DNA, 22 bp, Artificial Sequence
  Synthetic oligonucleotide; TTA chr11 5241147 5241168 5241164 5241169 +
tgaatgcacacatgtgtgtgta

SEQ ID NO: 87190 - DNA, 22 bp, Artificial Sequence
  Synthetic oligonucleotide; CTA chr11 5241197 5241218 5241214 5241219 +
ccactaaaaacaataaaacttg

SEQ ID NO: 87191 - DNA, 22 bp, Artificial Sequence
  Synthetic oligonucleotide; CTA chr11 5241203 5241224 5241220 5241225 +
aaaacaataaaacttgtacata

SEQ ID NO: 87192 - DNA, 22 bp, Artificial Sequence
  Synthetic oligonucleotide; CTT chr11 5241218 5241239 5241235 5241240 +
gtacatatttatagaaacagag

SEQ ID NO: 87193 - DNA, 22 bp, Artificial Sequence
  Synthetic oligonucleotide; TTG chr11 5241219 5241240 5241236 5241241 +
tacatatttatagaaacagaga

SEQ ID NO: 87194 - DNA, 22 bp, Artificial Sequence
  Synthetic oligonucleotide; TTT chr11 5241228 5241249 5241245 5241250 +
atagaaacagagagctgaacaa

SEQ ID NO: 87195 - DNA, 22 bp, Artificial Sequence
  Synthetic oligonucleotide; TTA chr11 5241229 5241250 5241246 5241251 +
tagaaacagagagctgaacaaa

SEQ ID NO: 87196 - DNA, 22 bp, Artificial Sequence
  Synthetic oligonucleotide; CTG chr11 5241245 5241266 5241262 5241267 +
aacaaagagatttattatttat

SEQ ID NO: 87197 - DNA, 22 bp, Artificial Sequence
  Synthetic oligonucleotide; TTT chr11 5241258 5241279 5241275 5241280 +
attatttattgggtagtgtgat

SEQ ID NO: 87198 - DNA, 22 bp, Artificial Sequence
  Synthetic oligonucleotide; TTA chr11 5241259 5241280 5241276 5241281 +
ttatttattgggtagtgtgata

SEQ ID NO: 87199 - DNA, 22 bp, Artificial Sequence
  Synthetic oligonucleotide; TTA chr11 5241262 5241283 5241279 5241284 +
tttattgggtagtgtgataaag

SEQ ID NO: 87200 - DNA, 22 bp, Artificial Sequence
  Synthetic oligonucleotide; TTT chr11 5241265 5241286 5241282 5241287 +
attgggtagtgtgataaagact

SEQ ID NO: 87201 - DNA, 22 bp, Artificial Sequence
  Synthetic oligonucleotide; TTA chr11 5241266 5241287 5241283 5241288 +
ttgggtagtgtgataaagactt

SEQ ID NO: 87202 - DNA, 22 bp, Artificial Sequence
  Synthetic oligonucleotide; TTG chr11 5241269 5241290 5241286 5241291 +
ggtagtgtgataaagactttac

SEQ ID NO: 87203 - DNA, 22 bp, Artificial Sequence
  Synthetic oligonucleotide; CTT chr11 5241288 5241309 5241305 5241310 +
tacaggtatcaattcaattagt

SEQ ID NO: 87204 - DNA, 22 bp, Artificial Sequence
  Synthetic oligonucleotide; TTT chr11 5241289 5241310 5241306 5241311 +
acaggtatcaattcaattagtt

SEQ ID NO: 87205 - DNA, 22 bp, Artificial Sequence
  Synthetic oligonucleotide; TTA chr11 5241290 5241311 5241307 5241312 +
caggtatcaattcaattagttc

SEQ ID NO: 87206 - DNA, 22 bp, Artificial Sequence
  Synthetic oligonucleotide; TTC chr11 5241303 5241324 5241320 5241325 +
aattagttcttacaaaaatcct

SEQ ID NO: 87207 - DNA, 22 bp, Artificial Sequence
  Synthetic oligonucleotide; TTA chr11 5241308 5241329 5241325 5241330 +
gttcttacaaaaatcctttaag

SEQ ID NO: 87208 - DNA, 22 bp, Artificial Sequence
  Synthetic oligonucleotide; TTC chr11 5241312 5241333 5241329 5241334 +
ttacaaaaatcctttaaggaaa

SEQ ID NO: 87209 - DNA, 22 bp, Artificial Sequence
  Synthetic oligonucleotide; CTT chr11 5241314 5241335 5241331 5241336 +
acaaaaatcctttaaggaaaat

SEQ ID NO: 87210 - DNA, 22 bp, Artificial Sequence
  Synthetic oligonucleotide; TTA chr11 5241315 5241336 5241332 5241337 +
caaaaatcctttaaggaaaata

SEQ ID NO: 87211 - DNA, 22 bp, Artificial Sequence
  Synthetic oligonucleotide; CTT chr11 5241326 5241347 5241343 5241348 +
taaggaaaatacatatgataaa

SEQ ID NO: 87212 - DNA, 22 bp, Artificial Sequence
  Synthetic oligonucleotide; TTT chr11 5241327 5241348 5241344 5241349 +
aaggaaaatacatatgataaat

SEQ ID NO: 87213 - DNA, 22 bp, Artificial Sequence
  Synthetic oligonucleotide; TTA chr11 5241328 5241349 5241345 5241350 +
aggaaaatacatatgataaatc

SEQ ID NO: 87214 - DNA, 22 bp, Artificial Sequence
  Synthetic oligonucleotide; CTA chr11 5241352 5241373 5241369 5241374 +
tcatatgcacagcttaatggaa

SEQ ID NO: 87215 - DNA, 22 bp, Artificial Sequence
  Synthetic oligonucleotide; CTT chr11 5241367 5241388 5241384 5241389 +
aatggaattataaatatgtttc

SEQ ID NO: 87216 - DNA, 22 bp, Artificial Sequence
  Synthetic oligonucleotide; TTA chr11 5241368 5241389 5241385 5241390 +
atggaattataaatatgtttca

SEQ ID NO: 87217 - DNA, 22 bp, Artificial Sequence
  Synthetic oligonucleotide; TTA chr11 5241377 5241398 5241394 5241399 +
taaatatgtttcaggtcacaga

SEQ ID NO: 87218 - DNA, 22 bp, Artificial Sequence
  Synthetic oligonucleotide; TTT chr11 5241388 5241409 5241405 5241410 +
caggtcacagaggtagcagatg

SEQ ID NO: 87219 - DNA, 22 bp, Artificial Sequence
  Synthetic oligonucleotide; TTC chr11 5241389 5241410 5241406 5241411 +
aggtcacagaggtagcagatga

SEQ ID NO: 87220 - DNA, 22 bp, Artificial Sequence
  Synthetic oligonucleotide; TTC chr11 5241441 5241462 5241458 5241463 +
acatgccttagagataattctc

SEQ ID NO: 87221 - DNA, 22 bp, Artificial Sequence
  Synthetic oligonucleotide; CTT chr11 5241450 5241471 5241467 5241472 +
agagataattctctattaatac

SEQ ID NO: 87222 - DNA, 22 bp, Artificial Sequence
  Synthetic oligonucleotide; TTA chr11 5241451 5241472 5241468 5241473 +
gagataattctctattaatacc

SEQ ID NO: 87223 - DNA, 22 bp, Artificial Sequence
  Synthetic oligonucleotide; TTC chr11 5241461 5241482 5241478 5241483 +
tctattaataccattgaagacg

SEQ ID NO: 87224 - DNA, 22 bp, Artificial Sequence
  Synthetic oligonucleotide; CTC chr11 5241463 5241484 5241480 5241485 +
tattaataccattgaagacgtt

SEQ ID NO: 87225 - DNA, 22 bp, Artificial Sequence
  Synthetic oligonucleotide; CTA chr11 5241465 5241486 5241482 5241487 +
ttaataccattgaagacgttaa

SEQ ID NO: 87226 - DNA, 22 bp, Artificial Sequence
  Synthetic oligonucleotide; TTA chr11 5241468 5241489 5241485 5241490 +
ataccattgaagacgttaagag

SEQ ID NO: 87227 - DNA, 22 bp, Artificial Sequence
  Synthetic oligonucleotide; TTG chr11 5241477 5241498 5241494 5241499 +
aagacgttaagagaaagttcaa

SEQ ID NO: 87228 - DNA, 22 bp, Artificial Sequence
  Synthetic oligonucleotide; TTA chr11 5241486 5241507 5241503 5241508 +
agagaaagttcaaggtttggcc

SEQ ID NO: 87229 - DNA, 22 bp, Artificial Sequence
  Synthetic oligonucleotide; TTC chr11 5241497 5241518 5241514 5241519 +
aaggtttggcccttgattggtc

SEQ ID NO: 87230 - DNA, 22 bp, Artificial Sequence
  Synthetic oligonucleotide; TTT chr11 5241504 5241525 5241521 5241526 +
ggcccttgattggtctctagga

SEQ ID NO: 87231 - DNA, 22 bp, Artificial Sequence
  Synthetic oligonucleotide; TTG chr11 5241505 5241526 5241522 5241527 +
gcccttgattggtctctaggaa

SEQ ID NO: 87232 - DNA, 22 bp, Artificial Sequence
  Synthetic oligonucleotide; CTT chr11 5241511 5241532 5241528 5241533 +
gattggtctctaggaagcccca

SEQ ID NO: 87233 - DNA, 22 bp, Artificial Sequence
  Synthetic oligonucleotide; TTG chr11 5241512 5241533 5241529 5241534 +
attggtctctaggaagccccat

SEQ ID NO: 87234 - DNA, 22 bp, Artificial Sequence
  Synthetic oligonucleotide; TTG chr11 5241516 5241537 5241533 5241538 +
gtctctaggaagccccatcccc

SEQ ID NO: 87235 - DNA, 22 bp, Artificial Sequence
  Synthetic oligonucleotide; CTC chr11 5241521 5241542 5241538 5241543 +
taggaagccccatccccacttc

SEQ ID NO: 87236 - DNA, 22 bp, Artificial Sequence
  Synthetic oligonucleotide; CTA chr11 5241523 5241544 5241540 5241545 +
ggaagccccatccccacttcat

SEQ ID NO: 87237 - DNA, 22 bp, Artificial Sequence
  Synthetic oligonucleotide; CTT chr11 5241542 5241563 5241559 5241564 +
cattataaataataaaaaatat

SEQ ID NO: 87238 - DNA, 22 bp, Artificial Sequence
  Synthetic oligonucleotide; TTC chr11 5241543 5241564 5241560 5241565 +
attataaataataaaaaatatg

SEQ ID NO: 87239 - DNA, 22 bp, Artificial Sequence
  Synthetic oligonucleotide; TTA chr11 5241547 5241568 5241564 5241569 +
taaataataaaaaatatgttgt

SEQ ID NO: 87240 - DNA, 22 bp, Artificial Sequence
  Synthetic oligonucleotide; TTG chr11 5241568 5241589 5241585 5241590 +
tttaaaataagtagaagtgaac

SEQ ID NO: 87241 - DNA, 22 bp, Artificial Sequence
  Synthetic oligonucleotide; TTT chr11 5241571 5241592 5241588 5241593 +
aaaataagtagaagtgaactgc

SEQ ID NO: 87242 - DNA, 22 bp, Artificial Sequence
  Synthetic oligonucleotide; TTA chr11 5241572 5241593 5241589 5241594 +
aaataagtagaagtgaactgca

SEQ ID NO: 87243 - DNA, 22 bp, Artificial Sequence
  Synthetic oligonucleotide; CTG chr11 5241592 5241613 5241609 5241614 +
cagtcaccaaatgagctatatc

SEQ ID NO: 87244 - DNA, 22 bp, Artificial Sequence
  Synthetic oligonucleotide; CTA chr11 5241610 5241631 5241627 5241632 +
tatcctgagtttcatacaaata

SEQ ID NO: 87245 - DNA, 22 bp, Artificial Sequence
  Synthetic oligonucleotide; CTG chr11 5241617 5241638 5241634 5241639 +
agtttcatacaaataatagcct

SEQ ID NO: 87246 - DNA, 22 bp, Artificial Sequence
  Synthetic oligonucleotide; TTT chr11 5241622 5241643 5241639 5241644 +
catacaaataatagcctataca

SEQ ID NO: 87247 - DNA, 22 bp, Artificial Sequence
  Synthetic oligonucleotide; TTC chr11 5241623 5241644 5241640 5241645 +
atacaaataatagcctatacag

SEQ ID NO: 87248 - DNA, 22 bp, Artificial Sequence
  Synthetic oligonucleotide; CTA chr11 5241640 5241661 5241657 5241662 +
tacagaacttctaatttgagtc

SEQ ID NO: 87249 - DNA, 22 bp, Artificial Sequence
  Synthetic oligonucleotide; CTT chr11 5241650 5241671 5241667 5241672 +
ctaatttgagtcctaacatacc

SEQ ID NO: 87250 - DNA, 22 bp, Artificial Sequence
  Synthetic oligonucleotide; TTC chr11 5241651 5241672 5241668 5241673 +
taatttgagtcctaacatacct

SEQ ID NO: 87251 - DNA, 22 bp, Artificial Sequence
  Synthetic oligonucleotide; CTA chr11 5241653 5241674 5241670 5241675 +
atttgagtcctaacatacctct

SEQ ID NO: 87252 - DNA, 22 bp, Artificial Sequence
  Synthetic oligonucleotide; TTT chr11 5241657 5241678 5241674 5241679 +
gagtcctaacatacctctacac

SEQ ID NO: 87253 - DNA, 22 bp, Artificial Sequence
  Synthetic oligonucleotide; TTG chr11 5241658 5241679 5241675 5241680 +
agtcctaacatacctctacaca

SEQ ID NO: 87254 - DNA, 22 bp, Artificial Sequence
  Synthetic oligonucleotide; CTA chr11 5241665 5241686 5241682 5241687 +
acatacctctacacactaccaa

SEQ ID NO: 87255 - DNA, 22 bp, Artificial Sequence
  Synthetic oligonucleotide; CTC chr11 5241674 5241695 5241691 5241696 +
tacacactaccaacaatcctct

SEQ ID NO: 87256 - DNA, 22 bp, Artificial Sequence
  Synthetic oligonucleotide; CTA chr11 5241676 5241697 5241693 5241698 +
cacactaccaacaatcctctta

SEQ ID NO: 87257 - DNA, 22 bp, Artificial Sequence
  Synthetic oligonucleotide; CTA chr11 5241683 5241704 5241700 5241705 +
ccaacaatcctcttacacctcc

SEQ ID NO: 87258 - DNA, 22 bp, Artificial Sequence
  Synthetic oligonucleotide; CTC chr11 5241695 5241716 5241712 5241717 +
ttacacctccaaagagtacctc

SEQ ID NO: 87259 - DNA, 22 bp, Artificial Sequence
  Synthetic oligonucleotide; CTT chr11 5241697 5241718 5241714 5241719 +
acacctccaaagagtacctcca

SEQ ID NO: 87260 - DNA, 22 bp, Artificial Sequence
  Synthetic oligonucleotide; TTA chr11 5241698 5241719 5241715 5241720 +
cacctccaaagagtacctccat

SEQ ID NO: 87261 - DNA, 22 bp, Artificial Sequence
  Synthetic oligonucleotide; CTC chr11 5241704 5241725 5241721 5241726 +
caaagagtacctccattgacct

SEQ ID NO: 87262 - DNA, 22 bp, Artificial Sequence
  Synthetic oligonucleotide; CTC chr11 5241717 5241738 5241734 5241739 +
cattgacctccctttctgtaaa

SEQ ID NO: 87263 - DNA, 22 bp, Artificial Sequence
  Synthetic oligonucleotide; TTG chr11 5241722 5241743 5241739 5241744 +
acctccctttctgtaaaaacat

SEQ ID NO: 87264 - DNA, 22 bp, Artificial Sequence
  Synthetic oligonucleotide; CTC chr11 5241727 5241748 5241744 5241749 +
cctttctgtaaaaacattgtct

SEQ ID NO: 87265 - DNA, 22 bp, Artificial Sequence
  Synthetic oligonucleotide; CTT chr11 5241731 5241752 5241748 5241753 +
tctgtaaaaacattgtcttatt

SEQ ID NO: 87266 - DNA, 22 bp, Artificial Sequence
  Synthetic oligonucleotide; TTT chr11 5241732 5241753 5241749 5241754 +
ctgtaaaaacattgtcttattc

SEQ ID NO: 87267 - DNA, 22 bp, Artificial Sequence
  Synthetic oligonucleotide; TTC chr11 5241733 5241754 5241750 5241755 +
tgtaaaaacattgtcttattct

SEQ ID NO: 87268 - DNA, 22 bp, Artificial Sequence
  Synthetic oligonucleotide; CTG chr11 5241735 5241756 5241752 5241757 +
taaaaacattgtcttattctag

SEQ ID NO: 87269 - DNA, 22 bp, Artificial Sequence
  Synthetic oligonucleotide; TTG chr11 5241746 5241767 5241763 5241768 +
tcttattctagagacgatttcc

SEQ ID NO: 87270 - DNA, 22 bp, Artificial Sequence
  Synthetic oligonucleotide; CTT chr11 5241750 5241771 5241767 5241772 +
attctagagacgatttcccctt

SEQ ID NO: 87271 - DNA, 22 bp, Artificial Sequence
  Synthetic oligonucleotide; TTA chr11 5241751 5241772 5241768 5241773 +
ttctagagacgatttccccttc

SEQ ID NO: 87272 - DNA, 22 bp, Artificial Sequence
  Synthetic oligonucleotide; TTC chr11 5241754 5241775 5241771 5241776 +
tagagacgatttccccttccta

SEQ ID NO: 87273 - DNA, 22 bp, Artificial Sequence
  Synthetic oligonucleotide; CTA chr11 5241756 5241777 5241773 5241778 +
gagacgatttccccttcctagg

SEQ ID NO: 87274 - DNA, 22 bp, Artificial Sequence
  Synthetic oligonucleotide; TTT chr11 5241766 5241787 5241783 5241788 +
ccccttcctaggagtaactacc

SEQ ID NO: 87275 - DNA, 22 bp, Artificial Sequence
  Synthetic oligonucleotide; TTC chr11 5241767 5241788 5241784 5241789 +
cccttcctaggagtaactaccc

SEQ ID NO: 87276 - DNA, 22 bp, Artificial Sequence
  Synthetic oligonucleotide; CTT chr11 5241772 5241793 5241789 5241794 +
cctaggagtaactaccccacta

SEQ ID NO: 87277 - DNA, 22 bp, Artificial Sequence
  Synthetic oligonucleotide; TTC chr11 5241773 5241794 5241790 5241795 +
ctaggagtaactaccccactaa

SEQ ID NO: 87278 - DNA, 22 bp, Artificial Sequence
  Synthetic oligonucleotide; CTA chr11 5241776 5241797 5241793 5241798 +
ggagtaactaccccactaaatc

SEQ ID NO: 87279 - DNA, 22 bp, Artificial Sequence
  Synthetic oligonucleotide; CTA chr11 5241786 5241807 5241803 5241808 +
ccccactaaatccacccacgag

SEQ ID NO: 87280 - DNA, 22 bp, Artificial Sequence
  Synthetic oligonucleotide; CTA chr11 5241794 5241815 5241811 5241816 +
aatccacccacgagttctctct

SEQ ID NO: 87281 - DNA, 22 bp, Artificial Sequence
  Synthetic oligonucleotide; TTC chr11 5241811 5241832 5241828 5241833 +
tctcttttcttgcaggattgca

SEQ ID NO: 87282 - DNA, 22 bp, Artificial Sequence
  Synthetic oligonucleotide; CTC chr11 5241813 5241834 5241830 5241835 +
tcttttcttgcaggattgcaag

SEQ ID NO: 87283 - DNA, 22 bp, Artificial Sequence
  Synthetic oligonucleotide; CTC chr11 5241815 5241836 5241832 5241837 +
ttttcttgcaggattgcaagaa

SEQ ID NO: 87284 - DNA, 22 bp, Artificial Sequence
  Synthetic oligonucleotide; CTT chr11 5241817 5241838 5241834 5241839 +
ttcttgcaggattgcaagaaag

SEQ ID NO: 87285 - DNA, 22 bp, Artificial Sequence
  Synthetic oligonucleotide; TTT chr11 5241818 5241839 5241835 5241840 +
tcttgcaggattgcaagaaagt

SEQ ID NO: 87286 - DNA, 22 bp, Artificial Sequence
  Synthetic oligonucleotide; TTT chr11 5241819 5241840 5241836 5241841 +
cttgcaggattgcaagaaagta

SEQ ID NO: 87287 - DNA, 22 bp, Artificial Sequence
  Synthetic oligonucleotide; TTC chr11 5241820 5241841 5241837 5241842 +
ttgcaggattgcaagaaagtat

SEQ ID NO: 87288 - DNA, 22 bp, Artificial Sequence
  Synthetic oligonucleotide; CTT chr11 5241822 5241843 5241839 5241844 +
gcaggattgcaagaaagtatct

SEQ ID NO: 87289 - DNA, 22 bp, Artificial Sequence
  Synthetic oligonucleotide; TTG chr11 5241823 5241844 5241840 5241845 +
caggattgcaagaaagtatctt

SEQ ID NO: 87290 - DNA, 22 bp, Artificial Sequence
  Synthetic oligonucleotide; TTG chr11 5241831 5241852 5241848 5241853 +
caagaaagtatcttctctgtcc

SEQ ID NO: 87291 - DNA, 22 bp, Artificial Sequence
  Synthetic oligonucleotide; CTT chr11 5241845 5241866 5241862 5241867 +
ctctgtccttaaactcccattc

SEQ ID NO: 87292 - DNA, 22 bp, Artificial Sequence
  Synthetic oligonucleotide; TTC chr11 5241846 5241867 5241863 5241868 +
tctgtccttaaactcccattct

SEQ ID NO: 87293 - DNA, 22 bp, Artificial Sequence
  Synthetic oligonucleotide; CTC chr11 5241848 5241869 5241865 5241870 +
tgtccttaaactcccattctcc

SEQ ID NO: 87294 - DNA, 22 bp, Artificial Sequence
  Synthetic oligonucleotide; CTG chr11 5241850 5241871 5241867 5241872 +
tccttaaactcccattctccaa

SEQ ID NO: 87295 - DNA, 22 bp, Artificial Sequence
  Synthetic oligonucleotide; CTT chr11 5241855 5241876 5241872 5241877 +
aaactcccattctccaacattc

SEQ ID NO: 87296 - DNA, 22 bp, Artificial Sequence
  Synthetic oligonucleotide; TTA chr11 5241856 5241877 5241873 5241878 +
aactcccattctccaacattct

SEQ ID NO: 87297 - DNA, 22 bp, Artificial Sequence
  Synthetic oligonucleotide; CTC chr11 5241861 5241882 5241878 5241883 +
ccattctccaacattctcattt

SEQ ID NO: 87298 - DNA, 22 bp, Artificial Sequence
  Synthetic oligonucleotide; TTC chr11 5241867 5241888 5241884 5241889 +
tccaacattctcatttccatca

SEQ ID NO: 87299 - DNA, 22 bp, Artificial Sequence
  Synthetic oligonucleotide; CTC chr11 5241869 5241890 5241886 5241891 +
caacattctcatttccatcaga

SEQ ID NO: 87300 - DNA, 22 bp, Artificial Sequence
  Synthetic oligonucleotide; TTC chr11 5241877 5241898 5241894 5241899 +
tcatttccatcagaaatagtgc

SEQ ID NO: 87301 - DNA, 22 bp, Artificial Sequence
  Synthetic oligonucleotide; CTC chr11 5241879 5241900 5241896 5241901 +
atttccatcagaaatagtgcgt

SEQ ID NO: 87302 - DNA, 22 bp, Artificial Sequence
  Synthetic oligonucleotide; TTT chr11 5241883 5241904 5241900 5241905 +
ccatcagaaatagtgcgtcctt

SEQ ID NO: 87303 - DNA, 22 bp, Artificial Sequence
  Synthetic oligonucleotide; TTC chr11 5241884 5241905 5241901 5241906 +
catcagaaatagtgcgtccttt

SEQ ID NO: 87304 - DNA, 22 bp, Artificial Sequence
  Synthetic oligonucleotide; CTT chr11 5241905 5241926 5241922 5241927 +
ttggctgaatcagggtaaaata

SEQ ID NO: 87305 - DNA, 22 bp, Artificial Sequence
  Synthetic oligonucleotide; TTT chr11 5241906 5241927 5241923 5241928 +
tggctgaatcagggtaaaatat

SEQ ID NO: 87306 - DNA, 22 bp, Artificial Sequence
  Synthetic oligonucleotide; TTT chr11 5241907 5241928 5241924 5241929 +
ggctgaatcagggtaaaatata

SEQ ID NO: 87307 - DNA, 22 bp, Artificial Sequence
  Synthetic oligonucleotide; TTG chr11 5241908 5241929 5241925 5241930 +
gctgaatcagggtaaaatataa

SEQ ID NO: 87308 - DNA, 22 bp, Artificial Sequence
  Synthetic oligonucleotide; CTG chr11 5241912 5241933 5241929 5241934 +
aatcagggtaaaatataaagac

SEQ ID NO: 87309 - DNA, 22 bp, Artificial Sequence
  Synthetic oligonucleotide; TTT chr11 5241957 5241978 5241974 5241979 +
cttagagagcatatttctttat

SEQ ID NO: 87310 - DNA, 22 bp, Artificial Sequence
  Synthetic oligonucleotide; TTC chr11 5241958 5241979 5241975 5241980 +
ttagagagcatatttctttatt

SEQ ID NO: 87311 - DNA, 22 bp, Artificial Sequence
  Synthetic oligonucleotide; CTT chr11 5241960 5241981 5241977 5241982 +
agagagcatatttctttattct

SEQ ID NO: 87312 - DNA, 22 bp, Artificial Sequence
  Synthetic oligonucleotide; TTA chr11 5241961 5241982 5241978 5241983 +
gagagcatatttctttattcta

SEQ ID NO: 87313 - DNA, 22 bp, Artificial Sequence
  Synthetic oligonucleotide; TTT chr11 5241973 5241994 5241990 5241995 +
ctttattctatttttatcatgc

SEQ ID NO: 87314 - DNA, 22 bp, Artificial Sequence
  Synthetic oligonucleotide; TTC chr11 5241974 5241995 5241991 5241996 +
tttattctatttttatcatgca

SEQ ID NO: 87315 - DNA, 22 bp, Artificial Sequence
  Synthetic oligonucleotide; CTT chr11 5241976 5241997 5241993 5241998 +
tattctatttttatcatgcagg

SEQ ID NO: 87316 - DNA, 22 bp, Artificial Sequence
  Synthetic oligonucleotide; TTT chr11 5241977 5241998 5241994 5241999 +
attctatttttatcatgcagga

SEQ ID NO: 87317 - DNA, 22 bp, Artificial Sequence
  Synthetic oligonucleotide; TTA chr11 5241978 5241999 5241995 5242000 +
ttctatttttatcatgcaggaa

SEQ ID NO: 87318 - DNA, 22 bp, Artificial Sequence
  Synthetic oligonucleotide; TTC chr11 5241981 5242002 5241998 5242003 +
tatttttatcatgcaggaactg

SEQ ID NO: 87319 - DNA, 22 bp, Artificial Sequence
  Synthetic oligonucleotide; CTA chr11 5241983 5242004 5242000 5242005 +
tttttatcatgcaggaactgaa

SEQ ID NO: 87320 - DNA, 22 bp, Artificial Sequence
  Synthetic oligonucleotide; TTT chr11 5241986 5242007 5242003 5242008 +
ttatcatgcaggaactgaatca

SEQ ID NO: 87321 - DNA, 22 bp, Artificial Sequence
  Synthetic oligonucleotide; TTT chr11 5241987 5242008 5242004 5242009 +
tatcatgcaggaactgaatcag

SEQ ID NO: 87322 - DNA, 22 bp, Artificial Sequence
  Synthetic oligonucleotide; TTT chr11 5241988 5242009 5242005 5242010 +
atcatgcaggaactgaatcagc

SEQ ID NO: 87323 - DNA, 22 bp, Artificial Sequence
  Synthetic oligonucleotide; TTA chr11 5241989 5242010 5242006 5242011 +
tcatgcaggaactgaatcagca

SEQ ID NO: 87324 - DNA, 22 bp, Artificial Sequence
  Synthetic oligonucleotide; CTG chr11 5242003 5242024 5242020 5242025 +
aatcagcaggcaggatactgct

SEQ ID NO: 87325 - DNA, 22 bp, Artificial Sequence
  Synthetic oligonucleotide; CTG chr11 5242023 5242044 5242040 5242045 +
ctcttctccccaacctccccca

SEQ ID NO: 87326 - DNA, 22 bp, Artificial Sequence
  Synthetic oligonucleotide; CTC chr11 5242026 5242047 5242043 5242048 +
ttctccccaacctcccccatct

SEQ ID NO: 87327 - DNA, 22 bp, Artificial Sequence
  Synthetic oligonucleotide; CTT chr11 5242028 5242049 5242045 5242050 +
ctccccaacctcccccatctaa

SEQ ID NO: 87328 - DNA, 22 bp, Artificial Sequence
  Synthetic oligonucleotide; TTC chr11 5242029 5242050 5242046 5242051 +
tccccaacctcccccatctaaa

SEQ ID NO: 87329 - DNA, 22 bp, Artificial Sequence
  Synthetic oligonucleotide; CTC chr11 5242031 5242052 5242048 5242053 +
cccaacctcccccatctaaagg

SEQ ID NO: 87330 - DNA, 22 bp, Artificial Sequence
  Synthetic oligonucleotide; CTC chr11 5242040 5242061 5242057 5242062 +
ccccatctaaaggagatgagat

SEQ ID NO: 87331 - DNA, 22 bp, Artificial Sequence
  Synthetic oligonucleotide; CTA chr11 5242049 5242070 5242066 5242071 +
aaggagatgagattttgggaca

SEQ ID NO: 87332 - DNA, 22 bp, Artificial Sequence
  Synthetic oligonucleotide; TTT chr11 5242064 5242085 5242081 5242086 +
tgggacataggtacaaacatag

SEQ ID NO: 87333 - DNA, 22 bp, Artificial Sequence
  Synthetic oligonucleotide; TTT chr11 5242065 5242086 5242082 5242087 +
gggacataggtacaaacatagt

SEQ ID NO: 87334 - DNA, 22 bp, Artificial Sequence
  Synthetic oligonucleotide; TTG chr11 5242066 5242087 5242083 5242088 +
ggacataggtacaaacatagtg

SEQ ID NO: 87335 - DNA, 22 bp, Artificial Sequence
  Synthetic oligonucleotide; CTC chr11 5242122 5242143 5242139 5242144 +
agtggtcttgtgggctacagca

SEQ ID NO: 87336 - DNA, 22 bp, Artificial Sequence
  Synthetic oligonucleotide; CTT chr11 5242131 5242152 5242148 5242153 +
gtgggctacagcattaaccaca

SEQ ID NO: 87337 - DNA, 22 bp, Artificial Sequence
  Synthetic oligonucleotide; TTG chr11 5242132 5242153 5242149 5242154 +
tgggctacagcattaaccacag

SEQ ID NO: 87338 - DNA, 22 bp, Artificial Sequence
  Synthetic oligonucleotide; CTA chr11 5242139 5242160 5242156 5242161 +
cagcattaaccacagcatttgt

SEQ ID NO: 87339 - DNA, 22 bp, Artificial Sequence
  Synthetic oligonucleotide; TTA chr11 5242147 5242168 5242164 5242169 +
accacagcatttgttagttact

SEQ ID NO: 87340 - DNA, 22 bp, Artificial Sequence
  Synthetic oligonucleotide; TTT chr11 5242159 5242180 5242176 5242181 +
gttagttactgccaagaagcct

SEQ ID NO: 87341 - DNA, 22 bp, Artificial Sequence
  Synthetic oligonucleotide; TTG chr11 5242160 5242181 5242177 5242182 +
ttagttactgccaagaagcctg

SEQ ID NO: 87342 - DNA, 22 bp, Artificial Sequence
  Synthetic oligonucleotide; TTA chr11 5242163 5242184 5242180 5242185 +
gttactgccaagaagcctgtat

SEQ ID NO: 87343 - DNA, 22 bp, Artificial Sequence
  Synthetic oligonucleotide; TTA chr11 5242167 5242188 5242184 5242189 +
ctgccaagaagcctgtatctgt

SEQ ID NO: 87344 - DNA, 22 bp, Artificial Sequence
  Synthetic oligonucleotide; CTG chr11 5242170 5242191 5242187 5242192 +
ccaagaagcctgtatctgtagg

SEQ ID NO: 87345 - DNA, 22 bp, Artificial Sequence
  Synthetic oligonucleotide; CTG chr11 5242182 5242203 5242199 5242204 +
tatctgtagggtaaaatcctcg

SEQ ID NO: 87346 - DNA, 22 bp, Artificial Sequence
  Synthetic oligonucleotide; CTG chr11 5242188 5242209 5242205 5242210 +
tagggtaaaatcctcgctgaag

SEQ ID NO: 87347 - DNA, 22 bp, Artificial Sequence
  Synthetic oligonucleotide; CTC chr11 5242203 5242224 5242220 5242225 +
gctgaagtgggttgccaaaaca

SEQ ID NO: 87348 - DNA, 22 bp, Artificial Sequence
  Synthetic oligonucleotide; CTG chr11 5242207 5242228 5242224 5242229 +
aagtgggttgccaaaacaatca

SEQ ID NO: 87349 - DNA, 22 bp, Artificial Sequence
  Synthetic oligonucleotide; TTG chr11 5242217 5242238 5242234 5242239 +
ccaaaacaatcaatatcacgtt

SEQ ID NO: 87350 - DNA, 22 bp, Artificial Sequence
  Synthetic oligonucleotide; TTG chr11 5242240 5242261 5242257 5242262 +
cctaagagctggggagggagtg

SEQ ID NO: 87351 - DNA, 22 bp, Artificial Sequence
  Synthetic oligonucleotide; CTA chr11 5242244 5242265 5242261 5242266 +
agagctggggagggagtgaaga

SEQ ID NO: 87352 - DNA, 22 bp, Artificial Sequence
  Synthetic oligonucleotide; CTG chr11 5242251 5242272 5242268 5242273 +
gggagggagtgaagataaaaaa

SEQ ID NO: 87353 - DNA, 22 bp, Artificial Sequence
  Synthetic oligonucleotide; CTC chr11 5242303 5242324 5242320 5242325 +
aagctggacttgcagtaaatag

SEQ ID NO: 87354 - DNA, 22 bp, Artificial Sequence
  Synthetic oligonucleotide; CTG chr11 5242309 5242330 5242326 5242331 +
gacttgcagtaaatagatataa

SEQ ID NO: 87355 - DNA, 22 bp, Artificial Sequence
  Synthetic oligonucleotide; CTT chr11 5242314 5242335 5242331 5242336 +
gcagtaaatagatataacactt

SEQ ID NO: 87356 - DNA, 22 bp, Artificial Sequence
  Synthetic oligonucleotide; TTG chr11 5242315 5242336 5242332 5242337 +
cagtaaatagatataacactta

SEQ ID NO: 87357 - DNA, 22 bp, Artificial Sequence
  Synthetic oligonucleotide; CTT chr11 5242336 5242357 5242353 5242358 +
acatcctttttcaccagagttt

SEQ ID NO: 87358 - DNA, 22 bp, Artificial Sequence
  Synthetic oligonucleotide; TTA chr11 5242337 5242358 5242354 5242359 +
catcctttttcaccagagtttg

SEQ ID NO: 87359 - DNA, 22 bp, Artificial Sequence
  Synthetic oligonucleotide; CTT chr11 5242344 5242365 5242361 5242366 +
tttcaccagagtttgagcaact

SEQ ID NO: 87360 - DNA, 22 bp, Artificial Sequence
  Synthetic oligonucleotide; TTT chr11 5242345 5242366 5242362 5242367 +
ttcaccagagtttgagcaactc

SEQ ID NO: 87361 - DNA, 22 bp, Artificial Sequence
  Synthetic oligonucleotide; TTT chr11 5242346 5242367 5242363 5242368 +
tcaccagagtttgagcaactct

SEQ ID NO: 87362 - DNA, 22 bp, Artificial Sequence
  Synthetic oligonucleotide; TTT chr11 5242347 5242368 5242364 5242369 +
caccagagtttgagcaactctc

SEQ ID NO: 87363 - DNA, 22 bp, Artificial Sequence
  Synthetic oligonucleotide; TTC chr11 5242348 5242369 5242365 5242370 +
accagagtttgagcaactctca

SEQ ID NO: 87364 - DNA, 22 bp, Artificial Sequence
  Synthetic oligonucleotide; TTT chr11 5242358 5242379 5242375 5242380 +
gagcaactctcaccattatggg

SEQ ID NO: 87365 - DNA, 22 bp, Artificial Sequence
  Synthetic oligonucleotide; TTG chr11 5242359 5242380 5242376 5242381 +
agcaactctcaccattatgggc

SEQ ID NO: 87366 - DNA, 22 bp, Artificial Sequence
  Synthetic oligonucleotide; CTC chr11 5242367 5242388 5242384 5242389 +
tcaccattatgggctagatatc

SEQ ID NO: 87367 - DNA, 22 bp, Artificial Sequence
  Synthetic oligonucleotide; CTC chr11 5242369 5242390 5242386 5242391 +
accattatgggctagatatcag

SEQ ID NO: 87368 - DNA, 22 bp, Artificial Sequence
  Synthetic oligonucleotide; TTA chr11 5242376 5242397 5242393 5242398 +
tgggctagatatcagcttcaat

SEQ ID NO: 87369 - DNA, 22 bp, Artificial Sequence
  Synthetic oligonucleotide; CTA chr11 5242383 5242404 5242400 5242405 +
gatatcagcttcaatatgactg

SEQ ID NO: 87370 - DNA, 22 bp, Artificial Sequence
  Synthetic oligonucleotide; CTT chr11 5242394 5242415 5242411 5242416 +
caatatgactggcagccctgca

SEQ ID NO: 87371 - DNA, 22 bp, Artificial Sequence
  Synthetic oligonucleotide; TTC chr11 5242395 5242416 5242412 5242417 +
aatatgactggcagccctgcac

SEQ ID NO: 87372 - DNA, 22 bp, Artificial Sequence
  Synthetic oligonucleotide; CTG chr11 5242405 5242426 5242422 5242427 +
gcagccctgcacctcccattgt

SEQ ID NO: 87373 - DNA, 22 bp, Artificial Sequence
  Synthetic oligonucleotide; CTG chr11 5242414 5242435 5242431 5242436 +
cacctcccattgtgtcctatcc

SEQ ID NO: 87374 - DNA, 22 bp, Artificial Sequence
  Synthetic oligonucleotide; CTC chr11 5242420 5242441 5242437 5242442 +
ccattgtgtcctatccttctct

SEQ ID NO: 87375 - DNA, 22 bp, Artificial Sequence
  Synthetic oligonucleotide; TTG chr11 5242426 5242447 5242443 5242448 +
tgtcctatccttctcttacttg

SEQ ID NO: 87376 - DNA, 22 bp, Artificial Sequence
  Synthetic oligonucleotide; CTA chr11 5242433 5242454 5242450 5242455 +
tccttctcttacttgctatgcc

SEQ ID NO: 87377 - DNA, 22 bp, Artificial Sequence
  Synthetic oligonucleotide; CTT chr11 5242438 5242459 5242455 5242460 +
ctcttacttgctatgccaactc

SEQ ID NO: 87378 - DNA, 22 bp, Artificial Sequence
  Synthetic oligonucleotide; TTC chr11 5242439 5242460 5242456 5242461 +
tcttacttgctatgccaactca

SEQ ID NO: 87379 - DNA, 22 bp, Artificial Sequence
  Synthetic oligonucleotide; CTC chr11 5242441 5242462 5242458 5242463 +
ttacttgctatgccaactcact

SEQ ID NO: 87380 - DNA, 22 bp, Artificial Sequence
  Synthetic oligonucleotide; CTT chr11 5242443 5242464 5242460 5242465 +
acttgctatgccaactcactac

SEQ ID NO: 87381 - DNA, 22 bp, Artificial Sequence
  Synthetic oligonucleotide; TTA chr11 5242444 5242465 5242461 5242466 +
cttgctatgccaactcactacc

SEQ ID NO: 87382 - DNA, 22 bp, Artificial Sequence
  Synthetic oligonucleotide; CTT chr11 5242447 5242468 5242464 5242469 +
gctatgccaactcactacccca

SEQ ID NO: 87383 - DNA, 22 bp, Artificial Sequence
  Synthetic oligonucleotide; TTG chr11 5242448 5242469 5242465 5242470 +
ctatgccaactcactaccccaa

SEQ ID NO: 87384 - DNA, 22 bp, Artificial Sequence
  Synthetic oligonucleotide; CTA chr11 5242451 5242472 5242468 5242473 +
tgccaactcactaccccaacat

SEQ ID NO: 87385 - DNA, 22 bp, Artificial Sequence
  Synthetic oligonucleotide; CTC chr11 5242460 5242481 5242477 5242482 +
actaccccaacatattgtgatt

SEQ ID NO: 87386 - DNA, 22 bp, Artificial Sequence
  Synthetic oligonucleotide; CTA chr11 5242464 5242485 5242481 5242486 +
ccccaacatattgtgattgttt

SEQ ID NO: 87387 - DNA, 22 bp, Artificial Sequence
  Synthetic oligonucleotide; TTG chr11 5242477 5242498 5242494 5242499 +
tgattgtttcatttttttttta

SEQ ID NO: 87388 - DNA, 22 bp, Artificial Sequence
  Synthetic oligonucleotide; TTG chr11 5242483 5242504 5242500 5242505 +
tttcattttttttttagagact

SEQ ID NO: 87389 - DNA, 22 bp, Artificial Sequence
  Synthetic oligonucleotide; TTT chr11 5242486 5242507 5242503 5242508 +
cattttttttttagagacttcg

SEQ ID NO: 87390 - DNA, 22 bp, Artificial Sequence
  Synthetic oligonucleotide; TTC chr11 5242487 5242508 5242504 5242509 +
attttttttttagagacttcgt

SEQ ID NO: 87391 - DNA, 22 bp, Artificial Sequence
  Synthetic oligonucleotide; TTT chr11 5242491 5242512 5242508 5242513 +
tttttttagagacttcgtcctt

SEQ ID NO: 87392 - DNA, 22 bp, Artificial Sequence
  Synthetic oligonucleotide; TTT chr11 5242492 5242513 5242509 5242514 +
ttttttagagacttcgtccttt

SEQ ID NO: 87393 - DNA, 22 bp, Artificial Sequence
  Synthetic oligonucleotide; TTT chr11 5242493 5242514 5242510 5242515 +
tttttagagacttcgtcctttt

SEQ ID NO: 87394 - DNA, 22 bp, Artificial Sequence
  Synthetic oligonucleotide; TTT chr11 5242494 5242515 5242511 5242516 +
ttttagagacttcgtcctttta

SEQ ID NO: 87395 - DNA, 22 bp, Artificial Sequence
  Synthetic oligonucleotide; TTT chr11 5242495 5242516 5242512 5242517 +
tttagagacttcgtccttttaa

SEQ ID NO: 87396 - DNA, 22 bp, Artificial Sequence
  Synthetic oligonucleotide; TTT chr11 5242496 5242517 5242513 5242518 +
ttagagacttcgtccttttaaa

SEQ ID NO: 87397 - DNA, 22 bp, Artificial Sequence
  Synthetic oligonucleotide; TTT chr11 5242497 5242518 5242514 5242519 +
tagagacttcgtccttttaaaa

SEQ ID NO: 87398 - DNA, 22 bp, Artificial Sequence
  Synthetic oligonucleotide; TTT chr11 5242498 5242519 5242515 5242520 +
agagacttcgtccttttaaaaa

SEQ ID NO: 87399 - DNA, 22 bp, Artificial Sequence
  Synthetic oligonucleotide; TTA chr11 5242499 5242520 5242516 5242521 +
gagacttcgtccttttaaaaag

SEQ ID NO: 87400 - DNA, 22 bp, Artificial Sequence
  Synthetic oligonucleotide; CTT chr11 5242506 5242527 5242523 5242528 +
cgtccttttaaaaagtaggata

SEQ ID NO: 87401 - DNA, 22 bp, Artificial Sequence
  Synthetic oligonucleotide; TTC chr11 5242507 5242528 5242524 5242529 +
gtccttttaaaaagtaggataa

SEQ ID NO: 87402 - DNA, 22 bp, Artificial Sequence
  Synthetic oligonucleotide; CTT chr11 5242513 5242534 5242530 5242535 +
ttaaaaagtaggataatagtac

SEQ ID NO: 87403 - DNA, 22 bp, Artificial Sequence
  Synthetic oligonucleotide; TTT chr11 5242514 5242535 5242531 5242536 +
taaaaagtaggataatagtact

SEQ ID NO: 87404 - DNA, 22 bp, Artificial Sequence
  Synthetic oligonucleotide; TTT chr11 5242515 5242536 5242532 5242537 +
aaaaagtaggataatagtactt

SEQ ID NO: 87405 - DNA, 22 bp, Artificial Sequence
  Synthetic oligonucleotide; TTA chr11 5242516 5242537 5242533 5242538 +
aaaagtaggataatagtacttc

SEQ ID NO: 87406 - DNA, 22 bp, Artificial Sequence
  Synthetic oligonucleotide; CTT chr11 5242537 5242558 5242554 5242559 +
caaggaacagtaatggatagga

SEQ ID NO: 87407 - DNA, 22 bp, Artificial Sequence
  Synthetic oligonucleotide; TTC chr11 5242538 5242559 5242555 5242560 +
aaggaacagtaatggataggat

SEQ ID NO: 87408 - DNA, 22 bp, Artificial Sequence
  Synthetic oligonucleotide; TTT chr11 5242606 5242627 5242623 5242628 +
tcccaaacactcataacaaaga

SEQ ID NO: 87409 - DNA, 22 bp, Artificial Sequence
  Synthetic oligonucleotide; TTT chr11 5242607 5242628 5242624 5242629 +
cccaaacactcataacaaagaa

SEQ ID NO: 87410 - DNA, 22 bp, Artificial Sequence
  Synthetic oligonucleotide; TTC chr11 5242608 5242629 5242625 5242630 +
ccaaacactcataacaaagaat

SEQ ID NO: 87411 - DNA, 22 bp, Artificial Sequence
  Synthetic oligonucleotide; CTC chr11 5242618 5242639 5242635 5242640 +
ataacaaagaatcctgtaccat

SEQ ID NO: 87412 - DNA, 22 bp, Artificial Sequence
  Synthetic oligonucleotide; CTG chr11 5242634 5242655 5242651 5242656 +
taccatgcgtacaaaagtatac

SEQ ID NO: 87413 - DNA, 22 bp, Artificial Sequence
  Synthetic oligonucleotide; TTC chr11 5242667 5242688 5242684 5242689 +
ggagggaaacaatcctcttttt

SEQ ID NO: 87414 - DNA, 22 bp, Artificial Sequence
  Synthetic oligonucleotide; CTC chr11 5242684 5242705 5242701 5242706 +
tttttaacagcttcccactact

SEQ ID NO: 87415 - DNA, 22 bp, Artificial Sequence
  Synthetic oligonucleotide; CTT chr11 5242686 5242707 5242703 5242708 +
tttaacagcttcccactacttt

SEQ ID NO: 87416 - DNA, 22 bp, Artificial Sequence
  Synthetic oligonucleotide; TTT chr11 5242687 5242708 5242704 5242709 +
ttaacagcttcccactactttg

SEQ ID NO: 87417 - DNA, 22 bp, Artificial Sequence
  Synthetic oligonucleotide; TTT chr11 5242688 5242709 5242705 5242710 +
taacagcttcccactactttgt

SEQ ID NO: 87418 - DNA, 22 bp, Artificial Sequence
  Synthetic oligonucleotide; TTT chr11 5242689 5242710 5242706 5242711 +
aacagcttcccactactttgtt

SEQ ID NO: 87419 - DNA, 22 bp, Artificial Sequence
  Synthetic oligonucleotide; TTA chr11 5242690 5242711 5242707 5242712 +
acagcttcccactactttgttc

SEQ ID NO: 87420 - DNA, 22 bp, Artificial Sequence
  Synthetic oligonucleotide; CTT chr11 5242697 5242718 5242714 5242719 +
cccactactttgttcagttgat

SEQ ID NO: 87421 - DNA, 22 bp, Artificial Sequence
  Synthetic oligonucleotide; TTC chr11 5242698 5242719 5242715 5242720 +
ccactactttgttcagttgatc

SEQ ID NO: 87422 - DNA, 22 bp, Artificial Sequence
  Synthetic oligonucleotide; CTA chr11 5242704 5242725 5242721 5242726 +
ctttgttcagttgatctttttc

SEQ ID NO: 87423 - DNA, 22 bp, Artificial Sequence
  Synthetic oligonucleotide; CTT chr11 5242707 5242728 5242724 5242729 +
tgttcagttgatctttttctaa

SEQ ID NO: 87424 - DNA, 22 bp, Artificial Sequence
  Synthetic oligonucleotide; TTT chr11 5242708 5242729 5242725 5242730 +
gttcagttgatctttttctaac

SEQ ID NO: 87425 - DNA, 22 bp, Artificial Sequence
  Synthetic oligonucleotide; TTG chr11 5242709 5242730 5242726 5242731 +
ttcagttgatctttttctaacc

SEQ ID NO: 87426 - DNA, 22 bp, Artificial Sequence
  Synthetic oligonucleotide; TTC chr11 5242712 5242733 5242729 5242734 +
agttgatctttttctaacctcc

SEQ ID NO: 87427 - DNA, 22 bp, Artificial Sequence
  Synthetic oligonucleotide; TTG chr11 5242717 5242738 5242734 5242739 +
atctttttctaacctccaggac

SEQ ID NO: 87428 - DNA, 22 bp, Artificial Sequence
  Synthetic oligonucleotide; CTT chr11 5242722 5242743 5242739 5242744 +
tttctaacctccaggactatgc

SEQ ID NO: 87429 - DNA, 22 bp, Artificial Sequence
  Synthetic oligonucleotide; TTT chr11 5242723 5242744 5242740 5242745 +
ttctaacctccaggactatgca

SEQ ID NO: 87430 - DNA, 22 bp, Artificial Sequence
  Synthetic oligonucleotide; TTT chr11 5242724 5242745 5242741 5242746 +
tctaacctccaggactatgcag

SEQ ID NO: 87431 - DNA, 22 bp, Artificial Sequence
  Synthetic oligonucleotide; TTT chr11 5242725 5242746 5242742 5242747 +
ctaacctccaggactatgcaga

SEQ ID NO: 87432 - DNA, 22 bp, Artificial Sequence
  Synthetic oligonucleotide; TTC chr11 5242726 5242747 5242743 5242748 +
taacctccaggactatgcagaa

SEQ ID NO: 87433 - DNA, 22 bp, Artificial Sequence
  Synthetic oligonucleotide; CTA chr11 5242728 5242749 5242745 5242750 +
acctccaggactatgcagaaaa

SEQ ID NO: 87434 - DNA, 22 bp, Artificial Sequence
  Synthetic oligonucleotide; CTC chr11 5242733 5242754 5242750 5242755 +
caggactatgcagaaaagtgac

SEQ ID NO: 87435 - DNA, 22 bp, Artificial Sequence
  Synthetic oligonucleotide; CTA chr11 5242741 5242762 5242758 5242763 +
tgcagaaaagtgactattaatt

SEQ ID NO: 87436 - DNA, 22 bp, Artificial Sequence
  Synthetic oligonucleotide; CTA chr11 5242757 5242778 5242774 5242779 +
ttaatttttatagaaaatttcg

SEQ ID NO: 87437 - DNA, 22 bp, Artificial Sequence
  Synthetic oligonucleotide; TTA chr11 5242760 5242781 5242777 5242782 +
atttttatagaaaatttcgctg

SEQ ID NO: 87438 - DNA, 22 bp, Artificial Sequence
  Synthetic oligonucleotide; TTT chr11 5242764 5242785 5242781 5242786 +
ttatagaaaatttcgctgacca

SEQ ID NO: 87439 - DNA, 22 bp, Artificial Sequence
  Synthetic oligonucleotide; TTT chr11 5242765 5242786 5242782 5242787 +
tatagaaaatttcgctgaccaa

SEQ ID NO: 87440 - DNA, 22 bp, Artificial Sequence
  Synthetic oligonucleotide; TTT chr11 5242766 5242787 5242783 5242788 +
atagaaaatttcgctgaccaaa

SEQ ID NO: 87441 - DNA, 22 bp, Artificial Sequence
  Synthetic oligonucleotide; TTA chr11 5242767 5242788 5242784 5242789 +
tagaaaatttcgctgaccaaag

SEQ ID NO: 87442 - DNA, 22 bp, Artificial Sequence
  Synthetic oligonucleotide; TTT chr11 5242777 5242798 5242794 5242799 +
cgctgaccaaaggaaagatgtt

SEQ ID NO: 87443 - DNA, 22 bp, Artificial Sequence
  Synthetic oligonucleotide; TTC chr11 5242778 5242799 5242795 5242800 +
gctgaccaaaggaaagatgtta

SEQ ID NO: 87444 - DNA, 22 bp, Artificial Sequence
  Synthetic oligonucleotide; CTG chr11 5242782 5242803 5242799 5242804 +
accaaaggaaagatgttatttt

SEQ ID NO: 87445 - DNA, 22 bp, Artificial Sequence
  Synthetic oligonucleotide; TTA chr11 5242800 5242821 5242817 5242822 +
ttttctctatctcaacttctgt

SEQ ID NO: 87446 - DNA, 22 bp, Artificial Sequence
  Synthetic oligonucleotide; TTT chr11 5242803 5242824 5242820 5242825 +
tctctatctcaacttctgttcc

SEQ ID NO: 87447 - DNA, 22 bp, Artificial Sequence
  Synthetic oligonucleotide; TTT chr11 5242804 5242825 5242821 5242826 +
ctctatctcaacttctgttccc

SEQ ID NO: 87448 - DNA, 22 bp, Artificial Sequence
  Synthetic oligonucleotide; TTC chr11 5242805 5242826 5242822 5242827 +
tctatctcaacttctgttccct

SEQ ID NO: 87449 - DNA, 22 bp, Artificial Sequence
  Synthetic oligonucleotide; CTC chr11 5242807 5242828 5242824 5242829 +
tatctcaacttctgttccctca

SEQ ID NO: 87450 - DNA, 22 bp, Artificial Sequence
  Synthetic oligonucleotide; CTA chr11 5242809 5242830 5242826 5242831 +
tctcaacttctgttccctcatc

SEQ ID NO: 87451 - DNA, 22 bp, Artificial Sequence
  Synthetic oligonucleotide; CTC chr11 5242813 5242834 5242830 5242835 +
aacttctgttccctcatccaaa

SEQ ID NO: 87452 - DNA, 22 bp, Artificial Sequence
  Synthetic oligonucleotide; CTT chr11 5242818 5242839 5242835 5242840 +
ctgttccctcatccaaaaacac

SEQ ID NO: 87453 - DNA, 22 bp, Artificial Sequence
  Synthetic oligonucleotide; TTC chr11 5242819 5242840 5242836 5242841 +
tgttccctcatccaaaaacact

SEQ ID NO: 87454 - DNA, 22 bp, Artificial Sequence
  Synthetic oligonucleotide; CTG chr11 5242821 5242842 5242838 5242843 +
ttccctcatccaaaaacactca

SEQ ID NO: 87455 - DNA, 22 bp, Artificial Sequence
  Synthetic oligonucleotide; TTC chr11 5242824 5242845 5242841 5242846 +
cctcatccaaaaacactcagtt

SEQ ID NO: 87456 - DNA, 22 bp, Artificial Sequence
  Synthetic oligonucleotide; CTC chr11 5242828 5242849 5242845 5242850 +
atccaaaaacactcagtttgat

SEQ ID NO: 87457 - DNA, 22 bp, Artificial Sequence
  Synthetic oligonucleotide; CTC chr11 5242842 5242863 5242859 5242864 +
agtttgattttggccagaattt

SEQ ID NO: 87458 - DNA, 22 bp, Artificial Sequence
  Synthetic oligonucleotide; TTT chr11 5242847 5242868 5242864 5242869 +
gattttggccagaattttttat

SEQ ID NO: 87459 - DNA, 22 bp, Artificial Sequence
  Synthetic oligonucleotide; TTG chr11 5242848 5242869 5242865 5242870 +
attttggccagaattttttata

SEQ ID NO: 87460 - DNA, 22 bp, Artificial Sequence
  Synthetic oligonucleotide; TTT chr11 5242852 5242873 5242869 5242874 +
tggccagaattttttataagat

SEQ ID NO: 87461 - DNA, 22 bp, Artificial Sequence
  Synthetic oligonucleotide; TTT chr11 5242853 5242874 5242870 5242875 +
ggccagaattttttataagatg

SEQ ID NO: 87462 - DNA, 22 bp, Artificial Sequence
  Synthetic oligonucleotide; TTG chr11 5242854 5242875 5242871 5242876 +
gccagaattttttataagatgt

SEQ ID NO: 87463 - DNA, 22 bp, Artificial Sequence
  Synthetic oligonucleotide; TTT chr11 5242864 5242885 5242881 5242886 +
tttataagatgtgtttttcaga

SEQ ID NO: 87464 - DNA, 22 bp, Artificial Sequence
  Synthetic oligonucleotide; TTT chr11 5242865 5242886 5242882 5242887 +
ttataagatgtgtttttcagag

SEQ ID NO: 87465 - DNA, 22 bp, Artificial Sequence
  Synthetic oligonucleotide; TTT chr11 5242866 5242887 5242883 5242888 +
tataagatgtgtttttcagagc

SEQ ID NO: 87466 - DNA, 22 bp, Artificial Sequence
  Synthetic oligonucleotide; TTT chr11 5242867 5242888 5242884 5242889 +
ataagatgtgtttttcagagct

SEQ ID NO: 87467 - DNA, 22 bp, Artificial Sequence
  Synthetic oligonucleotide; TTA chr11 5242868 5242889 5242885 5242890 +
taagatgtgtttttcagagcta

SEQ ID NO: 87468 - DNA, 22 bp, Artificial Sequence
  Synthetic oligonucleotide; TTT chr11 5242880 5242901 5242897 5242902 +
ttcagagctatcaaatggtaag

SEQ ID NO: 87469 - DNA, 22 bp, Artificial Sequence
  Synthetic oligonucleotide; TTT chr11 5242881 5242902 5242898 5242903 +
tcagagctatcaaatggtaagt

SEQ ID NO: 87470 - DNA, 22 bp, Artificial Sequence
  Synthetic oligonucleotide; TTT chr11 5242882 5242903 5242899 5242904 +
cagagctatcaaatggtaagtg

SEQ ID NO: 87471 - DNA, 22 bp, Artificial Sequence
  Synthetic oligonucleotide; TTC chr11 5242883 5242904 5242900 5242905 +
agagctatcaaatggtaagtgg

SEQ ID NO: 87472 - DNA, 22 bp, Artificial Sequence
  Synthetic oligonucleotide; CTA chr11 5242890 5242911 5242907 5242912 +
tcaaatggtaagtggccttcca

SEQ ID NO: 87473 - DNA, 22 bp, Artificial Sequence
  Synthetic oligonucleotide; CTT chr11 5242909 5242930 5242926 5242931 +
ccattattcatagtccttgctc

SEQ ID NO: 87474 - DNA, 22 bp, Artificial Sequence
  Synthetic oligonucleotide; TTC chr11 5242910 5242931 5242927 5242932 +
cattattcatagtccttgctct

SEQ ID NO: 87475 - DNA, 22 bp, Artificial Sequence
  Synthetic oligonucleotide; TTA chr11 5242915 5242936 5242932 5242937 +
ttcatagtccttgctctaccaa

SEQ ID NO: 87476 - DNA, 22 bp, Artificial Sequence
  Synthetic oligonucleotide; TTC chr11 5242918 5242939 5242935 5242940 +
atagtccttgctctaccaaatt

SEQ ID NO: 87477 - DNA, 22 bp, Artificial Sequence
  Synthetic oligonucleotide; CTT chr11 5242927 5242948 5242944 5242949 +
gctctaccaaattttagttatg

SEQ ID NO: 87478 - DNA, 22 bp, Artificial Sequence
  Synthetic oligonucleotide; TTG chr11 5242928 5242949 5242945 5242950 +
ctctaccaaattttagttatgt

SEQ ID NO: 87479 - DNA, 22 bp, Artificial Sequence
  Synthetic oligonucleotide; CTC chr11 5242931 5242952 5242948 5242953 +
taccaaattttagttatgttat

SEQ ID NO: 87480 - DNA, 22 bp, Artificial Sequence
  Synthetic oligonucleotide; CTA chr11 5242933 5242954 5242950 5242955 +
ccaaattttagttatgttattt

SEQ ID NO: 87481 - DNA, 22 bp, Artificial Sequence
  Synthetic oligonucleotide; TTT chr11 5242941 5242962 5242958 5242963 +
tagttatgttatttacagcaac

SEQ ID NO: 87482 - DNA, 22 bp, Artificial Sequence
  Synthetic oligonucleotide; TTT chr11 5242942 5242963 5242959 5242964 +
agttatgttatttacagcaaca

SEQ ID NO: 87483 - DNA, 22 bp, Artificial Sequence
  Synthetic oligonucleotide; TTA chr11 5242943 5242964 5242960 5242965 +
gttatgttatttacagcaacat

SEQ ID NO: 87484 - DNA, 22 bp, Artificial Sequence
  Synthetic oligonucleotide; TTA chr11 5242947 5242968 5242964 5242969 +
tgttatttacagcaacataact

SEQ ID NO: 87485 - DNA, 22 bp, Artificial Sequence
  Synthetic oligonucleotide; TTA chr11 5242952 5242973 5242969 5242974 +
tttacagcaacataactctcaa

SEQ ID NO: 87486 - DNA, 22 bp, Artificial Sequence
  Synthetic oligonucleotide; TTT chr11 5242955 5242976 5242972 5242977 +
acagcaacataactctcaaaat

SEQ ID NO: 87487 - DNA, 22 bp, Artificial Sequence
  Synthetic oligonucleotide; TTA chr11 5242956 5242977 5242973 5242978 +
cagcaacataactctcaaaatc

SEQ ID NO: 87488 - DNA, 22 bp, Artificial Sequence
  Synthetic oligonucleotide; CTC chr11 5242970 5242991 5242987 5242992 +
tcaaaatcccactgctgaaata

SEQ ID NO: 87489 - DNA, 22 bp, Artificial Sequence
  Synthetic oligonucleotide; CTC chr11 5242972 5242993 5242989 5242994 +
aaaatcccactgctgaaatatc

SEQ ID NO: 87490 - DNA, 22 bp, Artificial Sequence
  Synthetic oligonucleotide; CTG chr11 5242984 5243005 5243001 5243006 +
ctgaaatatcatatcccatagc

SEQ ID NO: 87491 - DNA, 22 bp, Artificial Sequence
  Synthetic oligonucleotide; CTG chr11 5242987 5243008 5243004 5243009 +
aaatatcatatcccatagctga

SEQ ID NO: 87492 - DNA, 22 bp, Artificial Sequence
  Synthetic oligonucleotide; CTG chr11 5243008 5243029 5243025 5243030 +
actcataacacaagagaaagcc

SEQ ID NO: 87493 - DNA, 22 bp, Artificial Sequence
  Synthetic oligonucleotide; CTC chr11 5243012 5243033 5243029 5243034 +
ataacacaagagaaagccacct

SEQ ID NO: 87494 - DNA, 22 bp, Artificial Sequence
  Synthetic oligonucleotide; CTC chr11 5243035 5243056 5243052 5243057 +
tgctttcaaaagtacccatagt

SEQ ID NO: 87495 - DNA, 22 bp, Artificial Sequence
  Synthetic oligonucleotide; CTG chr11 5243037 5243058 5243054 5243059 +
ctttcaaaagtacccatagtgc

SEQ ID NO: 87496 - DNA, 22 bp, Artificial Sequence
  Synthetic oligonucleotide; CTT chr11 5243040 5243061 5243057 5243062 +
tcaaaagtacccatagtgcaaa

SEQ ID NO: 87497 - DNA, 22 bp, Artificial Sequence
  Synthetic oligonucleotide; TTT chr11 5243041 5243062 5243058 5243063 +
caaaagtacccatagtgcaaat

SEQ ID NO: 87498 - DNA, 22 bp, Artificial Sequence
  Synthetic oligonucleotide; TTC chr11 5243042 5243063 5243059 5243064 +
aaaagtacccatagtgcaaata

SEQ ID NO: 87499 - DNA, 22 bp, Artificial Sequence
  Synthetic oligonucleotide; CTA chr11 5243068 5243089 5243085 5243090 +
agggtaaagaagaaagcgtgag

SEQ ID NO: 87500 - DNA, 22 bp, Artificial Sequence
  Synthetic oligonucleotide; CTT chr11 5243097 5243118 5243114 5243119 +
actactcaccaggaagttctca

SEQ ID NO: 87501 - DNA, 22 bp, Artificial Sequence
  Synthetic oligonucleotide; TTA chr11 5243098 5243119 5243115 5243120 +
ctactcaccaggaagttctcag

SEQ ID NO: 87502 - DNA, 22 bp, Artificial Sequence
  Synthetic oligonucleotide; CTA chr11 5243101 5243122 5243118 5243123 +
ctcaccaggaagttctcagggt

SEQ ID NO: 87503 - DNA, 22 bp, Artificial Sequence
  Synthetic oligonucleotide; CTC chr11 5243104 5243125 5243121 5243126 +
accaggaagttctcagggtcca

SEQ ID NO: 87504 - DNA, 22 bp, Artificial Sequence
  Synthetic oligonucleotide; TTC chr11 5243116 5243137 5243133 5243138 +
tcagggtccacgtgcagcttgt

SEQ ID NO: 87505 - DNA, 22 bp, Artificial Sequence
  Synthetic oligonucleotide; CTC chr11 5243118 5243139 5243135 5243140 +
agggtccacgtgcagcttgtta

SEQ ID NO: 87506 - DNA, 22 bp, Artificial Sequence
  Synthetic oligonucleotide; CTT chr11 5243136 5243157 5243153 5243158 +
gttacagtgcaggtcactcagt

SEQ ID NO: 87507 - DNA, 22 bp, Artificial Sequence
  Synthetic oligonucleotide; TTG chr11 5243137 5243158 5243154 5243159 +
ttacagtgcaggtcactcagtg

SEQ ID NO: 87508 - DNA, 22 bp, Artificial Sequence
  Synthetic oligonucleotide; TTA chr11 5243140 5243161 5243157 5243162 +
cagtgcaggtcactcagtgtag

SEQ ID NO: 87509 - DNA, 22 bp, Artificial Sequence
  Synthetic oligonucleotide; CTC chr11 5243155 5243176 5243172 5243177 +
agtgtagcaaaggtgcctttga

SEQ ID NO: 87510 - DNA, 22 bp, Artificial Sequence
  Synthetic oligonucleotide; CTT chr11 5243174 5243195 5243191 5243196 +
tgaggtcatccgtgagcataac

SEQ ID NO: 87511 - DNA, 22 bp, Artificial Sequence
  Synthetic oligonucleotide; TTT chr11 5243175 5243196 5243192 5243197 +
gaggtcatccgtgagcataaca

SEQ ID NO: 87512 - DNA, 22 bp, Artificial Sequence
  Synthetic oligonucleotide; TTG chr11 5243176 5243197 5243193 5243198 +
aggtcatccgtgagcataacag

SEQ ID NO: 87513 - DNA, 22 bp, Artificial Sequence
  Synthetic oligonucleotide; CTT chr11 5243201 5243222 5243218 5243223 +
ttccgaaggagatcagcacctt

SEQ ID NO: 87514 - DNA, 22 bp, Artificial Sequence
  Synthetic oligonucleotide; TTT chr11 5243202 5243223 5243219 5243224 +
tccgaaggagatcagcaccttc

SEQ ID NO: 87515 - DNA, 22 bp, Artificial Sequence
  Synthetic oligonucleotide; TTT chr11 5243203 5243224 5243220 5243225 +
ccgaaggagatcagcaccttct

SEQ ID NO: 87516 - DNA, 22 bp, Artificial Sequence
  Synthetic oligonucleotide; TTC chr11 5243204 5243225 5243221 5243226 +
cgaaggagatcagcaccttctt

SEQ ID NO: 87517 - DNA, 22 bp, Artificial Sequence
  Synthetic oligonucleotide; CTT chr11 5243223 5243244 5243240 5243245 +
cttgccatgtgccttgactttg

SEQ ID NO: 87518 - DNA, 22 bp, Artificial Sequence
  Synthetic oligonucleotide; TTC chr11 5243224 5243245 5243241 5243246 +
ttgccatgtgccttgactttgg

SEQ ID NO: 87519 - DNA, 22 bp, Artificial Sequence
  Synthetic oligonucleotide; CTT chr11 5243226 5243247 5243243 5243248 +
gccatgtgccttgactttgggg

SEQ ID NO: 87520 - DNA, 22 bp, Artificial Sequence
  Synthetic oligonucleotide; TTG chr11 5243227 5243248 5243244 5243249 +
ccatgtgccttgactttggggt

SEQ ID NO: 87521 - DNA, 22 bp, Artificial Sequence
  Synthetic oligonucleotide; CTT chr11 5243238 5243259 5243255 5243260 +
gactttggggttgcccattatt

SEQ ID NO: 87522 - DNA, 22 bp, Artificial Sequence
  Synthetic oligonucleotide; TTG chr11 5243239 5243260 5243256 5243261 +
actttggggttgcccattattg

SEQ ID NO: 87523 - DNA, 22 bp, Artificial Sequence
  Synthetic oligonucleotide; CTT chr11 5243243 5243264 5243260 5243265 +
tggggttgcccattattgcaca

SEQ ID NO: 87524 - DNA, 22 bp, Artificial Sequence
  Synthetic oligonucleotide; TTT chr11 5243244 5243265 5243261 5243266 +
ggggttgcccattattgcacag

SEQ ID NO: 87525 - DNA, 22 bp, Artificial Sequence
  Synthetic oligonucleotide; TTG chr11 5243245 5243266 5243262 5243267 +
gggttgcccattattgcacagt

SEQ ID NO: 87526 - DNA, 22 bp, Artificial Sequence
  Synthetic oligonucleotide; TTG chr11 5243251 5243272 5243268 5243273 +
cccattattgcacagtcagagc

SEQ ID NO: 87527 - DNA, 22 bp, Artificial Sequence
  Synthetic oligonucleotide; TTA chr11 5243258 5243279 5243275 5243280 +
ttgcacagtcagagcccagata

SEQ ID NO: 87528 - DNA, 22 bp, Artificial Sequence
  Synthetic oligonucleotide; TTG chr11 5243261 5243282 5243278 5243283 +
cacagtcagagcccagatatcc

SEQ ID NO: 87529 - DNA, 22 bp, Artificial Sequence
  Synthetic oligonucleotide; CTT chr11 5243290 5243311 5243307 5243312 +
tcaaagtacctctaggtccatg

SEQ ID NO: 87530 - DNA, 22 bp, Artificial Sequence
  Synthetic oligonucleotide; TTT chr11 5243291 5243312 5243308 5243313 +
caaagtacctctaggtccatgg

SEQ ID NO: 87531 - DNA, 22 bp, Artificial Sequence
  Synthetic oligonucleotide; TTC chr11 5243292 5243313 5243309 5243314 +
aaagtacctctaggtccatggg

SEQ ID NO: 87532 - DNA, 22 bp, Artificial Sequence
  Synthetic oligonucleotide; CTC chr11 5243302 5243323 5243319 5243324 +
taggtccatgggtagacaacca

SEQ ID NO: 87533 - DNA, 22 bp, Artificial Sequence
  Synthetic oligonucleotide; CTA chr11 5243304 5243325 5243321 5243326 +
ggtccatgggtagacaaccagg

SEQ ID NO: 87534 - DNA, 22 bp, Artificial Sequence
  Synthetic oligonucleotide; CTG chr11 5243332 5243353 5243349 5243354 +
tgggatagtcataatcacagag

SEQ ID NO: 87535 - DNA, 22 bp, Artificial Sequence
  Synthetic oligonucleotide; CTA chr11 5243373 5243394 5243390 5243395 +
tgtaagacaacgggctaatccc

SEQ ID NO: 87536 - DNA, 22 bp, Artificial Sequence
  Synthetic oligonucleotide; CTA chr11 5243390 5243411 5243407 5243412 +
atccctctttcagaaacacttt

SEQ ID NO: 87537 - DNA, 22 bp, Artificial Sequence
  Synthetic oligonucleotide; CTC chr11 5243397 5243418 5243414 5243419 +
tttcagaaacactttctgcctt

SEQ ID NO: 87538 - DNA, 22 bp, Artificial Sequence
  Synthetic oligonucleotide; CTT chr11 5243399 5243420 5243416 5243421 +
tcagaaacactttctgcctttc

SEQ ID NO: 87539 - DNA, 22 bp, Artificial Sequence
  Synthetic oligonucleotide; TTT chr11 5243400 5243421 5243417 5243422 +
cagaaacactttctgcctttct

SEQ ID NO: 87540 - DNA, 22 bp, Artificial Sequence
  Synthetic oligonucleotide; TTC chr11 5243401 5243422 5243418 5243423 +
agaaacactttctgcctttctg

SEQ ID NO: 87541 - DNA, 22 bp, Artificial Sequence
  Synthetic oligonucleotide; CTT chr11 5243411 5243432 5243428 5243433 +
tctgcctttctgcaccttgtcc

SEQ ID NO: 87542 - DNA, 22 bp, Artificial Sequence
  Synthetic oligonucleotide; TTT chr11 5243412 5243433 5243429 5243434 +
ctgcctttctgcaccttgtccc

SEQ ID NO: 87543 - DNA, 22 bp, Artificial Sequence
  Synthetic oligonucleotide; TTC chr11 5243413 5243434 5243430 5243435 +
tgcctttctgcaccttgtcccg

SEQ ID NO: 87544 - DNA, 22 bp, Artificial Sequence
  Synthetic oligonucleotide; CTG chr11 5243415 5243436 5243432 5243437 +
cctttctgcaccttgtcccggc

SEQ ID NO: 87545 - DNA, 22 bp, Artificial Sequence
  Synthetic oligonucleotide; CTT chr11 5243419 5243440 5243436 5243441 +
tctgcaccttgtcccggcttcc

SEQ ID NO: 87546 - DNA, 22 bp, Artificial Sequence
  Synthetic oligonucleotide; TTT chr11 5243420 5243441 5243437 5243442 +
ctgcaccttgtcccggcttcca

SEQ ID NO: 87547 - DNA, 22 bp, Artificial Sequence
  Synthetic oligonucleotide; TTC chr11 5243421 5243442 5243438 5243443 +
tgcaccttgtcccggcttccag

SEQ ID NO: 87548 - DNA, 22 bp, Artificial Sequence
  Synthetic oligonucleotide; CTG chr11 5243423 5243444 5243440 5243445 +
caccttgtcccggcttccagta

SEQ ID NO: 87549 - DNA, 22 bp, Artificial Sequence
  Synthetic oligonucleotide; CTT chr11 5243429 5243450 5243446 5243451 +
gtcccggcttccagtacctacc

SEQ ID NO: 87550 - DNA, 22 bp, Artificial Sequence
  Synthetic oligonucleotide; TTG chr11 5243430 5243451 5243447 5243452 +
tcccggcttccagtacctacct

SEQ ID NO: 87551 - DNA, 22 bp, Artificial Sequence
  Synthetic oligonucleotide; CTT chr11 5243439 5243460 5243456 5243461 +
ccagtacctacctgcccagaat

SEQ ID NO: 87552 - DNA, 22 bp, Artificial Sequence
  Synthetic oligonucleotide; TTC chr11 5243440 5243461 5243457 5243462 +
cagtacctacctgcccagaatc

SEQ ID NO: 87553 - DNA, 22 bp, Artificial Sequence
  Synthetic oligonucleotide; CTA chr11 5243449 5243470 5243466 5243471 +
cctgcccagaatctcacctcca

SEQ ID NO: 87554 - DNA, 22 bp, Artificial Sequence
  Synthetic oligonucleotide; CTG chr11 5243453 5243474 5243470 5243475 +
cccagaatctcacctccagcct

SEQ ID NO: 87555 - DNA, 22 bp, Artificial Sequence
  Synthetic oligonucleotide; CTC chr11 5243464 5243485 5243481 5243486 +
acctccagccttctcaccttaa

SEQ ID NO: 87556 - DNA, 22 bp, Artificial Sequence
  Synthetic oligonucleotide; CTC chr11 5243469 5243490 5243486 5243491 +
cagccttctcaccttaaccttg

SEQ ID NO: 87557 - DNA, 22 bp, Artificial Sequence
  Synthetic oligonucleotide; CTT chr11 5243476 5243497 5243493 5243498 +
ctcaccttaaccttgcttcaca

SEQ ID NO: 87558 - DNA, 22 bp, Artificial Sequence
  Synthetic oligonucleotide; TTC chr11 5243477 5243498 5243494 5243499 +
tcaccttaaccttgcttcacag

SEQ ID NO: 87559 - DNA, 22 bp, Artificial Sequence
  Synthetic oligonucleotide; CTC chr11 5243479 5243500 5243496 5243501 +
accttaaccttgcttcacaggc

SEQ ID NO: 87560 - DNA, 22 bp, Artificial Sequence
  Synthetic oligonucleotide; CTT chr11 5243484 5243505 5243501 5243506 +
aaccttgcttcacaggctggtg

SEQ ID NO: 87561 - DNA, 22 bp, Artificial Sequence
  Synthetic oligonucleotide; TTA chr11 5243485 5243506 5243502 5243507 +
accttgcttcacaggctggtgg

SEQ ID NO: 87562 - DNA, 22 bp, Artificial Sequence
  Synthetic oligonucleotide; CTT chr11 5243490 5243511 5243507 5243512 +
gcttcacaggctggtggcagca

SEQ ID NO: 87563 - DNA, 22 bp, Artificial Sequence
  Synthetic oligonucleotide; TTG chr11 5243491 5243512 5243508 5243513 +
cttcacaggctggtggcagcag

SEQ ID NO: 87564 - DNA, 22 bp, Artificial Sequence
  Synthetic oligonucleotide; CTT chr11 5243494 5243515 5243511 5243516 +
cacaggctggtggcagcagcct

SEQ ID NO: 87565 - DNA, 22 bp, Artificial Sequence
  Synthetic oligonucleotide; TTC chr11 5243495 5243516 5243512 5243517 +
acaggctggtggcagcagcctt

SEQ ID NO: 87566 - DNA, 22 bp, Artificial Sequence
  Synthetic oligonucleotide; CTG chr11 5243503 5243524 5243520 5243525 +
gtggcagcagccttcttgtcag

SEQ ID NO: 87567 - DNA, 22 bp, Artificial Sequence
  Synthetic oligonucleotide; CTT chr11 5243517 5243538 5243534 5243539 +
cttgtcagcagtgaaatgcact

SEQ ID NO: 87568 - DNA, 22 bp, Artificial Sequence
  Synthetic oligonucleotide; TTC chr11 5243518 5243539 5243535 5243540 +
ttgtcagcagtgaaatgcacta

SEQ ID NO: 87569 - DNA, 22 bp, Artificial Sequence
  Synthetic oligonucleotide; CTT chr11 5243520 5243541 5243537 5243542 +
gtcagcagtgaaatgcactaca

SEQ ID NO: 87570 - DNA, 22 bp, Artificial Sequence
  Synthetic oligonucleotide; TTG chr11 5243521 5243542 5243538 5243543 +
tcagcagtgaaatgcactacag

SEQ ID NO: 87571 - DNA, 22 bp, Artificial Sequence
  Synthetic oligonucleotide; CTA chr11 5243540 5243561 5243557 5243562 +
cagtgtcagatctgggagtttc

SEQ ID NO: 87572 - DNA, 22 bp, Artificial Sequence
  Synthetic oligonucleotide; CTG chr11 5243554 5243575 5243571 5243576 +
ggagtttcctggtgatcacaga

SEQ ID NO: 87573 - DNA, 22 bp, Artificial Sequence
  Synthetic oligonucleotide; TTT chr11 5243561 5243582 5243578 5243583 +
cctggtgatcacagatgagcca

SEQ ID NO: 87574 - DNA, 22 bp, Artificial Sequence
  Synthetic oligonucleotide; TTC chr11 5243562 5243583 5243579 5243584 +
ctggtgatcacagatgagccag

SEQ ID NO: 87575 - DNA, 22 bp, Artificial Sequence
  Synthetic oligonucleotide; CTG chr11 5243565 5243586 5243582 5243587 +
gtgatcacagatgagccagaag

SEQ ID NO: 87576 - DNA, 22 bp, Artificial Sequence
  Synthetic oligonucleotide; CTG chr11 5243595 5243616 5243612 5243617 +
cattgctgcttcatgtgtggct

SEQ ID NO: 87577 - DNA, 22 bp, Artificial Sequence
  Synthetic oligonucleotide; TTG chr11 5243600 5243621 5243617 5243622 +
ctgcttcatgtgtggcttttta

SEQ ID NO: 87578 - DNA, 22 bp, Artificial Sequence
  Synthetic oligonucleotide; CTG chr11 5243603 5243624 5243620 5243625 +
cttcatgtgtggctttttactt

SEQ ID NO: 87579 - DNA, 22 bp, Artificial Sequence
  Synthetic oligonucleotide; CTT chr11 5243606 5243627 5243623 5243628 +
catgtgtggctttttacttctc

SEQ ID NO: 87580 - DNA, 22 bp, Artificial Sequence
  Synthetic oligonucleotide; TTC chr11 5243607 5243628 5243624 5243629 +
atgtgtggctttttacttctcc

SEQ ID NO: 87581 - DNA, 22 bp, Artificial Sequence
  Synthetic oligonucleotide; CTT chr11 5243618 5243639 5243635 5243640 +
tttacttctcctctctggcccc

SEQ ID NO: 87582 - DNA, 22 bp, Artificial Sequence
  Synthetic oligonucleotide; TTT chr11 5243619 5243640 5243636 5243641 +
ttacttctcctctctggccccc

SEQ ID NO: 87583 - DNA, 22 bp, Artificial Sequence
  Synthetic oligonucleotide; TTT chr11 5243620 5243641 5243637 5243642 +
tacttctcctctctggccccca

SEQ ID NO: 87584 - DNA, 22 bp, Artificial Sequence
  Synthetic oligonucleotide; TTT chr11 5243621 5243642 5243638 5243643 +
acttctcctctctggcccccag

SEQ ID NO: 87585 - DNA, 22 bp, Artificial Sequence
  Synthetic oligonucleotide; TTA chr11 5243622 5243643 5243639 5243644 +
cttctcctctctggcccccagc

SEQ ID NO: 87586 - DNA, 22 bp, Artificial Sequence
  Synthetic oligonucleotide; CTT chr11 5243625 5243646 5243642 5243647 +
ctcctctctggcccccagccct

SEQ ID NO: 87587 - DNA, 22 bp, Artificial Sequence
  Synthetic oligonucleotide; TTC chr11 5243626 5243647 5243643 5243648 +
tcctctctggcccccagccctt

SEQ ID NO: 87588 - DNA, 22 bp, Artificial Sequence
  Synthetic oligonucleotide; CTC chr11 5243628 5243649 5243645 5243650 +
ctctctggcccccagccctttg

SEQ ID NO: 87589 - DNA, 22 bp, Artificial Sequence
  Synthetic oligonucleotide; CTC chr11 5243631 5243652 5243648 5243653 +
tctggcccccagccctttgcct

SEQ ID NO: 87590 - DNA, 22 bp, Artificial Sequence
  Synthetic oligonucleotide; CTC chr11 5243633 5243654 5243650 5243655 +
tggcccccagccctttgcctct

SEQ ID NO: 87591 - DNA, 22 bp, Artificial Sequence
  Synthetic oligonucleotide; CTG chr11 5243635 5243656 5243652 5243657 +
gcccccagccctttgcctctcc

SEQ ID NO: 87592 - DNA, 22 bp, Artificial Sequence
  Synthetic oligonucleotide; CTT chr11 5243648 5243669 5243665 5243670 +
tgcctctcccagtgaaatgaat

SEQ ID NO: 87593 - DNA, 22 bp, Artificial Sequence
  Synthetic oligonucleotide; TTT chr11 5243649 5243670 5243666 5243671 +
gcctctcccagtgaaatgaatc

SEQ ID NO: 87594 - DNA, 22 bp, Artificial Sequence
  Synthetic oligonucleotide; TTG chr11 5243650 5243671 5243667 5243672 +
cctctcccagtgaaatgaatct

SEQ ID NO: 87595 - DNA, 22 bp, Artificial Sequence
  Synthetic oligonucleotide; CTC chr11 5243654 5243675 5243671 5243676 +
tcccagtgaaatgaatctattg

SEQ ID NO: 87596 - DNA, 22 bp, Artificial Sequence
  Synthetic oligonucleotide; CTC chr11 5243656 5243677 5243673 5243678 +
ccagtgaaatgaatctattgac

SEQ ID NO: 87597 - DNA, 22 bp, Artificial Sequence
  Synthetic oligonucleotide; CTA chr11 5243673 5243694 5243690 5243695 +
ttgaccagccctttgcctccct

SEQ ID NO: 87598 - DNA, 22 bp, Artificial Sequence
  Synthetic oligonucleotide; TTG chr11 5243676 5243697 5243693 5243698 +
accagccctttgcctccctcag

SEQ ID NO: 87599 - DNA, 22 bp, Artificial Sequence
  Synthetic oligonucleotide; CTT chr11 5243686 5243707 5243703 5243708 +
tgcctccctcagtaaaatgaat

SEQ ID NO: 87600 - DNA, 22 bp, Artificial Sequence
  Synthetic oligonucleotide; TTT chr11 5243687 5243708 5243704 5243709 +
gcctccctcagtaaaatgaatc

SEQ ID NO: 87601 - DNA, 22 bp, Artificial Sequence
  Synthetic oligonucleotide; TTG chr11 5243688 5243709 5243705 5243710 +
cctccctcagtaaaatgaatct

SEQ ID NO: 87602 - DNA, 22 bp, Artificial Sequence
  Synthetic oligonucleotide; CTC chr11 5243692 5243713 5243709 5243714 +
cctcagtaaaatgaatctattg

SEQ ID NO: 87603 - DNA, 22 bp, Artificial Sequence
  Synthetic oligonucleotide; CTC chr11 5243696 5243717 5243713 5243718 +
agtaaaatgaatctattggtca

SEQ ID NO: 87604 - DNA, 22 bp, Artificial Sequence
  Synthetic oligonucleotide; CTA chr11 5243711 5243732 5243728 5243733 +
ttggtcaagggtgggttgtgac

SEQ ID NO: 87605 - DNA, 22 bp, Artificial Sequence
  Synthetic oligonucleotide; TTG chr11 5243714 5243735 5243731 5243736 +
gtcaagggtgggttgtgactcc

SEQ ID NO: 87606 - DNA, 22 bp, Artificial Sequence
  Synthetic oligonucleotide; TTG chr11 5243729 5243750 5243746 5243751 +
tgactccaggggtggggtttgg

SEQ ID NO: 87607 - DNA, 22 bp, Artificial Sequence
  Synthetic oligonucleotide; CTC chr11 5243735 5243756 5243752 5243757 +
caggggtggggtttgggcaagg

SEQ ID NO: 87608 - DNA, 22 bp, Artificial Sequence
  Synthetic oligonucleotide; TTT chr11 5243749 5243770 5243766 5243771 +
gggcaaggaagttttgcaagat

SEQ ID NO: 87609 - DNA, 22 bp, Artificial Sequence
  Synthetic oligonucleotide; TTG chr11 5243750 5243771 5243767 5243772 +
ggcaaggaagttttgcaagatg

SEQ ID NO: 87610 - DNA, 22 bp, Artificial Sequence
  Synthetic oligonucleotide; TTT chr11 5243763 5243784 5243780 5243785 +
tgcaagatggacattcgagttt

SEQ ID NO: 87611 - DNA, 22 bp, Artificial Sequence
  Synthetic oligonucleotide; TTT chr11 5243764 5243785 5243781 5243786 +
gcaagatggacattcgagtttc

SEQ ID NO: 87612 - DNA, 22 bp, Artificial Sequence
  Synthetic oligonucleotide; TTG chr11 5243765 5243786 5243782 5243787 +
caagatggacattcgagtttct

SEQ ID NO: 87613 - DNA, 22 bp, Artificial Sequence
  Synthetic oligonucleotide; TTC chr11 5243779 5243800 5243796 5243801 +
gagtttctgatagaatccaggt

SEQ ID NO: 87614 - DNA, 22 bp, Artificial Sequence
  Synthetic oligonucleotide; TTT chr11 5243785 5243806 5243802 5243807 +
ctgatagaatccaggtggcctt

SEQ ID NO: 87615 - DNA, 22 bp, Artificial Sequence
  Synthetic oligonucleotide; TTC chr11 5243786 5243807 5243803 5243808 +
tgatagaatccaggtggccttc

SEQ ID NO: 87616 - DNA, 22 bp, Artificial Sequence
  Synthetic oligonucleotide; CTG chr11 5243788 5243809 5243805 5243810 +
atagaatccaggtggccttctc

SEQ ID NO: 87617 - DNA, 22 bp, Artificial Sequence
  Synthetic oligonucleotide; CTT chr11 5243807 5243828 5243824 5243829 +
ctcaggggaactttgctgttca

SEQ ID NO: 87618 - DNA, 22 bp, Artificial Sequence
  Synthetic oligonucleotide; TTC chr11 5243808 5243829 5243825 5243830 +
tcaggggaactttgctgttcag

SEQ ID NO: 87619 - DNA, 22 bp, Artificial Sequence
  Synthetic oligonucleotide; CTC chr11 5243810 5243831 5243827 5243832 +
aggggaactttgctgttcaggc

SEQ ID NO: 87620 - DNA, 22 bp, Artificial Sequence
  Synthetic oligonucleotide; CTT chr11 5243820 5243841 5243837 5243842 +
tgctgttcaggcttaatttgaa

SEQ ID NO: 87621 - DNA, 22 bp, Artificial Sequence
  Synthetic oligonucleotide; TTT chr11 5243821 5243842 5243838 5243843 +
gctgttcaggcttaatttgaaa

SEQ ID NO: 87622 - DNA, 22 bp, Artificial Sequence
  Synthetic oligonucleotide; TTG chr11 5243822 5243843 5243839 5243844 +
ctgttcaggcttaatttgaaac

SEQ ID NO: 87623 - DNA, 22 bp, Artificial Sequence
  Synthetic oligonucleotide; CTG chr11 5243825 5243846 5243842 5243847 +
ttcaggcttaatttgaaacttt

SEQ ID NO: 87624 - DNA, 22 bp, Artificial Sequence
  Synthetic oligonucleotide; TTC chr11 5243828 5243849 5243845 5243850 +
aggcttaatttgaaactttact

SEQ ID NO: 87625 - DNA, 22 bp, Artificial Sequence
  Synthetic oligonucleotide; CTT chr11 5243834 5243855 5243851 5243856 +
aatttgaaactttacttccttc

SEQ ID NO: 87626 - DNA, 22 bp, Artificial Sequence
  Synthetic oligonucleotide; TTA chr11 5243835 5243856 5243852 5243857 +
atttgaaactttacttccttcc

SEQ ID NO: 87627 - DNA, 22 bp, Artificial Sequence
  Synthetic oligonucleotide; TTT chr11 5243839 5243860 5243856 5243861 +
gaaactttacttccttcccctc

SEQ ID NO: 87628 - DNA, 22 bp, Artificial Sequence
  Synthetic oligonucleotide; TTG chr11 5243840 5243861 5243857 5243862 +
aaactttacttccttcccctcc

SEQ ID NO: 87629 - DNA, 22 bp, Artificial Sequence
  Synthetic oligonucleotide; CTT chr11 5243846 5243867 5243863 5243868 +
tacttccttcccctccattttc

SEQ ID NO: 87630 - DNA, 22 bp, Artificial Sequence
  Synthetic oligonucleotide; TTT chr11 5243847 5243868 5243864 5243869 +
acttccttcccctccattttcc

SEQ ID NO: 87631 - DNA, 22 bp, Artificial Sequence
  Synthetic oligonucleotide; TTA chr11 5243848 5243869 5243865 5243870 +
cttccttcccctccattttcct

SEQ ID NO: 87632 - DNA, 22 bp, Artificial Sequence
  Synthetic oligonucleotide; CTT chr11 5243851 5243872 5243868 5243873 +
ccttcccctccattttcctaca

SEQ ID NO: 87633 - DNA, 22 bp, Artificial Sequence
  Synthetic oligonucleotide; TTC chr11 5243852 5243873 5243869 5243874 +
cttcccctccattttcctacac

SEQ ID NO: 87634 - DNA, 22 bp, Artificial Sequence
  Synthetic oligonucleotide; CTT chr11 5243855 5243876 5243872 5243877 +
cccctccattttcctacactac

SEQ ID NO: 87635 - DNA, 22 bp, Artificial Sequence
  Synthetic oligonucleotide; TTC chr11 5243856 5243877 5243873 5243878 +
ccctccattttcctacactacc

SEQ ID NO: 87636 - DNA, 22 bp, Artificial Sequence
  Synthetic oligonucleotide; CTC chr11 5243861 5243882 5243878 5243883 +
cattttcctacactacccccac

SEQ ID NO: 87637 - DNA, 22 bp, Artificial Sequence
  Synthetic oligonucleotide; TTT chr11 5243866 5243887 5243883 5243888 +
tcctacactacccccaccatcc

SEQ ID NO: 87638 - DNA, 22 bp, Artificial Sequence
  Synthetic oligonucleotide; TTT chr11 5243867 5243888 5243884 5243889 +
cctacactacccccaccatcca

SEQ ID NO: 87639 - DNA, 22 bp, Artificial Sequence
  Synthetic oligonucleotide; TTC chr11 5243868 5243889 5243885 5243890 +
ctacactacccccaccatccag

SEQ ID NO: 87640 - DNA, 22 bp, Artificial Sequence
  Synthetic oligonucleotide; CTA chr11 5243871 5243892 5243888 5243893 +
cactacccccaccatccagtgt

SEQ ID NO: 87641 - DNA, 22 bp, Artificial Sequence
  Synthetic oligonucleotide; CTA chr11 5243876 5243897 5243893 5243898 +
cccccaccatccagtgtgcagt

SEQ ID NO: 87642 - DNA, 22 bp, Artificial Sequence
  Synthetic oligonucleotide; TTT chr11 5243900 5243921 5243917 5243922 +
atttctcaaggacttcgccagc

SEQ ID NO: 87643 - DNA, 22 bp, Artificial Sequence
  Synthetic oligonucleotide; TTA chr11 5243901 5243922 5243918 5243923 +
tttctcaaggacttcgccagca

SEQ ID NO: 87644 - DNA, 22 bp, Artificial Sequence
  Synthetic oligonucleotide; TTT chr11 5243904 5243925 5243921 5243926 +
ctcaaggacttcgccagcagcc

SEQ ID NO: 87645 - DNA, 22 bp, Artificial Sequence
  Synthetic oligonucleotide; TTC chr11 5243905 5243926 5243922 5243927 +
tcaaggacttcgccagcagccg

SEQ ID NO: 87646 - DNA, 22 bp, Artificial Sequence
  Synthetic oligonucleotide; CTC chr11 5243907 5243928 5243924 5243929 +
aaggacttcgccagcagccgct

SEQ ID NO: 87647 - DNA, 22 bp, Artificial Sequence
  Synthetic oligonucleotide; CTT chr11 5243915 5243936 5243932 5243937 +
cgccagcagccgctaataacct

SEQ ID NO: 87648 - DNA, 22 bp, Artificial Sequence
  Synthetic oligonucleotide; TTC chr11 5243916 5243937 5243933 5243938 +
gccagcagccgctaataacctg

SEQ ID NO: 87649 - DNA, 22 bp, Artificial Sequence
  Synthetic oligonucleotide; CTA chr11 5243930 5243951 5243947 5243952 +
ataacctgaatgctgacaaata

SEQ ID NO: 87650 - DNA, 22 bp, Artificial Sequence
  Synthetic oligonucleotide; CTG chr11 5243938 5243959 5243955 5243960 +
aatgctgacaaataggaataag

SEQ ID NO: 87651 - DNA, 22 bp, Artificial Sequence
  Synthetic oligonucleotide; CTG chr11 5243945 5243966 5243962 5243967 +
acaaataggaataagttacaac

SEQ ID NO: 87652 - DNA, 22 bp, Artificial Sequence
  Synthetic oligonucleotide; TTA chr11 5243963 5243984 5243980 5243985 +
caactgaaaaggataagaatta

SEQ ID NO: 87653 - DNA, 22 bp, Artificial Sequence
  Synthetic oligonucleotide; CTG chr11 5243969 5243990 5243986 5243991 +
aaaaggataagaattacgaata

SEQ ID NO: 87654 - DNA, 22 bp, Artificial Sequence
  Synthetic oligonucleotide; TTA chr11 5243985 5244006 5244002 5244007 +
cgaatatcttagccatcaattc

SEQ ID NO: 87655 - DNA, 22 bp, Artificial Sequence
  Synthetic oligonucleotide; CTT chr11 5243995 5244016 5244012 5244017 +
agccatcaattcctggatcagg

SEQ ID NO: 87656 - DNA, 22 bp, Artificial Sequence
  Synthetic oligonucleotide; TTA chr11 5243996 5244017 5244013 5244018 +
gccatcaattcctggatcagga

SEQ ID NO: 87657 - DNA, 22 bp, Artificial Sequence
  Synthetic oligonucleotide; TTC chr11 5244007 5244028 5244024 5244029 +
ctggatcaggagttgtgacaat

SEQ ID NO: 87658 - DNA, 22 bp, Artificial Sequence
  Synthetic oligonucleotide; CTG chr11 5244010 5244031 5244027 5244032 +
gatcaggagttgtgacaatgta

SEQ ID NO: 87659 - DNA, 22 bp, Artificial Sequence
  Synthetic oligonucleotide; TTG chr11 5244022 5244043 5244039 5244044 +
tgacaatgtaacaacgtgttat

SEQ ID NO: 87660 - DNA, 22 bp, Artificial Sequence
  Synthetic oligonucleotide; TTA chr11 5244043 5244064 5244060 5244065 +
tcctgttattcatccaggcttt

SEQ ID NO: 87661 - DNA, 22 bp, Artificial Sequence
  Synthetic oligonucleotide; CTG chr11 5244048 5244069 5244065 5244070 +
ttattcatccaggctttatgtg

SEQ ID NO: 87662 - DNA, 22 bp, Artificial Sequence
  Synthetic oligonucleotide; TTA chr11 5244051 5244072 5244068 5244073 +
ttcatccaggctttatgtggaa

SEQ ID NO: 87663 - DNA, 22 bp, Artificial Sequence
  Synthetic oligonucleotide; TTC chr11 5244054 5244075 5244071 5244076 +
atccaggctttatgtggaagaa

SEQ ID NO: 87664 - DNA, 22 bp, Artificial Sequence
  Synthetic oligonucleotide; CTT chr11 5244064 5244085 5244081 5244086 +
tatgtggaagaagccacagcct

SEQ ID NO: 87665 - DNA, 22 bp, Artificial Sequence
  Synthetic oligonucleotide; TTT chr11 5244065 5244086 5244082 5244087 +
atgtggaagaagccacagcctt

SEQ ID NO: 87666 - DNA, 22 bp, Artificial Sequence
  Synthetic oligonucleotide; TTA chr11 5244066 5244087 5244083 5244088 +
tgtggaagaagccacagccttt

SEQ ID NO: 87667 - DNA, 22 bp, Artificial Sequence
  Synthetic oligonucleotide; CTT chr11 5244087 5244108 5244104 5244109 +
tcttggttttcaattctcttga

SEQ ID NO: 87668 - DNA, 22 bp, Artificial Sequence
  Synthetic oligonucleotide; TTT chr11 5244088 5244109 5244105 5244110 +
cttggttttcaattctcttgag

SEQ ID NO: 87669 - DNA, 22 bp, Artificial Sequence
  Synthetic oligonucleotide; TTC chr11 5244089 5244110 5244106 5244111 +
ttggttttcaattctcttgaga

SEQ ID NO: 87670 - DNA, 22 bp, Artificial Sequence
  Synthetic oligonucleotide; CTT chr11 5244091 5244112 5244108 5244113 +
ggttttcaattctcttgagact

SEQ ID NO: 87671 - DNA, 22 bp, Artificial Sequence
  Synthetic oligonucleotide; TTG chr11 5244092 5244113 5244109 5244114 +
gttttcaattctcttgagacta

SEQ ID NO: 87672 - DNA, 22 bp, Artificial Sequence
  Synthetic oligonucleotide; TTT chr11 5244096 5244117 5244113 5244118 +
tcaattctcttgagactacatt

SEQ ID NO: 87673 - DNA, 22 bp, Artificial Sequence
  Synthetic oligonucleotide; TTT chr11 5244097 5244118 5244114 5244119 +
caattctcttgagactacattg

SEQ ID NO: 87674 - DNA, 22 bp, Artificial Sequence
  Synthetic oligonucleotide; TTC chr11 5244098 5244119 5244115 5244120 +
aattctcttgagactacattga

SEQ ID NO: 87675 - DNA, 22 bp, Artificial Sequence
  Synthetic oligonucleotide; TTC chr11 5244103 5244124 5244120 5244125 +
tcttgagactacattgaataca

SEQ ID NO: 87676 - DNA, 22 bp, Artificial Sequence
  Synthetic oligonucleotide; CTC chr11 5244105 5244126 5244122 5244127 +
ttgagactacattgaatacaca

SEQ ID NO: 87677 - DNA, 22 bp, Artificial Sequence
  Synthetic oligonucleotide; CTT chr11 5244107 5244128 5244124 5244129 +
gagactacattgaatacacaat

SEQ ID NO: 87678 - DNA, 22 bp, Artificial Sequence
  Synthetic oligonucleotide; TTG chr11 5244108 5244129 5244125 5244130 +
agactacattgaatacacaatt

SEQ ID NO: 87679 - DNA, 22 bp, Artificial Sequence
  Synthetic oligonucleotide; CTA chr11 5244114 5244135 5244131 5244136 +
cattgaatacacaatttcatca

SEQ ID NO: 87680 - DNA, 22 bp, Artificial Sequence
  Synthetic oligonucleotide; TTG chr11 5244119 5244140 5244136 5244141 +
aatacacaatttcatcagtttt

SEQ ID NO: 87681 - DNA, 22 bp, Artificial Sequence
  Synthetic oligonucleotide; TTT chr11 5244131 5244152 5244148 5244153 +
catcagtttttttttctttctt

SEQ ID NO: 87682 - DNA, 22 bp, Artificial Sequence
  Synthetic oligonucleotide; TTC chr11 5244132 5244153 5244149 5244154 +
atcagtttttttttctttcttt

SEQ ID NO: 87683 - DNA, 22 bp, Artificial Sequence
  Synthetic oligonucleotide; TTT chr11 5244140 5244161 5244157 5244162 +
ttttttctttctttctttcttt

SEQ ID NO: 87684 - DNA, 22 bp, Artificial Sequence
  Synthetic oligonucleotide; TTT chr11 5244141 5244162 5244158 5244163 +
tttttctttctttctttctttt

SEQ ID NO: 87685 - DNA, 22 bp, Artificial Sequence
  Synthetic oligonucleotide; TTT chr11 5244142 5244163 5244159 5244164 +
ttttctttctttctttcttttt

SEQ ID NO: 87686 - DNA, 22 bp, Artificial Sequence
  Synthetic oligonucleotide; TTT chr11 5244143 5244164 5244160 5244165 +
tttctttctttctttctttttc

SEQ ID NO: 87687 - DNA, 22 bp, Artificial Sequence
  Synthetic oligonucleotide; TTT chr11 5244144 5244165 5244161 5244166 +
ttctttctttctttctttttct

SEQ ID NO: 87688 - DNA, 22 bp, Artificial Sequence
  Synthetic oligonucleotide; TTT chr11 5244145 5244166 5244162 5244167 +
tctttctttctttctttttctt

SEQ ID NO: 87689 - DNA, 22 bp, Artificial Sequence
  Synthetic oligonucleotide; TTT chr11 5244146 5244167 5244163 5244168 +
ctttctttctttctttttcttt

SEQ ID NO: 87690 - DNA, 22 bp, Artificial Sequence
  Synthetic oligonucleotide; TTC chr11 5244147 5244168 5244164 5244169 +
tttctttctttctttttctttt

SEQ ID NO: 87691 - DNA, 22 bp, Artificial Sequence
  Synthetic oligonucleotide; CTT chr11 5244149 5244170 5244166 5244171 +
tctttctttctttttctttttt

SEQ ID NO: 87692 - DNA, 22 bp, Artificial Sequence
  Synthetic oligonucleotide; TTT chr11 5244150 5244171 5244167 5244172 +
ctttctttctttttcttttttt

SEQ ID NO: 87693 - DNA, 22 bp, Artificial Sequence
  Synthetic oligonucleotide; TTC chr11 5244151 5244172 5244168 5244173 +
tttctttctttttctttttttt

SEQ ID NO: 87694 - DNA, 22 bp, Artificial Sequence
  Synthetic oligonucleotide; CTT chr11 5244153 5244174 5244170 5244175 +
tctttctttttctttttttttt

SEQ ID NO: 87695 - DNA, 22 bp, Artificial Sequence
  Synthetic oligonucleotide; TTT chr11 5244154 5244175 5244171 5244176 +
ctttctttttcttttttttttt

SEQ ID NO: 87696 - DNA, 22 bp, Artificial Sequence
  Synthetic oligonucleotide; TTC chr11 5244155 5244176 5244172 5244177 +
tttctttttctttttttttttt

SEQ ID NO: 87697 - DNA, 22 bp, Artificial Sequence
  Synthetic oligonucleotide; CTT chr11 5244157 5244178 5244174 5244179 +
tctttttctttttttttttttt

SEQ ID NO: 87698 - DNA, 22 bp, Artificial Sequence
  Synthetic oligonucleotide; TTT chr11 5244158 5244179 5244175 5244180 +
ctttttcttttttttttttttt

SEQ ID NO: 87699 - DNA, 22 bp, Artificial Sequence
  Synthetic oligonucleotide; TTC chr11 5244159 5244180 5244176 5244181 +
tttttctttttttttttttttt

SEQ ID NO: 87700 - DNA, 22 bp, Artificial Sequence
  Synthetic oligonucleotide; CTT chr11 5244161 5244182 5244178 5244183 +
tttctttttttttttttttttt

SEQ ID NO: 87701 - DNA, 22 bp, Artificial Sequence
  Synthetic oligonucleotide; TTT chr11 5244162 5244183 5244179 5244184 +
ttcttttttttttttttttttt

SEQ ID NO: 87702 - DNA, 22 bp, Artificial Sequence
  Synthetic oligonucleotide; TTT chr11 5244163 5244184 5244180 5244185 +
tctttttttttttttttttttt

SEQ ID NO: 87703 - DNA, 22 bp, Artificial Sequence
  Synthetic oligonucleotide; TTT chr11 5244164 5244185 5244181 5244186 +
cttttttttttttttttttttg

SEQ ID NO: 87704 - DNA, 22 bp, Artificial Sequence
  Synthetic oligonucleotide; TTC chr11 5244165 5244186 5244182 5244187 +
ttttttttttttttttttttga

SEQ ID NO: 87705 - DNA, 22 bp, Artificial Sequence
  Synthetic oligonucleotide; CTT chr11 5244167 5244188 5244184 5244189 +
ttttttttttttttttttgaga

SEQ ID NO: 87706 - DNA, 22 bp, Artificial Sequence
  Synthetic oligonucleotide; TTT chr11 5244168 5244189 5244185 5244190 +
tttttttttttttttttgagat

SEQ ID NO: 87707 - DNA, 22 bp, Artificial Sequence
  Synthetic oligonucleotide; TTT chr11 5244169 5244190 5244186 5244191 +
ttttttttttttttttgagatg

SEQ ID NO: 87708 - DNA, 22 bp, Artificial Sequence
  Synthetic oligonucleotide; TTT chr11 5244170 5244191 5244187 5244192 +
tttttttttttttttgagatgg

SEQ ID NO: 87709 - DNA, 22 bp, Artificial Sequence
  Synthetic oligonucleotide; TTT chr11 5244171 5244192 5244188 5244193 +
ttttttttttttttgagatgga

SEQ ID NO: 87710 - DNA, 22 bp, Artificial Sequence
  Synthetic oligonucleotide; TTT chr11 5244172 5244193 5244189 5244194 +
tttttttttttttgagatggag

SEQ ID NO: 87711 - DNA, 22 bp, Artificial Sequence
  Synthetic oligonucleotide; TTT chr11 5244173 5244194 5244190 5244195 +
ttttttttttttgagatggagt

SEQ ID NO: 87712 - DNA, 22 bp, Artificial Sequence
  Synthetic oligonucleotide; TTT chr11 5244174 5244195 5244191 5244196 +
tttttttttttgagatggagtc

SEQ ID NO: 87713 - DNA, 22 bp, Artificial Sequence
  Synthetic oligonucleotide; TTT chr11 5244175 5244196 5244192 5244197 +
ttttttttttgagatggagtct

SEQ ID NO: 87714 - DNA, 22 bp, Artificial Sequence
  Synthetic oligonucleotide; TTT chr11 5244176 5244197 5244193 5244198 +
tttttttttgagatggagtctc

SEQ ID NO: 87715 - DNA, 22 bp, Artificial Sequence
  Synthetic oligonucleotide; TTT chr11 5244177 5244198 5244194 5244199 +
ttttttttgagatggagtctcg

SEQ ID NO: 87716 - DNA, 22 bp, Artificial Sequence
  Synthetic oligonucleotide; TTT chr11 5244178 5244199 5244195 5244200 +
tttttttgagatggagtctcgc

SEQ ID NO: 87717 - DNA, 22 bp, Artificial Sequence
  Synthetic oligonucleotide; TTT chr11 5244179 5244200 5244196 5244201 +
ttttttgagatggagtctcgct

SEQ ID NO: 87718 - DNA, 22 bp, Artificial Sequence
  Synthetic oligonucleotide; TTT chr11 5244180 5244201 5244197 5244202 +
tttttgagatggagtctcgctt

SEQ ID NO: 87719 - DNA, 22 bp, Artificial Sequence
  Synthetic oligonucleotide; TTT chr11 5244181 5244202 5244198 5244203 +
ttttgagatggagtctcgcttt

SEQ ID NO: 87720 - DNA, 22 bp, Artificial Sequence
  Synthetic oligonucleotide; TTT chr11 5244182 5244203 5244199 5244204 +
tttgagatggagtctcgctttg

SEQ ID NO: 87721 - DNA, 22 bp, Artificial Sequence
  Synthetic oligonucleotide; TTT chr11 5244183 5244204 5244200 5244205 +
ttgagatggagtctcgctttgt

SEQ ID NO: 87722 - DNA, 22 bp, Artificial Sequence
  Synthetic oligonucleotide; TTT chr11 5244184 5244205 5244201 5244206 +
tgagatggagtctcgctttgtc

SEQ ID NO: 87723 - DNA, 22 bp, Artificial Sequence
  Synthetic oligonucleotide; TTT chr11 5244185 5244206 5244202 5244207 +
gagatggagtctcgctttgtca

SEQ ID NO: 87724 - DNA, 22 bp, Artificial Sequence
  Synthetic oligonucleotide; TTG chr11 5244186 5244207 5244203 5244208 +
agatggagtctcgctttgtcac

SEQ ID NO: 87725 - DNA, 22 bp, Artificial Sequence
  Synthetic oligonucleotide; CTC chr11 5244198 5244219 5244215 5244220 +
gctttgtcacccaggctggagt

SEQ ID NO: 87726 - DNA, 22 bp, Artificial Sequence
  Synthetic oligonucleotide; CTT chr11 5244202 5244223 5244219 5244224 +
tgtcacccaggctggagtgtgc

SEQ ID NO: 87727 - DNA, 22 bp, Artificial Sequence
  Synthetic oligonucleotide; TTT chr11 5244203 5244224 5244220 5244225 +
gtcacccaggctggagtgtgca

SEQ ID NO: 87728 - DNA, 22 bp, Artificial Sequence
  Synthetic oligonucleotide; TTG chr11 5244204 5244225 5244221 5244226 +
tcacccaggctggagtgtgcag

SEQ ID NO: 87729 - DNA, 22 bp, Artificial Sequence
  Synthetic oligonucleotide; CTG chr11 5244216 5244237 5244233 5244238 +
gagtgtgcagtggcgcgatctc

SEQ ID NO: 87730 - DNA, 22 bp, Artificial Sequence
  Synthetic oligonucleotide; CTC chr11 5244238 5244259 5244255 5244260 +
tgctcaccgcaagctctgcctc

SEQ ID NO: 87731 - DNA, 22 bp, Artificial Sequence
  Synthetic oligonucleotide; CTG chr11 5244240 5244261 5244257 5244262 +
ctcaccgcaagctctgcctccc

SEQ ID NO: 87732 - DNA, 22 bp, Artificial Sequence
  Synthetic oligonucleotide; CTC chr11 5244243 5244264 5244260 5244265 +
accgcaagctctgcctcccagg

SEQ ID NO: 87733 - DNA, 22 bp, Artificial Sequence
  Synthetic oligonucleotide; CTC chr11 5244254 5244275 5244271 5244276 +
tgcctcccaggttcacgccatt

SEQ ID NO: 87734 - DNA, 22 bp, Artificial Sequence
  Synthetic oligonucleotide; CTG chr11 5244256 5244277 5244273 5244278 +
cctcccaggttcacgccattct

SEQ ID NO: 87735 - DNA, 22 bp, Artificial Sequence
  Synthetic oligonucleotide; CTC chr11 5244260 5244281 5244277 5244282 +
ccaggttcacgccattctcctg

SEQ ID NO: 87736 - DNA, 22 bp, Artificial Sequence
  Synthetic oligonucleotide; TTC chr11 5244268 5244289 5244285 5244290 +
acgccattctcctgcctcagcc

SEQ ID NO: 87737 - DNA, 22 bp, Artificial Sequence
  Synthetic oligonucleotide; TTC chr11 5244277 5244298 5244294 5244299 +
tcctgcctcagcctcccgagta

SEQ ID NO: 87738 - DNA, 22 bp, Artificial Sequence
  Synthetic oligonucleotide; CTC chr11 5244279 5244300 5244296 5244301 +
ctgcctcagcctcccgagtagc

SEQ ID NO: 87739 - DNA, 22 bp, Artificial Sequence
  Synthetic oligonucleotide; CTG chr11 5244282 5244303 5244299 5244304 +
cctcagcctcccgagtagctgg

SEQ ID NO: 87740 - DNA, 22 bp, Artificial Sequence
  Synthetic oligonucleotide; CTC chr11 5244286 5244307 5244303 5244308 +
agcctcccgagtagctgggact

SEQ ID NO: 87741 - DNA, 22 bp, Artificial Sequence
  Synthetic oligonucleotide; CTC chr11 5244292 5244313 5244309 5244314 +
ccgagtagctgggactacaggc

SEQ ID NO: 87742 - DNA, 22 bp, Artificial Sequence
  Synthetic oligonucleotide; CTG chr11 5244303 5244324 5244320 5244325 +
ggactacaggcacccgccactg

SEQ ID NO: 87743 - DNA, 22 bp, Artificial Sequence
  Synthetic oligonucleotide; CTA chr11 5244309 5244330 5244326 5244331 +
caggcacccgccactgtctctg

SEQ ID NO: 87744 - DNA, 22 bp, Artificial Sequence
  Synthetic oligonucleotide; CTG chr11 5244325 5244346 5244342 5244347 +
tctctggctaattttttgtatt

SEQ ID NO: 87745 - DNA, 22 bp, Artificial Sequence
  Synthetic oligonucleotide; CTC chr11 5244329 5244350 5244346 5244351 +
tggctaattttttgtattttta

SEQ ID NO: 87746 - DNA, 22 bp, Artificial Sequence
  Synthetic oligonucleotide; CTG chr11 5244331 5244352 5244348 5244353 +
gctaattttttgtatttttagt

SEQ ID NO: 87747 - DNA, 22 bp, Artificial Sequence
  Synthetic oligonucleotide; CTA chr11 5244335 5244356 5244352 5244357 +
attttttgtatttttagtagag

SEQ ID NO: 87748 - DNA, 22 bp, Artificial Sequence
  Synthetic oligonucleotide; TTT chr11 5244339 5244360 5244356 5244361 +
tttgtatttttagtagagatgg

SEQ ID NO: 87749 - DNA, 22 bp, Artificial Sequence
  Synthetic oligonucleotide; TTT chr11 5244340 5244361 5244357 5244362 +
ttgtatttttagtagagatggg

SEQ ID NO: 87750 - DNA, 22 bp, Artificial Sequence
  Synthetic oligonucleotide; TTT chr11 5244341 5244362 5244358 5244363 +
tgtatttttagtagagatgggg

SEQ ID NO: 87751 - DNA, 22 bp, Artificial Sequence
  Synthetic oligonucleotide; TTT chr11 5244342 5244363 5244359 5244364 +
gtatttttagtagagatggggt

SEQ ID NO: 87752 - DNA, 22 bp, Artificial Sequence
  Synthetic oligonucleotide; TTG chr11 5244343 5244364 5244360 5244365 +
tatttttagtagagatggggtt

SEQ ID NO: 87753 - DNA, 22 bp, Artificial Sequence
  Synthetic oligonucleotide; TTT chr11 5244348 5244369 5244365 5244370 +
ttagtagagatggggtttcacc

SEQ ID NO: 87754 - DNA, 22 bp, Artificial Sequence
  Synthetic oligonucleotide; TTT chr11 5244349 5244370 5244366 5244371 +
tagtagagatggggtttcacca

SEQ ID NO: 87755 - DNA, 22 bp, Artificial Sequence
  Synthetic oligonucleotide; TTT chr11 5244350 5244371 5244367 5244372 +
agtagagatggggtttcaccat

SEQ ID NO: 87756 - DNA, 22 bp, Artificial Sequence
  Synthetic oligonucleotide; TTA chr11 5244351 5244372 5244368 5244373 +
gtagagatggggtttcaccatg

SEQ ID NO: 87757 - DNA, 22 bp, Artificial Sequence
  Synthetic oligonucleotide; TTT chr11 5244366 5244387 5244383 5244388 +
caccatgttagccaggatggtc

SEQ ID NO: 87758 - DNA, 22 bp, Artificial Sequence
  Synthetic oligonucleotide; TTC chr11 5244367 5244388 5244384 5244389 +
accatgttagccaggatggtct

SEQ ID NO: 87759 - DNA, 22 bp, Artificial Sequence
  Synthetic oligonucleotide; TTA chr11 5244376 5244397 5244393 5244398 +
gccaggatggtcttgatctcct

SEQ ID NO: 87760 - DNA, 22 bp, Artificial Sequence
  Synthetic oligonucleotide; CTT chr11 5244390 5244411 5244407 5244412 +
gatctcctgacctcgtgatccg

SEQ ID NO: 87761 - DNA, 22 bp, Artificial Sequence
  Synthetic oligonucleotide; TTG chr11 5244391 5244412 5244408 5244413 +
atctcctgacctcgtgatccgc

SEQ ID NO: 87762 - DNA, 22 bp, Artificial Sequence
  Synthetic oligonucleotide; CTC chr11 5244396 5244417 5244413 5244418 +
ctgacctcgtgatccgcccacc

SEQ ID NO: 87763 - DNA, 22 bp, Artificial Sequence
  Synthetic oligonucleotide; CTG chr11 5244399 5244420 5244416 5244421 +
acctcgtgatccgcccacctca

SEQ ID NO: 87764 - DNA, 22 bp, Artificial Sequence
  Synthetic oligonucleotide; CTC chr11 5244404 5244425 5244421 5244426 +
gtgatccgcccacctcagcctc

SEQ ID NO: 87765 - DNA, 22 bp, Artificial Sequence
  Synthetic oligonucleotide; CTC chr11 5244420 5244441 5244437 5244442 +
agcctcccaaagtgctgggatt

SEQ ID NO: 87766 - DNA, 22 bp, Artificial Sequence
  Synthetic oligonucleotide; CTC chr11 5244426 5244447 5244443 5244448 +
ccaaagtgctgggattacaggt

SEQ ID NO: 87767 - DNA, 22 bp, Artificial Sequence
  Synthetic oligonucleotide; CTG chr11 5244437 5244458 5244454 5244459 +
ggattacaggtgtgagccaccg

SEQ ID NO: 87768 - DNA, 22 bp, Artificial Sequence
  Synthetic oligonucleotide; TTA chr11 5244443 5244464 5244460 5244465 +
caggtgtgagccaccgcgcccg

SEQ ID NO: 87769 - DNA, 22 bp, Artificial Sequence
  Synthetic oligonucleotide; TTT chr11 5244473 5244494 5244490 5244495 +
catcactttttagaatagaaat

SEQ ID NO: 87770 - DNA, 22 bp, Artificial Sequence
  Synthetic oligonucleotide; TTC chr11 5244474 5244495 5244491 5244496 +
atcactttttagaatagaaata

SEQ ID NO: 87771 - DNA, 22 bp, Artificial Sequence
  Synthetic oligonucleotide; CTT chr11 5244481 5244502 5244498 5244503 +
tttagaatagaaataaacacct

SEQ ID NO: 87772 - DNA, 22 bp, Artificial Sequence
  Synthetic oligonucleotide; TTT chr11 5244482 5244503 5244499 5244504 +
ttagaatagaaataaacacctc

SEQ ID NO: 87773 - DNA, 22 bp, Artificial Sequence
  Synthetic oligonucleotide; TTT chr11 5244483 5244504 5244500 5244505 +
tagaatagaaataaacacctct

SEQ ID NO: 87774 - DNA, 22 bp, Artificial Sequence
  Synthetic oligonucleotide; TTT chr11 5244484 5244505 5244501 5244506 +
agaatagaaataaacacctcta

SEQ ID NO: 87775 - DNA, 22 bp, Artificial Sequence
  Synthetic oligonucleotide; TTA chr11 5244485 5244506 5244502 5244507 +
gaatagaaataaacacctctat

SEQ ID NO: 87776 - DNA, 22 bp, Artificial Sequence
  Synthetic oligonucleotide; CTC chr11 5244504 5244525 5244521 5244526 +
tatccagcatcaacttggaaga

SEQ ID NO: 87777 - DNA, 22 bp, Artificial Sequence
  Synthetic oligonucleotide; CTA chr11 5244506 5244527 5244523 5244528 +
tccagcatcaacttggaagaaa

SEQ ID NO: 87778 - DNA, 22 bp, Artificial Sequence
  Synthetic oligonucleotide; CTT chr11 5244520 5244541 5244537 5244542 +
ggaagaaagcagaataagaaac

SEQ ID NO: 87779 - DNA, 22 bp, Artificial Sequence
  Synthetic oligonucleotide; TTG chr11 5244521 5244542 5244538 5244543 +
gaagaaagcagaataagaaaca

SEQ ID NO: 87780 - DNA, 22 bp, Artificial Sequence
  Synthetic oligonucleotide; CTA chr11 5244548 5244569 5244565 5244570 +
gggaagtaaggggaaaactggg

SEQ ID NO: 87781 - DNA, 22 bp, Artificial Sequence
  Synthetic oligonucleotide; CTG chr11 5244568 5244589 5244585 5244590 +
ggttttattactgtgtttttta

SEQ ID NO: 87782 - DNA, 22 bp, Artificial Sequence
  Synthetic oligonucleotide; TTT chr11 5244573 5244594 5244590 5244595 +
tattactgtgttttttaatcca

SEQ ID NO: 87783 - DNA, 22 bp, Artificial Sequence
  Synthetic oligonucleotide; TTT chr11 5244574 5244595 5244591 5244596 +
attactgtgttttttaatccat

SEQ ID NO: 87784 - DNA, 22 bp, Artificial Sequence
  Synthetic oligonucleotide; TTA chr11 5244575 5244596 5244592 5244597 +
ttactgtgttttttaatccatt

SEQ ID NO: 87785 - DNA, 22 bp, Artificial Sequence
  Synthetic oligonucleotide; TTA chr11 5244578 5244599 5244595 5244600 +
ctgtgttttttaatccatttag

SEQ ID NO: 87786 - DNA, 22 bp, Artificial Sequence
  Synthetic oligonucleotide; CTG chr11 5244581 5244602 5244598 5244603 +
tgttttttaatccatttagtag

SEQ ID NO: 87787 - DNA, 22 bp, Artificial Sequence
  Synthetic oligonucleotide; TTT chr11 5244586 5244607 5244603 5244608 +
tttaatccatttagtagtcagt

SEQ ID NO: 87788 - DNA, 22 bp, Artificial Sequence
  Synthetic oligonucleotide; TTT chr11 5244587 5244608 5244604 5244609 +
ttaatccatttagtagtcagtg

SEQ ID NO: 87789 - DNA, 22 bp, Artificial Sequence
  Synthetic oligonucleotide; TTT chr11 5244588 5244609 5244605 5244610 +
taatccatttagtagtcagtgt

SEQ ID NO: 87790 - DNA, 22 bp, Artificial Sequence
  Synthetic oligonucleotide; TTT chr11 5244589 5244610 5244606 5244611 +
aatccatttagtagtcagtgta

SEQ ID NO: 87791 - DNA, 22 bp, Artificial Sequence
  Synthetic oligonucleotide; TTA chr11 5244590 5244611 5244607 5244612 +
atccatttagtagtcagtgtac

SEQ ID NO: 87792 - DNA, 22 bp, Artificial Sequence
  Synthetic oligonucleotide; TTT chr11 5244598 5244619 5244615 5244620 +
agtagtcagtgtacttatctga

SEQ ID NO: 87793 - DNA, 22 bp, Artificial Sequence
  Synthetic oligonucleotide; TTA chr11 5244599 5244620 5244616 5244621 +
gtagtcagtgtacttatctgaa

SEQ ID NO: 87794 - DNA, 22 bp, Artificial Sequence
  Synthetic oligonucleotide; CTT chr11 5244614 5244635 5244631 5244636 +
atctgaacaaaggagatttcct

SEQ ID NO: 87795 - DNA, 22 bp, Artificial Sequence
  Synthetic oligonucleotide; TTA chr11 5244615 5244636 5244632 5244637 +
tctgaacaaaggagatttcctc

SEQ ID NO: 87796 - DNA, 22 bp, Artificial Sequence
  Synthetic oligonucleotide; CTG chr11 5244619 5244640 5244636 5244641 +
aacaaaggagatttcctctgaa

SEQ ID NO: 87797 - DNA, 22 bp, Artificial Sequence
  Synthetic oligonucleotide; TTT chr11 5244633 5244654 5244650 5244655 +
cctctgaatcattgaacaatag

SEQ ID NO: 87798 - DNA, 22 bp, Artificial Sequence
  Synthetic oligonucleotide; TTC chr11 5244634 5244655 5244651 5244656 +
ctctgaatcattgaacaatagt

SEQ ID NO: 87799 - DNA, 22 bp, Artificial Sequence
  Synthetic oligonucleotide; CTC chr11 5244637 5244658 5244654 5244659 +
tgaatcattgaacaatagtcca

SEQ ID NO: 87800 - DNA, 22 bp, Artificial Sequence
  Synthetic oligonucleotide; CTG chr11 5244639 5244660 5244656 5244661 +
aatcattgaacaatagtccatg

SEQ ID NO: 87801 - DNA, 22 bp, Artificial Sequence
  Synthetic oligonucleotide; TTG chr11 5244647 5244668 5244664 5244669 +
aacaatagtccatgtcaaatcc

SEQ ID NO: 87802 - DNA, 22 bp, Artificial Sequence
  Synthetic oligonucleotide; CTA chr11 5244671 5244692 5244688 5244693 +
catatctacaaaattatgccag

SEQ ID NO: 87803 - DNA, 22 bp, Artificial Sequence
  Synthetic oligonucleotide; CTA chr11 5244679 5244700 5244696 5244701 +
caaaattatgccagaacatcta

SEQ ID NO: 87804 - DNA, 22 bp, Artificial Sequence
  Synthetic oligonucleotide; TTA chr11 5244687 5244708 5244704 5244709 +
tgccagaacatctaatagtgtt

SEQ ID NO: 87805 - DNA, 22 bp, Artificial Sequence
  Synthetic oligonucleotide; CTA chr11 5244701 5244722 5244718 5244723 +
atagtgttgggggagaagtgtg

SEQ ID NO: 87806 - DNA, 22 bp, Artificial Sequence
  Synthetic oligonucleotide; TTG chr11 5244710 5244731 5244727 5244732 +
ggggagaagtgtgctgctctgt

SEQ ID NO: 87807 - DNA, 22 bp, Artificial Sequence
  Synthetic oligonucleotide; CTG chr11 5244726 5244747 5244743 5244748 +
ctctgttcaagcaagaggatag

SEQ ID NO: 87808 - DNA, 22 bp, Artificial Sequence
  Synthetic oligonucleotide; CTC chr11 5244729 5244750 5244746 5244751 +
tgttcaagcaagaggataggag

SEQ ID NO: 87809 - DNA, 22 bp, Artificial Sequence
  Synthetic oligonucleotide; CTG chr11 5244731 5244752 5244748 5244753 +
ttcaagcaagaggataggagat

SEQ ID NO: 87810 - DNA, 22 bp, Artificial Sequence
  Synthetic oligonucleotide; TTC chr11 5244734 5244755 5244751 5244756 +
aagcaagaggataggagattcc

SEQ ID NO: 87811 - DNA, 22 bp, Artificial Sequence
  Synthetic oligonucleotide; TTC chr11 5244755 5244776 5244772 5244777 +
cgtggcccgtgctgggcattag

SEQ ID NO: 87812 - DNA, 22 bp, Artificial Sequence
  Synthetic oligonucleotide; CTG chr11 5244769 5244790 5244786 5244791 +
ggcattaggtcatttgtgtctg

SEQ ID NO: 87813 - DNA, 22 bp, Artificial Sequence
  Synthetic oligonucleotide; TTA chr11 5244776 5244797 5244793 5244798 +
ggtcatttgtgtctggcacagg

SEQ ID NO: 87814 - DNA, 22 bp, Artificial Sequence
  Synthetic oligonucleotide; TTT chr11 5244784 5244805 5244801 5244806 +
gtgtctggcacaggcttgatct

SEQ ID NO: 87815 - DNA, 22 bp, Artificial Sequence
  Synthetic oligonucleotide; TTG chr11 5244785 5244806 5244802 5244807 +
tgtctggcacaggcttgatcta

SEQ ID NO: 87816 - DNA, 22 bp, Artificial Sequence
  Synthetic oligonucleotide; CTG chr11 5244791 5244812 5244808 5244813 +
gcacaggcttgatctatagtct

SEQ ID NO: 87817 - DNA, 22 bp, Artificial Sequence
  Synthetic oligonucleotide; CTT chr11 5244801 5244822 5244818 5244823 +
gatctatagtctaatgctgtgt

SEQ ID NO: 87818 - DNA, 22 bp, Artificial Sequence
  Synthetic oligonucleotide; TTG chr11 5244802 5244823 5244819 5244824 +
atctatagtctaatgctgtgtt

SEQ ID NO: 87819 - DNA, 22 bp, Artificial Sequence
  Synthetic oligonucleotide; CTA chr11 5244807 5244828 5244824 5244829 +
tagtctaatgctgtgtttaact

SEQ ID NO: 87820 - DNA, 22 bp, Artificial Sequence
  Synthetic oligonucleotide; CTA chr11 5244814 5244835 5244831 5244836 +
atgctgtgtttaacttgtcttt

SEQ ID NO: 87821 - DNA, 22 bp, Artificial Sequence
  Synthetic oligonucleotide; CTG chr11 5244820 5244841 5244837 5244842 +
tgtttaacttgtctttatatct

SEQ ID NO: 87822 - DNA, 22 bp, Artificial Sequence
  Synthetic oligonucleotide; TTT chr11 5244825 5244846 5244842 5244847 +
aacttgtctttatatctaatca

SEQ ID NO: 87823 - DNA, 22 bp, Artificial Sequence
  Synthetic oligonucleotide; TTA chr11 5244826 5244847 5244843 5244848 +
acttgtctttatatctaatcag

SEQ ID NO: 87824 - DNA, 22 bp, Artificial Sequence
  Synthetic oligonucleotide; CTT chr11 5244830 5244851 5244847 5244852 +
gtctttatatctaatcaggcaa

SEQ ID NO: 87825 - DNA, 22 bp, Artificial Sequence
  Synthetic oligonucleotide; TTG chr11 5244831 5244852 5244848 5244853 +
tctttatatctaatcaggcaaa

SEQ ID NO: 87826 - DNA, 22 bp, Artificial Sequence
  Synthetic oligonucleotide; CTT chr11 5244835 5244856 5244852 5244857 +
tatatctaatcaggcaaagaca

SEQ ID NO: 87827 - DNA, 22 bp, Artificial Sequence
  Synthetic oligonucleotide; TTT chr11 5244836 5244857 5244853 5244858 +
atatctaatcaggcaaagacat

SEQ ID NO: 87828 - DNA, 22 bp, Artificial Sequence
  Synthetic oligonucleotide; TTA chr11 5244837 5244858 5244854 5244859 +
tatctaatcaggcaaagacatt

SEQ ID NO: 87829 - DNA, 22 bp, Artificial Sequence
  Synthetic oligonucleotide; CTA chr11 5244843 5244864 5244860 5244865 +
atcaggcaaagacattcttcac

SEQ ID NO: 87830 - DNA, 22 bp, Artificial Sequence
  Synthetic oligonucleotide; TTC chr11 5244860 5244881 5244877 5244882 +
ttcactgacaatattccacagg

SEQ ID NO: 87831 - DNA, 22 bp, Artificial Sequence
  Synthetic oligonucleotide; CTT chr11 5244862 5244883 5244879 5244884 +
cactgacaatattccacaggct

SEQ ID NO: 87832 - DNA, 22 bp, Artificial Sequence
  Synthetic oligonucleotide; TTC chr11 5244863 5244884 5244880 5244885 +
actgacaatattccacaggctg

SEQ ID NO: 87833 - DNA, 22 bp, Artificial Sequence
  Synthetic oligonucleotide; CTG chr11 5244867 5244888 5244884 5244889 +
acaatattccacaggctgctgc

SEQ ID NO: 87834 - DNA, 22 bp, Artificial Sequence
  Synthetic oligonucleotide; TTC chr11 5244876 5244897 5244893 5244898 +
cacaggctgctgcacgtgtctc

SEQ ID NO: 87835 - DNA, 22 bp, Artificial Sequence
  Synthetic oligonucleotide; CTG chr11 5244885 5244906 5244902 5244907 +
ctgcacgtgtctcatgtgctgc

SEQ ID NO: 87836 - DNA, 22 bp, Artificial Sequence
  Synthetic oligonucleotide; CTG chr11 5244888 5244909 5244905 5244910 +
cacgtgtctcatgtgctgcacg

SEQ ID NO: 87837 - DNA, 22 bp, Artificial Sequence
  Synthetic oligonucleotide; CTC chr11 5244898 5244919 5244915 5244920 +
atgtgctgcacgtctcatgcgt

SEQ ID NO: 87838 - DNA, 22 bp, Artificial Sequence
  Synthetic oligonucleotide; CTG chr11 5244906 5244927 5244923 5244928 +
cacgtctcatgcgtctcaaaca

SEQ ID NO: 87839 - DNA, 22 bp, Artificial Sequence
  Synthetic oligonucleotide; CTC chr11 5244914 5244935 5244931 5244936 +
atgcgtctcaaacaagcaattt

SEQ ID NO: 87840 - DNA, 22 bp, Artificial Sequence
  Synthetic oligonucleotide; CTC chr11 5244923 5244944 5244940 5244945 +
aaacaagcaatttcaggaatag

SEQ ID NO: 87841 - DNA, 22 bp, Artificial Sequence
  Synthetic oligonucleotide; TTT chr11 5244936 5244957 5244953 5244958 +
caggaatagacagggcacactt

SEQ ID NO: 87842 - DNA, 22 bp, Artificial Sequence
  Synthetic oligonucleotide; TTC chr11 5244937 5244958 5244954 5244959 +
aggaatagacagggcacacttc

SEQ ID NO: 87843 - DNA, 22 bp, Artificial Sequence
  Synthetic oligonucleotide; CTT chr11 5244958 5244979 5244975 5244980 +
ccaccggcagagagaagaacag

SEQ ID NO: 87844 - DNA, 22 bp, Artificial Sequence
  Synthetic oligonucleotide; TTC chr11 5244959 5244980 5244976 5244981 +
caccggcagagagaagaacagt

SEQ ID NO: 87845 - DNA, 22 bp, Artificial Sequence
  Synthetic oligonucleotide; TTT chr11 5244983 5245004 5245000 5245005 +
attttatattcttaaggcttac

SEQ ID NO: 87846 - DNA, 22 bp, Artificial Sequence
  Synthetic oligonucleotide; TTA chr11 5244984 5245005 5245001 5245006 +
ttttatattcttaaggcttact

SEQ ID NO: 87847 - DNA, 22 bp, Artificial Sequence
  Synthetic oligonucleotide; TTT chr11 5244987 5245008 5245004 5245009 +
tatattcttaaggcttactgtc

SEQ ID NO: 87848 - DNA, 22 bp, Artificial Sequence
  Synthetic oligonucleotide; TTT chr11 5244988 5245009 5245005 5245010 +
atattcttaaggcttactgtcc

SEQ ID NO: 87849 - DNA, 22 bp, Artificial Sequence
  Synthetic oligonucleotide; TTA chr11 5244989 5245010 5245006 5245011 +
tattcttaaggcttactgtcct

SEQ ID NO: 87850 - DNA, 22 bp, Artificial Sequence
  Synthetic oligonucleotide; TTC chr11 5244994 5245015 5245011 5245016 +
ttaaggcttactgtcctcatac

SEQ ID NO: 87851 - DNA, 22 bp, Artificial Sequence
  Synthetic oligonucleotide; CTT chr11 5244996 5245017 5245013 5245018 +
aaggcttactgtcctcatactt

SEQ ID NO: 87852 - DNA, 22 bp, Artificial Sequence
  Synthetic oligonucleotide; TTA chr11 5244997 5245018 5245014 5245019 +
aggcttactgtcctcatactta

SEQ ID NO: 87853 - DNA, 22 bp, Artificial Sequence
  Synthetic oligonucleotide; CTT chr11 5245003 5245024 5245020 5245025 +
actgtcctcatacttagaggtt

SEQ ID NO: 87854 - DNA, 22 bp, Artificial Sequence
  Synthetic oligonucleotide; TTA chr11 5245004 5245025 5245021 5245026 +
ctgtcctcatacttagaggttc

SEQ ID NO: 87855 - DNA, 22 bp, Artificial Sequence
  Synthetic oligonucleotide; CTG chr11 5245007 5245028 5245024 5245029 +
tcctcatacttagaggttcagg

SEQ ID NO: 87856 - DNA, 22 bp, Artificial Sequence
  Synthetic oligonucleotide; CTC chr11 5245012 5245033 5245029 5245034 +
atacttagaggttcaggatgct

SEQ ID NO: 87857 - DNA, 22 bp, Artificial Sequence
  Synthetic oligonucleotide; CTT chr11 5245018 5245039 5245035 5245040 +
agaggttcaggatgctggtttg

SEQ ID NO: 87858 - DNA, 22 bp, Artificial Sequence
  Synthetic oligonucleotide; TTA chr11 5245019 5245040 5245036 5245041 +
gaggttcaggatgctggtttgt

SEQ ID NO: 87859 - DNA, 22 bp, Artificial Sequence
  Synthetic oligonucleotide; TTC chr11 5245026 5245047 5245043 5245048 +
aggatgctggtttgtgtgttac

SEQ ID NO: 87860 - DNA, 22 bp, Artificial Sequence
  Synthetic oligonucleotide; CTG chr11 5245035 5245056 5245052 5245057 +
gtttgtgtgttacccctgagat

SEQ ID NO: 87861 - DNA, 22 bp, Artificial Sequence
  Synthetic oligonucleotide; TTT chr11 5245039 5245060 5245056 5245061 +
gtgtgttacccctgagataaat

SEQ ID NO: 87862 - DNA, 22 bp, Artificial Sequence
  Synthetic oligonucleotide; TTG chr11 5245040 5245061 5245057 5245062 +
tgtgttacccctgagataaatc

SEQ ID NO: 87863 - DNA, 22 bp, Artificial Sequence
  Synthetic oligonucleotide; TTA chr11 5245047 5245068 5245064 5245069 +
cccctgagataaatccttacaa

SEQ ID NO: 87864 - DNA, 22 bp, Artificial Sequence
  Synthetic oligonucleotide; CTG chr11 5245053 5245074 5245070 5245075 +
agataaatccttacaagaaata

SEQ ID NO: 87865 - DNA, 22 bp, Artificial Sequence
  Synthetic oligonucleotide; CTT chr11 5245065 5245086 5245082 5245087 +
acaagaaataaagtttaggaaa

SEQ ID NO: 87866 - DNA, 22 bp, Artificial Sequence
  Synthetic oligonucleotide; TTA chr11 5245066 5245087 5245083 5245088 +
caagaaataaagtttaggaaat

SEQ ID NO: 87867 - DNA, 22 bp, Artificial Sequence
  Synthetic oligonucleotide; TTT chr11 5245081 5245102 5245098 5245103 +
aggaaatcacccccatgtgtat

SEQ ID NO: 87868 - DNA, 22 bp, Artificial Sequence
  Synthetic oligonucleotide; TTA chr11 5245082 5245103 5245099 5245104 +
ggaaatcacccccatgtgtatt

SEQ ID NO: 87869 - DNA, 22 bp, Artificial Sequence
  Synthetic oligonucleotide; TTT chr11 5245105 5245126 5245122 5245127 +
caaggagactctaaatttcaaa

SEQ ID NO: 87870 - DNA, 22 bp, Artificial Sequence
  Synthetic oligonucleotide; TTC chr11 5245106 5245127 5245123 5245128 +
aaggagactctaaatttcaaag

SEQ ID NO: 87871 - DNA, 22 bp, Artificial Sequence
  Synthetic oligonucleotide; CTC chr11 5245116 5245137 5245133 5245138 +
taaatttcaaagagttaaaccc

SEQ ID NO: 87872 - DNA, 22 bp, Artificial Sequence
  Synthetic oligonucleotide; CTA chr11 5245118 5245139 5245135 5245140 +
aatttcaaagagttaaacccaa

SEQ ID NO: 87873 - DNA, 22 bp, Artificial Sequence
  Synthetic oligonucleotide; TTT chr11 5245123 5245144 5245140 5245145 +
caaagagttaaacccaatatat

SEQ ID NO: 87874 - DNA, 22 bp, Artificial Sequence
  Synthetic oligonucleotide; TTC chr11 5245124 5245145 5245141 5245146 +
aaagagttaaacccaatatatt

SEQ ID NO: 87875 - DNA, 22 bp, Artificial Sequence
  Synthetic oligonucleotide; TTA chr11 5245133 5245154 5245150 5245155 +
aacccaatatattaaagctgaa

SEQ ID NO: 87876 - DNA, 22 bp, Artificial Sequence
  Synthetic oligonucleotide; TTA chr11 5245147 5245168 5245164 5245169 +
aagctgaatttctgatattaga

SEQ ID NO: 87877 - DNA, 22 bp, Artificial Sequence
  Synthetic oligonucleotide; CTG chr11 5245153 5245174 5245170 5245175 +
aatttctgatattagagacaca

SEQ ID NO: 87878 - DNA, 22 bp, Artificial Sequence
  Synthetic oligonucleotide; TTT chr11 5245158 5245179 5245175 5245180 +
ctgatattagagacacaatatt

SEQ ID NO: 87879 - DNA, 22 bp, Artificial Sequence
  Synthetic oligonucleotide; TTC chr11 5245159 5245180 5245176 5245181 +
tgatattagagacacaatattt

SEQ ID NO: 87880 - DNA, 22 bp, Artificial Sequence
  Synthetic oligonucleotide; CTG chr11 5245161 5245182 5245178 5245183 +
atattagagacacaatatttta

SEQ ID NO: 87881 - DNA, 22 bp, Artificial Sequence
  Synthetic oligonucleotide; TTA chr11 5245167 5245188 5245184 5245189 +
gagacacaatattttagtctac

SEQ ID NO: 87882 - DNA, 22 bp, Artificial Sequence
  Synthetic oligonucleotide; TTT chr11 5245181 5245202 5245198 5245203 +
tagtctacttgatatagttgag

SEQ ID NO: 87883 - DNA, 22 bp, Artificial Sequence
  Synthetic oligonucleotide; TTT chr11 5245182 5245203 5245199 5245204 +
agtctacttgatatagttgaga

SEQ ID NO: 87884 - DNA, 22 bp, Artificial Sequence
  Synthetic oligonucleotide; TTA chr11 5245183 5245204 5245200 5245205 +
gtctacttgatatagttgagag

SEQ ID NO: 87885 - DNA, 22 bp, Artificial Sequence
  Synthetic oligonucleotide; CTA chr11 5245188 5245209 5245205 5245210 +
cttgatatagttgagaggcagt

SEQ ID NO: 87886 - DNA, 22 bp, Artificial Sequence
  Synthetic oligonucleotide; CTT chr11 5245191 5245212 5245208 5245213 +
gatatagttgagaggcagttac

SEQ ID NO: 87887 - DNA, 22 bp, Artificial Sequence
  Synthetic oligonucleotide; TTG chr11 5245192 5245213 5245209 5245214 +
atatagttgagaggcagttacc

SEQ ID NO: 87888 - DNA, 22 bp, Artificial Sequence
  Synthetic oligonucleotide; TTG chr11 5245201 5245222 5245218 5245223 +
agaggcagttacctgttttact

SEQ ID NO: 87889 - DNA, 22 bp, Artificial Sequence
  Synthetic oligonucleotide; TTA chr11 5245212 5245233 5245229 5245234 +
cctgttttacttaggaacatgg

SEQ ID NO: 87890 - DNA, 22 bp, Artificial Sequence
  Synthetic oligonucleotide; CTG chr11 5245216 5245237 5245233 5245238 +
ttttacttaggaacatggggaa

SEQ ID NO: 87891 - DNA, 22 bp, Artificial Sequence
  Synthetic oligonucleotide; TTT chr11 5245219 5245240 5245236 5245241 +
tacttaggaacatggggaaagt

SEQ ID NO: 87892 - DNA, 22 bp, Artificial Sequence
  Synthetic oligonucleotide; TTT chr11 5245220 5245241 5245237 5245242 +
acttaggaacatggggaaagtt

SEQ ID NO: 87893 - DNA, 22 bp, Artificial Sequence
  Synthetic oligonucleotide; TTA chr11 5245221 5245242 5245238 5245243 +
cttaggaacatggggaaagttt

SEQ ID NO: 87894 - DNA, 22 bp, Artificial Sequence
  Synthetic oligonucleotide; CTT chr11 5245224 5245245 5245241 5245246 +
aggaacatggggaaagtttgta

SEQ ID NO: 87895 - DNA, 22 bp, Artificial Sequence
  Synthetic oligonucleotide; TTA chr11 5245225 5245246 5245242 5245247 +
ggaacatggggaaagtttgtag

SEQ ID NO: 87896 - DNA, 22 bp, Artificial Sequence
  Synthetic oligonucleotide; TTT chr11 5245243 5245264 5245260 5245265 +
gtagtgacaaacagtttgaggc

SEQ ID NO: 87897 - DNA, 22 bp, Artificial Sequence
  Synthetic oligonucleotide; TTG chr11 5245244 5245265 5245261 5245266 +
tagtgacaaacagtttgaggca

SEQ ID NO: 87898 - DNA, 22 bp, Artificial Sequence
  Synthetic oligonucleotide; TTT chr11 5245260 5245281 5245277 5245282 +
gaggcaaaaccaagattatctt

SEQ ID NO: 87899 - DNA, 22 bp, Artificial Sequence
  Synthetic oligonucleotide; TTG chr11 5245261 5245282 5245278 5245283 +
aggcaaaaccaagattatcttt

SEQ ID NO: 87900 - DNA, 22 bp, Artificial Sequence
  Synthetic oligonucleotide; TTA chr11 5245278 5245299 5245295 5245300 +
tctttaagagcagagatcgatg

SEQ ID NO: 87901 - DNA, 22 bp, Artificial Sequence
  Synthetic oligonucleotide; CTT chr11 5245282 5245303 5245299 5245304 +
taagagcagagatcgatgatat

SEQ ID NO: 87902 - DNA, 22 bp, Artificial Sequence
  Synthetic oligonucleotide; TTT chr11 5245283 5245304 5245300 5245305 +
aagagcagagatcgatgatatg

SEQ ID NO: 87903 - DNA, 22 bp, Artificial Sequence
  Synthetic oligonucleotide; TTA chr11 5245284 5245305 5245301 5245306 +
agagcagagatcgatgatatga

SEQ ID NO: 87904 - DNA, 22 bp, Artificial Sequence
  Synthetic oligonucleotide; CTT chr11 5245326 5245347 5245343 5245348 +
tgactatatgcaggaaacacat

SEQ ID NO: 87905 - DNA, 22 bp, Artificial Sequence
  Synthetic oligonucleotide; TTT chr11 5245327 5245348 5245344 5245349 +
gactatatgcaggaaacacatt

SEQ ID NO: 87906 - DNA, 22 bp, Artificial Sequence
  Synthetic oligonucleotide; TTG chr11 5245328 5245349 5245345 5245350 +
actatatgcaggaaacacattt

SEQ ID NO: 87907 - DNA, 22 bp, Artificial Sequence
  Synthetic oligonucleotide; CTA chr11 5245332 5245353 5245349 5245354 +
tatgcaggaaacacatttatat

SEQ ID NO: 87908 - DNA, 22 bp, Artificial Sequence
  Synthetic oligonucleotide; TTT chr11 5245350 5245371 5245367 5245372 +
atattgagttgtggggactggc

SEQ ID NO: 87909 - DNA, 22 bp, Artificial Sequence
  Synthetic oligonucleotide; TTA chr11 5245351 5245372 5245368 5245373 +
tattgagttgtggggactggcc

SEQ ID NO: 87910 - DNA, 22 bp, Artificial Sequence
  Synthetic oligonucleotide; TTG chr11 5245356 5245377 5245373 5245378 +
agttgtggggactggcctcaga

SEQ ID NO: 87911 - DNA, 22 bp, Artificial Sequence
  Synthetic oligonucleotide; TTG chr11 5245361 5245382 5245378 5245383 +
tggggactggcctcagaggaaa

SEQ ID NO: 87912 - DNA, 22 bp, Artificial Sequence
  Synthetic oligonucleotide; CTG chr11 5245370 5245391 5245387 5245392 +
gcctcagaggaaacttcaggtc

SEQ ID NO: 87913 - DNA, 22 bp, Artificial Sequence
  Synthetic oligonucleotide; CTC chr11 5245375 5245396 5245392 5245397 +
agaggaaacttcaggtcatgtc

SEQ ID NO: 87914 - DNA, 22 bp, Artificial Sequence
  Synthetic oligonucleotide; CTT chr11 5245386 5245407 5245403 5245408 +
caggtcatgtcctttaatggcc

SEQ ID NO: 87915 - DNA, 22 bp, Artificial Sequence
  Synthetic oligonucleotide; TTC chr11 5245387 5245408 5245404 5245409 +
aggtcatgtcctttaatggccc

SEQ ID NO: 87916 - DNA, 22 bp, Artificial Sequence
  Synthetic oligonucleotide; CTT chr11 5245400 5245421 5245417 5245422 +
taatggccctaaaactcattcc

SEQ ID NO: 87917 - DNA, 22 bp, Artificial Sequence
  Synthetic oligonucleotide; TTT chr11 5245401 5245422 5245418 5245423 +
aatggccctaaaactcattccc

SEQ ID NO: 87918 - DNA, 22 bp, Artificial Sequence
  Synthetic oligonucleotide; TTA chr11 5245402 5245423 5245419 5245424 +
atggccctaaaactcattccca

SEQ ID NO: 87919 - DNA, 22 bp, Artificial Sequence
  Synthetic oligonucleotide; CTA chr11 5245411 5245432 5245428 5245433 +
aaactcattcccaaaagaattt

SEQ ID NO: 87920 - DNA, 22 bp, Artificial Sequence
  Synthetic oligonucleotide; CTC chr11 5245417 5245438 5245434 5245439 +
attcccaaaagaatttctgttc

SEQ ID NO: 87921 - DNA, 22 bp, Artificial Sequence
  Synthetic oligonucleotide; TTC chr11 5245421 5245442 5245438 5245443 +
ccaaaagaatttctgttcattg

SEQ ID NO: 87922 - DNA, 22 bp, Artificial Sequence
  Synthetic oligonucleotide; TTT chr11 5245433 5245454 5245450 5245455 +
ctgttcattgccatacctcata

SEQ ID NO: 87923 - DNA, 22 bp, Artificial Sequence
  Synthetic oligonucleotide; TTC chr11 5245434 5245455 5245451 5245456 +
tgttcattgccatacctcatat

SEQ ID NO: 87924 - DNA, 22 bp, Artificial Sequence
  Synthetic oligonucleotide; CTG chr11 5245436 5245457 5245453 5245458 +
ttcattgccatacctcatatcc

SEQ ID NO: 87925 - DNA, 22 bp, Artificial Sequence
  Synthetic oligonucleotide; TTC chr11 5245439 5245460 5245456 5245461 +
attgccatacctcatatcctta

SEQ ID NO: 87926 - DNA, 22 bp, Artificial Sequence
  Synthetic oligonucleotide; TTG chr11 5245443 5245464 5245460 5245465 +
ccatacctcatatccttaggta

SEQ ID NO: 87927 - DNA, 22 bp, Artificial Sequence
  Synthetic oligonucleotide; CTC chr11 5245452 5245473 5245469 5245474 +
atatccttaggtacatacatct

SEQ ID NO: 87928 - DNA, 22 bp, Artificial Sequence
  Synthetic oligonucleotide; CTT chr11 5245460 5245481 5245477 5245482 +
aggtacatacatctaaaaccct

SEQ ID NO: 87929 - DNA, 22 bp, Artificial Sequence
  Synthetic oligonucleotide; TTA chr11 5245461 5245482 5245478 5245483 +
ggtacatacatctaaaaccctg

SEQ ID NO: 87930 - DNA, 22 bp, Artificial Sequence
  Synthetic oligonucleotide; CTA chr11 5245475 5245496 5245492 5245497 +
aaaccctgcgtaccagtgaaca

SEQ ID NO: 87931 - DNA, 22 bp, Artificial Sequence
  Synthetic oligonucleotide; CTG chr11 5245483 5245504 5245500 5245505 +
cgtaccagtgaacagctgcccc

SEQ ID NO: 87932 - DNA, 22 bp, Artificial Sequence
  Synthetic oligonucleotide; CTG chr11 5245501 5245522 5245518 5245523 +
ccccatctttccatcagccaac

SEQ ID NO: 87933 - DNA, 22 bp, Artificial Sequence
  Synthetic oligonucleotide; CTT chr11 5245510 5245531 5245527 5245532 +
tccatcagccaaccaggaattc

SEQ ID NO: 87934 - DNA, 22 bp, Artificial Sequence
  Synthetic oligonucleotide; TTT chr11 5245511 5245532 5245528 5245533 +
ccatcagccaaccaggaattca

SEQ ID NO: 87935 - DNA, 22 bp, Artificial Sequence
  Synthetic oligonucleotide; TTC chr11 5245512 5245533 5245529 5245534 +
catcagccaaccaggaattcag

SEQ ID NO: 87936 - DNA, 22 bp, Artificial Sequence
  Synthetic oligonucleotide; TTC chr11 5245532 5245553 5245549 5245554 +
agcagttactgctaacttccac

SEQ ID NO: 87937 - DNA, 22 bp, Artificial Sequence
  Synthetic oligonucleotide; TTA chr11 5245540 5245561 5245557 5245562 +
ctgctaacttccacttttctct

SEQ ID NO: 87938 - DNA, 22 bp, Artificial Sequence
  Synthetic oligonucleotide; CTG chr11 5245543 5245564 5245560 5245565 +
ctaacttccacttttctctcac

SEQ ID NO: 87939 - DNA, 22 bp, Artificial Sequence
  Synthetic oligonucleotide; CTA chr11 5245546 5245567 5245563 5245568 +
acttccacttttctctcacccg

SEQ ID NO: 87940 - DNA, 22 bp, Artificial Sequence
  Synthetic oligonucleotide; CTT chr11 5245550 5245571 5245567 5245572 +
ccacttttctctcacccgctcc

SEQ ID NO: 87941 - DNA, 22 bp, Artificial Sequence
  Synthetic oligonucleotide; TTC chr11 5245551 5245572 5245568 5245573 +
cacttttctctcacccgctcca

SEQ ID NO: 87942 - DNA, 22 bp, Artificial Sequence
  Synthetic oligonucleotide; CTT chr11 5245556 5245577 5245573 5245578 +
ttctctcacccgctccaggaaa

SEQ ID NO: 87943 - DNA, 22 bp, Artificial Sequence
  Synthetic oligonucleotide; TTT chr11 5245557 5245578 5245574 5245579 +
tctctcacccgctccaggaaaa

SEQ ID NO: 87944 - DNA, 22 bp, Artificial Sequence
  Synthetic oligonucleotide; TTT chr11 5245558 5245579 5245575 5245580 +
ctctcacccgctccaggaaaag

SEQ ID NO: 87945 - DNA, 22 bp, Artificial Sequence
  Synthetic oligonucleotide; TTC chr11 5245559 5245580 5245576 5245581 +
tctcacccgctccaggaaaagt

SEQ ID NO: 87946 - DNA, 22 bp, Artificial Sequence
  Synthetic oligonucleotide; CTC chr11 5245561 5245582 5245578 5245583 +
tcacccgctccaggaaaagtga

SEQ ID NO: 87947 - DNA, 22 bp, Artificial Sequence
  Synthetic oligonucleotide; CTC chr11 5245563 5245584 5245580 5245585 +
acccgctccaggaaaagtgacc

SEQ ID NO: 87948 - DNA, 22 bp, Artificial Sequence
  Synthetic oligonucleotide; CTC chr11 5245571 5245592 5245588 5245593 +
caggaaaagtgacctgcagtca

SEQ ID NO: 87949 - DNA, 22 bp, Artificial Sequence
  Synthetic oligonucleotide; CTG chr11 5245587 5245608 5245604 5245609 +
cagtcactttcctggaagtatt

SEQ ID NO: 87950 - DNA, 22 bp, Artificial Sequence
  Synthetic oligonucleotide; CTT chr11 5245596 5245617 5245613 5245618 +
tcctggaagtattgattctttc

SEQ ID NO: 87951 - DNA, 22 bp, Artificial Sequence
  Synthetic oligonucleotide; TTT chr11 5245597 5245618 5245614 5245619 +
cctggaagtattgattctttct

SEQ ID NO: 87952 - DNA, 22 bp, Artificial Sequence
  Synthetic oligonucleotide; TTC chr11 5245598 5245619 5245615 5245620 +
ctggaagtattgattctttctt

SEQ ID NO: 87953 - DNA, 22 bp, Artificial Sequence
  Synthetic oligonucleotide; CTG chr11 5245601 5245622 5245618 5245623 +
gaagtattgattctttcttgtt

SEQ ID NO: 87954 - DNA, 22 bp, Artificial Sequence
  Synthetic oligonucleotide; TTG chr11 5245610 5245631 5245627 5245632 +
attctttcttgtttgtggctgt

SEQ ID NO: 87955 - DNA, 22 bp, Artificial Sequence
  Synthetic oligonucleotide; TTC chr11 5245614 5245635 5245631 5245636 +
tttcttgtttgtggctgttccc

SEQ ID NO: 87956 - DNA, 22 bp, Artificial Sequence
  Synthetic oligonucleotide; CTT chr11 5245616 5245637 5245633 5245638 +
tcttgtttgtggctgttcccca

SEQ ID NO: 87957 - DNA, 22 bp, Artificial Sequence
  Synthetic oligonucleotide; TTT chr11 5245617 5245638 5245634 5245639 +
cttgtttgtggctgttccccat

SEQ ID NO: 87958 - DNA, 22 bp, Artificial Sequence
  Synthetic oligonucleotide; TTC chr11 5245618 5245639 5245635 5245640 +
ttgtttgtggctgttccccatt

SEQ ID NO: 87959 - DNA, 22 bp, Artificial Sequence
  Synthetic oligonucleotide; CTT chr11 5245620 5245641 5245637 5245642 +
gtttgtggctgttccccatttc

SEQ ID NO: 87960 - DNA, 22 bp, Artificial Sequence
  Synthetic oligonucleotide; TTG chr11 5245621 5245642 5245638 5245643 +
tttgtggctgttccccatttcc

SEQ ID NO: 87961 - DNA, 22 bp, Artificial Sequence
  Synthetic oligonucleotide; TTT chr11 5245624 5245645 5245641 5245646 +
gtggctgttccccatttccaat

SEQ ID NO: 87962 - DNA, 22 bp, Artificial Sequence
  Synthetic oligonucleotide; TTG chr11 5245625 5245646 5245642 5245647 +
tggctgttccccatttccaatt

SEQ ID NO: 87963 - DNA, 22 bp, Artificial Sequence
  Synthetic oligonucleotide; CTG chr11 5245631 5245652 5245648 5245653 +
ttccccatttccaattgttttc

SEQ ID NO: 87964 - DNA, 22 bp, Artificial Sequence
  Synthetic oligonucleotide; TTC chr11 5245634 5245655 5245651 5245656 +
cccatttccaattgttttccat

SEQ ID NO: 87965 - DNA, 22 bp, Artificial Sequence
  Synthetic oligonucleotide; TTT chr11 5245641 5245662 5245658 5245663 +
ccaattgttttccatgattatt

SEQ ID NO: 87966 - DNA, 22 bp, Artificial Sequence
  Synthetic oligonucleotide; TTC chr11 5245642 5245663 5245659 5245664 +
caattgttttccatgattattg

SEQ ID NO: 87967 - DNA, 22 bp, Artificial Sequence
  Synthetic oligonucleotide; TTG chr11 5245648 5245669 5245665 5245670 +
ttttccatgattattgcttcta

SEQ ID NO: 87968 - DNA, 22 bp, Artificial Sequence
  Synthetic oligonucleotide; TTT chr11 5245651 5245672 5245668 5245673 +
tccatgattattgcttctactg

SEQ ID NO: 87969 - DNA, 22 bp, Artificial Sequence
  Synthetic oligonucleotide; TTT chr11 5245652 5245673 5245669 5245674 +
ccatgattattgcttctactgt

SEQ ID NO: 87970 - DNA, 22 bp, Artificial Sequence
  Synthetic oligonucleotide; TTC chr11 5245653 5245674 5245670 5245675 +
catgattattgcttctactgtg

SEQ ID NO: 87971 - DNA, 22 bp, Artificial Sequence
  Synthetic oligonucleotide; TTA chr11 5245661 5245682 5245678 5245683 +
ttgcttctactgtgatctatag

SEQ ID NO: 87972 - DNA, 22 bp, Artificial Sequence
  Synthetic oligonucleotide; TTG chr11 5245664 5245685 5245681 5245686 +
cttctactgtgatctatagact

SEQ ID NO: 87973 - DNA, 22 bp, Artificial Sequence
  Synthetic oligonucleotide; CTT chr11 5245667 5245688 5245684 5245689 +
ctactgtgatctatagactctt

SEQ ID NO: 87974 - DNA, 22 bp, Artificial Sequence
  Synthetic oligonucleotide; TTC chr11 5245668 5245689 5245685 5245690 +
tactgtgatctatagactctta

SEQ ID NO: 87975 - DNA, 22 bp, Artificial Sequence
  Synthetic oligonucleotide; CTA chr11 5245670 5245691 5245687 5245692 +
ctgtgatctatagactcttata

SEQ ID NO: 87976 - DNA, 22 bp, Artificial Sequence
  Synthetic oligonucleotide; CTG chr11 5245673 5245694 5245690 5245695 +
tgatctatagactcttatatca

SEQ ID NO: 87977 - DNA, 22 bp, Artificial Sequence
  Synthetic oligonucleotide; CTA chr11 5245680 5245701 5245697 5245702 +
tagactcttatatcatcaatac

SEQ ID NO: 87978 - DNA, 22 bp, Artificial Sequence
  Synthetic oligonucleotide; CTC chr11 5245687 5245708 5245704 5245709 +
ttatatcatcaataccaggtta

SEQ ID NO: 87979 - DNA, 22 bp, Artificial Sequence
  Synthetic oligonucleotide; CTT chr11 5245689 5245710 5245706 5245711 +
atatcatcaataccaggttatc

SEQ ID NO: 87980 - DNA, 22 bp, Artificial Sequence
  Synthetic oligonucleotide; TTA chr11 5245690 5245711 5245707 5245712 +
tatcatcaataccaggttatca

SEQ ID NO: 87981 - DNA, 22 bp, Artificial Sequence
  Synthetic oligonucleotide; TTA chr11 5245709 5245730 5245726 5245731 +
tcattgcagttgtcaacttctc

SEQ ID NO: 87982 - DNA, 22 bp, Artificial Sequence
  Synthetic oligonucleotide; TTG chr11 5245715 5245736 5245732 5245737 +
cagttgtcaacttctctctgtt

SEQ ID NO: 87983 - DNA, 22 bp, Artificial Sequence
  Synthetic oligonucleotide; TTG chr11 5245721 5245742 5245738 5245743 +
tcaacttctctctgttgcatct

SEQ ID NO: 87984 - DNA, 22 bp, Artificial Sequence
  Synthetic oligonucleotide; CTT chr11 5245728 5245749 5245745 5245750 +
ctctctgttgcatcttatgcat

SEQ ID NO: 87985 - DNA, 22 bp, Artificial Sequence
  Synthetic oligonucleotide; TTC chr11 5245729 5245750 5245746 5245751 +
tctctgttgcatcttatgcatt

SEQ ID NO: 87986 - DNA, 22 bp, Artificial Sequence
  Synthetic oligonucleotide; CTC chr11 5245731 5245752 5245748 5245753 +
tctgttgcatcttatgcattaa

SEQ ID NO: 87987 - DNA, 22 bp, Artificial Sequence
  Synthetic oligonucleotide; CTC chr11 5245733 5245754 5245750 5245755 +
tgttgcatcttatgcattaatt

SEQ ID NO: 87988 - DNA, 22 bp, Artificial Sequence
  Synthetic oligonucleotide; CTG chr11 5245735 5245756 5245752 5245757 +
ttgcatcttatgcattaattca

SEQ ID NO: 87989 - DNA, 22 bp, Artificial Sequence
  Synthetic oligonucleotide; TTG chr11 5245738 5245759 5245755 5245760 +
catcttatgcattaattcaaca

SEQ ID NO: 87990 - DNA, 22 bp, Artificial Sequence
  Synthetic oligonucleotide; CTT chr11 5245744 5245765 5245761 5245766 +
atgcattaattcaacaaataca

SEQ ID NO: 87991 - DNA, 22 bp, Artificial Sequence
  Synthetic oligonucleotide; TTA chr11 5245745 5245766 5245762 5245767 +
tgcattaattcaacaaatacat

SEQ ID NO: 87992 - DNA, 22 bp, Artificial Sequence
  Synthetic oligonucleotide; TTA chr11 5245752 5245773 5245769 5245774 +
attcaacaaatacatattagat

SEQ ID NO: 87993 - DNA, 22 bp, Artificial Sequence
  Synthetic oligonucleotide; TTC chr11 5245756 5245777 5245773 5245778 +
aacaaatacatattagattcca

SEQ ID NO: 87994 - DNA, 22 bp, Artificial Sequence
  Synthetic oligonucleotide; TTA chr11 5245771 5245792 5245788 5245793 +
gattccatatgtcatccatgaa

SEQ ID NO: 87995 - DNA, 22 bp, Artificial Sequence
  Synthetic oligonucleotide; TTC chr11 5245776 5245797 5245793 5245798 +
catatgtcatccatgaagtttc

SEQ ID NO: 87996 - DNA, 22 bp, Artificial Sequence
  Synthetic oligonucleotide; TTT chr11 5245797 5245818 5245814 5245819 +
cattcatatgccatccattttt

SEQ ID NO: 87997 - DNA, 22 bp, Artificial Sequence
  Synthetic oligonucleotide; TTC chr11 5245798 5245819 5245815 5245820 +
attcatatgccatccatttttc

SEQ ID NO: 87998 - DNA, 22 bp, Artificial Sequence
  Synthetic oligonucleotide; TTC chr11 5245802 5245823 5245819 5245824 +
atatgccatccatttttcttaa

SEQ ID NO: 87999 - DNA, 22 bp, Artificial Sequence
  Synthetic oligonucleotide; TTT chr11 5245817 5245838 5245834 5245839 +
ttcttaattctgagaatcttac

SEQ ID NO: 88000 - DNA, 22 bp, Artificial Sequence
  Synthetic oligonucleotide; TTT chr11 5245818 5245839 5245835 5245840 +
tcttaattctgagaatcttaca

SEQ ID NO: 88001 - DNA, 22 bp, Artificial Sequence
  Synthetic oligonucleotide; TTT chr11 5245819 5245840 5245836 5245841 +
cttaattctgagaatcttacat

SEQ ID NO: 88002 - DNA, 22 bp, Artificial Sequence
  Synthetic oligonucleotide; TTC chr11 5245820 5245841 5245837 5245842 +
ttaattctgagaatcttacatg

SEQ ID NO: 88003 - DNA, 22 bp, Artificial Sequence
  Synthetic oligonucleotide; CTT chr11 5245822 5245843 5245839 5245844 +
aattctgagaatcttacatgaa

SEQ ID NO: 88004 - DNA, 22 bp, Artificial Sequence
  Synthetic oligonucleotide; TTA chr11 5245823 5245844 5245840 5245845 +
attctgagaatcttacatgaac

SEQ ID NO: 88005 - DNA, 22 bp, Artificial Sequence
  Synthetic oligonucleotide; TTC chr11 5245827 5245848 5245844 5245849 +
tgagaatcttacatgaactaga

SEQ ID NO: 88006 - DNA, 22 bp, Artificial Sequence
  Synthetic oligonucleotide; CTG chr11 5245829 5245850 5245846 5245851 +
agaatcttacatgaactagaca

SEQ ID NO: 88007 - DNA, 22 bp, Artificial Sequence
  Synthetic oligonucleotide; CTT chr11 5245837 5245858 5245854 5245859 +
acatgaactagacagacagatt

SEQ ID NO: 88008 - DNA, 22 bp, Artificial Sequence
  Synthetic oligonucleotide; TTA chr11 5245838 5245859 5245855 5245860 +
catgaactagacagacagattc

SEQ ID NO: 88009 - DNA, 22 bp, Artificial Sequence
  Synthetic oligonucleotide; CTA chr11 5245847 5245868 5245864 5245869 +
gacagacagattctctggctaa

SEQ ID NO: 88010 - DNA, 22 bp, Artificial Sequence
  Synthetic oligonucleotide; TTC chr11 5245860 5245881 5245877 5245882 +
tctggctaatggtgccctcact

SEQ ID NO: 88011 - DNA, 22 bp, Artificial Sequence
  Synthetic oligonucleotide; CTC chr11 5245862 5245883 5245879 5245884 +
tggctaatggtgccctcactat

SEQ ID NO: 88012 - DNA, 22 bp, Artificial Sequence
  Synthetic oligonucleotide; CTG chr11 5245864 5245885 5245881 5245886 +
gctaatggtgccctcactatag

SEQ ID NO: 88013 - DNA, 22 bp, Artificial Sequence
  Synthetic oligonucleotide; CTA chr11 5245868 5245889 5245885 5245890 +
atggtgccctcactatagtgag

SEQ ID NO: 88014 - DNA, 22 bp, Artificial Sequence
  Synthetic oligonucleotide; CTC chr11 5245879 5245900 5245896 5245901 +
actatagtgagcagaggagacc

SEQ ID NO: 88015 - DNA, 22 bp, Artificial Sequence
  Synthetic oligonucleotide; CTA chr11 5245883 5245904 5245900 5245905 +
tagtgagcagaggagaccagca

SEQ ID NO: 88016 - DNA, 22 bp, Artificial Sequence
  Synthetic oligonucleotide; CTA chr11 5245914 5245935 5245931 5245936 +
aaagaaatgaattaataagaga

SEQ ID NO: 88017 - DNA, 22 bp, Artificial Sequence
  Synthetic oligonucleotide; TTA chr11 5245928 5245949 5245945 5245950 +
ataagagatttcagatggtatt

SEQ ID NO: 88018 - DNA, 22 bp, Artificial Sequence
  Synthetic oligonucleotide; TTT chr11 5245939 5245960 5245956 5245961 +
cagatggtattatatgacttga

SEQ ID NO: 88019 - DNA, 22 bp, Artificial Sequence
  Synthetic oligonucleotide; TTC chr11 5245940 5245961 5245957 5245962 +
agatggtattatatgacttgaa

SEQ ID NO: 88020 - DNA, 22 bp, Artificial Sequence
  Synthetic oligonucleotide; TTA chr11 5245951 5245972 5245968 5245973 +
tatgacttgaagaaactgcata

SEQ ID NO: 88021 - DNA, 22 bp, Artificial Sequence
  Synthetic oligonucleotide; CTT chr11 5245959 5245980 5245976 5245981 +
gaagaaactgcatattgtacct

SEQ ID NO: 88022 - DNA, 22 bp, Artificial Sequence
  Synthetic oligonucleotide; TTG chr11 5245960 5245981 5245977 5245982 +
aagaaactgcatattgtaccta

SEQ ID NO: 88023 - DNA, 22 bp, Artificial Sequence
  Synthetic oligonucleotide; CTG chr11 5245969 5245990 5245986 5245991 +
catattgtacctacaaccatct

SEQ ID NO: 88024 - DNA, 22 bp, Artificial Sequence
  Synthetic oligonucleotide; TTG chr11 5245976 5245997 5245993 5245998 +
tacctacaaccatctggtcttt

SEQ ID NO: 88025 - DNA, 22 bp, Artificial Sequence
  Synthetic oligonucleotide; CTA chr11 5245982 5246003 5245999 5246004 +
caaccatctggtcttttagaaa

SEQ ID NO: 88026 - DNA, 22 bp, Artificial Sequence
  Synthetic oligonucleotide; CTG chr11 5245992 5246013 5246009 5246014 +
gtcttttagaaacctgacaaaa

SEQ ID NO: 88027 - DNA, 22 bp, Artificial Sequence
  Synthetic oligonucleotide; CTT chr11 5245997 5246018 5246014 5246019 +
ttagaaacctgacaaaagcaag

SEQ ID NO: 88028 - DNA, 22 bp, Artificial Sequence
  Synthetic oligonucleotide; TTT chr11 5245998 5246019 5246015 5246020 +
tagaaacctgacaaaagcaagc

SEQ ID NO: 88029 - DNA, 22 bp, Artificial Sequence
  Synthetic oligonucleotide; TTT chr11 5245999 5246020 5246016 5246021 +
agaaacctgacaaaagcaagca

SEQ ID NO: 88030 - DNA, 22 bp, Artificial Sequence
  Synthetic oligonucleotide; TTA chr11 5246000 5246021 5246017 5246022 +
gaaacctgacaaaagcaagcaa

SEQ ID NO: 88031 - DNA, 22 bp, Artificial Sequence
  Synthetic oligonucleotide; CTG chr11 5246008 5246029 5246025 5246030 +
acaaaagcaagcaatggggaaa

SEQ ID NO: 88032 - DNA, 22 bp, Artificial Sequence
  Synthetic oligonucleotide; TTT chr11 5246036 5246057 5246053 5246058 +
tcaatttaataaatgatggggg

SEQ ID NO: 88033 - DNA, 22 bp, Artificial Sequence
  Synthetic oligonucleotide; TTT chr11 5246037 5246058 5246054 5246059 +
caatttaataaatgatggggga

SEQ ID NO: 88034 - DNA, 22 bp, Artificial Sequence
  Synthetic oligonucleotide; TTC chr11 5246038 5246059 5246055 5246060 +
aatttaataaatgatgggggag

SEQ ID NO: 88035 - DNA, 22 bp, Artificial Sequence
  Synthetic oligonucleotide; TTT chr11 5246043 5246064 5246060 5246065 +
aataaatgatgggggagaactg

SEQ ID NO: 88036 - DNA, 22 bp, Artificial Sequence
  Synthetic oligonucleotide; TTA chr11 5246044 5246065 5246061 5246066 +
ataaatgatgggggagaactgg

SEQ ID NO: 88037 - DNA, 22 bp, Artificial Sequence
  Synthetic oligonucleotide; CTG chr11 5246065 5246086 5246082 5246087 +
gctagccatatgctgaaaaatg

SEQ ID NO: 88038 - DNA, 22 bp, Artificial Sequence
  Synthetic oligonucleotide; CTA chr11 5246069 5246090 5246086 5246091 +
gccatatgctgaaaaatgaaac

SEQ ID NO: 88039 - DNA, 22 bp, Artificial Sequence
  Synthetic oligonucleotide; CTG chr11 5246080 5246101 5246097 5246102 +
aaaaatgaaactggactccttc

SEQ ID NO: 88040 - DNA, 22 bp, Artificial Sequence
  Synthetic oligonucleotide; CTG chr11 5246093 5246114 5246110 5246115 +
gactccttccttataccttatc

SEQ ID NO: 88041 - DNA, 22 bp, Artificial Sequence
  Synthetic oligonucleotide; CTC chr11 5246098 5246119 5246115 5246120 +
cttccttataccttatccaaaa

SEQ ID NO: 88042 - DNA, 22 bp, Artificial Sequence
  Synthetic oligonucleotide; CTT chr11 5246101 5246122 5246118 5246123 +
ccttataccttatccaaaatta

SEQ ID NO: 88043 - DNA, 22 bp, Artificial Sequence
  Synthetic oligonucleotide; TTC chr11 5246102 5246123 5246119 5246124 +
cttataccttatccaaaattaa

SEQ ID NO: 88044 - DNA, 22 bp, Artificial Sequence
  Synthetic oligonucleotide; CTT chr11 5246105 5246126 5246122 5246127 +
ataccttatccaaaattaactc

SEQ ID NO: 88045 - DNA, 22 bp, Artificial Sequence
  Synthetic oligonucleotide; TTA chr11 5246106 5246127 5246123 5246128 +
taccttatccaaaattaactcc

SEQ ID NO: 88046 - DNA, 22 bp, Artificial Sequence
  Synthetic oligonucleotide; CTT chr11 5246112 5246133 5246129 5246134 +
atccaaaattaactccagatgg

SEQ ID NO: 88047 - DNA, 22 bp, Artificial Sequence
  Synthetic oligonucleotide; TTA chr11 5246113 5246134 5246130 5246135 +
tccaaaattaactccagatgga

SEQ ID NO: 88048 - DNA, 22 bp, Artificial Sequence
  Synthetic oligonucleotide; TTA chr11 5246123 5246144 5246140 5246145 +
actccagatggattagagactt

SEQ ID NO: 88049 - DNA, 22 bp, Artificial Sequence
  Synthetic oligonucleotide; CTC chr11 5246127 5246148 5246144 5246149 +
cagatggattagagacttaaat

SEQ ID NO: 88050 - DNA, 22 bp, Artificial Sequence
  Synthetic oligonucleotide; TTA chr11 5246138 5246159 5246155 5246160 +
gagacttaaatgaaaaacccca

SEQ ID NO: 88051 - DNA, 22 bp, Artificial Sequence
  Synthetic oligonucleotide; CTT chr11 5246145 5246166 5246162 5246167 +
aaatgaaaaaccccaaactata

SEQ ID NO: 88052 - DNA, 22 bp, Artificial Sequence
  Synthetic oligonucleotide; TTA chr11 5246146 5246167 5246163 5246168 +
aatgaaaaaccccaaactataa

SEQ ID NO: 88053 - DNA, 22 bp, Artificial Sequence
  Synthetic oligonucleotide; CTA chr11 5246165 5246186 5246182 5246187 +
taaaaagcctagaaaaaaatca

SEQ ID NO: 88054 - DNA, 22 bp, Artificial Sequence
  Synthetic oligonucleotide; CTA chr11 5246176 5246197 5246193 5246198 +
gaaaaaaatcaaggcaatacta

SEQ ID NO: 88055 - DNA, 22 bp, Artificial Sequence
  Synthetic oligonucleotide; CTA chr11 5246198 5246219 5246215 5246220 +
ttcatgatataaacacgggcac

SEQ ID NO: 88056 - DNA, 22 bp, Artificial Sequence
  Synthetic oligonucleotide; TTC chr11 5246201 5246222 5246218 5246223 +
atgatataaacacgggcacaga

SEQ ID NO: 88057 - DNA, 22 bp, Artificial Sequence
  Synthetic oligonucleotide; TTT chr11 5246226 5246247 5246243 5246248 +
catgatgaaagcgtgaaaagca

SEQ ID NO: 88058 - DNA, 22 bp, Artificial Sequence
  Synthetic oligonucleotide; TTC chr11 5246227 5246248 5246244 5246249 +
atgatgaaagcgtgaaaagcaa

SEQ ID NO: 88059 - DNA, 22 bp, Artificial Sequence
  Synthetic oligonucleotide; TTG chr11 5246252 5246273 5246269 5246274 +
cagcaaaagcaaaaattgacca

SEQ ID NO: 88060 - DNA, 22 bp, Artificial Sequence
  Synthetic oligonucleotide; TTG chr11 5246270 5246291 5246287 5246292 +
accaatggaatctaattaaact

SEQ ID NO: 88061 - DNA, 22 bp, Artificial Sequence
  Synthetic oligonucleotide; CTA chr11 5246284 5246305 5246301 5246306 +
attaaactaaagagctcctgct

SEQ ID NO: 88062 - DNA, 22 bp, Artificial Sequence
  Synthetic oligonucleotide; TTA chr11 5246288 5246309 5246305 5246310 +
aactaaagagctcctgctcagc

SEQ ID NO: 88063 - DNA, 22 bp, Artificial Sequence
  Synthetic oligonucleotide; CTA chr11 5246293 5246314 5246310 5246315 +
aagagctcctgctcagcaaaag

SEQ ID NO: 88064 - DNA, 22 bp, Artificial Sequence
  Synthetic oligonucleotide; CTC chr11 5246301 5246322 5246318 5246323 +
ctgctcagcaaaagaaactacc

SEQ ID NO: 88065 - DNA, 22 bp, Artificial Sequence
  Synthetic oligonucleotide; CTG chr11 5246304 5246325 5246321 5246326 +
ctcagcaaaagaaactaccatc

SEQ ID NO: 88066 - DNA, 22 bp, Artificial Sequence
  Synthetic oligonucleotide; CTC chr11 5246307 5246328 5246324 5246329 +
agcaaaagaaactaccatcaga

SEQ ID NO: 88067 - DNA, 22 bp, Artificial Sequence
  Synthetic oligonucleotide; CTA chr11 5246321 5246342 5246338 5246343 +
ccatcagagcgaaagacaatct

SEQ ID NO: 88068 - DNA, 22 bp, Artificial Sequence
  Synthetic oligonucleotide; CTA chr11 5246344 5246365 5246361 5246366 +
cagaatgggaaaaagattttcc

SEQ ID NO: 88069 - DNA, 22 bp, Artificial Sequence
  Synthetic oligonucleotide; TTT chr11 5246363 5246384 5246380 5246385 +
tccaatctattcttctgacaaa

SEQ ID NO: 88070 - DNA, 22 bp, Artificial Sequence
  Synthetic oligonucleotide; TTT chr11 5246364 5246385 5246381 5246386 +
ccaatctattcttctgacaaag

SEQ ID NO: 88071 - DNA, 22 bp, Artificial Sequence
  Synthetic oligonucleotide; TTC chr11 5246365 5246386 5246382 5246387 +
caatctattcttctgacaaagg

SEQ ID NO: 88072 - DNA, 22 bp, Artificial Sequence
  Synthetic oligonucleotide; CTA chr11 5246372 5246393 5246389 5246394 +
ttcttctgacaaaggcctaata

SEQ ID NO: 88073 - DNA, 22 bp, Artificial Sequence
  Synthetic oligonucleotide; TTC chr11 5246375 5246396 5246392 5246397 +
ttctgacaaaggcctaatatcc

SEQ ID NO: 88074 - DNA, 22 bp, Artificial Sequence
  Synthetic oligonucleotide; CTT chr11 5246377 5246398 5246394 5246399 +
ctgacaaaggcctaatatccag

SEQ ID NO: 88075 - DNA, 22 bp, Artificial Sequence
  Synthetic oligonucleotide; TTC chr11 5246378 5246399 5246395 5246400 +
tgacaaaggcctaatatccaga

SEQ ID NO: 88076 - DNA, 22 bp, Artificial Sequence
  Synthetic oligonucleotide; CTG chr11 5246380 5246401 5246397 5246402 +
acaaaggcctaatatccagagt

SEQ ID NO: 88077 - DNA, 22 bp, Artificial Sequence
  Synthetic oligonucleotide; CTA chr11 5246391 5246412 5246408 5246413 +
atatccagagtaaacaagaaac

SEQ ID NO: 88078 - DNA, 22 bp, Artificial Sequence
  Synthetic oligonucleotide; CTT chr11 5246415 5246436 5246432 5246437 +
aaacaactttacaagaaaaaaa

SEQ ID NO: 88079 - DNA, 22 bp, Artificial Sequence
  Synthetic oligonucleotide; TTA chr11 5246416 5246437 5246433 5246438 +
aacaactttacaagaaaaaaaa

SEQ ID NO: 88080 - DNA, 22 bp, Artificial Sequence
  Synthetic oligonucleotide; CTT chr11 5246424 5246445 5246441 5246446 +
tacaagaaaaaaaaaacccatt

SEQ ID NO: 88081 - DNA, 22 bp, Artificial Sequence
  Synthetic oligonucleotide; TTT chr11 5246425 5246446 5246442 5246447 +
acaagaaaaaaaaaacccatta

SEQ ID NO: 88082 - DNA, 22 bp, Artificial Sequence
  Synthetic oligonucleotide; TTA chr11 5246426 5246447 5246443 5246448 +
caagaaaaaaaaaacccattaa

SEQ ID NO: 88083 - DNA, 22 bp, Artificial Sequence
  Synthetic oligonucleotide; TTA chr11 5246447 5246468 5246464 5246469 +
aaaccatggcacacttttacct

SEQ ID NO: 88084 - DNA, 22 bp, Artificial Sequence
  Synthetic oligonucleotide; CTT chr11 5246463 5246484 5246480 5246485 +
ttacctataaaacaaacctgca

SEQ ID NO: 88085 - DNA, 22 bp, Artificial Sequence
  Synthetic oligonucleotide; TTT chr11 5246464 5246485 5246481 5246486 +
tacctataaaacaaacctgcat

SEQ ID NO: 88086 - DNA, 22 bp, Artificial Sequence
  Synthetic oligonucleotide; TTT chr11 5246465 5246486 5246482 5246487 +
acctataaaacaaacctgcata

SEQ ID NO: 88087 - DNA, 22 bp, Artificial Sequence
  Synthetic oligonucleotide; TTA chr11 5246466 5246487 5246483 5246488 +
cctataaaacaaacctgcatat

SEQ ID NO: 88088 - DNA, 22 bp, Artificial Sequence
  Synthetic oligonucleotide; CTA chr11 5246470 5246491 5246487 5246492 +
taaaacaaacctgcatatcctg

SEQ ID NO: 88089 - DNA, 22 bp, Artificial Sequence
  Synthetic oligonucleotide; CTG chr11 5246483 5246504 5246500 5246505 +
catatcctgtacgtgtacccct

SEQ ID NO: 88090 - DNA, 22 bp, Artificial Sequence
  Synthetic oligonucleotide; CTG chr11 5246492 5246513 5246509 5246514 +
tacgtgtacccctgaatttaag

SEQ ID NO: 88091 - DNA, 22 bp, Artificial Sequence
  Synthetic oligonucleotide; CTG chr11 5246506 5246527 5246523 5246528 +
aatttaaggtaacagtaaatta

SEQ ID NO: 88092 - DNA, 22 bp, Artificial Sequence
  Synthetic oligonucleotide; TTT chr11 5246511 5246532 5246528 5246533 +
aaggtaacagtaaattaaatta

SEQ ID NO: 88093 - DNA, 22 bp, Artificial Sequence
  Synthetic oligonucleotide; TTA chr11 5246512 5246533 5246529 5246534 +
aggtaacagtaaattaaattaa

SEQ ID NO: 88094 - DNA, 22 bp, Artificial Sequence
  Synthetic oligonucleotide; TTA chr11 5246528 5246549 5246545 5246550 +
aattaaaagaaaaatgccatgg

SEQ ID NO: 88095 - DNA, 22 bp, Artificial Sequence
  Synthetic oligonucleotide; TTA chr11 5246533 5246554 5246550 5246555 +
aaagaaaaatgccatggcaatg

SEQ ID NO: 88096 - DNA, 22 bp, Artificial Sequence
  Synthetic oligonucleotide; TTA chr11 5246566 5246587 5246583 5246588 +
ccctatatggcctaaaaagaga

SEQ ID NO: 88097 - DNA, 22 bp, Artificial Sequence
  Synthetic oligonucleotide; CTA chr11 5246571 5246592 5246588 5246593 +
tatggcctaaaaagagaaggca

SEQ ID NO: 88098 - DNA, 22 bp, Artificial Sequence
  Synthetic oligonucleotide; CTA chr11 5246580 5246601 5246597 5246602 +
aaaagagaaggcataaataatc

SEQ ID NO: 88099 - DNA, 22 bp, Artificial Sequence
  Synthetic oligonucleotide; CTT chr11 5246610 5246631 5246627 5246632 +
gtttaacatatcatcaagaaat

SEQ ID NO: 88100 - DNA, 22 bp, Artificial Sequence
  Synthetic oligonucleotide; TTG chr11 5246611 5246632 5246628 5246633 +
tttaacatatcatcaagaaata

SEQ ID NO: 88101 - DNA, 22 bp, Artificial Sequence
  Synthetic oligonucleotide; TTT chr11 5246614 5246635 5246631 5246636 +
aacatatcatcaagaaataacc

SEQ ID NO: 88102 - DNA, 22 bp, Artificial Sequence
  Synthetic oligonucleotide; TTA chr11 5246615 5246636 5246632 5246637 +
acatatcatcaagaaataacca

SEQ ID NO: 88103 - DNA, 22 bp, Artificial Sequence
  Synthetic oligonucleotide; CTC chr11 5246661 5246682 5246678 5246683 +
ggggctgctctgcctatgcagt

SEQ ID NO: 88104 - DNA, 22 bp, Artificial Sequence
  Synthetic oligonucleotide; CTG chr11 5246668 5246689 5246685 5246690 +
ctctgcctatgcagtagtcatt

SEQ ID NO: 88105 - DNA, 22 bp, Artificial Sequence
  Synthetic oligonucleotide; CTC chr11 5246671 5246692 5246688 5246693 +
tgcctatgcagtagtcattcgt

SEQ ID NO: 88106 - DNA, 22 bp, Artificial Sequence
  Synthetic oligonucleotide; CTG chr11 5246673 5246694 5246690 5246695 +
cctatgcagtagtcattcgttt

SEQ ID NO: 88107 - DNA, 22 bp, Artificial Sequence
  Synthetic oligonucleotide; CTA chr11 5246677 5246698 5246694 5246699 +
tgcagtagtcattcgtttattt

SEQ ID NO: 88108 - DNA, 22 bp, Artificial Sequence
  Synthetic oligonucleotide; TTC chr11 5246691 5246712 5246708 5246713 +
gtttatttctttactctctcaa

SEQ ID NO: 88109 - DNA, 22 bp, Artificial Sequence
  Synthetic oligonucleotide; TTT chr11 5246695 5246716 5246712 5246717 +
atttctttactctctcaagaaa

SEQ ID NO: 88110 - DNA, 22 bp, Artificial Sequence
  Synthetic oligonucleotide; TTA chr11 5246696 5246717 5246713 5246718 +
tttctttactctctcaagaaat

SEQ ID NO: 88111 - DNA, 22 bp, Artificial Sequence
  Synthetic oligonucleotide; TTT chr11 5246699 5246720 5246716 5246721 +
ctttactctctcaagaaatttg

SEQ ID NO: 88112 - DNA, 22 bp, Artificial Sequence
  Synthetic oligonucleotide; TTC chr11 5246700 5246721 5246717 5246722 +
tttactctctcaagaaatttgc

SEQ ID NO: 88113 - DNA, 22 bp, Artificial Sequence
  Synthetic oligonucleotide; CTT chr11 5246702 5246723 5246719 5246724 +
tactctctcaagaaatttgctt

SEQ ID NO: 88114 - DNA, 22 bp, Artificial Sequence
  Synthetic oligonucleotide; TTT chr11 5246703 5246724 5246720 5246725 +
actctctcaagaaatttgcttt

SEQ ID NO: 88115 - DNA, 22 bp, Artificial Sequence
  Synthetic oligonucleotide; TTA chr11 5246704 5246725 5246721 5246726 +
ctctctcaagaaatttgctttg

SEQ ID NO: 88116 - DNA, 22 bp, Artificial Sequence
  Synthetic oligonucleotide; CTC chr11 5246707 5246728 5246724 5246729 +
tctcaagaaatttgctttgact

SEQ ID NO: 88117 - DNA, 22 bp, Artificial Sequence
  Synthetic oligonucleotide; CTC chr11 5246709 5246730 5246726 5246731 +
tcaagaaatttgctttgactta

SEQ ID NO: 88118 - DNA, 22 bp, Artificial Sequence
  Synthetic oligonucleotide; CTC chr11 5246711 5246732 5246728 5246733 +
aagaaatttgctttgacttaaa

SEQ ID NO: 88119 - DNA, 22 bp, Artificial Sequence
  Synthetic oligonucleotide; TTT chr11 5246720 5246741 5246737 5246742 +
gctttgacttaaaaaaaacaaa

SEQ ID NO: 88120 - DNA, 22 bp, Artificial Sequence
  Synthetic oligonucleotide; TTG chr11 5246721 5246742 5246738 5246743 +
ctttgacttaaaaaaaacaaaa

SEQ ID NO: 88121 - DNA, 22 bp, Artificial Sequence
  Synthetic oligonucleotide; CTT chr11 5246724 5246745 5246741 5246746 +
tgacttaaaaaaaacaaaaaac

SEQ ID NO: 88122 - DNA, 22 bp, Artificial Sequence
  Synthetic oligonucleotide; TTT chr11 5246725 5246746 5246742 5246747 +
gacttaaaaaaaacaaaaaaca

SEQ ID NO: 88123 - DNA, 22 bp, Artificial Sequence
  Synthetic oligonucleotide; TTG chr11 5246726 5246747 5246743 5246748 +
acttaaaaaaaacaaaaaacaa

SEQ ID NO: 88124 - DNA, 22 bp, Artificial Sequence
  Synthetic oligonucleotide; CTT chr11 5246730 5246751 5246747 5246752 +
aaaaaaaacaaaaaacaaaaaa

SEQ ID NO: 88125 - DNA, 22 bp, Artificial Sequence
  Synthetic oligonucleotide; TTA chr11 5246731 5246752 5246748 5246753 +
aaaaaaacaaaaaacaaaaaag

SEQ ID NO: 88126 - DNA, 22 bp, Artificial Sequence
  Synthetic oligonucleotide; TTC chr11 5246770 5246791 5246787 5246792 +
tgaaacggtagtgactgcattt

SEQ ID NO: 88127 - DNA, 22 bp, Artificial Sequence
  Synthetic oligonucleotide; CTG chr11 5246772 5246793 5246789 5246794 +
aaacggtagtgactgcatttga

SEQ ID NO: 88128 - DNA, 22 bp, Artificial Sequence
  Synthetic oligonucleotide; CTG chr11 5246787 5246808 5246804 5246809 +
catttgaagtgggacctttatg

SEQ ID NO: 88129 - DNA, 22 bp, Artificial Sequence
  Synthetic oligonucleotide; TTT chr11 5246792 5246813 5246809 5246814 +
gaagtgggacctttatgatatg

SEQ ID NO: 88130 - DNA, 22 bp, Artificial Sequence
  Synthetic oligonucleotide; TTG chr11 5246793 5246814 5246810 5246815 +
aagtgggacctttatgatatga

SEQ ID NO: 88131 - DNA, 22 bp, Artificial Sequence
  Synthetic oligonucleotide; CTT chr11 5246805 5246826 5246822 5246827 +
tatgatatgatggagccaggca

SEQ ID NO: 88132 - DNA, 22 bp, Artificial Sequence
  Synthetic oligonucleotide; TTT chr11 5246806 5246827 5246823 5246828 +
atgatatgatggagccaggcag

SEQ ID NO: 88133 - DNA, 22 bp, Artificial Sequence
  Synthetic oligonucleotide; TTA chr11 5246807 5246828 5246824 5246829 +
tgatatgatggagccaggcaga

SEQ ID NO: 88134 - DNA, 22 bp, Artificial Sequence
  Synthetic oligonucleotide; TTG chr11 5246836 5246857 5246853 5246858 +
gagaagttcctgaaagaaggaa

SEQ ID NO: 88135 - DNA, 22 bp, Artificial Sequence
  Synthetic oligonucleotide; TTC chr11 5246845 5246866 5246862 5246867 +
ctgaaagaaggaagggcatgtg

SEQ ID NO: 88136 - DNA, 22 bp, Artificial Sequence
  Synthetic oligonucleotide; CTG chr11 5246848 5246869 5246865 5246870 +
aaagaaggaagggcatgtgcca

SEQ ID NO: 88137 - DNA, 22 bp, Artificial Sequence
  Synthetic oligonucleotide; TTC chr11 5246875 5246896 5246892 5246897 +
tgaggctgaggagaaaaaagaa

SEQ ID NO: 88138 - DNA, 22 bp, Artificial Sequence
  Synthetic oligonucleotide; CTG chr11 5246877 5246898 5246894 5246899 +
aggctgaggagaaaaaagaaag

SEQ ID NO: 88139 - DNA, 22 bp, Artificial Sequence
  Synthetic oligonucleotide; CTG chr11 5246883 5246904 5246900 5246905 +
aggagaaaaaagaaagaaagaa

SEQ ID NO: 88140 - DNA, 22 bp, Artificial Sequence
  Synthetic oligonucleotide; CTT chr11 5246923 5246944 5246940 5246945 +
tacatttcactgtatgtaaaga

SEQ ID NO: 88141 - DNA, 22 bp, Artificial Sequence
  Synthetic oligonucleotide; TTT chr11 5246924 5246945 5246941 5246946 +
acatttcactgtatgtaaagac

SEQ ID NO: 88142 - DNA, 22 bp, Artificial Sequence
  Synthetic oligonucleotide; TTA chr11 5246925 5246946 5246942 5246947 +
catttcactgtatgtaaagaca

SEQ ID NO: 88143 - DNA, 22 bp, Artificial Sequence
  Synthetic oligonucleotide; TTT chr11 5246930 5246951 5246947 5246952 +
cactgtatgtaaagacattaca

SEQ ID NO: 88144 - DNA, 22 bp, Artificial Sequence
  Synthetic oligonucleotide; TTC chr11 5246931 5246952 5246948 5246953 +
actgtatgtaaagacattacaa

SEQ ID NO: 88145 - DNA, 22 bp, Artificial Sequence
  Synthetic oligonucleotide; CTG chr11 5246935 5246956 5246952 5246957 +
tatgtaaagacattacaaggct

SEQ ID NO: 88146 - DNA, 22 bp, Artificial Sequence
  Synthetic oligonucleotide; TTA chr11 5246950 5246971 5246967 5246972 +
caaggctagagtaaagcatgtt

SEQ ID NO: 88147 - DNA, 22 bp, Artificial Sequence
  Synthetic oligonucleotide; CTA chr11 5246958 5246979 5246975 5246980 +
gagtaaagcatgttgaagtaaa

SEQ ID NO: 88148 - DNA, 22 bp, Artificial Sequence
  Synthetic oligonucleotide; TTG chr11 5246973 5246994 5246990 5246995 +
aagtaaaaataggagaaatcaa

SEQ ID NO: 88149 - DNA, 22 bp, Artificial Sequence
  Synthetic oligonucleotide; TTA chr11 5247000 5247021 5247017 5247022 +
gagagaagggcgcaggcttatt

SEQ ID NO: 88150 - DNA, 22 bp, Artificial Sequence
  Synthetic oligonucleotide; CTT chr11 5247019 5247040 5247036 5247041 +
attatttgggtcttatagatga

SEQ ID NO: 88151 - DNA, 22 bp, Artificial Sequence
  Synthetic oligonucleotide; TTA chr11 5247020 5247041 5247037 5247042 +
ttatttgggtcttatagatgag

SEQ ID NO: 88152 - DNA, 22 bp, Artificial Sequence
  Synthetic oligonucleotide; TTA chr11 5247023 5247044 5247040 5247045 +
tttgggtcttatagatgagagt

SEQ ID NO: 88153 - DNA, 22 bp, Artificial Sequence
  Synthetic oligonucleotide; TTT chr11 5247026 5247047 5247043 5247048 +
gggtcttatagatgagagtagt

SEQ ID NO: 88154 - DNA, 22 bp, Artificial Sequence
  Synthetic oligonucleotide; TTG chr11 5247027 5247048 5247044 5247049 +
ggtcttatagatgagagtagta

SEQ ID NO: 88155 - DNA, 22 bp, Artificial Sequence
  Synthetic oligonucleotide; CTT chr11 5247033 5247054 5247050 5247055 +
atagatgagagtagtagagtag

SEQ ID NO: 88156 - DNA, 22 bp, Artificial Sequence
  Synthetic oligonucleotide; TTA chr11 5247034 5247055 5247051 5247056 +
tagatgagagtagtagagtagg

SEQ ID NO: 88157 - DNA, 22 bp, Artificial Sequence
  Synthetic oligonucleotide; TTT chr11 5247061 5247082 5247078 5247083 +
tatactgaaacataggggacga

SEQ ID NO: 88158 - DNA, 22 bp, Artificial Sequence
  Synthetic oligonucleotide; TTT chr11 5247062 5247083 5247079 5247084 +
atactgaaacataggggacgag

SEQ ID NO: 88159 - DNA, 22 bp, Artificial Sequence
  Synthetic oligonucleotide; TTA chr11 5247063 5247084 5247080 5247085 +
tactgaaacataggggacgagg

SEQ ID NO: 88160 - DNA, 22 bp, Artificial Sequence
  Synthetic oligonucleotide; CTG chr11 5247068 5247089 5247085 5247090 +
aaacataggggacgaggggagc

SEQ ID NO: 88161 - DNA, 22 bp, Artificial Sequence
  Synthetic oligonucleotide; CTT chr11 5247092 5247113 5247109 5247114 +
tgcaaacctgagataaacatgg

SEQ ID NO: 88162 - DNA, 22 bp, Artificial Sequence
  Synthetic oligonucleotide; TTT chr11 5247093 5247114 5247110 5247115 +
gcaaacctgagataaacatggt

SEQ ID NO: 88163 - DNA, 22 bp, Artificial Sequence
  Synthetic oligonucleotide; TTG chr11 5247094 5247115 5247111 5247116 +
caaacctgagataaacatggtc

SEQ ID NO: 88164 - DNA, 22 bp, Artificial Sequence
  Synthetic oligonucleotide; CTG chr11 5247102 5247123 5247119 5247124 +
agataaacatggtctgtagtcc

SEQ ID NO: 88165 - DNA, 22 bp, Artificial Sequence
  Synthetic oligonucleotide; CTG chr11 5247118 5247139 5247135 5247140 +
tagtccactcaaaacccaagct

SEQ ID NO: 88166 - DNA, 22 bp, Artificial Sequence
  Synthetic oligonucleotide; CTC chr11 5247128 5247149 5247145 5247150 +
aaaacccaagcttatttttttc

SEQ ID NO: 88167 - DNA, 22 bp, Artificial Sequence
  Synthetic oligonucleotide; CTT chr11 5247141 5247162 5247158 5247163 +
atttttttctccttcttcatct

SEQ ID NO: 88168 - DNA, 22 bp, Artificial Sequence
  Synthetic oligonucleotide; TTA chr11 5247142 5247163 5247159 5247164 +
tttttttctccttcttcatctg

SEQ ID NO: 88169 - DNA, 22 bp, Artificial Sequence
  Synthetic oligonucleotide; TTT chr11 5247145 5247166 5247162 5247167 +
ttttctccttcttcatctgcct

SEQ ID NO: 88170 - DNA, 22 bp, Artificial Sequence
  Synthetic oligonucleotide; TTT chr11 5247146 5247167 5247163 5247168 +
tttctccttcttcatctgcctt

SEQ ID NO: 88171 - DNA, 22 bp, Artificial Sequence
  Synthetic oligonucleotide; TTT chr11 5247147 5247168 5247164 5247169 +
ttctccttcttcatctgcctta

SEQ ID NO: 88172 - DNA, 22 bp, Artificial Sequence
  Synthetic oligonucleotide; TTT chr11 5247148 5247169 5247165 5247170 +
tctccttcttcatctgccttac

SEQ ID NO: 88173 - DNA, 22 bp, Artificial Sequence
  Synthetic oligonucleotide; TTT chr11 5247149 5247170 5247166 5247171 +
ctccttcttcatctgccttact

SEQ ID NO: 88174 - DNA, 22 bp, Artificial Sequence
  Synthetic oligonucleotide; TTC chr11 5247150 5247171 5247167 5247172 +
tccttcttcatctgccttactc

SEQ ID NO: 88175 - DNA, 22 bp, Artificial Sequence
  Synthetic oligonucleotide; CTC chr11 5247152 5247173 5247169 5247174 +
cttcttcatctgccttactcag

SEQ ID NO: 88176 - DNA, 22 bp, Artificial Sequence
  Synthetic oligonucleotide; CTT chr11 5247155 5247176 5247172 5247177 +
cttcatctgccttactcagtgc

SEQ ID NO: 88177 - DNA, 22 bp, Artificial Sequence
  Synthetic oligonucleotide; TTC chr11 5247156 5247177 5247173 5247178 +
ttcatctgccttactcagtgca

SEQ ID NO: 88178 - DNA, 22 bp, Artificial Sequence
  Synthetic oligonucleotide; CTT chr11 5247158 5247179 5247175 5247180 +
catctgccttactcagtgcaag

SEQ ID NO: 88179 - DNA, 22 bp, Artificial Sequence
  Synthetic oligonucleotide; TTC chr11 5247159 5247180 5247176 5247181 +
atctgccttactcagtgcaagg

SEQ ID NO: 88180 - DNA, 22 bp, Artificial Sequence
  Synthetic oligonucleotide; CTG chr11 5247164 5247185 5247181 5247186 +
ccttactcagtgcaaggtgcta

SEQ ID NO: 88181 - DNA, 22 bp, Artificial Sequence
  Synthetic oligonucleotide; CTT chr11 5247168 5247189 5247185 5247190 +
actcagtgcaaggtgctataac

SEQ ID NO: 88182 - DNA, 22 bp, Artificial Sequence
  Synthetic oligonucleotide; TTA chr11 5247169 5247190 5247186 5247191 +
ctcagtgcaaggtgctataaca

SEQ ID NO: 88183 - DNA, 22 bp, Artificial Sequence
  Synthetic oligonucleotide; CTC chr11 5247172 5247193 5247189 5247194 +
agtgcaaggtgctataacaaaa

SEQ ID NO: 88184 - DNA, 22 bp, Artificial Sequence
  Synthetic oligonucleotide; CTA chr11 5247186 5247207 5247203 5247208 +
taacaaaatacaaaagactggg

SEQ ID NO: 88185 - DNA, 22 bp, Artificial Sequence
  Synthetic oligonucleotide; CTG chr11 5247206 5247227 5247223 5247228 +
ggtggcttcaacaacagagttt

SEQ ID NO: 88186 - DNA, 22 bp, Artificial Sequence
  Synthetic oligonucleotide; CTT chr11 5247214 5247235 5247231 5247236 +
caacaacagagttttttctcac

SEQ ID NO: 88187 - DNA, 22 bp, Artificial Sequence
  Synthetic oligonucleotide; TTC chr11 5247215 5247236 5247232 5247237 +
aacaacagagttttttctcaca

SEQ ID NO: 88188 - DNA, 22 bp, Artificial Sequence
  Synthetic oligonucleotide; TTT chr11 5247228 5247249 5247245 5247250 +
tttctcacatttctgaaggctg

SEQ ID NO: 88189 - DNA, 22 bp, Artificial Sequence
  Synthetic oligonucleotide; TTT chr11 5247229 5247250 5247246 5247251 +
ttctcacatttctgaaggctga

SEQ ID NO: 88190 - DNA, 22 bp, Artificial Sequence
  Synthetic oligonucleotide; TTT chr11 5247230 5247251 5247247 5247252 +
tctcacatttctgaaggctgac

SEQ ID NO: 88191 - DNA, 22 bp, Artificial Sequence
  Synthetic oligonucleotide; TTT chr11 5247231 5247252 5247248 5247253 +
ctcacatttctgaaggctgact

SEQ ID NO: 88192 - DNA, 22 bp, Artificial Sequence
  Synthetic oligonucleotide; TTC chr11 5247232 5247253 5247249 5247254 +
tcacatttctgaaggctgactc

SEQ ID NO: 88193 - DNA, 22 bp, Artificial Sequence
  Synthetic oligonucleotide; CTC chr11 5247234 5247255 5247251 5247256 +
acatttctgaaggctgactcgt

SEQ ID NO: 88194 - DNA, 22 bp, Artificial Sequence
  Synthetic oligonucleotide; TTT chr11 5247240 5247261 5247257 5247262 +
ctgaaggctgactcgtggtcag

SEQ ID NO: 88195 - DNA, 22 bp, Artificial Sequence
  Synthetic oligonucleotide; TTC chr11 5247241 5247262 5247258 5247263 +
tgaaggctgactcgtggtcagg

SEQ ID NO: 88196 - DNA, 22 bp, Artificial Sequence
  Synthetic oligonucleotide; CTG chr11 5247243 5247264 5247260 5247265 +
aaggctgactcgtggtcagggt

SEQ ID NO: 88197 - DNA, 22 bp, Artificial Sequence
  Synthetic oligonucleotide; CTG chr11 5247250 5247271 5247267 5247272 +
actcgtggtcagggttctcttc

SEQ ID NO: 88198 - DNA, 22 bp, Artificial Sequence
  Synthetic oligonucleotide; CTC chr11 5247254 5247275 5247271 5247276 +
gtggtcagggttctcttcctgg

SEQ ID NO: 88199 - DNA, 22 bp, Artificial Sequence
  Synthetic oligonucleotide; TTC chr11 5247267 5247288 5247284 5247289 +
tcttcctggattgcagatggcg

SEQ ID NO: 88200 - DNA, 22 bp, Artificial Sequence
  Synthetic oligonucleotide; CTC chr11 5247269 5247290 5247286 5247291 +
ttcctggattgcagatggcgga

SEQ ID NO: 88201 - DNA, 22 bp, Artificial Sequence
  Synthetic oligonucleotide; CTT chr11 5247271 5247292 5247288 5247293 +
cctggattgcagatggcggact

SEQ ID NO: 88202 - DNA, 22 bp, Artificial Sequence
  Synthetic oligonucleotide; TTC chr11 5247272 5247293 5247289 5247294 +
ctggattgcagatggcggactt

SEQ ID NO: 88203 - DNA, 22 bp, Artificial Sequence
  Synthetic oligonucleotide; CTG chr11 5247275 5247296 5247292 5247297 +
gattgcagatggcggacttctc

SEQ ID NO: 88204 - DNA, 22 bp, Artificial Sequence
  Synthetic oligonucleotide; TTG chr11 5247280 5247301 5247297 5247302 +
cagatggcggacttctcactgt

SEQ ID NO: 88205 - DNA, 22 bp, Artificial Sequence
  Synthetic oligonucleotide; CTT chr11 5247294 5247315 5247311 5247316 +
ctcactgtgtcctcaccgggag

SEQ ID NO: 88206 - DNA, 22 bp, Artificial Sequence
  Synthetic oligonucleotide; TTC chr11 5247295 5247316 5247312 5247317 +
tcactgtgtcctcaccgggagg

SEQ ID NO: 88207 - DNA, 22 bp, Artificial Sequence
  Synthetic oligonucleotide; CTC chr11 5247297 5247318 5247314 5247319 +
actgtgtcctcaccgggaggaa

SEQ ID NO: 88208 - DNA, 22 bp, Artificial Sequence
  Synthetic oligonucleotide; CTG chr11 5247301 5247322 5247318 5247323 +
tgtcctcaccgggaggaaagag

SEQ ID NO: 88209 - DNA, 22 bp, Artificial Sequence
  Synthetic oligonucleotide; CTC chr11 5247308 5247329 5247325 5247330 +
accgggaggaaagagaaatggc

SEQ ID NO: 88210 - DNA, 22 bp, Artificial Sequence
  Synthetic oligonucleotide; CTT chr11 5247332 5247353 5247349 5247354 +
gtctctctgcttctgataagga

SEQ ID NO: 88211 - DNA, 22 bp, Artificial Sequence
  Synthetic oligonucleotide; TTG chr11 5247333 5247354 5247350 5247355 +
tctctctgcttctgataaggaa

SEQ ID NO: 88212 - DNA, 22 bp, Artificial Sequence
  Synthetic oligonucleotide; CTC chr11 5247337 5247358 5247354 5247359 +
tctgcttctgataaggaaaata

SEQ ID NO: 88213 - DNA, 22 bp, Artificial Sequence
  Synthetic oligonucleotide; CTC chr11 5247339 5247360 5247356 5247361 +
tgcttctgataaggaaaataat

SEQ ID NO: 88214 - DNA, 22 bp, Artificial Sequence
  Synthetic oligonucleotide; CTG chr11 5247341 5247362 5247358 5247363 +
cttctgataaggaaaataattt

SEQ ID NO: 88215 - DNA, 22 bp, Artificial Sequence
  Synthetic oligonucleotide; CTT chr11 5247344 5247365 5247361 5247366 +
ctgataaggaaaataattttat

SEQ ID NO: 88216 - DNA, 22 bp, Artificial Sequence
  Synthetic oligonucleotide; TTC chr11 5247345 5247366 5247362 5247367 +
tgataaggaaaataattttatg

SEQ ID NO: 88217 - DNA, 22 bp, Artificial Sequence
  Synthetic oligonucleotide; CTG chr11 5247347 5247368 5247364 5247369 +
ataaggaaaataattttatgat

SEQ ID NO: 88218 - DNA, 22 bp, Artificial Sequence
  Synthetic oligonucleotide; TTT chr11 5247363 5247384 5247380 5247385 +
tatgatggggatctgctcttat

SEQ ID NO: 88219 - DNA, 22 bp, Artificial Sequence
  Synthetic oligonucleotide; TTT chr11 5247364 5247385 5247381 5247386 +
atgatggggatctgctcttatg

SEQ ID NO: 88220 - DNA, 22 bp, Artificial Sequence
  Synthetic oligonucleotide; TTA chr11 5247365 5247386 5247382 5247387 +
tgatggggatctgctcttatga

SEQ ID NO: 88221 - DNA, 22 bp, Artificial Sequence
  Synthetic oligonucleotide; CTG chr11 5247378 5247399 5247395 5247400 +
ctcttatgagctcatctaaacc

SEQ ID NO: 88222 - DNA, 22 bp, Artificial Sequence
  Synthetic oligonucleotide; CTC chr11 5247381 5247402 5247398 5247403 +
ttatgagctcatctaaacctaa

SEQ ID NO: 88223 - DNA, 22 bp, Artificial Sequence
  Synthetic oligonucleotide; CTT chr11 5247383 5247404 5247400 5247405 +
atgagctcatctaaacctaatt

SEQ ID NO: 88224 - DNA, 22 bp, Artificial Sequence
  Synthetic oligonucleotide; TTA chr11 5247384 5247405 5247401 5247406 +
tgagctcatctaaacctaatta

SEQ ID NO: 88225 - DNA, 22 bp, Artificial Sequence
  Synthetic oligonucleotide; CTC chr11 5247391 5247412 5247408 5247413 +
atctaaacctaattacttttca

SEQ ID NO: 88226 - DNA, 22 bp, Artificial Sequence
  Synthetic oligonucleotide; CTA chr11 5247396 5247417 5247413 5247418 +
aacctaattacttttcaaaagc

SEQ ID NO: 88227 - DNA, 22 bp, Artificial Sequence
  Synthetic oligonucleotide; CTA chr11 5247402 5247423 5247419 5247424 +
attacttttcaaaagcctcccc

SEQ ID NO: 88228 - DNA, 22 bp, Artificial Sequence
  Synthetic oligonucleotide; TTA chr11 5247406 5247427 5247423 5247428 +
cttttcaaaagcctcccccaca

SEQ ID NO: 88229 - DNA, 22 bp, Artificial Sequence
  Synthetic oligonucleotide; CTT chr11 5247409 5247430 5247426 5247431 +
ttcaaaagcctcccccacagat

SEQ ID NO: 88230 - DNA, 22 bp, Artificial Sequence
  Synthetic oligonucleotide; TTT chr11 5247410 5247431 5247427 5247432 +
tcaaaagcctcccccacagata

SEQ ID NO: 88231 - DNA, 22 bp, Artificial Sequence
  Synthetic oligonucleotide; TTT chr11 5247411 5247432 5247428 5247433 +
caaaagcctcccccacagataa

SEQ ID NO: 88232 - DNA, 22 bp, Artificial Sequence
  Synthetic oligonucleotide; TTC chr11 5247412 5247433 5247429 5247434 +
aaaagcctcccccacagataag

SEQ ID NO: 88233 - DNA, 22 bp, Artificial Sequence
  Synthetic oligonucleotide; CTC chr11 5247421 5247442 5247438 5247443 +
ccccacagataaggtcagttgg

SEQ ID NO: 88234 - DNA, 22 bp, Artificial Sequence
  Synthetic oligonucleotide; TTG chr11 5247442 5247463 5247459 5247464 +
ggagttggggattcagcatgtg

SEQ ID NO: 88235 - DNA, 22 bp, Artificial Sequence
  Synthetic oligonucleotide; TTG chr11 5247449 5247470 5247466 5247471 +
gggattcagcatgtgaattttg

SEQ ID NO: 88236 - DNA, 22 bp, Artificial Sequence
  Synthetic oligonucleotide; TTC chr11 5247456 5247477 5247473 5247478 +
agcatgtgaattttgaggagac

SEQ ID NO: 88237 - DNA, 22 bp, Artificial Sequence
  Synthetic oligonucleotide; TTT chr11 5247469 5247490 5247486 5247491 +
tgaggagacacaaacattaggt

SEQ ID NO: 88238 - DNA, 22 bp, Artificial Sequence
  Synthetic oligonucleotide; TTT chr11 5247470 5247491 5247487 5247492 +
gaggagacacaaacattaggtc

SEQ ID NO: 88239 - DNA, 22 bp, Artificial Sequence
  Synthetic oligonucleotide; TTG chr11 5247471 5247492 5247488 5247493 +
aggagacacaaacattaggtcc

SEQ ID NO: 88240 - DNA, 22 bp, Artificial Sequence
  Synthetic oligonucleotide; TTA chr11 5247488 5247509 5247505 5247510 +
ggtccgtaacaccatcatatta

SEQ ID NO: 88241 - DNA, 22 bp, Artificial Sequence
  Synthetic oligonucleotide; TTA chr11 5247510 5247531 5247527 5247532 +
aactcttacttatagagatgca

SEQ ID NO: 88242 - DNA, 22 bp, Artificial Sequence
  Synthetic oligonucleotide; CTC chr11 5247515 5247536 5247532 5247537 +
ttacttatagagatgcactaac

SEQ ID NO: 88243 - DNA, 22 bp, Artificial Sequence
  Synthetic oligonucleotide; CTT chr11 5247517 5247538 5247534 5247539 +
acttatagagatgcactaacat

SEQ ID NO: 88244 - DNA, 22 bp, Artificial Sequence
  Synthetic oligonucleotide; TTA chr11 5247518 5247539 5247535 5247540 +
cttatagagatgcactaacatc

SEQ ID NO: 88245 - DNA, 22 bp, Artificial Sequence
  Synthetic oligonucleotide; CTT chr11 5247521 5247542 5247538 5247543 +
atagagatgcactaacatccaa

SEQ ID NO: 88246 - DNA, 22 bp, Artificial Sequence
  Synthetic oligonucleotide; TTA chr11 5247522 5247543 5247539 5247544 +
tagagatgcactaacatccaac

SEQ ID NO: 88247 - DNA, 22 bp, Artificial Sequence
  Synthetic oligonucleotide; CTA chr11 5247535 5247556 5247552 5247557 +
acatccaactatacaaaaattc

SEQ ID NO: 88248 - DNA, 22 bp, Artificial Sequence
  Synthetic oligonucleotide; CTA chr11 5247546 5247567 5247563 5247568 +
tacaaaaattccattaagtaag

SEQ ID NO: 88249 - DNA, 22 bp, Artificial Sequence
  Synthetic oligonucleotide; TTC chr11 5247557 5247578 5247574 5247579 +
cattaagtaagccttccaatta

SEQ ID NO: 88250 - DNA, 22 bp, Artificial Sequence
  Synthetic oligonucleotide; TTA chr11 5247562 5247583 5247579 5247584 +
agtaagccttccaattaatgtt

SEQ ID NO: 88251 - DNA, 22 bp, Artificial Sequence
  Synthetic oligonucleotide; CTT chr11 5247572 5247593 5247589 5247594 +
ccaattaatgttgtacaaattc

SEQ ID NO: 88252 - DNA, 22 bp, Artificial Sequence
  Synthetic oligonucleotide; TTC chr11 5247573 5247594 5247590 5247595 +
caattaatgttgtacaaattct

SEQ ID NO: 88253 - DNA, 22 bp, Artificial Sequence
  Synthetic oligonucleotide; TTA chr11 5247579 5247600 5247596 5247601 +
atgttgtacaaattcttcccac

SEQ ID NO: 88254 - DNA, 22 bp, Artificial Sequence
  Synthetic oligonucleotide; TTG chr11 5247585 5247606 5247602 5247607 +
tacaaattcttcccactacatt

SEQ ID NO: 88255 - DNA, 22 bp, Artificial Sequence
  Synthetic oligonucleotide; TTC chr11 5247594 5247615 5247611 5247616 +
ttcccactacattttgatctca

SEQ ID NO: 88256 - DNA, 22 bp, Artificial Sequence
  Synthetic oligonucleotide; CTT chr11 5247596 5247617 5247613 5247618 +
cccactacattttgatctcaca

SEQ ID NO: 88257 - DNA, 22 bp, Artificial Sequence
  Synthetic oligonucleotide; TTC chr11 5247597 5247618 5247614 5247619 +
ccactacattttgatctcacag

SEQ ID NO: 88258 - DNA, 22 bp, Artificial Sequence
  Synthetic oligonucleotide; CTA chr11 5247603 5247624 5247620 5247625 +
cattttgatctcacagtgctgg

SEQ ID NO: 88259 - DNA, 22 bp, Artificial Sequence
  Synthetic oligonucleotide; TTT chr11 5247608 5247629 5247625 5247630 +
tgatctcacagtgctggtctgt

SEQ ID NO: 88260 - DNA, 22 bp, Artificial Sequence
  Synthetic oligonucleotide; TTT chr11 5247609 5247630 5247626 5247631 +
gatctcacagtgctggtctgtt

SEQ ID NO: 88261 - DNA, 22 bp, Artificial Sequence
  Synthetic oligonucleotide; TTG chr11 5247610 5247631 5247627 5247632 +
atctcacagtgctggtctgttt

SEQ ID NO: 88262 - DNA, 22 bp, Artificial Sequence
  Synthetic oligonucleotide; CTC chr11 5247615 5247636 5247632 5247637 +
acagtgctggtctgtttctcag

SEQ ID NO: 88263 - DNA, 22 bp, Artificial Sequence
  Synthetic oligonucleotide; CTG chr11 5247624 5247645 5247641 5247646 +
gtctgtttctcagacataacat

SEQ ID NO: 88264 - DNA, 22 bp, Artificial Sequence
  Synthetic oligonucleotide; CTG chr11 5247629 5247650 5247646 5247651 +
tttctcagacataacatgctca

SEQ ID NO: 88265 - DNA, 22 bp, Artificial Sequence
  Synthetic oligonucleotide; TTT chr11 5247632 5247653 5247649 5247654 +
ctcagacataacatgctcatgc

SEQ ID NO: 88266 - DNA, 22 bp, Artificial Sequence
  Synthetic oligonucleotide; TTC chr11 5247633 5247654 5247650 5247655 +
tcagacataacatgctcatgct

SEQ ID NO: 88267 - DNA, 22 bp, Artificial Sequence
  Synthetic oligonucleotide; CTC chr11 5247635 5247656 5247652 5247657 +
agacataacatgctcatgctga

SEQ ID NO: 88268 - DNA, 22 bp, Artificial Sequence
  Synthetic oligonucleotide; CTC chr11 5247650 5247671 5247667 5247672 +
atgctgacttgtgagcctctgc

SEQ ID NO: 88269 - DNA, 22 bp, Artificial Sequence
  Synthetic oligonucleotide; CTG chr11 5247656 5247677 5247673 5247678 +
acttgtgagcctctgctgattc

SEQ ID NO: 88270 - DNA, 22 bp, Artificial Sequence
  Synthetic oligonucleotide; CTT chr11 5247660 5247681 5247677 5247682 +
gtgagcctctgctgattcattt

SEQ ID NO: 88271 - DNA, 22 bp, Artificial Sequence
  Synthetic oligonucleotide; TTG chr11 5247661 5247682 5247678 5247683 +
tgagcctctgctgattcatttc

SEQ ID NO: 88272 - DNA, 22 bp, Artificial Sequence
  Synthetic oligonucleotide; CTC chr11 5247669 5247690 5247686 5247691 +
tgctgattcatttcttacacct

SEQ ID NO: 88273 - DNA, 22 bp, Artificial Sequence
  Synthetic oligonucleotide; CTG chr11 5247671 5247692 5247688 5247693 +
ctgattcatttcttacacctaa

SEQ ID NO: 88274 - DNA, 22 bp, Artificial Sequence
  Synthetic oligonucleotide; CTG chr11 5247674 5247695 5247691 5247696 +
attcatttcttacacctaagtc

SEQ ID NO: 88275 - DNA, 22 bp, Artificial Sequence
  Synthetic oligonucleotide; TTC chr11 5247678 5247699 5247695 5247700 +
atttcttacacctaagtcccca

SEQ ID NO: 88276 - DNA, 22 bp, Artificial Sequence
  Synthetic oligonucleotide; TTT chr11 5247682 5247703 5247699 5247704 +
cttacacctaagtccccacctc

SEQ ID NO: 88277 - DNA, 22 bp, Artificial Sequence
  Synthetic oligonucleotide; TTC chr11 5247683 5247704 5247700 5247705 +
ttacacctaagtccccacctcc

SEQ ID NO: 88278 - DNA, 22 bp, Artificial Sequence
  Synthetic oligonucleotide; CTT chr11 5247685 5247706 5247702 5247707 +
acacctaagtccccacctcccc

SEQ ID NO: 88279 - DNA, 22 bp, Artificial Sequence
  Synthetic oligonucleotide; TTA chr11 5247686 5247707 5247703 5247708 +
cacctaagtccccacctccccc

SEQ ID NO: 88280 - DNA, 22 bp, Artificial Sequence
  Synthetic oligonucleotide; CTA chr11 5247692 5247713 5247709 5247714 +
agtccccacctcccccagagtc

SEQ ID NO: 88281 - DNA, 22 bp, Artificial Sequence
  Synthetic oligonucleotide; CTC chr11 5247704 5247725 5247721 5247726 +
ccccagagtcttacaatgaggt

SEQ ID NO: 88282 - DNA, 22 bp, Artificial Sequence
  Synthetic oligonucleotide; CTT chr11 5247716 5247737 5247733 5247738 +
acaatgaggtctctcccttgaa

SEQ ID NO: 88283 - DNA, 22 bp, Artificial Sequence
  Synthetic oligonucleotide; TTA chr11 5247717 5247738 5247734 5247739 +
caatgaggtctctcccttgaaa

SEQ ID NO: 88284 - DNA, 22 bp, Artificial Sequence
  Synthetic oligonucleotide; CTC chr11 5247729 5247750 5247746 5247751 +
tcccttgaaatgctgtgaccaa

SEQ ID NO: 88285 - DNA, 22 bp, Artificial Sequence
  Synthetic oligonucleotide; CTC chr11 5247731 5247752 5247748 5247753 +
ccttgaaatgctgtgaccaatc

SEQ ID NO: 88286 - DNA, 22 bp, Artificial Sequence
  Synthetic oligonucleotide; CTT chr11 5247735 5247756 5247752 5247757 +
gaaatgctgtgaccaatctgca

SEQ ID NO: 88287 - DNA, 22 bp, Artificial Sequence
  Synthetic oligonucleotide; TTG chr11 5247736 5247757 5247753 5247758 +
aaatgctgtgaccaatctgcac

SEQ ID NO: 88288 - DNA, 22 bp, Artificial Sequence
  Synthetic oligonucleotide; CTG chr11 5247744 5247765 5247761 5247766 +
tgaccaatctgcacacttgagg

SEQ ID NO: 88289 - DNA, 22 bp, Artificial Sequence
  Synthetic oligonucleotide; CTG chr11 5247755 5247776 5247772 5247777 +
cacacttgagggcatgggatta

SEQ ID NO: 88290 - DNA, 22 bp, Artificial Sequence
  Synthetic oligonucleotide; CTT chr11 5247762 5247783 5247779 5247784 +
gagggcatgggattaatttcac

SEQ ID NO: 88291 - DNA, 22 bp, Artificial Sequence
  Synthetic oligonucleotide; TTG chr11 5247763 5247784 5247780 5247785 +
agggcatgggattaatttcact

SEQ ID NO: 88292 - DNA, 22 bp, Artificial Sequence
  Synthetic oligonucleotide; TTA chr11 5247777 5247798 5247794 5247799 +
atttcactttcttaggcatcca

SEQ ID NO: 88293 - DNA, 22 bp, Artificial Sequence
  Synthetic oligonucleotide; TTT chr11 5247781 5247802 5247798 5247803 +
cactttcttaggcatccacaag

SEQ ID NO: 88294 - DNA, 22 bp, Artificial Sequence
  Synthetic oligonucleotide; TTC chr11 5247782 5247803 5247799 5247804 +
actttcttaggcatccacaagg

SEQ ID NO: 88295 - DNA, 22 bp, Artificial Sequence
  Synthetic oligonucleotide; CTT chr11 5247786 5247807 5247803 5247808 +
tcttaggcatccacaagggctg

SEQ ID NO: 88296 - DNA, 22 bp, Artificial Sequence
  Synthetic oligonucleotide; TTT chr11 5247787 5247808 5247804 5247809 +
cttaggcatccacaagggctgt

SEQ ID NO: 88297 - DNA, 22 bp, Artificial Sequence
  Synthetic oligonucleotide; TTC chr11 5247788 5247809 5247805 5247810 +
ttaggcatccacaagggctgtg

SEQ ID NO: 88298 - DNA, 22 bp, Artificial Sequence
  Synthetic oligonucleotide; CTT chr11 5247790 5247811 5247807 5247812 +
aggcatccacaagggctgtgaa

SEQ ID NO: 88299 - DNA, 22 bp, Artificial Sequence
  Synthetic oligonucleotide; TTA chr11 5247791 5247812 5247808 5247813 +
ggcatccacaagggctgtgaaa

SEQ ID NO: 88300 - DNA, 22 bp, Artificial Sequence
  Synthetic oligonucleotide; CTG chr11 5247808 5247829 5247825 5247830 +
tgaaaagctaagtgccattaga

SEQ ID NO: 88301 - DNA, 22 bp, Artificial Sequence
  Synthetic oligonucleotide; CTA chr11 5247818 5247839 5247835 5247840 +
agtgccattagaaatagtattc

SEQ ID NO: 88302 - DNA, 22 bp, Artificial Sequence
  Synthetic oligonucleotide; TTA chr11 5247828 5247849 5247845 5247850 +
gaaatagtattcctcctaataa

SEQ ID NO: 88303 - DNA, 22 bp, Artificial Sequence
  Synthetic oligonucleotide; TTC chr11 5247840 5247861 5247857 5247862 +
ctcctaataaaatagaattgct

SEQ ID NO: 88304 - DNA, 22 bp, Artificial Sequence
  Synthetic oligonucleotide; CTC chr11 5247843 5247864 5247860 5247865 +
ctaataaaatagaattgctaca

SEQ ID NO: 88305 - DNA, 22 bp, Artificial Sequence
  Synthetic oligonucleotide; CTA chr11 5247846 5247867 5247863 5247868 +
ataaaatagaattgctacacct

SEQ ID NO: 88306 - DNA, 22 bp, Artificial Sequence
  Synthetic oligonucleotide; TTG chr11 5247860 5247881 5247877 5247882 +
ctacacctgactaaaccttgaa

SEQ ID NO: 88307 - DNA, 22 bp, Artificial Sequence
  Synthetic oligonucleotide; CTA chr11 5247863 5247884 5247880 5247885 +
cacctgactaaaccttgaattc

SEQ ID NO: 88308 - DNA, 22 bp, Artificial Sequence
  Synthetic oligonucleotide; CTG chr11 5247869 5247890 5247886 5247891 +
actaaaccttgaattcctaaag

SEQ ID NO: 88309 - DNA, 22 bp, Artificial Sequence
  Synthetic oligonucleotide; CTA chr11 5247873 5247894 5247890 5247895 +
aaccttgaattcctaaagcttg

SEQ ID NO: 88310 - DNA, 22 bp, Artificial Sequence
  Synthetic oligonucleotide; CTT chr11 5247879 5247900 5247896 5247901 +
gaattcctaaagcttggaacac

SEQ ID NO: 88311 - DNA, 22 bp, Artificial Sequence
  Synthetic oligonucleotide; TTG chr11 5247880 5247901 5247897 5247902 +
aattcctaaagcttggaacact

SEQ ID NO: 88312 - DNA, 22 bp, Artificial Sequence
  Synthetic oligonucleotide; TTC chr11 5247885 5247906 5247902 5247907 +
ctaaagcttggaacactttccc

SEQ ID NO: 88313 - DNA, 22 bp, Artificial Sequence
  Synthetic oligonucleotide; CTA chr11 5247888 5247909 5247905 5247910 +
aagcttggaacactttcccttc

SEQ ID NO: 88314 - DNA, 22 bp, Artificial Sequence
  Synthetic oligonucleotide; CTT chr11 5247894 5247915 5247911 5247916 +
ggaacactttcccttccttaag

SEQ ID NO: 88315 - DNA, 22 bp, Artificial Sequence
  Synthetic oligonucleotide; TTG chr11 5247895 5247916 5247912 5247917 +
gaacactttcccttccttaaga

SEQ ID NO: 88316 - DNA, 22 bp, Artificial Sequence
  Synthetic oligonucleotide; CTT chr11 5247903 5247924 5247920 5247925 +
tcccttccttaagaaccatcct

SEQ ID NO: 88317 - DNA, 22 bp, Artificial Sequence
  Synthetic oligonucleotide; TTT chr11 5247904 5247925 5247921 5247926 +
cccttccttaagaaccatcctt

SEQ ID NO: 88318 - DNA, 22 bp, Artificial Sequence
  Synthetic oligonucleotide; TTC chr11 5247905 5247926 5247922 5247927 +
ccttccttaagaaccatccttg

SEQ ID NO: 88319 - DNA, 22 bp, Artificial Sequence
  Synthetic oligonucleotide; CTT chr11 5247909 5247930 5247926 5247931 +
ccttaagaaccatccttgctac

SEQ ID NO: 88320 - DNA, 22 bp, Artificial Sequence
  Synthetic oligonucleotide; TTC chr11 5247910 5247931 5247927 5247932 +
cttaagaaccatccttgctact

SEQ ID NO: 88321 - DNA, 22 bp, Artificial Sequence
  Synthetic oligonucleotide; CTT chr11 5247913 5247934 5247930 5247935 +
aagaaccatccttgctactcag

SEQ ID NO: 88322 - DNA, 22 bp, Artificial Sequence
  Synthetic oligonucleotide; TTA chr11 5247914 5247935 5247931 5247936 +
agaaccatccttgctactcagc

SEQ ID NO: 88323 - DNA, 22 bp, Artificial Sequence
  Synthetic oligonucleotide; CTT chr11 5247926 5247947 5247943 5247948 +
gctactcagctgcaatcaatcc

SEQ ID NO: 88324 - DNA, 22 bp, Artificial Sequence
  Synthetic oligonucleotide; TTG chr11 5247927 5247948 5247944 5247949 +
ctactcagctgcaatcaatcca

SEQ ID NO: 88325 - DNA, 22 bp, Artificial Sequence
  Synthetic oligonucleotide; CTA chr11 5247930 5247951 5247947 5247952 +
ctcagctgcaatcaatccagcc

SEQ ID NO: 88326 - DNA, 22 bp, Artificial Sequence
  Synthetic oligonucleotide; CTC chr11 5247933 5247954 5247950 5247955 +
agctgcaatcaatccagccccc

SEQ ID NO: 88327 - DNA, 22 bp, Artificial Sequence
  Synthetic oligonucleotide; CTG chr11 5247938 5247959 5247955 5247960 +
caatcaatccagcccccaggtc

SEQ ID NO: 88328 - DNA, 22 bp, Artificial Sequence
  Synthetic oligonucleotide; CTT chr11 5247962 5247983 5247979 5247984 +
cactgaaccttttcccatctct

SEQ ID NO: 88329 - DNA, 22 bp, Artificial Sequence
  Synthetic oligonucleotide; TTC chr11 5247963 5247984 5247980 5247985 +
actgaaccttttcccatctctt

SEQ ID NO: 88330 - DNA, 22 bp, Artificial Sequence
  Synthetic oligonucleotide; CTG chr11 5247967 5247988 5247984 5247989 +
aaccttttcccatctcttccaa

SEQ ID NO: 88331 - DNA, 22 bp, Artificial Sequence
  Synthetic oligonucleotide; CTT chr11 5247973 5247994 5247990 5247995 +
ttcccatctcttccaaaacatc

SEQ ID NO: 88332 - DNA, 22 bp, Artificial Sequence
  Synthetic oligonucleotide; TTT chr11 5247974 5247995 5247991 5247996 +
tcccatctcttccaaaacatct

SEQ ID NO: 88333 - DNA, 22 bp, Artificial Sequence
  Synthetic oligonucleotide; TTT chr11 5247975 5247996 5247992 5247997 +
cccatctcttccaaaacatctg

SEQ ID NO: 88334 - DNA, 22 bp, Artificial Sequence
  Synthetic oligonucleotide; TTC chr11 5247976 5247997 5247993 5247998 +
ccatctcttccaaaacatctgt

SEQ ID NO: 88335 - DNA, 22 bp, Artificial Sequence
  Synthetic oligonucleotide; CTC chr11 5247983 5248004 5248000 5248005 +
ttccaaaacatctgtttctgag

SEQ ID NO: 88336 - DNA, 22 bp, Artificial Sequence
  Synthetic oligonucleotide; CTT chr11 5247985 5248006 5248002 5248007 +
ccaaaacatctgtttctgagaa

SEQ ID NO: 88337 - DNA, 22 bp, Artificial Sequence
  Synthetic oligonucleotide; TTC chr11 5247986 5248007 5248003 5248008 +
caaaacatctgtttctgagaag

SEQ ID NO: 88338 - DNA, 22 bp, Artificial Sequence
  Synthetic oligonucleotide; CTG chr11 5247997 5248018 5248014 5248019 +
tttctgagaagtcctgtcctat

SEQ ID NO: 88339 - DNA, 22 bp, Artificial Sequence
  Synthetic oligonucleotide; TTT chr11 5248000 5248021 5248017 5248022 +
ctgagaagtcctgtcctataga

SEQ ID NO: 88340 - DNA, 22 bp, Artificial Sequence
  Synthetic oligonucleotide; TTC chr11 5248001 5248022 5248018 5248023 +
tgagaagtcctgtcctatagag

SEQ ID NO: 88341 - DNA, 22 bp, Artificial Sequence
  Synthetic oligonucleotide; CTG chr11 5248003 5248024 5248020 5248025 +
agaagtcctgtcctatagaggt

SEQ ID NO: 88342 - DNA, 22 bp, Artificial Sequence
  Synthetic oligonucleotide; CTG chr11 5248013 5248034 5248030 5248035 +
tcctatagaggtctttcttccc

SEQ ID NO: 88343 - DNA, 22 bp, Artificial Sequence
  Synthetic oligonucleotide; CTA chr11 5248018 5248039 5248035 5248040 +
tagaggtctttcttcccaccgg

SEQ ID NO: 88344 - DNA, 22 bp, Artificial Sequence
  Synthetic oligonucleotide; CTT chr11 5248028 5248049 5248045 5248050 +
tcttcccaccggatttctccta

SEQ ID NO: 88345 - DNA, 22 bp, Artificial Sequence
  Synthetic oligonucleotide; TTT chr11 5248029 5248050 5248046 5248051 +
cttcccaccggatttctcctac

SEQ ID NO: 88346 - DNA, 22 bp, Artificial Sequence
  Synthetic oligonucleotide; TTC chr11 5248030 5248051 5248047 5248052 +
ttcccaccggatttctcctaca

SEQ ID NO: 88347 - DNA, 22 bp, Artificial Sequence
  Synthetic oligonucleotide; CTT chr11 5248032 5248053 5248049 5248054 +
cccaccggatttctcctacacc

SEQ ID NO: 88348 - DNA, 22 bp, Artificial Sequence
  Synthetic oligonucleotide; TTC chr11 5248033 5248054 5248050 5248055 +
ccaccggatttctcctacacca

SEQ ID NO: 88349 - DNA, 22 bp, Artificial Sequence
  Synthetic oligonucleotide; TTT chr11 5248044 5248065 5248061 5248066 +
ctcctacaccatttactcccac

SEQ ID NO: 88350 - DNA, 22 bp, Artificial Sequence
  Synthetic oligonucleotide; TTC chr11 5248045 5248066 5248062 5248067 +
tcctacaccatttactcccact

SEQ ID NO: 88351 - DNA, 22 bp, Artificial Sequence
  Synthetic oligonucleotide; CTC chr11 5248047 5248068 5248064 5248069 +
ctacaccatttactcccacttg

SEQ ID NO: 88352 - DNA, 22 bp, Artificial Sequence
  Synthetic oligonucleotide; CTA chr11 5248050 5248071 5248067 5248072 +
caccatttactcccacttgcag

SEQ ID NO: 88353 - DNA, 22 bp, Artificial Sequence
  Synthetic oligonucleotide; TTT chr11 5248058 5248079 5248075 5248080 +
actcccacttgcagaactcccg

SEQ ID NO: 88354 - DNA, 22 bp, Artificial Sequence
  Synthetic oligonucleotide; TTA chr11 5248059 5248080 5248076 5248081 +
ctcccacttgcagaactcccgt

SEQ ID NO: 88355 - DNA, 22 bp, Artificial Sequence
  Synthetic oligonucleotide; CTC chr11 5248062 5248083 5248079 5248084 +
ccacttgcagaactcccgtgta

SEQ ID NO: 88356 - DNA, 22 bp, Artificial Sequence
  Synthetic oligonucleotide; CTT chr11 5248068 5248089 5248085 5248090 +
gcagaactcccgtgtacaagtg

SEQ ID NO: 88357 - DNA, 22 bp, Artificial Sequence
  Synthetic oligonucleotide; TTG chr11 5248069 5248090 5248086 5248091 +
cagaactcccgtgtacaagtgt

SEQ ID NO: 88358 - DNA, 22 bp, Artificial Sequence
  Synthetic oligonucleotide; CTC chr11 5248077 5248098 5248094 5248099 +
ccgtgtacaagtgtctttactg

SEQ ID NO: 88359 - DNA, 22 bp, Artificial Sequence
  Synthetic oligonucleotide; CTT chr11 5248094 5248115 5248111 5248116 +
tactgcttttatttgctcatca

SEQ ID NO: 88360 - DNA, 22 bp, Artificial Sequence
  Synthetic oligonucleotide; TTT chr11 5248095 5248116 5248112 5248117 +
actgcttttatttgctcatcaa

SEQ ID NO: 88361 - DNA, 22 bp, Artificial Sequence
  Synthetic oligonucleotide; TTA chr11 5248096 5248117 5248113 5248118 +
ctgcttttatttgctcatcaaa

SEQ ID NO: 88362 - DNA, 22 bp, Artificial Sequence
  Synthetic oligonucleotide; CTG chr11 5248099 5248120 5248116 5248121 +
cttttatttgctcatcaaaatg

SEQ ID NO: 88363 - DNA, 22 bp, Artificial Sequence
  Synthetic oligonucleotide; CTT chr11 5248102 5248123 5248119 5248124 +
ttatttgctcatcaaaatgcac

SEQ ID NO: 88364 - DNA, 22 bp, Artificial Sequence
  Synthetic oligonucleotide; TTT chr11 5248103 5248124 5248120 5248125 +
tatttgctcatcaaaatgcaca

SEQ ID NO: 88365 - DNA, 22 bp, Artificial Sequence
  Synthetic oligonucleotide; TTT chr11 5248104 5248125 5248121 5248126 +
atttgctcatcaaaatgcacat

SEQ ID NO: 88366 - DNA, 22 bp, Artificial Sequence
  Synthetic oligonucleotide; TTA chr11 5248105 5248126 5248122 5248127 +
tttgctcatcaaaatgcacatc

SEQ ID NO: 88367 - DNA, 22 bp, Artificial Sequence
  Synthetic oligonucleotide; TTT chr11 5248108 5248129 5248125 5248130 +
gctcatcaaaatgcacatctca

SEQ ID NO: 88368 - DNA, 22 bp, Artificial Sequence
  Synthetic oligonucleotide; TTG chr11 5248109 5248130 5248126 5248131 +
ctcatcaaaatgcacatctcat

SEQ ID NO: 88369 - DNA, 22 bp, Artificial Sequence
  Synthetic oligonucleotide; CTC chr11 5248112 5248133 5248129 5248134 +
atcaaaatgcacatctcatata

SEQ ID NO: 88370 - DNA, 22 bp, Artificial Sequence
  Synthetic oligonucleotide; CTC chr11 5248129 5248150 5248146 5248151 +
atataaaaataaatgaggagca

SEQ ID NO: 88371 - DNA, 22 bp, Artificial Sequence
  Synthetic oligonucleotide; CTT chr11 5248201 5248222 5248218 5248223 +
ccctcaatataaaccctttgtg

SEQ ID NO: 88372 - DNA, 22 bp, Artificial Sequence
  Synthetic oligonucleotide; TTC chr11 5248202 5248223 5248219 5248224 +
cctcaatataaaccctttgtgg

SEQ ID NO: 88373 - DNA, 22 bp, Artificial Sequence
  Synthetic oligonucleotide; CTC chr11 5248206 5248227 5248223 5248228 +
aatataaaccctttgtggctca

SEQ ID NO: 88374 - DNA, 22 bp, Artificial Sequence
  Synthetic oligonucleotide; CTT chr11 5248219 5248240 5248236 5248241 +
tgtggctcatatatttaaaaag

SEQ ID NO: 88375 - DNA, 22 bp, Artificial Sequence
  Synthetic oligonucleotide; TTT chr11 5248220 5248241 5248237 5248242 +
gtggctcatatatttaaaaaga

SEQ ID NO: 88376 - DNA, 22 bp, Artificial Sequence
  Synthetic oligonucleotide; TTG chr11 5248221 5248242 5248238 5248243 +
tggctcatatatttaaaaagat

SEQ ID NO: 88377 - DNA, 22 bp, Artificial Sequence
  Synthetic oligonucleotide; CTC chr11 5248227 5248248 5248244 5248249 +
atatatttaaaaagatgtaaaa

SEQ ID NO: 88378 - DNA, 22 bp, Artificial Sequence
  Synthetic oligonucleotide; TTT chr11 5248235 5248256 5248252 5248257 +
aaaaagatgtaaaaaaaagagc

SEQ ID NO: 88379 - DNA, 22 bp, Artificial Sequence
  Synthetic oligonucleotide; TTA chr11 5248236 5248257 5248253 5248258 +
aaaagatgtaaaaaaaagagct

SEQ ID NO: 88380 - DNA, 22 bp, Artificial Sequence
  Synthetic oligonucleotide; CTG chr11 5248259 5248280 5248276 5248281 +
aagaaaatcatgtgtgatctct

SEQ ID NO: 88381 - DNA, 22 bp, Artificial Sequence
  Synthetic oligonucleotide; CTC chr11 5248280 5248301 5248297 5248302 +
tcagcagaatagatttattatt

SEQ ID NO: 88382 - DNA, 22 bp, Artificial Sequence
  Synthetic oligonucleotide; CTC chr11 5248282 5248303 5248299 5248304 +
agcagaatagatttattatttg

SEQ ID NO: 88383 - DNA, 22 bp, Artificial Sequence
  Synthetic oligonucleotide; TTT chr11 5248296 5248317 5248313 5248318 +
attatttgtattgcttgcagaa

SEQ ID NO: 88384 - DNA, 22 bp, Artificial Sequence
  Synthetic oligonucleotide; TTA chr11 5248297 5248318 5248314 5248319 +
ttatttgtattgcttgcagaat

SEQ ID NO: 88385 - DNA, 22 bp, Artificial Sequence
  Synthetic oligonucleotide; TTA chr11 5248300 5248321 5248317 5248322 +
tttgtattgcttgcagaataaa

SEQ ID NO: 88386 - DNA, 22 bp, Artificial Sequence
  Synthetic oligonucleotide; TTT chr11 5248303 5248324 5248320 5248325 +
gtattgcttgcagaataaagcc

SEQ ID NO: 88387 - DNA, 22 bp, Artificial Sequence
  Synthetic oligonucleotide; TTG chr11 5248304 5248325 5248321 5248326 +
tattgcttgcagaataaagcct

SEQ ID NO: 88388 - DNA, 22 bp, Artificial Sequence
  Synthetic oligonucleotide; TTG chr11 5248309 5248330 5248326 5248331 +
cttgcagaataaagcctatcct

SEQ ID NO: 88389 - DNA, 22 bp, Artificial Sequence
  Synthetic oligonucleotide; CTT chr11 5248312 5248333 5248329 5248334 +
gcagaataaagcctatccttga

SEQ ID NO: 88390 - DNA, 22 bp, Artificial Sequence
  Synthetic oligonucleotide; TTG chr11 5248313 5248334 5248330 5248335 +
cagaataaagcctatccttgaa

SEQ ID NO: 88391 - DNA, 22 bp, Artificial Sequence
  Synthetic oligonucleotide; CTA chr11 5248327 5248348 5248344 5248349 +
tccttgaaagctctgaatcatg

SEQ ID NO: 88392 - DNA, 22 bp, Artificial Sequence
  Synthetic oligonucleotide; CTT chr11 5248332 5248353 5248349 5248354 +
gaaagctctgaatcatgggcag

SEQ ID NO: 88393 - DNA, 22 bp, Artificial Sequence
  Synthetic oligonucleotide; TTG chr11 5248333 5248354 5248350 5248355 +
aaagctctgaatcatgggcagt

SEQ ID NO: 88394 - DNA, 22 bp, Artificial Sequence
  Synthetic oligonucleotide; CTC chr11 5248340 5248361 5248357 5248362 +
tgaatcatgggcagtgagctca

SEQ ID NO: 88395 - DNA, 22 bp, Artificial Sequence
  Synthetic oligonucleotide; CTG chr11 5248342 5248363 5248359 5248364 +
aatcatgggcagtgagctcagt

SEQ ID NO: 88396 - DNA, 22 bp, Artificial Sequence
  Synthetic oligonucleotide; CTC chr11 5248361 5248382 5248378 5248383 +
agtggtatctggaggacagggc

SEQ ID NO: 88397 - DNA, 22 bp, Artificial Sequence
  Synthetic oligonucleotide; CTG chr11 5248372 5248393 5248389 5248394 +
gaggacagggcactggccactg

SEQ ID NO: 88398 - DNA, 22 bp, Artificial Sequence
  Synthetic oligonucleotide; CTG chr11 5248387 5248408 5248404 5248409 +
gccactgcagtcaccatcttct

SEQ ID NO: 88399 - DNA, 22 bp, Artificial Sequence
  Synthetic oligonucleotide; CTG chr11 5248394 5248415 5248411 5248416 +
cagtcaccatcttctgccagga

SEQ ID NO: 88400 - DNA, 22 bp, Artificial Sequence
  Synthetic oligonucleotide; CTT chr11 5248407 5248428 5248424 5248429 +
ctgccaggaagcctgcacctca

SEQ ID NO: 88401 - DNA, 22 bp, Artificial Sequence
  Synthetic oligonucleotide; TTC chr11 5248408 5248429 5248425 5248430 +
tgccaggaagcctgcacctcag

SEQ ID NO: 88402 - DNA, 22 bp, Artificial Sequence
  Synthetic oligonucleotide; CTG chr11 5248410 5248431 5248427 5248432 +
ccaggaagcctgcacctcaggg

SEQ ID NO: 88403 - DNA, 22 bp, Artificial Sequence
  Synthetic oligonucleotide; CTG chr11 5248422 5248443 5248439 5248444 +
cacctcaggggtgaattctttg

SEQ ID NO: 88404 - DNA, 22 bp, Artificial Sequence
  Synthetic oligonucleotide; CTC chr11 5248428 5248449 5248445 5248450 +
aggggtgaattctttgccgaaa

SEQ ID NO: 88405 - DNA, 22 bp, Artificial Sequence
  Synthetic oligonucleotide; TTC chr11 5248440 5248461 5248457 5248462 +
tttgccgaaatggattgccaaa

SEQ ID NO: 88406 - DNA, 22 bp, Artificial Sequence
  Synthetic oligonucleotide; CTT chr11 5248442 5248463 5248459 5248464 +
tgccgaaatggattgccaaaac

SEQ ID NO: 88407 - DNA, 22 bp, Artificial Sequence
  Synthetic oligonucleotide; TTT chr11 5248443 5248464 5248460 5248465 +
gccgaaatggattgccaaaacg

SEQ ID NO: 88408 - DNA, 22 bp, Artificial Sequence
  Synthetic oligonucleotide; TTG chr11 5248444 5248465 5248461 5248466 +
ccgaaatggattgccaaaacgg

SEQ ID NO: 88409 - DNA, 22 bp, Artificial Sequence
  Synthetic oligonucleotide; TTG chr11 5248457 5248478 5248474 5248479 +
ccaaaacggtcaccagcacatt

SEQ ID NO: 88410 - DNA, 22 bp, Artificial Sequence
  Synthetic oligonucleotide; TTT chr11 5248480 5248501 5248497 5248502 +
cccaggagctgttgagatgaaa

SEQ ID NO: 88411 - DNA, 22 bp, Artificial Sequence
  Synthetic oligonucleotide; TTC chr11 5248481 5248502 5248498 5248503 +
ccaggagctgttgagatgaaag

SEQ ID NO: 88412 - DNA, 22 bp, Artificial Sequence
  Synthetic oligonucleotide; CTG chr11 5248491 5248512 5248508 5248513 +
ttgagatgaaaggagacaataa

SEQ ID NO: 88413 - DNA, 22 bp, Artificial Sequence
  Synthetic oligonucleotide; TTG chr11 5248494 5248515 5248511 5248516 +
agatgaaaggagacaataaaga

SEQ ID NO: 88414 - DNA, 22 bp, Artificial Sequence
  Synthetic oligonucleotide; CTG chr11 5248534 5248555 5248551 5248556 +
agagctccagcctggcctccag

SEQ ID NO: 88415 - DNA, 22 bp, Artificial Sequence
  Synthetic oligonucleotide; CTC chr11 5248541 5248562 5248558 5248563 +
cagcctggcctccagataacta

SEQ ID NO: 88416 - DNA, 22 bp, Artificial Sequence
  Synthetic oligonucleotide; CTG chr11 5248548 5248569 5248565 5248570 +
gcctccagataactacacacca

SEQ ID NO: 88417 - DNA, 22 bp, Artificial Sequence
  Synthetic oligonucleotide; CTC chr11 5248553 5248574 5248570 5248575 +
cagataactacacaccaagctt

SEQ ID NO: 88418 - DNA, 22 bp, Artificial Sequence
  Synthetic oligonucleotide; CTA chr11 5248563 5248584 5248580 5248585 +
cacaccaagcttccacccagaa

SEQ ID NO: 88419 - DNA, 22 bp, Artificial Sequence
  Synthetic oligonucleotide; CTT chr11 5248575 5248596 5248592 5248597 +
ccacccagaatcaagcctatgt

SEQ ID NO: 88420 - DNA, 22 bp, Artificial Sequence
  Synthetic oligonucleotide; TTC chr11 5248576 5248597 5248593 5248598 +
cacccagaatcaagcctatgtt

SEQ ID NO: 88421 - DNA, 22 bp, Artificial Sequence
  Synthetic oligonucleotide; CTA chr11 5248594 5248615 5248611 5248616 +
tgttaacttccctcaaagcctg

SEQ ID NO: 88422 - DNA, 22 bp, Artificial Sequence
  Synthetic oligonucleotide; TTA chr11 5248599 5248620 5248616 5248621 +
acttccctcaaagcctgagatt

SEQ ID NO: 88423 - DNA, 22 bp, Artificial Sequence
  Synthetic oligonucleotide; CTT chr11 5248603 5248624 5248620 5248625 +
ccctcaaagcctgagattttgc

SEQ ID NO: 88424 - DNA, 22 bp, Artificial Sequence
  Synthetic oligonucleotide; TTC chr11 5248604 5248625 5248621 5248626 +
cctcaaagcctgagattttgcc

SEQ ID NO: 88425 - DNA, 22 bp, Artificial Sequence
  Synthetic oligonucleotide; CTC chr11 5248608 5248629 5248625 5248630 +
aaagcctgagattttgccttcc

SEQ ID NO: 88426 - DNA, 22 bp, Artificial Sequence
  Synthetic oligonucleotide; CTG chr11 5248616 5248637 5248633 5248638 +
agattttgccttcccattaaat

SEQ ID NO: 88427 - DNA, 22 bp, Artificial Sequence
  Synthetic oligonucleotide; TTT chr11 5248622 5248643 5248639 5248644 +
tgccttcccattaaatgcaggt

SEQ ID NO: 88428 - DNA, 22 bp, Artificial Sequence
  Synthetic oligonucleotide; TTT chr11 5248623 5248644 5248640 5248645 +
gccttcccattaaatgcaggta

SEQ ID NO: 88429 - DNA, 22 bp, Artificial Sequence
  Synthetic oligonucleotide; TTG chr11 5248624 5248645 5248641 5248646 +
ccttcccattaaatgcaggtag

SEQ ID NO: 88430 - DNA, 22 bp, Artificial Sequence
  Synthetic oligonucleotide; CTT chr11 5248628 5248649 5248645 5248650 +
cccattaaatgcaggtagttgt

SEQ ID NO: 88431 - DNA, 22 bp, Artificial Sequence
  Synthetic oligonucleotide; TTC chr11 5248629 5248650 5248646 5248651 +
ccattaaatgcaggtagttgtt

SEQ ID NO: 88432 - DNA, 22 bp, Artificial Sequence
  Synthetic oligonucleotide; TTA chr11 5248635 5248656 5248652 5248657 +
aatgcaggtagttgttcccctt

SEQ ID NO: 88433 - DNA, 22 bp, Artificial Sequence
  Synthetic oligonucleotide; TTG chr11 5248649 5248670 5248666 5248671 +
ttccccttcaagcactagtcac

SEQ ID NO: 88434 - DNA, 22 bp, Artificial Sequence
  Synthetic oligonucleotide; TTC chr11 5248652 5248673 5248669 5248674 +
cccttcaagcactagtcactgg

SEQ ID NO: 88435 - DNA, 22 bp, Artificial Sequence
  Synthetic oligonucleotide; CTT chr11 5248657 5248678 5248674 5248679 +
caagcactagtcactggccata

SEQ ID NO: 88436 - DNA, 22 bp, Artificial Sequence
  Synthetic oligonucleotide; TTC chr11 5248658 5248679 5248675 5248680 +
aagcactagtcactggccataa

SEQ ID NO: 88437 - DNA, 22 bp, Artificial Sequence
  Synthetic oligonucleotide; CTA chr11 5248666 5248687 5248683 5248688 +
gtcactggccataatttaaatc

SEQ ID NO: 88438 - DNA, 22 bp, Artificial Sequence
  Synthetic oligonucleotide; CTG chr11 5248673 5248694 5248690 5248695 +
gccataatttaaatcttgctat

SEQ ID NO: 88439 - DNA, 22 bp, Artificial Sequence
  Synthetic oligonucleotide; TTT chr11 5248683 5248704 5248700 5248705 +
aaatcttgctatcttcttgcca

SEQ ID NO: 88440 - DNA, 22 bp, Artificial Sequence
  Synthetic oligonucleotide; TTA chr11 5248684 5248705 5248701 5248706 +
aatcttgctatcttcttgccac

SEQ ID NO: 88441 - DNA, 22 bp, Artificial Sequence
  Synthetic oligonucleotide; CTT chr11 5248690 5248711 5248707 5248712 +
gctatcttcttgccaccatgaa

SEQ ID NO: 88442 - DNA, 22 bp, Artificial Sequence
  Synthetic oligonucleotide; TTG chr11 5248691 5248712 5248708 5248713 +
ctatcttcttgccaccatgaac

SEQ ID NO: 88443 - DNA, 22 bp, Artificial Sequence
  Synthetic oligonucleotide; CTA chr11 5248694 5248715 5248711 5248716 +
tcttcttgccaccatgaaccct

SEQ ID NO: 88444 - DNA, 22 bp, Artificial Sequence
  Synthetic oligonucleotide; CTT chr11 5248698 5248719 5248715 5248720 +
cttgccaccatgaaccctgtat

SEQ ID NO: 88445 - DNA, 22 bp, Artificial Sequence
  Synthetic oligonucleotide; TTC chr11 5248699 5248720 5248716 5248721 +
ttgccaccatgaaccctgtatg

SEQ ID NO: 88446 - DNA, 22 bp, Artificial Sequence
  Synthetic oligonucleotide; CTT chr11 5248701 5248722 5248718 5248723 +
gccaccatgaaccctgtatgtt

SEQ ID NO: 88447 - DNA, 22 bp, Artificial Sequence
  Synthetic oligonucleotide; TTG chr11 5248702 5248723 5248719 5248724 +
ccaccatgaaccctgtatgttg

SEQ ID NO: 88448 - DNA, 22 bp, Artificial Sequence
  Synthetic oligonucleotide; CTG chr11 5248717 5248738 5248734 5248739 +
tatgttgtaggctgaagacgtt

SEQ ID NO: 88449 - DNA, 22 bp, Artificial Sequence
  Synthetic oligonucleotide; TTG chr11 5248724 5248745 5248741 5248746 +
taggctgaagacgttaaaagaa

SEQ ID NO: 88450 - DNA, 22 bp, Artificial Sequence
  Synthetic oligonucleotide; CTG chr11 5248731 5248752 5248748 5248753 +
aagacgttaaaagaaacacacg

SEQ ID NO: 88451 - DNA, 22 bp, Artificial Sequence
  Synthetic oligonucleotide; TTA chr11 5248740 5248761 5248757 5248762 +
aaagaaacacacgctgacacac

SEQ ID NO: 88452 - DNA, 22 bp, Artificial Sequence
  Synthetic oligonucleotide; CTG chr11 5248756 5248777 5248773 5248778 +
acacacacacacacacgcgcgc

SEQ ID NO: 88453 - DNA, 22 bp, Artificial Sequence
  Synthetic oligonucleotide; CTG chr11 5248807 5248828 5248824 5248829 +
actttcaaaatctactccagcc

SEQ ID NO: 88454 - DNA, 22 bp, Artificial Sequence
  Synthetic oligonucleotide; CTT chr11 5248811 5248832 5248828 5248833 +
tcaaaatctactccagcccaaa

SEQ ID NO: 88455 - DNA, 22 bp, Artificial Sequence
  Synthetic oligonucleotide; TTT chr11 5248812 5248833 5248829 5248834 +
caaaatctactccagcccaaat

SEQ ID NO: 88456 - DNA, 22 bp, Artificial Sequence
  Synthetic oligonucleotide; TTC chr11 5248813 5248834 5248830 5248835 +
aaaatctactccagcccaaatg

SEQ ID NO: 88457 - DNA, 22 bp, Artificial Sequence
  Synthetic oligonucleotide; CTA chr11 5248821 5248842 5248838 5248843 +
ctccagcccaaatgtttcaatt

SEQ ID NO: 88458 - DNA, 22 bp, Artificial Sequence
  Synthetic oligonucleotide; CTC chr11 5248824 5248845 5248841 5248846 +
cagcccaaatgtttcaattgtt

SEQ ID NO: 88459 - DNA, 22 bp, Artificial Sequence
  Synthetic oligonucleotide; TTT chr11 5248838 5248859 5248855 5248860 +
caattgttcctcacccctggac

SEQ ID NO: 88460 - DNA, 22 bp, Artificial Sequence
  Synthetic oligonucleotide; TTC chr11 5248839 5248860 5248856 5248861 +
aattgttcctcacccctggaca

SEQ ID NO: 88461 - DNA, 22 bp, Artificial Sequence
  Synthetic oligonucleotide; TTG chr11 5248844 5248865 5248861 5248866 +
ttcctcacccctggacatactt

SEQ ID NO: 88462 - DNA, 22 bp, Artificial Sequence
  Synthetic oligonucleotide; TTC chr11 5248847 5248868 5248864 5248869 +
ctcacccctggacatactttgc

SEQ ID NO: 88463 - DNA, 22 bp, Artificial Sequence
  Synthetic oligonucleotide; CTC chr11 5248850 5248871 5248867 5248872 +
acccctggacatactttgcccc

SEQ ID NO: 88464 - DNA, 22 bp, Artificial Sequence
  Synthetic oligonucleotide; CTG chr11 5248857 5248878 5248874 5248879 +
gacatactttgcccccatctgg

SEQ ID NO: 88465 - DNA, 22 bp, Artificial Sequence
  Synthetic oligonucleotide; CTT chr11 5248866 5248887 5248883 5248888 +
tgcccccatctggaattaaagg

SEQ ID NO: 88466 - DNA, 22 bp, Artificial Sequence
  Synthetic oligonucleotide; TTT chr11 5248867 5248888 5248884 5248889 +
gcccccatctggaattaaagga

SEQ ID NO: 88467 - DNA, 22 bp, Artificial Sequence
  Synthetic oligonucleotide; TTG chr11 5248868 5248889 5248885 5248890 +
cccccatctggaattaaaggat

SEQ ID NO: 88468 - DNA, 22 bp, Artificial Sequence
  Synthetic oligonucleotide; CTG chr11 5248878 5248899 5248895 5248900 +
gaattaaaggatataagtttgt

SEQ ID NO: 88469 - DNA, 22 bp, Artificial Sequence
  Synthetic oligonucleotide; TTA chr11 5248884 5248905 5248901 5248906 +
aaggatataagtttgtaatgaa

SEQ ID NO: 88470 - DNA, 22 bp, Artificial Sequence
  Synthetic oligonucleotide; TTT chr11 5248898 5248919 5248915 5248920 +
gtaatgaagcattagcagcatt

SEQ ID NO: 88471 - DNA, 22 bp, Artificial Sequence
  Synthetic oligonucleotide; TTG chr11 5248899 5248920 5248916 5248921 +
taatgaagcattagcagcattt

SEQ ID NO: 88472 - DNA, 22 bp, Artificial Sequence
  Synthetic oligonucleotide; TTA chr11 5248912 5248933 5248929 5248934 +
gcagcattttatatgtgtccag

SEQ ID NO: 88473 - DNA, 22 bp, Artificial Sequence
  Synthetic oligonucleotide; TTT chr11 5248921 5248942 5248938 5248943 +
tatatgtgtccagctgatatag

SEQ ID NO: 88474 - DNA, 22 bp, Artificial Sequence
  Synthetic oligonucleotide; TTT chr11 5248922 5248943 5248939 5248944 +
atatgtgtccagctgatatagg

SEQ ID NO: 88475 - DNA, 22 bp, Artificial Sequence
  Synthetic oligonucleotide; TTA chr11 5248923 5248944 5248940 5248945 +
tatgtgtccagctgatatagga

SEQ ID NO: 88476 - DNA, 22 bp, Artificial Sequence
  Synthetic oligonucleotide; CTG chr11 5248937 5248958 5248954 5248959 +
atataggaatagccttagcaat

SEQ ID NO: 88477 - DNA, 22 bp, Artificial Sequence
  Synthetic oligonucleotide; CTT chr11 5248953 5248974 5248970 5248975 +
agcaatgtatgtttggccacca

SEQ ID NO: 88478 - DNA, 22 bp, Artificial Sequence
  Synthetic oligonucleotide; TTA chr11 5248954 5248975 5248971 5248976 +
gcaatgtatgtttggccaccaa

SEQ ID NO: 88479 - DNA, 22 bp, Artificial Sequence
  Synthetic oligonucleotide; TTT chr11 5248967 5248988 5248984 5248989 +
ggccaccaaagttccccacttt

SEQ ID NO: 88480 - DNA, 22 bp, Artificial Sequence
  Synthetic oligonucleotide; TTG chr11 5248968 5248989 5248985 5248990 +
gccaccaaagttccccactttg

SEQ ID NO: 88481 - DNA, 22 bp, Artificial Sequence
  Synthetic oligonucleotide; TTC chr11 5248981 5249002 5248998 5249003 +
cccactttgactgagccaatat

SEQ ID NO: 88482 - DNA, 22 bp, Artificial Sequence
  Synthetic oligonucleotide; CTT chr11 5248988 5249009 5249005 5249010 +
tgactgagccaatatatgcctt

SEQ ID NO: 88483 - DNA, 22 bp, Artificial Sequence
  Synthetic oligonucleotide; TTT chr11 5248989 5249010 5249006 5249011 +
gactgagccaatatatgccttc

SEQ ID NO: 88484 - DNA, 22 bp, Artificial Sequence
  Synthetic oligonucleotide; TTG chr11 5248990 5249011 5249007 5249012 +
actgagccaatatatgccttct

SEQ ID NO: 88485 - DNA, 22 bp, Artificial Sequence
  Synthetic oligonucleotide; CTG chr11 5248994 5249015 5249011 5249016 +
agccaatatatgccttctgcct

SEQ ID NO: 88486 - DNA, 22 bp, Artificial Sequence
  Synthetic oligonucleotide; CTT chr11 5249010 5249031 5249027 5249032 +
ctgcctgcatctttttaacgac

SEQ ID NO: 88487 - DNA, 22 bp, Artificial Sequence
  Synthetic oligonucleotide; TTC chr11 5249011 5249032 5249028 5249033 +
tgcctgcatctttttaacgacc

SEQ ID NO: 88488 - DNA, 22 bp, Artificial Sequence
  Synthetic oligonucleotide; CTG chr11 5249013 5249034 5249030 5249035 +
cctgcatctttttaacgaccat

SEQ ID NO: 88489 - DNA, 22 bp, Artificial Sequence
  Synthetic oligonucleotide; CTG chr11 5249017 5249038 5249034 5249039 +
catctttttaacgaccatactt

SEQ ID NO: 88490 - DNA, 22 bp, Artificial Sequence
  Synthetic oligonucleotide; CTT chr11 5249023 5249044 5249040 5249045 +
tttaacgaccatacttgtcctg

SEQ ID NO: 88491 - DNA, 22 bp, Artificial Sequence
  Synthetic oligonucleotide; TTT chr11 5249024 5249045 5249041 5249046 +
ttaacgaccatacttgtcctgc

SEQ ID NO: 88492 - DNA, 22 bp, Artificial Sequence
  Synthetic oligonucleotide; TTT chr11 5249025 5249046 5249042 5249047 +
taacgaccatacttgtcctgcc

SEQ ID NO: 88493 - DNA, 22 bp, Artificial Sequence
  Synthetic oligonucleotide; TTT chr11 5249026 5249047 5249043 5249048 +
aacgaccatacttgtcctgcct

SEQ ID NO: 88494 - DNA, 22 bp, Artificial Sequence
  Synthetic oligonucleotide; TTA chr11 5249027 5249048 5249044 5249049 +
acgaccatacttgtcctgcctc

SEQ ID NO: 88495 - DNA, 22 bp, Artificial Sequence
  Synthetic oligonucleotide; CTT chr11 5249039 5249060 5249056 5249061 +
gtcctgcctccagatagatgtt

SEQ ID NO: 88496 - DNA, 22 bp, Artificial Sequence
  Synthetic oligonucleotide; TTG chr11 5249040 5249061 5249057 5249062 +
tcctgcctccagatagatgttt

SEQ ID NO: 88497 - DNA, 22 bp, Artificial Sequence
  Synthetic oligonucleotide; CTG chr11 5249045 5249066 5249062 5249067 +
cctccagatagatgttttaaaa

SEQ ID NO: 88498 - DNA, 22 bp, Artificial Sequence
  Synthetic oligonucleotide; CTC chr11 5249049 5249070 5249066 5249071 +
cagatagatgttttaaaacaac

SEQ ID NO: 88499 - DNA, 22 bp, Artificial Sequence
  Synthetic oligonucleotide; TTT chr11 5249062 5249083 5249079 5249084 +
taaaacaacaaaaatgagggaa

SEQ ID NO: 88500 - DNA, 22 bp, Artificial Sequence
  Synthetic oligonucleotide; TTT chr11 5249063 5249084 5249080 5249085 +
aaaacaacaaaaatgagggaaa

SEQ ID NO: 88501 - DNA, 22 bp, Artificial Sequence
  Synthetic oligonucleotide; TTA chr11 5249064 5249085 5249081 5249086 +
aaacaacaaaaatgagggaaag

SEQ ID NO: 88502 - DNA, 22 bp, Artificial Sequence
  Synthetic oligonucleotide; TTC chr11 5249096 5249117 5249113 5249118 +
tttctactggaatctaataaag

SEQ ID NO: 88503 - DNA, 22 bp, Artificial Sequence
  Synthetic oligonucleotide; CTT chr11 5249098 5249119 5249115 5249120 +
tctactggaatctaataaagaa

SEQ ID NO: 88504 - DNA, 22 bp, Artificial Sequence
  Synthetic oligonucleotide; TTT chr11 5249099 5249120 5249116 5249121 +
ctactggaatctaataaagaaa

SEQ ID NO: 88505 - DNA, 22 bp, Artificial Sequence
  Synthetic oligonucleotide; TTC chr11 5249100 5249121 5249117 5249122 +
tactggaatctaataaagaaaa

SEQ ID NO: 88506 - DNA, 22 bp, Artificial Sequence
  Synthetic oligonucleotide; CTA chr11 5249102 5249123 5249119 5249124 +
ctggaatctaataaagaaaagt

SEQ ID NO: 88507 - DNA, 22 bp, Artificial Sequence
  Synthetic oligonucleotide; CTG chr11 5249105 5249126 5249122 5249127 +
gaatctaataaagaaaagtcat

SEQ ID NO: 88508 - DNA, 22 bp, Artificial Sequence
  Synthetic oligonucleotide; CTA chr11 5249112 5249133 5249129 5249134 +
ataaagaaaagtcattttcctc

SEQ ID NO: 88509 - DNA, 22 bp, Artificial Sequence
  Synthetic oligonucleotide; TTT chr11 5249129 5249150 5249146 5249151 +
tcctcatttccacctctctttt

SEQ ID NO: 88510 - DNA, 22 bp, Artificial Sequence
  Synthetic oligonucleotide; TTT chr11 5249130 5249151 5249147 5249152 +
cctcatttccacctctcttttc

SEQ ID NO: 88511 - DNA, 22 bp, Artificial Sequence
  Synthetic oligonucleotide; TTC chr11 5249131 5249152 5249148 5249153 +
ctcatttccacctctcttttct

SEQ ID NO: 88512 - DNA, 22 bp, Artificial Sequence
  Synthetic oligonucleotide; CTC chr11 5249134 5249155 5249151 5249156 +
atttccacctctcttttctcaa

SEQ ID NO: 88513 - DNA, 22 bp, Artificial Sequence
  Synthetic oligonucleotide; TTT chr11 5249138 5249159 5249155 5249160 +
ccacctctcttttctcaaagtc

SEQ ID NO: 88514 - DNA, 22 bp, Artificial Sequence
  Synthetic oligonucleotide; TTC chr11 5249139 5249160 5249156 5249161 +
cacctctcttttctcaaagtca

SEQ ID NO: 88515 - DNA, 22 bp, Artificial Sequence
  Synthetic oligonucleotide; CTC chr11 5249145 5249166 5249162 5249167 +
tcttttctcaaagtcaaaattg

SEQ ID NO: 88516 - DNA, 22 bp, Artificial Sequence
  Synthetic oligonucleotide; CTC chr11 5249147 5249168 5249164 5249169 +
ttttctcaaagtcaaaattgtc

SEQ ID NO: 88517 - DNA, 22 bp, Artificial Sequence
  Synthetic oligonucleotide; CTT chr11 5249149 5249170 5249166 5249171 +
ttctcaaagtcaaaattgtcca

SEQ ID NO: 88518 - DNA, 22 bp, Artificial Sequence
  Synthetic oligonucleotide; TTT chr11 5249150 5249171 5249167 5249172 +
tctcaaagtcaaaattgtccat

SEQ ID NO: 88519 - DNA, 22 bp, Artificial Sequence
  Synthetic oligonucleotide; TTT chr11 5249151 5249172 5249168 5249173 +
ctcaaagtcaaaattgtccatc

SEQ ID NO: 88520 - DNA, 22 bp, Artificial Sequence
  Synthetic oligonucleotide; TTC chr11 5249152 5249173 5249169 5249174 +
tcaaagtcaaaattgtccatct

SEQ ID NO: 88521 - DNA, 22 bp, Artificial Sequence
  Synthetic oligonucleotide; CTC chr11 5249154 5249175 5249171 5249176 +
aaagtcaaaattgtccatctag

SEQ ID NO: 88522 - DNA, 22 bp, Artificial Sequence
  Synthetic oligonucleotide; TTG chr11 5249167 5249188 5249184 5249189 +
tccatctagatttttagaggca

SEQ ID NO: 88523 - DNA, 22 bp, Artificial Sequence
  Synthetic oligonucleotide; CTA chr11 5249175 5249196 5249192 5249197 +
gatttttagaggcactccttag

SEQ ID NO: 88524 - DNA, 22 bp, Artificial Sequence
  Synthetic oligonucleotide; TTT chr11 5249180 5249201 5249197 5249202 +
ttagaggcactccttaggccct

SEQ ID NO: 88525 - DNA, 22 bp, Artificial Sequence
  Synthetic oligonucleotide; TTT chr11 5249181 5249202 5249198 5249203 +
tagaggcactccttaggcccta

SEQ ID NO: 88526 - DNA, 22 bp, Artificial Sequence
  Synthetic oligonucleotide; TTT chr11 5249182 5249203 5249199 5249204 +
agaggcactccttaggccctaa

SEQ ID NO: 88527 - DNA, 22 bp, Artificial Sequence
  Synthetic oligonucleotide; TTA chr11 5249183 5249204 5249200 5249205 +
gaggcactccttaggccctaaa

SEQ ID NO: 88528 - DNA, 22 bp, Artificial Sequence
  Synthetic oligonucleotide; CTC chr11 5249192 5249213 5249209 5249214 +
cttaggccctaaaacattacca

SEQ ID NO: 88529 - DNA, 22 bp, Artificial Sequence
  Synthetic oligonucleotide; CTT chr11 5249195 5249216 5249212 5249217 +
aggccctaaaacattaccactg

SEQ ID NO: 88530 - DNA, 22 bp, Artificial Sequence
  Synthetic oligonucleotide; TTA chr11 5249196 5249217 5249213 5249218 +
ggccctaaaacattaccactgg

SEQ ID NO: 88531 - DNA, 22 bp, Artificial Sequence
  Synthetic oligonucleotide; CTA chr11 5249203 5249224 5249220 5249225 +
aaacattaccactgggtctcag

SEQ ID NO: 88532 - DNA, 22 bp, Artificial Sequence
  Synthetic oligonucleotide; TTA chr11 5249211 5249232 5249228 5249233 +
ccactgggtctcagcccagtta

SEQ ID NO: 88533 - DNA, 22 bp, Artificial Sequence
  Synthetic oligonucleotide; CTG chr11 5249217 5249238 5249234 5249239 +
ggtctcagcccagttagtcctc

SEQ ID NO: 88534 - DNA, 22 bp, Artificial Sequence
  Synthetic oligonucleotide; CTC chr11 5249223 5249244 5249240 5249245 +
agcccagttagtcctctgcagt

SEQ ID NO: 88535 - DNA, 22 bp, Artificial Sequence
  Synthetic oligonucleotide; TTA chr11 5249233 5249254 5249250 5249255 +
gtcctctgcagtttcttcaccc

SEQ ID NO: 88536 - DNA, 22 bp, Artificial Sequence
  Synthetic oligonucleotide; CTC chr11 5249239 5249260 5249256 5249261 +
tgcagtttcttcacccccaacc

SEQ ID NO: 88537 - DNA, 22 bp, Artificial Sequence
  Synthetic oligonucleotide; CTG chr11 5249241 5249262 5249258 5249263 +
cagtttcttcacccccaacccc

SEQ ID NO: 88538 - DNA, 22 bp, Artificial Sequence
  Synthetic oligonucleotide; TTT chr11 5249247 5249268 5249264 5249269 +
cttcacccccaaccccagtatc

SEQ ID NO: 88539 - DNA, 22 bp, Artificial Sequence
  Synthetic oligonucleotide; TTC chr11 5249248 5249269 5249265 5249270 +
ttcacccccaaccccagtatct

SEQ ID NO: 88540 - DNA, 22 bp, Artificial Sequence
  Synthetic oligonucleotide; CTT chr11 5249250 5249271 5249267 5249272 +
cacccccaaccccagtatcttc

SEQ ID NO: 88541 - DNA, 22 bp, Artificial Sequence
  Synthetic oligonucleotide; TTC chr11 5249251 5249272 5249268 5249273 +
acccccaaccccagtatcttca

SEQ ID NO: 88542 - DNA, 22 bp, Artificial Sequence
  Synthetic oligonucleotide; CTT chr11 5249271 5249292 5249288 5249293 +
caaacagctcacaccctgctgt

SEQ ID NO: 88543 - DNA, 22 bp, Artificial Sequence
  Synthetic oligonucleotide; TTC chr11 5249272 5249293 5249289 5249294 +
aaacagctcacaccctgctgtg

SEQ ID NO: 88544 - DNA, 22 bp, Artificial Sequence
  Synthetic oligonucleotide; CTC chr11 5249281 5249302 5249298 5249303 +
acaccctgctgtgctcagatca

SEQ ID NO: 88545 - DNA, 22 bp, Artificial Sequence
  Synthetic oligonucleotide; CTG chr11 5249289 5249310 5249306 5249311 +
ctgtgctcagatcaatactccg

SEQ ID NO: 88546 - DNA, 22 bp, Artificial Sequence
  Synthetic oligonucleotide; CTG chr11 5249292 5249313 5249309 5249314 +
tgctcagatcaatactccgttg

SEQ ID NO: 88547 - DNA, 22 bp, Artificial Sequence
  Synthetic oligonucleotide; CTC chr11 5249297 5249318 5249314 5249319 +
agatcaatactccgttgtctaa

SEQ ID NO: 88548 - DNA, 22 bp, Artificial Sequence
  Synthetic oligonucleotide; CTC chr11 5249309 5249330 5249326 5249331 +
cgttgtctaagttgcctcgaga

SEQ ID NO: 88549 - DNA, 22 bp, Artificial Sequence
  Synthetic oligonucleotide; TTG chr11 5249314 5249335 5249331 5249336 +
tctaagttgcctcgagactaaa

SEQ ID NO: 88550 - DNA, 22 bp, Artificial Sequence
  Synthetic oligonucleotide; CTA chr11 5249318 5249339 5249335 5249340 +
agttgcctcgagactaaaggca

SEQ ID NO: 88551 - DNA, 22 bp, Artificial Sequence
  Synthetic oligonucleotide; TTG chr11 5249323 5249344 5249340 5249345 +
cctcgagactaaaggcaacagg

SEQ ID NO: 88552 - DNA, 22 bp, Artificial Sequence
  Synthetic oligonucleotide; CTC chr11 5249327 5249348 5249344 5249349 +
gagactaaaggcaacagggctg

SEQ ID NO: 88553 - DNA, 22 bp, Artificial Sequence
  Synthetic oligonucleotide; CTA chr11 5249334 5249355 5249351 5249356 +
aaggcaacagggctgaaacatc

SEQ ID NO: 88554 - DNA, 22 bp, Artificial Sequence
  Synthetic oligonucleotide; CTG chr11 5249349 5249370 5249366 5249371 +
aaacatctcctggactcacctt

SEQ ID NO: 88555 - DNA, 22 bp, Artificial Sequence
  Synthetic oligonucleotide; CTC chr11 5249358 5249379 5249375 5249380 +
ctggactcaccttgaagttctc

SEQ ID NO: 88556 - DNA, 22 bp, Artificial Sequence
  Synthetic oligonucleotide; CTG chr11 5249361 5249382 5249378 5249383 +
gactcaccttgaagttctcagg

SEQ ID NO: 88557 - DNA, 22 bp, Artificial Sequence
  Synthetic oligonucleotide; CTC chr11 5249366 5249387 5249383 5249388 +
accttgaagttctcaggatcca

SEQ ID NO: 88558 - DNA, 22 bp, Artificial Sequence
  Synthetic oligonucleotide; CTT chr11 5249371 5249392 5249388 5249393 +
gaagttctcaggatccacatgc

SEQ ID NO: 88559 - DNA, 22 bp, Artificial Sequence
  Synthetic oligonucleotide; TTG chr11 5249372 5249393 5249389 5249394 +
aagttctcaggatccacatgca

SEQ ID NO: 88560 - DNA, 22 bp, Artificial Sequence
  Synthetic oligonucleotide; TTC chr11 5249378 5249399 5249395 5249400 +
tcaggatccacatgcagcttgt

SEQ ID NO: 88561 - DNA, 22 bp, Artificial Sequence
  Synthetic oligonucleotide; CTC chr11 5249380 5249401 5249397 5249402 +
aggatccacatgcagcttgtca

SEQ ID NO: 88562 - DNA, 22 bp, Artificial Sequence
  Synthetic oligonucleotide; CTT chr11 5249398 5249419 5249415 5249420 +
gtcacagtgcagttcactcagc

SEQ ID NO: 88563 - DNA, 22 bp, Artificial Sequence
  Synthetic oligonucleotide; TTG chr11 5249399 5249420 5249416 5249421 +
tcacagtgcagttcactcagct

SEQ ID NO: 88564 - DNA, 22 bp, Artificial Sequence
  Synthetic oligonucleotide; TTC chr11 5249413 5249434 5249430 5249435 +
actcagctgggcaaaggtgccc

SEQ ID NO: 88565 - DNA, 22 bp, Artificial Sequence
  Synthetic oligonucleotide; CTC chr11 5249417 5249438 5249434 5249439 +
agctgggcaaaggtgcccttga

SEQ ID NO: 88566 - DNA, 22 bp, Artificial Sequence
  Synthetic oligonucleotide; CTG chr11 5249422 5249443 5249439 5249444 +
ggcaaaggtgcccttgagatca

SEQ ID NO: 88567 - DNA, 22 bp, Artificial Sequence
  Synthetic oligonucleotide; CTT chr11 5249437 5249458 5249454 5249459 +
gagatcatccaggtgctttgtg

SEQ ID NO: 88568 - DNA, 22 bp, Artificial Sequence
  Synthetic oligonucleotide; TTG chr11 5249438 5249459 5249455 5249460 +
agatcatccaggtgctttgtgg

SEQ ID NO: 88569 - DNA, 22 bp, Artificial Sequence
  Synthetic oligonucleotide; CTT chr11 5249455 5249476 5249472 5249477 +
tgtggcatctcccaaggaagtc

SEQ ID NO: 88570 - DNA, 22 bp, Artificial Sequence
  Synthetic oligonucleotide; TTT chr11 5249456 5249477 5249473 5249478 +
gtggcatctcccaaggaagtca

SEQ ID NO: 88571 - DNA, 22 bp, Artificial Sequence
  Synthetic oligonucleotide; TTG chr11 5249457 5249478 5249474 5249479 +
tggcatctcccaaggaagtcag

SEQ ID NO: 88572 - DNA, 22 bp, Artificial Sequence
  Synthetic oligonucleotide; CTC chr11 5249466 5249487 5249483 5249488 +
ccaaggaagtcagcaccttctt

SEQ ID NO: 88573 - DNA, 22 bp, Artificial Sequence
  Synthetic oligonucleotide; CTT chr11 5249485 5249506 5249502 5249507 +
cttgccatgtgccttgactttg

SEQ ID NO: 88574 - DNA, 22 bp, Artificial Sequence
  Synthetic oligonucleotide; TTC chr11 5249486 5249507 5249503 5249508 +
ttgccatgtgccttgactttgg

SEQ ID NO: 88575 - DNA, 22 bp, Artificial Sequence
  Synthetic oligonucleotide; CTT chr11 5249488 5249509 5249505 5249510 +
gccatgtgccttgactttgggg

SEQ ID NO: 88576 - DNA, 22 bp, Artificial Sequence
  Synthetic oligonucleotide; TTG chr11 5249489 5249510 5249506 5249511 +
ccatgtgccttgactttggggt

SEQ ID NO: 88577 - DNA, 22 bp, Artificial Sequence
  Synthetic oligonucleotide; CTT chr11 5249500 5249521 5249517 5249522 +
gactttggggttgcccatgatg

SEQ ID NO: 88578 - DNA, 22 bp, Artificial Sequence
  Synthetic oligonucleotide; TTG chr11 5249501 5249522 5249518 5249523 +
actttggggttgcccatgatgg

SEQ ID NO: 88579 - DNA, 22 bp, Artificial Sequence
  Synthetic oligonucleotide; CTT chr11 5249505 5249526 5249522 5249527 +
tggggttgcccatgatggcaga

SEQ ID NO: 88580 - DNA, 22 bp, Artificial Sequence
  Synthetic oligonucleotide; TTT chr11 5249506 5249527 5249523 5249528 +
ggggttgcccatgatggcagag

SEQ ID NO: 88581 - DNA, 22 bp, Artificial Sequence
  Synthetic oligonucleotide; TTG chr11 5249507 5249528 5249524 5249529 +
gggttgcccatgatggcagagg

SEQ ID NO: 88582 - DNA, 22 bp, Artificial Sequence
  Synthetic oligonucleotide; TTG chr11 5249513 5249534 5249530 5249535 +
cccatgatggcagaggcagagg

SEQ ID NO: 88583 - DNA, 22 bp, Artificial Sequence
  Synthetic oligonucleotide; TTG chr11 5249543 5249564 5249560 5249565 +
ccaaagctgtcaaagaacctct

SEQ ID NO: 88584 - DNA, 22 bp, Artificial Sequence
  Synthetic oligonucleotide; CTG chr11 5249552 5249573 5249569 5249574 +
tcaaagaacctctgggtccatg

SEQ ID NO: 88585 - DNA, 22 bp, Artificial Sequence
  Synthetic oligonucleotide; CTC chr11 5249564 5249585 5249581 5249586 +
tgggtccatgggtagacaacca

SEQ ID NO: 88586 - DNA, 22 bp, Artificial Sequence
  Synthetic oligonucleotide; CTG chr11 5249566 5249587 5249583 5249588 +
ggtccatgggtagacaaccagg

SEQ ID NO: 88587 - DNA, 22 bp, Artificial Sequence
  Synthetic oligonucleotide; CTG chr11 5249594 5249615 5249611 5249616 +
tgagattgacaagaacagtttg

SEQ ID NO: 88588 - DNA, 22 bp, Artificial Sequence
  Synthetic oligonucleotide; TTG chr11 5249602 5249623 5249619 5249624 +
acaagaacagtttgacagtcag

SEQ ID NO: 88589 - DNA, 22 bp, Artificial Sequence
  Synthetic oligonucleotide; TTT chr11 5249615 5249636 5249632 5249637 +
gacagtcagaaggtgccacaaa

SEQ ID NO: 88590 - DNA, 22 bp, Artificial Sequence
  Synthetic oligonucleotide; TTG chr11 5249616 5249637 5249633 5249638 +
acagtcagaaggtgccacaaat

SEQ ID NO: 88591 - DNA, 22 bp, Artificial Sequence
  Synthetic oligonucleotide; CTG chr11 5249642 5249663 5249659 5249664 +
agaagcgacctggacttttgcc

SEQ ID NO: 88592 - DNA, 22 bp, Artificial Sequence
  Synthetic oligonucleotide; CTG chr11 5249654 5249675 5249671 5249676 +
gacttttgccaggcacagggtc

SEQ ID NO: 88593 - DNA, 22 bp, Artificial Sequence
  Synthetic oligonucleotide; CTT chr11 5249659 5249680 5249676 5249681 +
ttgccaggcacagggtccttcc

SEQ ID NO: 88594 - DNA, 22 bp, Artificial Sequence
  Synthetic oligonucleotide; TTT chr11 5249660 5249681 5249677 5249682 +
tgccaggcacagggtccttcct

SEQ ID NO: 88595 - DNA, 22 bp, Artificial Sequence
  Synthetic oligonucleotide; TTT chr11 5249661 5249682 5249678 5249683 +
gccaggcacagggtccttcctt

SEQ ID NO: 88596 - DNA, 22 bp, Artificial Sequence
  Synthetic oligonucleotide; TTG chr11 5249662 5249683 5249679 5249684 +
ccaggcacagggtccttccttc

SEQ ID NO: 88597 - DNA, 22 bp, Artificial Sequence
  Synthetic oligonucleotide; CTT chr11 5249679 5249700 5249696 5249701 +
ccttccctcccttgtcctggtc

SEQ ID NO: 88598 - DNA, 22 bp, Artificial Sequence
  Synthetic oligonucleotide; TTC chr11 5249680 5249701 5249697 5249702 +
cttccctcccttgtcctggtca

SEQ ID NO: 88599 - DNA, 22 bp, Artificial Sequence
  Synthetic oligonucleotide; CTT chr11 5249683 5249704 5249700 5249705 +
ccctcccttgtcctggtcacca

SEQ ID NO: 88600 - DNA, 22 bp, Artificial Sequence
  Synthetic oligonucleotide; TTC chr11 5249684 5249705 5249701 5249706 +
cctcccttgtcctggtcaccag

SEQ ID NO: 88601 - DNA, 22 bp, Artificial Sequence
  Synthetic oligonucleotide; CTC chr11 5249688 5249709 5249705 5249710 +
ccttgtcctggtcaccagagcc

SEQ ID NO: 88602 - DNA, 22 bp, Artificial Sequence
  Synthetic oligonucleotide; CTT chr11 5249692 5249713 5249709 5249714 +
gtcctggtcaccagagcctacc

SEQ ID NO: 88603 - DNA, 22 bp, Artificial Sequence
  Synthetic oligonucleotide; TTG chr11 5249693 5249714 5249710 5249715 +
tcctggtcaccagagcctacct

SEQ ID NO: 88604 - DNA, 22 bp, Artificial Sequence
  Synthetic oligonucleotide; CTG chr11 5249698 5249719 5249715 5249720 +
gtcaccagagcctaccttccca

SEQ ID NO: 88605 - DNA, 22 bp, Artificial Sequence
  Synthetic oligonucleotide; CTA chr11 5249712 5249733 5249729 5249734 +
ccttcccagggtttctcctcca

SEQ ID NO: 88606 - DNA, 22 bp, Artificial Sequence
  Synthetic oligonucleotide; CTT chr11 5249716 5249737 5249733 5249738 +
cccagggtttctcctccagcat

SEQ ID NO: 88607 - DNA, 22 bp, Artificial Sequence
  Synthetic oligonucleotide; TTC chr11 5249717 5249738 5249734 5249739 +
ccagggtttctcctccagcatc

SEQ ID NO: 88608 - DNA, 22 bp, Artificial Sequence
  Synthetic oligonucleotide; TTT chr11 5249726 5249747 5249743 5249748 +
ctcctccagcatcttccacatt

SEQ ID NO: 88609 - DNA, 22 bp, Artificial Sequence
  Synthetic oligonucleotide; TTC chr11 5249727 5249748 5249744 5249749 +
tcctccagcatcttccacattc

SEQ ID NO: 88610 - DNA, 22 bp, Artificial Sequence
  Synthetic oligonucleotide; CTC chr11 5249729 5249750 5249746 5249751 +
ctccagcatcttccacattcac

SEQ ID NO: 88611 - DNA, 22 bp, Artificial Sequence
  Synthetic oligonucleotide; CTC chr11 5249732 5249753 5249749 5249754 +
cagcatcttccacattcacctt

SEQ ID NO: 88612 - DNA, 22 bp, Artificial Sequence
  Synthetic oligonucleotide; CTT chr11 5249741 5249762 5249758 5249763 +
ccacattcaccttgccccacag

SEQ ID NO: 88613 - DNA, 22 bp, Artificial Sequence
  Synthetic oligonucleotide; TTC chr11 5249742 5249763 5249759 5249764 +
cacattcaccttgccccacagg

SEQ ID NO: 88614 - DNA, 22 bp, Artificial Sequence
  Synthetic oligonucleotide; TTC chr11 5249749 5249770 5249766 5249771 +
accttgccccacaggcttgtga

SEQ ID NO: 88615 - DNA, 22 bp, Artificial Sequence
  Synthetic oligonucleotide; CTT chr11 5249754 5249775 5249771 5249776 +
gccccacaggcttgtgatagta

SEQ ID NO: 88616 - DNA, 22 bp, Artificial Sequence
  Synthetic oligonucleotide; TTG chr11 5249755 5249776 5249772 5249777 +
ccccacaggcttgtgatagtag

SEQ ID NO: 88617 - DNA, 22 bp, Artificial Sequence
  Synthetic oligonucleotide; CTT chr11 5249767 5249788 5249784 5249789 +
gtgatagtagccttgtcctcct

SEQ ID NO: 88618 - DNA, 22 bp, Artificial Sequence
  Synthetic oligonucleotide; TTG chr11 5249768 5249789 5249785 5249790 +
tgatagtagccttgtcctcctc

SEQ ID NO: 88619 - DNA, 22 bp, Artificial Sequence
  Synthetic oligonucleotide; CTT chr11 5249781 5249802 5249798 5249803 +
gtcctcctctgtgaaatgaccc

SEQ ID NO: 88620 - DNA, 22 bp, Artificial Sequence
  Synthetic oligonucleotide; TTG chr11 5249782 5249803 5249799 5249804 +
tcctcctctgtgaaatgaccca

SEQ ID NO: 88621 - DNA, 22 bp, Artificial Sequence
  Synthetic oligonucleotide; CTC chr11 5249787 5249808 5249804 5249809 +
ctctgtgaaatgacccatggcg

SEQ ID NO: 88622 - DNA, 22 bp, Artificial Sequence
  Synthetic oligonucleotide; CTC chr11 5249790 5249811 5249807 5249812 +
tgtgaaatgacccatggcgtct

SEQ ID NO: 88623 - DNA, 22 bp, Artificial Sequence
  Synthetic oligonucleotide; CTG chr11 5249792 5249813 5249809 5249814 +
tgaaatgacccatggcgtctgg

SEQ ID NO: 88624 - DNA, 22 bp, Artificial Sequence
  Synthetic oligonucleotide; CTG chr11 5249813 5249834 5249830 5249835 +
gactaggagcttattgataacc

SEQ ID NO: 88625 - DNA, 22 bp, Artificial Sequence
  Synthetic oligonucleotide; CTA chr11 5249818 5249839 5249835 5249840 +
ggagcttattgataacctcaga

SEQ ID NO: 88626 - DNA, 22 bp, Artificial Sequence
  Synthetic oligonucleotide; CTT chr11 5249825 5249846 5249842 5249847 +
attgataacctcagacgttcca

SEQ ID NO: 88627 - DNA, 22 bp, Artificial Sequence
  Synthetic oligonucleotide; TTA chr11 5249826 5249847 5249843 5249848 +
ttgataacctcagacgttccag

SEQ ID NO: 88628 - DNA, 22 bp, Artificial Sequence
  Synthetic oligonucleotide; TTG chr11 5249829 5249850 5249846 5249851 +
ataacctcagacgttccagaag

SEQ ID NO: 88629 - DNA, 22 bp, Artificial Sequence
  Synthetic oligonucleotide; CTC chr11 5249837 5249858 5249854 5249859 +
agacgttccagaagcgagtgtg

SEQ ID NO: 88630 - DNA, 22 bp, Artificial Sequence
  Synthetic oligonucleotide; TTC chr11 5249845 5249866 5249862 5249867 +
cagaagcgagtgtgtggaactg

SEQ ID NO: 88631 - DNA, 22 bp, Artificial Sequence
  Synthetic oligonucleotide; CTG chr11 5249867 5249888 5249884 5249889 +
ctgaagggtgcttccttttatt

SEQ ID NO: 88632 - DNA, 22 bp, Artificial Sequence
  Synthetic oligonucleotide; CTG chr11 5249870 5249891 5249887 5249892 +
aagggtgcttccttttattctt

SEQ ID NO: 88633 - DNA, 22 bp, Artificial Sequence
  Synthetic oligonucleotide; CTT chr11 5249880 5249901 5249897 5249902 +
ccttttattcttcatccctagc

SEQ ID NO: 88634 - DNA, 22 bp, Artificial Sequence
  Synthetic oligonucleotide; TTC chr11 5249881 5249902 5249898 5249903 +
cttttattcttcatccctagcc

SEQ ID NO: 88635 - DNA, 22 bp, Artificial Sequence
  Synthetic oligonucleotide; CTT chr11 5249884 5249905 5249901 5249906 +
ttattcttcatccctagccagc

SEQ ID NO: 88636 - DNA, 22 bp, Artificial Sequence
  Synthetic oligonucleotide; TTT chr11 5249885 5249906 5249902 5249907 +
tattcttcatccctagccagcc

SEQ ID NO: 88637 - DNA, 22 bp, Artificial Sequence
  Synthetic oligonucleotide; TTT chr11 5249886 5249907 5249903 5249908 +
attcttcatccctagccagccg

SEQ ID NO: 88638 - DNA, 22 bp, Artificial Sequence
  Synthetic oligonucleotide; TTA chr11 5249887 5249908 5249904 5249909 +
ttcttcatccctagccagccgc

SEQ ID NO: 88639 - DNA, 22 bp, Artificial Sequence
  Synthetic oligonucleotide; TTC chr11 5249890 5249911 5249907 5249912 +
ttcatccctagccagccgccgg

SEQ ID NO: 88640 - DNA, 22 bp, Artificial Sequence
  Synthetic oligonucleotide; CTT chr11 5249892 5249913 5249909 5249914 +
catccctagccagccgccggcc

SEQ ID NO: 88641 - DNA, 22 bp, Artificial Sequence
  Synthetic oligonucleotide; TTC chr11 5249893 5249914 5249910 5249915 +
atccctagccagccgccggccc

SEQ ID NO: 88642 - DNA, 22 bp, Artificial Sequence
  Synthetic oligonucleotide; CTA chr11 5249900 5249921 5249917 5249922 +
gccagccgccggcccctggcct

SEQ ID NO: 88643 - DNA, 22 bp, Artificial Sequence
  Synthetic oligonucleotide; CTG chr11 5249918 5249939 5249935 5249940 +
gcctcactggatactctaagac

SEQ ID NO: 88644 - DNA, 22 bp, Artificial Sequence
  Synthetic oligonucleotide; CTC chr11 5249923 5249944 5249940 5249945 +
actggatactctaagactattg

SEQ ID NO: 88645 - DNA, 22 bp, Artificial Sequence
  Synthetic oligonucleotide; CTG chr11 5249927 5249948 5249944 5249949 +
gatactctaagactattggtca

SEQ ID NO: 88646 - DNA, 22 bp, Artificial Sequence
  Synthetic oligonucleotide; CTC chr11 5249934 5249955 5249951 5249956 +
taagactattggtcaagtttgc

SEQ ID NO: 88647 - DNA, 22 bp, Artificial Sequence
  Synthetic oligonucleotide; CTA chr11 5249936 5249957 5249953 5249958 +
agactattggtcaagtttgcct

SEQ ID NO: 88648 - DNA, 22 bp, Artificial Sequence
  Synthetic oligonucleotide; CTA chr11 5249942 5249963 5249959 5249964 +
ttggtcaagtttgccttgtcaa

SEQ ID NO: 88649 - DNA, 22 bp, Artificial Sequence
  Synthetic oligonucleotide; TTG chr11 5249945 5249966 5249962 5249967 +
gtcaagtttgccttgtcaaggc

SEQ ID NO: 88650 - DNA, 22 bp, Artificial Sequence
  Synthetic oligonucleotide; TTT chr11 5249954 5249975 5249971 5249976 +
gccttgtcaaggctattggtca

SEQ ID NO: 88651 - DNA, 22 bp, Artificial Sequence
  Synthetic oligonucleotide; TTG chr11 5249955 5249976 5249972 5249977 +
ccttgtcaaggctattggtcaa

SEQ ID NO: 88652 - DNA, 22 bp, Artificial Sequence
  Synthetic oligonucleotide; CTT chr11 5249959 5249980 5249976 5249981 +
gtcaaggctattggtcaaggca

SEQ ID NO: 88653 - DNA, 22 bp, Artificial Sequence
  Synthetic oligonucleotide; TTG chr11 5249960 5249981 5249977 5249982 +
tcaaggctattggtcaaggcaa

SEQ ID NO: 88654 - DNA, 22 bp, Artificial Sequence
  Synthetic oligonucleotide; CTA chr11 5249969 5249990 5249986 5249991 +
ttggtcaaggcaaggctggcca

SEQ ID NO: 88655 - DNA, 22 bp, Artificial Sequence
  Synthetic oligonucleotide; TTG chr11 5249972 5249993 5249989 5249994 +
gtcaaggcaaggctggccaacc

SEQ ID NO: 88656 - DNA, 22 bp, Artificial Sequence
  Synthetic oligonucleotide; CTG chr11 5249987 5250008 5250004 5250009 +
gccaacccatgggtggagttta

SEQ ID NO: 88657 - DNA, 22 bp, Artificial Sequence
  Synthetic oligonucleotide; TTT chr11 5250008 5250029 5250025 5250030 +
agccagggaccgtttcagacag

SEQ ID NO: 88658 - DNA, 22 bp, Artificial Sequence
  Synthetic oligonucleotide; TTA chr11 5250009 5250030 5250026 5250031 +
gccagggaccgtttcagacaga

SEQ ID NO: 88659 - DNA, 22 bp, Artificial Sequence
  Synthetic oligonucleotide; TTT chr11 5250023 5250044 5250040 5250045 +
cagacagatatttgcattgaga

SEQ ID NO: 88660 - DNA, 22 bp, Artificial Sequence
  Synthetic oligonucleotide; TTC chr11 5250024 5250045 5250041 5250046 +
agacagatatttgcattgagat

SEQ ID NO: 88661 - DNA, 22 bp, Artificial Sequence
  Synthetic oligonucleotide; TTT chr11 5250036 5250057 5250053 5250058 +
gcattgagatagtgtggggaag

SEQ ID NO: 88662 - DNA, 22 bp, Artificial Sequence
  Synthetic oligonucleotide; TTG chr11 5250037 5250058 5250054 5250059 +
cattgagatagtgtggggaagg

SEQ ID NO: 88663 - DNA, 22 bp, Artificial Sequence
  Synthetic oligonucleotide; TTG chr11 5250042 5250063 5250059 5250064 +
agatagtgtggggaaggggccc

SEQ ID NO: 88664 - DNA, 22 bp, Artificial Sequence
  Synthetic oligonucleotide; CTG chr11 5250078 5250099 5250095 5250100 +
ctaattttttttatagcctttg

SEQ ID NO: 88665 - DNA, 22 bp, Artificial Sequence
  Synthetic oligonucleotide; CTA chr11 5250081 5250102 5250098 5250103 +
attttttttatagcctttgcct

SEQ ID NO: 88666 - DNA, 22 bp, Artificial Sequence
  Synthetic oligonucleotide; TTT chr11 5250085 5250106 5250102 5250107 +
tttttatagcctttgccttgtt

SEQ ID NO: 88667 - DNA, 22 bp, Artificial Sequence
  Synthetic oligonucleotide; TTT chr11 5250086 5250107 5250103 5250108 +
ttttatagcctttgccttgttc

SEQ ID NO: 88668 - DNA, 22 bp, Artificial Sequence
  Synthetic oligonucleotide; TTT chr11 5250087 5250108 5250104 5250109 +
tttatagcctttgccttgttcc

SEQ ID NO: 88669 - DNA, 22 bp, Artificial Sequence
  Synthetic oligonucleotide; TTT chr11 5250088 5250109 5250105 5250110 +
ttatagcctttgccttgttccg

SEQ ID NO: 88670 - DNA, 22 bp, Artificial Sequence
  Synthetic oligonucleotide; TTT chr11 5250089 5250110 5250106 5250111 +
tatagcctttgccttgttccga

SEQ ID NO: 88671 - DNA, 22 bp, Artificial Sequence
  Synthetic oligonucleotide; TTT chr11 5250090 5250111 5250107 5250112 +
atagcctttgccttgttccgat

SEQ ID NO: 88672 - DNA, 22 bp, Artificial Sequence
  Synthetic oligonucleotide; TTA chr11 5250091 5250112 5250108 5250113 +
tagcctttgccttgttccgatt

SEQ ID NO: 88673 - DNA, 22 bp, Artificial Sequence
  Synthetic oligonucleotide; CTT chr11 5250098 5250119 5250115 5250120 +
tgccttgttccgattcagtcat

SEQ ID NO: 88674 - DNA, 22 bp, Artificial Sequence
  Synthetic oligonucleotide; TTT chr11 5250099 5250120 5250116 5250121 +
gccttgttccgattcagtcatt

SEQ ID NO: 88675 - DNA, 22 bp, Artificial Sequence
  Synthetic oligonucleotide; TTG chr11 5250100 5250121 5250117 5250122 +
ccttgttccgattcagtcattc

SEQ ID NO: 88676 - DNA, 22 bp, Artificial Sequence
  Synthetic oligonucleotide; CTT chr11 5250104 5250125 5250121 5250126 +
gttccgattcagtcattccagt

SEQ ID NO: 88677 - DNA, 22 bp, Artificial Sequence
  Synthetic oligonucleotide; TTG chr11 5250105 5250126 5250122 5250127 +
ttccgattcagtcattccagtt

SEQ ID NO: 88678 - DNA, 22 bp, Artificial Sequence
  Synthetic oligonucleotide; TTC chr11 5250108 5250129 5250125 5250130 +
cgattcagtcattccagttttt

SEQ ID NO: 88679 - DNA, 22 bp, Artificial Sequence
  Synthetic oligonucleotide; TTC chr11 5250114 5250135 5250131 5250136 +
agtcattccagtttttctctaa

SEQ ID NO: 88680 - DNA, 22 bp, Artificial Sequence
  Synthetic oligonucleotide; TTC chr11 5250122 5250143 5250139 5250144 +
cagtttttctctaatttattct

SEQ ID NO: 88681 - DNA, 22 bp, Artificial Sequence
  Synthetic oligonucleotide; TTT chr11 5250128 5250149 5250145 5250150 +
ttctctaatttattcttccctt

SEQ ID NO: 88682 - DNA, 22 bp, Artificial Sequence
  Synthetic oligonucleotide; TTT chr11 5250129 5250150 5250146 5250151 +
tctctaatttattcttcccttt

SEQ ID NO: 88683 - DNA, 22 bp, Artificial Sequence
  Synthetic oligonucleotide; TTT chr11 5250130 5250151 5250147 5250152 +
ctctaatttattcttcccttta

SEQ ID NO: 88684 - DNA, 22 bp, Artificial Sequence
  Synthetic oligonucleotide; TTC chr11 5250131 5250152 5250148 5250153 +
tctaatttattcttccctttag

SEQ ID NO: 88685 - DNA, 22 bp, Artificial Sequence
  Synthetic oligonucleotide; CTC chr11 5250133 5250154 5250150 5250155 +
taatttattcttccctttagct

SEQ ID NO: 88686 - DNA, 22 bp, Artificial Sequence
  Synthetic oligonucleotide; CTA chr11 5250135 5250156 5250152 5250157 +
atttattcttccctttagctag

SEQ ID NO: 88687 - DNA, 22 bp, Artificial Sequence
  Synthetic oligonucleotide; TTT chr11 5250139 5250160 5250156 5250161 +
attcttccctttagctagtttc

SEQ ID NO: 88688 - DNA, 22 bp, Artificial Sequence
  Synthetic oligonucleotide; TTA chr11 5250140 5250161 5250157 5250162 +
ttcttccctttagctagtttcc

SEQ ID NO: 88689 - DNA, 22 bp, Artificial Sequence
  Synthetic oligonucleotide; TTC chr11 5250143 5250164 5250160 5250165 +
ttccctttagctagtttccttc

SEQ ID NO: 88690 - DNA, 22 bp, Artificial Sequence
  Synthetic oligonucleotide; CTT chr11 5250145 5250166 5250162 5250167 +
ccctttagctagtttccttctc

SEQ ID NO: 88691 - DNA, 22 bp, Artificial Sequence
  Synthetic oligonucleotide; TTC chr11 5250146 5250167 5250163 5250168 +
cctttagctagtttccttctcc

SEQ ID NO: 88692 - DNA, 22 bp, Artificial Sequence
  Synthetic oligonucleotide; CTT chr11 5250150 5250171 5250167 5250172 +
tagctagtttccttctcccatc

SEQ ID NO: 88693 - DNA, 22 bp, Artificial Sequence
  Synthetic oligonucleotide; TTT chr11 5250151 5250172 5250168 5250173 +
agctagtttccttctcccatca

SEQ ID NO: 88694 - DNA, 22 bp, Artificial Sequence
  Synthetic oligonucleotide; TTA chr11 5250152 5250173 5250169 5250174 +
gctagtttccttctcccatcat

SEQ ID NO: 88695 - DNA, 22 bp, Artificial Sequence
  Synthetic oligonucleotide; CTA chr11 5250156 5250177 5250173 5250178 +
gtttccttctcccatcatagag

SEQ ID NO: 88696 - DNA, 22 bp, Artificial Sequence
  Synthetic oligonucleotide; TTT chr11 5250160 5250181 5250177 5250182 +
ccttctcccatcatagaggata

SEQ ID NO: 88697 - DNA, 22 bp, Artificial Sequence
  Synthetic oligonucleotide; TTC chr11 5250161 5250182 5250178 5250183 +
cttctcccatcatagaggatac

SEQ ID NO: 88698 - DNA, 22 bp, Artificial Sequence
  Synthetic oligonucleotide; CTT chr11 5250164 5250185 5250181 5250186 +
ctcccatcatagaggataccag

SEQ ID NO: 88699 - DNA, 22 bp, Artificial Sequence
  Synthetic oligonucleotide; TTC chr11 5250165 5250186 5250182 5250187 +
tcccatcatagaggataccagg

SEQ ID NO: 88700 - DNA, 22 bp, Artificial Sequence
  Synthetic oligonucleotide; CTC chr11 5250167 5250188 5250184 5250189 +
ccatcatagaggataccaggac

SEQ ID NO: 88701 - DNA, 22 bp, Artificial Sequence
  Synthetic oligonucleotide; CTT chr11 5250191 5250212 5250208 5250213 +
cttttgtcagccgttttttacc

SEQ ID NO: 88702 - DNA, 22 bp, Artificial Sequence
  Synthetic oligonucleotide; TTC chr11 5250192 5250213 5250209 5250214 +
ttttgtcagccgttttttacct

SEQ ID NO: 88703 - DNA, 22 bp, Artificial Sequence
  Synthetic oligonucleotide; CTT chr11 5250194 5250215 5250211 5250216 +
ttgtcagccgttttttaccttc

SEQ ID NO: 88704 - DNA, 22 bp, Artificial Sequence
  Synthetic oligonucleotide; TTT chr11 5250195 5250216 5250212 5250217 +
tgtcagccgttttttaccttct

SEQ ID NO: 88705 - DNA, 22 bp, Artificial Sequence
  Synthetic oligonucleotide; TTT chr11 5250196 5250217 5250213 5250218 +
gtcagccgttttttaccttctt

SEQ ID NO: 88706 - DNA, 22 bp, Artificial Sequence
  Synthetic oligonucleotide; TTG chr11 5250197 5250218 5250214 5250219 +
tcagccgttttttaccttcttg

SEQ ID NO: 88707 - DNA, 22 bp, Artificial Sequence
  Synthetic oligonucleotide; TTT chr11 5250207 5250228 5250224 5250229 +
tttaccttcttgtctctagctc

SEQ ID NO: 88708 - DNA, 22 bp, Artificial Sequence
  Synthetic oligonucleotide; TTT chr11 5250208 5250229 5250225 5250230 +
ttaccttcttgtctctagctcc

SEQ ID NO: 88709 - DNA, 22 bp, Artificial Sequence
  Synthetic oligonucleotide; TTT chr11 5250209 5250230 5250226 5250231 +
taccttcttgtctctagctcca

SEQ ID NO: 88710 - DNA, 22 bp, Artificial Sequence
  Synthetic oligonucleotide; TTT chr11 5250210 5250231 5250227 5250232 +
accttcttgtctctagctccag

SEQ ID NO: 88711 - DNA, 22 bp, Artificial Sequence
  Synthetic oligonucleotide; TTA chr11 5250211 5250232 5250228 5250233 +
ccttcttgtctctagctccagt

SEQ ID NO: 88712 - DNA, 22 bp, Artificial Sequence
  Synthetic oligonucleotide; CTT chr11 5250215 5250236 5250232 5250237 +
cttgtctctagctccagtgagg

SEQ ID NO: 88713 - DNA, 22 bp, Artificial Sequence
  Synthetic oligonucleotide; TTC chr11 5250216 5250237 5250233 5250238 +
ttgtctctagctccagtgaggc

SEQ ID NO: 88714 - DNA, 22 bp, Artificial Sequence
  Synthetic oligonucleotide; CTT chr11 5250218 5250239 5250235 5250240 +
gtctctagctccagtgaggcct

SEQ ID NO: 88715 - DNA, 22 bp, Artificial Sequence
  Synthetic oligonucleotide; TTG chr11 5250219 5250240 5250236 5250241 +
tctctagctccagtgaggcctg

SEQ ID NO: 88716 - DNA, 22 bp, Artificial Sequence
  Synthetic oligonucleotide; CTC chr11 5250223 5250244 5250240 5250245 +
tagctccagtgaggcctgtagt

SEQ ID NO: 88717 - DNA, 22 bp, Artificial Sequence
  Synthetic oligonucleotide; CTA chr11 5250225 5250246 5250242 5250247 +
gctccagtgaggcctgtagttt

SEQ ID NO: 88718 - DNA, 22 bp, Artificial Sequence
  Synthetic oligonucleotide; CTC chr11 5250229 5250250 5250246 5250251 +
cagtgaggcctgtagtttaaag

SEQ ID NO: 88719 - DNA, 22 bp, Artificial Sequence
  Synthetic oligonucleotide; CTG chr11 5250241 5250262 5250258 5250263 +
tagtttaaagctaaagcatgta

SEQ ID NO: 88720 - DNA, 22 bp, Artificial Sequence
  Synthetic oligonucleotide; TTT chr11 5250247 5250268 5250264 5250269 +
aaagctaaagcatgtaccaatt

SEQ ID NO: 88721 - DNA, 22 bp, Artificial Sequence
  Synthetic oligonucleotide; TTA chr11 5250248 5250269 5250265 5250270 +
aagctaaagcatgtaccaattt

SEQ ID NO: 88722 - DNA, 22 bp, Artificial Sequence
  Synthetic oligonucleotide; CTA chr11 5250254 5250275 5250271 5250276 +
aagcatgtaccaatttttgaaa

SEQ ID NO: 88723 - DNA, 22 bp, Artificial Sequence
  Synthetic oligonucleotide; TTT chr11 5250270 5250291 5250287 5250292 +
ttgaaaagttcagggattgtga

SEQ ID NO: 88724 - DNA, 22 bp, Artificial Sequence
  Synthetic oligonucleotide; TTT chr11 5250271 5250292 5250288 5250293 +
tgaaaagttcagggattgtgaa

SEQ ID NO: 88725 - DNA, 22 bp, Artificial Sequence
  Synthetic oligonucleotide; TTT chr11 5250272 5250293 5250289 5250294 +
gaaaagttcagggattgtgaaa

SEQ ID NO: 88726 - DNA, 22 bp, Artificial Sequence
  Synthetic oligonucleotide; TTG chr11 5250273 5250294 5250290 5250295 +
aaaagttcagggattgtgaaat

SEQ ID NO: 88727 - DNA, 22 bp, Artificial Sequence
  Synthetic oligonucleotide; TTC chr11 5250281 5250302 5250298 5250303 +
agggattgtgaaatgtgtttta

SEQ ID NO: 88728 - DNA, 22 bp, Artificial Sequence
  Synthetic oligonucleotide; TTG chr11 5250289 5250310 5250306 5250311 +
tgaaatgtgttttaggcatagg

SEQ ID NO: 88729 - DNA, 22 bp, Artificial Sequence
  Synthetic oligonucleotide; TTT chr11 5250301 5250322 5250318 5250323 +
taggcataggtccaggattttt

SEQ ID NO: 88730 - DNA, 22 bp, Artificial Sequence
  Synthetic oligonucleotide; TTT chr11 5250302 5250323 5250319 5250324 +
aggcataggtccaggatttttg

SEQ ID NO: 88731 - DNA, 22 bp, Artificial Sequence
  Synthetic oligonucleotide; TTA chr11 5250303 5250324 5250320 5250325 +
ggcataggtccaggatttttga

SEQ ID NO: 88732 - DNA, 22 bp, Artificial Sequence
  Synthetic oligonucleotide; TTT chr11 5250321 5250342 5250338 5250343 +
ttgacgggacaaatcttagtct

SEQ ID NO: 88733 - DNA, 22 bp, Artificial Sequence
  Synthetic oligonucleotide; TTT chr11 5250322 5250343 5250339 5250344 +
tgacgggacaaatcttagtctc

SEQ ID NO: 88734 - DNA, 22 bp, Artificial Sequence
  Synthetic oligonucleotide; TTT chr11 5250323 5250344 5250340 5250345 +
gacgggacaaatcttagtctct

SEQ ID NO: 88735 - DNA, 22 bp, Artificial Sequence
  Synthetic oligonucleotide; TTG chr11 5250324 5250345 5250341 5250346 +
acgggacaaatcttagtctctt

SEQ ID NO: 88736 - DNA, 22 bp, Artificial Sequence
  Synthetic oligonucleotide; CTT chr11 5250338 5250359 5250355 5250360 +
agtctctttcagttagcagtgg

SEQ ID NO: 88737 - DNA, 22 bp, Artificial Sequence
  Synthetic oligonucleotide; TTA chr11 5250339 5250360 5250356 5250361 +
gtctctttcagttagcagtggt

SEQ ID NO: 88738 - DNA, 22 bp, Artificial Sequence
  Synthetic oligonucleotide; CTC chr11 5250344 5250365 5250361 5250366 +
tttcagttagcagtggtttcta

SEQ ID NO: 88739 - DNA, 22 bp, Artificial Sequence
  Synthetic oligonucleotide; CTT chr11 5250346 5250367 5250363 5250368 +
tcagttagcagtggtttctaag

SEQ ID NO: 88740 - DNA, 22 bp, Artificial Sequence
  Synthetic oligonucleotide; TTT chr11 5250347 5250368 5250364 5250369 +
cagttagcagtggtttctaagg

SEQ ID NO: 88741 - DNA, 22 bp, Artificial Sequence
  Synthetic oligonucleotide; TTC chr11 5250348 5250369 5250365 5250370 +
agttagcagtggtttctaagga

SEQ ID NO: 88742 - DNA, 22 bp, Artificial Sequence
  Synthetic oligonucleotide; TTA chr11 5250353 5250374 5250370 5250375 +
gcagtggtttctaaggaaaaag

SEQ ID NO: 88743 - DNA, 22 bp, Artificial Sequence
  Synthetic oligonucleotide; TTT chr11 5250363 5250384 5250380 5250385 +
ctaaggaaaaagtgctatactt

SEQ ID NO: 88744 - DNA, 22 bp, Artificial Sequence
  Synthetic oligonucleotide; TTC chr11 5250364 5250385 5250381 5250386 +
taaggaaaaagtgctatacttc

SEQ ID NO: 88745 - DNA, 22 bp, Artificial Sequence
  Synthetic oligonucleotide; CTA chr11 5250366 5250387 5250383 5250388 +
aggaaaaagtgctatacttctt

SEQ ID NO: 88746 - DNA, 22 bp, Artificial Sequence
  Synthetic oligonucleotide; CTA chr11 5250380 5250401 5250397 5250402 +
tacttctttttgaatatactct

SEQ ID NO: 88747 - DNA, 22 bp, Artificial Sequence
  Synthetic oligonucleotide; CTT chr11 5250385 5250406 5250402 5250407 +
ctttttgaatatactctttgtg

SEQ ID NO: 88748 - DNA, 22 bp, Artificial Sequence
  Synthetic oligonucleotide; TTC chr11 5250386 5250407 5250403 5250408 +
tttttgaatatactctttgtga

SEQ ID NO: 88749 - DNA, 22 bp, Artificial Sequence
  Synthetic oligonucleotide; CTT chr11 5250388 5250409 5250405 5250410 +
tttgaatatactctttgtgact

SEQ ID NO: 88750 - DNA, 22 bp, Artificial Sequence
  Synthetic oligonucleotide; TTT chr11 5250389 5250410 5250406 5250411 +
ttgaatatactctttgtgactt

SEQ ID NO: 88751 - DNA, 22 bp, Artificial Sequence
  Synthetic oligonucleotide; TTT chr11 5250390 5250411 5250407 5250412 +
tgaatatactctttgtgacttt

SEQ ID NO: 88752 - DNA, 22 bp, Artificial Sequence
  Synthetic oligonucleotide; TTT chr11 5250391 5250412 5250408 5250413 +
gaatatactctttgtgactttt

SEQ ID NO: 88753 - DNA, 22 bp, Artificial Sequence
  Synthetic oligonucleotide; TTG chr11 5250392 5250413 5250409 5250414 +
aatatactctttgtgacttttg

SEQ ID NO: 88754 - DNA, 22 bp, Artificial Sequence
  Synthetic oligonucleotide; CTC chr11 5250401 5250422 5250418 5250423 +
tttgtgacttttgccattatct

SEQ ID NO: 88755 - DNA, 22 bp, Artificial Sequence
  Synthetic oligonucleotide; CTT chr11 5250403 5250424 5250420 5250425 +
tgtgacttttgccattatctct

SEQ ID NO: 88756 - DNA, 22 bp, Artificial Sequence
  Synthetic oligonucleotide; TTT chr11 5250404 5250425 5250421 5250426 +
gtgacttttgccattatctctt

SEQ ID NO: 88757 - DNA, 22 bp, Artificial Sequence
  Synthetic oligonucleotide; TTG chr11 5250405 5250426 5250422 5250427 +
tgacttttgccattatctctta

SEQ ID NO: 88758 - DNA, 22 bp, Artificial Sequence
  Synthetic oligonucleotide; CTT chr11 5250411 5250432 5250428 5250433 +
ttgccattatctcttaatttct

SEQ ID NO: 88759 - DNA, 22 bp, Artificial Sequence
  Synthetic oligonucleotide; TTT chr11 5250412 5250433 5250429 5250434 +
tgccattatctcttaatttctc

SEQ ID NO: 88760 - DNA, 22 bp, Artificial Sequence
  Synthetic oligonucleotide; TTT chr11 5250413 5250434 5250430 5250435 +
gccattatctcttaatttctca

SEQ ID NO: 88761 - DNA, 22 bp, Artificial Sequence
  Synthetic oligonucleotide; TTG chr11 5250414 5250435 5250431 5250436 +
ccattatctcttaatttctcaa

SEQ ID NO: 88762 - DNA, 22 bp, Artificial Sequence
  Synthetic oligonucleotide; TTA chr11 5250420 5250441 5250437 5250442 +
tctcttaatttctcaatagtgc

SEQ ID NO: 88763 - DNA, 22 bp, Artificial Sequence
  Synthetic oligonucleotide; CTC chr11 5250424 5250445 5250441 5250446 +
ttaatttctcaatagtgcagtg

SEQ ID NO: 88764 - DNA, 22 bp, Artificial Sequence
  Synthetic oligonucleotide; CTT chr11 5250426 5250447 5250443 5250448 +
aatttctcaatagtgcagtgaa

SEQ ID NO: 88765 - DNA, 22 bp, Artificial Sequence
  Synthetic oligonucleotide; TTA chr11 5250427 5250448 5250444 5250449 +
atttctcaatagtgcagtgaaa

SEQ ID NO: 88766 - DNA, 22 bp, Artificial Sequence
  Synthetic oligonucleotide; TTT chr11 5250431 5250452 5250448 5250453 +
ctcaatagtgcagtgaaaacaa

SEQ ID NO: 88767 - DNA, 22 bp, Artificial Sequence
  Synthetic oligonucleotide; TTC chr11 5250432 5250453 5250449 5250454 +
tcaatagtgcagtgaaaacaat

SEQ ID NO: 88768 - DNA, 22 bp, Artificial Sequence
  Synthetic oligonucleotide; CTC chr11 5250434 5250455 5250451 5250456 +
aatagtgcagtgaaaacaattt

SEQ ID NO: 88769 - DNA, 22 bp, Artificial Sequence
  Synthetic oligonucleotide; TTT chr11 5250456 5250477 5250473 5250478 +
ctataaagccacagtttcagcg

SEQ ID NO: 88770 - DNA, 22 bp, Artificial Sequence
  Synthetic oligonucleotide; TTC chr11 5250457 5250478 5250474 5250479 +
tataaagccacagtttcagcgc

SEQ ID NO: 88771 - DNA, 22 bp, Artificial Sequence
  Synthetic oligonucleotide; CTA chr11 5250459 5250480 5250476 5250481 +
taaagccacagtttcagcgcag

SEQ ID NO: 88772 - DNA, 22 bp, Artificial Sequence
  Synthetic oligonucleotide; TTT chr11 5250473 5250494 5250490 5250495 +
cagcgcagtaatagattagtgt

SEQ ID NO: 88773 - DNA, 22 bp, Artificial Sequence
  Synthetic oligonucleotide; TTC chr11 5250474 5250495 5250491 5250496 +
agcgcagtaatagattagtgtt

SEQ ID NO: 88774 - DNA, 22 bp, Artificial Sequence
  Synthetic oligonucleotide; TTA chr11 5250491 5250512 5250508 5250513 +
gtgttacataatataagaccta

SEQ ID NO: 88775 - DNA, 22 bp, Artificial Sequence
  Synthetic oligonucleotide; TTA chr11 5250497 5250518 5250514 5250519 +
cataatataagacctaatgctt

SEQ ID NO: 88776 - DNA, 22 bp, Artificial Sequence
  Synthetic oligonucleotide; CTA chr11 5250513 5250534 5250530 5250535 +
atgcttacctcaatatctactt

SEQ ID NO: 88777 - DNA, 22 bp, Artificial Sequence
  Synthetic oligonucleotide; CTT chr11 5250519 5250540 5250536 5250541 +
acctcaatatctacttatccgt

SEQ ID NO: 88778 - DNA, 22 bp, Artificial Sequence
  Synthetic oligonucleotide; TTA chr11 5250520 5250541 5250537 5250542 +
cctcaatatctacttatccgta

SEQ ID NO: 88779 - DNA, 22 bp, Artificial Sequence
  Synthetic oligonucleotide; CTC chr11 5250524 5250545 5250541 5250546 +
aatatctacttatccgtaccta

SEQ ID NO: 88780 - DNA, 22 bp, Artificial Sequence
  Synthetic oligonucleotide; CTA chr11 5250532 5250553 5250549 5250554 +
cttatccgtacctatttgaaat

SEQ ID NO: 88781 - DNA, 22 bp, Artificial Sequence
  Synthetic oligonucleotide; CTT chr11 5250535 5250556 5250552 5250557 +
atccgtacctatttgaaataaa

SEQ ID NO: 88782 - DNA, 22 bp, Artificial Sequence
  Synthetic oligonucleotide; TTA chr11 5250536 5250557 5250553 5250558 +
tccgtacctatttgaaataaat

SEQ ID NO: 88783 - DNA, 22 bp, Artificial Sequence
  Synthetic oligonucleotide; CTA chr11 5250546 5250567 5250563 5250568 +
tttgaaataaatcatgactgtt

SEQ ID NO: 88784 - DNA, 22 bp, Artificial Sequence
  Synthetic oligonucleotide; TTT chr11 5250549 5250570 5250566 5250571 +
gaaataaatcatgactgtttca

SEQ ID NO: 88785 - DNA, 22 bp, Artificial Sequence
  Synthetic oligonucleotide; TTG chr11 5250550 5250571 5250567 5250572 +
aaataaatcatgactgtttcat

SEQ ID NO: 88786 - DNA, 22 bp, Artificial Sequence
  Synthetic oligonucleotide; CTG chr11 5250566 5250587 5250583 5250588 +
tttcatcttagaaaaatatttg

SEQ ID NO: 88787 - DNA, 22 bp, Artificial Sequence
  Synthetic oligonucleotide; TTT chr11 5250569 5250590 5250586 5250591 +
catcttagaaaaatatttgatt

SEQ ID NO: 88788 - DNA, 22 bp, Artificial Sequence
  Synthetic oligonucleotide; TTC chr11 5250570 5250591 5250587 5250592 +
atcttagaaaaatatttgattc

SEQ ID NO: 88789 - DNA, 22 bp, Artificial Sequence
  Synthetic oligonucleotide; CTT chr11 5250575 5250596 5250592 5250597 +
agaaaaatatttgattccatat

SEQ ID NO: 88790 - DNA, 22 bp, Artificial Sequence
  Synthetic oligonucleotide; TTA chr11 5250576 5250597 5250593 5250598 +
gaaaaatatttgattccatatt

SEQ ID NO: 88791 - DNA, 22 bp, Artificial Sequence
  Synthetic oligonucleotide; TTT chr11 5250587 5250608 5250604 5250609 +
gattccatattcaggtatgtat

SEQ ID NO: 88792 - DNA, 22 bp, Artificial Sequence
  Synthetic oligonucleotide; TTG chr11 5250588 5250609 5250605 5250610 +
attccatattcaggtatgtatg

SEQ ID NO: 88793 - DNA, 22 bp, Artificial Sequence
  Synthetic oligonucleotide; TTC chr11 5250592 5250613 5250609 5250614 +
catattcaggtatgtatgtata

SEQ ID NO: 88794 - DNA, 22 bp, Artificial Sequence
  Synthetic oligonucleotide; TTC chr11 5250599 5250620 5250616 5250621 +
aggtatgtatgtatacaccaga

SEQ ID NO: 88795 - DNA, 22 bp, Artificial Sequence
  Synthetic oligonucleotide; TTT chr11 5250633 5250654 5250650 5250655 +
accactggataagtgtgtgtgc

SEQ ID NO: 88796 - DNA, 22 bp, Artificial Sequence
  Synthetic oligonucleotide; TTA chr11 5250634 5250655 5250651 5250656 +
ccactggataagtgtgtgtgct

SEQ ID NO: 88797 - DNA, 22 bp, Artificial Sequence
  Synthetic oligonucleotide; CTG chr11 5250640 5250661 5250657 5250662 +
gataagtgtgtgtgctggctga

SEQ ID NO: 88798 - DNA, 22 bp, Artificial Sequence
  Synthetic oligonucleotide; CTG chr11 5250657 5250678 5250674 5250679 +
gctgatgacccagggttttggc

SEQ ID NO: 88799 - DNA, 22 bp, Artificial Sequence
  Synthetic oligonucleotide; CTG chr11 5250661 5250682 5250678 5250683 +
atgacccagggttttggcgtag

SEQ ID NO: 88800 - DNA, 22 bp, Artificial Sequence
  Synthetic oligonucleotide; TTT chr11 5250675 5250696 5250692 5250697 +
tggcgtagctcttctatgctca

SEQ ID NO: 88801 - DNA, 22 bp, Artificial Sequence
  Synthetic oligonucleotide; TTT chr11 5250676 5250697 5250693 5250698 +
ggcgtagctcttctatgctcag

SEQ ID NO: 88802 - DNA, 22 bp, Artificial Sequence
  Synthetic oligonucleotide; TTG chr11 5250677 5250698 5250694 5250699 +
gcgtagctcttctatgctcagt

SEQ ID NO: 88803 - DNA, 22 bp, Artificial Sequence
  Synthetic oligonucleotide; CTC chr11 5250686 5250707 5250703 5250708 +
ttctatgctcagtaaagatgat

SEQ ID NO: 88804 - DNA, 22 bp, Artificial Sequence
  Synthetic oligonucleotide; CTT chr11 5250688 5250709 5250705 5250710 +
ctatgctcagtaaagatgatgg

SEQ ID NO: 88805 - DNA, 22 bp, Artificial Sequence
  Synthetic oligonucleotide; TTC chr11 5250689 5250710 5250706 5250711 +
tatgctcagtaaagatgatggt

SEQ ID NO: 88806 - DNA, 22 bp, Artificial Sequence
  Synthetic oligonucleotide; CTA chr11 5250691 5250712 5250708 5250713 +
tgctcagtaaagatgatggtag

SEQ ID NO: 88807 - DNA, 22 bp, Artificial Sequence
  Synthetic oligonucleotide; CTC chr11 5250696 5250717 5250713 5250718 +
agtaaagatgatggtagaatgt

SEQ ID NO: 88808 - DNA, 22 bp, Artificial Sequence
  Synthetic oligonucleotide; TTC chr11 5250720 5250741 5250737 5250742 +
tttggcaggtactgtggattag

SEQ ID NO: 88809 - DNA, 22 bp, Artificial Sequence
  Synthetic oligonucleotide; CTT chr11 5250722 5250743 5250739 5250744 +
tggcaggtactgtggattagaa

SEQ ID NO: 88810 - DNA, 22 bp, Artificial Sequence
  Synthetic oligonucleotide; TTT chr11 5250723 5250744 5250740 5250745 +
ggcaggtactgtggattagaat

SEQ ID NO: 88811 - DNA, 22 bp, Artificial Sequence
  Synthetic oligonucleotide; TTG chr11 5250724 5250745 5250741 5250746 +
gcaggtactgtggattagaatt

SEQ ID NO: 88812 - DNA, 22 bp, Artificial Sequence
  Synthetic oligonucleotide; CTG chr11 5250734 5250755 5250751 5250756 +
tggattagaattaattatcttg

SEQ ID NO: 88813 - DNA, 22 bp, Artificial Sequence
  Synthetic oligonucleotide; TTA chr11 5250741 5250762 5250758 5250763 +
gaattaattatcttgtataaat

SEQ ID NO: 88814 - DNA, 22 bp, Artificial Sequence
  Synthetic oligonucleotide; TTA chr11 5250747 5250768 5250764 5250769 +
attatcttgtataaatgctagg

SEQ ID NO: 88815 - DNA, 22 bp, Artificial Sequence
  Synthetic oligonucleotide; TTA chr11 5250751 5250772 5250768 5250773 +
tcttgtataaatgctaggttca

SEQ ID NO: 88816 - DNA, 22 bp, Artificial Sequence
  Synthetic oligonucleotide; CTT chr11 5250755 5250776 5250772 5250777 +
gtataaatgctaggttcacttc

SEQ ID NO: 88817 - DNA, 22 bp, Artificial Sequence
  Synthetic oligonucleotide; TTG chr11 5250756 5250777 5250773 5250778 +
tataaatgctaggttcacttct

SEQ ID NO: 88818 - DNA, 22 bp, Artificial Sequence
  Synthetic oligonucleotide; CTA chr11 5250767 5250788 5250784 5250789 +
ggttcacttctcagggaatctt

SEQ ID NO: 88819 - DNA, 22 bp, Artificial Sequence
  Synthetic oligonucleotide; TTC chr11 5250772 5250793 5250789 5250794 +
acttctcagggaatcttactct

SEQ ID NO: 88820 - DNA, 22 bp, Artificial Sequence
  Synthetic oligonucleotide; CTT chr11 5250776 5250797 5250793 5250798 +
ctcagggaatcttactctaaga

SEQ ID NO: 88821 - DNA, 22 bp, Artificial Sequence
  Synthetic oligonucleotide; TTC chr11 5250777 5250798 5250794 5250799 +
tcagggaatcttactctaagac

SEQ ID NO: 88822 - DNA, 22 bp, Artificial Sequence
  Synthetic oligonucleotide; CTC chr11 5250779 5250800 5250796 5250801 +
agggaatcttactctaagacat

SEQ ID NO: 88823 - DNA, 22 bp, Artificial Sequence
  Synthetic oligonucleotide; CTT chr11 5250789 5250810 5250806 5250811 +
actctaagacataagatgtgcg

SEQ ID NO: 88824 - DNA, 22 bp, Artificial Sequence
  Synthetic oligonucleotide; TTA chr11 5250790 5250811 5250807 5250812 +
ctctaagacataagatgtgcgt

SEQ ID NO: 88825 - DNA, 22 bp, Artificial Sequence
  Synthetic oligonucleotide; CTC chr11 5250793 5250814 5250810 5250815 +
taagacataagatgtgcgtgta

SEQ ID NO: 88826 - DNA, 22 bp, Artificial Sequence
  Synthetic oligonucleotide; CTA chr11 5250795 5250816 5250812 5250817 +
agacataagatgtgcgtgtaca

SEQ ID NO: 88827 - DNA, 22 bp, Artificial Sequence
  Synthetic oligonucleotide; CTC chr11 5250830 5250851 5250847 5250852 +
taaagaggcaagggttgttttt

SEQ ID NO: 88828 - DNA, 22 bp, Artificial Sequence
  Synthetic oligonucleotide; CTA chr11 5250832 5250853 5250849 5250854 +
aagaggcaagggttgtttttat

SEQ ID NO: 88829 - DNA, 22 bp, Artificial Sequence
  Synthetic oligonucleotide; TTG chr11 5250847 5250868 5250864 5250869 +
tttttattgactaatagtccac

SEQ ID NO: 88830 - DNA, 22 bp, Artificial Sequence
  Synthetic oligonucleotide; TTT chr11 5250850 5250871 5250867 5250872 +
ttattgactaatagtccacaca

SEQ ID NO: 88831 - DNA, 22 bp, Artificial Sequence
  Synthetic oligonucleotide; TTT chr11 5250851 5250872 5250868 5250873 +
tattgactaatagtccacacac

SEQ ID NO: 88832 - DNA, 22 bp, Artificial Sequence
  Synthetic oligonucleotide; TTT chr11 5250852 5250873 5250869 5250874 +
attgactaatagtccacacact

SEQ ID NO: 88833 - DNA, 22 bp, Artificial Sequence
  Synthetic oligonucleotide; TTA chr11 5250853 5250874 5250870 5250875 +
ttgactaatagtccacacacta

SEQ ID NO: 88834 - DNA, 22 bp, Artificial Sequence
  Synthetic oligonucleotide; TTG chr11 5250856 5250877 5250873 5250878 +
actaatagtccacacactatta

SEQ ID NO: 88835 - DNA, 22 bp, Artificial Sequence
  Synthetic oligonucleotide; CTA chr11 5250860 5250881 5250877 5250882 +
atagtccacacactattataac

SEQ ID NO: 88836 - DNA, 22 bp, Artificial Sequence
  Synthetic oligonucleotide; CTA chr11 5250875 5250896 5250892 5250897 +
ttataactcgaatattagtgta

SEQ ID NO: 88837 - DNA, 22 bp, Artificial Sequence
  Synthetic oligonucleotide; TTA chr11 5250878 5250899 5250895 5250900 +
taactcgaatattagtgtactt

SEQ ID NO: 88838 - DNA, 22 bp, Artificial Sequence
  Synthetic oligonucleotide; CTC chr11 5250884 5250905 5250901 5250906 +
gaatattagtgtactttagaca

SEQ ID NO: 88839 - DNA, 22 bp, Artificial Sequence
  Synthetic oligonucleotide; TTA chr11 5250892 5250913 5250909 5250914 +
gtgtactttagacagctttatt

SEQ ID NO: 88840 - DNA, 22 bp, Artificial Sequence
  Synthetic oligonucleotide; CTT chr11 5250900 5250921 5250917 5250922 +
tagacagctttatttctaacac

SEQ ID NO: 88841 - DNA, 22 bp, Artificial Sequence
  Synthetic oligonucleotide; TTT chr11 5250901 5250922 5250918 5250923 +
agacagctttatttctaacaca

SEQ ID NO: 88842 - DNA, 22 bp, Artificial Sequence
  Synthetic oligonucleotide; TTA chr11 5250902 5250923 5250919 5250924 +
gacagctttatttctaacacag

SEQ ID NO: 88843 - DNA, 22 bp, Artificial Sequence
  Synthetic oligonucleotide; CTT chr11 5250910 5250931 5250927 5250932 +
tatttctaacacagtgctgttt

SEQ ID NO: 88844 - DNA, 22 bp, Artificial Sequence
  Synthetic oligonucleotide; TTT chr11 5250911 5250932 5250928 5250933 +
atttctaacacagtgctgtttc

SEQ ID NO: 88845 - DNA, 22 bp, Artificial Sequence
  Synthetic oligonucleotide; TTA chr11 5250912 5250933 5250929 5250934 +
tttctaacacagtgctgtttct

SEQ ID NO: 88846 - DNA, 22 bp, Artificial Sequence
  Synthetic oligonucleotide; TTT chr11 5250915 5250936 5250932 5250937 +
ctaacacagtgctgtttctgac

SEQ ID NO: 88847 - DNA, 22 bp, Artificial Sequence
  Synthetic oligonucleotide; TTC chr11 5250916 5250937 5250933 5250938 +
taacacagtgctgtttctgaca

SEQ ID NO: 88848 - DNA, 22 bp, Artificial Sequence
  Synthetic oligonucleotide; CTA chr11 5250918 5250939 5250935 5250940 +
acacagtgctgtttctgacata

SEQ ID NO: 88849 - DNA, 22 bp, Artificial Sequence
  Synthetic oligonucleotide; CTG chr11 5250929 5250950 5250946 5250951 +
tttctgacatattggaccatta

SEQ ID NO: 88850 - DNA, 22 bp, Artificial Sequence
  Synthetic oligonucleotide; TTT chr11 5250932 5250953 5250949 5250954 +
ctgacatattggaccattaaca

SEQ ID NO: 88851 - DNA, 22 bp, Artificial Sequence
  Synthetic oligonucleotide; TTC chr11 5250933 5250954 5250950 5250955 +
tgacatattggaccattaacag

SEQ ID NO: 88852 - DNA, 22 bp, Artificial Sequence
  Synthetic oligonucleotide; CTG chr11 5250935 5250956 5250952 5250957 +
acatattggaccattaacaggg

SEQ ID NO: 88853 - DNA, 22 bp, Artificial Sequence
  Synthetic oligonucleotide; TTG chr11 5250943 5250964 5250960 5250965 +
gaccattaacagggtaggaagt

SEQ ID NO: 88854 - DNA, 22 bp, Artificial Sequence
  Synthetic oligonucleotide; TTA chr11 5250951 5250972 5250968 5250973 +
acagggtaggaagtatttatgg

SEQ ID NO: 88855 - DNA, 22 bp, Artificial Sequence
  Synthetic oligonucleotide; TTT chr11 5250969 5250990 5250986 5250991 +
atggtggttttttggttctgtt

SEQ ID NO: 88856 - DNA, 22 bp, Artificial Sequence
  Synthetic oligonucleotide; TTA chr11 5250970 5250991 5250987 5250992 +
tggtggttttttggttctgttt

SEQ ID NO: 88857 - DNA, 22 bp, Artificial Sequence
  Synthetic oligonucleotide; TTT chr11 5250979 5251000 5250996 5251001 +
tttggttctgttttgcttttgg

SEQ ID NO: 88858 - DNA, 22 bp, Artificial Sequence
  Synthetic oligonucleotide; TTT chr11 5250980 5251001 5250997 5251002 +
ttggttctgttttgcttttggt

SEQ ID NO: 88859 - DNA, 22 bp, Artificial Sequence
  Synthetic oligonucleotide; TTT chr11 5250981 5251002 5250998 5251003 +
tggttctgttttgcttttggtt

SEQ ID NO: 88860 - DNA, 22 bp, Artificial Sequence
  Synthetic oligonucleotide; TTT chr11 5250982 5251003 5250999 5251004 +
ggttctgttttgcttttggtta

SEQ ID NO: 88861 - DNA, 22 bp, Artificial Sequence
  Synthetic oligonucleotide; TTG chr11 5250983 5251004 5251000 5251005 +
gttctgttttgcttttggttag

SEQ ID NO: 88862 - DNA, 22 bp, Artificial Sequence
  Synthetic oligonucleotide; TTC chr11 5250987 5251008 5251004 5251009 +
tgttttgcttttggttagtttg

SEQ ID NO: 88863 - DNA, 22 bp, Artificial Sequence
  Synthetic oligonucleotide; CTG chr11 5250989 5251010 5251006 5251011 +
ttttgcttttggttagtttgtt

SEQ ID NO: 88864 - DNA, 22 bp, Artificial Sequence
  Synthetic oligonucleotide; TTT chr11 5250992 5251013 5251009 5251014 +
tgcttttggttagtttgttttt

SEQ ID NO: 88865 - DNA, 22 bp, Artificial Sequence
  Synthetic oligonucleotide; TTT chr11 5250993 5251014 5251010 5251015 +
gcttttggttagtttgtttttg

SEQ ID NO: 88866 - DNA, 22 bp, Artificial Sequence
  Synthetic oligonucleotide; TTG chr11 5250994 5251015 5251011 5251016 +
cttttggttagtttgtttttgt

SEQ ID NO: 88867 - DNA, 22 bp, Artificial Sequence
  Synthetic oligonucleotide; CTT chr11 5250997 5251018 5251014 5251019 +
ttggttagtttgtttttgtttt

SEQ ID NO: 88868 - DNA, 22 bp, Artificial Sequence
  Synthetic oligonucleotide; TTT chr11 5250998 5251019 5251015 5251020 +
tggttagtttgtttttgttttt

SEQ ID NO: 88869 - DNA, 22 bp, Artificial Sequence
  Synthetic oligonucleotide; TTT chr11 5250999 5251020 5251016 5251021 +
ggttagtttgtttttgtttttc

SEQ ID NO: 88870 - DNA, 22 bp, Artificial Sequence
  Synthetic oligonucleotide; TTG chr11 5251000 5251021 5251017 5251022 +
gttagtttgtttttgtttttct

SEQ ID NO: 88871 - DNA, 22 bp, Artificial Sequence
  Synthetic oligonucleotide; TTA chr11 5251004 5251025 5251021 5251026 +
gtttgtttttgtttttctctga

SEQ ID NO: 88872 - DNA, 22 bp, Artificial Sequence
  Synthetic oligonucleotide; TTT chr11 5251008 5251029 5251025 5251030 +
gtttttgtttttctctgaaagt

SEQ ID NO: 88873 - DNA, 22 bp, Artificial Sequence
  Synthetic oligonucleotide; TTG chr11 5251009 5251030 5251026 5251031 +
tttttgtttttctctgaaagtg

SEQ ID NO: 88874 - DNA, 22 bp, Artificial Sequence
  Synthetic oligonucleotide; TTT chr11 5251012 5251033 5251029 5251034 +
ttgtttttctctgaaagtgatc

SEQ ID NO: 88875 - DNA, 22 bp, Artificial Sequence
  Synthetic oligonucleotide; TTT chr11 5251013 5251034 5251030 5251035 +
tgtttttctctgaaagtgatcc

SEQ ID NO: 88876 - DNA, 22 bp, Artificial Sequence
  Synthetic oligonucleotide; TTT chr11 5251014 5251035 5251031 5251036 +
gtttttctctgaaagtgatcca

SEQ ID NO: 88877 - DNA, 22 bp, Artificial Sequence
  Synthetic oligonucleotide; TTG chr11 5251015 5251036 5251032 5251037 +
tttttctctgaaagtgatccat

SEQ ID NO: 88878 - DNA, 22 bp, Artificial Sequence
  Synthetic oligonucleotide; TTT chr11 5251018 5251039 5251035 5251040 +
ttctctgaaagtgatccatgat

SEQ ID NO: 88879 - DNA, 22 bp, Artificial Sequence
  Synthetic oligonucleotide; TTT chr11 5251019 5251040 5251036 5251041 +
tctctgaaagtgatccatgatc

SEQ ID NO: 88880 - DNA, 22 bp, Artificial Sequence
  Synthetic oligonucleotide; TTT chr11 5251020 5251041 5251037 5251042 +
ctctgaaagtgatccatgatct

SEQ ID NO: 88881 - DNA, 22 bp, Artificial Sequence
  Synthetic oligonucleotide; TTC chr11 5251021 5251042 5251038 5251043 +
tctgaaagtgatccatgatctc

SEQ ID NO: 88882 - DNA, 22 bp, Artificial Sequence
  Synthetic oligonucleotide; CTC chr11 5251023 5251044 5251040 5251045 +
tgaaagtgatccatgatctcta

SEQ ID NO: 88883 - DNA, 22 bp, Artificial Sequence
  Synthetic oligonucleotide; CTG chr11 5251025 5251046 5251042 5251047 +
aaagtgatccatgatctctaac

SEQ ID NO: 88884 - DNA, 22 bp, Artificial Sequence
  Synthetic oligonucleotide; CTC chr11 5251043 5251064 5251060 5251065 +
taaccttgctagattataatgc

SEQ ID NO: 88885 - DNA, 22 bp, Artificial Sequence
  Synthetic oligonucleotide; CTA chr11 5251045 5251066 5251062 5251067 +
accttgctagattataatgcca

SEQ ID NO: 88886 - DNA, 22 bp, Artificial Sequence
  Synthetic oligonucleotide; CTT chr11 5251050 5251071 5251067 5251072 +
gctagattataatgccagaagc

SEQ ID NO: 88887 - DNA, 22 bp, Artificial Sequence
  Synthetic oligonucleotide; TTG chr11 5251051 5251072 5251068 5251073 +
ctagattataatgccagaagct

SEQ ID NO: 88888 - DNA, 22 bp, Artificial Sequence
  Synthetic oligonucleotide; CTA chr11 5251054 5251075 5251071 5251076 +
gattataatgccagaagctctg

SEQ ID NO: 88889 - DNA, 22 bp, Artificial Sequence
  Synthetic oligonucleotide; TTA chr11 5251059 5251080 5251076 5251081 +
taatgccagaagctctggaatt

SEQ ID NO: 88890 - DNA, 22 bp, Artificial Sequence
  Synthetic oligonucleotide; CTC chr11 5251074 5251095 5251091 5251096 +
tggaattctggcttatcggagg

SEQ ID NO: 88891 - DNA, 22 bp, Artificial Sequence
  Synthetic oligonucleotide; CTG chr11 5251076 5251097 5251093 5251098 +
gaattctggcttatcggaggca

SEQ ID NO: 88892 - DNA, 22 bp, Artificial Sequence
  Synthetic oligonucleotide; TTC chr11 5251082 5251103 5251099 5251104 +
tggcttatcggaggcaagctgt

SEQ ID NO: 88893 - DNA, 22 bp, Artificial Sequence
  Synthetic oligonucleotide; CTG chr11 5251084 5251105 5251101 5251106 +
gcttatcggaggcaagctgtat

SEQ ID NO: 88894 - DNA, 22 bp, Artificial Sequence
  Synthetic oligonucleotide; CTT chr11 5251088 5251109 5251105 5251110 +
atcggaggcaagctgtatcttc

SEQ ID NO: 88895 - DNA, 22 bp, Artificial Sequence
  Synthetic oligonucleotide; TTA chr11 5251089 5251110 5251106 5251111 +
tcggaggcaagctgtatcttca

SEQ ID NO: 88896 - DNA, 22 bp, Artificial Sequence
  Synthetic oligonucleotide; CTG chr11 5251103 5251124 5251120 5251125 +
tatcttcaaattagtttatccc

SEQ ID NO: 88897 - DNA, 22 bp, Artificial Sequence
  Synthetic oligonucleotide; CTT chr11 5251109 5251130 5251126 5251131 +
caaattagtttatcccctaagc

SEQ ID NO: 88898 - DNA, 22 bp, Artificial Sequence
  Synthetic oligonucleotide; TTC chr11 5251110 5251131 5251127 5251132 +
aaattagtttatcccctaagct

SEQ ID NO: 88899 - DNA, 22 bp, Artificial Sequence
  Synthetic oligonucleotide; TTA chr11 5251116 5251137 5251133 5251138 +
gtttatcccctaagctatcagg

SEQ ID NO: 88900 - DNA, 22 bp, Artificial Sequence
  Synthetic oligonucleotide; TTT chr11 5251120 5251141 5251137 5251142 +
atcccctaagctatcaggttga

SEQ ID NO: 88901 - DNA, 22 bp, Artificial Sequence
  Synthetic oligonucleotide; TTA chr11 5251121 5251142 5251138 5251143 +
tcccctaagctatcaggttgat

SEQ ID NO: 88902 - DNA, 22 bp, Artificial Sequence
  Synthetic oligonucleotide; CTA chr11 5251128 5251149 5251145 5251150 +
agctatcaggttgattgaaatt

SEQ ID NO: 88903 - DNA, 22 bp, Artificial Sequence
  Synthetic oligonucleotide; CTA chr11 5251133 5251154 5251150 5251155 +
tcaggttgattgaaattattat

SEQ ID NO: 88904 - DNA, 22 bp, Artificial Sequence
  Synthetic oligonucleotide; TTG chr11 5251141 5251162 5251158 5251163 +
attgaaattattataatattgg

SEQ ID NO: 88905 - DNA, 22 bp, Artificial Sequence
  Synthetic oligonucleotide; TTG chr11 5251145 5251166 5251162 5251167 +
aaattattataatattggtgaa

SEQ ID NO: 88906 - DNA, 22 bp, Artificial Sequence
  Synthetic oligonucleotide; TTA chr11 5251151 5251172 5251168 5251173 +
ttataatattggtgaaattctt

SEQ ID NO: 88907 - DNA, 22 bp, Artificial Sequence
  Synthetic oligonucleotide; TTA chr11 5251154 5251175 5251171 5251176 +
taatattggtgaaattctttca

SEQ ID NO: 88908 - DNA, 22 bp, Artificial Sequence
  Synthetic oligonucleotide; TTG chr11 5251162 5251183 5251179 5251184 +
gtgaaattctttcatccttcat

SEQ ID NO: 88909 - DNA, 22 bp, Artificial Sequence
  Synthetic oligonucleotide; TTC chr11 5251171 5251192 5251188 5251193 +
tttcatccttcatgatcctgtg

SEQ ID NO: 88910 - DNA, 22 bp, Artificial Sequence
  Synthetic oligonucleotide; CTT chr11 5251173 5251194 5251190 5251195 +
tcatccttcatgatcctgtgta

SEQ ID NO: 88911 - DNA, 22 bp, Artificial Sequence
  Synthetic oligonucleotide; TTT chr11 5251174 5251195 5251191 5251196 +
catccttcatgatcctgtgtaa

SEQ ID NO: 88912 - DNA, 22 bp, Artificial Sequence
  Synthetic oligonucleotide; TTC chr11 5251175 5251196 5251192 5251197 +
atccttcatgatcctgtgtaaa

SEQ ID NO: 88913 - DNA, 22 bp, Artificial Sequence
  Synthetic oligonucleotide; CTT chr11 5251181 5251202 5251198 5251203 +
catgatcctgtgtaaagcttat

SEQ ID NO: 88914 - DNA, 22 bp, Artificial Sequence
  Synthetic oligonucleotide; TTC chr11 5251182 5251203 5251199 5251204 +
atgatcctgtgtaaagcttata

SEQ ID NO: 88915 - DNA, 22 bp, Artificial Sequence
  Synthetic oligonucleotide; CTG chr11 5251191 5251212 5251208 5251213 +
tgtaaagcttatatctgctcat

SEQ ID NO: 88916 - DNA, 22 bp, Artificial Sequence
  Synthetic oligonucleotide; CTT chr11 5251201 5251222 5251218 5251223 +
atatctgctcattgatacagat

SEQ ID NO: 88917 - DNA, 22 bp, Artificial Sequence
  Synthetic oligonucleotide; TTA chr11 5251202 5251223 5251219 5251224 +
tatctgctcattgatacagatg

SEQ ID NO: 88918 - DNA, 22 bp, Artificial Sequence
  Synthetic oligonucleotide; CTG chr11 5251208 5251229 5251225 5251230 +
ctcattgatacagatggctaaa

SEQ ID NO: 88919 - DNA, 22 bp, Artificial Sequence
  Synthetic oligonucleotide; CTC chr11 5251211 5251232 5251228 5251233 +
attgatacagatggctaaaagg

SEQ ID NO: 88920 - DNA, 22 bp, Artificial Sequence
  Synthetic oligonucleotide; TTG chr11 5251215 5251236 5251232 5251237 +
atacagatggctaaaaggccag

SEQ ID NO: 88921 - DNA, 22 bp, Artificial Sequence
  Synthetic oligonucleotide; CTA chr11 5251228 5251249 5251245 5251250 +
aaaggccagaaagacacacatt

SEQ ID NO: 88922 - DNA, 22 bp, Artificial Sequence
  Synthetic oligonucleotide; TTT chr11 5251251 5251272 5251268 5251273 +
acccatgtaacaagcctgcaca

SEQ ID NO: 88923 - DNA, 22 bp, Artificial Sequence
  Synthetic oligonucleotide; TTA chr11 5251252 5251273 5251269 5251274 +
cccatgtaacaagcctgcacat

SEQ ID NO: 88924 - DNA, 22 bp, Artificial Sequence
  Synthetic oligonucleotide; CTG chr11 5251269 5251290 5251286 5251291 +
cacatcctgcacatgtaccttc

SEQ ID NO: 88925 - DNA, 22 bp, Artificial Sequence
  Synthetic oligonucleotide; CTG chr11 5251278 5251299 5251295 5251300 +
cacatgtaccttcgaaattaaa

SEQ ID NO: 88926 - DNA, 22 bp, Artificial Sequence
  Synthetic oligonucleotide; CTT chr11 5251290 5251311 5251307 5251312 +
cgaaattaaaatgaaatgaaat

SEQ ID NO: 88927 - DNA, 22 bp, Artificial Sequence
  Synthetic oligonucleotide; TTC chr11 5251291 5251312 5251308 5251313 +
gaaattaaaatgaaatgaaata

SEQ ID NO: 88928 - DNA, 22 bp, Artificial Sequence
  Synthetic oligonucleotide; TTA chr11 5251298 5251319 5251315 5251320 +
aaatgaaatgaaataaaattaa

SEQ ID NO: 88929 - DNA, 22 bp, Artificial Sequence
  Synthetic oligonucleotide; TTA chr11 5251319 5251340 5251336 5251341 +
aaaggaaaaaaatgccatggca

SEQ ID NO: 88930 - DNA, 22 bp, Artificial Sequence
  Synthetic oligonucleotide; TTA chr11 5251355 5251376 5251372 5251377 +
tcttttatggtctaaaaatggg

SEQ ID NO: 88931 - DNA, 22 bp, Artificial Sequence
  Synthetic oligonucleotide; CTT chr11 5251359 5251380 5251376 5251381 +
ttatggtctaaaaatgggcagc

SEQ ID NO: 88932 - DNA, 22 bp, Artificial Sequence
  Synthetic oligonucleotide; TTT chr11 5251360 5251381 5251377 5251382 +
tatggtctaaaaatgggcagca

SEQ ID NO: 88933 - DNA, 22 bp, Artificial Sequence
  Synthetic oligonucleotide; TTT chr11 5251361 5251382 5251378 5251383 +
atggtctaaaaatgggcagcat

SEQ ID NO: 88934 - DNA, 22 bp, Artificial Sequence
  Synthetic oligonucleotide; TTA chr11 5251362 5251383 5251379 5251384 +
tggtctaaaaatgggcagcata

SEQ ID NO: 88935 - DNA, 22 bp, Artificial Sequence
  Synthetic oligonucleotide; CTA chr11 5251369 5251390 5251386 5251391 +
aaaatgggcagcataaataatc

SEQ ID NO: 88936 - DNA, 22 bp, Artificial Sequence
  Synthetic oligonucleotide; CTA chr11 5251393 5251414 5251410 5251415 +
ccccttgtttagcatactattg

SEQ ID NO: 88937 - DNA, 22 bp, Artificial Sequence
  Synthetic oligonucleotide; CTT chr11 5251399 5251420 5251416 5251421 +
gtttagcatactattgaaaaat

SEQ ID NO: 88938 - DNA, 22 bp, Artificial Sequence
  Synthetic oligonucleotide; TTG chr11 5251400 5251421 5251417 5251422 +
tttagcatactattgaaaaata

SEQ ID NO: 88939 - DNA, 22 bp, Artificial Sequence
  Synthetic oligonucleotide; TTT chr11 5251403 5251424 5251420 5251425 +
agcatactattgaaaaataaca

SEQ ID NO: 88940 - DNA, 22 bp, Artificial Sequence
  Synthetic oligonucleotide; TTA chr11 5251404 5251425 5251421 5251426 +
gcatactattgaaaaataacaa

SEQ ID NO: 88941 - DNA, 22 bp, Artificial Sequence
  Synthetic oligonucleotide; CTA chr11 5251412 5251433 5251429 5251434 +
ttgaaaaataacaataaaaatc

SEQ ID NO: 88942 - DNA, 22 bp, Artificial Sequence
  Synthetic oligonucleotide; TTG chr11 5251415 5251436 5251432 5251437 +
aaaaataacaataaaaatcggc

SEQ ID NO: 88943 - DNA, 22 bp, Artificial Sequence
  Synthetic oligonucleotide; CTT chr11 5251451 5251472 5251468 5251473 +
gcgtctactctgcctatgaagt

SEQ ID NO: 88944 - DNA, 22 bp, Artificial Sequence
  Synthetic oligonucleotide; TTG chr11 5251452 5251473 5251469 5251474 +
cgtctactctgcctatgaagta

SEQ ID NO: 88945 - DNA, 22 bp, Artificial Sequence
  Synthetic oligonucleotide; CTA chr11 5251458 5251479 5251475 5251480 +
ctctgcctatgaagtagccatt

SEQ ID NO: 88946 - DNA, 22 bp, Artificial Sequence
  Synthetic oligonucleotide; CTC chr11 5251461 5251482 5251478 5251483 +
tgcctatgaagtagccattcat

SEQ ID NO: 88947 - DNA, 22 bp, Artificial Sequence
  Synthetic oligonucleotide; CTG chr11 5251463 5251484 5251480 5251485 +
cctatgaagtagccattcattt

SEQ ID NO: 88948 - DNA, 22 bp, Artificial Sequence
  Synthetic oligonucleotide; CTA chr11 5251467 5251488 5251484 5251489 +
tgaagtagccattcatttattc

SEQ ID NO: 88949 - DNA, 22 bp, Artificial Sequence
  Synthetic oligonucleotide; TTC chr11 5251481 5251502 5251498 5251503 +
atttattccttcaattttttat

SEQ ID NO: 88950 - DNA, 22 bp, Artificial Sequence
  Synthetic oligonucleotide; TTT chr11 5251485 5251506 5251502 5251507 +
attccttcaattttttataaac

SEQ ID NO: 88951 - DNA, 22 bp, Artificial Sequence
  Synthetic oligonucleotide; TTA chr11 5251486 5251507 5251503 5251508 +
ttccttcaattttttataaact

SEQ ID NO: 88952 - DNA, 22 bp, Artificial Sequence
  Synthetic oligonucleotide; TTC chr11 5251489 5251510 5251506 5251511 +
cttcaattttttataaacttgt

SEQ ID NO: 88953 - DNA, 22 bp, Artificial Sequence
  Synthetic oligonucleotide; CTT chr11 5251492 5251513 5251509 5251514 +
caattttttataaacttgtttt

SEQ ID NO: 88954 - DNA, 22 bp, Artificial Sequence
  Synthetic oligonucleotide; TTC chr11 5251493 5251514 5251510 5251515 +
aattttttataaacttgtttta

SEQ ID NO: 88955 - DNA, 22 bp, Artificial Sequence
  Synthetic oligonucleotide; TTT chr11 5251498 5251519 5251515 5251520 +
tttataaacttgttttactaaa

SEQ ID NO: 88956 - DNA, 22 bp, Artificial Sequence
  Synthetic oligonucleotide; TTT chr11 5251499 5251520 5251516 5251521 +
ttataaacttgttttactaaaa

SEQ ID NO: 88957 - DNA, 22 bp, Artificial Sequence
  Synthetic oligonucleotide; TTT chr11 5251500 5251521 5251517 5251522 +
tataaacttgttttactaaaaa

SEQ ID NO: 88958 - DNA, 22 bp, Artificial Sequence
  Synthetic oligonucleotide; TTT chr11 5251501 5251522 5251518 5251523 +
ataaacttgttttactaaaaaa

SEQ ID NO: 88959 - DNA, 22 bp, Artificial Sequence
  Synthetic oligonucleotide; TTA chr11 5251502 5251523 5251519 5251524 +
taaacttgttttactaaaaaaa

SEQ ID NO: 88960 - DNA, 22 bp, Artificial Sequence
  Synthetic oligonucleotide; CTT chr11 5251509 5251530 5251526 5251531 +
gttttactaaaaaaaaaaagga

SEQ ID NO: 88961 - DNA, 22 bp, Artificial Sequence
  Synthetic oligonucleotide; TTG chr11 5251510 5251531 5251527 5251532 +
ttttactaaaaaaaaaaaggac

SEQ ID NO: 88962 - DNA, 22 bp, Artificial Sequence
  Synthetic oligonucleotide; TTT chr11 5251513 5251534 5251530 5251535 +
tactaaaaaaaaaaaggacaaa

SEQ ID NO: 88963 - DNA, 22 bp, Artificial Sequence
  Synthetic oligonucleotide; TTT chr11 5251514 5251535 5251531 5251536 +
actaaaaaaaaaaaggacaaag

SEQ ID NO: 88964 - DNA, 22 bp, Artificial Sequence
  Synthetic oligonucleotide; TTA chr11 5251515 5251536 5251532 5251537 +
ctaaaaaaaaaaaggacaaaga

SEQ ID NO: 88965 - DNA, 22 bp, Artificial Sequence
  Synthetic oligonucleotide; CTA chr11 5251518 5251539 5251535 5251540 +
aaaaaaaaaaggacaaagaaag

SEQ ID NO: 88966 - DNA, 22 bp, Artificial Sequence
  Synthetic oligonucleotide; TTG chr11 5251553 5251574 5251570 5251575 +
tgaaatggtagtgagtgatggc

SEQ ID NO: 88967 - DNA, 22 bp, Artificial Sequence
  Synthetic oligonucleotide; TTT chr11 5251579 5251600 5251596 5251601 +
gaagtgggtcctttatgatttg

SEQ ID NO: 88968 - DNA, 22 bp, Artificial Sequence
  Synthetic oligonucleotide; TTG chr11 5251580 5251601 5251597 5251602 +
aagtgggtcctttatgatttga

SEQ ID NO: 88969 - DNA, 22 bp, Artificial Sequence
  Synthetic oligonucleotide; CTT chr11 5251592 5251613 5251609 5251614 +
tatgatttgatggagccaggca

SEQ ID NO: 88970 - DNA, 22 bp, Artificial Sequence
  Synthetic oligonucleotide; TTT chr11 5251593 5251614 5251610 5251615 +
atgatttgatggagccaggcag

SEQ ID NO: 88971 - DNA, 22 bp, Artificial Sequence
  Synthetic oligonucleotide; TTA chr11 5251594 5251615 5251611 5251616 +
tgatttgatggagccaggcaga

SEQ ID NO: 88972 - DNA, 22 bp, Artificial Sequence
  Synthetic oligonucleotide; TTT chr11 5251600 5251621 5251617 5251622 +
gatggagccaggcagaagacgt

SEQ ID NO: 88973 - DNA, 22 bp, Artificial Sequence
  Synthetic oligonucleotide; TTG chr11 5251601 5251622 5251618 5251623 +
atggagccaggcagaagacgtt

SEQ ID NO: 88974 - DNA, 22 bp, Artificial Sequence
  Synthetic oligonucleotide; TTT chr11 5251624 5251645 5251641 5251646 +
ggagaaagaagttcctgaaagt

SEQ ID NO: 88975 - DNA, 22 bp, Artificial Sequence
  Synthetic oligonucleotide; TTG chr11 5251625 5251646 5251642 5251647 +
gagaaagaagttcctgaaagta

SEQ ID NO: 88976 - DNA, 22 bp, Artificial Sequence
  Synthetic oligonucleotide; TTC chr11 5251638 5251659 5251655 5251660 +
ctgaaagtaggaagggcatgtg

SEQ ID NO: 88977 - DNA, 22 bp, Artificial Sequence
  Synthetic oligonucleotide; CTG chr11 5251641 5251662 5251658 5251663 +
aaagtaggaagggcatgtggaa

SEQ ID NO: 88978 - DNA, 22 bp, Artificial Sequence
  Synthetic oligonucleotide; CTC chr11 5251668 5251689 5251685 5251690 +
tgaggctgaggaaaaaaaagaa

SEQ ID NO: 88979 - DNA, 22 bp, Artificial Sequence
  Synthetic oligonucleotide; CTG chr11 5251670 5251691 5251687 5251692 +
aggctgaggaaaaaaaagaaag

SEQ ID NO: 88980 - DNA, 22 bp, Artificial Sequence
  Synthetic oligonucleotide; CTG chr11 5251676 5251697 5251693 5251698 +
aggaaaaaaaagaaagaaagaa

SEQ ID NO: 88981 - DNA, 22 bp, Artificial Sequence
  Synthetic oligonucleotide; CTT chr11 5251715 5251736 5251732 5251737 +
gacatttcactgtatataaaca

SEQ ID NO: 88982 - DNA, 22 bp, Artificial Sequence
  Synthetic oligonucleotide; TTG chr11 5251716 5251737 5251733 5251738 +
acatttcactgtatataaacac

SEQ ID NO: 88983 - DNA, 22 bp, Artificial Sequence
  Synthetic oligonucleotide; TTT chr11 5251722 5251743 5251739 5251744 +
cactgtatataaacacattaca

SEQ ID NO: 88984 - DNA, 22 bp, Artificial Sequence
  Synthetic oligonucleotide; TTC chr11 5251723 5251744 5251740 5251745 +
actgtatataaacacattacaa

SEQ ID NO: 88985 - DNA, 22 bp, Artificial Sequence
  Synthetic oligonucleotide; CTG chr11 5251727 5251748 5251744 5251749 +
tatataaacacattacaagcct

SEQ ID NO: 88986 - DNA, 22 bp, Artificial Sequence
  Synthetic oligonucleotide; TTA chr11 5251742 5251763 5251759 5251764 +
caagcctaaagtacgttgaaga

SEQ ID NO: 88987 - DNA, 22 bp, Artificial Sequence
  Synthetic oligonucleotide; CTA chr11 5251750 5251771 5251767 5251772 +
aagtacgttgaagaaaaaatag

SEQ ID NO: 88988 - DNA, 22 bp, Artificial Sequence
  Synthetic oligonucleotide; TTG chr11 5251760 5251781 5251777 5251782 +
aagaaaaaatagaattcaaagt

SEQ ID NO: 88989 - DNA, 22 bp, Artificial Sequence
  Synthetic oligonucleotide; TTC chr11 5251777 5251798 5251794 5251799 +
aaagttagacagaagggctcag

SEQ ID NO: 88990 - DNA, 22 bp, Artificial Sequence
  Synthetic oligonucleotide; TTA chr11 5251784 5251805 5251801 5251806 +
gacagaagggctcaggcttact

SEQ ID NO: 88991 - DNA, 22 bp, Artificial Sequence
  Synthetic oligonucleotide; CTC chr11 5251797 5251818 5251814 5251819 +
aggcttactatttgcatcttac

SEQ ID NO: 88992 - DNA, 22 bp, Artificial Sequence
  Synthetic oligonucleotide; CTT chr11 5251803 5251824 5251820 5251825 +
actatttgcatcttacagatga

SEQ ID NO: 88993 - DNA, 22 bp, Artificial Sequence
  Synthetic oligonucleotide; TTA chr11 5251804 5251825 5251821 5251826 +
ctatttgcatcttacagatgag

SEQ ID NO: 88994 - DNA, 22 bp, Artificial Sequence
  Synthetic oligonucleotide; CTA chr11 5251807 5251828 5251824 5251829 +
tttgcatcttacagatgagagt

SEQ ID NO: 88995 - DNA, 22 bp, Artificial Sequence
  Synthetic oligonucleotide; TTT chr11 5251810 5251831 5251827 5251832 +
gcatcttacagatgagagtagt

SEQ ID NO: 88996 - DNA, 22 bp, Artificial Sequence
  Synthetic oligonucleotide; TTG chr11 5251811 5251832 5251828 5251833 +
catcttacagatgagagtagta

SEQ ID NO: 88997 - DNA, 22 bp, Artificial Sequence
  Synthetic oligonucleotide; CTT chr11 5251817 5251838 5251834 5251839 +
acagatgagagtagtagagttg

SEQ ID NO: 88998 - DNA, 22 bp, Artificial Sequence
  Synthetic oligonucleotide; TTA chr11 5251818 5251839 5251835 5251840 +
cagatgagagtagtagagttgg

SEQ ID NO: 88999 - DNA, 22 bp, Artificial Sequence
  Synthetic oligonucleotide; TTG chr11 5251839 5251860 5251856 5251861 +
gtattttattctgaaacacaga

SEQ ID NO: 89000 - DNA, 22 bp, Artificial Sequence
  Synthetic oligonucleotide; TTT chr11 5251845 5251866 5251862 5251867 +
tattctgaaacacagaggacaa

SEQ ID NO: 89001 - DNA, 22 bp, Artificial Sequence
  Synthetic oligonucleotide; TTT chr11 5251846 5251867 5251863 5251868 +
attctgaaacacagaggacaag

SEQ ID NO: 89002 - DNA, 22 bp, Artificial Sequence
  Synthetic oligonucleotide; TTA chr11 5251847 5251868 5251864 5251869 +
ttctgaaacacagaggacaagt

SEQ ID NO: 89003 - DNA, 22 bp, Artificial Sequence
  Synthetic oligonucleotide; TTC chr11 5251850 5251871 5251867 5251872 +
tgaaacacagaggacaagtgga

SEQ ID NO: 89004 - DNA, 22 bp, Artificial Sequence
  Synthetic oligonucleotide; CTG chr11 5251852 5251873 5251869 5251874 +
aaacacagaggacaagtggaga

SEQ ID NO: 89005 - DNA, 22 bp, Artificial Sequence
  Synthetic oligonucleotide; TTT chr11 5251877 5251898 5251894 5251899 +
gtaaacctgagataaacatggt

SEQ ID NO: 89006 - DNA, 22 bp, Artificial Sequence
  Synthetic oligonucleotide; TTG chr11 5251878 5251899 5251895 5251900 +
taaacctgagataaacatggtt

SEQ ID NO: 89007 - DNA, 22 bp, Artificial Sequence
  Synthetic oligonucleotide; CTG chr11 5251886 5251907 5251903 5251908 +
agataaacatggtttctaatcc

SEQ ID NO: 89008 - DNA, 22 bp, Artificial Sequence
  Synthetic oligonucleotide; TTT chr11 5251901 5251922 5251918 5251923 +
ctaatccactgaacaccgaagc

SEQ ID NO: 89009 - DNA, 22 bp, Artificial Sequence
  Synthetic oligonucleotide; TTC chr11 5251902 5251923 5251919 5251924 +
taatccactgaacaccgaagct

SEQ ID NO: 89010 - DNA, 22 bp, Artificial Sequence
  Synthetic oligonucleotide; CTA chr11 5251904 5251925 5251921 5251926 +
atccactgaacaccgaagctta

SEQ ID NO: 89011 - DNA, 22 bp, Artificial Sequence
  Synthetic oligonucleotide; CTG chr11 5251912 5251933 5251929 5251934 +
aacaccgaagcttatttttttc

SEQ ID NO: 89012 - DNA, 22 bp, Artificial Sequence
  Synthetic oligonucleotide; CTT chr11 5251925 5251946 5251942 5251947 +
atttttttctctttcttcatct

SEQ ID NO: 89013 - DNA, 22 bp, Artificial Sequence
  Synthetic oligonucleotide; TTA chr11 5251926 5251947 5251943 5251948 +
tttttttctctttcttcatctg

SEQ ID NO: 89014 - DNA, 22 bp, Artificial Sequence
  Synthetic oligonucleotide; TTT chr11 5251929 5251950 5251946 5251951 +
ttttctctttcttcatctgcct

SEQ ID NO: 89015 - DNA, 22 bp, Artificial Sequence
  Synthetic oligonucleotide; TTT chr11 5251930 5251951 5251947 5251952 +
tttctctttcttcatctgcctt

SEQ ID NO: 89016 - DNA, 22 bp, Artificial Sequence
  Synthetic oligonucleotide; TTT chr11 5251931 5251952 5251948 5251953 +
ttctctttcttcatctgcctta

SEQ ID NO: 89017 - DNA, 22 bp, Artificial Sequence
  Synthetic oligonucleotide; TTT chr11 5251932 5251953 5251949 5251954 +
tctctttcttcatctgccttac

SEQ ID NO: 89018 - DNA, 22 bp, Artificial Sequence
  Synthetic oligonucleotide; TTT chr11 5251933 5251954 5251950 5251955 +
ctctttcttcatctgccttact

SEQ ID NO: 89019 - DNA, 22 bp, Artificial Sequence
  Synthetic oligonucleotide; TTC chr11 5251934 5251955 5251951 5251956 +
tctttcttcatctgccttactt

SEQ ID NO: 89020 - DNA, 22 bp, Artificial Sequence
  Synthetic oligonucleotide; CTC chr11 5251936 5251957 5251953 5251958 +
tttcttcatctgccttacttag

SEQ ID NO: 89021 - DNA, 22 bp, Artificial Sequence
  Synthetic oligonucleotide; CTT chr11 5251938 5251959 5251955 5251960 +
tcttcatctgccttacttagtg

SEQ ID NO: 89022 - DNA, 22 bp, Artificial Sequence
  Synthetic oligonucleotide; TTT chr11 5251939 5251960 5251956 5251961 +
cttcatctgccttacttagtgc

SEQ ID NO: 89023 - DNA, 22 bp, Artificial Sequence
  Synthetic oligonucleotide; TTC chr11 5251940 5251961 5251957 5251962 +
ttcatctgccttacttagtgca

SEQ ID NO: 89024 - DNA, 22 bp, Artificial Sequence
  Synthetic oligonucleotide; CTT chr11 5251942 5251963 5251959 5251964 +
catctgccttacttagtgcaag

SEQ ID NO: 89025 - DNA, 22 bp, Artificial Sequence
  Synthetic oligonucleotide; TTC chr11 5251943 5251964 5251960 5251965 +
atctgccttacttagtgcaagg

SEQ ID NO: 89026 - DNA, 22 bp, Artificial Sequence
  Synthetic oligonucleotide; CTG chr11 5251948 5251969 5251965 5251970 +
ccttacttagtgcaaggtgcta

SEQ ID NO: 89027 - DNA, 22 bp, Artificial Sequence
  Synthetic oligonucleotide; CTT chr11 5251952 5251973 5251969 5251974 +
acttagtgcaaggtgctataac

SEQ ID NO: 89028 - DNA, 22 bp, Artificial Sequence
  Synthetic oligonucleotide; TTA chr11 5251953 5251974 5251970 5251975 +
cttagtgcaaggtgctataaca

SEQ ID NO: 89029 - DNA, 22 bp, Artificial Sequence
  Synthetic oligonucleotide; CTT chr11 5251956 5251977 5251973 5251978 +
agtgcaaggtgctataacaaaa

SEQ ID NO: 89030 - DNA, 22 bp, Artificial Sequence
  Synthetic oligonucleotide; TTA chr11 5251957 5251978 5251974 5251979 +
gtgcaaggtgctataacaaaat

SEQ ID NO: 89031 - DNA, 22 bp, Artificial Sequence
  Synthetic oligonucleotide; CTA chr11 5251970 5251991 5251987 5251992 +
taacaaaatagcatagactggg

SEQ ID NO: 89032 - DNA, 22 bp, Artificial Sequence
  Synthetic oligonucleotide; CTG chr11 5251990 5252011 5252007 5252012 +
ggtgacttcaacaacaggattt

SEQ ID NO: 89033 - DNA, 22 bp, Artificial Sequence
  Synthetic oligonucleotide; CTT chr11 5251998 5252019 5252015 5252020 +
caacaacaggattttttctcac

SEQ ID NO: 89034 - DNA, 22 bp, Artificial Sequence
  Synthetic oligonucleotide; TTC chr11 5251999 5252020 5252016 5252021 +
aacaacaggattttttctcact

SEQ ID NO: 89035 - DNA, 22 bp, Artificial Sequence
  Synthetic oligonucleotide; TTT chr11 5252012 5252033 5252029 5252034 +
tttctcacttttctgctggttc

SEQ ID NO: 89036 - DNA, 22 bp, Artificial Sequence
  Synthetic oligonucleotide; TTT chr11 5252013 5252034 5252030 5252035 +
ttctcacttttctgctggttcc

SEQ ID NO: 89037 - DNA, 22 bp, Artificial Sequence
  Synthetic oligonucleotide; TTT chr11 5252014 5252035 5252031 5252036 +
tctcacttttctgctggttcct

SEQ ID NO: 89038 - DNA, 22 bp, Artificial Sequence
  Synthetic oligonucleotide; TTT chr11 5252015 5252036 5252032 5252037 +
ctcacttttctgctggttcctg

SEQ ID NO: 89039 - DNA, 22 bp, Artificial Sequence
  Synthetic oligonucleotide; TTC chr11 5252016 5252037 5252033 5252038 +
tcacttttctgctggttcctgg

SEQ ID NO: 89040 - DNA, 22 bp, Artificial Sequence
  Synthetic oligonucleotide; CTC chr11 5252018 5252039 5252035 5252040 +
acttttctgctggttcctggtc

SEQ ID NO: 89041 - DNA, 22 bp, Artificial Sequence
  Synthetic oligonucleotide; CTT chr11 5252022 5252043 5252039 5252044 +
ttctgctggttcctggtcaggg

SEQ ID NO: 89042 - DNA, 22 bp, Artificial Sequence
  Synthetic oligonucleotide; TTT chr11 5252023 5252044 5252040 5252045 +
tctgctggttcctggtcagggc

SEQ ID NO: 89043 - DNA, 22 bp, Artificial Sequence
  Synthetic oligonucleotide; TTT chr11 5252024 5252045 5252041 5252046 +
ctgctggttcctggtcagggct

SEQ ID NO: 89044 - DNA, 22 bp, Artificial Sequence
  Synthetic oligonucleotide; TTC chr11 5252025 5252046 5252042 5252047 +
tgctggttcctggtcagggctc

SEQ ID NO: 89045 - DNA, 22 bp, Artificial Sequence
  Synthetic oligonucleotide; CTG chr11 5252027 5252048 5252044 5252049 +
ctggttcctggtcagggctctc

SEQ ID NO: 89046 - DNA, 22 bp, Artificial Sequence
  Synthetic oligonucleotide; CTG chr11 5252030 5252051 5252047 5252052 +
gttcctggtcagggctctcttc

SEQ ID NO: 89047 - DNA, 22 bp, Artificial Sequence
  Synthetic oligonucleotide; TTC chr11 5252034 5252055 5252051 5252056 +
ctggtcagggctctcttcctgg

SEQ ID NO: 89048 - DNA, 22 bp, Artificial Sequence
  Synthetic oligonucleotide; CTG chr11 5252037 5252058 5252054 5252059 +
gtcagggctctcttcctgggtt

SEQ ID NO: 89049 - DNA, 22 bp, Artificial Sequence
  Synthetic oligonucleotide; CTC chr11 5252047 5252068 5252064 5252069 +
tcttcctgggttgcaggtggct

SEQ ID NO: 89050 - DNA, 22 bp, Artificial Sequence
  Synthetic oligonucleotide; CTC chr11 5252049 5252070 5252066 5252071 +
ttcctgggttgcaggtggctga

SEQ ID NO: 89051 - DNA, 22 bp, Artificial Sequence
  Synthetic oligonucleotide; CTT chr11 5252051 5252072 5252068 5252073 +
cctgggttgcaggtggctgact

SEQ ID NO: 89052 - DNA, 22 bp, Artificial Sequence
  Synthetic oligonucleotide; TTC chr11 5252052 5252073 5252069 5252074 +
ctgggttgcaggtggctgactt

SEQ ID NO: 89053 - DNA, 22 bp, Artificial Sequence
  Synthetic oligonucleotide; CTG chr11 5252055 5252076 5252072 5252077 +
ggttgcaggtggctgacttccc

SEQ ID NO: 89054 - DNA, 22 bp, Artificial Sequence
  Synthetic oligonucleotide; TTG chr11 5252060 5252081 5252077 5252082 +
caggtggctgacttcccactgt

SEQ ID NO: 89055 - DNA, 22 bp, Artificial Sequence
  Synthetic oligonucleotide; CTG chr11 5252070 5252091 5252087 5252092 +
acttcccactgtgtcctcacca

SEQ ID NO: 89056 - DNA, 22 bp, Artificial Sequence
  Synthetic oligonucleotide; CTT chr11 5252074 5252095 5252091 5252096 +
cccactgtgtcctcaccagaag

SEQ ID NO: 89057 - DNA, 22 bp, Artificial Sequence
  Synthetic oligonucleotide; TTC chr11 5252075 5252096 5252092 5252097 +
ccactgtgtcctcaccagaagg

SEQ ID NO: 89058 - DNA, 22 bp, Artificial Sequence
  Synthetic oligonucleotide; CTG chr11 5252081 5252102 5252098 5252103 +
tgtcctcaccagaaggaagaga

SEQ ID NO: 89059 - DNA, 22 bp, Artificial Sequence
  Synthetic oligonucleotide; CTC chr11 5252088 5252109 5252105 5252110 +
accagaaggaagagaaatggct

SEQ ID NO: 89060 - DNA, 22 bp, Artificial Sequence
  Synthetic oligonucleotide; CTA chr11 5252111 5252132 5252128 5252133 +
atctctctgcttctgatgagga

SEQ ID NO: 89061 - DNA, 22 bp, Artificial Sequence
  Synthetic oligonucleotide; CTC chr11 5252116 5252137 5252133 5252138 +
tctgcttctgatgaggaaaata

SEQ ID NO: 89062 - DNA, 22 bp, Artificial Sequence
  Synthetic oligonucleotide; CTC chr11 5252118 5252139 5252135 5252140 +
tgcttctgatgaggaaaataat

SEQ ID NO: 89063 - DNA, 22 bp, Artificial Sequence
  Synthetic oligonucleotide; CTG chr11 5252120 5252141 5252137 5252142 +
cttctgatgaggaaaataattc

SEQ ID NO: 89064 - DNA, 22 bp, Artificial Sequence
  Synthetic oligonucleotide; CTT chr11 5252123 5252144 5252140 5252145 +
ctgatgaggaaaataattctat

SEQ ID NO: 89065 - DNA, 22 bp, Artificial Sequence
  Synthetic oligonucleotide; TTC chr11 5252124 5252145 5252141 5252146 +
tgatgaggaaaataattctatg

SEQ ID NO: 89066 - DNA, 22 bp, Artificial Sequence
  Synthetic oligonucleotide; CTG chr11 5252126 5252147 5252143 5252148 +
atgaggaaaataattctatgat

SEQ ID NO: 89067 - DNA, 22 bp, Artificial Sequence
  Synthetic oligonucleotide; TTC chr11 5252142 5252163 5252159 5252164 +
tatgatggggatctgctctcat

SEQ ID NO: 89068 - DNA, 22 bp, Artificial Sequence
  Synthetic oligonucleotide; CTA chr11 5252144 5252165 5252161 5252166 +
tgatggggatctgctctcatga

SEQ ID NO: 89069 - DNA, 22 bp, Artificial Sequence
  Synthetic oligonucleotide; CTG chr11 5252157 5252178 5252174 5252179 +
ctctcatgagctcctctaaacc

SEQ ID NO: 89070 - DNA, 22 bp, Artificial Sequence
  Synthetic oligonucleotide; CTC chr11 5252160 5252181 5252177 5252182 +
tcatgagctcctctaaacctga

SEQ ID NO: 89071 - DNA, 22 bp, Artificial Sequence
  Synthetic oligonucleotide; CTC chr11 5252162 5252183 5252179 5252184 +
atgagctcctctaaacctgatt

SEQ ID NO: 89072 - DNA, 22 bp, Artificial Sequence
  Synthetic oligonucleotide; CTC chr11 5252170 5252191 5252187 5252192 +
ctctaaacctgattacttttcc

SEQ ID NO: 89073 - DNA, 22 bp, Artificial Sequence
  Synthetic oligonucleotide; CTC chr11 5252173 5252194 5252190 5252195 +
taaacctgattacttttccaaa

SEQ ID NO: 89074 - DNA, 22 bp, Artificial Sequence
  Synthetic oligonucleotide; CTA chr11 5252175 5252196 5252192 5252197 +
aacctgattacttttccaaagc

SEQ ID NO: 89075 - DNA, 22 bp, Artificial Sequence
  Synthetic oligonucleotide; CTG chr11 5252181 5252202 5252198 5252203 +
attacttttccaaagcctcccc

SEQ ID NO: 89076 - DNA, 22 bp, Artificial Sequence
  Synthetic oligonucleotide; TTA chr11 5252185 5252206 5252202 5252207 +
cttttccaaagcctcccccaca

SEQ ID NO: 89077 - DNA, 22 bp, Artificial Sequence
  Synthetic oligonucleotide; CTT chr11 5252188 5252209 5252205 5252210 +
ttccaaagcctcccccacaaat

SEQ ID NO: 89078 - DNA, 22 bp, Artificial Sequence
  Synthetic oligonucleotide; TTT chr11 5252189 5252210 5252206 5252211 +
tccaaagcctcccccacaaatg

SEQ ID NO: 89079 - DNA, 22 bp, Artificial Sequence
  Synthetic oligonucleotide; TTT chr11 5252190 5252211 5252207 5252212 +
ccaaagcctcccccacaaatgg

SEQ ID NO: 89080 - DNA, 22 bp, Artificial Sequence
  Synthetic oligonucleotide; TTC chr11 5252191 5252212 5252208 5252213 +
caaagcctcccccacaaatgga

SEQ ID NO: 89081 - DNA, 22 bp, Artificial Sequence
  Synthetic oligonucleotide; CTC chr11 5252200 5252221 5252217 5252222 +
ccccacaaatggagccaattgg

SEQ ID NO: 89082 - DNA, 22 bp, Artificial Sequence
  Synthetic oligonucleotide; TTG chr11 5252221 5252242 5252238 5252243 +
ggagttggggattcagcatgtg

SEQ ID NO: 89083 - DNA, 22 bp, Artificial Sequence
  Synthetic oligonucleotide; TTG chr11 5252228 5252249 5252245 5252250 +
gggattcagcatgtgaattttc

SEQ ID NO: 89084 - DNA, 22 bp, Artificial Sequence
  Synthetic oligonucleotide; TTC chr11 5252235 5252256 5252252 5252257 +
agcatgtgaattttctggagac

SEQ ID NO: 89085 - DNA, 22 bp, Artificial Sequence
  Synthetic oligonucleotide; TTT chr11 5252248 5252269 5252265 5252270 +
tctggagacacaagcgttaagt

SEQ ID NO: 89086 - DNA, 22 bp, Artificial Sequence
  Synthetic oligonucleotide; TTT chr11 5252249 5252270 5252266 5252271 +
ctggagacacaagcgttaagtt

SEQ ID NO: 89087 - DNA, 22 bp, Artificial Sequence
  Synthetic oligonucleotide; TTC chr11 5252250 5252271 5252267 5252272 +
tggagacacaagcgttaagttc

SEQ ID NO: 89088 - DNA, 22 bp, Artificial Sequence
  Synthetic oligonucleotide; CTG chr11 5252252 5252273 5252269 5252274 +
gagacacaagcgttaagttcat

SEQ ID NO: 89089 - DNA, 22 bp, Artificial Sequence
  Synthetic oligonucleotide; TTA chr11 5252267 5252288 5252284 5252289 +
agttcataacaccatcacatta

SEQ ID NO: 89090 - DNA, 22 bp, Artificial Sequence
  Synthetic oligonucleotide; TTC chr11 5252272 5252293 5252289 5252294 +
ataacaccatcacattaaacta

SEQ ID NO: 89091 - DNA, 22 bp, Artificial Sequence
  Synthetic oligonucleotide; TTA chr11 5252289 5252310 5252306 5252311 +
aactaaactcttgcttattaac

SEQ ID NO: 89092 - DNA, 22 bp, Artificial Sequence
  Synthetic oligonucleotide; CTA chr11 5252294 5252315 5252311 5252316 +
aactcttgcttattaacgtgca

SEQ ID NO: 89093 - DNA, 22 bp, Artificial Sequence
  Synthetic oligonucleotide; CTC chr11 5252299 5252320 5252316 5252321 +
ttgcttattaacgtgcattaac

SEQ ID NO: 89094 - DNA, 22 bp, Artificial Sequence
  Synthetic oligonucleotide; CTT chr11 5252301 5252322 5252318 5252323 +
gcttattaacgtgcattaactt

SEQ ID NO: 89095 - DNA, 22 bp, Artificial Sequence
  Synthetic oligonucleotide; TTG chr11 5252302 5252323 5252319 5252324 +
cttattaacgtgcattaacttt

SEQ ID NO: 89096 - DNA, 22 bp, Artificial Sequence
  Synthetic oligonucleotide; CTT chr11 5252305 5252326 5252322 5252327 +
attaacgtgcattaactttcaa

SEQ ID NO: 89097 - DNA, 22 bp, Artificial Sequence
  Synthetic oligonucleotide; TTA chr11 5252306 5252327 5252323 5252328 +
ttaacgtgcattaactttcaat

SEQ ID NO: 89098 - DNA, 22 bp, Artificial Sequence
  Synthetic oligonucleotide; TTA chr11 5252309 5252330 5252326 5252331 +
acgtgcattaactttcaattat

SEQ ID NO: 89099 - DNA, 22 bp, Artificial Sequence
  Synthetic oligonucleotide; TTA chr11 5252319 5252340 5252336 5252341 +
actttcaattatataagaactc

SEQ ID NO: 89100 - DNA, 22 bp, Artificial Sequence
  Synthetic oligonucleotide; CTT chr11 5252323 5252344 5252340 5252345 +
tcaattatataagaactccagt

SEQ ID NO: 89101 - DNA, 22 bp, Artificial Sequence
  Synthetic oligonucleotide; TTT chr11 5252324 5252345 5252341 5252346 +
caattatataagaactccagtg

SEQ ID NO: 89102 - DNA, 22 bp, Artificial Sequence
  Synthetic oligonucleotide; TTC chr11 5252325 5252346 5252342 5252347 +
aattatataagaactccagtga

SEQ ID NO: 89103 - DNA, 22 bp, Artificial Sequence
  Synthetic oligonucleotide; TTA chr11 5252330 5252351 5252347 5252352 +
tataagaactccagtgaatctg

SEQ ID NO: 89104 - DNA, 22 bp, Artificial Sequence
  Synthetic oligonucleotide; CTC chr11 5252341 5252362 5252358 5252363 +
cagtgaatctgccttctcaatt

SEQ ID NO: 89105 - DNA, 22 bp, Artificial Sequence
  Synthetic oligonucleotide; CTG chr11 5252352 5252373 5252369 5252374 +
ccttctcaattaatgttataca

SEQ ID NO: 89106 - DNA, 22 bp, Artificial Sequence
  Synthetic oligonucleotide; CTT chr11 5252356 5252377 5252373 5252378 +
ctcaattaatgttatacaaatt

SEQ ID NO: 89107 - DNA, 22 bp, Artificial Sequence
  Synthetic oligonucleotide; TTC chr11 5252357 5252378 5252374 5252379 +
tcaattaatgttatacaaattc

SEQ ID NO: 89108 - DNA, 22 bp, Artificial Sequence
  Synthetic oligonucleotide; CTC chr11 5252359 5252380 5252376 5252381 +
aattaatgttatacaaattctt

SEQ ID NO: 89109 - DNA, 22 bp, Artificial Sequence
  Synthetic oligonucleotide; TTA chr11 5252364 5252385 5252381 5252386 +
atgttatacaaattcttcacac

SEQ ID NO: 89110 - DNA, 22 bp, Artificial Sequence
  Synthetic oligonucleotide; TTA chr11 5252370 5252391 5252387 5252392 +
tacaaattcttcacactatatt

SEQ ID NO: 89111 - DNA, 22 bp, Artificial Sequence
  Synthetic oligonucleotide; TTC chr11 5252379 5252400 5252396 5252401 +
ttcacactatattttcatctga

SEQ ID NO: 89112 - DNA, 22 bp, Artificial Sequence
  Synthetic oligonucleotide; CTT chr11 5252381 5252402 5252398 5252403 +
cacactatattttcatctgacc

SEQ ID NO: 89113 - DNA, 22 bp, Artificial Sequence
  Synthetic oligonucleotide; TTC chr11 5252382 5252403 5252399 5252404 +
acactatattttcatctgaccg

SEQ ID NO: 89114 - DNA, 22 bp, Artificial Sequence
  Synthetic oligonucleotide; CTA chr11 5252388 5252409 5252405 5252410 +
tattttcatctgaccgtgctgt

SEQ ID NO: 89115 - DNA, 22 bp, Artificial Sequence
  Synthetic oligonucleotide; TTT chr11 5252393 5252414 5252410 5252415 +
tcatctgaccgtgctgttctgc

SEQ ID NO: 89116 - DNA, 22 bp, Artificial Sequence
  Synthetic oligonucleotide; TTT chr11 5252394 5252415 5252411 5252416 +
catctgaccgtgctgttctgct

SEQ ID NO: 89117 - DNA, 22 bp, Artificial Sequence
  Synthetic oligonucleotide; TTC chr11 5252395 5252416 5252412 5252417 +
atctgaccgtgctgttctgctg

SEQ ID NO: 89118 - DNA, 22 bp, Artificial Sequence
  Synthetic oligonucleotide; CTG chr11 5252400 5252421 5252417 5252422 +
accgtgctgttctgctgctgag

SEQ ID NO: 89119 - DNA, 22 bp, Artificial Sequence
  Synthetic oligonucleotide; CTG chr11 5252409 5252430 5252426 5252431 +
ttctgctgctgagacatgacac

SEQ ID NO: 89120 - DNA, 22 bp, Artificial Sequence
  Synthetic oligonucleotide; TTC chr11 5252412 5252433 5252429 5252434 +
tgctgctgagacatgacacgct

SEQ ID NO: 89121 - DNA, 22 bp, Artificial Sequence
  Synthetic oligonucleotide; CTG chr11 5252414 5252435 5252431 5252436 +
ctgctgagacatgacacgctga

SEQ ID NO: 89122 - DNA, 22 bp, Artificial Sequence
  Synthetic oligonucleotide; CTG chr11 5252417 5252438 5252434 5252439 +
ctgagacatgacacgctgatgc

SEQ ID NO: 89123 - DNA, 22 bp, Artificial Sequence
  Synthetic oligonucleotide; CTG chr11 5252420 5252441 5252437 5252442 +
agacatgacacgctgatgctga

SEQ ID NO: 89124 - DNA, 22 bp, Artificial Sequence
  Synthetic oligonucleotide; CTG chr11 5252435 5252456 5252452 5252457 +
atgctgacttgtgagcttctgc

SEQ ID NO: 89125 - DNA, 22 bp, Artificial Sequence
  Synthetic oligonucleotide; CTG chr11 5252441 5252462 5252458 5252463 +
acttgtgagcttctgctggctc

SEQ ID NO: 89126 - DNA, 22 bp, Artificial Sequence
  Synthetic oligonucleotide; CTT chr11 5252445 5252466 5252462 5252467 +
gtgagcttctgctggctcattt

SEQ ID NO: 89127 - DNA, 22 bp, Artificial Sequence
  Synthetic oligonucleotide; TTG chr11 5252446 5252467 5252463 5252468 +
tgagcttctgctggctcatttc

SEQ ID NO: 89128 - DNA, 22 bp, Artificial Sequence
  Synthetic oligonucleotide; CTT chr11 5252453 5252474 5252470 5252475 +
ctgctggctcatttccttcacc

SEQ ID NO: 89129 - DNA, 22 bp, Artificial Sequence
  Synthetic oligonucleotide; TTC chr11 5252454 5252475 5252471 5252476 +
tgctggctcatttccttcacct

SEQ ID NO: 89130 - DNA, 22 bp, Artificial Sequence
  Synthetic oligonucleotide; CTG chr11 5252456 5252477 5252473 5252478 +
ctggctcatttccttcacctaa

SEQ ID NO: 89131 - DNA, 22 bp, Artificial Sequence
  Synthetic oligonucleotide; CTG chr11 5252459 5252480 5252476 5252481 +
gctcatttccttcacctaagtc

SEQ ID NO: 89132 - DNA, 22 bp, Artificial Sequence
  Synthetic oligonucleotide; CTC chr11 5252463 5252484 5252480 5252485 +
atttccttcacctaagtcccca

SEQ ID NO: 89133 - DNA, 22 bp, Artificial Sequence
  Synthetic oligonucleotide; TTT chr11 5252467 5252488 5252484 5252489 +
ccttcacctaagtccccacctc

SEQ ID NO: 89134 - DNA, 22 bp, Artificial Sequence
  Synthetic oligonucleotide; TTC chr11 5252468 5252489 5252485 5252490 +
cttcacctaagtccccacctcc

SEQ ID NO: 89135 - DNA, 22 bp, Artificial Sequence
  Synthetic oligonucleotide; CTT chr11 5252471 5252492 5252488 5252493 +
cacctaagtccccacctcccta

SEQ ID NO: 89136 - DNA, 22 bp, Artificial Sequence
  Synthetic oligonucleotide; TTC chr11 5252472 5252493 5252489 5252494 +
acctaagtccccacctccctag

SEQ ID NO: 89137 - DNA, 22 bp, Artificial Sequence
  Synthetic oligonucleotide; CTA chr11 5252477 5252498 5252494 5252499 +
agtccccacctccctagaagct

SEQ ID NO: 89138 - DNA, 22 bp, Artificial Sequence
  Synthetic oligonucleotide; CTC chr11 5252489 5252510 5252506 5252511 +
cctagaagcttacaatgaggtc

SEQ ID NO: 89139 - DNA, 22 bp, Artificial Sequence
  Synthetic oligonucleotide; CTA chr11 5252493 5252514 5252510 5252515 +
gaagcttacaatgaggtctcct

SEQ ID NO: 89140 - DNA, 22 bp, Artificial Sequence
  Synthetic oligonucleotide; CTT chr11 5252500 5252521 5252517 5252522 +
acaatgaggtctcctccttgaa

SEQ ID NO: 89141 - DNA, 22 bp, Artificial Sequence
  Synthetic oligonucleotide; TTA chr11 5252501 5252522 5252518 5252523 +
caatgaggtctcctccttgaaa

SEQ ID NO: 89142 - DNA, 22 bp, Artificial Sequence
  Synthetic oligonucleotide; CTC chr11 5252513 5252534 5252530 5252535 +
ctccttgaaatgctgtgaccag

SEQ ID NO: 89143 - DNA, 22 bp, Artificial Sequence
  Synthetic oligonucleotide; CTC chr11 5252516 5252537 5252533 5252538 +
cttgaaatgctgtgaccagtct

SEQ ID NO: 89144 - DNA, 22 bp, Artificial Sequence
  Synthetic oligonucleotide; CTT chr11 5252519 5252540 5252536 5252541 +
gaaatgctgtgaccagtctgta

SEQ ID NO: 89145 - DNA, 22 bp, Artificial Sequence
  Synthetic oligonucleotide; TTG chr11 5252520 5252541 5252537 5252542 +
aaatgctgtgaccagtctgtag

SEQ ID NO: 89146 - DNA, 22 bp, Artificial Sequence
  Synthetic oligonucleotide; CTG chr11 5252528 5252549 5252545 5252550 +
tgaccagtctgtagacttaagg

SEQ ID NO: 89147 - DNA, 22 bp, Artificial Sequence
  Synthetic oligonucleotide; CTG chr11 5252539 5252560 5252556 5252561 +
tagacttaagggtatgggatta

SEQ ID NO: 89148 - DNA, 22 bp, Artificial Sequence
  Synthetic oligonucleotide; CTT chr11 5252546 5252567 5252563 5252568 +
aagggtatgggattaatttcac

SEQ ID NO: 89149 - DNA, 22 bp, Artificial Sequence
  Synthetic oligonucleotide; TTA chr11 5252547 5252568 5252564 5252569 +
agggtatgggattaatttcacc

SEQ ID NO: 89150 - DNA, 22 bp, Artificial Sequence
  Synthetic oligonucleotide; TTA chr11 5252561 5252582 5252578 5252583 +
atttcacctctttaggcatgcg

SEQ ID NO: 89151 - DNA, 22 bp, Artificial Sequence
  Synthetic oligonucleotide; TTT chr11 5252565 5252586 5252582 5252587 +
cacctctttaggcatgcgtcaa

SEQ ID NO: 89152 - DNA, 22 bp, Artificial Sequence
  Synthetic oligonucleotide; TTC chr11 5252566 5252587 5252583 5252588 +
acctctttaggcatgcgtcaac

SEQ ID NO: 89153 - DNA, 22 bp, Artificial Sequence
  Synthetic oligonucleotide; CTC chr11 5252571 5252592 5252588 5252593 +
tttaggcatgcgtcaacactta

SEQ ID NO: 89154 - DNA, 22 bp, Artificial Sequence
  Synthetic oligonucleotide; CTT chr11 5252573 5252594 5252590 5252595 +
taggcatgcgtcaacacttaaa

SEQ ID NO: 89155 - DNA, 22 bp, Artificial Sequence
  Synthetic oligonucleotide; TTT chr11 5252574 5252595 5252591 5252596 +
aggcatgcgtcaacacttaaaa

SEQ ID NO: 89156 - DNA, 22 bp, Artificial Sequence
  Synthetic oligonucleotide; TTA chr11 5252575 5252596 5252592 5252597 +
ggcatgcgtcaacacttaaaat

SEQ ID NO: 89157 - DNA, 22 bp, Artificial Sequence
  Synthetic oligonucleotide; CTT chr11 5252592 5252613 5252609 5252614 +
aaaatgaaaagttccttagtaa

SEQ ID NO: 89158 - DNA, 22 bp, Artificial Sequence
  Synthetic oligonucleotide; TTA chr11 5252593 5252614 5252610 5252615 +
aaatgaaaagttccttagtaaa

SEQ ID NO: 89159 - DNA, 22 bp, Artificial Sequence
  Synthetic oligonucleotide; TTC chr11 5252606 5252627 5252623 5252628 +
cttagtaaagtaaggatcactt

SEQ ID NO: 89160 - DNA, 22 bp, Artificial Sequence
  Synthetic oligonucleotide; CTT chr11 5252609 5252630 5252626 5252631 +
agtaaagtaaggatcacttcat

SEQ ID NO: 89161 - DNA, 22 bp, Artificial Sequence
  Synthetic oligonucleotide; TTA chr11 5252610 5252631 5252627 5252632 +
gtaaagtaaggatcacttcatt

SEQ ID NO: 89162 - DNA, 22 bp, Artificial Sequence
  Synthetic oligonucleotide; CTT chr11 5252628 5252649 5252645 5252650 +
cattgtagttaccgtggaaaga

SEQ ID NO: 89163 - DNA, 22 bp, Artificial Sequence
  Synthetic oligonucleotide; TTC chr11 5252629 5252650 5252646 5252651 +
attgtagttaccgtggaaagaa

SEQ ID NO: 89164 - DNA, 22 bp, Artificial Sequence
  Synthetic oligonucleotide; TTG chr11 5252633 5252654 5252650 5252655 +
tagttaccgtggaaagaaaaac

SEQ ID NO: 89165 - DNA, 22 bp, Artificial Sequence
  Synthetic oligonucleotide; TTA chr11 5252639 5252660 5252656 5252661 +
ccgtggaaagaaaaacctgttt

SEQ ID NO: 89166 - DNA, 22 bp, Artificial Sequence
  Synthetic oligonucleotide; CTG chr11 5252658 5252679 5252675 5252680 +
tttcctgctctgatctctaaca

SEQ ID NO: 89167 - DNA, 22 bp, Artificial Sequence
  Synthetic oligonucleotide; TTT chr11 5252661 5252682 5252678 5252683 +
cctgctctgatctctaacacct

SEQ ID NO: 89168 - DNA, 22 bp, Artificial Sequence
  Synthetic oligonucleotide; TTC chr11 5252662 5252683 5252679 5252684 +
ctgctctgatctctaacacctc

SEQ ID NO: 89169 - DNA, 22 bp, Artificial Sequence
  Synthetic oligonucleotide; CTG chr11 5252665 5252686 5252682 5252687 +
ctctgatctctaacacctcaac

SEQ ID NO: 89170 - DNA, 22 bp, Artificial Sequence
  Synthetic oligonucleotide; CTC chr11 5252668 5252689 5252685 5252690 +
tgatctctaacacctcaacctc

SEQ ID NO: 89171 - DNA, 22 bp, Artificial Sequence
  Synthetic oligonucleotide; CTG chr11 5252670 5252691 5252687 5252692 +
atctctaacacctcaacctccc

SEQ ID NO: 89172 - DNA, 22 bp, Artificial Sequence
  Synthetic oligonucleotide; CTC chr11 5252675 5252696 5252692 5252697 +
taacacctcaacctccctgtag

SEQ ID NO: 89173 - DNA, 22 bp, Artificial Sequence
  Synthetic oligonucleotide; CTA chr11 5252677 5252698 5252694 5252699 +
acacctcaacctccctgtagag

SEQ ID NO: 89174 - DNA, 22 bp, Artificial Sequence
  Synthetic oligonucleotide; CTC chr11 5252684 5252705 5252701 5252706 +
aacctccctgtagagcctcaca

SEQ ID NO: 89175 - DNA, 22 bp, Artificial Sequence
  Synthetic oligonucleotide; CTC chr11 5252690 5252711 5252707 5252712 +
cctgtagagcctcacaagggct

SEQ ID NO: 89176 - DNA, 22 bp, Artificial Sequence
  Synthetic oligonucleotide; CTG chr11 5252694 5252715 5252711 5252716 +
tagagcctcacaagggctgaga

SEQ ID NO: 89177 - DNA, 22 bp, Artificial Sequence
  Synthetic oligonucleotide; CTC chr11 5252703 5252724 5252720 5252725 +
acaagggctgagaaaagccaga

SEQ ID NO: 89178 - DNA, 22 bp, Artificial Sequence
  Synthetic oligonucleotide; CTG chr11 5252713 5252734 5252730 5252735 +
agaaaagccagatgccgttgga

SEQ ID NO: 89179 - DNA, 22 bp, Artificial Sequence
  Synthetic oligonucleotide; TTG chr11 5252733 5252754 5252750 5252755 +
gaaatagtattgcccctaataa

SEQ ID NO: 89180 - DNA, 22 bp, Artificial Sequence
  Synthetic oligonucleotide; TTG chr11 5252745 5252766 5252762 5252767 +
cccctaataaaatagaatggct

SEQ ID NO: 89181 - DNA, 22 bp, Artificial Sequence
  Synthetic oligonucleotide; CTA chr11 5252751 5252772 5252768 5252773 +
ataaaatagaatggctatccct

SEQ ID NO: 89182 - DNA, 22 bp, Artificial Sequence
  Synthetic oligonucleotide; CTA chr11 5252768 5252789 5252785 5252790 +
tccctgcctaaaccttgacttc

SEQ ID NO: 89183 - DNA, 22 bp, Artificial Sequence
  Synthetic oligonucleotide; CTG chr11 5252774 5252795 5252791 5252796 +
cctaaaccttgacttcctaaag

SEQ ID NO: 89184 - DNA, 22 bp, Artificial Sequence
  Synthetic oligonucleotide; CTA chr11 5252778 5252799 5252795 5252800 +
aaccttgacttcctaaagcttg

SEQ ID NO: 89185 - DNA, 22 bp, Artificial Sequence
  Synthetic oligonucleotide; CTT chr11 5252784 5252805 5252801 5252806 +
gacttcctaaagcttggaacac

SEQ ID NO: 89186 - DNA, 22 bp, Artificial Sequence
  Synthetic oligonucleotide; TTG chr11 5252785 5252806 5252802 5252807 +
acttcctaaagcttggaacact

SEQ ID NO: 89187 - DNA, 22 bp, Artificial Sequence
  Synthetic oligonucleotide; CTT chr11 5252789 5252810 5252806 5252811 +
cctaaagcttggaacacttttt

SEQ ID NO: 89188 - DNA, 22 bp, Artificial Sequence
  Synthetic oligonucleotide; TTC chr11 5252790 5252811 5252807 5252812 +
ctaaagcttggaacactttttc

SEQ ID NO: 89189 - DNA, 22 bp, Artificial Sequence
  Synthetic oligonucleotide; CTA chr11 5252793 5252814 5252810 5252815 +
aagcttggaacactttttcttc

SEQ ID NO: 89190 - DNA, 22 bp, Artificial Sequence
  Synthetic oligonucleotide; CTT chr11 5252799 5252820 5252816 5252821 +
ggaacactttttcttcgttgag

SEQ ID NO: 89191 - DNA, 22 bp, Artificial Sequence
  Synthetic oligonucleotide; TTG chr11 5252800 5252821 5252817 5252822 +
gaacactttttcttcgttgagc

SEQ ID NO: 89192 - DNA, 22 bp, Artificial Sequence
  Synthetic oligonucleotide; CTT chr11 5252808 5252829 5252825 5252830 +
tttcttcgttgagccccttcct

SEQ ID NO: 89193 - DNA, 22 bp, Artificial Sequence
  Synthetic oligonucleotide; TTT chr11 5252809 5252830 5252826 5252831 +
ttcttcgttgagccccttcctc

SEQ ID NO: 89194 - DNA, 22 bp, Artificial Sequence
  Synthetic oligonucleotide; TTT chr11 5252810 5252831 5252827 5252832 +
tcttcgttgagccccttcctcg

SEQ ID NO: 89195 - DNA, 22 bp, Artificial Sequence
  Synthetic oligonucleotide; TTT chr11 5252811 5252832 5252828 5252833 +
cttcgttgagccccttcctcgc

SEQ ID NO: 89196 - DNA, 22 bp, Artificial Sequence
  Synthetic oligonucleotide; TTC chr11 5252812 5252833 5252829 5252834 +
ttcgttgagccccttcctcgct

SEQ ID NO: 89197 - DNA, 22 bp, Artificial Sequence
  Synthetic oligonucleotide; CTT chr11 5252814 5252835 5252831 5252836 +
cgttgagccccttcctcgctgc

SEQ ID NO: 89198 - DNA, 22 bp, Artificial Sequence
  Synthetic oligonucleotide; TTC chr11 5252815 5252836 5252832 5252837 +
gttgagccccttcctcgctgct

SEQ ID NO: 89199 - DNA, 22 bp, Artificial Sequence
  Synthetic oligonucleotide; TTG chr11 5252819 5252840 5252836 5252841 +
agccccttcctcgctgctgtgc

SEQ ID NO: 89200 - DNA, 22 bp, Artificial Sequence
  Synthetic oligonucleotide; CTT chr11 5252827 5252848 5252844 5252849 +
cctcgctgctgtgctgcaatcc

SEQ ID NO: 89201 - DNA, 22 bp, Artificial Sequence
  Synthetic oligonucleotide; TTC chr11 5252828 5252849 5252845 5252850 +
ctcgctgctgtgctgcaatcca

SEQ ID NO: 89202 - DNA, 22 bp, Artificial Sequence
  Synthetic oligonucleotide; CTC chr11 5252831 5252852 5252848 5252853 +
gctgctgtgctgcaatccaggg

SEQ ID NO: 89203 - DNA, 22 bp, Artificial Sequence
  Synthetic oligonucleotide; CTG chr11 5252835 5252856 5252852 5252857 +
ctgtgctgcaatccagggaagg

SEQ ID NO: 89204 - DNA, 22 bp, Artificial Sequence
  Synthetic oligonucleotide; CTG chr11 5252838 5252859 5252855 5252860 +
tgctgcaatccagggaaggggg

SEQ ID NO: 89205 - DNA, 22 bp, Artificial Sequence
  Synthetic oligonucleotide; CTG chr11 5252843 5252864 5252860 5252865 +
caatccagggaagggggttcag

SEQ ID NO: 89206 - DNA, 22 bp, Artificial Sequence
  Synthetic oligonucleotide; TTC chr11 5252863 5252884 5252880 5252885 +
agcccccttcactgaacctttc

SEQ ID NO: 89207 - DNA, 22 bp, Artificial Sequence
  Synthetic oligonucleotide; CTT chr11 5252872 5252893 5252889 5252894 +
cactgaacctttccccatctct

SEQ ID NO: 89208 - DNA, 22 bp, Artificial Sequence
  Synthetic oligonucleotide; TTC chr11 5252873 5252894 5252890 5252895 +
actgaacctttccccatctctt

SEQ ID NO: 89209 - DNA, 22 bp, Artificial Sequence
  Synthetic oligonucleotide; CTG chr11 5252877 5252898 5252894 5252899 +
aacctttccccatctcttccaa

SEQ ID NO: 89210 - DNA, 22 bp, Artificial Sequence
  Synthetic oligonucleotide; CTT chr11 5252883 5252904 5252900 5252905 +
tccccatctcttccaaaacatc

SEQ ID NO: 89211 - DNA, 22 bp, Artificial Sequence
  Synthetic oligonucleotide; TTT chr11 5252884 5252905 5252901 5252906 +
ccccatctcttccaaaacatct

SEQ ID NO: 89212 - DNA, 22 bp, Artificial Sequence
  Synthetic oligonucleotide; TTC chr11 5252885 5252906 5252902 5252907 +
cccatctcttccaaaacatctg

SEQ ID NO: 89213 - DNA, 22 bp, Artificial Sequence
  Synthetic oligonucleotide; CTC chr11 5252893 5252914 5252910 5252915 +
ttccaaaacatctgtttctgag

SEQ ID NO: 89214 - DNA, 22 bp, Artificial Sequence
  Synthetic oligonucleotide; CTT chr11 5252895 5252916 5252912 5252917 +
ccaaaacatctgtttctgagga

SEQ ID NO: 89215 - DNA, 22 bp, Artificial Sequence
  Synthetic oligonucleotide; TTC chr11 5252896 5252917 5252913 5252918 +
caaaacatctgtttctgaggag

SEQ ID NO: 89216 - DNA, 22 bp, Artificial Sequence
  Synthetic oligonucleotide; CTG chr11 5252907 5252928 5252924 5252929 +
tttctgaggagtcctgtcctat

SEQ ID NO: 89217 - DNA, 22 bp, Artificial Sequence
  Synthetic oligonucleotide; TTT chr11 5252910 5252931 5252927 5252932 +
ctgaggagtcctgtcctataga

SEQ ID NO: 89218 - DNA, 22 bp, Artificial Sequence
  Synthetic oligonucleotide; TTC chr11 5252911 5252932 5252928 5252933 +
tgaggagtcctgtcctatagag

SEQ ID NO: 89219 - DNA, 22 bp, Artificial Sequence
  Synthetic oligonucleotide; CTG chr11 5252913 5252934 5252930 5252935 +
aggagtcctgtcctatagaggt

SEQ ID NO: 89220 - DNA, 22 bp, Artificial Sequence
  Synthetic oligonucleotide; CTG chr11 5252923 5252944 5252940 5252945 +
tcctatagaggtctttcttcca

SEQ ID NO: 89221 - DNA, 22 bp, Artificial Sequence
  Synthetic oligonucleotide; CTA chr11 5252928 5252949 5252945 5252950 +
tagaggtctttcttccaaccag

SEQ ID NO: 89222 - DNA, 22 bp, Artificial Sequence
  Synthetic oligonucleotide; CTT chr11 5252938 5252959 5252955 5252960 +
tcttccaaccagatttctcctg

SEQ ID NO: 89223 - DNA, 22 bp, Artificial Sequence
  Synthetic oligonucleotide; TTT chr11 5252939 5252960 5252956 5252961 +
cttccaaccagatttctcctgc

SEQ ID NO: 89224 - DNA, 22 bp, Artificial Sequence
  Synthetic oligonucleotide; TTC chr11 5252940 5252961 5252957 5252962 +
ttccaaccagatttctcctgca

SEQ ID NO: 89225 - DNA, 22 bp, Artificial Sequence
  Synthetic oligonucleotide; CTT chr11 5252942 5252963 5252959 5252964 +
ccaaccagatttctcctgcacc

SEQ ID NO: 89226 - DNA, 22 bp, Artificial Sequence
  Synthetic oligonucleotide; TTC chr11 5252943 5252964 5252960 5252965 +
caaccagatttctcctgcacct

SEQ ID NO: 89227 - DNA, 22 bp, Artificial Sequence
  Synthetic oligonucleotide; TTT chr11 5252954 5252975 5252971 5252976 +
ctcctgcaccttttactcccac

SEQ ID NO: 89228 - DNA, 22 bp, Artificial Sequence
  Synthetic oligonucleotide; TTC chr11 5252955 5252976 5252972 5252977 +
tcctgcaccttttactcccact

SEQ ID NO: 89229 - DNA, 22 bp, Artificial Sequence
  Synthetic oligonucleotide; CTC chr11 5252957 5252978 5252974 5252979 +
ctgcaccttttactcccacttg

SEQ ID NO: 89230 - DNA, 22 bp, Artificial Sequence
  Synthetic oligonucleotide; CTG chr11 5252960 5252981 5252977 5252982 +
caccttttactcccacttgcag

SEQ ID NO: 89231 - DNA, 22 bp, Artificial Sequence
  Synthetic oligonucleotide; CTT chr11 5252966 5252987 5252983 5252988 +
ttactcccacttgcagaactcc

SEQ ID NO: 89232 - DNA, 22 bp, Artificial Sequence
  Synthetic oligonucleotide; TTT chr11 5252967 5252988 5252984 5252989 +
tactcccacttgcagaactccc

SEQ ID NO: 89233 - DNA, 22 bp, Artificial Sequence
  Synthetic oligonucleotide; TTT chr11 5252968 5252989 5252985 5252990 +
actcccacttgcagaactccca

SEQ ID NO: 89234 - DNA, 22 bp, Artificial Sequence
  Synthetic oligonucleotide; TTA chr11 5252969 5252990 5252986 5252991 +
ctcccacttgcagaactcccat

SEQ ID NO: 89235 - DNA, 22 bp, Artificial Sequence
  Synthetic oligonucleotide; CTC chr11 5252972 5252993 5252989 5252994 +
ccacttgcagaactcccatgta

SEQ ID NO: 89236 - DNA, 22 bp, Artificial Sequence
  Synthetic oligonucleotide; CTT chr11 5252978 5252999 5252995 5253000 +
gcagaactcccatgtacaagtt

SEQ ID NO: 89237 - DNA, 22 bp, Artificial Sequence
  Synthetic oligonucleotide; TTG chr11 5252979 5253000 5252996 5253001 +
cagaactcccatgtacaagttt

SEQ ID NO: 89238 - DNA, 22 bp, Artificial Sequence
  Synthetic oligonucleotide; CTC chr11 5252987 5253008 5253004 5253009 +
ccatgtacaagtttctttattg

SEQ ID NO: 89239 - DNA, 22 bp, Artificial Sequence
  Synthetic oligonucleotide; TTT chr11 5253001 5253022 5253018 5253023 +
ctttattgcctagttcttttat

SEQ ID NO: 89240 - DNA, 22 bp, Artificial Sequence
  Synthetic oligonucleotide; TTC chr11 5253002 5253023 5253019 5253024 +
tttattgcctagttcttttatt

SEQ ID NO: 89241 - DNA, 22 bp, Artificial Sequence
  Synthetic oligonucleotide; CTT chr11 5253004 5253025 5253021 5253026 +
tattgcctagttcttttatttg

SEQ ID NO: 89242 - DNA, 22 bp, Artificial Sequence
  Synthetic oligonucleotide; TTT chr11 5253005 5253026 5253022 5253027 +
attgcctagttcttttatttgc

SEQ ID NO: 89243 - DNA, 22 bp, Artificial Sequence
  Synthetic oligonucleotide; TTA chr11 5253006 5253027 5253023 5253028 +
ttgcctagttcttttatttgct

SEQ ID NO: 89244 - DNA, 22 bp, Artificial Sequence
  Synthetic oligonucleotide; TTG chr11 5253009 5253030 5253026 5253031 +
cctagttcttttatttgctcat

SEQ ID NO: 89245 - DNA, 22 bp, Artificial Sequence
  Synthetic oligonucleotide; CTA chr11 5253013 5253034 5253030 5253035 +
gttcttttatttgctcatcaaa

SEQ ID NO: 89246 - DNA, 22 bp, Artificial Sequence
  Synthetic oligonucleotide; TTC chr11 5253017 5253038 5253034 5253039 +
ttttatttgctcatcaaaaccc

SEQ ID NO: 89247 - DNA, 22 bp, Artificial Sequence
  Synthetic oligonucleotide; CTT chr11 5253019 5253040 5253036 5253041 +
ttatttgctcatcaaaacccac

SEQ ID NO: 89248 - DNA, 22 bp, Artificial Sequence
  Synthetic oligonucleotide; TTT chr11 5253020 5253041 5253037 5253042 +
tatttgctcatcaaaacccaca

SEQ ID NO: 89249 - DNA, 22 bp, Artificial Sequence
  Synthetic oligonucleotide; TTT chr11 5253021 5253042 5253038 5253043 +
atttgctcatcaaaacccacat

SEQ ID NO: 89250 - DNA, 22 bp, Artificial Sequence
  Synthetic oligonucleotide; TTA chr11 5253022 5253043 5253039 5253044 +
tttgctcatcaaaacccacatc

SEQ ID NO: 89251 - DNA, 22 bp, Artificial Sequence
  Synthetic oligonucleotide; TTT chr11 5253025 5253046 5253042 5253047 +
gctcatcaaaacccacatctaa

SEQ ID NO: 89252 - DNA, 22 bp, Artificial Sequence
  Synthetic oligonucleotide; TTG chr11 5253026 5253047 5253043 5253048 +
ctcatcaaaacccacatctaac

SEQ ID NO: 89253 - DNA, 22 bp, Artificial Sequence
  Synthetic oligonucleotide; CTC chr11 5253029 5253050 5253046 5253051 +
atcaaaacccacatctaacgta

SEQ ID NO: 89254 - DNA, 22 bp, Artificial Sequence
  Synthetic oligonucleotide; CTA chr11 5253046 5253067 5253063 5253068 +
acgtaaacaaaaaagtgtggag

SEQ ID NO: 89255 - DNA, 22 bp, Artificial Sequence
  Synthetic oligonucleotide; CTC chr11 5253125 5253146 5253142 5253147 +
aacataaaaccctttgtggctc

SEQ ID NO: 89256 - DNA, 22 bp, Artificial Sequence
  Synthetic oligonucleotide; CTT chr11 5253139 5253160 5253156 5253161 +
tgtggctcatatatttaaaaag

SEQ ID NO: 89257 - DNA, 22 bp, Artificial Sequence
  Synthetic oligonucleotide; TTT chr11 5253140 5253161 5253157 5253162 +
gtggctcatatatttaaaaaga

SEQ ID NO: 89258 - DNA, 22 bp, Artificial Sequence
  Synthetic oligonucleotide; TTG chr11 5253141 5253162 5253158 5253163 +
tggctcatatatttaaaaagac

SEQ ID NO: 89259 - DNA, 22 bp, Artificial Sequence
  Synthetic oligonucleotide; CTC chr11 5253147 5253168 5253164 5253169 +
atatatttaaaaagacataaaa

SEQ ID NO: 89260 - DNA, 22 bp, Artificial Sequence
  Synthetic oligonucleotide; TTT chr11 5253155 5253176 5253172 5253177 +
aaaaagacataaaaaaagaact

SEQ ID NO: 89261 - DNA, 22 bp, Artificial Sequence
  Synthetic oligonucleotide; TTA chr11 5253156 5253177 5253173 5253178 +
aaaagacataaaaaaagaactg

SEQ ID NO: 89262 - DNA, 22 bp, Artificial Sequence
  Synthetic oligonucleotide; CTG chr11 5253178 5253199 5253195 5253200 +
aagacaaccatgtgtgatctct

SEQ ID NO: 89263 - DNA, 22 bp, Artificial Sequence
  Synthetic oligonucleotide; CTC chr11 5253199 5253220 5253216 5253221 +
ttagcagaatagatttattatt

SEQ ID NO: 89264 - DNA, 22 bp, Artificial Sequence
  Synthetic oligonucleotide; CTT chr11 5253201 5253222 5253218 5253223 +
agcagaatagatttattatttg

SEQ ID NO: 89265 - DNA, 22 bp, Artificial Sequence
  Synthetic oligonucleotide; TTA chr11 5253202 5253223 5253219 5253224 +
gcagaatagatttattatttga

SEQ ID NO: 89266 - DNA, 22 bp, Artificial Sequence
  Synthetic oligonucleotide; TTT chr11 5253215 5253236 5253232 5253237 +
attatttgattgcttgcagaat

SEQ ID NO: 89267 - DNA, 22 bp, Artificial Sequence
  Synthetic oligonucleotide; TTA chr11 5253216 5253237 5253233 5253238 +
ttatttgattgcttgcagaata

SEQ ID NO: 89268 - DNA, 22 bp, Artificial Sequence
  Synthetic oligonucleotide; TTA chr11 5253219 5253240 5253236 5253241 +
tttgattgcttgcagaataaag

SEQ ID NO: 89269 - DNA, 22 bp, Artificial Sequence
  Synthetic oligonucleotide; TTT chr11 5253222 5253243 5253239 5253244 +
gattgcttgcagaataaagcct

SEQ ID NO: 89270 - DNA, 22 bp, Artificial Sequence
  Synthetic oligonucleotide; TTG chr11 5253223 5253244 5253240 5253245 +
attgcttgcagaataaagccta

SEQ ID NO: 89271 - DNA, 22 bp, Artificial Sequence
  Synthetic oligonucleotide; TTG chr11 5253227 5253248 5253244 5253249 +
cttgcagaataaagcctatcct

SEQ ID NO: 89272 - DNA, 22 bp, Artificial Sequence
  Synthetic oligonucleotide; CTT chr11 5253230 5253251 5253247 5253252 +
gcagaataaagcctatccttga

SEQ ID NO: 89273 - DNA, 22 bp, Artificial Sequence
  Synthetic oligonucleotide; TTG chr11 5253231 5253252 5253248 5253253 +
cagaataaagcctatccttgaa

SEQ ID NO: 89274 - DNA, 22 bp, Artificial Sequence
  Synthetic oligonucleotide; CTA chr11 5253245 5253266 5253262 5253267 +
tccttgaaagctctgcatcatg

SEQ ID NO: 89275 - DNA, 22 bp, Artificial Sequence
  Synthetic oligonucleotide; CTT chr11 5253250 5253271 5253267 5253272 +
gaaagctctgcatcatgggcag

SEQ ID NO: 89276 - DNA, 22 bp, Artificial Sequence
  Synthetic oligonucleotide; TTG chr11 5253251 5253272 5253268 5253273 +
aaagctctgcatcatgggcagt

SEQ ID NO: 89277 - DNA, 22 bp, Artificial Sequence
  Synthetic oligonucleotide; CTC chr11 5253258 5253279 5253275 5253280 +
tgcatcatgggcagtgagctca

SEQ ID NO: 89278 - DNA, 22 bp, Artificial Sequence
  Synthetic oligonucleotide; CTG chr11 5253260 5253281 5253277 5253282 +
catcatgggcagtgagctcagt

SEQ ID NO: 89279 - DNA, 22 bp, Artificial Sequence
  Synthetic oligonucleotide; CTC chr11 5253279 5253300 5253296 5253301 +
agtggtatctggaggacagggc

SEQ ID NO: 89280 - DNA, 22 bp, Artificial Sequence
  Synthetic oligonucleotide; CTG chr11 5253290 5253311 5253307 5253312 +
gaggacagggcactggccactc

SEQ ID NO: 89281 - DNA, 22 bp, Artificial Sequence
  Synthetic oligonucleotide; CTG chr11 5253305 5253326 5253322 5253327 +
gccactccagtcaccatcttct

SEQ ID NO: 89282 - DNA, 22 bp, Artificial Sequence
  Synthetic oligonucleotide; CTC chr11 5253312 5253333 5253329 5253334 +
cagtcaccatcttctgccagga

SEQ ID NO: 89283 - DNA, 22 bp, Artificial Sequence
  Synthetic oligonucleotide; CTT chr11 5253325 5253346 5253342 5253347 +
ctgccaggaagcctgcacctca

SEQ ID NO: 89284 - DNA, 22 bp, Artificial Sequence
  Synthetic oligonucleotide; TTC chr11 5253326 5253347 5253343 5253348 +
tgccaggaagcctgcacctcag

SEQ ID NO: 89285 - DNA, 22 bp, Artificial Sequence
  Synthetic oligonucleotide; CTG chr11 5253328 5253349 5253345 5253350 +
ccaggaagcctgcacctcaggg

SEQ ID NO: 89286 - DNA, 22 bp, Artificial Sequence
  Synthetic oligonucleotide; CTG chr11 5253340 5253361 5253357 5253362 +
cacctcaggggtgaattctttg

SEQ ID NO: 89287 - DNA, 22 bp, Artificial Sequence
  Synthetic oligonucleotide; CTC chr11 5253346 5253367 5253363 5253368 +
aggggtgaattctttgccgaaa

SEQ ID NO: 89288 - DNA, 22 bp, Artificial Sequence
  Synthetic oligonucleotide; TTC chr11 5253358 5253379 5253375 5253380 +
tttgccgaaatggattgccaaa

SEQ ID NO: 89289 - DNA, 22 bp, Artificial Sequence
  Synthetic oligonucleotide; CTT chr11 5253360 5253381 5253377 5253382 +
tgccgaaatggattgccaaaac

SEQ ID NO: 89290 - DNA, 22 bp, Artificial Sequence
  Synthetic oligonucleotide; TTT chr11 5253361 5253382 5253378 5253383 +
gccgaaatggattgccaaaacg

SEQ ID NO: 89291 - DNA, 22 bp, Artificial Sequence
  Synthetic oligonucleotide; TTG chr11 5253362 5253383 5253379 5253384 +
ccgaaatggattgccaaaacgg

SEQ ID NO: 89292 - DNA, 22 bp, Artificial Sequence
  Synthetic oligonucleotide; TTG chr11 5253375 5253396 5253392 5253397 +
ccaaaacggtcaccagcacatt

SEQ ID NO: 89293 - DNA, 22 bp, Artificial Sequence
  Synthetic oligonucleotide; TTT chr11 5253398 5253419 5253415 5253420 +
cccaggagctgttgagatgaaa

SEQ ID NO: 89294 - DNA, 22 bp, Artificial Sequence
  Synthetic oligonucleotide; TTC chr11 5253399 5253420 5253416 5253421 +
ccaggagctgttgagatgaaag

SEQ ID NO: 89295 - DNA, 22 bp, Artificial Sequence
  Synthetic oligonucleotide; CTG chr11 5253409 5253430 5253426 5253431 +
ttgagatgaaaggagacaataa

SEQ ID NO: 89296 - DNA, 22 bp, Artificial Sequence
  Synthetic oligonucleotide; TTG chr11 5253412 5253433 5253429 5253434 +
agatgaaaggagacaataaaga

SEQ ID NO: 89297 - DNA, 22 bp, Artificial Sequence
  Synthetic oligonucleotide; CTG chr11 5253452 5253473 5253469 5253474 +
agagctccagcctggcctccag

SEQ ID NO: 89298 - DNA, 22 bp, Artificial Sequence
  Synthetic oligonucleotide; CTC chr11 5253459 5253480 5253476 5253481 +
cagcctggcctccagataacta

SEQ ID NO: 89299 - DNA, 22 bp, Artificial Sequence
  Synthetic oligonucleotide; CTG chr11 5253466 5253487 5253483 5253488 +
gcctccagataactacacacca

SEQ ID NO: 89300 - DNA, 22 bp, Artificial Sequence
  Synthetic oligonucleotide; CTC chr11 5253471 5253492 5253488 5253493 +
cagataactacacaccaagctt

SEQ ID NO: 89301 - DNA, 22 bp, Artificial Sequence
  Synthetic oligonucleotide; CTA chr11 5253481 5253502 5253498 5253503 +
cacaccaagcttccacccagaa

SEQ ID NO: 89302 - DNA, 22 bp, Artificial Sequence
  Synthetic oligonucleotide; CTT chr11 5253493 5253514 5253510 5253515 +
ccacccagaatcaagcctatgt

SEQ ID NO: 89303 - DNA, 22 bp, Artificial Sequence
  Synthetic oligonucleotide; TTC chr11 5253494 5253515 5253511 5253516 +
cacccagaatcaagcctatgtt

SEQ ID NO: 89304 - DNA, 22 bp, Artificial Sequence
  Synthetic oligonucleotide; CTA chr11 5253512 5253533 5253529 5253534 +
tgttaacttccctcaaagcctg

SEQ ID NO: 89305 - DNA, 22 bp, Artificial Sequence
  Synthetic oligonucleotide; TTA chr11 5253517 5253538 5253534 5253539 +
acttccctcaaagcctgagatt

SEQ ID NO: 89306 - DNA, 22 bp, Artificial Sequence
  Synthetic oligonucleotide; CTT chr11 5253521 5253542 5253538 5253543 +
ccctcaaagcctgagattttgc

SEQ ID NO: 89307 - DNA, 22 bp, Artificial Sequence
  Synthetic oligonucleotide; TTC chr11 5253522 5253543 5253539 5253544 +
cctcaaagcctgagattttgct

SEQ ID NO: 89308 - DNA, 22 bp, Artificial Sequence
  Synthetic oligonucleotide; CTC chr11 5253526 5253547 5253543 5253548 +
aaagcctgagattttgctttcc

SEQ ID NO: 89309 - DNA, 22 bp, Artificial Sequence
  Synthetic oligonucleotide; CTG chr11 5253534 5253555 5253551 5253556 +
agattttgctttcccattaaat

SEQ ID NO: 89310 - DNA, 22 bp, Artificial Sequence
  Synthetic oligonucleotide; TTT chr11 5253540 5253561 5253557 5253562 +
tgctttcccattaaatgcaggt

SEQ ID NO: 89311 - DNA, 22 bp, Artificial Sequence
  Synthetic oligonucleotide; TTT chr11 5253541 5253562 5253558 5253563 +
gctttcccattaaatgcaggta

SEQ ID NO: 89312 - DNA, 22 bp, Artificial Sequence
  Synthetic oligonucleotide; TTG chr11 5253542 5253563 5253559 5253564 +
ctttcccattaaatgcaggtag

SEQ ID NO: 89313 - DNA, 22 bp, Artificial Sequence
  Synthetic oligonucleotide; CTT chr11 5253545 5253566 5253562 5253567 +
tcccattaaatgcaggtagttg

SEQ ID NO: 89314 - DNA, 22 bp, Artificial Sequence
  Synthetic oligonucleotide; TTT chr11 5253546 5253567 5253563 5253568 +
cccattaaatgcaggtagttgt

SEQ ID NO: 89315 - DNA, 22 bp, Artificial Sequence
  Synthetic oligonucleotide; TTC chr11 5253547 5253568 5253564 5253569 +
ccattaaatgcaggtagttgtt

SEQ ID NO: 89316 - DNA, 22 bp, Artificial Sequence
  Synthetic oligonucleotide; TTA chr11 5253553 5253574 5253570 5253575 +
aatgcaggtagttgttcttctt

SEQ ID NO: 89317 - DNA, 22 bp, Artificial Sequence
  Synthetic oligonucleotide; TTG chr11 5253567 5253588 5253584 5253589 +
ttcttcttgcagcactagtcac

SEQ ID NO: 89318 - DNA, 22 bp, Artificial Sequence
  Synthetic oligonucleotide; TTC chr11 5253570 5253591 5253587 5253592 +
ttcttgcagcactagtcactgg

SEQ ID NO: 89319 - DNA, 22 bp, Artificial Sequence
  Synthetic oligonucleotide; CTT chr11 5253572 5253593 5253589 5253594 +
cttgcagcactagtcactggcc

SEQ ID NO: 89320 - DNA, 22 bp, Artificial Sequence
  Synthetic oligonucleotide; TTC chr11 5253573 5253594 5253590 5253595 +
ttgcagcactagtcactggcca

SEQ ID NO: 89321 - DNA, 22 bp, Artificial Sequence
  Synthetic oligonucleotide; CTT chr11 5253575 5253596 5253592 5253597 +
gcagcactagtcactggccata

SEQ ID NO: 89322 - DNA, 22 bp, Artificial Sequence
  Synthetic oligonucleotide; TTG chr11 5253576 5253597 5253593 5253598 +
cagcactagtcactggccataa

SEQ ID NO: 89323 - DNA, 22 bp, Artificial Sequence
  Synthetic oligonucleotide; CTA chr11 5253584 5253605 5253601 5253606 +
gtcactggccataatttaaatc

SEQ ID NO: 89324 - DNA, 22 bp, Artificial Sequence
  Synthetic oligonucleotide; CTG chr11 5253591 5253612 5253608 5253613 +
gccataatttaaatcttgttat

SEQ ID NO: 89325 - DNA, 22 bp, Artificial Sequence
  Synthetic oligonucleotide; TTT chr11 5253601 5253622 5253618 5253623 +
aaatcttgttatcttcttgcca

SEQ ID NO: 89326 - DNA, 22 bp, Artificial Sequence
  Synthetic oligonucleotide; TTA chr11 5253602 5253623 5253619 5253624 +
aatcttgttatcttcttgccac

SEQ ID NO: 89327 - DNA, 22 bp, Artificial Sequence
  Synthetic oligonucleotide; CTT chr11 5253608 5253629 5253625 5253630 +
gttatcttcttgccaccatgaa

SEQ ID NO: 89328 - DNA, 22 bp, Artificial Sequence
  Synthetic oligonucleotide; TTG chr11 5253609 5253630 5253626 5253631 +
ttatcttcttgccaccatgaac

SEQ ID NO: 89329 - DNA, 22 bp, Artificial Sequence
  Synthetic oligonucleotide; TTA chr11 5253612 5253633 5253629 5253634 +
tcttcttgccaccatgaaccct

SEQ ID NO: 89330 - DNA, 22 bp, Artificial Sequence
  Synthetic oligonucleotide; CTT chr11 5253616 5253637 5253633 5253638 +
cttgccaccatgaaccctgtat

SEQ ID NO: 89331 - DNA, 22 bp, Artificial Sequence
  Synthetic oligonucleotide; TTC chr11 5253617 5253638 5253634 5253639 +
ttgccaccatgaaccctgtatg

SEQ ID NO: 89332 - DNA, 22 bp, Artificial Sequence
  Synthetic oligonucleotide; CTT chr11 5253619 5253640 5253636 5253641 +
gccaccatgaaccctgtatgct

SEQ ID NO: 89333 - DNA, 22 bp, Artificial Sequence
  Synthetic oligonucleotide; TTG chr11 5253620 5253641 5253637 5253642 +
ccaccatgaaccctgtatgctg

SEQ ID NO: 89334 - DNA, 22 bp, Artificial Sequence
  Synthetic oligonucleotide; CTG chr11 5253635 5253656 5253652 5253657 +
tatgctgtaggctgaaaacgtt

SEQ ID NO: 89335 - DNA, 22 bp, Artificial Sequence
  Synthetic oligonucleotide; CTG chr11 5253642 5253663 5253659 5253664 +
taggctgaaaacgttaaaagaa

SEQ ID NO: 89336 - DNA, 22 bp, Artificial Sequence
  Synthetic oligonucleotide; CTG chr11 5253649 5253670 5253666 5253671 +
aaaacgttaaaagaaacacacg

SEQ ID NO: 89337 - DNA, 22 bp, Artificial Sequence
  Synthetic oligonucleotide; TTA chr11 5253658 5253679 5253675 5253680 +
aaagaaacacacgctctcacac

SEQ ID NO: 89338 - DNA, 22 bp, Artificial Sequence
  Synthetic oligonucleotide; CTC chr11 5253674 5253695 5253691 5253696 +
tcacacacacacaaacacacgc

SEQ ID NO: 89339 - DNA, 22 bp, Artificial Sequence
  Synthetic oligonucleotide; CTC chr11 5253676 5253697 5253693 5253698 +
acacacacacaaacacacgcgc

SEQ ID NO: 89340 - DNA, 22 bp, Artificial Sequence
  Synthetic oligonucleotide; CTG chr11 5253727 5253748 5253744 5253749 +
actttcaaaatctactccagcc

SEQ ID NO: 89341 - DNA, 22 bp, Artificial Sequence
  Synthetic oligonucleotide; CTT chr11 5253731 5253752 5253748 5253753 +
tcaaaatctactccagcccaaa

SEQ ID NO: 89342 - DNA, 22 bp, Artificial Sequence
  Synthetic oligonucleotide; TTT chr11 5253732 5253753 5253749 5253754 +
caaaatctactccagcccaaat

SEQ ID NO: 89343 - DNA, 22 bp, Artificial Sequence
  Synthetic oligonucleotide; TTC chr11 5253733 5253754 5253750 5253755 +
aaaatctactccagcccaaatg

SEQ ID NO: 89344 - DNA, 22 bp, Artificial Sequence
  Synthetic oligonucleotide; CTA chr11 5253741 5253762 5253758 5253763 +
ctccagcccaaatgtttcaatt

SEQ ID NO: 89345 - DNA, 22 bp, Artificial Sequence
  Synthetic oligonucleotide; CTC chr11 5253744 5253765 5253761 5253766 +
cagcccaaatgtttcaattgtt

SEQ ID NO: 89346 - DNA, 22 bp, Artificial Sequence
  Synthetic oligonucleotide; TTT chr11 5253758 5253779 5253775 5253780 +
caattgttcctcacccctggac

SEQ ID NO: 89347 - DNA, 22 bp, Artificial Sequence
  Synthetic oligonucleotide; TTC chr11 5253759 5253780 5253776 5253781 +
aattgttcctcacccctggaca

SEQ ID NO: 89348 - DNA, 22 bp, Artificial Sequence
  Synthetic oligonucleotide; TTG chr11 5253764 5253785 5253781 5253786 +
ttcctcacccctggacatactt

SEQ ID NO: 89349 - DNA, 22 bp, Artificial Sequence
  Synthetic oligonucleotide; TTC chr11 5253767 5253788 5253784 5253789 +
ctcacccctggacatactttgc

SEQ ID NO: 89350 - DNA, 22 bp, Artificial Sequence
  Synthetic oligonucleotide; CTC chr11 5253770 5253791 5253787 5253792 +
acccctggacatactttgcccc

SEQ ID NO: 89351 - DNA, 22 bp, Artificial Sequence
  Synthetic oligonucleotide; CTG chr11 5253777 5253798 5253794 5253799 +
gacatactttgcccccatctgg

SEQ ID NO: 89352 - DNA, 22 bp, Artificial Sequence
  Synthetic oligonucleotide; CTT chr11 5253786 5253807 5253803 5253808 +
tgcccccatctggaattaaagg

SEQ ID NO: 89353 - DNA, 22 bp, Artificial Sequence
  Synthetic oligonucleotide; TTT chr11 5253787 5253808 5253804 5253809 +
gcccccatctggaattaaagga

SEQ ID NO: 89354 - DNA, 22 bp, Artificial Sequence
  Synthetic oligonucleotide; TTG chr11 5253788 5253809 5253805 5253810 +
cccccatctggaattaaaggat

SEQ ID NO: 89355 - DNA, 22 bp, Artificial Sequence
  Synthetic oligonucleotide; CTG chr11 5253798 5253819 5253815 5253820 +
gaattaaaggatataagtttgt

SEQ ID NO: 89356 - DNA, 22 bp, Artificial Sequence
  Synthetic oligonucleotide; TTA chr11 5253804 5253825 5253821 5253826 +
aaggatataagtttgtaatgaa

SEQ ID NO: 89357 - DNA, 22 bp, Artificial Sequence
  Synthetic oligonucleotide; TTT chr11 5253818 5253839 5253835 5253840 +
gtaatgaagcattagcagcatt

SEQ ID NO: 89358 - DNA, 22 bp, Artificial Sequence
  Synthetic oligonucleotide; TTG chr11 5253819 5253840 5253836 5253841 +
taatgaagcattagcagcattt

SEQ ID NO: 89359 - DNA, 22 bp, Artificial Sequence
  Synthetic oligonucleotide; TTA chr11 5253832 5253853 5253849 5253854 +
gcagcattttatatgtgtccag

SEQ ID NO: 89360 - DNA, 22 bp, Artificial Sequence
  Synthetic oligonucleotide; TTT chr11 5253841 5253862 5253858 5253863 +
tatatgtgtccagctgatatag

SEQ ID NO: 89361 - DNA, 22 bp, Artificial Sequence
  Synthetic oligonucleotide; TTT chr11 5253842 5253863 5253859 5253864 +
atatgtgtccagctgatatagg

SEQ ID NO: 89362 - DNA, 22 bp, Artificial Sequence
  Synthetic oligonucleotide; TTA chr11 5253843 5253864 5253860 5253865 +
tatgtgtccagctgatatagga

SEQ ID NO: 89363 - DNA, 22 bp, Artificial Sequence
  Synthetic oligonucleotide; CTG chr11 5253857 5253878 5253874 5253879 +
atataggaatagccttagcaat

SEQ ID NO: 89364 - DNA, 22 bp, Artificial Sequence
  Synthetic oligonucleotide; CTT chr11 5253873 5253894 5253890 5253895 +
agcaatgtatgtttggccacca

SEQ ID NO: 89365 - DNA, 22 bp, Artificial Sequence
  Synthetic oligonucleotide; TTA chr11 5253874 5253895 5253891 5253896 +
gcaatgtatgtttggccaccaa

SEQ ID NO: 89366 - DNA, 22 bp, Artificial Sequence
  Synthetic oligonucleotide; TTT chr11 5253887 5253908 5253904 5253909 +
ggccaccaaagttccccacttt

SEQ ID NO: 89367 - DNA, 22 bp, Artificial Sequence
  Synthetic oligonucleotide; TTG chr11 5253888 5253909 5253905 5253910 +
gccaccaaagttccccactttg

SEQ ID NO: 89368 - DNA, 22 bp, Artificial Sequence
  Synthetic oligonucleotide; TTC chr11 5253901 5253922 5253918 5253923 +
cccactttgactgagccaatat

SEQ ID NO: 89369 - DNA, 22 bp, Artificial Sequence
  Synthetic oligonucleotide; CTT chr11 5253908 5253929 5253925 5253930 +
tgactgagccaatatatgcctt

SEQ ID NO: 89370 - DNA, 22 bp, Artificial Sequence
  Synthetic oligonucleotide; TTT chr11 5253909 5253930 5253926 5253931 +
gactgagccaatatatgccttc

SEQ ID NO: 89371 - DNA, 22 bp, Artificial Sequence
  Synthetic oligonucleotide; TTG chr11 5253910 5253931 5253927 5253932 +
actgagccaatatatgccttct

SEQ ID NO: 89372 - DNA, 22 bp, Artificial Sequence
  Synthetic oligonucleotide; CTG chr11 5253914 5253935 5253931 5253936 +
agccaatatatgccttctgcct

SEQ ID NO: 89373 - DNA, 22 bp, Artificial Sequence
  Synthetic oligonucleotide; CTT chr11 5253930 5253951 5253947 5253952 +
ctgcctgcatctttttaatgac

SEQ ID NO: 89374 - DNA, 22 bp, Artificial Sequence
  Synthetic oligonucleotide; TTC chr11 5253931 5253952 5253948 5253953 +
tgcctgcatctttttaatgacc

SEQ ID NO: 89375 - DNA, 22 bp, Artificial Sequence
  Synthetic oligonucleotide; CTG chr11 5253933 5253954 5253950 5253955 +
cctgcatctttttaatgaccat

SEQ ID NO: 89376 - DNA, 22 bp, Artificial Sequence
  Synthetic oligonucleotide; CTG chr11 5253937 5253958 5253954 5253959 +
catctttttaatgaccatactt

SEQ ID NO: 89377 - DNA, 22 bp, Artificial Sequence
  Synthetic oligonucleotide; CTT chr11 5253943 5253964 5253960 5253965 +
tttaatgaccatacttgtcctg

SEQ ID NO: 89378 - DNA, 22 bp, Artificial Sequence
  Synthetic oligonucleotide; TTT chr11 5253944 5253965 5253961 5253966 +
ttaatgaccatacttgtcctgc

SEQ ID NO: 89379 - DNA, 22 bp, Artificial Sequence
  Synthetic oligonucleotide; TTT chr11 5253945 5253966 5253962 5253967 +
taatgaccatacttgtcctgcc

SEQ ID NO: 89380 - DNA, 22 bp, Artificial Sequence
  Synthetic oligonucleotide; TTT chr11 5253946 5253967 5253963 5253968 +
aatgaccatacttgtcctgcct

SEQ ID NO: 89381 - DNA, 22 bp, Artificial Sequence
  Synthetic oligonucleotide; TTA chr11 5253947 5253968 5253964 5253969 +
atgaccatacttgtcctgcctc

SEQ ID NO: 89382 - DNA, 22 bp, Artificial Sequence
  Synthetic oligonucleotide; CTT chr11 5253959 5253980 5253976 5253981 +
gtcctgcctccagatagatgtt

SEQ ID NO: 89383 - DNA, 22 bp, Artificial Sequence
  Synthetic oligonucleotide; TTG chr11 5253960 5253981 5253977 5253982 +
tcctgcctccagatagatgttt

SEQ ID NO: 89384 - DNA, 22 bp, Artificial Sequence
  Synthetic oligonucleotide; CTG chr11 5253965 5253986 5253982 5253987 +
cctccagatagatgttttaaaa

SEQ ID NO: 89385 - DNA, 22 bp, Artificial Sequence
  Synthetic oligonucleotide; CTC chr11 5253969 5253990 5253986 5253991 +
cagatagatgttttaaaacgaa

SEQ ID NO: 89386 - DNA, 22 bp, Artificial Sequence
  Synthetic oligonucleotide; TTT chr11 5253982 5254003 5253999 5254004 +
taaaacgaataacaaaaatagg

SEQ ID NO: 89387 - DNA, 22 bp, Artificial Sequence
  Synthetic oligonucleotide; TTT chr11 5253983 5254004 5254000 5254005 +
aaaacgaataacaaaaataggg

SEQ ID NO: 89388 - DNA, 22 bp, Artificial Sequence
  Synthetic oligonucleotide; TTA chr11 5253984 5254005 5254001 5254006 +
aaacgaataacaaaaatagggg

SEQ ID NO: 89389 - DNA, 22 bp, Artificial Sequence
  Synthetic oligonucleotide; TTC chr11 5254020 5254041 5254037 5254042 +
tttctaccgaaatctaataaag

SEQ ID NO: 89390 - DNA, 22 bp, Artificial Sequence
  Synthetic oligonucleotide; CTT chr11 5254022 5254043 5254039 5254044 +
tctaccgaaatctaataaagaa

SEQ ID NO: 89391 - DNA, 22 bp, Artificial Sequence
  Synthetic oligonucleotide; TTT chr11 5254023 5254044 5254040 5254045 +
ctaccgaaatctaataaagaaa

SEQ ID NO: 89392 - DNA, 22 bp, Artificial Sequence
  Synthetic oligonucleotide; TTC chr11 5254024 5254045 5254041 5254046 +
taccgaaatctaataaagaaaa

SEQ ID NO: 89393 - DNA, 22 bp, Artificial Sequence
  Synthetic oligonucleotide; CTA chr11 5254026 5254047 5254043 5254048 +
ccgaaatctaataaagaaaagt

SEQ ID NO: 89394 - DNA, 22 bp, Artificial Sequence
  Synthetic oligonucleotide; CTA chr11 5254036 5254057 5254053 5254058 +
ataaagaaaagtcattttcctc

SEQ ID NO: 89395 - DNA, 22 bp, Artificial Sequence
  Synthetic oligonucleotide; TTT chr11 5254053 5254074 5254070 5254075 +
tcctcatttccacctctctttt

SEQ ID NO: 89396 - DNA, 22 bp, Artificial Sequence
  Synthetic oligonucleotide; TTT chr11 5254054 5254075 5254071 5254076 +
cctcatttccacctctcttttc

SEQ ID NO: 89397 - DNA, 22 bp, Artificial Sequence
  Synthetic oligonucleotide; TTC chr11 5254055 5254076 5254072 5254077 +
ctcatttccacctctcttttct

SEQ ID NO: 89398 - DNA, 22 bp, Artificial Sequence
  Synthetic oligonucleotide; CTC chr11 5254058 5254079 5254075 5254080 +
atttccacctctcttttctcaa

SEQ ID NO: 89399 - DNA, 22 bp, Artificial Sequence
  Synthetic oligonucleotide; TTT chr11 5254062 5254083 5254079 5254084 +
ccacctctcttttctcaaagtc

SEQ ID NO: 89400 - DNA, 22 bp, Artificial Sequence
  Synthetic oligonucleotide; TTC chr11 5254063 5254084 5254080 5254085 +
cacctctcttttctcaaagtca

SEQ ID NO: 89401 - DNA, 22 bp, Artificial Sequence
  Synthetic oligonucleotide; CTC chr11 5254069 5254090 5254086 5254091 +
tcttttctcaaagtcaaagttg

SEQ ID NO: 89402 - DNA, 22 bp, Artificial Sequence
  Synthetic oligonucleotide; CTC chr11 5254071 5254092 5254088 5254093 +
ttttctcaaagtcaaagttgtc

SEQ ID NO: 89403 - DNA, 22 bp, Artificial Sequence
  Synthetic oligonucleotide; CTT chr11 5254073 5254094 5254090 5254095 +
ttctcaaagtcaaagttgtcca

SEQ ID NO: 89404 - DNA, 22 bp, Artificial Sequence
  Synthetic oligonucleotide; TTT chr11 5254074 5254095 5254091 5254096 +
tctcaaagtcaaagttgtccat

SEQ ID NO: 89405 - DNA, 22 bp, Artificial Sequence
  Synthetic oligonucleotide; TTT chr11 5254075 5254096 5254092 5254097 +
ctcaaagtcaaagttgtccatc

SEQ ID NO: 89406 - DNA, 22 bp, Artificial Sequence
  Synthetic oligonucleotide; TTC chr11 5254076 5254097 5254093 5254098 +
tcaaagtcaaagttgtccatct

SEQ ID NO: 89407 - DNA, 22 bp, Artificial Sequence
  Synthetic oligonucleotide; CTC chr11 5254078 5254099 5254095 5254100 +
aaagtcaaagttgtccatctag

SEQ ID NO: 89408 - DNA, 22 bp, Artificial Sequence
  Synthetic oligonucleotide; TTG chr11 5254091 5254112 5254108 5254113 +
tccatctagattttcagaggca

SEQ ID NO: 89409 - DNA, 22 bp, Artificial Sequence
  Synthetic oligonucleotide; CTA chr11 5254099 5254120 5254116 5254121 +
gattttcagaggcactccttag

SEQ ID NO: 89410 - DNA, 22 bp, Artificial Sequence
  Synthetic oligonucleotide; TTT chr11 5254104 5254125 5254121 5254126 +
tcagaggcactccttaggccct

SEQ ID NO: 89411 - DNA, 22 bp, Artificial Sequence
  Synthetic oligonucleotide; TTT chr11 5254105 5254126 5254122 5254127 +
cagaggcactccttaggcccta

SEQ ID NO: 89412 - DNA, 22 bp, Artificial Sequence
  Synthetic oligonucleotide; TTC chr11 5254106 5254127 5254123 5254128 +
agaggcactccttaggccctaa

SEQ ID NO: 89413 - DNA, 22 bp, Artificial Sequence
  Synthetic oligonucleotide; CTC chr11 5254116 5254137 5254133 5254138 +
cttaggccctaaaacattgcca

SEQ ID NO: 89414 - DNA, 22 bp, Artificial Sequence
  Synthetic oligonucleotide; CTT chr11 5254119 5254140 5254136 5254141 +
aggccctaaaacattgccactg

SEQ ID NO: 89415 - DNA, 22 bp, Artificial Sequence
  Synthetic oligonucleotide; TTA chr11 5254120 5254141 5254137 5254142 +
ggccctaaaacattgccactgg

SEQ ID NO: 89416 - DNA, 22 bp, Artificial Sequence
  Synthetic oligonucleotide; CTA chr11 5254127 5254148 5254144 5254149 +
aaacattgccactgggtctcag

SEQ ID NO: 89417 - DNA, 22 bp, Artificial Sequence
  Synthetic oligonucleotide; TTG chr11 5254135 5254156 5254152 5254157 +
ccactgggtctcagcccagtta

SEQ ID NO: 89418 - DNA, 22 bp, Artificial Sequence
  Synthetic oligonucleotide; CTG chr11 5254141 5254162 5254158 5254163 +
ggtctcagcccagttagtcctc

SEQ ID NO: 89419 - DNA, 22 bp, Artificial Sequence
  Synthetic oligonucleotide; CTC chr11 5254147 5254168 5254164 5254169 +
agcccagttagtcctctgcagt

SEQ ID NO: 89420 - DNA, 22 bp, Artificial Sequence
  Synthetic oligonucleotide; TTA chr11 5254157 5254178 5254174 5254179 +
gtcctctgcagtttcttcactc

SEQ ID NO: 89421 - DNA, 22 bp, Artificial Sequence
  Synthetic oligonucleotide; CTC chr11 5254163 5254184 5254180 5254185 +
tgcagtttcttcactcccaacc

SEQ ID NO: 89422 - DNA, 22 bp, Artificial Sequence
  Synthetic oligonucleotide; CTG chr11 5254165 5254186 5254182 5254187 +
cagtttcttcactcccaacccc

SEQ ID NO: 89423 - DNA, 22 bp, Artificial Sequence
  Synthetic oligonucleotide; TTT chr11 5254171 5254192 5254188 5254193 +
cttcactcccaaccccagtatc

SEQ ID NO: 89424 - DNA, 22 bp, Artificial Sequence
  Synthetic oligonucleotide; TTC chr11 5254172 5254193 5254189 5254194 +
ttcactcccaaccccagtatct

SEQ ID NO: 89425 - DNA, 22 bp, Artificial Sequence
  Synthetic oligonucleotide; CTT chr11 5254174 5254195 5254191 5254196 +
cactcccaaccccagtatcttc

SEQ ID NO: 89426 - DNA, 22 bp, Artificial Sequence
  Synthetic oligonucleotide; TTC chr11 5254175 5254196 5254192 5254197 +
actcccaaccccagtatcttca

SEQ ID NO: 89427 - DNA, 22 bp, Artificial Sequence
  Synthetic oligonucleotide; CTC chr11 5254179 5254200 5254196 5254201 +
ccaaccccagtatcttcaaaca

SEQ ID NO: 89428 - DNA, 22 bp, Artificial Sequence
  Synthetic oligonucleotide; CTT chr11 5254195 5254216 5254212 5254217 +
caaacagctcacaccctgctgt

SEQ ID NO: 89429 - DNA, 22 bp, Artificial Sequence
  Synthetic oligonucleotide; TTC chr11 5254196 5254217 5254213 5254218 +
aaacagctcacaccctgctgtg

SEQ ID NO: 89430 - DNA, 22 bp, Artificial Sequence
  Synthetic oligonucleotide; CTC chr11 5254205 5254226 5254222 5254227 +
acaccctgctgtgctcagatca

SEQ ID NO: 89431 - DNA, 22 bp, Artificial Sequence
  Synthetic oligonucleotide; CTG chr11 5254213 5254234 5254230 5254235 +
ctgtgctcagatcaatactcag

SEQ ID NO: 89432 - DNA, 22 bp, Artificial Sequence
  Synthetic oligonucleotide; CTG chr11 5254216 5254237 5254233 5254238 +
tgctcagatcaatactcagttg

SEQ ID NO: 89433 - DNA, 22 bp, Artificial Sequence
  Synthetic oligonucleotide; CTC chr11 5254221 5254242 5254238 5254243 +
agatcaatactcagttgtctaa

SEQ ID NO: 89434 - DNA, 22 bp, Artificial Sequence
  Synthetic oligonucleotide; CTC chr11 5254233 5254254 5254250 5254255 +
agttgtctaagttgcctcgaga

SEQ ID NO: 89435 - DNA, 22 bp, Artificial Sequence
  Synthetic oligonucleotide; TTG chr11 5254238 5254259 5254255 5254260 +
tctaagttgcctcgagactaaa

SEQ ID NO: 89436 - DNA, 22 bp, Artificial Sequence
  Synthetic oligonucleotide; CTA chr11 5254242 5254263 5254259 5254264 +
agttgcctcgagactaaaggca

SEQ ID NO: 89437 - DNA, 22 bp, Artificial Sequence
  Synthetic oligonucleotide; TTG chr11 5254247 5254268 5254264 5254269 +
cctcgagactaaaggcaacagt

SEQ ID NO: 89438 - DNA, 22 bp, Artificial Sequence
  Synthetic oligonucleotide; CTC chr11 5254251 5254272 5254268 5254273 +
gagactaaaggcaacagtgctg

SEQ ID NO: 89439 - DNA, 22 bp, Artificial Sequence
  Synthetic oligonucleotide; CTA chr11 5254258 5254279 5254275 5254280 +
aaggcaacagtgctgaaacatc

SEQ ID NO: 89440 - DNA, 22 bp, Artificial Sequence
  Synthetic oligonucleotide; CTG chr11 5254273 5254294 5254290 5254295 +
aaacatctcctggactcacctt

SEQ ID NO: 89441 - DNA, 22 bp, Artificial Sequence
  Synthetic oligonucleotide; CTC chr11 5254282 5254303 5254299 5254304 +
ctggactcaccttgaagttctc

SEQ ID NO: 89442 - DNA, 22 bp, Artificial Sequence
  Synthetic oligonucleotide; CTG chr11 5254285 5254306 5254302 5254307 +
gactcaccttgaagttctcagg

SEQ ID NO: 89443 - DNA, 22 bp, Artificial Sequence
  Synthetic oligonucleotide; CTC chr11 5254290 5254311 5254307 5254312 +
accttgaagttctcaggatcca

SEQ ID NO: 89444 - DNA, 22 bp, Artificial Sequence
  Synthetic oligonucleotide; CTT chr11 5254295 5254316 5254312 5254317 +
gaagttctcaggatccacatgc

SEQ ID NO: 89445 - DNA, 22 bp, Artificial Sequence
  Synthetic oligonucleotide; TTG chr11 5254296 5254317 5254313 5254318 +
aagttctcaggatccacatgca

SEQ ID NO: 89446 - DNA, 22 bp, Artificial Sequence
  Synthetic oligonucleotide; TTC chr11 5254302 5254323 5254319 5254324 +
tcaggatccacatgcagcttgt

SEQ ID NO: 89447 - DNA, 22 bp, Artificial Sequence
  Synthetic oligonucleotide; CTC chr11 5254304 5254325 5254321 5254326 +
aggatccacatgcagcttgtca

SEQ ID NO: 89448 - DNA, 22 bp, Artificial Sequence
  Synthetic oligonucleotide; CTT chr11 5254322 5254343 5254339 5254344 +
gtcacagtgcagttcactcagc

SEQ ID NO: 89449 - DNA, 22 bp, Artificial Sequence
  Synthetic oligonucleotide; TTG chr11 5254323 5254344 5254340 5254345 +
tcacagtgcagttcactcagct

SEQ ID NO: 89450 - DNA, 22 bp, Artificial Sequence
  Synthetic oligonucleotide; TTC chr11 5254337 5254358 5254354 5254359 +
actcagctgggcaaaggtgccc

SEQ ID NO: 89451 - DNA, 22 bp, Artificial Sequence
  Synthetic oligonucleotide; CTC chr11 5254341 5254362 5254358 5254363 +
agctgggcaaaggtgcccttga

SEQ ID NO: 89452 - DNA, 22 bp, Artificial Sequence
  Synthetic oligonucleotide; CTG chr11 5254346 5254367 5254363 5254368 +
ggcaaaggtgcccttgagatca

SEQ ID NO: 89453 - DNA, 22 bp, Artificial Sequence
  Synthetic oligonucleotide; CTT chr11 5254361 5254382 5254378 5254383 +
gagatcatccaggtgctttatg

SEQ ID NO: 89454 - DNA, 22 bp, Artificial Sequence
  Synthetic oligonucleotide; TTG chr11 5254362 5254383 5254379 5254384 +
agatcatccaggtgctttatgg

SEQ ID NO: 89455 - DNA, 22 bp, Artificial Sequence
  Synthetic oligonucleotide; CTT chr11 5254379 5254400 5254396 5254401 +
tatggcatctcccaaggaagtc

SEQ ID NO: 89456 - DNA, 22 bp, Artificial Sequence
  Synthetic oligonucleotide; TTT chr11 5254380 5254401 5254397 5254402 +
atggcatctcccaaggaagtca

SEQ ID NO: 89457 - DNA, 22 bp, Artificial Sequence
  Synthetic oligonucleotide; TTA chr11 5254381 5254402 5254398 5254403 +
tggcatctcccaaggaagtcag

SEQ ID NO: 89458 - DNA, 22 bp, Artificial Sequence
  Synthetic oligonucleotide; CTC chr11 5254390 5254411 5254407 5254412 +
ccaaggaagtcagcaccttctt

SEQ ID NO: 89459 - DNA, 22 bp, Artificial Sequence
  Synthetic oligonucleotide; CTT chr11 5254409 5254430 5254426 5254431 +
cttgccatgtgccttgactttg

SEQ ID NO: 89460 - DNA, 22 bp, Artificial Sequence
  Synthetic oligonucleotide; TTC chr11 5254410 5254431 5254427 5254432 +
ttgccatgtgccttgactttgg

SEQ ID NO: 89461 - DNA, 22 bp, Artificial Sequence
  Synthetic oligonucleotide; CTT chr11 5254412 5254433 5254429 5254434 +
gccatgtgccttgactttgggg

SEQ ID NO: 89462 - DNA, 22 bp, Artificial Sequence
  Synthetic oligonucleotide; TTG chr11 5254413 5254434 5254430 5254435 +
ccatgtgccttgactttggggt

SEQ ID NO: 89463 - DNA, 22 bp, Artificial Sequence
  Synthetic oligonucleotide; CTT chr11 5254424 5254445 5254441 5254446 +
gactttggggttgcccatgatg

SEQ ID NO: 89464 - DNA, 22 bp, Artificial Sequence
  Synthetic oligonucleotide; TTG chr11 5254425 5254446 5254442 5254447 +
actttggggttgcccatgatgg

SEQ ID NO: 89465 - DNA, 22 bp, Artificial Sequence
  Synthetic oligonucleotide; CTT chr11 5254429 5254450 5254446 5254451 +
tggggttgcccatgatggcaga

SEQ ID NO: 89466 - DNA, 22 bp, Artificial Sequence
  Synthetic oligonucleotide; TTT chr11 5254430 5254451 5254447 5254452 +
ggggttgcccatgatggcagag

SEQ ID NO: 89467 - DNA, 22 bp, Artificial Sequence
  Synthetic oligonucleotide; TTG chr11 5254431 5254452 5254448 5254453 +
gggttgcccatgatggcagagg

SEQ ID NO: 89468 - DNA, 22 bp, Artificial Sequence
  Synthetic oligonucleotide; TTG chr11 5254437 5254458 5254454 5254459 +
cccatgatggcagaggcagagg

SEQ ID NO: 89469 - DNA, 22 bp, Artificial Sequence
  Synthetic oligonucleotide; TTG chr11 5254467 5254488 5254484 5254489 +
ccaaagctgtcaaagaacctct

SEQ ID NO: 89470 - DNA, 22 bp, Artificial Sequence
  Synthetic oligonucleotide; CTG chr11 5254476 5254497 5254493 5254498 +
tcaaagaacctctgggtccatg

SEQ ID NO: 89471 - DNA, 22 bp, Artificial Sequence
  Synthetic oligonucleotide; CTC chr11 5254488 5254509 5254505 5254510 +
tgggtccatgggtagacaacca

SEQ ID NO: 89472 - DNA, 22 bp, Artificial Sequence
  Synthetic oligonucleotide; CTG chr11 5254490 5254511 5254507 5254512 +
ggtccatgggtagacaaccagg

SEQ ID NO: 89473 - DNA, 22 bp, Artificial Sequence
  Synthetic oligonucleotide; CTG chr11 5254518 5254539 5254535 5254540 +
tgagattgacaagaacagtttg

SEQ ID NO: 89474 - DNA, 22 bp, Artificial Sequence
  Synthetic oligonucleotide; TTG chr11 5254526 5254547 5254543 5254548 +
acaagaacagtttgacagtcag

SEQ ID NO: 89475 - DNA, 22 bp, Artificial Sequence
  Synthetic oligonucleotide; TTT chr11 5254539 5254560 5254556 5254561 +
gacagtcagaaggtgccacaaa

SEQ ID NO: 89476 - DNA, 22 bp, Artificial Sequence
  Synthetic oligonucleotide; TTG chr11 5254540 5254561 5254557 5254562 +
acagtcagaaggtgccacaaat

SEQ ID NO: 89477 - DNA, 22 bp, Artificial Sequence
  Synthetic oligonucleotide; CTG chr11 5254566 5254587 5254583 5254588 +
agaagcgacctggacttttgcc

SEQ ID NO: 89478 - DNA, 22 bp, Artificial Sequence
  Synthetic oligonucleotide; CTG chr11 5254578 5254599 5254595 5254600 +
gacttttgccaggcacagggtc

SEQ ID NO: 89479 - DNA, 22 bp, Artificial Sequence
  Synthetic oligonucleotide; CTT chr11 5254583 5254604 5254600 5254605 +
ttgccaggcacagggtccttcc

SEQ ID NO: 89480 - DNA, 22 bp, Artificial Sequence
  Synthetic oligonucleotide; TTT chr11 5254584 5254605 5254601 5254606 +
tgccaggcacagggtccttcct

SEQ ID NO: 89481 - DNA, 22 bp, Artificial Sequence
  Synthetic oligonucleotide; TTT chr11 5254585 5254606 5254602 5254607 +
gccaggcacagggtccttcctt

SEQ ID NO: 89482 - DNA, 22 bp, Artificial Sequence
  Synthetic oligonucleotide; TTG chr11 5254586 5254607 5254603 5254608 +
ccaggcacagggtccttccttc

SEQ ID NO: 89483 - DNA, 22 bp, Artificial Sequence
  Synthetic oligonucleotide; CTT chr11 5254603 5254624 5254620 5254625 +
ccttccctcccttgtcctggtc

SEQ ID NO: 89484 - DNA, 22 bp, Artificial Sequence
  Synthetic oligonucleotide; TTC chr11 5254604 5254625 5254621 5254626 +
cttccctcccttgtcctggtca

SEQ ID NO: 89485 - DNA, 22 bp, Artificial Sequence
  Synthetic oligonucleotide; CTT chr11 5254607 5254628 5254624 5254629 +
ccctcccttgtcctggtcacca

SEQ ID NO: 89486 - DNA, 22 bp, Artificial Sequence
  Synthetic oligonucleotide; TTC chr11 5254608 5254629 5254625 5254630 +
cctcccttgtcctggtcaccag

SEQ ID NO: 89487 - DNA, 22 bp, Artificial Sequence
  Synthetic oligonucleotide; CTC chr11 5254612 5254633 5254629 5254634 +
ccttgtcctggtcaccagagcc

SEQ ID NO: 89488 - DNA, 22 bp, Artificial Sequence
  Synthetic oligonucleotide; CTT chr11 5254616 5254637 5254633 5254638 +
gtcctggtcaccagagcctacc

SEQ ID NO: 89489 - DNA, 22 bp, Artificial Sequence
  Synthetic oligonucleotide; TTG chr11 5254617 5254638 5254634 5254639 +
tcctggtcaccagagcctacct

SEQ ID NO: 89490 - DNA, 22 bp, Artificial Sequence
  Synthetic oligonucleotide; CTG chr11 5254622 5254643 5254639 5254644 +
gtcaccagagcctaccttccca

SEQ ID NO: 89491 - DNA, 22 bp, Artificial Sequence
  Synthetic oligonucleotide; CTA chr11 5254636 5254657 5254653 5254658 +
ccttcccagggtttctcctcca

SEQ ID NO: 89492 - DNA, 22 bp, Artificial Sequence
  Synthetic oligonucleotide; CTT chr11 5254640 5254661 5254657 5254662 +
cccagggtttctcctccagcat

SEQ ID NO: 89493 - DNA, 22 bp, Artificial Sequence
  Synthetic oligonucleotide; TTC chr11 5254641 5254662 5254658 5254663 +
ccagggtttctcctccagcatc

SEQ ID NO: 89494 - DNA, 22 bp, Artificial Sequence
  Synthetic oligonucleotide; TTT chr11 5254650 5254671 5254667 5254672 +
ctcctccagcatcttccacatt

SEQ ID NO: 89495 - DNA, 22 bp, Artificial Sequence
  Synthetic oligonucleotide; TTC chr11 5254651 5254672 5254668 5254673 +
tcctccagcatcttccacattc

SEQ ID NO: 89496 - DNA, 22 bp, Artificial Sequence
  Synthetic oligonucleotide; CTC chr11 5254653 5254674 5254670 5254675 +
ctccagcatcttccacattcac

SEQ ID NO: 89497 - DNA, 22 bp, Artificial Sequence
  Synthetic oligonucleotide; CTC chr11 5254656 5254677 5254673 5254678 +
cagcatcttccacattcacctt

SEQ ID NO: 89498 - DNA, 22 bp, Artificial Sequence
  Synthetic oligonucleotide; CTT chr11 5254665 5254686 5254682 5254687 +
ccacattcaccttgccccacag

SEQ ID NO: 89499 - DNA, 22 bp, Artificial Sequence
  Synthetic oligonucleotide; TTC chr11 5254666 5254687 5254683 5254688 +
cacattcaccttgccccacagg

SEQ ID NO: 89500 - DNA, 22 bp, Artificial Sequence
  Synthetic oligonucleotide; TTC chr11 5254673 5254694 5254690 5254695 +
accttgccccacaggcttgtga

SEQ ID NO: 89501 - DNA, 22 bp, Artificial Sequence
  Synthetic oligonucleotide; CTT chr11 5254678 5254699 5254695 5254700 +
gccccacaggcttgtgatagta

SEQ ID NO: 89502 - DNA, 22 bp, Artificial Sequence
  Synthetic oligonucleotide; TTG chr11 5254679 5254700 5254696 5254701 +
ccccacaggcttgtgatagtag

SEQ ID NO: 89503 - DNA, 22 bp, Artificial Sequence
  Synthetic oligonucleotide; CTT chr11 5254691 5254712 5254708 5254713 +
gtgatagtagccttgtcctcct

SEQ ID NO: 89504 - DNA, 22 bp, Artificial Sequence
  Synthetic oligonucleotide; TTG chr11 5254692 5254713 5254709 5254714 +
tgatagtagccttgtcctcctc

SEQ ID NO: 89505 - DNA, 22 bp, Artificial Sequence
  Synthetic oligonucleotide; CTT chr11 5254705 5254726 5254722 5254727 +
gtcctcctctgtgaaatgaccc

SEQ ID NO: 89506 - DNA, 22 bp, Artificial Sequence
  Synthetic oligonucleotide; TTG chr11 5254706 5254727 5254723 5254728 +
tcctcctctgtgaaatgaccca

SEQ ID NO: 89507 - DNA, 22 bp, Artificial Sequence
  Synthetic oligonucleotide; CTC chr11 5254711 5254732 5254728 5254733 +
ctctgtgaaatgacccatggcg

SEQ ID NO: 89508 - DNA, 22 bp, Artificial Sequence
  Synthetic oligonucleotide; CTC chr11 5254714 5254735 5254731 5254736 +
tgtgaaatgacccatggcgtct

SEQ ID NO: 89509 - DNA, 22 bp, Artificial Sequence
  Synthetic oligonucleotide; CTG chr11 5254716 5254737 5254733 5254738 +
tgaaatgacccatggcgtctgg

SEQ ID NO: 89510 - DNA, 22 bp, Artificial Sequence
  Synthetic oligonucleotide; CTG chr11 5254737 5254758 5254754 5254759 +
gactaggagcttattgataacc

SEQ ID NO: 89511 - DNA, 22 bp, Artificial Sequence
  Synthetic oligonucleotide; CTA chr11 5254742 5254763 5254759 5254764 +
ggagcttattgataacctcaga

SEQ ID NO: 89512 - DNA, 22 bp, Artificial Sequence
  Synthetic oligonucleotide; CTT chr11 5254749 5254770 5254766 5254771 +
attgataacctcagacgttcca

SEQ ID NO: 89513 - DNA, 22 bp, Artificial Sequence
  Synthetic oligonucleotide; TTA chr11 5254750 5254771 5254767 5254772 +
ttgataacctcagacgttccag

SEQ ID NO: 89514 - DNA, 22 bp, Artificial Sequence
  Synthetic oligonucleotide; TTG chr11 5254753 5254774 5254770 5254775 +
ataacctcagacgttccagaag

SEQ ID NO: 89515 - DNA, 22 bp, Artificial Sequence
  Synthetic oligonucleotide; CTC chr11 5254761 5254782 5254778 5254783 +
agacgttccagaagcgagtgtg

SEQ ID NO: 89516 - DNA, 22 bp, Artificial Sequence
  Synthetic oligonucleotide; TTC chr11 5254769 5254790 5254786 5254791 +
cagaagcgagtgtgtggaactg

SEQ ID NO: 89517 - DNA, 22 bp, Artificial Sequence
  Synthetic oligonucleotide; CTG chr11 5254791 5254812 5254808 5254813 +
ctgaagggtgcttccttttatt

SEQ ID NO: 89518 - DNA, 22 bp, Artificial Sequence
  Synthetic oligonucleotide; CTG chr11 5254794 5254815 5254811 5254816 +
aagggtgcttccttttattctt

SEQ ID NO: 89519 - DNA, 22 bp, Artificial Sequence
  Synthetic oligonucleotide; CTT chr11 5254804 5254825 5254821 5254826 +
ccttttattcttcatccctagc

SEQ ID NO: 89520 - DNA, 22 bp, Artificial Sequence
  Synthetic oligonucleotide; TTC chr11 5254805 5254826 5254822 5254827 +
cttttattcttcatccctagcc

SEQ ID NO: 89521 - DNA, 22 bp, Artificial Sequence
  Synthetic oligonucleotide; CTT chr11 5254808 5254829 5254825 5254830 +
ttattcttcatccctagccagc

SEQ ID NO: 89522 - DNA, 22 bp, Artificial Sequence
  Synthetic oligonucleotide; TTT chr11 5254809 5254830 5254826 5254831 +
tattcttcatccctagccagcc

SEQ ID NO: 89523 - DNA, 22 bp, Artificial Sequence
  Synthetic oligonucleotide; TTT chr11 5254810 5254831 5254827 5254832 +
attcttcatccctagccagccg

SEQ ID NO: 89524 - DNA, 22 bp, Artificial Sequence
  Synthetic oligonucleotide; TTA chr11 5254811 5254832 5254828 5254833 +
ttcttcatccctagccagccgc

SEQ ID NO: 89525 - DNA, 22 bp, Artificial Sequence
  Synthetic oligonucleotide; TTC chr11 5254814 5254835 5254831 5254836 +
ttcatccctagccagccgccgg

SEQ ID NO: 89526 - DNA, 22 bp, Artificial Sequence
  Synthetic oligonucleotide; CTT chr11 5254816 5254837 5254833 5254838 +
catccctagccagccgccggcc

SEQ ID NO: 89527 - DNA, 22 bp, Artificial Sequence
  Synthetic oligonucleotide; TTC chr11 5254817 5254838 5254834 5254839 +
atccctagccagccgccggccc

SEQ ID NO: 89528 - DNA, 22 bp, Artificial Sequence
  Synthetic oligonucleotide; CTA chr11 5254824 5254845 5254841 5254846 +
gccagccgccggcccctggcct

SEQ ID NO: 89529 - DNA, 22 bp, Artificial Sequence
  Synthetic oligonucleotide; CTG chr11 5254842 5254863 5254859 5254864 +
gcctcactggatactctaagac

SEQ ID NO: 89530 - DNA, 22 bp, Artificial Sequence
  Synthetic oligonucleotide; CTC chr11 5254847 5254868 5254864 5254869 +
actggatactctaagactattg

SEQ ID NO: 89531 - DNA, 22 bp, Artificial Sequence
  Synthetic oligonucleotide; CTG chr11 5254851 5254872 5254868 5254873 +
gatactctaagactattggtca

SEQ ID NO: 89532 - DNA, 22 bp, Artificial Sequence
  Synthetic oligonucleotide; CTC chr11 5254858 5254879 5254875 5254880 +
taagactattggtcaagtttgc

SEQ ID NO: 89533 - DNA, 22 bp, Artificial Sequence
  Synthetic oligonucleotide; CTA chr11 5254860 5254881 5254877 5254882 +
agactattggtcaagtttgcct

SEQ ID NO: 89534 - DNA, 22 bp, Artificial Sequence
  Synthetic oligonucleotide; CTA chr11 5254866 5254887 5254883 5254888 +
ttggtcaagtttgccttgtcaa

SEQ ID NO: 89535 - DNA, 22 bp, Artificial Sequence
  Synthetic oligonucleotide; TTG chr11 5254869 5254890 5254886 5254891 +
gtcaagtttgccttgtcaaggc

SEQ ID NO: 89536 - DNA, 22 bp, Artificial Sequence
  Synthetic oligonucleotide; TTT chr11 5254878 5254899 5254895 5254900 +
gccttgtcaaggctattggtca

SEQ ID NO: 89537 - DNA, 22 bp, Artificial Sequence
  Synthetic oligonucleotide; TTG chr11 5254879 5254900 5254896 5254901 +
ccttgtcaaggctattggtcaa

SEQ ID NO: 89538 - DNA, 22 bp, Artificial Sequence
  Synthetic oligonucleotide; CTT chr11 5254883 5254904 5254900 5254905 +
gtcaaggctattggtcaaggca

SEQ ID NO: 89539 - DNA, 22 bp, Artificial Sequence
  Synthetic oligonucleotide; TTG chr11 5254884 5254905 5254901 5254906 +
tcaaggctattggtcaaggcaa

SEQ ID NO: 89540 - DNA, 22 bp, Artificial Sequence
  Synthetic oligonucleotide; CTA chr11 5254893 5254914 5254910 5254915 +
ttggtcaaggcaaggctggcca

SEQ ID NO: 89541 - DNA, 22 bp, Artificial Sequence
  Synthetic oligonucleotide; TTG chr11 5254896 5254917 5254913 5254918 +
gtcaaggcaaggctggccaacc

SEQ ID NO: 89542 - DNA, 22 bp, Artificial Sequence
  Synthetic oligonucleotide; CTG chr11 5254911 5254932 5254928 5254933 +
gccaacccatgggtggagttta

SEQ ID NO: 89543 - DNA, 22 bp, Artificial Sequence
  Synthetic oligonucleotide; TTT chr11 5254932 5254953 5254949 5254954 +
agccagggaccgtttcagacag

SEQ ID NO: 89544 - DNA, 22 bp, Artificial Sequence
  Synthetic oligonucleotide; TTA chr11 5254933 5254954 5254950 5254955 +
gccagggaccgtttcagacaga

SEQ ID NO: 89545 - DNA, 22 bp, Artificial Sequence
  Synthetic oligonucleotide; TTT chr11 5254947 5254968 5254964 5254969 +
cagacagatatttgcattgaga

SEQ ID NO: 89546 - DNA, 22 bp, Artificial Sequence
  Synthetic oligonucleotide; TTC chr11 5254948 5254969 5254965 5254970 +
agacagatatttgcattgagat

SEQ ID NO: 89547 - DNA, 22 bp, Artificial Sequence
  Synthetic oligonucleotide; TTT chr11 5254960 5254981 5254977 5254982 +
gcattgagatagtgtggggaag

SEQ ID NO: 89548 - DNA, 22 bp, Artificial Sequence
  Synthetic oligonucleotide; TTG chr11 5254961 5254982 5254978 5254983 +
cattgagatagtgtggggaagg

SEQ ID NO: 89549 - DNA, 22 bp, Artificial Sequence
  Synthetic oligonucleotide; TTG chr11 5254966 5254987 5254983 5254988 +
agatagtgtggggaaggggccc

SEQ ID NO: 89550 - DNA, 22 bp, Artificial Sequence
  Synthetic oligonucleotide; CTG chr11 5255002 5255023 5255019 5255024 +
ctgcttaattttttttatagcc

SEQ ID NO: 89551 - DNA, 22 bp, Artificial Sequence
  Synthetic oligonucleotide; CTG chr11 5255005 5255026 5255022 5255027 +
cttaattttttttatagccttt

SEQ ID NO: 89552 - DNA, 22 bp, Artificial Sequence
  Synthetic oligonucleotide; CTT chr11 5255008 5255029 5255025 5255030 +
aattttttttatagcctttgcc

SEQ ID NO: 89553 - DNA, 22 bp, Artificial Sequence
  Synthetic oligonucleotide; TTA chr11 5255009 5255030 5255026 5255031 +
attttttttatagcctttgcct

SEQ ID NO: 89554 - DNA, 22 bp, Artificial Sequence
  Synthetic oligonucleotide; TTT chr11 5255013 5255034 5255030 5255035 +
tttttatagcctttgccttgtt

SEQ ID NO: 89555 - DNA, 22 bp, Artificial Sequence
  Synthetic oligonucleotide; TTT chr11 5255014 5255035 5255031 5255036 +
ttttatagcctttgccttgttc

SEQ ID NO: 89556 - DNA, 22 bp, Artificial Sequence
  Synthetic oligonucleotide; TTT chr11 5255015 5255036 5255032 5255037 +
tttatagcctttgccttgttcc

SEQ ID NO: 89557 - DNA, 22 bp, Artificial Sequence
  Synthetic oligonucleotide; TTT chr11 5255016 5255037 5255033 5255038 +
ttatagcctttgccttgttccg

SEQ ID NO: 89558 - DNA, 22 bp, Artificial Sequence
  Synthetic oligonucleotide; TTT chr11 5255017 5255038 5255034 5255039 +
tatagcctttgccttgttccga

SEQ ID NO: 89559 - DNA, 22 bp, Artificial Sequence
  Synthetic oligonucleotide; TTT chr11 5255018 5255039 5255035 5255040 +
atagcctttgccttgttccgat

SEQ ID NO: 89560 - DNA, 22 bp, Artificial Sequence
  Synthetic oligonucleotide; TTA chr11 5255019 5255040 5255036 5255041 +
tagcctttgccttgttccgatt

SEQ ID NO: 89561 - DNA, 22 bp, Artificial Sequence
  Synthetic oligonucleotide; CTT chr11 5255026 5255047 5255043 5255048 +
tgccttgttccgattcagtcat

SEQ ID NO: 89562 - DNA, 22 bp, Artificial Sequence
  Synthetic oligonucleotide; TTT chr11 5255027 5255048 5255044 5255049 +
gccttgttccgattcagtcatt

SEQ ID NO: 89563 - DNA, 22 bp, Artificial Sequence
  Synthetic oligonucleotide; TTG chr11 5255028 5255049 5255045 5255050 +
ccttgttccgattcagtcattc

SEQ ID NO: 89564 - DNA, 22 bp, Artificial Sequence
  Synthetic oligonucleotide; CTT chr11 5255032 5255053 5255049 5255054 +
gttccgattcagtcattccaat

SEQ ID NO: 89565 - DNA, 22 bp, Artificial Sequence
  Synthetic oligonucleotide; TTG chr11 5255033 5255054 5255050 5255055 +
ttccgattcagtcattccaatt

SEQ ID NO: 89566 - DNA, 22 bp, Artificial Sequence
  Synthetic oligonucleotide; TTC chr11 5255036 5255057 5255053 5255058 +
cgattcagtcattccaattttt

SEQ ID NO: 89567 - DNA, 22 bp, Artificial Sequence
  Synthetic oligonucleotide; TTC chr11 5255042 5255063 5255059 5255064 +
agtcattccaatttttctctaa

SEQ ID NO: 89568 - DNA, 22 bp, Artificial Sequence
  Synthetic oligonucleotide; TTC chr11 5255050 5255071 5255067 5255072 +
caatttttctctaatttattct

SEQ ID NO: 89569 - DNA, 22 bp, Artificial Sequence
  Synthetic oligonucleotide; TTT chr11 5255056 5255077 5255073 5255078 +
ttctctaatttattcttccctt

SEQ ID NO: 89570 - DNA, 22 bp, Artificial Sequence
  Synthetic oligonucleotide; TTT chr11 5255057 5255078 5255074 5255079 +
tctctaatttattcttcccttt

SEQ ID NO: 89571 - DNA, 22 bp, Artificial Sequence
  Synthetic oligonucleotide; TTT chr11 5255058 5255079 5255075 5255080 +
ctctaatttattcttcccttta

SEQ ID NO: 89572 - DNA, 22 bp, Artificial Sequence
  Synthetic oligonucleotide; TTC chr11 5255059 5255080 5255076 5255081 +
tctaatttattcttccctttag

SEQ ID NO: 89573 - DNA, 22 bp, Artificial Sequence
  Synthetic oligonucleotide; CTC chr11 5255061 5255082 5255078 5255083 +
taatttattcttccctttagct

SEQ ID NO: 89574 - DNA, 22 bp, Artificial Sequence
  Synthetic oligonucleotide; CTA chr11 5255063 5255084 5255080 5255085 +
atttattcttccctttagctag

SEQ ID NO: 89575 - DNA, 22 bp, Artificial Sequence
  Synthetic oligonucleotide; TTT chr11 5255067 5255088 5255084 5255089 +
attcttccctttagctagtttt

SEQ ID NO: 89576 - DNA, 22 bp, Artificial Sequence
  Synthetic oligonucleotide; TTA chr11 5255068 5255089 5255085 5255090 +
ttcttccctttagctagttttc

SEQ ID NO: 89577 - DNA, 22 bp, Artificial Sequence
  Synthetic oligonucleotide; TTC chr11 5255071 5255092 5255088 5255093 +
ttccctttagctagttttcttc

SEQ ID NO: 89578 - DNA, 22 bp, Artificial Sequence
  Synthetic oligonucleotide; CTT chr11 5255073 5255094 5255090 5255095 +
ccctttagctagttttcttctc

SEQ ID NO: 89579 - DNA, 22 bp, Artificial Sequence
  Synthetic oligonucleotide; TTC chr11 5255074 5255095 5255091 5255096 +
cctttagctagttttcttctcc

SEQ ID NO: 89580 - DNA, 22 bp, Artificial Sequence
  Synthetic oligonucleotide; CTT chr11 5255078 5255099 5255095 5255100 +
tagctagttttcttctcccacc

SEQ ID NO: 89581 - DNA, 22 bp, Artificial Sequence
  Synthetic oligonucleotide; TTT chr11 5255079 5255100 5255096 5255101 +
agctagttttcttctcccacca

SEQ ID NO: 89582 - DNA, 22 bp, Artificial Sequence
  Synthetic oligonucleotide; TTA chr11 5255080 5255101 5255097 5255102 +
gctagttttcttctcccaccat

SEQ ID NO: 89583 - DNA, 22 bp, Artificial Sequence
  Synthetic oligonucleotide; CTA chr11 5255084 5255105 5255101 5255106 +
gttttcttctcccaccatagaa

SEQ ID NO: 89584 - DNA, 22 bp, Artificial Sequence
  Synthetic oligonucleotide; TTT chr11 5255088 5255109 5255105 5255110 +
tcttctcccaccatagaagata

SEQ ID NO: 89585 - DNA, 22 bp, Artificial Sequence
  Synthetic oligonucleotide; TTT chr11 5255089 5255110 5255106 5255111 +
cttctcccaccatagaagatac

SEQ ID NO: 89586 - DNA, 22 bp, Artificial Sequence
  Synthetic oligonucleotide; TTC chr11 5255090 5255111 5255107 5255112 +
ttctcccaccatagaagatacc

SEQ ID NO: 89587 - DNA, 22 bp, Artificial Sequence
  Synthetic oligonucleotide; CTT chr11 5255092 5255113 5255109 5255114 +
ctcccaccatagaagataccag

SEQ ID NO: 89588 - DNA, 22 bp, Artificial Sequence
  Synthetic oligonucleotide; TTC chr11 5255093 5255114 5255110 5255115 +
tcccaccatagaagataccagg

SEQ ID NO: 89589 - DNA, 22 bp, Artificial Sequence
  Synthetic oligonucleotide; CTC chr11 5255095 5255116 5255112 5255117 +
ccaccatagaagataccaggac

SEQ ID NO: 89590 - DNA, 22 bp, Artificial Sequence
  Synthetic oligonucleotide; CTT chr11 5255119 5255140 5255136 5255141 +
cttttgtcagccgtttttcacc

SEQ ID NO: 89591 - DNA, 22 bp, Artificial Sequence
  Synthetic oligonucleotide; TTC chr11 5255120 5255141 5255137 5255142 +
ttttgtcagccgtttttcacct

SEQ ID NO: 89592 - DNA, 22 bp, Artificial Sequence
  Synthetic oligonucleotide; CTT chr11 5255122 5255143 5255139 5255144 +
ttgtcagccgtttttcaccttc

SEQ ID NO: 89593 - DNA, 22 bp, Artificial Sequence
  Synthetic oligonucleotide; TTT chr11 5255123 5255144 5255140 5255145 +
tgtcagccgtttttcaccttct

SEQ ID NO: 89594 - DNA, 22 bp, Artificial Sequence
  Synthetic oligonucleotide; TTT chr11 5255124 5255145 5255141 5255146 +
gtcagccgtttttcaccttctt

SEQ ID NO: 89595 - DNA, 22 bp, Artificial Sequence
  Synthetic oligonucleotide; TTG chr11 5255125 5255146 5255142 5255147 +
tcagccgtttttcaccttcttg

SEQ ID NO: 89596 - DNA, 22 bp, Artificial Sequence
  Synthetic oligonucleotide; TTT chr11 5255135 5255156 5255152 5255157 +
ttcaccttcttgtctgtagctc

SEQ ID NO: 89597 - DNA, 22 bp, Artificial Sequence
  Synthetic oligonucleotide; TTT chr11 5255136 5255157 5255153 5255158 +
tcaccttcttgtctgtagctcc

SEQ ID NO: 89598 - DNA, 22 bp, Artificial Sequence
  Synthetic oligonucleotide; TTT chr11 5255137 5255158 5255154 5255159 +
caccttcttgtctgtagctcca

SEQ ID NO: 89599 - DNA, 22 bp, Artificial Sequence
  Synthetic oligonucleotide; TTC chr11 5255138 5255159 5255155 5255160 +
accttcttgtctgtagctccag

SEQ ID NO: 89600 - DNA, 22 bp, Artificial Sequence
  Synthetic oligonucleotide; CTT chr11 5255143 5255164 5255160 5255165 +
cttgtctgtagctccagtgagg

SEQ ID NO: 89601 - DNA, 22 bp, Artificial Sequence
  Synthetic oligonucleotide; TTC chr11 5255144 5255165 5255161 5255166 +
ttgtctgtagctccagtgaggc

SEQ ID NO: 89602 - DNA, 22 bp, Artificial Sequence
  Synthetic oligonucleotide; CTT chr11 5255146 5255167 5255163 5255168 +
gtctgtagctccagtgaggcct

SEQ ID NO: 89603 - DNA, 22 bp, Artificial Sequence
  Synthetic oligonucleotide; TTG chr11 5255147 5255168 5255164 5255169 +
tctgtagctccagtgaggcctg

SEQ ID NO: 89604 - DNA, 22 bp, Artificial Sequence
  Synthetic oligonucleotide; CTG chr11 5255151 5255172 5255168 5255173 +
tagctccagtgaggcctgtagt

SEQ ID NO: 89605 - DNA, 22 bp, Artificial Sequence
  Synthetic oligonucleotide; CTC chr11 5255157 5255178 5255174 5255179 +
cagtgaggcctgtagtttaaag

SEQ ID NO: 89606 - DNA, 22 bp, Artificial Sequence
  Synthetic oligonucleotide; CTG chr11 5255169 5255190 5255186 5255191 +
tagtttaaagttaaagcatgta

SEQ ID NO: 89607 - DNA, 22 bp, Artificial Sequence
  Synthetic oligonucleotide; TTT chr11 5255175 5255196 5255192 5255197 +
aaagttaaagcatgtaccaatt

SEQ ID NO: 89608 - DNA, 22 bp, Artificial Sequence
  Synthetic oligonucleotide; TTA chr11 5255176 5255197 5255193 5255198 +
aagttaaagcatgtaccaattt

SEQ ID NO: 89609 - DNA, 22 bp, Artificial Sequence
  Synthetic oligonucleotide; TTA chr11 5255182 5255203 5255199 5255204 +
aagcatgtaccaatttttgaaa

SEQ ID NO: 89610 - DNA, 22 bp, Artificial Sequence
  Synthetic oligonucleotide; TTT chr11 5255198 5255219 5255215 5255220 +
ttgaaaagttcagggattgtga

SEQ ID NO: 89611 - DNA, 22 bp, Artificial Sequence
  Synthetic oligonucleotide; TTT chr11 5255199 5255220 5255216 5255221 +
tgaaaagttcagggattgtgaa

SEQ ID NO: 89612 - DNA, 22 bp, Artificial Sequence
  Synthetic oligonucleotide; TTT chr11 5255200 5255221 5255217 5255222 +
gaaaagttcagggattgtgaaa

SEQ ID NO: 89613 - DNA, 22 bp, Artificial Sequence
  Synthetic oligonucleotide; TTG chr11 5255201 5255222 5255218 5255223 +
aaaagttcagggattgtgaaat

SEQ ID NO: 89614 - DNA, 22 bp, Artificial Sequence
  Synthetic oligonucleotide; TTC chr11 5255209 5255230 5255226 5255231 +
agggattgtgaaatgtgtttta

SEQ ID NO: 89615 - DNA, 22 bp, Artificial Sequence
  Synthetic oligonucleotide; TTG chr11 5255217 5255238 5255234 5255239 +
tgaaatgtgttttaggcatagg

SEQ ID NO: 89616 - DNA, 22 bp, Artificial Sequence
  Synthetic oligonucleotide; TTT chr11 5255229 5255250 5255246 5255251 +
taggcataggtccaggattttt

SEQ ID NO: 89617 - DNA, 22 bp, Artificial Sequence
  Synthetic oligonucleotide; TTT chr11 5255230 5255251 5255247 5255252 +
aggcataggtccaggatttttg

SEQ ID NO: 89618 - DNA, 22 bp, Artificial Sequence
  Synthetic oligonucleotide; TTA chr11 5255231 5255252 5255248 5255253 +
ggcataggtccaggatttttga

SEQ ID NO: 89619 - DNA, 22 bp, Artificial Sequence
  Synthetic oligonucleotide; TTT chr11 5255249 5255270 5255266 5255271 +
ttgatgggacacgtcttagtct

SEQ ID NO: 89620 - DNA, 22 bp, Artificial Sequence
  Synthetic oligonucleotide; TTT chr11 5255250 5255271 5255267 5255272 +
tgatgggacacgtcttagtctc

SEQ ID NO: 89621 - DNA, 22 bp, Artificial Sequence
  Synthetic oligonucleotide; TTT chr11 5255251 5255272 5255268 5255273 +
gatgggacacgtcttagtctca

SEQ ID NO: 89622 - DNA, 22 bp, Artificial Sequence
  Synthetic oligonucleotide; TTG chr11 5255252 5255273 5255269 5255274 +
atgggacacgtcttagtctcat

SEQ ID NO: 89623 - DNA, 22 bp, Artificial Sequence
  Synthetic oligonucleotide; CTT chr11 5255266 5255287 5255283 5255288 +
agtctcatttagtaagcattgg

SEQ ID NO: 89624 - DNA, 22 bp, Artificial Sequence
  Synthetic oligonucleotide; TTA chr11 5255267 5255288 5255284 5255289 +
gtctcatttagtaagcattggt

SEQ ID NO: 89625 - DNA, 22 bp, Artificial Sequence
  Synthetic oligonucleotide; CTC chr11 5255272 5255293 5255289 5255294 +
atttagtaagcattggtttcca

SEQ ID NO: 89626 - DNA, 22 bp, Artificial Sequence
  Synthetic oligonucleotide; TTT chr11 5255276 5255297 5255293 5255298 +
agtaagcattggtttccaaata

SEQ ID NO: 89627 - DNA, 22 bp, Artificial Sequence
  Synthetic oligonucleotide; TTA chr11 5255277 5255298 5255294 5255299 +
gtaagcattggtttccaaataa

SEQ ID NO: 89628 - DNA, 22 bp, Artificial Sequence
  Synthetic oligonucleotide; TTG chr11 5255287 5255308 5255304 5255309 +
gtttccaaataagaagtgctat

SEQ ID NO: 89629 - DNA, 22 bp, Artificial Sequence
  Synthetic oligonucleotide; TTT chr11 5255291 5255312 5255308 5255313 +
ccaaataagaagtgctatactt

SEQ ID NO: 89630 - DNA, 22 bp, Artificial Sequence
  Synthetic oligonucleotide; TTC chr11 5255292 5255313 5255309 5255314 +
caaataagaagtgctatactta

SEQ ID NO: 89631 - DNA, 22 bp, Artificial Sequence
  Synthetic oligonucleotide; CTA chr11 5255308 5255329 5255325 5255330 +
tacttatctttgaatatactct

SEQ ID NO: 89632 - DNA, 22 bp, Artificial Sequence
  Synthetic oligonucleotide; CTT chr11 5255313 5255334 5255330 5255335 +
atctttgaatatactctctgtg

SEQ ID NO: 89633 - DNA, 22 bp, Artificial Sequence
  Synthetic oligonucleotide; TTA chr11 5255314 5255335 5255331 5255336 +
tctttgaatatactctctgtgg

SEQ ID NO: 89634 - DNA, 22 bp, Artificial Sequence
  Synthetic oligonucleotide; CTT chr11 5255318 5255339 5255335 5255340 +
tgaatatactctctgtggtttt

SEQ ID NO: 89635 - DNA, 22 bp, Artificial Sequence
  Synthetic oligonucleotide; TTT chr11 5255319 5255340 5255336 5255341 +
gaatatactctctgtggtttta

SEQ ID NO: 89636 - DNA, 22 bp, Artificial Sequence
  Synthetic oligonucleotide; TTG chr11 5255320 5255341 5255337 5255342 +
aatatactctctgtggttttag

SEQ ID NO: 89637 - DNA, 22 bp, Artificial Sequence
  Synthetic oligonucleotide; CTC chr11 5255329 5255350 5255346 5255351 +
tctgtggttttaggccattatc

SEQ ID NO: 89638 - DNA, 22 bp, Artificial Sequence
  Synthetic oligonucleotide; CTC chr11 5255331 5255352 5255348 5255353 +
tgtggttttaggccattatctc

SEQ ID NO: 89639 - DNA, 22 bp, Artificial Sequence
  Synthetic oligonucleotide; CTG chr11 5255333 5255354 5255350 5255355 +
tggttttaggccattatctctt

SEQ ID NO: 89640 - DNA, 22 bp, Artificial Sequence
  Synthetic oligonucleotide; TTT chr11 5255339 5255360 5255356 5255361 +
taggccattatctcttaagttc

SEQ ID NO: 89641 - DNA, 22 bp, Artificial Sequence
  Synthetic oligonucleotide; TTT chr11 5255340 5255361 5255357 5255362 +
aggccattatctcttaagttct

SEQ ID NO: 89642 - DNA, 22 bp, Artificial Sequence
  Synthetic oligonucleotide; TTA chr11 5255341 5255362 5255358 5255363 +
ggccattatctcttaagttctc

SEQ ID NO: 89643 - DNA, 22 bp, Artificial Sequence
  Synthetic oligonucleotide; TTA chr11 5255349 5255370 5255366 5255371 +
tctcttaagttctcattagtgt

SEQ ID NO: 89644 - DNA, 22 bp, Artificial Sequence
  Synthetic oligonucleotide; CTC chr11 5255353 5255374 5255370 5255375 +
ttaagttctcattagtgtagtg

SEQ ID NO: 89645 - DNA, 22 bp, Artificial Sequence
  Synthetic oligonucleotide; CTT chr11 5255355 5255376 5255372 5255377 +
aagttctcattagtgtagtgaa

SEQ ID NO: 89646 - DNA, 22 bp, Artificial Sequence
  Synthetic oligonucleotide; TTA chr11 5255356 5255377 5255373 5255378 +
agttctcattagtgtagtgaaa

SEQ ID NO: 89647 - DNA, 22 bp, Artificial Sequence
  Synthetic oligonucleotide; TTC chr11 5255361 5255382 5255378 5255383 +
tcattagtgtagtgaaaaatcc

SEQ ID NO: 89648 - DNA, 22 bp, Artificial Sequence
  Synthetic oligonucleotide; CTC chr11 5255363 5255384 5255380 5255385 +
attagtgtagtgaaaaatccta

SEQ ID NO: 89649 - DNA, 22 bp, Artificial Sequence
  Synthetic oligonucleotide; TTA chr11 5255367 5255388 5255384 5255389 +
gtgtagtgaaaaatcctataaa

SEQ ID NO: 89650 - DNA, 22 bp, Artificial Sequence
  Synthetic oligonucleotide; CTA chr11 5255385 5255406 5255402 5255407 +
taaagcaacagtttcagtgcag

SEQ ID NO: 89651 - DNA, 22 bp, Artificial Sequence
  Synthetic oligonucleotide; TTT chr11 5255399 5255420 5255416 5255421 +
cagtgcaggaatagattaatgt

SEQ ID NO: 89652 - DNA, 22 bp, Artificial Sequence
  Synthetic oligonucleotide; TTC chr11 5255400 5255421 5255417 5255422 +
agtgcaggaatagattaatgtt

SEQ ID NO: 89653 - DNA, 22 bp, Artificial Sequence
  Synthetic oligonucleotide; TTA chr11 5255417 5255438 5255434 5255439 +
atgttatgtaatataatataag

SEQ ID NO: 89654 - DNA, 22 bp, Artificial Sequence
  Synthetic oligonucleotide; TTA chr11 5255423 5255444 5255440 5255445 +
tgtaatataatataagactgaa

SEQ ID NO: 89655 - DNA, 22 bp, Artificial Sequence
  Synthetic oligonucleotide; CTG chr11 5255443 5255464 5255460 5255465 +
aatccttacttcaatatctact

SEQ ID NO: 89656 - DNA, 22 bp, Artificial Sequence
  Synthetic oligonucleotide; CTT chr11 5255450 5255471 5255467 5255472 +
acttcaatatctacttatccgt

SEQ ID NO: 89657 - DNA, 22 bp, Artificial Sequence
  Synthetic oligonucleotide; TTA chr11 5255451 5255472 5255468 5255473 +
cttcaatatctacttatccgta

SEQ ID NO: 89658 - DNA, 22 bp, Artificial Sequence
  Synthetic oligonucleotide; CTT chr11 5255454 5255475 5255471 5255476 +
caatatctacttatccgtacct

SEQ ID NO: 89659 - DNA, 22 bp, Artificial Sequence
  Synthetic oligonucleotide; TTC chr11 5255455 5255476 5255472 5255477 +
aatatctacttatccgtaccta

SEQ ID NO: 89660 - DNA, 22 bp, Artificial Sequence
  Synthetic oligonucleotide; CTA chr11 5255463 5255484 5255480 5255485 +
cttatccgtacctatttgaaat

SEQ ID NO: 89661 - DNA, 22 bp, Artificial Sequence
  Synthetic oligonucleotide; CTT chr11 5255466 5255487 5255483 5255488 +
atccgtacctatttgaaataaa

SEQ ID NO: 89662 - DNA, 22 bp, Artificial Sequence
  Synthetic oligonucleotide; TTA chr11 5255467 5255488 5255484 5255489 +
tccgtacctatttgaaataaat

SEQ ID NO: 89663 - DNA, 22 bp, Artificial Sequence
  Synthetic oligonucleotide; CTA chr11 5255477 5255498 5255494 5255499 +
tttgaaataaatcacgcctgtt

SEQ ID NO: 89664 - DNA, 22 bp, Artificial Sequence
  Synthetic oligonucleotide; TTT chr11 5255480 5255501 5255497 5255502 +
gaaataaatcacgcctgtttca

SEQ ID NO: 89665 - DNA, 22 bp, Artificial Sequence
  Synthetic oligonucleotide; TTG chr11 5255481 5255502 5255498 5255503 +
aaataaatcacgcctgtttcat

SEQ ID NO: 89666 - DNA, 22 bp, Artificial Sequence
  Synthetic oligonucleotide; CTG chr11 5255497 5255518 5255514 5255519 +
tttcatctcagcaaaagtattt

SEQ ID NO: 89667 - DNA, 22 bp, Artificial Sequence
  Synthetic oligonucleotide; TTT chr11 5255500 5255521 5255517 5255522 +
catctcagcaaaagtatttttt

SEQ ID NO: 89668 - DNA, 22 bp, Artificial Sequence
  Synthetic oligonucleotide; TTC chr11 5255501 5255522 5255518 5255523 +
atctcagcaaaagtattttttt

SEQ ID NO: 89669 - DNA, 22 bp, Artificial Sequence
  Synthetic oligonucleotide; CTC chr11 5255506 5255527 5255523 5255528 +
agcaaaagtattttttttatat

SEQ ID NO: 89670 - DNA, 22 bp, Artificial Sequence
  Synthetic oligonucleotide; TTT chr11 5255519 5255540 5255536 5255541 +
tttttatattcaggtatgtatg

SEQ ID NO: 89671 - DNA, 22 bp, Artificial Sequence
  Synthetic oligonucleotide; TTT chr11 5255520 5255541 5255537 5255542 +
ttttatattcaggtatgtatgt

SEQ ID NO: 89672 - DNA, 22 bp, Artificial Sequence
  Synthetic oligonucleotide; TTT chr11 5255521 5255542 5255538 5255543 +
tttatattcaggtatgtatgta

SEQ ID NO: 89673 - DNA, 22 bp, Artificial Sequence
  Synthetic oligonucleotide; TTT chr11 5255522 5255543 5255539 5255544 +
ttatattcaggtatgtatgtag

SEQ ID NO: 89674 - DNA, 22 bp, Artificial Sequence
  Synthetic oligonucleotide; TTT chr11 5255523 5255544 5255540 5255545 +
tatattcaggtatgtatgtagg

SEQ ID NO: 89675 - DNA, 22 bp, Artificial Sequence
  Synthetic oligonucleotide; TTT chr11 5255524 5255545 5255541 5255546 +
atattcaggtatgtatgtaggc

SEQ ID NO: 89676 - DNA, 22 bp, Artificial Sequence
  Synthetic oligonucleotide; TTA chr11 5255525 5255546 5255542 5255547 +
tattcaggtatgtatgtaggca

SEQ ID NO: 89677 - DNA, 22 bp, Artificial Sequence
  Synthetic oligonucleotide; TTC chr11 5255530 5255551 5255547 5255552 +
aggtatgtatgtaggcacccga

SEQ ID NO: 89678 - DNA, 22 bp, Artificial Sequence
  Synthetic oligonucleotide; TTT chr11 5255564 5255585 5255581 5255586 +
atcactggataagtgtatgtgc

SEQ ID NO: 89679 - DNA, 22 bp, Artificial Sequence
  Synthetic oligonucleotide; TTA chr11 5255565 5255586 5255582 5255587 +
tcactggataagtgtatgtgct

SEQ ID NO: 89680 - DNA, 22 bp, Artificial Sequence
  Synthetic oligonucleotide; CTG chr11 5255571 5255592 5255588 5255593 +
gataagtgtatgtgctggctga

SEQ ID NO: 89681 - DNA, 22 bp, Artificial Sequence
  Synthetic oligonucleotide; CTG chr11 5255588 5255609 5255605 5255610 +
gctgatgacccagggttttggt

SEQ ID NO: 89682 - DNA, 22 bp, Artificial Sequence
  Synthetic oligonucleotide; CTG chr11 5255592 5255613 5255609 5255614 +
atgacccagggttttggtgtag

SEQ ID NO: 89683 - DNA, 22 bp, Artificial Sequence
  Synthetic oligonucleotide; TTT chr11 5255606 5255627 5255623 5255628 +
tggtgtagctcttctatgctcg

SEQ ID NO: 89684 - DNA, 22 bp, Artificial Sequence
  Synthetic oligonucleotide; TTT chr11 5255607 5255628 5255624 5255629 +
ggtgtagctcttctatgctcgg

SEQ ID NO: 89685 - DNA, 22 bp, Artificial Sequence
  Synthetic oligonucleotide; TTG chr11 5255608 5255629 5255625 5255630 +
gtgtagctcttctatgctcggt

SEQ ID NO: 89686 - DNA, 22 bp, Artificial Sequence
  Synthetic oligonucleotide; CTC chr11 5255617 5255638 5255634 5255639 +
ttctatgctcggtaaagatgat

SEQ ID NO: 89687 - DNA, 22 bp, Artificial Sequence
  Synthetic oligonucleotide; CTT chr11 5255619 5255640 5255636 5255641 +
ctatgctcggtaaagatgatgg

SEQ ID NO: 89688 - DNA, 22 bp, Artificial Sequence
  Synthetic oligonucleotide; TTC chr11 5255620 5255641 5255637 5255642 +
tatgctcggtaaagatgatggt

SEQ ID NO: 89689 - DNA, 22 bp, Artificial Sequence
  Synthetic oligonucleotide; CTA chr11 5255622 5255643 5255639 5255644 +
tgctcggtaaagatgatggtag

SEQ ID NO: 89690 - DNA, 22 bp, Artificial Sequence
  Synthetic oligonucleotide; CTC chr11 5255627 5255648 5255644 5255649 +
ggtaaagatgatggtagaatgc

SEQ ID NO: 89691 - DNA, 22 bp, Artificial Sequence
  Synthetic oligonucleotide; CTC chr11 5255651 5255672 5255668 5255673 +
tttaccagatactatggattag

SEQ ID NO: 89692 - DNA, 22 bp, Artificial Sequence
  Synthetic oligonucleotide; CTT chr11 5255653 5255674 5255670 5255675 +
taccagatactatggattagaa

SEQ ID NO: 89693 - DNA, 22 bp, Artificial Sequence
  Synthetic oligonucleotide; TTT chr11 5255654 5255675 5255671 5255676 +
accagatactatggattagaat

SEQ ID NO: 89694 - DNA, 22 bp, Artificial Sequence
  Synthetic oligonucleotide; TTA chr11 5255655 5255676 5255672 5255677 +
ccagatactatggattagaatt

SEQ ID NO: 89695 - DNA, 22 bp, Artificial Sequence
  Synthetic oligonucleotide; CTA chr11 5255665 5255686 5255682 5255687 +
tggattagaattaattatcttg

SEQ ID NO: 89696 - DNA, 22 bp, Artificial Sequence
  Synthetic oligonucleotide; TTA chr11 5255672 5255693 5255689 5255694 +
gaattaattatcttgtataaat

SEQ ID NO: 89697 - DNA, 22 bp, Artificial Sequence
  Synthetic oligonucleotide; TTA chr11 5255678 5255699 5255695 5255700 +
attatcttgtataaatgctagg

SEQ ID NO: 89698 - DNA, 22 bp, Artificial Sequence
  Synthetic oligonucleotide; TTA chr11 5255682 5255703 5255699 5255704 +
tcttgtataaatgctaggttca

SEQ ID NO: 89699 - DNA, 22 bp, Artificial Sequence
  Synthetic oligonucleotide; CTT chr11 5255686 5255707 5255703 5255708 +
gtataaatgctaggttcacttc

SEQ ID NO: 89700 - DNA, 22 bp, Artificial Sequence
  Synthetic oligonucleotide; TTG chr11 5255687 5255708 5255704 5255709 +
tataaatgctaggttcacttct

SEQ ID NO: 89701 - DNA, 22 bp, Artificial Sequence
  Synthetic oligonucleotide; CTA chr11 5255698 5255719 5255715 5255720 +
ggttcacttcttagggaatctt

SEQ ID NO: 89702 - DNA, 22 bp, Artificial Sequence
  Synthetic oligonucleotide; TTC chr11 5255703 5255724 5255720 5255725 +
acttcttagggaatcttattct

SEQ ID NO: 89703 - DNA, 22 bp, Artificial Sequence
  Synthetic oligonucleotide; CTT chr11 5255707 5255728 5255724 5255729 +
cttagggaatcttattctaaga

SEQ ID NO: 89704 - DNA, 22 bp, Artificial Sequence
  Synthetic oligonucleotide; TTC chr11 5255708 5255729 5255725 5255730 +
ttagggaatcttattctaagac

SEQ ID NO: 89705 - DNA, 22 bp, Artificial Sequence
  Synthetic oligonucleotide; CTT chr11 5255710 5255731 5255727 5255732 +
agggaatcttattctaagacat

SEQ ID NO: 89706 - DNA, 22 bp, Artificial Sequence
  Synthetic oligonucleotide; TTA chr11 5255711 5255732 5255728 5255733 +
gggaatcttattctaagacata

SEQ ID NO: 89707 - DNA, 22 bp, Artificial Sequence
  Synthetic oligonucleotide; CTT chr11 5255720 5255741 5255737 5255742 +
attctaagacataagacatgta

SEQ ID NO: 89708 - DNA, 22 bp, Artificial Sequence
  Synthetic oligonucleotide; TTA chr11 5255721 5255742 5255738 5255743 +
ttctaagacataagacatgtat

SEQ ID NO: 89709 - DNA, 22 bp, Artificial Sequence
  Synthetic oligonucleotide; TTC chr11 5255724 5255745 5255741 5255746 +
taagacataagacatgtatttg

SEQ ID NO: 89710 - DNA, 22 bp, Artificial Sequence
  Synthetic oligonucleotide; CTA chr11 5255726 5255747 5255743 5255748 +
agacataagacatgtatttgca

SEQ ID NO: 89711 - DNA, 22 bp, Artificial Sequence
  Synthetic oligonucleotide; TTT chr11 5255745 5255766 5255762 5255767 +
gcatggaaaacaactcttaaga

SEQ ID NO: 89712 - DNA, 22 bp, Artificial Sequence
  Synthetic oligonucleotide; TTG chr11 5255746 5255767 5255763 5255768 +
catggaaaacaactcttaagag

SEQ ID NO: 89713 - DNA, 22 bp, Artificial Sequence
  Synthetic oligonucleotide; CTC chr11 5255761 5255782 5255778 5255783 +
ttaagaggcagggactgtttta

SEQ ID NO: 89714 - DNA, 22 bp, Artificial Sequence
  Synthetic oligonucleotide; CTT chr11 5255763 5255784 5255780 5255785 +
aagaggcagggactgttttatt

SEQ ID NO: 89715 - DNA, 22 bp, Artificial Sequence
  Synthetic oligonucleotide; TTA chr11 5255764 5255785 5255781 5255786 +
agaggcagggactgttttattg

SEQ ID NO: 89716 - DNA, 22 bp, Artificial Sequence
  Synthetic oligonucleotide; CTG chr11 5255778 5255799 5255795 5255800 +
ttttattgactaatagtccaca

SEQ ID NO: 89717 - DNA, 22 bp, Artificial Sequence
  Synthetic oligonucleotide; TTT chr11 5255781 5255802 5255798 5255803 +
tattgactaatagtccacacac

SEQ ID NO: 89718 - DNA, 22 bp, Artificial Sequence
  Synthetic oligonucleotide; TTT chr11 5255782 5255803 5255799 5255804 +
attgactaatagtccacacact

SEQ ID NO: 89719 - DNA, 22 bp, Artificial Sequence
  Synthetic oligonucleotide; TTA chr11 5255783 5255804 5255800 5255805 +
ttgactaatagtccacacactg

SEQ ID NO: 89720 - DNA, 22 bp, Artificial Sequence
  Synthetic oligonucleotide; TTG chr11 5255786 5255807 5255803 5255808 +
actaatagtccacacactgtga

SEQ ID NO: 89721 - DNA, 22 bp, Artificial Sequence
  Synthetic oligonucleotide; CTA chr11 5255790 5255811 5255807 5255812 +
atagtccacacactgtgacagc

SEQ ID NO: 89722 - DNA, 22 bp, Artificial Sequence
  Synthetic oligonucleotide; CTG chr11 5255805 5255826 5255822 5255827 +
tgacagctgggatgtcactgta

SEQ ID NO: 89723 - DNA, 22 bp, Artificial Sequence
  Synthetic oligonucleotide; CTG chr11 5255814 5255835 5255831 5255836 +
ggatgtcactgtagtttagaca

SEQ ID NO: 89724 - DNA, 22 bp, Artificial Sequence
  Synthetic oligonucleotide; CTG chr11 5255825 5255846 5255842 5255847 +
tagtttagacatctttatctgt

SEQ ID NO: 89725 - DNA, 22 bp, Artificial Sequence
  Synthetic oligonucleotide; TTT chr11 5255831 5255852 5255848 5255853 +
agacatctttatctgtaactca

SEQ ID NO: 89726 - DNA, 22 bp, Artificial Sequence
  Synthetic oligonucleotide; TTA chr11 5255832 5255853 5255849 5255854 +
gacatctttatctgtaactcag

SEQ ID NO: 89727 - DNA, 22 bp, Artificial Sequence
  Synthetic oligonucleotide; CTT chr11 5255840 5255861 5255857 5255862 +
tatctgtaactcagtgctgttt

SEQ ID NO: 89728 - DNA, 22 bp, Artificial Sequence
  Synthetic oligonucleotide; TTT chr11 5255841 5255862 5255858 5255863 +
atctgtaactcagtgctgtttc

SEQ ID NO: 89729 - DNA, 22 bp, Artificial Sequence
  Synthetic oligonucleotide; TTA chr11 5255842 5255863 5255859 5255864 +
tctgtaactcagtgctgtttct

SEQ ID NO: 89730 - DNA, 22 bp, Artificial Sequence
  Synthetic oligonucleotide; CTG chr11 5255846 5255867 5255863 5255868 +
taactcagtgctgtttctgaca

SEQ ID NO: 89731 - DNA, 22 bp, Artificial Sequence
  Synthetic oligonucleotide; CTC chr11 5255852 5255873 5255869 5255874 +
agtgctgtttctgacatattgg

SEQ ID NO: 89732 - DNA, 22 bp, Artificial Sequence
  Synthetic oligonucleotide; CTG chr11 5255859 5255880 5255876 5255881 +
tttctgacatattggccactta

SEQ ID NO: 89733 - DNA, 22 bp, Artificial Sequence
  Synthetic oligonucleotide; TTT chr11 5255862 5255883 5255879 5255884 +
ctgacatattggccacttaaca

SEQ ID NO: 89734 - DNA, 22 bp, Artificial Sequence
  Synthetic oligonucleotide; TTC chr11 5255863 5255884 5255880 5255885 +
tgacatattggccacttaacat

SEQ ID NO: 89735 - DNA, 22 bp, Artificial Sequence
  Synthetic oligonucleotide; CTG chr11 5255865 5255886 5255882 5255887 +
acatattggccacttaacatgg

SEQ ID NO: 89736 - DNA, 22 bp, Artificial Sequence
  Synthetic oligonucleotide; TTG chr11 5255873 5255894 5255890 5255895 +
gccacttaacatggcaggaagt

SEQ ID NO: 89737 - DNA, 22 bp, Artificial Sequence
  Synthetic oligonucleotide; CTT chr11 5255880 5255901 5255897 5255902 +
aacatggcaggaagtattcatg

SEQ ID NO: 89738 - DNA, 22 bp, Artificial Sequence
  Synthetic oligonucleotide; TTA chr11 5255881 5255902 5255898 5255903 +
acatggcaggaagtattcatgc

SEQ ID NO: 89739 - DNA, 22 bp, Artificial Sequence
  Synthetic oligonucleotide; TTC chr11 5255899 5255920 5255916 5255921 +
atgctgtttttttctttatttt

SEQ ID NO: 89740 - DNA, 22 bp, Artificial Sequence
  Synthetic oligonucleotide; CTG chr11 5255905 5255926 5255922 5255927 +
tttttttctttattttttcttt

SEQ ID NO: 89741 - DNA, 22 bp, Artificial Sequence
  Synthetic oligonucleotide; TTT chr11 5255908 5255929 5255925 5255930 +
ttttctttattttttctttggg

SEQ ID NO: 89742 - DNA, 22 bp, Artificial Sequence
  Synthetic oligonucleotide; TTT chr11 5255909 5255930 5255926 5255931 +
tttctttattttttctttggga

SEQ ID NO: 89743 - DNA, 22 bp, Artificial Sequence
  Synthetic oligonucleotide; TTT chr11 5255910 5255931 5255927 5255932 +
ttctttattttttctttgggat

SEQ ID NO: 89744 - DNA, 22 bp, Artificial Sequence
  Synthetic oligonucleotide; TTT chr11 5255911 5255932 5255928 5255933 +
tctttattttttctttgggatt

SEQ ID NO: 89745 - DNA, 22 bp, Artificial Sequence
  Synthetic oligonucleotide; TTT chr11 5255912 5255933 5255929 5255934 +
ctttattttttctttgggattt

SEQ ID NO: 89746 - DNA, 22 bp, Artificial Sequence
  Synthetic oligonucleotide; TTC chr11 5255913 5255934 5255930 5255935 +
tttattttttctttgggatttt

SEQ ID NO: 89747 - DNA, 22 bp, Artificial Sequence
  Synthetic oligonucleotide; CTT chr11 5255915 5255936 5255932 5255937 +
tattttttctttgggattttta

SEQ ID NO: 89748 - DNA, 22 bp, Artificial Sequence
  Synthetic oligonucleotide; TTT chr11 5255916 5255937 5255933 5255938 +
attttttctttgggatttttat

SEQ ID NO: 89749 - DNA, 22 bp, Artificial Sequence
  Synthetic oligonucleotide; TTA chr11 5255917 5255938 5255934 5255939 +
ttttttctttgggatttttatt

SEQ ID NO: 89750 - DNA, 22 bp, Artificial Sequence
  Synthetic oligonucleotide; TTT chr11 5255920 5255941 5255937 5255942 +
tttctttgggatttttattttt

SEQ ID NO: 89751 - DNA, 22 bp, Artificial Sequence
  Synthetic oligonucleotide; TTT chr11 5255921 5255942 5255938 5255943 +
ttctttgggatttttatttttt

SEQ ID NO: 89752 - DNA, 22 bp, Artificial Sequence
  Synthetic oligonucleotide; TTT chr11 5255922 5255943 5255939 5255944 +
tctttgggatttttattttttg

SEQ ID NO: 89753 - DNA, 22 bp, Artificial Sequence
  Synthetic oligonucleotide; TTT chr11 5255923 5255944 5255940 5255945 +
ctttgggatttttattttttgg

SEQ ID NO: 89754 - DNA, 22 bp, Artificial Sequence
  Synthetic oligonucleotide; TTC chr11 5255924 5255945 5255941 5255946 +
tttgggatttttattttttggt

SEQ ID NO: 89755 - DNA, 22 bp, Artificial Sequence
  Synthetic oligonucleotide; CTT chr11 5255926 5255947 5255943 5255948 +
tgggatttttattttttggtag

SEQ ID NO: 89756 - DNA, 22 bp, Artificial Sequence
  Synthetic oligonucleotide; TTT chr11 5255927 5255948 5255944 5255949 +
gggatttttattttttggtagg

SEQ ID NO: 89757 - DNA, 22 bp, Artificial Sequence
  Synthetic oligonucleotide; TTG chr11 5255928 5255949 5255945 5255950 +
ggatttttattttttggtaggt

SEQ ID NO: 89758 - DNA, 22 bp, Artificial Sequence
  Synthetic oligonucleotide; TTT chr11 5255934 5255955 5255951 5255956 +
ttattttttggtaggtttggtt

SEQ ID NO: 89759 - DNA, 22 bp, Artificial Sequence
  Synthetic oligonucleotide; TTT chr11 5255935 5255956 5255952 5255957 +
tattttttggtaggtttggttt

SEQ ID NO: 89760 - DNA, 22 bp, Artificial Sequence
  Synthetic oligonucleotide; TTT chr11 5255936 5255957 5255953 5255958 +
attttttggtaggtttggtttt

SEQ ID NO: 89761 - DNA, 22 bp, Artificial Sequence
  Synthetic oligonucleotide; TTA chr11 5255937 5255958 5255954 5255959 +
ttttttggtaggtttggttttg

SEQ ID NO: 89762 - DNA, 22 bp, Artificial Sequence
  Synthetic oligonucleotide; TTT chr11 5255940 5255961 5255957 5255962 +
tttggtaggtttggttttgctt

SEQ ID NO: 89763 - DNA, 22 bp, Artificial Sequence
  Synthetic oligonucleotide; TTT chr11 5255941 5255962 5255958 5255963 +
ttggtaggtttggttttgcttt

SEQ ID NO: 89764 - DNA, 22 bp, Artificial Sequence
  Synthetic oligonucleotide; TTT chr11 5255942 5255963 5255959 5255964 +
tggtaggtttggttttgctttt

SEQ ID NO: 89765 - DNA, 22 bp, Artificial Sequence
  Synthetic oligonucleotide; TTT chr11 5255943 5255964 5255960 5255965 +
ggtaggtttggttttgcttttg

SEQ ID NO: 89766 - DNA, 22 bp, Artificial Sequence
  Synthetic oligonucleotide; TTG chr11 5255944 5255965 5255961 5255966 +
gtaggtttggttttgcttttgt

SEQ ID NO: 89767 - DNA, 22 bp, Artificial Sequence
  Synthetic oligonucleotide; TTT chr11 5255952 5255973 5255969 5255974 +
ggttttgcttttgttttttctc

SEQ ID NO: 89768 - DNA, 22 bp, Artificial Sequence
  Synthetic oligonucleotide; TTG chr11 5255953 5255974 5255970 5255975 +
gttttgcttttgttttttctct

SEQ ID NO: 89769 - DNA, 22 bp, Artificial Sequence
  Synthetic oligonucleotide; TTT chr11 5255957 5255978 5255974 5255979 +
tgcttttgttttttctctgaac

SEQ ID NO: 89770 - DNA, 22 bp, Artificial Sequence
  Synthetic oligonucleotide; TTT chr11 5255958 5255979 5255975 5255980 +
gcttttgttttttctctgaact

SEQ ID NO: 89771 - DNA, 22 bp, Artificial Sequence
  Synthetic oligonucleotide; TTG chr11 5255959 5255980 5255976 5255981 +
cttttgttttttctctgaactc

SEQ ID NO: 89772 - DNA, 22 bp, Artificial Sequence
  Synthetic oligonucleotide; CTT chr11 5255962 5255983 5255979 5255984 +
ttgttttttctctgaactcgat

SEQ ID NO: 89773 - DNA, 22 bp, Artificial Sequence
  Synthetic oligonucleotide; TTT chr11 5255963 5255984 5255980 5255985 +
tgttttttctctgaactcgatc

SEQ ID NO: 89774 - DNA, 22 bp, Artificial Sequence
  Synthetic oligonucleotide; TTT chr11 5255964 5255985 5255981 5255986 +
gttttttctctgaactcgatcc

SEQ ID NO: 89775 - DNA, 22 bp, Artificial Sequence
  Synthetic oligonucleotide; TTG chr11 5255965 5255986 5255982 5255987 +
ttttttctctgaactcgatcca

SEQ ID NO: 89776 - DNA, 22 bp, Artificial Sequence
  Synthetic oligonucleotide; TTT chr11 5255968 5255989 5255985 5255990 +
tttctctgaactcgatccatga

SEQ ID NO: 89777 - DNA, 22 bp, Artificial Sequence
  Synthetic oligonucleotide; TTT chr11 5255969 5255990 5255986 5255991 +
ttctctgaactcgatccatgac

SEQ ID NO: 89778 - DNA, 22 bp, Artificial Sequence
  Synthetic oligonucleotide; TTT chr11 5255970 5255991 5255987 5255992 +
tctctgaactcgatccatgacc

SEQ ID NO: 89779 - DNA, 22 bp, Artificial Sequence
  Synthetic oligonucleotide; TTT chr11 5255971 5255992 5255988 5255993 +
ctctgaactcgatccatgacct

SEQ ID NO: 89780 - DNA, 22 bp, Artificial Sequence
  Synthetic oligonucleotide; TTC chr11 5255972 5255993 5255989 5255994 +
tctgaactcgatccatgacctt

SEQ ID NO: 89781 - DNA, 22 bp, Artificial Sequence
  Synthetic oligonucleotide; CTC chr11 5255974 5255995 5255991 5255996 +
tgaactcgatccatgaccttgg

SEQ ID NO: 89782 - DNA, 22 bp, Artificial Sequence
  Synthetic oligonucleotide; CTG chr11 5255976 5255997 5255993 5255998 +
aactcgatccatgaccttggta

SEQ ID NO: 89783 - DNA, 22 bp, Artificial Sequence
  Synthetic oligonucleotide; CTC chr11 5255981 5256002 5255998 5256003 +
gatccatgaccttggtagatta

SEQ ID NO: 89784 - DNA, 22 bp, Artificial Sequence
  Synthetic oligonucleotide; CTT chr11 5255994 5256015 5256011 5256016 +
ggtagattatgacgtcagaaac

SEQ ID NO: 89785 - DNA, 22 bp, Artificial Sequence
  Synthetic oligonucleotide; TTG chr11 5255995 5256016 5256012 5256017 +
gtagattatgacgtcagaaact

SEQ ID NO: 89786 - DNA, 22 bp, Artificial Sequence
  Synthetic oligonucleotide; TTA chr11 5256003 5256024 5256020 5256025 +
tgacgtcagaaactctggaaat

SEQ ID NO: 89787 - DNA, 22 bp, Artificial Sequence
  Synthetic oligonucleotide; CTC chr11 5256018 5256039 5256035 5256040 +
tggaaatctggcttattggagg

SEQ ID NO: 89788 - DNA, 22 bp, Artificial Sequence
  Synthetic oligonucleotide; CTG chr11 5256020 5256041 5256037 5256042 +
gaaatctggcttattggaggag

SEQ ID NO: 89789 - DNA, 22 bp, Artificial Sequence
  Synthetic oligonucleotide; CTG chr11 5256028 5256049 5256045 5256050 +
gcttattggaggagagctctac

SEQ ID NO: 89790 - DNA, 22 bp, Artificial Sequence
  Synthetic oligonucleotide; CTT chr11 5256032 5256053 5256049 5256054 +
attggaggagagctctaccttc

SEQ ID NO: 89791 - DNA, 22 bp, Artificial Sequence
  Synthetic oligonucleotide; TTA chr11 5256033 5256054 5256050 5256055 +
ttggaggagagctctaccttcc

SEQ ID NO: 89792 - DNA, 22 bp, Artificial Sequence
  Synthetic oligonucleotide; TTG chr11 5256036 5256057 5256053 5256058 +
gaggagagctctaccttcccct

SEQ ID NO: 89793 - DNA, 22 bp, Artificial Sequence
  Synthetic oligonucleotide; CTC chr11 5256047 5256068 5256064 5256069 +
taccttcccctaacctatcagg

SEQ ID NO: 89794 - DNA, 22 bp, Artificial Sequence
  Synthetic oligonucleotide; CTA chr11 5256049 5256070 5256066 5256071 +
ccttcccctaacctatcaggtt

SEQ ID NO: 89795 - DNA, 22 bp, Artificial Sequence
  Synthetic oligonucleotide; CTT chr11 5256053 5256074 5256070 5256075 +
cccctaacctatcaggttgata

SEQ ID NO: 89796 - DNA, 22 bp, Artificial Sequence
  Synthetic oligonucleotide; TTC chr11 5256054 5256075 5256071 5256076 +
ccctaacctatcaggttgatag

SEQ ID NO: 89797 - DNA, 22 bp, Artificial Sequence
  Synthetic oligonucleotide; CTA chr11 5256059 5256080 5256076 5256081 +
acctatcaggttgataggaatt

SEQ ID NO: 89798 - DNA, 22 bp, Artificial Sequence
  Synthetic oligonucleotide; CTA chr11 5256064 5256085 5256081 5256086 +
tcaggttgataggaattataat

SEQ ID NO: 89799 - DNA, 22 bp, Artificial Sequence
  Synthetic oligonucleotide; TTG chr11 5256072 5256093 5256089 5256094 +
ataggaattataataatattgg

SEQ ID NO: 89800 - DNA, 22 bp, Artificial Sequence
  Synthetic oligonucleotide; TTA chr11 5256082 5256103 5256099 5256104 +
taataatattggtggaatcctt

SEQ ID NO: 89801 - DNA, 22 bp, Artificial Sequence
  Synthetic oligonucleotide; TTG chr11 5256093 5256114 5256110 5256115 +
gtggaatcctttcagacttcat

SEQ ID NO: 89802 - DNA, 22 bp, Artificial Sequence
  Synthetic oligonucleotide; CTT chr11 5256104 5256125 5256121 5256126 +
tcagacttcataatcctgtgta

SEQ ID NO: 89803 - DNA, 22 bp, Artificial Sequence
  Synthetic oligonucleotide; TTT chr11 5256105 5256126 5256122 5256127 +
cagacttcataatcctgtgtaa

SEQ ID NO: 89804 - DNA, 22 bp, Artificial Sequence
  Synthetic oligonucleotide; TTC chr11 5256106 5256127 5256123 5256128 +
agacttcataatcctgtgtaag

SEQ ID NO: 89805 - DNA, 22 bp, Artificial Sequence
  Synthetic oligonucleotide; CTT chr11 5256112 5256133 5256129 5256134 +
cataatcctgtgtaaggcttat

SEQ ID NO: 89806 - DNA, 22 bp, Artificial Sequence
  Synthetic oligonucleotide; TTC chr11 5256113 5256134 5256130 5256135 +
ataatcctgtgtaaggcttata

SEQ ID NO: 89807 - DNA, 22 bp, Artificial Sequence
  Synthetic oligonucleotide; CTG chr11 5256122 5256143 5256139 5256144 +
tgtaaggcttatatctgctcaa

SEQ ID NO: 89808 - DNA, 22 bp, Artificial Sequence
  Synthetic oligonucleotide; CTT chr11 5256132 5256153 5256149 5256154 +
atatctgctcaaagtgttaggc

SEQ ID NO: 89809 - DNA, 22 bp, Artificial Sequence
  Synthetic oligonucleotide; TTA chr11 5256133 5256154 5256150 5256155 +
tatctgctcaaagtgttaggcg

SEQ ID NO: 89810 - DNA, 22 bp, Artificial Sequence
  Synthetic oligonucleotide; CTG chr11 5256139 5256160 5256156 5256161 +
ctcaaagtgttaggcggctaaa

SEQ ID NO: 89811 - DNA, 22 bp, Artificial Sequence
  Synthetic oligonucleotide; CTC chr11 5256142 5256163 5256159 5256164 +
aaagtgttaggcggctaaaaga

SEQ ID NO: 89812 - DNA, 22 bp, Artificial Sequence
  Synthetic oligonucleotide; TTA chr11 5256151 5256172 5256168 5256173 +
ggcggctaaaagaccagaaaga

SEQ ID NO: 89813 - DNA, 22 bp, Artificial Sequence
  Synthetic oligonucleotide; CTA chr11 5256159 5256180 5256176 5256181 +
aaagaccagaaagatacatgtt

SEQ ID NO: 89814 - DNA, 22 bp, Artificial Sequence
  Synthetic oligonucleotide; TTG chr11 5256182 5256203 5256199 5256204 +
acctgcgcaacaaagctgcaca

SEQ ID NO: 89815 - DNA, 22 bp, Artificial Sequence
  Synthetic oligonucleotide; CTG chr11 5256187 5256208 5256204 5256209 +
cgcaacaaagctgcacatattg

SEQ ID NO: 89816 - DNA, 22 bp, Artificial Sequence
  Synthetic oligonucleotide; CTG chr11 5256200 5256221 5256217 5256222 +
cacatattgcacttgttctttg

SEQ ID NO: 89817 - DNA, 22 bp, Artificial Sequence
  Synthetic oligonucleotide; TTG chr11 5256209 5256230 5256226 5256231 +
cacttgttctttggaagttaaa

SEQ ID NO: 89818 - DNA, 22 bp, Artificial Sequence
  Synthetic oligonucleotide; CTT chr11 5256214 5256235 5256231 5256236 +
gttctttggaagttaaaataaa

SEQ ID NO: 89819 - DNA, 22 bp, Artificial Sequence
  Synthetic oligonucleotide; TTG chr11 5256215 5256236 5256232 5256237 +
ttctttggaagttaaaataaaa

SEQ ID NO: 89820 - DNA, 22 bp, Artificial Sequence
  Synthetic oligonucleotide; TTC chr11 5256218 5256239 5256235 5256240 +
tttggaagttaaaataaaagtt

SEQ ID NO: 89821 - DNA, 22 bp, Artificial Sequence
  Synthetic oligonucleotide; CTT chr11 5256220 5256241 5256237 5256242 +
tggaagttaaaataaaagttga

SEQ ID NO: 89822 - DNA, 22 bp, Artificial Sequence
  Synthetic oligonucleotide; TTT chr11 5256221 5256242 5256238 5256243 +
ggaagttaaaataaaagttgaa

SEQ ID NO: 89823 - DNA, 22 bp, Artificial Sequence
  Synthetic oligonucleotide; TTG chr11 5256222 5256243 5256239 5256244 +
gaagttaaaataaaagttgaat

SEQ ID NO: 89824 - DNA, 22 bp, Artificial Sequence
  Synthetic oligonucleotide; TTA chr11 5256229 5256250 5256246 5256251 +
aaataaaagttgaataagaaag

SEQ ID NO: 89825 - DNA, 22 bp, Artificial Sequence
  Synthetic oligonucleotide; TTG chr11 5256241 5256262 5256258 5256263 +
aataagaaaggaaagaaaaaga

SEQ ID NO: 89826 - DNA, 22 bp, Artificial Sequence
  Synthetic oligonucleotide; TTT chr11 5256266 5256287 5256283 5256288 +
gtcaacttatcagtatcttcca

SEQ ID NO: 89827 - DNA, 22 bp, Artificial Sequence
  Synthetic oligonucleotide; TTG chr11 5256267 5256288 5256284 5256289 +
tcaacttatcagtatcttccag

SEQ ID NO: 89828 - DNA, 22 bp, Artificial Sequence
  Synthetic oligonucleotide; CTT chr11 5256274 5256295 5256291 5256296 +
atcagtatcttccagttactca

SEQ ID NO: 89829 - DNA, 22 bp, Artificial Sequence
  Synthetic oligonucleotide; TTA chr11 5256275 5256296 5256292 5256297 +
tcagtatcttccagttactcac

SEQ ID NO: 89830 - DNA, 22 bp, Artificial Sequence
  Synthetic oligonucleotide; CTT chr11 5256285 5256306 5256302 5256307 +
ccagttactcacataataataa

SEQ ID NO: 89831 - DNA, 22 bp, Artificial Sequence
  Synthetic oligonucleotide; TTC chr11 5256286 5256307 5256303 5256308 +
cagttactcacataataataag

SEQ ID NO: 89832 - DNA, 22 bp, Artificial Sequence
  Synthetic oligonucleotide; TTA chr11 5256292 5256313 5256309 5256314 +
ctcacataataataagtgactt

SEQ ID NO: 89833 - DNA, 22 bp, Artificial Sequence
  Synthetic oligonucleotide; CTC chr11 5256295 5256316 5256312 5256317 +
acataataataagtgacttctc

SEQ ID NO: 89834 - DNA, 22 bp, Artificial Sequence
  Synthetic oligonucleotide; CTT chr11 5256314 5256335 5256331 5256336 +
ctctcaatctaaggatgggtga

SEQ ID NO: 89835 - DNA, 22 bp, Artificial Sequence
  Synthetic oligonucleotide; TTC chr11 5256315 5256336 5256332 5256337 +
tctcaatctaaggatgggtgag

SEQ ID NO: 89836 - DNA, 22 bp, Artificial Sequence
  Synthetic oligonucleotide; CTC chr11 5256317 5256338 5256334 5256339 +
tcaatctaaggatgggtgagaa

SEQ ID NO: 89837 - DNA, 22 bp, Artificial Sequence
  Synthetic oligonucleotide; CTC chr11 5256319 5256340 5256336 5256341 +
aatctaaggatgggtgagaaag

SEQ ID NO: 89838 - DNA, 22 bp, Artificial Sequence
  Synthetic oligonucleotide; CTA chr11 5256325 5256346 5256342 5256347 +
aggatgggtgagaaagattttt

SEQ ID NO: 89839 - DNA, 22 bp, Artificial Sequence
  Synthetic oligonucleotide; TTT chr11 5256345 5256366 5256362 5256367 +
ttattggtatgctggtacagat

SEQ ID NO: 89840 - DNA, 22 bp, Artificial Sequence
  Synthetic oligonucleotide; TTT chr11 5256346 5256367 5256363 5256368 +
tattggtatgctggtacagatt

SEQ ID NO: 89841 - DNA, 22 bp, Artificial Sequence
  Synthetic oligonucleotide; TTT chr11 5256347 5256368 5256364 5256369 +
attggtatgctggtacagatta

SEQ ID NO: 89842 - DNA, 22 bp, Artificial Sequence
  Synthetic oligonucleotide; TTA chr11 5256348 5256369 5256365 5256370 +
ttggtatgctggtacagattat

SEQ ID NO: 89843 - DNA, 22 bp, Artificial Sequence
  Synthetic oligonucleotide; TTG chr11 5256351 5256372 5256368 5256373 +
gtatgctggtacagattataga

SEQ ID NO: 89844 - DNA, 22 bp, Artificial Sequence
  Synthetic oligonucleotide; CTG chr11 5256359 5256380 5256376 5256381 +
gtacagattatagagactgagg

SEQ ID NO: 89845 - DNA, 22 bp, Artificial Sequence
  Synthetic oligonucleotide; TTA chr11 5256369 5256390 5256386 5256391 +
tagagactgaggtgaacccaaa

SEQ ID NO: 89846 - DNA, 22 bp, Artificial Sequence
  Synthetic oligonucleotide; CTG chr11 5256378 5256399 5256395 5256400 +
aggtgaacccaaattagggtct

SEQ ID NO: 89847 - DNA, 22 bp, Artificial Sequence
  Synthetic oligonucleotide; TTA chr11 5256394 5256415 5256411 5256416 +
gggtctctttaagataggggat

SEQ ID NO: 89848 - DNA, 22 bp, Artificial Sequence
  Synthetic oligonucleotide; CTC chr11 5256401 5256422 5256418 5256423 +
tttaagataggggatctgtgag

SEQ ID NO: 89849 - DNA, 22 bp, Artificial Sequence
  Synthetic oligonucleotide; CTT chr11 5256403 5256424 5256420 5256425 +
taagataggggatctgtgagat

SEQ ID NO: 89850 - DNA, 22 bp, Artificial Sequence
  Synthetic oligonucleotide; TTT chr11 5256404 5256425 5256421 5256426 +
aagataggggatctgtgagatg

SEQ ID NO: 89851 - DNA, 22 bp, Artificial Sequence
  Synthetic oligonucleotide; TTA chr11 5256405 5256426 5256422 5256427 +
agataggggatctgtgagatgg

SEQ ID NO: 89852 - DNA, 22 bp, Artificial Sequence
  Synthetic oligonucleotide; CTG chr11 5256419 5256440 5256436 5256441 +
tgagatgggtgtgtatagatct

SEQ ID NO: 89853 - DNA, 22 bp, Artificial Sequence
  Synthetic oligonucleotide; CTT chr11 5256442 5256463 5256459 5256464 +
tggccatatctgagagtctggt

SEQ ID NO: 89854 - DNA, 22 bp, Artificial Sequence
  Synthetic oligonucleotide; TTT chr11 5256443 5256464 5256460 5256465 +
ggccatatctgagagtctggtt

SEQ ID NO: 89855 - DNA, 22 bp, Artificial Sequence
  Synthetic oligonucleotide; TTG chr11 5256444 5256465 5256461 5256466 +
gccatatctgagagtctggttg

SEQ ID NO: 89856 - DNA, 22 bp, Artificial Sequence
  Synthetic oligonucleotide; CTG chr11 5256454 5256475 5256471 5256476 +
agagtctggttgggttccattt

SEQ ID NO: 89857 - DNA, 22 bp, Artificial Sequence
  Synthetic oligonucleotide; CTG chr11 5256462 5256483 5256479 5256484 +
gttgggttccatttgtagagcc

SEQ ID NO: 89858 - DNA, 22 bp, Artificial Sequence
  Synthetic oligonucleotide; TTG chr11 5256466 5256487 5256483 5256488 +
ggttccatttgtagagcctgac

SEQ ID NO: 89859 - DNA, 22 bp, Artificial Sequence
  Synthetic oligonucleotide; TTC chr11 5256471 5256492 5256488 5256493 +
catttgtagagcctgaccttta

SEQ ID NO: 89860 - DNA, 22 bp, Artificial Sequence
  Synthetic oligonucleotide; TTT chr11 5256476 5256497 5256493 5256498 +
gtagagcctgacctttaagaat

SEQ ID NO: 89861 - DNA, 22 bp, Artificial Sequence
  Synthetic oligonucleotide; TTG chr11 5256477 5256498 5256494 5256499 +
tagagcctgacctttaagaatg

SEQ ID NO: 89862 - DNA, 22 bp, Artificial Sequence
  Synthetic oligonucleotide; CTG chr11 5256486 5256507 5256503 5256508 +
acctttaagaatgtgtcagaga

SEQ ID NO: 89863 - DNA, 22 bp, Artificial Sequence
  Synthetic oligonucleotide; CTT chr11 5256491 5256512 5256508 5256513 +
taagaatgtgtcagagactggt

SEQ ID NO: 89864 - DNA, 22 bp, Artificial Sequence
  Synthetic oligonucleotide; TTT chr11 5256492 5256513 5256509 5256514 +
aagaatgtgtcagagactggtg

SEQ ID NO: 89865 - DNA, 22 bp, Artificial Sequence
  Synthetic oligonucleotide; TTA chr11 5256493 5256514 5256510 5256515 +
agaatgtgtcagagactggtgt

SEQ ID NO: 89866 - DNA, 22 bp, Artificial Sequence
  Synthetic oligonucleotide; CTG chr11 5256511 5256532 5256528 5256533 +
gtgtctaagcccgctaaggcct

SEQ ID NO: 89867 - DNA, 22 bp, Artificial Sequence
  Synthetic oligonucleotide; CTA chr11 5256518 5256539 5256535 5256540 +
agcccgctaaggcctaaacaag

SEQ ID NO: 89868 - DNA, 22 bp, Artificial Sequence
  Synthetic oligonucleotide; CTA chr11 5256527 5256548 5256544 5256549 +
aggcctaaacaagtgaatcttt

SEQ ID NO: 89869 - DNA, 22 bp, Artificial Sequence
  Synthetic oligonucleotide; CTA chr11 5256534 5256555 5256551 5256556 +
aacaagtgaatcttttgaatct

SEQ ID NO: 89870 - DNA, 22 bp, Artificial Sequence
  Synthetic oligonucleotide; CTT chr11 5256548 5256569 5256565 5256570 +
ttgaatctctcttttttttttt

SEQ ID NO: 89871 - DNA, 22 bp, Artificial Sequence
  Synthetic oligonucleotide; TTT chr11 5256549 5256570 5256566 5256571 +
tgaatctctctttttttttttt

SEQ ID NO: 89872 - DNA, 22 bp, Artificial Sequence
  Synthetic oligonucleotide; TTT chr11 5256550 5256571 5256567 5256572 +
gaatctctcttttttttttttg

SEQ ID NO: 89873 - DNA, 22 bp, Artificial Sequence
  Synthetic oligonucleotide; TTG chr11 5256551 5256572 5256568 5256573 +
aatctctcttttttttttttga

SEQ ID NO: 89874 - DNA, 22 bp, Artificial Sequence
  Synthetic oligonucleotide; CTC chr11 5256557 5256578 5256574 5256579 +
tcttttttttttttgagacaga

SEQ ID NO: 89875 - DNA, 22 bp, Artificial Sequence
  Synthetic oligonucleotide; CTC chr11 5256559 5256580 5256576 5256581 +
ttttttttttttgagacagagt

SEQ ID NO: 89876 - DNA, 22 bp, Artificial Sequence
  Synthetic oligonucleotide; CTT chr11 5256561 5256582 5256578 5256583 +
ttttttttttgagacagagtct

SEQ ID NO: 89877 - DNA, 22 bp, Artificial Sequence
  Synthetic oligonucleotide; TTT chr11 5256562 5256583 5256579 5256584 +
tttttttttgagacagagtctt

SEQ ID NO: 89878 - DNA, 22 bp, Artificial Sequence
  Synthetic oligonucleotide; TTT chr11 5256563 5256584 5256580 5256585 +
ttttttttgagacagagtcttg

SEQ ID NO: 89879 - DNA, 22 bp, Artificial Sequence
  Synthetic oligonucleotide; TTT chr11 5256564 5256585 5256581 5256586 +
tttttttgagacagagtcttgt

SEQ ID NO: 89880 - DNA, 22 bp, Artificial Sequence
  Synthetic oligonucleotide; TTT chr11 5256565 5256586 5256582 5256587 +
ttttttgagacagagtcttgtt

SEQ ID NO: 89881 - DNA, 22 bp, Artificial Sequence
  Synthetic oligonucleotide; TTT chr11 5256566 5256587 5256583 5256588 +
tttttgagacagagtcttgttc

SEQ ID NO: 89882 - DNA, 22 bp, Artificial Sequence
  Synthetic oligonucleotide; TTT chr11 5256567 5256588 5256584 5256589 +
ttttgagacagagtcttgttct

SEQ ID NO: 89883 - DNA, 22 bp, Artificial Sequence
  Synthetic oligonucleotide; TTT chr11 5256568 5256589 5256585 5256590 +
tttgagacagagtcttgttctg

SEQ ID NO: 89884 - DNA, 22 bp, Artificial Sequence
  Synthetic oligonucleotide; TTT chr11 5256569 5256590 5256586 5256591 +
ttgagacagagtcttgttctgt

SEQ ID NO: 89885 - DNA, 22 bp, Artificial Sequence
  Synthetic oligonucleotide; TTT chr11 5256570 5256591 5256587 5256592 +
tgagacagagtcttgttctgtc

SEQ ID NO: 89886 - DNA, 22 bp, Artificial Sequence
  Synthetic oligonucleotide; TTT chr11 5256571 5256592 5256588 5256593 +
gagacagagtcttgttctgtca

SEQ ID NO: 89887 - DNA, 22 bp, Artificial Sequence
  Synthetic oligonucleotide; TTG chr11 5256572 5256593 5256589 5256594 +
agacagagtcttgttctgtcac

SEQ ID NO: 89888 - DNA, 22 bp, Artificial Sequence
  Synthetic oligonucleotide; CTT chr11 5256584 5256605 5256601 5256606 +
gttctgtcacccaggctggagt

SEQ ID NO: 89889 - DNA, 22 bp, Artificial Sequence
  Synthetic oligonucleotide; TTG chr11 5256585 5256606 5256602 5256607 +
ttctgtcacccaggctggagtg

SEQ ID NO: 89890 - DNA, 22 bp, Artificial Sequence
  Synthetic oligonucleotide; TTC chr11 5256588 5256609 5256605 5256610 +
tgtcacccaggctggagtgcag

SEQ ID NO: 89891 - DNA, 22 bp, Artificial Sequence
  Synthetic oligonucleotide; CTG chr11 5256590 5256611 5256607 5256612 +
tcacccaggctggagtgcagtg

SEQ ID NO: 89892 - DNA, 22 bp, Artificial Sequence
  Synthetic oligonucleotide; CTG chr11 5256602 5256623 5256619 5256624 +
gagtgcagtggtatgatctcgg

SEQ ID NO: 89893 - DNA, 22 bp, Artificial Sequence
  Synthetic oligonucleotide; CTC chr11 5256622 5256643 5256639 5256644 +
ggctcactgcaactcctgcctt

SEQ ID NO: 89894 - DNA, 22 bp, Artificial Sequence
  Synthetic oligonucleotide; CTC chr11 5256627 5256648 5256644 5256649 +
actgcaactcctgccttccagg

SEQ ID NO: 89895 - DNA, 22 bp, Artificial Sequence
  Synthetic oligonucleotide; CTG chr11 5256631 5256652 5256648 5256653 +
caactcctgccttccaggttca

SEQ ID NO: 89896 - DNA, 22 bp, Artificial Sequence
  Synthetic oligonucleotide; CTC chr11 5256637 5256658 5256654 5256659 +
ctgccttccaggttcaagcaat

SEQ ID NO: 89897 - DNA, 22 bp, Artificial Sequence
  Synthetic oligonucleotide; CTG chr11 5256640 5256661 5256657 5256662 +
ccttccaggttcaagcaattct

SEQ ID NO: 89898 - DNA, 22 bp, Artificial Sequence
  Synthetic oligonucleotide; CTT chr11 5256644 5256665 5256661 5256666 +
ccaggttcaagcaattctcctt

SEQ ID NO: 89899 - DNA, 22 bp, Artificial Sequence
  Synthetic oligonucleotide; TTC chr11 5256645 5256666 5256662 5256667 +
caggttcaagcaattctccttc

SEQ ID NO: 89900 - DNA, 22 bp, Artificial Sequence
  Synthetic oligonucleotide; TTC chr11 5256652 5256673 5256669 5256674 +
aagcaattctccttcctcagcc

SEQ ID NO: 89901 - DNA, 22 bp, Artificial Sequence
  Synthetic oligonucleotide; TTC chr11 5256661 5256682 5256678 5256683 +
tccttcctcagcctcccaagta

SEQ ID NO: 89902 - DNA, 22 bp, Artificial Sequence
  Synthetic oligonucleotide; CTC chr11 5256663 5256684 5256680 5256685 +
cttcctcagcctcccaagtagc

SEQ ID NO: 89903 - DNA, 22 bp, Artificial Sequence
  Synthetic oligonucleotide; CTT chr11 5256666 5256687 5256683 5256688 +
cctcagcctcccaagtagctgg

SEQ ID NO: 89904 - DNA, 22 bp, Artificial Sequence
  Synthetic oligonucleotide; TTC chr11 5256667 5256688 5256684 5256689 +
ctcagcctcccaagtagctggg

SEQ ID NO: 89905 - DNA, 22 bp, Artificial Sequence
  Synthetic oligonucleotide; CTC chr11 5256670 5256691 5256687 5256692 +
agcctcccaagtagctgggatt

SEQ ID NO: 89906 - DNA, 22 bp, Artificial Sequence
  Synthetic oligonucleotide; CTC chr11 5256676 5256697 5256693 5256698 +
ccaagtagctgggattacaggc

SEQ ID NO: 89907 - DNA, 22 bp, Artificial Sequence
  Synthetic oligonucleotide; CTG chr11 5256687 5256708 5256704 5256709 +
ggattacaggcacttgccatca

SEQ ID NO: 89908 - DNA, 22 bp, Artificial Sequence
  Synthetic oligonucleotide; TTA chr11 5256693 5256714 5256710 5256715 +
caggcacttgccatcatgcctg

SEQ ID NO: 89909 - DNA, 22 bp, Artificial Sequence
  Synthetic oligonucleotide; CTT chr11 5256702 5256723 5256719 5256724 +
gccatcatgcctgtctaatttt

SEQ ID NO: 89910 - DNA, 22 bp, Artificial Sequence
  Synthetic oligonucleotide; TTG chr11 5256703 5256724 5256720 5256725 +
ccatcatgcctgtctaattttt

SEQ ID NO: 89911 - DNA, 22 bp, Artificial Sequence
  Synthetic oligonucleotide; CTG chr11 5256715 5256736 5256732 5256737 +
tctaatttttgtatttttgtag

SEQ ID NO: 89912 - DNA, 22 bp, Artificial Sequence
  Synthetic oligonucleotide; CTA chr11 5256719 5256740 5256736 5256741 +
atttttgtatttttgtagagat

SEQ ID NO: 89913 - DNA, 22 bp, Artificial Sequence
  Synthetic oligonucleotide; TTT chr11 5256723 5256744 5256740 5256745 +
ttgtatttttgtagagatggga

SEQ ID NO: 89914 - DNA, 22 bp, Artificial Sequence
  Synthetic oligonucleotide; TTT chr11 5256724 5256745 5256741 5256746 +
tgtatttttgtagagatgggat

SEQ ID NO: 89915 - DNA, 22 bp, Artificial Sequence
  Synthetic oligonucleotide; TTT chr11 5256725 5256746 5256742 5256747 +
gtatttttgtagagatgggatt

SEQ ID NO: 89916 - DNA, 22 bp, Artificial Sequence
  Synthetic oligonucleotide; TTG chr11 5256726 5256747 5256743 5256748 +
tatttttgtagagatgggattt

SEQ ID NO: 89917 - DNA, 22 bp, Artificial Sequence
  Synthetic oligonucleotide; TTT chr11 5256731 5256752 5256748 5256753 +
ttgtagagatgggatttcacca

SEQ ID NO: 89918 - DNA, 22 bp, Artificial Sequence
  Synthetic oligonucleotide; TTT chr11 5256732 5256753 5256749 5256754 +
tgtagagatgggatttcaccat

SEQ ID NO: 89919 - DNA, 22 bp, Artificial Sequence
  Synthetic oligonucleotide; TTT chr11 5256733 5256754 5256750 5256755 +
gtagagatgggatttcaccatg

SEQ ID NO: 89920 - DNA, 22 bp, Artificial Sequence
  Synthetic oligonucleotide; TTG chr11 5256734 5256755 5256751 5256756 +
tagagatgggatttcaccatgt

SEQ ID NO: 89921 - DNA, 22 bp, Artificial Sequence
  Synthetic oligonucleotide; TTT chr11 5256748 5256769 5256765 5256770 +
caccatgttggccaggttggtc

SEQ ID NO: 89922 - DNA, 22 bp, Artificial Sequence
  Synthetic oligonucleotide; TTC chr11 5256749 5256770 5256766 5256771 +
accatgttggccaggttggtct

SEQ ID NO: 89923 - DNA, 22 bp, Artificial Sequence
  Synthetic oligonucleotide; TTG chr11 5256758 5256779 5256775 5256780 +
gccaggttggtcttgaactctt

SEQ ID NO: 89924 - DNA, 22 bp, Artificial Sequence
  Synthetic oligonucleotide; TTG chr11 5256767 5256788 5256784 5256789 +
gtcttgaactcttgacctcagg

SEQ ID NO: 89925 - DNA, 22 bp, Artificial Sequence
  Synthetic oligonucleotide; CTT chr11 5256772 5256793 5256789 5256794 +
gaactcttgacctcaggtgatc

SEQ ID NO: 89926 - DNA, 22 bp, Artificial Sequence
  Synthetic oligonucleotide; TTG chr11 5256773 5256794 5256790 5256795 +
aactcttgacctcaggtgatct

SEQ ID NO: 89927 - DNA, 22 bp, Artificial Sequence
  Synthetic oligonucleotide; CTC chr11 5256778 5256799 5256795 5256800 +
ttgacctcaggtgatctgcctg

SEQ ID NO: 89928 - DNA, 22 bp, Artificial Sequence
  Synthetic oligonucleotide; CTT chr11 5256780 5256801 5256797 5256802 +
gacctcaggtgatctgcctgcc

SEQ ID NO: 89929 - DNA, 22 bp, Artificial Sequence
  Synthetic oligonucleotide; TTG chr11 5256781 5256802 5256798 5256803 +
acctcaggtgatctgcctgcct

SEQ ID NO: 89930 - DNA, 22 bp, Artificial Sequence
  Synthetic oligonucleotide; CTC chr11 5256786 5256807 5256803 5256808 +
aggtgatctgcctgccttggcc

SEQ ID NO: 89931 - DNA, 22 bp, Artificial Sequence
  Synthetic oligonucleotide; CTG chr11 5256796 5256817 5256813 5256818 +
cctgccttggcctcccaaaatt

SEQ ID NO: 89932 - DNA, 22 bp, Artificial Sequence
  Synthetic oligonucleotide; CTG chr11 5256800 5256821 5256817 5256822 +
ccttggcctcccaaaattctgg

SEQ ID NO: 89933 - DNA, 22 bp, Artificial Sequence
  Synthetic oligonucleotide; CTT chr11 5256804 5256825 5256821 5256826 +
ggcctcccaaaattctgggatt

SEQ ID NO: 89934 - DNA, 22 bp, Artificial Sequence
  Synthetic oligonucleotide; TTG chr11 5256805 5256826 5256822 5256827 +
gcctcccaaaattctgggatta

SEQ ID NO: 89935 - DNA, 22 bp, Artificial Sequence
  Synthetic oligonucleotide; CTC chr11 5256810 5256831 5256827 5256832 +
ccaaaattctgggattacaggc

SEQ ID NO: 89936 - DNA, 22 bp, Artificial Sequence
  Synthetic oligonucleotide; TTC chr11 5256819 5256840 5256836 5256841 +
tgggattacaggcgtgagccac

SEQ ID NO: 89937 - DNA, 22 bp, Artificial Sequence
  Synthetic oligonucleotide; CTG chr11 5256821 5256842 5256838 5256843 +
ggattacaggcgtgagccacca

SEQ ID NO: 89938 - DNA, 22 bp, Artificial Sequence
  Synthetic oligonucleotide; TTA chr11 5256827 5256848 5256844 5256849 +
caggcgtgagccaccactccca

SEQ ID NO: 89939 - DNA, 22 bp, Artificial Sequence
  Synthetic oligonucleotide; CTC chr11 5256846 5256867 5256863 5256868 +
ccagcctctaaacaagtgaatc

SEQ ID NO: 89940 - DNA, 22 bp, Artificial Sequence
  Synthetic oligonucleotide; CTC chr11 5256854 5256875 5256871 5256876 +
taaacaagtgaatcttaattgc

SEQ ID NO: 89941 - DNA, 22 bp, Artificial Sequence
  Synthetic oligonucleotide; CTA chr11 5256856 5256877 5256873 5256878 +
aacaagtgaatcttaattgctc

SEQ ID NO: 89942 - DNA, 22 bp, Artificial Sequence
  Synthetic oligonucleotide; CTT chr11 5256870 5256891 5256887 5256892 +
aattgctcctcctcagactaag

SEQ ID NO: 89943 - DNA, 22 bp, Artificial Sequence
  Synthetic oligonucleotide; TTA chr11 5256871 5256892 5256888 5256893 +
attgctcctcctcagactaagg

SEQ ID NO: 89944 - DNA, 22 bp, Artificial Sequence
  Synthetic oligonucleotide; TTG chr11 5256875 5256896 5256892 5256897 +
ctcctcctcagactaaggaata

SEQ ID NO: 89945 - DNA, 22 bp, Artificial Sequence
  Synthetic oligonucleotide; CTC chr11 5256878 5256899 5256895 5256900 +
ctcctcagactaaggaatatct

SEQ ID NO: 89946 - DNA, 22 bp, Artificial Sequence
  Synthetic oligonucleotide; CTC chr11 5256881 5256902 5256898 5256903 +
ctcagactaaggaatatctagg

SEQ ID NO: 89947 - DNA, 22 bp, Artificial Sequence
  Synthetic oligonucleotide; CTC chr11 5256884 5256905 5256901 5256906 +
agactaaggaatatctaggatc

SEQ ID NO: 89948 - DNA, 22 bp, Artificial Sequence
  Synthetic oligonucleotide; CTA chr11 5256890 5256911 5256907 5256912 +
aggaatatctaggatccctcct

SEQ ID NO: 89949 - DNA, 22 bp, Artificial Sequence
  Synthetic oligonucleotide; CTA chr11 5256901 5256922 5256918 5256923 +
ggatccctcctgttttcaaaca

SEQ ID NO: 89950 - DNA, 22 bp, Artificial Sequence
  Synthetic oligonucleotide; CTC chr11 5256910 5256931 5256927 5256932 +
ctgttttcaaacaacttcccca

SEQ ID NO: 89951 - DNA, 22 bp, Artificial Sequence
  Synthetic oligonucleotide; CTG chr11 5256913 5256934 5256930 5256935 +
ttttcaaacaacttccccattt

SEQ ID NO: 89952 - DNA, 22 bp, Artificial Sequence
  Synthetic oligonucleotide; TTT chr11 5256916 5256937 5256933 5256938 +
tcaaacaacttccccatttatc

SEQ ID NO: 89953 - DNA, 22 bp, Artificial Sequence
  Synthetic oligonucleotide; TTT chr11 5256917 5256938 5256934 5256939 +
caaacaacttccccatttatcc

SEQ ID NO: 89954 - DNA, 22 bp, Artificial Sequence
  Synthetic oligonucleotide; TTC chr11 5256918 5256939 5256935 5256940 +
aaacaacttccccatttatcca

SEQ ID NO: 89955 - DNA, 22 bp, Artificial Sequence
  Synthetic oligonucleotide; CTT chr11 5256927 5256948 5256944 5256949 +
ccccatttatccaaaaaccaag

SEQ ID NO: 89956 - DNA, 22 bp, Artificial Sequence
  Synthetic oligonucleotide; TTC chr11 5256928 5256949 5256945 5256950 +
cccatttatccaaaaaccaagg

SEQ ID NO: 89957 - DNA, 22 bp, Artificial Sequence
  Synthetic oligonucleotide; TTT chr11 5256935 5256956 5256952 5256957 +
atccaaaaaccaaggcagtgtt

SEQ ID NO: 89958 - DNA, 22 bp, Artificial Sequence
  Synthetic oligonucleotide; TTA chr11 5256936 5256957 5256953 5256958 +
tccaaaaaccaaggcagtgttc

SEQ ID NO: 89959 - DNA, 22 bp, Artificial Sequence
  Synthetic oligonucleotide; TTC chr11 5256958 5256979 5256975 5256980 +
taaaagtcatgtataaaccctt

SEQ ID NO: 89960 - DNA, 22 bp, Artificial Sequence
  Synthetic oligonucleotide; CTA chr11 5256960 5256981 5256977 5256982 +
aaagtcatgtataaacccttat

SEQ ID NO: 89961 - DNA, 22 bp, Artificial Sequence
  Synthetic oligonucleotide; CTT chr11 5256980 5257001 5256997 5257002 +
atttcctcttatgcttttgagg

SEQ ID NO: 89962 - DNA, 22 bp, Artificial Sequence
  Synthetic oligonucleotide; TTA chr11 5256981 5257002 5256998 5257003 +
tttcctcttatgcttttgaggc

SEQ ID NO: 89963 - DNA, 22 bp, Artificial Sequence
  Synthetic oligonucleotide; TTT chr11 5256984 5257005 5257001 5257006 +
cctcttatgcttttgaggcaat

SEQ ID NO: 89964 - DNA, 22 bp, Artificial Sequence
  Synthetic oligonucleotide; TTC chr11 5256985 5257006 5257002 5257007 +
ctcttatgcttttgaggcaata

SEQ ID NO: 89965 - DNA, 22 bp, Artificial Sequence
  Synthetic oligonucleotide; CTC chr11 5256988 5257009 5257005 5257010 +
ttatgcttttgaggcaatatct

SEQ ID NO: 89966 - DNA, 22 bp, Artificial Sequence
  Synthetic oligonucleotide; CTT chr11 5256990 5257011 5257007 5257012 +
atgcttttgaggcaatatcttt

SEQ ID NO: 89967 - DNA, 22 bp, Artificial Sequence
  Synthetic oligonucleotide; TTA chr11 5256991 5257012 5257008 5257013 +
tgcttttgaggcaatatctttt

SEQ ID NO: 89968 - DNA, 22 bp, Artificial Sequence
  Synthetic oligonucleotide; CTT chr11 5256996 5257017 5257013 5257018 +
ttgaggcaatatcttttaagag

SEQ ID NO: 89969 - DNA, 22 bp, Artificial Sequence
  Synthetic oligonucleotide; TTT chr11 5256997 5257018 5257014 5257019 +
tgaggcaatatcttttaagagt

SEQ ID NO: 89970 - DNA, 22 bp, Artificial Sequence
  Synthetic oligonucleotide; TTT chr11 5256998 5257019 5257015 5257020 +
gaggcaatatcttttaagagtt

SEQ ID NO: 89971 - DNA, 22 bp, Artificial Sequence
  Synthetic oligonucleotide; TTG chr11 5256999 5257020 5257016 5257021 +
aggcaatatcttttaagagttt

SEQ ID NO: 89972 - DNA, 22 bp, Artificial Sequence
  Synthetic oligonucleotide; CTT chr11 5257011 5257032 5257028 5257033 +
ttaagagtttgttgatttctcc

SEQ ID NO: 89973 - DNA, 22 bp, Artificial Sequence
  Synthetic oligonucleotide; TTT chr11 5257012 5257033 5257029 5257034 +
taagagtttgttgatttctcct

SEQ ID NO: 89974 - DNA, 22 bp, Artificial Sequence
  Synthetic oligonucleotide; TTT chr11 5257013 5257034 5257030 5257035 +
aagagtttgttgatttctcctt

SEQ ID NO: 89975 - DNA, 22 bp, Artificial Sequence
  Synthetic oligonucleotide; TTA chr11 5257014 5257035 5257031 5257036 +
agagtttgttgatttctcctta

SEQ ID NO: 89976 - DNA, 22 bp, Artificial Sequence
  Synthetic oligonucleotide; TTT chr11 5257021 5257042 5257038 5257043 +
gttgatttctccttatccataa

SEQ ID NO: 89977 - DNA, 22 bp, Artificial Sequence
  Synthetic oligonucleotide; TTG chr11 5257022 5257043 5257039 5257044 +
ttgatttctccttatccataac

SEQ ID NO: 89978 - DNA, 22 bp, Artificial Sequence
  Synthetic oligonucleotide; TTG chr11 5257025 5257046 5257042 5257047 +
atttctccttatccataactgt

SEQ ID NO: 89979 - DNA, 22 bp, Artificial Sequence
  Synthetic oligonucleotide; TTT chr11 5257029 5257050 5257046 5257051 +
ctccttatccataactgtctta

SEQ ID NO: 89980 - DNA, 22 bp, Artificial Sequence
  Synthetic oligonucleotide; TTC chr11 5257030 5257051 5257047 5257052 +
tccttatccataactgtcttat

SEQ ID NO: 89981 - DNA, 22 bp, Artificial Sequence
  Synthetic oligonucleotide; CTC chr11 5257032 5257053 5257049 5257054 +
cttatccataactgtcttattc

SEQ ID NO: 89982 - DNA, 22 bp, Artificial Sequence
  Synthetic oligonucleotide; CTT chr11 5257035 5257056 5257052 5257057 +
atccataactgtcttattcctc

SEQ ID NO: 89983 - DNA, 22 bp, Artificial Sequence
  Synthetic oligonucleotide; TTA chr11 5257036 5257057 5257053 5257058 +
tccataactgtcttattcctcg

SEQ ID NO: 89984 - DNA, 22 bp, Artificial Sequence
  Synthetic oligonucleotide; CTG chr11 5257046 5257067 5257063 5257068 +
tcttattcctcgatttttccta

SEQ ID NO: 89985 - DNA, 22 bp, Artificial Sequence
  Synthetic oligonucleotide; CTT chr11 5257050 5257071 5257067 5257072 +
attcctcgatttttcctatatc

SEQ ID NO: 89986 - DNA, 22 bp, Artificial Sequence
  Synthetic oligonucleotide; TTA chr11 5257051 5257072 5257068 5257073 +
ttcctcgatttttcctatatca

SEQ ID NO: 89987 - DNA, 22 bp, Artificial Sequence
  Synthetic oligonucleotide; TTC chr11 5257054 5257075 5257071 5257076 +
ctcgatttttcctatatcattg

SEQ ID NO: 89988 - DNA, 22 bp, Artificial Sequence
  Synthetic oligonucleotide; CTC chr11 5257057 5257078 5257074 5257079 +
gatttttcctatatcattgctt

SEQ ID NO: 89989 - DNA, 22 bp, Artificial Sequence
  Synthetic oligonucleotide; TTT chr11 5257062 5257083 5257079 5257084 +
ttcctatatcattgcttctgac

SEQ ID NO: 89990 - DNA, 22 bp, Artificial Sequence
  Synthetic oligonucleotide; TTT chr11 5257063 5257084 5257080 5257085 +
tcctatatcattgcttctgaca

SEQ ID NO: 89991 - DNA, 22 bp, Artificial Sequence
  Synthetic oligonucleotide; TTT chr11 5257064 5257085 5257081 5257086 +
cctatatcattgcttctgacat

SEQ ID NO: 89992 - DNA, 22 bp, Artificial Sequence
  Synthetic oligonucleotide; TTC chr11 5257065 5257086 5257082 5257087 +
ctatatcattgcttctgacatt

SEQ ID NO: 89993 - DNA, 22 bp, Artificial Sequence
  Synthetic oligonucleotide; CTA chr11 5257068 5257089 5257085 5257090 +
tatcattgcttctgacattgat

SEQ ID NO: 89994 - DNA, 22 bp, Artificial Sequence
  Synthetic oligonucleotide; TTG chr11 5257076 5257097 5257093 5257098 +
cttctgacattgattaaatcct

SEQ ID NO: 89995 - DNA, 22 bp, Artificial Sequence
  Synthetic oligonucleotide; CTT chr11 5257079 5257100 5257096 5257101 +
ctgacattgattaaatcctaac

SEQ ID NO: 89996 - DNA, 22 bp, Artificial Sequence
  Synthetic oligonucleotide; TTC chr11 5257080 5257101 5257097 5257102 +
tgacattgattaaatcctaact

SEQ ID NO: 89997 - DNA, 22 bp, Artificial Sequence
  Synthetic oligonucleotide; CTG chr11 5257082 5257103 5257099 5257104 +
acattgattaaatcctaactga

SEQ ID NO: 89998 - DNA, 22 bp, Artificial Sequence
  Synthetic oligonucleotide; TTG chr11 5257088 5257109 5257105 5257110 +
attaaatcctaactgataaaac

SEQ ID NO: 89999 - DNA, 22 bp, Artificial Sequence
  Synthetic oligonucleotide; TTA chr11 5257092 5257113 5257109 5257114 +
aatcctaactgataaaactgtt

SEQ ID NO: 90000 - DNA, 22 bp, Artificial Sequence
  Synthetic oligonucleotide; CTA chr11 5257099 5257120 5257116 5257121 +
actgataaaactgtttctttac

SEQ ID NO: 90001 - DNA, 22 bp, Artificial Sequence
  Synthetic oligonucleotide; CTG chr11 5257103 5257124 5257120 5257125 +
ataaaactgtttctttacacaa

SEQ ID NO: 90002 - DNA, 22 bp, Artificial Sequence
  Synthetic oligonucleotide; CTG chr11 5257112 5257133 5257129 5257134 +
tttctttacacaagcaatttca

SEQ ID NO: 90003 - DNA, 22 bp, Artificial Sequence
  Synthetic oligonucleotide; TTT chr11 5257115 5257136 5257132 5257137 +
ctttacacaagcaatttcaagt

SEQ ID NO: 90004 - DNA, 22 bp, Artificial Sequence
  Synthetic oligonucleotide; TTC chr11 5257116 5257137 5257133 5257138 +
tttacacaagcaatttcaagtg

SEQ ID NO: 90005 - DNA, 22 bp, Artificial Sequence
  Synthetic oligonucleotide; CTT chr11 5257118 5257139 5257135 5257140 +
tacacaagcaatttcaagtgtt

SEQ ID NO: 90006 - DNA, 22 bp, Artificial Sequence
  Synthetic oligonucleotide; TTT chr11 5257119 5257140 5257136 5257141 +
acacaagcaatttcaagtgttt

SEQ ID NO: 90007 - DNA, 22 bp, Artificial Sequence
  Synthetic oligonucleotide; TTA chr11 5257120 5257141 5257137 5257142 +
cacaagcaatttcaagtgtttt

SEQ ID NO: 90008 - DNA, 22 bp, Artificial Sequence
  Synthetic oligonucleotide; TTT chr11 5257132 5257153 5257149 5257154 +
caagtgttttcaagcattcttt

SEQ ID NO: 90009 - DNA, 22 bp, Artificial Sequence
  Synthetic oligonucleotide; TTC chr11 5257133 5257154 5257150 5257155 +
aagtgttttcaagcattctttc

SEQ ID NO: 90010 - DNA, 22 bp, Artificial Sequence
  Synthetic oligonucleotide; TTT chr11 5257141 5257162 5257158 5257163 +
tcaagcattctttcccatgtat

SEQ ID NO: 90011 - DNA, 22 bp, Artificial Sequence
  Synthetic oligonucleotide; TTT chr11 5257142 5257163 5257159 5257164 +
caagcattctttcccatgtatt

SEQ ID NO: 90012 - DNA, 22 bp, Artificial Sequence
  Synthetic oligonucleotide; TTC chr11 5257143 5257164 5257160 5257165 +
aagcattctttcccatgtattt

SEQ ID NO: 90013 - DNA, 22 bp, Artificial Sequence
  Synthetic oligonucleotide; TTC chr11 5257151 5257172 5257168 5257173 +
tttcccatgtattttcaaacat

SEQ ID NO: 90014 - DNA, 22 bp, Artificial Sequence
  Synthetic oligonucleotide; CTT chr11 5257153 5257174 5257170 5257175 +
tcccatgtattttcaaacattt

SEQ ID NO: 90015 - DNA, 22 bp, Artificial Sequence
  Synthetic oligonucleotide; TTT chr11 5257154 5257175 5257171 5257176 +
cccatgtattttcaaacatttg

SEQ ID NO: 90016 - DNA, 22 bp, Artificial Sequence
  Synthetic oligonucleotide; TTC chr11 5257155 5257176 5257172 5257177 +
ccatgtattttcaaacatttgt

SEQ ID NO: 90017 - DNA, 22 bp, Artificial Sequence
  Synthetic oligonucleotide; TTT chr11 5257165 5257186 5257182 5257187 +
tcaaacatttgttcagcaaata

SEQ ID NO: 90018 - DNA, 22 bp, Artificial Sequence
  Synthetic oligonucleotide; TTT chr11 5257166 5257187 5257183 5257188 +
caaacatttgttcagcaaatat

SEQ ID NO: 90019 - DNA, 22 bp, Artificial Sequence
  Synthetic oligonucleotide; TTC chr11 5257167 5257188 5257184 5257189 +
aaacatttgttcagcaaatatc

SEQ ID NO: 90020 - DNA, 22 bp, Artificial Sequence
  Synthetic oligonucleotide; TTT chr11 5257175 5257196 5257192 5257197 +
gttcagcaaatatctgttaaat

SEQ ID NO: 90021 - DNA, 22 bp, Artificial Sequence
  Synthetic oligonucleotide; TTG chr11 5257176 5257197 5257193 5257198 +
ttcagcaaatatctgttaaata

SEQ ID NO: 90022 - DNA, 22 bp, Artificial Sequence
  Synthetic oligonucleotide; TTC chr11 5257179 5257200 5257196 5257201 +
agcaaatatctgttaaataaat

SEQ ID NO: 90023 - DNA, 22 bp, Artificial Sequence
  Synthetic oligonucleotide; CTG chr11 5257191 5257212 5257208 5257213 +
ttaaataaatgtcataattttt

SEQ ID NO: 90024 - DNA, 22 bp, Artificial Sequence
  Synthetic oligonucleotide; TTA chr11 5257194 5257215 5257211 5257216 +
aataaatgtcataatttttaaa

SEQ ID NO: 90025 - DNA, 22 bp, Artificial Sequence
  Synthetic oligonucleotide; TTT chr11 5257211 5257232 5257228 5257233 +
ttaaagtagtgggcatttaagt

SEQ ID NO: 90026 - DNA, 22 bp, Artificial Sequence
  Synthetic oligonucleotide; TTT chr11 5257212 5257233 5257229 5257234 +
taaagtagtgggcatttaagtt

SEQ ID NO: 90027 - DNA, 22 bp, Artificial Sequence
  Synthetic oligonucleotide; TTT chr11 5257213 5257234 5257230 5257235 +
aaagtagtgggcatttaagtta

SEQ ID NO: 90028 - DNA, 22 bp, Artificial Sequence
  Synthetic oligonucleotide; TTA chr11 5257214 5257235 5257231 5257236 +
aagtagtgggcatttaagttaa

SEQ ID NO: 90029 - DNA, 22 bp, Artificial Sequence
  Synthetic oligonucleotide; TTT chr11 5257229 5257250 5257246 5257251 +
aagttaaataagtcagagaata

SEQ ID NO: 90030 - DNA, 22 bp, Artificial Sequence
  Synthetic oligonucleotide; TTA chr11 5257230 5257251 5257247 5257252 +
agttaaataagtcagagaataa

SEQ ID NO: 90031 - DNA, 22 bp, Artificial Sequence
  Synthetic oligonucleotide; TTA chr11 5257235 5257256 5257252 5257257 +
aataagtcagagaataaaactt

SEQ ID NO: 90032 - DNA, 22 bp, Artificial Sequence
  Synthetic oligonucleotide; CTT chr11 5257257 5257278 5257274 5257279 +
tcctctgaagattataatctag

SEQ ID NO: 90033 - DNA, 22 bp, Artificial Sequence
  Synthetic oligonucleotide; TTT chr11 5257258 5257279 5257275 5257280 +
cctctgaagattataatctagg

SEQ ID NO: 90034 - DNA, 22 bp, Artificial Sequence
  Synthetic oligonucleotide; TTC chr11 5257259 5257280 5257276 5257281 +
ctctgaagattataatctaggt

SEQ ID NO: 90035 - DNA, 22 bp, Artificial Sequence
  Synthetic oligonucleotide; CTC chr11 5257262 5257283 5257279 5257284 +
tgaagattataatctaggtaga

SEQ ID NO: 90036 - DNA, 22 bp, Artificial Sequence
  Synthetic oligonucleotide; CTG chr11 5257264 5257285 5257281 5257286 +
aagattataatctaggtagaac

SEQ ID NO: 90037 - DNA, 22 bp, Artificial Sequence
  Synthetic oligonucleotide; TTA chr11 5257271 5257292 5257288 5257293 +
taatctaggtagaacatacata

SEQ ID NO: 90038 - DNA, 22 bp, Artificial Sequence
  Synthetic oligonucleotide; CTA chr11 5257278 5257299 5257295 5257300 +
ggtagaacatacataaaattaa

SEQ ID NO: 90039 - DNA, 22 bp, Artificial Sequence
  Synthetic oligonucleotide; TTA chr11 5257299 5257320 5257316 5257321 +
ataattaagttaaacaacaaaa

SEQ ID NO: 90040 - DNA, 22 bp, Artificial Sequence
  Synthetic oligonucleotide; TTA chr11 5257306 5257327 5257323 5257328 +
agttaaacaacaaaataatttc

SEQ ID NO: 90041 - DNA, 22 bp, Artificial Sequence
  Synthetic oligonucleotide; TTA chr11 5257311 5257332 5257328 5257333 +
aacaacaaaataatttcagata

SEQ ID NO: 90042 - DNA, 22 bp, Artificial Sequence
  Synthetic oligonucleotide; TTT chr11 5257327 5257348 5257344 5257349 +
cagatattattaactaagaatg

SEQ ID NO: 90043 - DNA, 22 bp, Artificial Sequence
  Synthetic oligonucleotide; TTC chr11 5257328 5257349 5257345 5257350 +
agatattattaactaagaatga

SEQ ID NO: 90044 - DNA, 22 bp, Artificial Sequence
  Synthetic oligonucleotide; TTA chr11 5257336 5257357 5257353 5257358 +
ttaactaagaatgaaattaagg

SEQ ID NO: 90045 - DNA, 22 bp, Artificial Sequence
  Synthetic oligonucleotide; TTA chr11 5257339 5257360 5257356 5257361 +
actaagaatgaaattaaggaga

SEQ ID NO: 90046 - DNA, 22 bp, Artificial Sequence
  Synthetic oligonucleotide; CTA chr11 5257343 5257364 5257360 5257365 +
agaatgaaattaaggagaaagt

SEQ ID NO: 90047 - DNA, 22 bp, Artificial Sequence
  Synthetic oligonucleotide; TTA chr11 5257355 5257376 5257372 5257377 +
aggagaaagtattcgaacagag

SEQ ID NO: 90048 - DNA, 22 bp, Artificial Sequence
  Synthetic oligonucleotide; TTC chr11 5257369 5257390 5257386 5257391 +
gaacagaggcaaaatgacagaa

SEQ ID NO: 90049 - DNA, 22 bp, Artificial Sequence
  Synthetic oligonucleotide; CTG chr11 5257399 5257420 5257416 5257421 +
ccatgggaaggcattgccaaat

SEQ ID NO: 90050 - DNA, 22 bp, Artificial Sequence
  Synthetic oligonucleotide; TTG chr11 5257415 5257436 5257432 5257437 +
ccaaataaagtttagaagctga

SEQ ID NO: 90051 - DNA, 22 bp, Artificial Sequence
  Synthetic oligonucleotide; TTT chr11 5257428 5257449 5257445 5257450 +
agaagctgaaatagtaaattca

SEQ ID NO: 90052 - DNA, 22 bp, Artificial Sequence
  Synthetic oligonucleotide; TTA chr11 5257429 5257450 5257446 5257451 +
gaagctgaaatagtaaattcaa

SEQ ID NO: 90053 - DNA, 22 bp, Artificial Sequence
  Synthetic oligonucleotide; CTG chr11 5257436 5257457 5257453 5257458 +
aaatagtaaattcaaagctctg

SEQ ID NO: 90054 - DNA, 22 bp, Artificial Sequence
  Synthetic oligonucleotide; TTC chr11 5257449 5257470 5257466 5257471 +
aaagctctgaagcagaagaaaa

SEQ ID NO: 90055 - DNA, 22 bp, Artificial Sequence
  Synthetic oligonucleotide; CTC chr11 5257456 5257477 5257473 5257478 +
tgaagcagaagaaaacaaactc

SEQ ID NO: 90056 - DNA, 22 bp, Artificial Sequence
  Synthetic oligonucleotide; CTG chr11 5257458 5257479 5257475 5257480 +
aagcagaagaaaacaaactcct

SEQ ID NO: 90057 - DNA, 22 bp, Artificial Sequence
  Synthetic oligonucleotide; CTC chr11 5257478 5257499 5257495 5257500 +
ctgctgtgccagagagttagat

SEQ ID NO: 90058 - DNA, 22 bp, Artificial Sequence
  Synthetic oligonucleotide; CTG chr11 5257481 5257502 5257498 5257503 +
ctgtgccagagagttagataaa

SEQ ID NO: 90059 - DNA, 22 bp, Artificial Sequence
  Synthetic oligonucleotide; CTG chr11 5257484 5257505 5257501 5257506 +
tgccagagagttagataaagaa

SEQ ID NO: 90060 - DNA, 22 bp, Artificial Sequence
  Synthetic oligonucleotide; TTA chr11 5257497 5257518 5257514 5257519 +
gataaagaaccagtgccgttga

SEQ ID NO: 90061 - DNA, 22 bp, Artificial Sequence
  Synthetic oligonucleotide; TTG chr11 5257518 5257539 5257535 5257540 +
atatgtaaagtggagaatagca

SEQ ID NO: 90062 - DNA, 22 bp, Artificial Sequence
  Synthetic oligonucleotide; TTG chr11 5257550 5257571 5257567 5257572 +
tttcagggaagcataaacctaa

SEQ ID NO: 90063 - DNA, 22 bp, Artificial Sequence
  Synthetic oligonucleotide; TTT chr11 5257553 5257574 5257570 5257575 +
cagggaagcataaacctaagga

SEQ ID NO: 90064 - DNA, 22 bp, Artificial Sequence
  Synthetic oligonucleotide; TTC chr11 5257554 5257575 5257571 5257576 +
agggaagcataaacctaaggac

SEQ ID NO: 90065 - DNA, 22 bp, Artificial Sequence
  Synthetic oligonucleotide; CTA chr11 5257571 5257592 5257588 5257593 +
aggacataaacttgtcctcagt

SEQ ID NO: 90066 - DNA, 22 bp, Artificial Sequence
  Synthetic oligonucleotide; CTT chr11 5257584 5257605 5257601 5257606 +
gtcctcagtggtagggagtgag

SEQ ID NO: 90067 - DNA, 22 bp, Artificial Sequence
  Synthetic oligonucleotide; TTG chr11 5257585 5257606 5257602 5257607 +
tcctcagtggtagggagtgaga

SEQ ID NO: 90068 - DNA, 22 bp, Artificial Sequence
  Synthetic oligonucleotide; CTC chr11 5257590 5257611 5257607 5257612 +
agtggtagggagtgagaagcca

SEQ ID NO: 90069 - DNA, 22 bp, Artificial Sequence
  Synthetic oligonucleotide; TTA chr11 5257615 5257636 5257632 5257637 +
tagaattttaactctggtaatg

SEQ ID NO: 90070 - DNA, 22 bp, Artificial Sequence
  Synthetic oligonucleotide; TTT chr11 5257623 5257644 5257640 5257645 +
taactctggtaatgacataatc

SEQ ID NO: 90071 - DNA, 22 bp, Artificial Sequence
  Synthetic oligonucleotide; TTT chr11 5257624 5257645 5257641 5257646 +
aactctggtaatgacataatct

SEQ ID NO: 90072 - DNA, 22 bp, Artificial Sequence
  Synthetic oligonucleotide; TTA chr11 5257625 5257646 5257642 5257647 +
actctggtaatgacataatctc

SEQ ID NO: 90073 - DNA, 22 bp, Artificial Sequence
  Synthetic oligonucleotide; CTC chr11 5257629 5257650 5257646 5257651 +
tggtaatgacataatctctaag

SEQ ID NO: 90074 - DNA, 22 bp, Artificial Sequence
  Synthetic oligonucleotide; CTG chr11 5257631 5257652 5257648 5257653 +
gtaatgacataatctctaagca

SEQ ID NO: 90075 - DNA, 22 bp, Artificial Sequence
  Synthetic oligonucleotide; CTC chr11 5257647 5257668 5257664 5257669 +
taagcaacctgtactattggct

SEQ ID NO: 90076 - DNA, 22 bp, Artificial Sequence
  Synthetic oligonucleotide; CTA chr11 5257649 5257670 5257666 5257671 +
agcaacctgtactattggctgg

SEQ ID NO: 90077 - DNA, 22 bp, Artificial Sequence
  Synthetic oligonucleotide; CTG chr11 5257658 5257679 5257675 5257680 +
tactattggctggattactatt

SEQ ID NO: 90078 - DNA, 22 bp, Artificial Sequence
  Synthetic oligonucleotide; CTA chr11 5257663 5257684 5257680 5257685 +
ttggctggattactattctaag

SEQ ID NO: 90079 - DNA, 22 bp, Artificial Sequence
  Synthetic oligonucleotide; TTG chr11 5257666 5257687 5257683 5257688 +
gctggattactattctaagaat

SEQ ID NO: 90080 - DNA, 22 bp, Artificial Sequence
  Synthetic oligonucleotide; CTG chr11 5257670 5257691 5257687 5257692 +
gattactattctaagaatgacc

SEQ ID NO: 90081 - DNA, 22 bp, Artificial Sequence
  Synthetic oligonucleotide; TTA chr11 5257675 5257696 5257692 5257697 +
ctattctaagaatgacctgttt

SEQ ID NO: 90082 - DNA, 22 bp, Artificial Sequence
  Synthetic oligonucleotide; CTA chr11 5257678 5257699 5257695 5257700 +
ttctaagaatgacctgtttatc

SEQ ID NO: 90083 - DNA, 22 bp, Artificial Sequence
  Synthetic oligonucleotide; TTC chr11 5257681 5257702 5257698 5257703 +
taagaatgacctgtttatcaca

SEQ ID NO: 90084 - DNA, 22 bp, Artificial Sequence
  Synthetic oligonucleotide; CTA chr11 5257683 5257704 5257700 5257705 +
agaatgacctgtttatcacaac

SEQ ID NO: 90085 - DNA, 22 bp, Artificial Sequence
  Synthetic oligonucleotide; CTG chr11 5257694 5257715 5257711 5257716 +
tttatcacaactgttttgctta

SEQ ID NO: 90086 - DNA, 22 bp, Artificial Sequence
  Synthetic oligonucleotide; TTT chr11 5257697 5257718 5257714 5257719 +
atcacaactgttttgcttaaaa

SEQ ID NO: 90087 - DNA, 22 bp, Artificial Sequence
  Synthetic oligonucleotide; TTA chr11 5257698 5257719 5257715 5257720 +
tcacaactgttttgcttaaaaa

SEQ ID NO: 90088 - DNA, 22 bp, Artificial Sequence
  Synthetic oligonucleotide; CTG chr11 5257707 5257728 5257724 5257729 +
ttttgcttaaaaagcccttatt

SEQ ID NO: 90089 - DNA, 22 bp, Artificial Sequence
  Synthetic oligonucleotide; TTT chr11 5257710 5257731 5257727 5257732 +
tgcttaaaaagcccttattgcc

SEQ ID NO: 90090 - DNA, 22 bp, Artificial Sequence
  Synthetic oligonucleotide; TTT chr11 5257711 5257732 5257728 5257733 +
gcttaaaaagcccttattgcct

SEQ ID NO: 90091 - DNA, 22 bp, Artificial Sequence
  Synthetic oligonucleotide; TTG chr11 5257712 5257733 5257729 5257734 +
cttaaaaagcccttattgcctg

SEQ ID NO: 90092 - DNA, 22 bp, Artificial Sequence
  Synthetic oligonucleotide; CTT chr11 5257715 5257736 5257732 5257737 +
aaaaagcccttattgcctgtgg

SEQ ID NO: 90093 - DNA, 22 bp, Artificial Sequence
  Synthetic oligonucleotide; TTA chr11 5257716 5257737 5257733 5257738 +
aaaagcccttattgcctgtgga

SEQ ID NO: 90094 - DNA, 22 bp, Artificial Sequence
  Synthetic oligonucleotide; CTT chr11 5257726 5257747 5257743 5257748 +
attgcctgtggacaattattag

SEQ ID NO: 90095 - DNA, 22 bp, Artificial Sequence
  Synthetic oligonucleotide; TTA chr11 5257727 5257748 5257744 5257749 +
ttgcctgtggacaattattagt

SEQ ID NO: 90096 - DNA, 22 bp, Artificial Sequence
  Synthetic oligonucleotide; TTG chr11 5257730 5257751 5257747 5257752 +
cctgtggacaattattagttat

SEQ ID NO: 90097 - DNA, 22 bp, Artificial Sequence
  Synthetic oligonucleotide; CTG chr11 5257734 5257755 5257751 5257756 +
tggacaattattagttattctt

SEQ ID NO: 90098 - DNA, 22 bp, Artificial Sequence
  Synthetic oligonucleotide; TTA chr11 5257744 5257765 5257761 5257766 +
ttagttattctttcaactatta

SEQ ID NO: 90099 - DNA, 22 bp, Artificial Sequence
  Synthetic oligonucleotide; TTA chr11 5257747 5257768 5257764 5257769 +
gttattctttcaactattaaaa

SEQ ID NO: 90100 - DNA, 22 bp, Artificial Sequence
  Synthetic oligonucleotide; TTA chr11 5257751 5257772 5257768 5257773 +
ttctttcaactattaaaaatct

SEQ ID NO: 90101 - DNA, 22 bp, Artificial Sequence
  Synthetic oligonucleotide; TTC chr11 5257754 5257775 5257771 5257776 +
tttcaactattaaaaatcttgt

SEQ ID NO: 90102 - DNA, 22 bp, Artificial Sequence
  Synthetic oligonucleotide; CTT chr11 5257756 5257777 5257773 5257778 +
tcaactattaaaaatcttgtca

SEQ ID NO: 90103 - DNA, 22 bp, Artificial Sequence
  Synthetic oligonucleotide; TTT chr11 5257757 5257778 5257774 5257779 +
caactattaaaaatcttgtcat

SEQ ID NO: 90104 - DNA, 22 bp, Artificial Sequence
  Synthetic oligonucleotide; TTC chr11 5257758 5257779 5257775 5257780 +
aactattaaaaatcttgtcatg

SEQ ID NO: 90105 - DNA, 22 bp, Artificial Sequence
  Synthetic oligonucleotide; CTA chr11 5257763 5257784 5257780 5257785 +
ttaaaaatcttgtcatgcagat

SEQ ID NO: 90106 - DNA, 22 bp, Artificial Sequence
  Synthetic oligonucleotide; TTA chr11 5257766 5257787 5257783 5257788 +
aaaatcttgtcatgcagatgtg

SEQ ID NO: 90107 - DNA, 22 bp, Artificial Sequence
  Synthetic oligonucleotide; CTT chr11 5257774 5257795 5257791 5257796 +
gtcatgcagatgtgtgtgtgtg

SEQ ID NO: 90108 - DNA, 22 bp, Artificial Sequence
  Synthetic oligonucleotide; TTG chr11 5257775 5257796 5257792 5257797 +
tcatgcagatgtgtgtgtgtgt

SEQ ID NO: 90109 - DNA, 22 bp, Artificial Sequence
  Synthetic oligonucleotide; TTC chr11 5257807 5257828 5257824 5257829 +
attatgaatttgctttcaatta

SEQ ID NO: 90110 - DNA, 22 bp, Artificial Sequence
  Synthetic oligonucleotide; TTA chr11 5257811 5257832 5257828 5257833 +
tgaatttgctttcaattaagtt

SEQ ID NO: 90111 - DNA, 22 bp, Artificial Sequence
  Synthetic oligonucleotide; TTT chr11 5257818 5257839 5257835 5257840 +
gctttcaattaagttatcttga

SEQ ID NO: 90112 - DNA, 22 bp, Artificial Sequence
  Synthetic oligonucleotide; TTG chr11 5257819 5257840 5257836 5257841 +
ctttcaattaagttatcttgaa

SEQ ID NO: 90113 - DNA, 22 bp, Artificial Sequence
  Synthetic oligonucleotide; CTT chr11 5257822 5257843 5257839 5257844 +
tcaattaagttatcttgaattg

SEQ ID NO: 90114 - DNA, 22 bp, Artificial Sequence
  Synthetic oligonucleotide; TTT chr11 5257823 5257844 5257840 5257845 +
caattaagttatcttgaattgg

SEQ ID NO: 90115 - DNA, 22 bp, Artificial Sequence
  Synthetic oligonucleotide; TTC chr11 5257824 5257845 5257841 5257846 +
aattaagttatcttgaattggc

SEQ ID NO: 90116 - DNA, 22 bp, Artificial Sequence
  Synthetic oligonucleotide; TTA chr11 5257829 5257850 5257846 5257851 +
agttatcttgaattggcaatat

SEQ ID NO: 90117 - DNA, 22 bp, Artificial Sequence
  Synthetic oligonucleotide; TTA chr11 5257834 5257855 5257851 5257856 +
tcttgaattggcaatatctaaa

SEQ ID NO: 90118 - DNA, 22 bp, Artificial Sequence
  Synthetic oligonucleotide; CTT chr11 5257838 5257859 5257855 5257860 +
gaattggcaatatctaaatcta

SEQ ID NO: 90119 - DNA, 22 bp, Artificial Sequence
  Synthetic oligonucleotide; TTG chr11 5257839 5257860 5257856 5257861 +
aattggcaatatctaaatctag

SEQ ID NO: 90120 - DNA, 22 bp, Artificial Sequence
  Synthetic oligonucleotide; TTG chr11 5257844 5257865 5257861 5257866 +
gcaatatctaaatctagatata

SEQ ID NO: 90121 - DNA, 22 bp, Artificial Sequence
  Synthetic oligonucleotide; CTA chr11 5257854 5257875 5257871 5257876 +
aatctagatatagctccctaag

SEQ ID NO: 90122 - DNA, 22 bp, Artificial Sequence
  Synthetic oligonucleotide; CTA chr11 5257860 5257881 5257877 5257882 +
gatatagctccctaaggggtaa

SEQ ID NO: 90123 - DNA, 22 bp, Artificial Sequence
  Synthetic oligonucleotide; CTC chr11 5257870 5257891 5257887 5257892 +
cctaaggggtaaagagtgtatc

SEQ ID NO: 90124 - DNA, 22 bp, Artificial Sequence
  Synthetic oligonucleotide; CTA chr11 5257874 5257895 5257891 5257896 +
aggggtaaagagtgtatccact

SEQ ID NO: 90125 - DNA, 22 bp, Artificial Sequence
  Synthetic oligonucleotide; CTG chr11 5257897 5257918 5257914 5257919 +
cccacccctcaacatcacgtcc

SEQ ID NO: 90126 - DNA, 22 bp, Artificial Sequence
  Synthetic oligonucleotide; CTC chr11 5257907 5257928 5257924 5257929 +
aacatcacgtccttgattcctt

SEQ ID NO: 90127 - DNA, 22 bp, Artificial Sequence
  Synthetic oligonucleotide; CTT chr11 5257921 5257942 5257938 5257943 +
gattccttgatatcaaagggca

SEQ ID NO: 90128 - DNA, 22 bp, Artificial Sequence
  Synthetic oligonucleotide; TTG chr11 5257922 5257943 5257939 5257944 +
attccttgatatcaaagggcag

SEQ ID NO: 90129 - DNA, 22 bp, Artificial Sequence
  Synthetic oligonucleotide; TTC chr11 5257926 5257947 5257943 5257948 +
cttgatatcaaagggcagtata

SEQ ID NO: 90130 - DNA, 22 bp, Artificial Sequence
  Synthetic oligonucleotide; CTT chr11 5257929 5257950 5257946 5257951 +
gatatcaaagggcagtatagtt

SEQ ID NO: 90131 - DNA, 22 bp, Artificial Sequence
  Synthetic oligonucleotide; TTG chr11 5257930 5257951 5257947 5257952 +
atatcaaagggcagtatagttt

SEQ ID NO: 90132 - DNA, 22 bp, Artificial Sequence
  Synthetic oligonucleotide; TTT chr11 5257952 5257973 5257969 5257974 +
tgggggagaagaaaaagagaga

SEQ ID NO: 90133 - DNA, 22 bp, Artificial Sequence
  Synthetic oligonucleotide; TTT chr11 5257953 5257974 5257970 5257975 +
gggggagaagaaaaagagagag

SEQ ID NO: 90134 - DNA, 22 bp, Artificial Sequence
  Synthetic oligonucleotide; TTG chr11 5257954 5257975 5257971 5257976 +
ggggagaagaaaaagagagaga
